United States Patent Application Publication US 2008/0113351 A1 - sequence listing, part 23

SEQ ID NO: 556408 - DNA, 19 bp, Mus musculus
  siRNA target sequence for Adamts5 (NM_011782.1,1273-1291).
ctcatgacgattccaaatt

SEQ ID NO: 556409 - DNA, 19 bp, Mus musculus
  siRNA target sequence for Adamts5 (NM_011782.1,1275-1293).
catgacgattccaaattct

SEQ ID NO: 556410 - DNA, 19 bp, Mus musculus
  siRNA target sequence for Adamts5 (NM_011782.1,1315-1333).
cagaagacaagcgtttaat

SEQ ID NO: 556411 - DNA, 19 bp, Mus musculus
  siRNA target sequence for Adamts5 (NM_011782.1,1320-1338).
gacaagcgtttaatgtctt

SEQ ID NO: 556412 - DNA, 19 bp, Mus musculus
  siRNA target sequence for Adamts5 (NM_011782.1,1390-1408).
ccaccatcacagaattcct

SEQ ID NO: 556413 - DNA, 19 bp, Mus musculus
  siRNA target sequence for Adamts5 (NM_011782.1,1440-1458).
ctaccacggaagcagattt

SEQ ID NO: 556414 - DNA, 19 bp, Mus musculus
  siRNA target sequence for Adamts5 (NM_011782.1,1675-1693).
gtgtggacaaaactaagaa

SEQ ID NO: 556415 - DNA, 19 bp, Mus musculus
  siRNA target sequence for Adamts5 (NM_011782.1,1785-1803).
gcctaccgccattgtaata

SEQ ID NO: 556416 - DNA, 19 bp, Mus musculus
  siRNA target sequence for Adamts5 (NM_011782.1,1786-1804).
cctaccgccattgtaataa

SEQ ID NO: 556417 - DNA, 19 bp, Mus musculus
  siRNA target sequence for Adamts5 (NM_011782.1,1875-1893).
ccctgcccacccaatggta

SEQ ID NO: 556418 - DNA, 19 bp, Mus musculus
  siRNA target sequence for Adamts5 (NM_011782.1,1877-1895).
ctgcccacccaatggtaaa

SEQ ID NO: 556419 - DNA, 19 bp, Mus musculus
  siRNA target sequence for Adamts5 (NM_011782.1,1882-1900).
cacccaatggtaaatcttt

SEQ ID NO: 556420 - DNA, 19 bp, Mus musculus
  siRNA target sequence for Adamts5 (NM_011782.1,1930-1948).
gctatcagtctgatgcaaa

SEQ ID NO: 556421 - DNA, 19 bp, Mus musculus
  siRNA target sequence for Adamts5 (NM_011782.1,1951-1969).
gagtcaaaacatttgtaga

SEQ ID NO: 556422 - DNA, 19 bp, Mus musculus
  siRNA target sequence for Adamts5 (NM_011782.1,1953-1971).
gtcaaaacatttgtagaat

SEQ ID NO: 556423 - DNA, 19 bp, Mus musculus
  siRNA target sequence for Adamts5 (NM_011782.1,2001-2019).
gcagatgtgtgcaagctta

SEQ ID NO: 556424 - DNA, 19 bp, Mus musculus
  siRNA target sequence for Adamts5 (NM_011782.1,2051-2069).
ggtcttttctccaaaggtt

SEQ ID NO: 556425 - DNA, 19 bp, Mus musculus
  siRNA target sequence for Adamts5 (NM_011782.1,2052-2070).
gtcttttctccaaaggtta

SEQ ID NO: 556426 - DNA, 19 bp, Mus musculus
  siRNA target sequence for Adamts5 (NM_011782.1,2147-2165).
cattattggctcaaagcta

SEQ ID NO: 556427 - DNA, 19 bp, Mus musculus
  siRNA target sequence for Adamts5 (NM_011782.1,2155-2173).
gctcaaagctacaatatga

SEQ ID NO: 556428 - DNA, 19 bp, Mus musculus
  siRNA target sequence for Adamts5 (NM_011782.1,2158-2176).
caaagctacaatatgacaa

SEQ ID NO: 556429 - DNA, 19 bp, Mus musculus
  siRNA target sequence for Adamts5 (NM_011782.1,2184-2202).
gtgtgcggaggggataact

SEQ ID NO: 556430 - DNA, 19 bp, Mus musculus
  siRNA target sequence for Adamts5 (NM_011782.1,2193-2211).
ggggataactccagttgta

SEQ ID NO: 556431 - DNA, 19 bp, Mus musculus
  siRNA target sequence for Adamts5 (NM_011782.1,2195-2213).
ggataactccagttgtaca

SEQ ID NO: 556432 - DNA, 19 bp, Mus musculus
  siRNA target sequence for Adamts5 (NM_011782.1,2216-2234).
gattatcggaaccttcaat

SEQ ID NO: 556433 - DNA, 19 bp, Mus musculus
  siRNA target sequence for Adamts5 (NM_011782.1,2222-2240).
cggaaccttcaataaaaaa

SEQ ID NO: 556434 - DNA, 19 bp, Mus musculus
  siRNA target sequence for Adamts5 (NM_011782.1,2274-2292).
gaaggagcaacccacataa

SEQ ID NO: 556435 - DNA, 19 bp, Mus musculus
  siRNA target sequence for Adamts5 (NM_011782.1,2310-2328).
gccaaagaccagactagat

SEQ ID NO: 556436 - DNA, 19 bp, Mus musculus
  siRNA target sequence for Adamts5 (NM_011782.1,2335-2353).
cctacttagccctgaagaa

SEQ ID NO: 556437 - DNA, 19 bp, Mus musculus
  siRNA target sequence for Adamts5 (NM_011782.1,2359-2377).
ctggcgagtaccttatcaa

SEQ ID NO: 556438 - DNA, 19 bp, Mus musculus
  siRNA target sequence for Adamts5 (NM_011782.1,2370-2388).
cttatcaatggcaagtaca

SEQ ID NO: 556439 - DNA, 19 bp, Mus musculus
  siRNA target sequence for Adamts5 (NM_011782.1,2405-2423).
gaccatcatcgacatcaat

SEQ ID NO: 556440 - DNA, 19 bp, Mus musculus
  siRNA target sequence for Adamts5 (NM_011782.1,2482-2500).
gctattcagccacaaaaga

SEQ ID NO: 556441 - DNA, 19 bp, Mus musculus
  siRNA target sequence for Adamts5 (NM_011782.1,2549-2567).
cgtccgttacagctttttt

SEQ ID NO: 556442 - DNA, 19 bp, Mus musculus
  siRNA target sequence for Adamts5 (NM_011782.1,2573-2591).
caagaagaccactcaaaaa

SEQ ID NO: 556443 - DNA, 19 bp, Mus musculus
  siRNA target sequence for Adamts5 (NM_011782.1,2576-2594).
gaagaccactcaaaaagta

SEQ ID NO: 556444 - DNA, 19 bp, Mus musculus
  siRNA target sequence for Adamts5 (NM_011782.1,2582-2600).
cactcaaaaagtaaactct

SEQ ID NO: 556445 - DNA, 19 bp, Mus musculus
  siRNA target sequence for Adamts5 (NM_011782.1,2730-2748).
ggaaacaggaaattagcta

SEQ ID NO: 556446 - DNA, 19 bp, Mus musculus
  siRNA target sequence for Adamts5 (NM_011782.1,2771-2789).
gccttctgcatttaagcaa

SEQ ID NO: 556447 - DNA, 19 bp, Mus musculus
  siRNA target sequence for Adamts8 (NM_013906.1,586-604).
cttctctggcacagtgaat

SEQ ID NO: 556448 - DNA, 19 bp, Mus musculus
  siRNA target sequence for Adamts8 (NM_013906.1,887-905).
gaggggttgctcaaagaga

SEQ ID NO: 556449 - DNA, 19 bp, Mus musculus
  siRNA target sequence for Adamts8 (NM_013906.1,929-947).
ccacccttcggatccaaaa

SEQ ID NO: 556450 - DNA, 19 bp, Mus musculus
  siRNA target sequence for Adamts8 (NM_013906.1,934-952).
cttcggatccaaaactaga

SEQ ID NO: 556451 - DNA, 19 bp, Mus musculus
  siRNA target sequence for Adamts8 (NM_013906.1,975-993).
ctcgcttcgtggaaacact

SEQ ID NO: 556452 - DNA, 19 bp, Mus musculus
  siRNA target sequence for Adamts8 (NM_013906.1,1009-1027).
gtccatggctgccttctat

SEQ ID NO: 556453 - DNA, 19 bp, Mus musculus
  siRNA target sequence for Adamts8 (NM_013906.1,1065-1083).
caatggcagcccgaatcta

SEQ ID NO: 556454 - DNA, 19 bp, Mus musculus
  siRNA target sequence for Adamts8 (NM_013906.1,1120-1138).
ggtggtgaaagtgctaata

SEQ ID NO: 556455 - DNA, 19 bp, Mus musculus
  siRNA target sequence for Adamts8 (NM_013906.1,1209-1227).
ggcaacggcgtttcaacaa

SEQ ID NO: 556456 - DNA, 19 bp, Mus musculus
  siRNA target sequence for Adamts8 (NM_013906.1,1239-1257).
gccacccggagcactatga

SEQ ID NO: 556457 - DNA, 19 bp, Mus musculus
  siRNA target sequence for Adamts8 (NM_013906.1,1429-1447).
cagcatgccccatgatgat

SEQ ID NO: 556458 - DNA, 19 bp, Mus musculus
  siRNA target sequence for Adamts8 (NM_013906.1,1432-1450).
catgccccatgatgattct

SEQ ID NO: 556459 - DNA, 19 bp, Mus musculus
  siRNA target sequence for Adamts8 (NM_013906.1,1753-1771).
ccgtcatcgggatagtgat

SEQ ID NO: 556460 - DNA, 19 bp, Mus musculus
  siRNA target sequence for Adamts8 (NM_013906.1,1952-1970).
ggtggagggatacaattct

SEQ ID NO: 556461 - DNA, 19 bp, Mus musculus
  siRNA target sequence for Adamts8 (NM_013906.1,1969-1987).
ctcgaaccgtgaatgtgat

SEQ ID NO: 556462 - DNA, 19 bp, Mus musculus
  siRNA target sequence for Adamts8 (NM_013906.1,1971-1989).
cgaaccgtgaatgtgataa

SEQ ID NO: 556463 - DNA, 19 bp, Mus musculus
  siRNA target sequence for Adamts8 (NM_013906.1,1975-1993).
ccgtgaatgtgataatcca

SEQ ID NO: 556464 - DNA, 19 bp, Mus musculus
  siRNA target sequence for Adamts8 (NM_013906.1,1976-1994).
cgtgaatgtgataatccaa

SEQ ID NO: 556465 - DNA, 19 bp, Mus musculus
  siRNA target sequence for Adamts8 (NM_013906.1,1977-1995).
gtgaatgtgataatccaat

SEQ ID NO: 556466 - DNA, 19 bp, Mus musculus
  siRNA target sequence for Adamts8 (NM_013906.1,2027-2045).
gaaagagtcaagtaccaat

SEQ ID NO: 556467 - DNA, 19 bp, Mus musculus
  siRNA target sequence for Adamts8 (NM_013906.1,2067-2085).
caccaaacggaaaaagctt

SEQ ID NO: 556468 - DNA, 19 bp, Mus musculus
  siRNA target sequence for Adamts8 (NM_013906.1,2152-2170).
gtgggtccccaagtattca

SEQ ID NO: 556469 - DNA, 19 bp, Mus musculus
  siRNA target sequence for Adamts8 (NM_013906.1,2223-2241).
gtgagttcaaagtgtttga

SEQ ID NO: 556470 - DNA, 19 bp, Mus musculus
  siRNA target sequence for Adamts8 (NM_013906.1,2342-2360).
cctaagaagctggacaaat

SEQ ID NO: 556471 - DNA, 19 bp, Mus musculus
  siRNA target sequence for Adamts8 (NM_013906.1,2460-2478).
gtgccacaaacattgatgt

SEQ ID NO: 556472 - DNA, 19 bp, Mus musculus
  siRNA target sequence for Adamts8 (NM_013906.1,2714-2732).
gtcttccctccaaaagtca

SEQ ID NO: 556473 - DNA, 19 bp, Mus musculus
  siRNA target sequence for Adamts8 (NM_013906.1,2720-2738).
cctccaaaagtcagatata

SEQ ID NO: 556474 - DNA, 19 bp, Mus musculus
  siRNA target sequence for Adh1 (NM_007409.2,79-97).
gcactgcgggaaaagtgat

SEQ ID NO: 556475 - DNA, 19 bp, Mus musculus
  siRNA target sequence for Adh1 (NM_007409.2,84-102).
gcgggaaaagtgatcaaat

SEQ ID NO: 556476 - DNA, 19 bp, Mus musculus
  siRNA target sequence for Adh1 (NM_007409.2,167-185).
ccccaaggcccatgaagtt

SEQ ID NO: 556477 - DNA, 19 bp, Mus musculus
  siRNA target sequence for Adh1 (NM_007409.2,322-340).
gtgtgaaaccaggtgataa

SEQ ID NO: 556478 - DNA, 19 bp, Mus musculus
  siRNA target sequence for Adh1 (NM_007409.2,369-387).
ggagaatgcaggatttgca

SEQ ID NO: 556479 - DNA, 19 bp, Mus musculus
  siRNA target sequence for Adh1 (NM_007409.2,370-388).
gagaatgcaggatttgcaa

SEQ ID NO: 556480 - DNA, 19 bp, Mus musculus
  siRNA target sequence for Adh1 (NM_007409.2,390-408).
cacccggaaagcaactttt

SEQ ID NO: 556481 - DNA, 19 bp, Mus musculus
  siRNA target sequence for Adh1 (NM_007409.2,392-410).
cccggaaagcaacttttgt

SEQ ID NO: 556482 - DNA, 19 bp, Mus musculus
  siRNA target sequence for Adh1 (NM_007409.2,412-430).
gccgaagcgatctgctaat

SEQ ID NO: 556483 - DNA, 19 bp, Mus musculus
  siRNA target sequence for Adh1 (NM_007409.2,521-539).
gtacaccgtggtagatgat

SEQ ID NO: 556484 - DNA, 19 bp, Mus musculus
  siRNA target sequence for Adh1 (NM_007409.2,524-542).
caccgtggtagatgatata

SEQ ID NO: 556485 - DNA, 19 bp, Mus musculus
  siRNA target sequence for Adh1 (NM_007409.2,527-545).
cgtggtagatgatatagca

SEQ ID NO: 556486 - DNA, 19 bp, Mus musculus
  siRNA target sequence for Adh1 (NM_007409.2,796-814).
gcatcaaccctcaagacta

SEQ ID NO: 556487 - DNA, 19 bp, Mus musculus
  siRNA target sequence for Adh1 (NM_007409.2,852-870).
gacggaggggtggactttt

SEQ ID NO: 556488 - DNA, 19 bp, Mus musculus
  siRNA target sequence for Adh1 (NM_007409.2,856-874).
gaggggtggacttttcgtt

SEQ ID NO: 556489 - DNA, 19 bp, Mus musculus
  siRNA target sequence for Adh1 (NM_007409.2,860-878).
ggtggacttttcgtttgaa

SEQ ID NO: 556490 - DNA, 19 bp, Mus musculus
  siRNA target sequence for Adh1 (NM_007409.2,888-906).
cgccttgacaccatgactt

SEQ ID NO: 556491 - DNA, 19 bp, Mus musculus
  siRNA target sequence for Adh1 (NM_007409.2,1027-1045).
caatatttggcgggtttaa

SEQ ID NO: 556492 - DNA, 19 bp, Mus musculus
  siRNA target sequence for Adh1 (NM_007409.2,1036-1054).
gcgggtttaagagtaaaga

SEQ ID NO: 556493 - DNA, 19 bp, Mus musculus
  siRNA target sequence for Adh1 (NM_007409.2,1037-1055).
cgggtttaagagtaaagat

SEQ ID NO: 556494 - DNA, 19 bp, Mus musculus
  siRNA target sequence for Adh1 (NM_007409.2,1038-1056).
gggtttaagagtaaagatt

SEQ ID NO: 556495 - DNA, 19 bp, Mus musculus
  siRNA target sequence for Adh1 (NM_007409.2,1077-1095).
gacttcatggctaagaagt

SEQ ID NO: 556496 - DNA, 19 bp, Mus musculus
  siRNA target sequence for Adh1 (NM_007409.2,1098-1116).
ccgttggacccgttaatta

SEQ ID NO: 556497 - DNA, 19 bp, Mus musculus
  siRNA target sequence for Adh1 (NM_007409.2,1107-1125).
ccgttaattacccatgttt

SEQ ID NO: 556498 - DNA, 19 bp, Mus musculus
  siRNA target sequence for Adh1 (NM_007409.2,1108-1126).
cgttaattacccatgtttt

SEQ ID NO: 556499 - DNA, 19 bp, Mus musculus
  siRNA target sequence for Adh1 (NM_007409.2,1122-1140).
gttttacctttcgagaaaa

SEQ ID NO: 556500 - DNA, 19 bp, Mus musculus
  siRNA target sequence for Adh4 (NM_011996.1,107-125).
ggtgtcccctcctaaagct

SEQ ID NO: 556501 - DNA, 19 bp, Mus musculus
  siRNA target sequence for Adh4 (NM_011996.1,108-126).
gtgtcccctcctaaagctt

SEQ ID NO: 556502 - DNA, 19 bp, Mus musculus
  siRNA target sequence for Adh4 (NM_011996.1,161-179).
gtgccctactgacatcaat

SEQ ID NO: 556503 - DNA, 19 bp, Mus musculus
  siRNA target sequence for Adh4 (NM_011996.1,182-200).
caccgatcctaagaagaaa

SEQ ID NO: 556504 - DNA, 19 bp, Mus musculus
  siRNA target sequence for Adh4 (NM_011996.1,260-278).
gggagtgaccaacttcaaa

SEQ ID NO: 556505 - DNA, 19 bp, Mus musculus
  siRNA target sequence for Adh4 (NM_011996.1,377-395).
caaataccccactattgat

SEQ ID NO: 556506 - DNA, 19 bp, Mus musculus
  siRNA target sequence for Adh4 (NM_011996.1,411-429).
gacagaaccagcaggttta

SEQ ID NO: 556507 - DNA, 19 bp, Mus musculus
  siRNA target sequence for Adh4 (NM_011996.1,438-456).
ggaagatcaatttaccatt

SEQ ID NO: 556508 - DNA, 19 bp, Mus musculus
  siRNA target sequence for Adh4 (NM_011996.1,439-457).
gaagatcaatttaccattt

SEQ ID NO: 556509 - DNA, 19 bp, Mus musculus
  siRNA target sequence for Adh4 (NM_011996.1,536-554).
ggagagagtgtgtctgatt

SEQ ID NO: 556510 - DNA, 19 bp, Mus musculus
  siRNA target sequence for Adh4 (NM_011996.1,638-656).
ggggtgtgtaggtctttct

SEQ ID NO: 556511 - DNA, 19 bp, Mus musculus
  siRNA target sequence for Adh4 (NM_011996.1,657-675).
gccataattgggtgtaaaa

SEQ ID NO: 556512 - DNA, 19 bp, Mus musculus
  siRNA target sequence for Adh4 (NM_011996.1,658-676).
ccataattgggtgtaaaat

SEQ ID NO: 556513 - DNA, 19 bp, Mus musculus
  siRNA target sequence for Adh4 (NM_011996.1,684-702).
gcttccagaatcatagcta

SEQ ID NO: 556514 - DNA, 19 bp, Mus musculus
  siRNA target sequence for Adh4 (NM_011996.1,685-703).
cttccagaatcatagctat

SEQ ID NO: 556515 - DNA, 19 bp, Mus musculus
  siRNA target sequence for Adh4 (NM_011996.1,688-706).
ccagaatcatagctattga

SEQ ID NO: 556516 - DNA, 19 bp, Mus musculus
  siRNA target sequence for Adh4 (NM_011996.1,870-888).
gctgtggactgcactgtat

SEQ ID NO: 556517 - DNA, 19 bp, Mus musculus
  siRNA target sequence for Adh4 (NM_011996.1,871-889).
ctgtggactgcactgtatt

SEQ ID NO: 556518 - DNA, 19 bp, Mus musculus
  siRNA target sequence for Adh4 (NM_011996.1,942-960).
cccaccgtggacgttatat

SEQ ID NO: 556519 - DNA, 19 bp, Mus musculus
  siRNA target sequence for Adh4 (NM_011996.1,943-961).
ccaccgtggacgttatatt

SEQ ID NO: 556520 - DNA, 19 bp, Mus musculus
  siRNA target sequence for Adh4 (NM_011996.1,962-980).
gggccgttctataaatgga

SEQ ID NO: 556521 - DNA, 19 bp, Mus musculus
  siRNA target sequence for Adh4 (NM_011996.1,1080-1098).
ctacctttcgagagcataa

SEQ ID NO: 556522 - DNA, 19 bp, Mus musculus
  siRNA target sequence for Adh5 (NM_007410.2,326-344).
gtctgaatcctaaaacaaa

SEQ ID NO: 556523 - DNA, 19 bp, Mus musculus
  siRNA target sequence for Adh5 (NM_007410.2,532-550).
ctcggctgtggtatttcaa

SEQ ID NO: 556524 - DNA, 19 bp, Mus musculus
  siRNA target sequence for Adh5 (NM_007410.2,534-552).
cggctgtggtatttcaact

SEQ ID NO: 556525 - DNA, 19 bp, Mus musculus
  siRNA target sequence for Adh5 (NM_007410.2,664-682).
gcatcccggatcattggta

SEQ ID NO: 556526 - DNA, 19 bp, Mus musculus
  siRNA target sequence for Adh5 (NM_007410.2,665-683).
catcccggatcattggtat

SEQ ID NO: 556527 - DNA, 19 bp, Mus musculus
  siRNA target sequence for Adh5 (NM_007410.2,737-755).
gtattagcccccaagactt

SEQ ID NO: 556528 - DNA, 19 bp, Mus musculus
  siRNA target sequence for Adh5 (NM_007410.2,745-763).
ccccaagacttcagtaaat

SEQ ID NO: 556529 - DNA, 19 bp, Mus musculus
  siRNA target sequence for Adh5 (NM_007410.2,1066-1084).
ctctccttcgaccaaatta

SEQ ID NO: 556530 - DNA, 19 bp, Mus musculus
  siRNA target sequence for Adh5 (NM_007410.2,1116-1134).
cagcattcgaactgttcta

SEQ ID NO: 556531 - DNA, 19 bp, Mus musculus
  siRNA target sequence for Adh5 (NM_007410.2,1118-1136).
gcattcgaactgttctaaa

SEQ ID NO: 556532 - DNA, 19 bp, Mus musculus
  siRNA target sequence for Adh7 (NM_009626.2,134-152).
gggcaccgctggaaaagtt

SEQ ID NO: 556533 - DNA, 19 bp, Mus musculus
  siRNA target sequence for Adh7 (NM_009626.2,137-155).
caccgctggaaaagttatt

SEQ ID NO: 556534 - DNA, 19 bp, Mus musculus
  siRNA target sequence for Adh7 (NM_009626.2,139-157).
ccgctggaaaagttattaa

SEQ ID NO: 556535 - DNA, 19 bp, Mus musculus
  siRNA target sequence for Adh7 (NM_009626.2,232-250).
ctaaggaagtccgtgttaa

SEQ ID NO: 556536 - DNA, 19 bp, Mus musculus
  siRNA target sequence for Adh7 (NM_009626.2,236-254).
ggaagtccgtgttaagatt

SEQ ID NO: 556537 - DNA, 19 bp, Mus musculus
  siRNA target sequence for Adh7 (NM_009626.2,237-255).
gaagtccgtgttaagattt

SEQ ID NO: 556538 - DNA, 19 bp, Mus musculus
  siRNA target sequence for Adh7 (NM_009626.2,271-289).
gtcgcacagatgaccatat

SEQ ID NO: 556539 - DNA, 19 bp, Mus musculus
  siRNA target sequence for Adh7 (NM_009626.2,273-291).
cgcacagatgaccatataa

SEQ ID NO: 556540 - DNA, 19 bp, Mus musculus
  siRNA target sequence for Adh7 (NM_009626.2,274-292).
gcacagatgaccatataat

SEQ ID NO: 556541 - DNA, 19 bp, Mus musculus
  siRNA target sequence for Adh7 (NM_009626.2,275-293).
cacagatgaccatataata

SEQ ID NO: 556542 - DNA, 19 bp, Mus musculus
  siRNA target sequence for Adh7 (NM_009626.2,297-315).
ggatcgatggtgtctaagt

SEQ ID NO: 556543 - DNA, 19 bp, Mus musculus
  siRNA target sequence for Adh7 (NM_009626.2,298-316).
gatcgatggtgtctaagtt

SEQ ID NO: 556544 - DNA, 19 bp, Mus musculus
  siRNA target sequence for Adh7 (NM_009626.2,308-326).
gtctaagtttccagtgatt

SEQ ID NO: 556545 - DNA, 19 bp, Mus musculus
  siRNA target sequence for Adh7 (NM_009626.2,310-328).
ctaagtttccagtgattgt

SEQ ID NO: 556546 - DNA, 19 bp, Mus musculus
  siRNA target sequence for Adh7 (NM_009626.2,453-471).
gagggcaatctctgcatta

SEQ ID NO: 556547 - DNA, 19 bp, Mus musculus
  siRNA target sequence for Adh7 (NM_009626.2,456-474).
ggcaatctctgcattagga

SEQ ID NO: 556548 - DNA, 19 bp, Mus musculus
  siRNA target sequence for Adh7 (NM_009626.2,504-522).
gatggcactaccagattca

SEQ ID NO: 556549 - DNA, 19 bp, Mus musculus
  siRNA target sequence for Adh7 (NM_009626.2,537-555).
ccggtccagcacttcatga

SEQ ID NO: 556550 - DNA, 19 bp, Mus musculus
  siRNA target sequence for Adh7 (NM_009626.2,538-556).
cggtccagcacttcatgaa

SEQ ID NO: 556551 - DNA, 19 bp, Mus musculus
  siRNA target sequence for Adh7 (NM_009626.2,540-558).
gtccagcacttcatgaaca

SEQ ID NO: 556552 - DNA, 19 bp, Mus musculus
  siRNA target sequence for Adh7 (NM_009626.2,641-659).
cttgatcggctgtggattt

SEQ ID NO: 556553 - DNA, 19 bp, Mus musculus
  siRNA target sequence for Adh7 (NM_009626.2,701-719).
ccctggctccacttgtgtt

SEQ ID NO: 556554 - DNA, 19 bp, Mus musculus
  siRNA target sequence for Adh7 (NM_009626.2,777-795).
gcctccaggatcattggaa

SEQ ID NO: 556555 - DNA, 19 bp, Mus musculus
  siRNA target sequence for Adh7 (NM_009626.2,778-796).
cctccaggatcattggaat

SEQ ID NO: 556556 - DNA, 19 bp, Mus musculus
  siRNA target sequence for Adh7 (NM_009626.2,837-855).
ggtgccacagagtgtatca

SEQ ID NO: 556557 - DNA, 19 bp, Mus musculus
  siRNA target sequence for Adh7 (NM_009626.2,904-922).
caggcaacaccatacagta

SEQ ID NO: 556558 - DNA, 19 bp, Mus musculus
  siRNA target sequence for Adh7 (NM_009626.2,906-924).
ggcaacaccatacagtata

SEQ ID NO: 556559 - DNA, 19 bp, Mus musculus
  siRNA target sequence for Adh7 (NM_009626.2,920-938).
gtatacttttgaagttatt

SEQ ID NO: 556560 - DNA, 19 bp, Mus musculus
  siRNA target sequence for Adh7 (NM_009626.2,957-975).
gttgatgccctctcatctt

SEQ ID NO: 556561 - DNA, 19 bp, Mus musculus
  siRNA target sequence for Adh7 (NM_009626.2,966-984).
ctctcatcttgccatatga

SEQ ID NO: 556562 - DNA, 19 bp, Mus musculus
  siRNA target sequence for Adh7 (NM_009626.2,970-988).
catcttgccatatgaacta

SEQ ID NO: 556563 - DNA, 19 bp, Mus musculus
  siRNA target sequence for Adh7 (NM_009626.2,1094-1112).
gtggaagagcagagatgat

SEQ ID NO: 556564 - DNA, 19 bp, Mus musculus
  siRNA target sequence for Adh7 (NM_009626.2,1097-1115).
gaagagcagagatgatgta

SEQ ID NO: 556565 - DNA, 19 bp, Mus musculus
  siRNA target sequence for Adh7 (NM_009626.2,1217-1235).
gtattcggggaaaagcatt

SEQ ID NO: 556566 - DNA, 19 bp, Mus musculus
  siRNA target sequence for Aicda (NM_009645.1,250-268).
ctggctgccacgtggaatt

SEQ ID NO: 556567 - DNA, 19 bp, Mus musculus
  siRNA target sequence for Aicda (NM_009645.1,252-270).
ggctgccacgtggaattgt

SEQ ID NO: 556568 - DNA, 19 bp, Mus musculus
  siRNA target sequence for Aicda (NM_009645.1,253-271).
gctgccacgtggaattgtt

SEQ ID NO: 556569 - DNA, 19 bp, Mus musculus
  siRNA target sequence for Aicda (NM_009645.1,492-510).
gtccagatcgggatcatga

SEQ ID NO: 556570 - DNA, 19 bp, Mus musculus
  siRNA target sequence for Aicda (NM_009645.1,509-527).
gaccttcaaagactatttt

SEQ ID NO: 556571 - DNA, 19 bp, Mus musculus
  siRNA target sequence for Aicda (NM_009645.1,533-551).
ctggaatacatttgtagaa

SEQ ID NO: 556572 - DNA, 19 bp, Mus musculus
  siRNA target sequence for Aicda (NM_009645.1,575-593).
ctgggaagggctacatgaa

SEQ ID NO: 556573 - DNA, 19 bp, Mus musculus
  siRNA target sequence for Aicda (NM_009645.1,583-601).
ggctacatgaaaattctgt

SEQ ID NO: 556574 - DNA, 19 bp, Mus musculus
  siRNA target sequence for Aicda (NM_009645.1,602-620).
ccggctaaccagacaactt

SEQ ID NO: 556575 - DNA, 19 bp, Mus musculus
  siRNA target sequence for Aicda (NM_009645.1,615-633).
caacttcggcgcatccttt

SEQ ID NO: 556576 - DNA, 19 bp, Mus musculus
  siRNA target sequence for Aicda (NM_009645.1,656-674).
cttgcgagatgcatttcgt

SEQ ID NO: 556577 - DNA, 19 bp, Mus musculus
  siRNA target sequence for Aicda (NM_009645.1,661-679).
gagatgcatttcgtatgtt

SEQ ID NO: 556578 - DNA, 19 bp, Mus musculus
  siRNA target sequence for Anpep (NM_008486.1,36-54).
ggccaaggggttctacatt

SEQ ID NO: 556579 - DNA, 19 bp, Mus musculus
  siRNA target sequence for Anpep (NM_008486.1,129-147).
ctacgctcaggagaagaat

SEQ ID NO: 556580 - DNA, 19 bp, Mus musculus
  siRNA target sequence for Anpep (NM_008486.1,216-234).
cacccctgctgtagatgaa

SEQ ID NO: 556581 - DNA, 19 bp, Mus musculus
  siRNA target sequence for Anpep (NM_008486.1,252-270).
gtatcgcttgcctaagact

SEQ ID NO: 556582 - DNA, 19 bp, Mus musculus
  siRNA target sequence for Anpep (NM_008486.1,256-274).
cgcttgcctaagactctta

SEQ ID NO: 556583 - DNA, 19 bp, Mus musculus
  siRNA target sequence for Anpep (NM_008486.1,257-275).
gcttgcctaagactcttat

SEQ ID NO: 556584 - DNA, 19 bp, Mus musculus
  siRNA target sequence for Anpep (NM_008486.1,258-276).
cttgcctaagactcttata

SEQ ID NO: 556585 - DNA, 19 bp, Mus musculus
  siRNA target sequence for Anpep (NM_008486.1,676-694).
gctgatgctcggaaatcct

SEQ ID NO: 556586 - DNA, 19 bp, Mus musculus
  siRNA target sequence for Anpep (NM_008486.1,838-856).
cactccacccctaagatgt

SEQ ID NO: 556587 - DNA, 19 bp, Mus musculus
  siRNA target sequence for Anpep (NM_008486.1,879-897).
cgtgagcgagttcaaaaat

SEQ ID NO: 556588 - DNA, 19 bp, Mus musculus
  siRNA target sequence for Anpep (NM_008486.1,880-898).
gtgagcgagttcaaaaata

SEQ ID NO: 556589 - DNA, 19 bp, Mus musculus
  siRNA target sequence for Anpep (NM_008486.1,882-900).
gagcgagttcaaaaatata

SEQ ID NO: 556590 - DNA, 19 bp, Mus musculus
  siRNA target sequence for Anpep (NM_008486.1,886-904).
gagttcaaaaatataagct

SEQ ID NO: 556591 - DNA, 19 bp, Mus musculus
  siRNA target sequence for Anpep (NM_008486.1,1400-1418).
gtcctgctgacgagatcaa

SEQ ID NO: 556592 - DNA, 19 bp, Mus musculus
  siRNA target sequence for Anpep (NM_008486.1,1877-1895).
ccaatgaatggatcttact

SEQ ID NO: 556593 - DNA, 19 bp, Mus musculus
  siRNA target sequence for Anpep (NM_008486.1,1890-1908).
cttactgaacattaacgta

SEQ ID NO: 556594 - DNA, 19 bp, Mus musculus
  siRNA target sequence for Anpep (NM_008486.1,1910-1928).
ccggctactacctggttaa

SEQ ID NO: 556595 - DNA, 19 bp, Mus musculus
  siRNA target sequence for Anpep (NM_008486.1,1912-1930).
ggctactacctggttaact

SEQ ID NO: 556596 - DNA, 19 bp, Mus musculus
  siRNA target sequence for Anpep (NM_008486.1,1913-1931).
gctactacctggttaacta

SEQ ID NO: 556597 - DNA, 19 bp, Mus musculus
  siRNA target sequence for Anpep (NM_008486.1,1914-1932).
ctactacctggttaactat

SEQ ID NO: 556598 - DNA, 19 bp, Mus musculus
  siRNA target sequence for Anpep (NM_008486.1,1968-1986).
gcaaacagacctttctgtt

SEQ ID NO: 556599 - DNA, 19 bp, Mus musculus
  siRNA target sequence for Anpep (NM_008486.1,1969-1987).
caaacagacctttctgtta

SEQ ID NO: 556600 - DNA, 19 bp, Mus musculus
  siRNA target sequence for Anpep (NM_008486.1,2028-2046).
caacctggccagtgctaaa

SEQ ID NO: 556601 - DNA, 19 bp, Mus musculus
  siRNA target sequence for Anpep (NM_008486.1,2034-2052).
ggccagtgctaaaatgata

SEQ ID NO: 556602 - DNA, 19 bp, Mus musculus
  siRNA target sequence for Anpep (NM_008486.1,2125-2143).
ctgagcagcctcaactact

SEQ ID NO: 556603 - DNA, 19 bp, Mus musculus
  siRNA target sequence for Anpep (NM_008486.1,2267-2285).
cgctgatggagcagtacaa

SEQ ID NO: 556604 - DNA, 19 bp, Mus musculus
  siRNA target sequence for Anpep (NM_008486.1,2341-2359).
ctggtcgttgagctctata

SEQ ID NO: 556605 - DNA, 19 bp, Mus musculus
  siRNA target sequence for Anpep (NM_008486.1,2343-2361).
ggtcgttgagctctatagt

SEQ ID NO: 556606 - DNA, 19 bp, Mus musculus
  siRNA target sequence for Anpep (NM_008486.1,2355-2373).
ctatagtcagtggatgaaa

SEQ ID NO: 556607 - DNA, 19 bp, Mus musculus
  siRNA target sequence for Anpep (NM_008486.1,2366-2384).
ggatgaaaaaccctaataa

SEQ ID NO: 556608 - DNA, 19 bp, Mus musculus
  siRNA target sequence for Anpep (NM_008486.1,2435-2453).
ctttcggtggcgaagaaga

SEQ ID NO: 556609 - DNA, 19 bp, Mus musculus
  siRNA target sequence for Anpep (NM_008486.1,2788-2806).
cagtttaaagcggataact

SEQ ID NO: 556610 - DNA, 19 bp, Mus musculus
  siRNA target sequence for Anpep (NM_008486.1,2790-2808).
gtttaaagcggataactca

SEQ ID NO: 556611 - DNA, 19 bp, Mus musculus
  siRNA target sequence for Ap3b1 (NM_009680.2,198-216).
cgattggaagaagaatgaa

SEQ ID NO: 556612 - DNA, 19 bp, Mus musculus
  siRNA target sequence for Ap3b1 (NM_009680.2,234-252).
ggagagcaacaaagattct

SEQ ID NO: 556613 - DNA, 19 bp, Mus musculus
  siRNA target sequence for Ap3b1 (NM_009680.2,254-272).
ccaagctagatgctatgaa

SEQ ID NO: 556614 - DNA, 19 bp, Mus musculus
  siRNA target sequence for Ap3b1 (NM_009680.2,273-291).
gcgaattgttgggatgatt

SEQ ID NO: 556615 - DNA, 19 bp, Mus musculus
  siRNA target sequence for Ap3b1 (NM_009680.2,347-365).
gtaaaaacatcgagatcaa

SEQ ID NO: 556616 - DNA, 19 bp, Mus musculus
  siRNA target sequence for Ap3b1 (NM_009680.2,369-387).
gttggtgtacgtttacctt

SEQ ID NO: 556617 - DNA, 19 bp, Mus musculus
  siRNA target sequence for Ap3b1 (NM_009680.2,415-433).
ctggctcttctgtccataa

SEQ ID NO: 556618 - DNA, 19 bp, Mus musculus
  siRNA target sequence for Ap3b1 (NM_009680.2,453-471).
gaaggacccgaatcaacta

SEQ ID NO: 556619 - DNA, 19 bp, Mus musculus
  siRNA target sequence for Ap3b1 (NM_009680.2,503-521).
gtattagagtgccaattat

SEQ ID NO: 556620 - DNA, 19 bp, Mus musculus
  siRNA target sequence for Ap3b1 (NM_009680.2,529-547).
gtcatgatgctggctatta

SEQ ID NO: 556621 - DNA, 19 bp, Mus musculus
  siRNA target sequence for Ap3b1 (NM_009680.2,560-578).
ctgacctgtcgccatatgt

SEQ ID NO: 556622 - DNA, 19 bp, Mus musculus
  siRNA target sequence for Ap3b1 (NM_009680.2,562-580).
gacctgtcgccatatgtta

SEQ ID NO: 556623 - DNA, 19 bp, Mus musculus
  siRNA target sequence for Ap3b1 (NM_009680.2,585-603).
gaatgcagcccatgctatt

SEQ ID NO: 556624 - DNA, 19 bp, Mus musculus
  siRNA target sequence for Ap3b1 (NM_009680.2,627-645).
cgagcagaaggagatgtta

SEQ ID NO: 556625 - DNA, 19 bp, Mus musculus
  siRNA target sequence for Ap3b1 (NM_009680.2,630-648).
gcagaaggagatgttaatt

SEQ ID NO: 556626 - DNA, 19 bp, Mus musculus
  siRNA target sequence for Ap3b1 (NM_009680.2,718-736).
gaagtgtgcccggatagaa

SEQ ID NO: 556627 - DNA, 19 bp, Mus musculus
  siRNA target sequence for Ap3b1 (NM_009680.2,723-741).
gtgcccggatagaatcgat

SEQ ID NO: 556628 - DNA, 19 bp, Mus musculus
  siRNA target sequence for Ap3b1 (NM_009680.2,728-746).
cggatagaatcgatctgat

SEQ ID NO: 556629 - DNA, 19 bp, Mus musculus
  siRNA target sequence for Ap3b1 (NM_009680.2,729-747).
ggatagaatcgatctgatt

SEQ ID NO: 556630 - DNA, 19 bp, Mus musculus
  siRNA target sequence for Ap3b1 (NM_009680.2,750-768).
caggaattaccgaaagctt

SEQ ID NO: 556631 - DNA, 19 bp, Mus musculus
  siRNA target sequence for Ap3b1 (NM_009680.2,797-815).
gggggcaggtggtcataat

SEQ ID NO: 556632 - DNA, 19 bp, Mus musculus
  siRNA target sequence for Ap3b1 (NM_009680.2,800-818).
ggcaggtggtcataatcca

SEQ ID NO: 556633 - DNA, 19 bp, Mus musculus
  siRNA target sequence for Ap3b1 (NM_009680.2,801-819).
gcaggtggtcataatccat

SEQ ID NO: 556634 - DNA, 19 bp, Mus musculus
  siRNA target sequence for Ap3b1 (NM_009680.2,802-820).
caggtggtcataatccata

SEQ ID NO: 556635 - DNA, 19 bp, Mus musculus
  siRNA target sequence for Ap3b1 (NM_009680.2,807-825).
ggtcataatccatatgcta

SEQ ID NO: 556636 - DNA, 19 bp, Mus musculus
  siRNA target sequence for Ap3b1 (NM_009680.2,808-826).
gtcataatccatatgctaa

SEQ ID NO: 556637 - DNA, 19 bp, Mus musculus
  siRNA target sequence for Ap3b1 (NM_009680.2,835-853).
gctcggacccagtttgtca

SEQ ID NO: 556638 - DNA, 19 bp, Mus musculus
  siRNA target sequence for Ap3b1 (NM_009680.2,874-892).
ggtctggaagacaatgaga

SEQ ID NO: 556639 - DNA, 19 bp, Mus musculus
  siRNA target sequence for Ap3b1 (NM_009680.2,972-990).
ccacagactcttaattaga

SEQ ID NO: 556640 - DNA, 19 bp, Mus musculus
  siRNA target sequence for Ap3b1 (NM_009680.2,1016-1034).
ggaatgcagcggtggttat

SEQ ID NO: 556641 - DNA, 19 bp, Mus musculus
  siRNA target sequence for Ap3b1 (NM_009680.2,1035-1053).
ggctgtcgctcagctatat

SEQ ID NO: 556642 - DNA, 19 bp, Mus musculus
  siRNA target sequence for Ap3b1 (NM_009680.2,1036-1054).
gctgtcgctcagctatatt

SEQ ID NO: 556643 - DNA, 19 bp, Mus musculus
  siRNA target sequence for Ap3b1 (NM_009680.2,1071-1089).
gtcggaggctggtgtcatt

SEQ ID NO: 556644 - DNA, 19 bp, Mus musculus
  siRNA target sequence for Ap3b1 (NM_009680.2,1074-1092).
ggaggctggtgtcatttct

SEQ ID NO: 556645 - DNA, 19 bp, Mus musculus
  siRNA target sequence for Ap3b1 (NM_009680.2,1105-1123).
cgcttattgcgcagcaata

SEQ ID NO: 556646 - DNA, 19 bp, Mus musculus
  siRNA target sequence for Ap3b1 (NM_009680.2,1125-1143).
ggaggtgcagtatattgta

SEQ ID NO: 556647 - DNA, 19 bp, Mus musculus
  siRNA target sequence for Ap3b1 (NM_009680.2,1131-1149).
gcagtatattgtattgcaa

SEQ ID NO: 556648 - DNA, 19 bp, Mus musculus
  siRNA target sequence for Ap3b1 (NM_009680.2,1132-1150).
cagtatattgtattgcaaa

SEQ ID NO: 556649 - DNA, 19 bp, Mus musculus
  siRNA target sequence for Ap3b1 (NM_009680.2,1156-1174).
gcaactatgtcaattgaga

SEQ ID NO: 556650 - DNA, 19 bp, Mus musculus
  siRNA target sequence for Ap3b1 (NM_009680.2,1160-1178).
ctatgtcaattgagagaaa

SEQ ID NO: 556651 - DNA, 19 bp, Mus musculus
  siRNA target sequence for Ap3b1 (NM_009680.2,1217-1235).
gatccactgatccaactat

SEQ ID NO: 556652 - DNA, 19 bp, Mus musculus
  siRNA target sequence for Ap3b1 (NM_009680.2,1220-1238).
ccactgatccaactatgat

SEQ ID NO: 556653 - DNA, 19 bp, Mus musculus
  siRNA target sequence for Ap3b1 (NM_009680.2,1223-1241).
ctgatccaactatgatcaa

SEQ ID NO: 556654 - DNA, 19 bp, Mus musculus
  siRNA target sequence for Ap3b1 (NM_009680.2,1229-1247).
caactatgatcaaaacact

SEQ ID NO: 556655 - DNA, 19 bp, Mus musculus
  siRNA target sequence for Ap3b1 (NM_009680.2,1248-1266).
gaagcttgaaattttgaca

SEQ ID NO: 556656 - DNA, 19 bp, Mus musculus
  siRNA target sequence for Ap3b1 (NM_009680.2,1284-1302).
caacatatcaactcttctt

SEQ ID NO: 556657 - DNA, 19 bp, Mus musculus
  siRNA target sequence for Ap3b1 (NM_009680.2,1292-1310).
caactcttcttcgagaatt

SEQ ID NO: 556658 - DNA, 19 bp, Mus musculus
  siRNA target sequence for Ap3b1 (NM_009680.2,1297-1315).
cttcttcgagaatttcaga

SEQ ID NO: 556659 - DNA, 19 bp, Mus musculus
  siRNA target sequence for Ap3b1 (NM_009680.2,1440-1458).
cagggatgaaatagttgtt

SEQ ID NO: 556660 - DNA, 19 bp, Mus musculus
  siRNA target sequence for Ap3b1 (NM_009680.2,1468-1486).
gtggttgttataaagaaat

SEQ ID NO: 556661 - DNA, 19 bp, Mus musculus
  siRNA target sequence for Ap3b1 (NM_009680.2,1502-1520).
ctgcacagcatggtgaaat

SEQ ID NO: 556662 - DNA, 19 bp, Mus musculus
  siRNA target sequence for Ap3b1 (NM_009680.2,1507-1525).
cagcatggtgaaattatca

SEQ ID NO: 556663 - DNA, 19 bp, Mus musculus
  siRNA target sequence for Ap3b1 (NM_009680.2,1509-1527).
gcatggtgaaattatcaga

SEQ ID NO: 556664 - DNA, 19 bp, Mus musculus
  siRNA target sequence for Ap3b1 (NM_009680.2,1513-1531).
ggtgaaattatcagacata

SEQ ID NO: 556665 - DNA, 19 bp, Mus musculus
  siRNA target sequence for Ap3b1 (NM_009680.2,1514-1532).
gtgaaattatcagacatat

SEQ ID NO: 556666 - DNA, 19 bp, Mus musculus
  siRNA target sequence for Ap3b1 (NM_009680.2,1587-1605).
gctaattggagaaaactgt

SEQ ID NO: 556667 - DNA, 19 bp, Mus musculus
  siRNA target sequence for Ap3b1 (NM_009680.2,1604-1622).
gtgaacgagttcctaaaat

SEQ ID NO: 556668 - DNA, 19 bp, Mus musculus
  siRNA target sequence for Ap3b1 (NM_009680.2,1713-1731).
gtatttaactaattccaaa

SEQ ID NO: 556669 - DNA, 19 bp, Mus musculus
  siRNA target sequence for Ap3b1 (NM_009680.2,1765-1783).
ctcggcaagtatgatcaaa

SEQ ID NO: 556670 - DNA, 19 bp, Mus musculus
  siRNA target sequence for Ap3b1 (NM_009680.2,1768-1786).
ggcaagtatgatcaaaact

SEQ ID NO: 556671 - DNA, 19 bp, Mus musculus
  siRNA target sequence for Ap3b1 (NM_009680.2,1769-1787).
gcaagtatgatcaaaacta

SEQ ID NO: 556672 - DNA, 19 bp, Mus musculus
  siRNA target sequence for Ap3b1 (NM_009680.2,1796-1814).
gagaccgcacacgatttat

SEQ ID NO: 556673 - DNA, 19 bp, Mus musculus
  siRNA target sequence for Ap3b1 (NM_009680.2,1798-1816).
gaccgcacacgatttatta

SEQ ID NO: 556674 - DNA, 19 bp, Mus musculus
  siRNA target sequence for Ap3b1 (NM_009680.2,1808-1826).
gatttattaggcagcttat

SEQ ID NO: 556675 - DNA, 19 bp, Mus musculus
  siRNA target sequence for Ap3b1 (NM_009680.2,1839-1857).
gaagagtggagccttaagt

SEQ ID NO: 556676 - DNA, 19 bp, Mus musculus
  siRNA target sequence for Ap3b1 (NM_009680.2,1842-1860).
gagtggagccttaagtaaa

SEQ ID NO: 556677 - DNA, 19 bp, Mus musculus
  siRNA target sequence for Ap3b1 (NM_009680.2,1844-1862).
gtggagccttaagtaaata

SEQ ID NO: 556678 - DNA, 19 bp, Mus musculus
  siRNA target sequence for Ap3b1 (NM_009680.2,1902-1920).
gctcgagtctccctttaaa

SEQ ID NO: 556679 - DNA, 19 bp, Mus musculus
  siRNA target sequence for Ap3b1 (NM_009680.2,1943-1961).
gcaccttatctcatactct

SEQ ID NO: 556680 - DNA, 19 bp, Mus musculus
  siRNA target sequence for Ap3b1 (NM_009680.2,1952-1970).
ctcatactctcaacattaa

SEQ ID NO: 556681 - DNA, 19 bp, Mus musculus
  siRNA target sequence for Ap3b1 (NM_009680.2,1973-1991).
cgtccgggtacctggaatt

SEQ ID NO: 556682 - DNA, 19 bp, Mus musculus
  siRNA target sequence for Ap3b1 (NM_009680.2,1974-1992).
gtccgggtacctggaatta

SEQ ID NO: 556683 - DNA, 19 bp, Mus musculus
  siRNA target sequence for Ap3b1 (NM_009680.2,1977-1995).
cgggtacctggaattatct

SEQ ID NO: 556684 - DNA, 19 bp, Mus musculus
  siRNA target sequence for Ap3b1 (NM_009680.2,1978-1996).
gggtacctggaattatcta

SEQ ID NO: 556685 - DNA, 19 bp, Mus musculus
  siRNA target sequence for Ap3b1 (NM_009680.2,1979-1997).
ggtacctggaattatctaa

SEQ ID NO: 556686 - DNA, 19 bp, Mus musculus
  siRNA target sequence for Ap3b1 (NM_009680.2,1980-1998).
gtacctggaattatctaat

SEQ ID NO: 556687 - DNA, 19 bp, Mus musculus
  siRNA target sequence for Ap3b1 (NM_009680.2,2019-2037).
cccatcggttcgcaatgta

SEQ ID NO: 556688 - DNA, 19 bp, Mus musculus
  siRNA target sequence for Ap3b1 (NM_009680.2,2021-2039).
catcggttcgcaatgtaga

SEQ ID NO: 556689 - DNA, 19 bp, Mus musculus
  siRNA target sequence for Ap3b1 (NM_009680.2,2024-2042).
cggttcgcaatgtagaagt

SEQ ID NO: 556690 - DNA, 19 bp, Mus musculus
  siRNA target sequence for Ap3b1 (NM_009680.2,2025-2043).
ggttcgcaatgtagaagta

SEQ ID NO: 556691 - DNA, 19 bp, Mus musculus
  siRNA target sequence for Ap3b1 (NM_009680.2,2026-2044).
gttcgcaatgtagaagtaa

SEQ ID NO: 556692 - DNA, 19 bp, Mus musculus
  siRNA target sequence for Ap3b1 (NM_009680.2,2182-2200).
gatgagaacccctctgata

SEQ ID NO: 556693 - DNA, 19 bp, Mus musculus
  siRNA target sequence for Ap3b1 (NM_009680.2,2332-2350).
gccaagaggaactccaaaa

SEQ ID NO: 556694 - DNA, 19 bp, Mus musculus
  siRNA target sequence for Ap3b1 (NM_009680.2,2358-2376).
gaaaagtgattcagaaaat

SEQ ID NO: 556695 - DNA, 19 bp, Mus musculus
  siRNA target sequence for Ap3b1 (NM_009680.2,2502-2520).
cgtggctccggcaaaagaa

SEQ ID NO: 556696 - DNA, 19 bp, Mus musculus
  siRNA target sequence for Ap3b1 (NM_009680.2,2503-2521).
gtggctccggcaaaagaaa

SEQ ID NO: 556697 - DNA, 19 bp, Mus musculus
  siRNA target sequence for Ap3b1 (NM_009680.2,2569-2587).
ctagatctggacgacttta

SEQ ID NO: 556698 - DNA, 19 bp, Mus musculus
  siRNA target sequence for Ap3b1 (NM_009680.2,2636-2654).
gcttgatagctgatcttga

SEQ ID NO: 556699 - DNA, 19 bp, Mus musculus
  siRNA target sequence for Ap3b1 (NM_009680.2,2650-2668).
cttgaaggtctaaacttgt

SEQ ID NO: 556700 - DNA, 19 bp, Mus musculus
  siRNA target sequence for Ap3b1 (NM_009680.2,2702-2720).
ctgtcttcgtgccaacaaa

SEQ ID NO: 556701 - DNA, 19 bp, Mus musculus
  siRNA target sequence for Ap3b1 (NM_009680.2,2706-2724).
cttcgtgccaacaaaaaca

SEQ ID NO: 556702 - DNA, 19 bp, Mus musculus
  siRNA target sequence for Ap3b1 (NM_009680.2,2823-2841).
gatcaccctgactaatact

SEQ ID NO: 556703 - DNA, 19 bp, Mus musculus
  siRNA target sequence for Ap3b1 (NM_009680.2,2829-2847).
cctgactaatacttctgat

SEQ ID NO: 556704 - DNA, 19 bp, Mus musculus
  siRNA target sequence for Ap3b1 (NM_009680.2,2834-2852).
ctaatacttctgatcgaaa

SEQ ID NO: 556705 - DNA, 19 bp, Mus musculus
  siRNA target sequence for Ap3b1 (NM_009680.2,2840-2858).
cttctgatcgaaaaataga

SEQ ID NO: 556706 - DNA, 19 bp, Mus musculus
  siRNA target sequence for Ap3b1 (NM_009680.2,2843-2861).
ctgatcgaaaaatagaaaa

SEQ ID NO: 556707 - DNA, 19 bp, Mus musculus
  siRNA target sequence for Ap3b1 (NM_009680.2,2961-2979).
gggtattgacttttgtgat

SEQ ID NO: 556708 - DNA, 19 bp, Mus musculus
  siRNA target sequence for Ap3b1 (NM_009680.2,3107-3125).
gaacgctcactggaatgaa

SEQ ID NO: 556709 - DNA, 19 bp, Mus musculus
  siRNA target sequence for Ap3b1 (NM_009680.2,3180-3198).
cctccagaaggttgtaaat

SEQ ID NO: 556710 - DNA, 19 bp, Mus musculus
  siRNA target sequence for Ap3b1 (NM_009680.2,3217-3235).
gtgccttccagccaagata

SEQ ID NO: 556711 - DNA, 19 bp, Mus musculus
  siRNA target sequence for Ap3b1 (NM_009680.2,3243-3261).
caggtttgcagctagaact

SEQ ID NO: 556712 - DNA, 19 bp, Mus musculus
  siRNA target sequence for Ap3b1 (NM_009680.2,3337-3355).
gagaaaaccgtgattggtt

SEQ ID NO: 556713 - DNA, 19 bp, Mus musculus
  siRNA target sequence for Apobec1 (NM_031159.2,619-637).
cccacgagtttgaagtctt

SEQ ID NO: 556714 - DNA, 19 bp, Mus musculus
  siRNA target sequence for Apobec1 (NM_031159.2,623-641).
cgagtttgaagtcttcttt

SEQ ID NO: 556715 - DNA, 19 bp, Mus musculus
  siRNA target sequence for Apobec1 (NM_031159.2,714-732).
cgacacacgagccaaaaca

SEQ ID NO: 556716 - DNA, 19 bp, Mus musculus
  siRNA target sequence for Apobec1 (NM_031159.2,733-751).
ccagcaaccacgttgaagt

SEQ ID NO: 556717 - DNA, 19 bp, Mus musculus
  siRNA target sequence for Apobec1 (NM_031159.2,736-754).
gcaaccacgttgaagtcaa

SEQ ID NO: 556718 - DNA, 19 bp, Mus musculus
  siRNA target sequence for Apobec1 (NM_031159.2,750-768).
gtcaacttcttagaaaaat

SEQ ID NO: 556719 - DNA, 19 bp, Mus musculus
  siRNA target sequence for Apobec1 (NM_031159.2,752-770).
caacttcttagaaaaattt

SEQ ID NO: 556720 - DNA, 19 bp, Mus musculus
  siRNA target sequence for Apobec1 (NM_031159.2,758-776).
cttagaaaaatttactaca

SEQ ID NO: 556721 - DNA, 19 bp, Mus musculus
  siRNA target sequence for Apobec1 (NM_031159.2,845-863).
gtgctccagggccattaca

SEQ ID NO: 556722 - DNA, 19 bp, Mus musculus
  siRNA target sequence for Apobec1 (NM_031159.2,847-865).
gctccagggccattacaga

SEQ ID NO: 556723 - DNA, 19 bp, Mus musculus
  siRNA target sequence for Apobec1 (NM_031159.2,872-890).
gagccgacacccctatgta

SEQ ID NO: 556724 - DNA, 19 bp, Mus musculus
  siRNA target sequence for Apobec1 (NM_031159.2,875-893).
ccgacacccctatgtaact

SEQ ID NO: 556725 - DNA, 19 bp, Mus musculus
  siRNA target sequence for Apobec1 (NM_031159.2,877-895).
gacacccctatgtaactct

SEQ ID NO: 556726 - DNA, 19 bp, Mus musculus
  siRNA target sequence for Apobec1 (NM_031159.2,883-901).
cctatgtaactctgtttat

SEQ ID NO: 556727 - DNA, 19 bp, Mus musculus
  siRNA target sequence for Apobec1 (NM_031159.2,888-906).
gtaactctgtttatttaca

SEQ ID NO: 556728 - DNA, 19 bp, Mus musculus
  siRNA target sequence for Apobec1 (NM_031159.2,951-969).
ctcagggaccttattagca

SEQ ID NO: 556729 - DNA, 19 bp, Mus musculus
  siRNA target sequence for Apobec1 (NM_031159.2,975-993).
gtgactatccagatcatga

SEQ ID NO: 556730 - DNA, 19 bp, Mus musculus
  siRNA target sequence for Apobec1 (NM_031159.2,989-1007).
catgacagagcaagagtat

SEQ ID NO: 556731 - DNA, 19 bp, Mus musculus
  siRNA target sequence for Apobec1 (NM_031159.2,996-1014).
gagcaagagtattgttact

SEQ ID NO: 556732 - DNA, 19 bp, Mus musculus
  siRNA target sequence for Apobec1 (NM_031159.2,1009-1027).
gttactgctggaggaattt

SEQ ID NO: 556733 - DNA, 19 bp, Mus musculus
  siRNA target sequence for Apobec1 (NM_031159.2,1039-1057).
ccccttcaaacgaagctta

SEQ ID NO: 556734 - DNA, 19 bp, Mus musculus
  siRNA target sequence for Apobec1 (NM_031159.2,1040-1058).
cccttcaaacgaagcttat

SEQ ID NO: 556735 - DNA, 19 bp, Mus musculus
  siRNA target sequence for Apobec1 (NM_031159.2,1072-1090).
cccatctgtgggtgaaact

SEQ ID NO: 556736 - DNA, 19 bp, Mus musculus
  siRNA target sequence for Apobec1 (NM_031159.2,1101-1119).
gagctctactgcatcattt

SEQ ID NO: 556737 - DNA, 19 bp, Mus musculus
  siRNA target sequence for Apobec1 (NM_031159.2,1103-1121).
gctctactgcatcatttta

SEQ ID NO: 556738 - DNA, 19 bp, Mus musculus
  siRNA target sequence for Apobec1 (NM_031159.2,1106-1124).
ctactgcatcattttagga

SEQ ID NO: 556739 - DNA, 19 bp, Mus musculus
  siRNA target sequence for Apobec1 (NM_031159.2,1158-1176).
caacctcaactcacgtttt

SEQ ID NO: 556740 - DNA, 19 bp, Mus musculus
  siRNA target sequence for Apobec1 (NM_031159.2,1167-1185).
ctcacgtttttcacaatta

SEQ ID NO: 556741 - DNA, 19 bp, Mus musculus
  siRNA target sequence for Apobec1 (NM_031159.2,1171-1189).
cgtttttcacaattactct

SEQ ID NO: 556742 - DNA, 19 bp, Mus musculus
  siRNA target sequence for Apobec3 (NM_030255.1,114-132).
gcagccatcgcaaatgcta

SEQ ID NO: 556743 - DNA, 19 bp, Mus musculus
  siRNA target sequence for Apobec3 (NM_030255.1,115-133).
cagccatcgcaaatgctat

SEQ ID NO: 556744 - DNA, 19 bp, Mus musculus
  siRNA target sequence for Apobec3 (NM_030255.1,118-136).
ccatcgcaaatgctattca

SEQ ID NO: 556745 - DNA, 19 bp, Mus musculus
  siRNA target sequence for Apobec3 (NM_030255.1,129-147).
gctattcaccgatcagaaa

SEQ ID NO: 556746 - DNA, 19 bp, Mus musculus
  siRNA target sequence for Apobec3 (NM_030255.1,137-155).
ccgatcagaaacctgatat

SEQ ID NO: 556747 - DNA, 19 bp, Mus musculus
  siRNA target sequence for Apobec3 (NM_030255.1,142-160).
cagaaacctgatatctcaa

SEQ ID NO: 556748 - DNA, 19 bp, Mus musculus
  siRNA target sequence for Apobec3 (NM_030255.1,206-224).
cggaaagataccttcttgt

SEQ ID NO: 556749 - DNA, 19 bp, Mus musculus
  siRNA target sequence for Apobec3 (NM_030255.1,216-234).
ccttcttgtgctatgaagt

SEQ ID NO: 556750 - DNA, 19 bp, Mus musculus
  siRNA target sequence for Apobec3 (NM_030255.1,266-284).
cttcaccatggggtcttta

SEQ ID NO: 556751 - DNA, 19 bp, Mus musculus
  siRNA target sequence for Apobec3 (NM_030255.1,304-322).
cgctgaaatctgcttttta

SEQ ID NO: 556752 - DNA, 19 bp, Mus musculus
  siRNA target sequence for Apobec3 (NM_030255.1,325-343).
ctggttccatgacaaagta

SEQ ID NO: 556753 - DNA, 19 bp, Mus musculus
  siRNA target sequence for Apobec3 (NM_030255.1,331-349).
ccatgacaaagtactgaaa

SEQ ID NO: 556754 - DNA, 19 bp, Mus musculus
  siRNA target sequence for Apobec3 (NM_030255.1,357-375).
ctccgagagaagagttcaa

SEQ ID NO: 556755 - DNA, 19 bp, Mus musculus
  siRNA target sequence for Apobec3 (NM_030255.1,554-572).
gccatggacctatacgaat

SEQ ID NO: 556756 - DNA, 19 bp, Mus musculus
  siRNA target sequence for Apobec3 (NM_030255.1,555-573).
ccatggacctatacgaatt

SEQ ID NO: 556757 - DNA, 19 bp, Mus musculus
  siRNA target sequence for Apobec3 (NM_030255.1,556-574).
catggacctatacgaattt

SEQ ID NO: 556758 - DNA, 19 bp, Mus musculus
  siRNA target sequence for Apobec3 (NM_030255.1,559-577).
ggacctatacgaatttaaa

SEQ ID NO: 556759 - DNA, 19 bp, Mus musculus
  siRNA target sequence for Apobec3 (NM_030255.1,560-578).
gacctatacgaatttaaaa

SEQ ID NO: 556760 - DNA, 19 bp, Mus musculus
  siRNA target sequence for Apobec3 (NM_030255.1,613-631).
gcgattcaggccttggaaa

SEQ ID NO: 556761 - DNA, 19 bp, Mus musculus
  siRNA target sequence for Apobec3 (NM_030255.1,614-632).
cgattcaggccttggaaaa

SEQ ID NO: 556762 - DNA, 19 bp, Mus musculus
  siRNA target sequence for Apobec3 (NM_030255.1,635-653).
ctgcttacaaattttagat

SEQ ID NO: 556763 - DNA, 19 bp, Mus musculus
  siRNA target sequence for Apobec3 (NM_030255.1,721-739).
cactctgtcaaatatctgt

SEQ ID NO: 556764 - DNA, 19 bp, Mus musculus
  siRNA target sequence for Apobec3 (NM_030255.1,727-745).
gtcaaatatctgtctaaca

SEQ ID NO: 556765 - DNA, 19 bp, Mus musculus
  siRNA target sequence for Apobec3 (NM_030255.1,729-747).
caaatatctgtctaacaaa

SEQ ID NO: 556766 - DNA, 19 bp, Mus musculus
  siRNA target sequence for Apobec3 (NM_030255.1,945-963).
gcaaacagcatgcagaaat

SEQ ID NO: 556767 - DNA, 19 bp, Mus musculus
  siRNA target sequence for Apobec3 (NM_030255.1,959-977).
gaaatcctcttccttgata

SEQ ID NO: 556768 - DNA, 19 bp, Mus musculus
  siRNA target sequence for Apobec3 (NM_030255.1,1030-1048).
gagcccctgcccaaactgt

SEQ ID NO: 556769 - DNA, 19 bp, Mus musculus
  siRNA target sequence for Apobec3 (NM_030255.1,1053-1071).
ggcaactggcggcattcaa

SEQ ID NO: 556770 - DNA, 19 bp, Mus musculus
  siRNA target sequence for Apobec3 (NM_030255.1,1074-1092).
gggatcgtccagatctaat

SEQ ID NO: 556771 - DNA, 19 bp, Mus musculus
  siRNA target sequence for Apobec3 (NM_030255.1,1075-1093).
ggatcgtccagatctaatt

SEQ ID NO: 556772 - DNA, 19 bp, Mus musculus
  siRNA target sequence for Apobec3 (NM_030255.1,1088-1106).
ctaattctgcatatctaca

SEQ ID NO: 556773 - DNA, 19 bp, Mus musculus
  siRNA target sequence for Apobec3 (NM_030255.1,1107-1125).
cctcccgcctgtatttcca

SEQ ID NO: 556774 - DNA, 19 bp, Mus musculus
  siRNA target sequence for Apobec3 (NM_030255.1,1189-1207).
catggacctcccacagttt

SEQ ID NO: 556775 - DNA, 19 bp, Mus musculus
  siRNA target sequence for Apobec3 (NM_030255.1,1192-1210).
ggacctcccacagtttact

SEQ ID NO: 556776 - DNA, 19 bp, Mus musculus
  siRNA target sequence for Apobec3 (NM_030255.1,1209-1227).
ctgactgctggacaaactt

SEQ ID NO: 556777 - DNA, 19 bp, Mus musculus
  siRNA target sequence for Apobec3 (NM_030255.1,1215-1233).
gctggacaaactttgtgaa

SEQ ID NO: 556778 - DNA, 19 bp, Mus musculus
  siRNA target sequence for Apobec3 (NM_030255.1,1317-1335).
cctggggtctgcaagattt

SEQ ID NO: 556779 - DNA, 19 bp, Mus musculus
  siRNA target sequence for Apobec3 (NM_030255.1,1361-1379).
cttggacccccgatgtctt

SEQ ID NO: 556780 - DNA, 19 bp, Mus musculus
  siRNA target sequence for Arts1 (NM_030711.2,86-104).
cttcttcccctagtattga

SEQ ID NO: 556781 - DNA, 19 bp, Mus musculus
  siRNA target sequence for Arts1 (NM_030711.2,89-107).
cttcccctagtattgacat

SEQ ID NO: 556782 - DNA, 19 bp, Mus musculus
  siRNA target sequence for Arts1 (NM_030711.2,132-150).
ggtgtcagaacagtgatat

SEQ ID NO: 556783 - DNA, 19 bp, Mus musculus
  siRNA target sequence for Arts1 (NM_030711.2,135-153).
gtcagaacagtgatataga

SEQ ID NO: 556784 - DNA, 19 bp, Mus musculus
  siRNA target sequence for Arts1 (NM_030711.2,139-157).
gaacagtgatatagaatct

SEQ ID NO: 556785 - DNA, 19 bp, Mus musculus
  siRNA target sequence for Arts1 (NM_030711.2,144-162).
gtgatatagaatctctaaa

SEQ ID NO: 556786 - DNA, 19 bp, Mus musculus
  siRNA target sequence for Arts1 (NM_030711.2,165-183).
ctagtaatggagactcatt

SEQ ID NO: 556787 - DNA, 19 bp, Mus musculus
  siRNA target sequence for Arts1 (NM_030711.2,178-196).
ctcattcccttggaataat

SEQ ID NO: 556788 - DNA, 19 bp, Mus musculus
  siRNA target sequence for Arts1 (NM_030711.2,180-198).
cattcccttggaataatat

SEQ ID NO: 556789 - DNA, 19 bp, Mus musculus
  siRNA target sequence for Arts1 (NM_030711.2,200-218).
cgacttcctgagtatatga

SEQ ID NO: 556790 - DNA, 19 bp, Mus musculus
  siRNA target sequence for Arts1 (NM_030711.2,211-229).
gtatatgaccccgattcat

SEQ ID NO: 556791 - DNA, 19 bp, Mus musculus
  siRNA target sequence for Arts1 (NM_030711.2,217-235).
gaccccgattcattatgat

SEQ ID NO: 556792 - DNA, 19 bp, Mus musculus
  siRNA target sequence for Arts1 (NM_030711.2,219-237).
ccccgattcattatgatct

SEQ ID NO: 556793 - DNA, 19 bp, Mus musculus
  siRNA target sequence for Arts1 (NM_030711.2,222-240).
cgattcattatgatctcat

SEQ ID NO: 556794 - DNA, 19 bp, Mus musculus
  siRNA target sequence for Arts1 (NM_030711.2,273-291).
ggggaaaaacagaagtaga

SEQ ID NO: 556795 - DNA, 19 bp, Mus musculus
  siRNA target sequence for Arts1 (NM_030711.2,307-325).
gcccaccagcaccattatt

SEQ ID NO: 556796 - DNA, 19 bp, Mus musculus
  siRNA target sequence for Arts1 (NM_030711.2,312-330).
ccagcaccattattatgca

SEQ ID NO: 556797 - DNA, 19 bp, Mus musculus
  siRNA target sequence for Arts1 (NM_030711.2,313-331).
cagcaccattattatgcat

SEQ ID NO: 556798 - DNA, 19 bp, Mus musculus
  siRNA target sequence for Arts1 (NM_030711.2,318-336).
ccattattatgcatagtca

SEQ ID NO: 556799 - DNA, 19 bp, Mus musculus
  siRNA target sequence for Arts1 (NM_030711.2,335-353).
caccacctgcaaatatcta

SEQ ID NO: 556800 - DNA, 19 bp, Mus musculus
  siRNA target sequence for Arts1 (NM_030711.2,467-485).
gggtccctgtacacagtta

SEQ ID NO: 556801 - DNA, 19 bp, Mus musculus
  siRNA target sequence for Arts1 (NM_030711.2,471-489).
ccctgtacacagttatcat

SEQ ID NO: 556802 - DNA, 19 bp, Mus musculus
  siRNA target sequence for Arts1 (NM_030711.2,501-519).
ccaacctgtctgagagttt

SEQ ID NO: 556803 - DNA, 19 bp, Mus musculus
  siRNA target sequence for Arts1 (NM_030711.2,854-872).
gctgtgccagacaagataa

SEQ ID NO: 556804 - DNA, 19 bp, Mus musculus
  siRNA target sequence for Arts1 (NM_030711.2,868-886).
gataaatcaagccgattat

SEQ ID NO: 556805 - DNA, 19 bp, Mus musculus
  siRNA target sequence for Arts1 (NM_030711.2,900-918).
cagtgactcttctagagtt

SEQ ID NO: 556806 - DNA, 19 bp, Mus musculus
  siRNA target sequence for Arts1 (NM_030711.2,904-922).
gactcttctagagttttat

SEQ ID NO: 556807 - DNA, 19 bp, Mus musculus
  siRNA target sequence for Arts1 (NM_030711.2,926-944).
gattatttcaacattccat

SEQ ID NO: 556808 - DNA, 19 bp, Mus musculus
  siRNA target sequence for Arts1 (NM_030711.2,948-966).
ctttacccaagcaagatct

SEQ ID NO: 556809 - DNA, 19 bp, Mus musculus
  siRNA target sequence for Arts1 (NM_030711.2,1026-1044).
gagagtcctctctgttata

SEQ ID NO: 556810 - DNA, 19 bp, Mus musculus
  siRNA target sequence for Arts1 (NM_030711.2,1030-1048).
gtcctctctgttatacgat

SEQ ID NO: 556811 - DNA, 19 bp, Mus musculus
  siRNA target sequence for Arts1 (NM_030711.2,1032-1050).
cctctctgttatacgataa

SEQ ID NO: 556812 - DNA, 19 bp, Mus musculus
  siRNA target sequence for Arts1 (NM_030711.2,1035-1053).
ctctgttatacgataaaga

SEQ ID NO: 556813 - DNA, 19 bp, Mus musculus
  siRNA target sequence for Arts1 (NM_030711.2,1037-1055).
ctgttatacgataaagaaa

SEQ ID NO: 556814 - DNA, 19 bp, Mus musculus
  siRNA target sequence for Arts1 (NM_030711.2,1071-1089).
gtaagcttggcatcacaat

SEQ ID NO: 556815 - DNA, 19 bp, Mus musculus
  siRNA target sequence for Arts1 (NM_030711.2,1079-1097).
ggcatcacaatgattgtgt

SEQ ID NO: 556816 - DNA, 19 bp, Mus musculus
  siRNA target sequence for Arts1 (NM_030711.2,1179-1197).
ccaaatttatggagtttgt

SEQ ID NO: 556817 - DNA, 19 bp, Mus musculus
  siRNA target sequence for Arts1 (NM_030711.2,1212-1230).
cccatcctgaactaaaagt

SEQ ID NO: 556818 - DNA, 19 bp, Mus musculus
  siRNA target sequence for Arts1 (NM_030711.2,1218-1236).
ctgaactaaaagttgaaga

SEQ ID NO: 556819 - DNA, 19 bp, Mus musculus
  siRNA target sequence for Arts1 (NM_030711.2,1248-1266).
gcaagtgttttaatgcaat

SEQ ID NO: 556820 - DNA, 19 bp, Mus musculus
  siRNA target sequence for Arts1 (NM_030711.2,1268-1286).
gaagttgatgcattaaact

SEQ ID NO: 556821 - DNA, 19 bp, Mus musculus
  siRNA target sequence for Arts1 (NM_030711.2,1323-1341).
cgcagattcgggagatgtt

SEQ ID NO: 556822 - DNA, 19 bp, Mus musculus
  siRNA target sequence for Arts1 (NM_030711.2,1324-1342).
gcagattcgggagatgttt

SEQ ID NO: 556823 - DNA, 19 bp, Mus musculus
  siRNA target sequence for Arts1 (NM_030711.2,1334-1352).
gagatgtttgatgatgttt

SEQ ID NO: 556824 - DNA, 19 bp, Mus musculus
  siRNA target sequence for Arts1 (NM_030711.2,1363-1381).
gggagcttgtattctgaat

SEQ ID NO: 556825 - DNA, 19 bp, Mus musculus
  siRNA target sequence for Arts1 (NM_030711.2,1364-1382).
ggagcttgtattctgaata

SEQ ID NO: 556826 - DNA, 19 bp, Mus musculus
  siRNA target sequence for Arts1 (NM_030711.2,1378-1396).
gaatatgctaagagattat

SEQ ID NO: 556827 - DNA, 19 bp, Mus musculus
  siRNA target sequence for Arts1 (NM_030711.2,1430-1448).
cagtatctccaaaagtata

SEQ ID NO: 556828 - DNA, 19 bp, Mus musculus
  siRNA target sequence for Arts1 (NM_030711.2,1432-1450).
gtatctccaaaagtatagt

SEQ ID NO: 556829 - DNA, 19 bp, Mus musculus
  siRNA target sequence for Arts1 (NM_030711.2,1480-1498).
gaatagcatgatgcatatt

SEQ ID NO: 556830 - DNA, 19 bp, Mus musculus
  siRNA target sequence for Arts1 (NM_030711.2,1506-1524).
cagatggcacacaaacaat

SEQ ID NO: 556831 - DNA, 19 bp, Mus musculus
  siRNA target sequence for Arts1 (NM_030711.2,1580-1598).
gaggttgtagatgtaaaga

SEQ ID NO: 556832 - DNA, 19 bp, Mus musculus
  siRNA target sequence for Arts1 (NM_030711.2,1624-1642).
gaagggctttcctctgata

SEQ ID NO: 556833 - DNA, 19 bp, Mus musculus
  siRNA target sequence for Arts1 (NM_030711.2,1733-1751).
catgttccactgacattca

SEQ ID NO: 556834 - DNA, 19 bp, Mus musculus
  siRNA target sequence for Arts1 (NM_030711.2,1736-1754).
gttccactgacattcatta

SEQ ID NO: 556835 - DNA, 19 bp, Mus musculus
  siRNA target sequence for Arts1 (NM_030711.2,1739-1757).
ccactgacattcattacca

SEQ ID NO: 556836 - DNA, 19 bp, Mus musculus
  siRNA target sequence for Arts1 (NM_030711.2,1824-1842).
cagtgcagtggatcaaatt

SEQ ID NO: 556837 - DNA, 19 bp, Mus musculus
  siRNA target sequence for Arts1 (NM_030711.2,1826-1844).
gtgcagtggatcaaattta

SEQ ID NO: 556838 - DNA, 19 bp, Mus musculus
  siRNA target sequence for Arts1 (NM_030711.2,1850-1868).
ggaatgaatggctattaca

SEQ ID NO: 556839 - DNA, 19 bp, Mus musculus
  siRNA target sequence for Arts1 (NM_030711.2,1919-1937).
gaagcgcacacaacaatca

SEQ ID NO: 556840 - DNA, 19 bp, Mus musculus
  siRNA target sequence for Arts1 (NM_030711.2,1949-1967).
cgggcaagtctcatcaaca

SEQ ID NO: 556841 - DNA, 19 bp, Mus musculus
  siRNA target sequence for Arts1 (NM_030711.2,1950-1968).
gggcaagtctcatcaacaa

SEQ ID NO: 556842 - DNA, 19 bp, Mus musculus
  siRNA target sequence for Arts1 (NM_030711.2,1951-1969).
ggcaagtctcatcaacaat

SEQ ID NO: 556843 - DNA, 19 bp, Mus musculus
  siRNA target sequence for Arts1 (NM_030711.2,1979-1997).
ctggtcagcattgaaaagt

SEQ ID NO: 556844 - DNA, 19 bp, Mus musculus
  siRNA target sequence for Arts1 (NM_030711.2,1986-2004).
gcattgaaaagttatcaat

SEQ ID NO: 556845 - DNA, 19 bp, Mus musculus
  siRNA target sequence for Arts1 (NM_030711.2,2018-2036).
gatttaaccctgtacttga

SEQ ID NO: 556846 - DNA, 19 bp, Mus musculus
  siRNA target sequence for Arts1 (NM_030711.2,2046-2064).
ctgaaattatgcccatatt

SEQ ID NO: 556847 - DNA, 19 bp, Mus musculus
  siRNA target sequence for Arts1 (NM_030711.2,2081-2099).
ctcatacctatgtataagt

SEQ ID NO: 556848 - DNA, 19 bp, Mus musculus
  siRNA target sequence for Arts1 (NM_030711.2,2119-2137).
gattgaggtggaaactcaa

SEQ ID NO: 556849 - DNA, 19 bp, Mus musculus
  siRNA target sequence for Arts1 (NM_030711.2,2123-2141).
gaggtggaaactcaattta

SEQ ID NO: 556850 - DNA, 19 bp, Mus musculus
  siRNA target sequence for Arts1 (NM_030711.2,2158-2176).
gttgctgaaggaccttatt

SEQ ID NO: 556851 - DNA, 19 bp, Mus musculus
  siRNA target sequence for Arts1 (NM_030711.2,2162-2180).
ctgaaggaccttattgata

SEQ ID NO: 556852 - DNA, 19 bp, Mus musculus
  siRNA target sequence for Arts1 (NM_030711.2,2447-2465).
gaattttccctctgtacaa

SEQ ID NO: 556853 - DNA, 19 bp, Mus musculus
  siRNA target sequence for Arts1 (NM_030711.2,2490-2508).
ggcttctagatcaaagttt

SEQ ID NO: 556854 - DNA, 19 bp, Mus musculus
  siRNA target sequence for Arts1 (NM_030711.2,2491-2509).
gcttctagatcaaagtttt

SEQ ID NO: 556855 - DNA, 19 bp, Mus musculus
  siRNA target sequence for Arts1 (NM_030711.2,2505-2523).
gttttaagggagagataat

SEQ ID NO: 556856 - DNA, 19 bp, Mus musculus
  siRNA target sequence for Arts1 (NM_030711.2,2692-2710).
caccagagcacgtcttgaa

SEQ ID NO: 556857 - DNA, 19 bp, Mus musculus
  siRNA target sequence for Arts1 (NM_030711.2,2700-2718).
cacgtcttgaagaggtaaa

SEQ ID NO: 556858 - DNA, 19 bp, Mus musculus
  siRNA target sequence for Arts1 (NM_030711.2,2711-2729).
gaggtaaaaggattcttca

SEQ ID NO: 556859 - DNA, 19 bp, Mus musculus
  siRNA target sequence for Arts1 (NM_030711.2,2714-2732).
gtaaaaggattcttcagtt

SEQ ID NO: 556860 - DNA, 19 bp, Mus musculus
  siRNA target sequence for Arts1 (NM_030711.2,2760-2778).
gttgtgttcaacaaaccat

SEQ ID NO: 556861 - DNA, 19 bp, Mus musculus
  siRNA target sequence for Arts1 (NM_030711.2,2801-2819).
cgatggatggataagaatt

SEQ ID NO: 556862 - DNA, 19 bp, Mus musculus
  siRNA target sequence for Arts1 (NM_030711.2,2802-2820).
gatggatggataagaattt

SEQ ID NO: 556863 - DNA, 19 bp, Mus musculus
  siRNA target sequence for B130024H06Rik (NM_173392.1,234-252).
ctcccagatgcatatgctt

SEQ ID NO: 556864 - DNA, 19 bp, Mus musculus
  siRNA target sequence for B130024H06Rik (NM_173392.1,236-254).
cccagatgcatatgctttt

SEQ ID NO: 556865 - DNA, 19 bp, Mus musculus
  siRNA target sequence for B130024H06Rik (NM_173392.1,284-302).
ctctccacagctagcttta

SEQ ID NO: 556866 - DNA, 19 bp, Mus musculus
  siRNA target sequence for B130024H06Rik (NM_173392.1,288-306).
ccacagctagctttactgt

SEQ ID NO: 556867 - DNA, 19 bp, Mus musculus
  siRNA target sequence for B130024H06Rik (NM_173392.1,406-424).
cctctagaccgaatgaaaa

SEQ ID NO: 556868 - DNA, 19 bp, Mus musculus
  siRNA target sequence for B130024H06Rik (NM_173392.1,409-427).
ctagaccgaatgaaaaaaa

SEQ ID NO: 556869 - DNA, 19 bp, Mus musculus
  siRNA target sequence for B130024H06Rik (NM_173392.1,412-430).
gaccgaatgaaaaaaacgt

SEQ ID NO: 556870 - DNA, 19 bp, Mus musculus
  siRNA target sequence for B130024H06Rik (NM_173392.1,428-446).
cgtagcgggacttgatctt

SEQ ID NO: 556871 - DNA, 19 bp, Mus musculus
  siRNA target sequence for B130024H06Rik (NM_173392.1,432-450).
gcgggacttgatcttcttt

SEQ ID NO: 556872 - DNA, 19 bp, Mus musculus
  siRNA target sequence for B130024H06Rik (NM_173392.1,458-476).
ggatgcgagtacttcagat

SEQ ID NO: 556873 - DNA, 19 bp, Mus musculus
  siRNA target sequence for B130024H06Rik (NM_173392.1,463-481).
cgagtacttcagatgagat

SEQ ID NO: 556874 - DNA, 19 bp, Mus musculus
  siRNA target sequence for B130024H06Rik (NM_173392.1,493-511).
gtatgagacggtgtagtaa

SEQ ID NO: 556875 - DNA, 19 bp, Mus musculus
  siRNA target sequence for B130024H06Rik (NM_173392.1,513-531).
cctgtctgtgacctgataa

SEQ ID NO: 556876 - DNA, 19 bp, Mus musculus
  siRNA target sequence for B130024H06Rik (NM_173392.1,591-609).
ccagatgaccctaagtctt

SEQ ID NO: 556877 - DNA, 19 bp, Mus musculus
  siRNA target sequence for B130024H06Rik (NM_173392.1,612-630).
gcagatactttgatcacat

SEQ ID NO: 556878 - DNA, 19 bp, Mus musculus
  siRNA target sequence for B130024H06Rik (NM_173392.1,632-650).
ggactcgtcttcagtttca

SEQ ID NO: 556879 - DNA, 19 bp, Mus musculus
  siRNA target sequence for B130024H06Rik (NM_173392.1,713-731).
catcaacgctggtataaaa

SEQ ID NO: 556880 - DNA, 19 bp, Mus musculus
  siRNA target sequence for B130024H06Rik (NM_173392.1,723-741).
ggtataaaaaacagagata

SEQ ID NO: 556881 - DNA, 19 bp, Mus musculus
  siRNA target sequence for B130024H06Rik (NM_173392.1,724-742).
gtataaaaaacagagatat

SEQ ID NO: 556882 - DNA, 19 bp, Mus musculus
  siRNA target sequence for B130024H06Rik (NM_173392.1,738-756).
gatattagtatcaaagaat

SEQ ID NO: 556883 - DNA, 19 bp, Mus musculus
  siRNA target sequence for B130024H06Rik (NM_173392.1,776-794).
ggcactttttgattcttgt

SEQ ID NO: 556884 - DNA, 19 bp, Mus musculus
  siRNA target sequence for B130024H06Rik (NM_173392.1,835-853).
ctaatgagttagaaacagt

SEQ ID NO: 556885 - DNA, 19 bp, Mus musculus
  siRNA target sequence for B130024H06Rik (NM_173392.1,846-864).
gaaacagttgattttgaca

SEQ ID NO: 556886 - DNA, 19 bp, Mus musculus
  siRNA target sequence for B130024H06Rik (NM_173392.1,912-930).
gataacccacaatacaaga

SEQ ID NO: 556887 - DNA, 19 bp, Mus musculus
  siRNA target sequence for B130024H06Rik (NM_173392.1,926-944).
caagaggctgccatgtgaa

SEQ ID NO: 556888 - DNA, 19 bp, Mus musculus
  siRNA target sequence for B130024H06Rik (NM_173392.1,981-999).
gtagctgtggcagtcaata

SEQ ID NO: 556889 - DNA, 19 bp, Mus musculus
  siRNA target sequence for B130024H06Rik (NM_173392.1,995-1013).
caataatacagagtgttta

SEQ ID NO: 556890 - DNA, 19 bp, Mus musculus
  siRNA target sequence for B130024H06Rik (NM_173392.1,1027-1045).
gaagtaacacaattgctat

SEQ ID NO: 556891 - DNA, 19 bp, Mus musculus
  siRNA target sequence for B130024H06Rik (NM_173392.1,1128-1146).
cccctccaggaaaatagaa

SEQ ID NO: 556892 - DNA, 19 bp, Mus musculus
  siRNA target sequence for B130024H06Rik (NM_173392.1,1133-1151).
ccaggaaaatagaacttct

SEQ ID NO: 556893 - DNA, 19 bp, Mus musculus
  siRNA target sequence for B130024H06Rik (NM_173392.1,1157-1175).
catgaaacagactgtaaaa

SEQ ID NO: 556894 - DNA, 19 bp, Mus musculus
  siRNA target sequence for B130024H06Rik (NM_173392.1,1220-1238).
ccatgtttcaggtgatgat

SEQ ID NO: 556895 - DNA, 19 bp, Mus musculus
  siRNA target sequence for B130024H06Rik (NM_173392.1,1274-1292).
gtctttgtgtggatcgtta

SEQ ID NO: 556896 - DNA, 19 bp, Mus musculus
  siRNA target sequence for B130024H06Rik (NM_173392.1,1276-1294).
ctttgtgtggatcgttaat

SEQ ID NO: 556897 - DNA, 19 bp, Mus musculus
  siRNA target sequence for B130024H06Rik (NM_173392.1,1282-1300).
gtggatcgttaattcacaa

SEQ ID NO: 556898 - DNA, 19 bp, Mus musculus
  siRNA target sequence for B130024H06Rik (NM_173392.1,1288-1306).
cgttaattcacaataatga

SEQ ID NO: 556899 - DNA, 19 bp, Mus musculus
  siRNA target sequence for B130024H06Rik (NM_173392.1,1334-1352).
gtctgaaggccagaacaat

SEQ ID NO: 556900 - DNA, 19 bp, Mus musculus
  siRNA target sequence for B130024H06Rik (NM_173392.1,1349-1367).
caatgatgcagtgactata

SEQ ID NO: 556901 - DNA, 19 bp, Mus musculus
  siRNA target sequence for B130024H06Rik (NM_173392.1,1425-1443).
gaaacgtgtaggagcatat

SEQ ID NO: 556902 - DNA, 19 bp, Mus musculus
  siRNA target sequence for B130024H06Rik (NM_173392.1,1429-1447).
cgtgtaggagcatatttct

SEQ ID NO: 556903 - DNA, 19 bp, Mus musculus
  siRNA target sequence for B130024H06Rik (NM_173392.1,1430-1448).
gtgtaggagcatatttctt

SEQ ID NO: 556904 - DNA, 19 bp, Mus musculus
  siRNA target sequence for B130024H06Rik (NM_173392.1,1432-1450).
gtaggagcatatttcttca

SEQ ID NO: 556905 - DNA, 19 bp, Mus musculus
  siRNA target sequence for B130024H06Rik (NM_173392.1,1485-1503).
gaggttgaggagatggtaa

SEQ ID NO: 556906 - DNA, 19 bp, Mus musculus
  siRNA target sequence for B130024H06Rik (NM_173392.1,1559-1577).
gtctccggtggcactttct

SEQ ID NO: 556907 - DNA, 19 bp, Mus musculus
  siRNA target sequence for B130024H06Rik (NM_173392.1,1644-1662).
gggcaagagttagattact

SEQ ID NO: 556908 - DNA, 19 bp, Mus musculus
  siRNA target sequence for B130024H06Rik (NM_173392.1,1645-1663).
ggcaagagttagattactt

SEQ ID NO: 556909 - DNA, 19 bp, Mus musculus
  siRNA target sequence for B130024H06Rik (NM_173392.1,1646-1664).
gcaagagttagattacttt

SEQ ID NO: 556910 - DNA, 19 bp, Mus musculus
  siRNA target sequence for B130024H06Rik (NM_173392.1,1647-1665).
caagagttagattacttta

SEQ ID NO: 556911 - DNA, 19 bp, Mus musculus
  siRNA target sequence for B130024H06Rik (NM_173392.1,1650-1668).
gagttagattactttaata

SEQ ID NO: 556912 - DNA, 19 bp, Mus musculus
  siRNA target sequence for B130024H06Rik (NM_173392.1,1679-1697).
catgagaagtggcatacta

SEQ ID NO: 556913 - DNA, 19 bp, Mus musculus
  siRNA target sequence for B130024H06Rik (NM_173392.1,1682-1700).
gagaagtggcatactaatt

SEQ ID NO: 556914 - DNA, 19 bp, Mus musculus
  siRNA target sequence for B130024H06Rik (NM_173392.1,1710-1728).
gaactcgatgcttttctga

SEQ ID NO: 556915 - DNA, 19 bp, Mus musculus
  siRNA target sequence for B130024H06Rik (NM_173392.1,1734-1752).
cagtgtctttcgaactcta

SEQ ID NO: 556916 - DNA, 19 bp, Mus musculus
  siRNA target sequence for B130024H06Rik (NM_173392.1,1740-1758).
ctttcgaactctaacacaa

SEQ ID NO: 556917 - DNA, 19 bp, Mus musculus
  siRNA target sequence for B130024H06Rik (NM_173392.1,1799-1817).
gaatcagatcactatgaaa

SEQ ID NO: 556918 - DNA, 19 bp, Mus musculus
  siRNA target sequence for B130024H06Rik (NM_173392.1,1808-1826).
cactatgaaaggactacat

SEQ ID NO: 556919 - DNA, 19 bp, Mus musculus
  siRNA target sequence for B130024H06Rik (NM_173392.1,1810-1828).
ctatgaaaggactacatga

SEQ ID NO: 556920 - DNA, 19 bp, Mus musculus
  siRNA target sequence for B130024H06Rik (NM_173392.1,1837-1855).
ctggggatatatacttcaa

SEQ ID NO: 556921 - DNA, 19 bp, Mus musculus
  siRNA target sequence for B130024H06Rik (NM_173392.1,1936-1954).
gtctttccataggagaaaa

SEQ ID NO: 556922 - DNA, 19 bp, Mus musculus
  siRNA target sequence for B130024H06Rik (NM_173392.1,1950-1968).
gaaaaaggcgcaattccaa

SEQ ID NO: 556923 - DNA, 19 bp, Mus musculus
  siRNA target sequence for B130024H06Rik (NM_173392.1,1965-1983).
ccaactgaaagagagttat

SEQ ID NO: 556924 - DNA, 19 bp, Mus musculus
  siRNA target sequence for B130024H06Rik (NM_173392.1,2015-2033).
gccagtccccagtattaaa

SEQ ID NO: 556925 - DNA, 19 bp, Mus musculus
  siRNA target sequence for B130024H06Rik (NM_173392.1,2174-2192).
cacttgctctgcagatcat

SEQ ID NO: 556926 - DNA, 19 bp, Mus musculus
  siRNA target sequence for B130024H06Rik (NM_173392.1,2176-2194).
cttgctctgcagatcatat

SEQ ID NO: 556927 - DNA, 19 bp, Mus musculus
  siRNA target sequence for B130024H06Rik (NM_173392.1,2212-2230).
gcttcaactccaattacat

SEQ ID NO: 556928 - DNA, 19 bp, Mus musculus
  siRNA target sequence for B130024H06Rik (NM_173392.1,2213-2231).
cttcaactccaattacatt

SEQ ID NO: 556929 - DNA, 19 bp, Mus musculus
  siRNA target sequence for B130024H06Rik (NM_173392.1,2221-2239).
ccaattacattgacataga

SEQ ID NO: 556930 - DNA, 19 bp, Mus musculus
  siRNA target sequence for B130024H06Rik (NM_173392.1,2263-2281).
gttttgtaactgcaaacaa

SEQ ID NO: 556931 - DNA, 19 bp, Mus musculus
  siRNA target sequence for B130024H06Rik (NM_173392.1,2268-2286).
gtaactgcaaacaaggatt

SEQ ID NO: 556932 - DNA, 19 bp, Mus musculus
  siRNA target sequence for B130024H06Rik (NM_173392.1,2318-2336).
ggttttgggccagaaacaa

SEQ ID NO: 556933 - DNA, 19 bp, Mus musculus
  siRNA target sequence for B130024H06Rik (NM_173392.1,2382-2400).
caagtcaaattcaccttta

SEQ ID NO: 556934 - DNA, 19 bp, Mus musculus
  siRNA target sequence for B130024H06Rik (NM_173392.1,2421-2439).
cgagcatgtgggaaggtat

SEQ ID NO: 556935 - DNA, 19 bp, Mus musculus
  siRNA target sequence for B130024H06Rik (NM_173392.1,2461-2479).
ggaaatgtaagcttcagta

SEQ ID NO: 556936 - DNA, 19 bp, Mus musculus
  siRNA target sequence for B130024H06Rik (NM_173392.1,2467-2485).
gtaagcttcagtatctaga

SEQ ID NO: 556937 - DNA, 19 bp, Mus musculus
  siRNA target sequence for B130024H06Rik (NM_173392.1,2510-2528).
ctgctatgagactataaat

SEQ ID NO: 556938 - DNA, 19 bp, Mus musculus
  siRNA target sequence for B130024H06Rik (NM_173392.1,2512-2530).
gctatgagactataaataa

SEQ ID NO: 556939 - DNA, 19 bp, Mus musculus
  siRNA target sequence for B130024H06Rik (NM_173392.1,2565-2583).
ggttcttgtcttaagtcta

SEQ ID NO: 556940 - DNA, 19 bp, Mus musculus
  siRNA target sequence for B130024H06Rik (NM_173392.1,2566-2584).
gttcttgtcttaagtctaa

SEQ ID NO: 556941 - DNA, 19 bp, Mus musculus
  siRNA target sequence for B130024H06Rik (NM_173392.1,2569-2587).
cttgtcttaagtctaatca

SEQ ID NO: 556942 - DNA, 19 bp, Mus musculus
  siRNA target sequence for B130024H06Rik (NM_173392.1,2574-2592).
cttaagtctaatcattcta

SEQ ID NO: 556943 - DNA, 19 bp, Mus musculus
  siRNA target sequence for B130024H06Rik (NM_173392.1,2695-2713).
gaccatgttccaaagaaca

SEQ ID NO: 556944 - DNA, 19 bp, Mus musculus
  siRNA target sequence for B130024H06Rik (NM_173392.1,2751-2769).
ggtgaagttgcagatacta

SEQ ID NO: 556945 - DNA, 19 bp, Mus musculus
  siRNA target sequence for B130024H06Rik (NM_173392.1,2757-2775).
gttgcagatactacgaaat

SEQ ID NO: 556946 - DNA, 19 bp, Mus musculus
  siRNA target sequence for B130024H06Rik (NM_173392.1,2760-2778).
gcagatactacgaaattat

SEQ ID NO: 556947 - DNA, 19 bp, Mus musculus
  siRNA target sequence for B130024H06Rik (NM_173392.1,2829-2847).
gtgcccacaatgataaata

SEQ ID NO: 556948 - DNA, 19 bp, Mus musculus
  siRNA target sequence for B130024H06Rik (NM_173392.1,2868-2886).
cctacagtggaaaaaccaa

SEQ ID NO: 556949 - DNA, 19 bp, Mus musculus
  siRNA target sequence for B130024H06Rik (NM_173392.1,2892-2910).
ggtttaggagacattataa

SEQ ID NO: 556950 - DNA, 19 bp, Mus musculus
  siRNA target sequence for B130024H06Rik (NM_173392.1,2903-2921).
cattataagaagtgagata

SEQ ID NO: 556951 - DNA, 19 bp, Mus musculus
  siRNA target sequence for B130024H06Rik (NM_173392.1,2924-2942).
ccagagtccaacttgtcat

SEQ ID NO: 556952 - DNA, 19 bp, Mus musculus
  siRNA target sequence for B130024H06Rik (NM_173392.1,2927-2945).
gagtccaacttgtcatact

SEQ ID NO: 556953 - DNA, 19 bp, Mus musculus
  siRNA target sequence for B130024H06Rik (NM_173392.1,2944-2962).
ctgcacctgtggaaagact

SEQ ID NO: 556954 - DNA, 19 bp, Mus musculus
  siRNA target sequence for B130024H06Rik (NM_173392.1,3001-3019).
gccctttcacactagaaga

SEQ ID NO: 556955 - DNA, 19 bp, Mus musculus
  siRNA target sequence for B130024H06Rik (NM_173392.1,3002-3020).
ccctttcacactagaagat

SEQ ID NO: 556956 - DNA, 19 bp, Mus musculus
  siRNA target sequence for B130024H06Rik (NM_173392.1,3008-3026).
cacactagaagatgatgtt

SEQ ID NO: 556957 - DNA, 19 bp, Mus musculus
  siRNA target sequence for B130024H06Rik (NM_173392.1,3044-3062).
gccgtctactcctactgtt

SEQ ID NO: 556958 - DNA, 19 bp, Mus musculus
  siRNA target sequence for B130024H06Rik (NM_173392.1,3083-3101).
gcctgttgctagcatttca

SEQ ID NO: 556959 - DNA, 19 bp, Mus musculus
  siRNA target sequence for B130024H06Rik (NM_173392.1,3107-3125).
caggttattgtgtagtgtt

SEQ ID NO: 556960 - DNA, 19 bp, Mus musculus
  siRNA target sequence for B130024H06Rik (NM_173392.1,3116-3134).
gtgtagtgttgccaaatgt

SEQ ID NO: 556961 - DNA, 19 bp, Mus musculus
  siRNA target sequence for B130024H06Rik (NM_173392.1,3118-3136).
gtagtgttgccaaatgtgt

SEQ ID NO: 556962 - DNA, 19 bp, Mus musculus
  siRNA target sequence for B130024H06Rik (NM_173392.1,3137-3155).
ctgcaacaacattagtctt

SEQ ID NO: 556963 - DNA, 19 bp, Mus musculus
  siRNA target sequence for B130024H06Rik (NM_173392.1,3286-3304).
ctgctacatttgttctaaa

SEQ ID NO: 556964 - DNA, 19 bp, Mus musculus
  siRNA target sequence for B130024H06Rik (NM_173392.1,3324-3342).
gtcaagttggtgctttatt

SEQ ID NO: 556965 - DNA, 19 bp, Mus musculus
  siRNA target sequence for B130024H06Rik (NM_173392.1,3343-3361).
cctcagagaagtattggta

SEQ ID NO: 556966 - DNA, 19 bp, Mus musculus
  siRNA target sequence for B130024H06Rik (NM_173392.1,3348-3366).
gagaagtattggtacttct

SEQ ID NO: 556967 - DNA, 19 bp, Mus musculus
  siRNA target sequence for B130024H06Rik (NM_173392.1,3439-3457).
cggttcctaaggacatctt

SEQ ID NO: 556968 - DNA, 19 bp, Mus musculus
  siRNA target sequence for B130024H06Rik (NM_173392.1,3441-3459).
gttcctaaggacatcttca

SEQ ID NO: 556969 - DNA, 19 bp, Mus musculus
  siRNA target sequence for B130024H06Rik (NM_173392.1,3462-3480).
ctgttcatcaccatatata

SEQ ID NO: 556970 - DNA, 19 bp, Mus musculus
  siRNA target sequence for B130024H06Rik (NM_173392.1,3467-3485).
catcaccatatataaggat

SEQ ID NO: 556971 - DNA, 19 bp, Mus musculus
  siRNA target sequence for B130024H06Rik (NM_173392.1,3473-3491).
catatataaggatgcttta

SEQ ID NO: 556972 - DNA, 19 bp, Mus musculus
  siRNA target sequence for B130024H06Rik (NM_173392.1,3515-3533).
ggacaatctgacctttact

SEQ ID NO: 556973 - DNA, 19 bp, Mus musculus
  siRNA target sequence for B130024H06Rik (NM_173392.1,3524-3542).
gacctttactgagagtttt

SEQ ID NO: 556974 - DNA, 19 bp, Mus musculus
  siRNA target sequence for B130024H06Rik (NM_173392.1,3611-3629).
cgtgccaaggagtcctttt

SEQ ID NO: 556975 - DNA, 19 bp, Mus musculus
  siRNA target sequence for B130024H06Rik (NM_173392.1,3665-3683).
ctgggcaaaggtttttcct

SEQ ID NO: 556976 - DNA, 19 bp, Mus musculus
  siRNA target sequence for B130024H06Rik (NM_173392.1,3700-3718).
gattgggagcagaatacaa

SEQ ID NO: 556977 - DNA, 19 bp, Mus musculus
  siRNA target sequence for B130024H06Rik (NM_173392.1,3768-3786).
ggagaaataggacatacta

SEQ ID NO: 556978 - DNA, 19 bp, Mus musculus
  siRNA target sequence for B130024H06Rik (NM_173392.1,3777-3795).
ggacatactattatgaact

SEQ ID NO: 556979 - DNA, 19 bp, Mus musculus
  siRNA target sequence for B130024H06Rik (NM_173392.1,3778-3796).
gacatactattatgaactt

SEQ ID NO: 556980 - DNA, 19 bp, Mus musculus
  siRNA target sequence for B130024H06Rik (NM_173392.1,3784-3802).
ctattatgaacttacttgt

SEQ ID NO: 556981 - DNA, 19 bp, Mus musculus
  siRNA target sequence for B130024H06Rik (NM_173392.1,3791-3809).
gaacttacttgttgatctt

SEQ ID NO: 556982 - DNA, 19 bp, Mus musculus
  siRNA target sequence for B130024H06Rik (NM_173392.1,3836-3854).
catcgatcagctattgatt

SEQ ID NO: 556983 - DNA, 19 bp, Mus musculus
  siRNA target sequence for B130024H06Rik (NM_173392.1,3840-3858).
gatcagctattgattcata

SEQ ID NO: 556984 - DNA, 19 bp, Mus musculus
  siRNA target sequence for B130024H06Rik (NM_173392.1,3904-3922).
gtgatgtaatgaaggtaat

SEQ ID NO: 556985 - DNA, 19 bp, Mus musculus
  siRNA target sequence for B130024H06Rik (NM_173392.1,3935-3953).
cgagcacgtcatcagtatt

SEQ ID NO: 556986 - DNA, 19 bp, Mus musculus
  siRNA target sequence for B130024H06Rik (NM_173392.1,3938-3956).
gcacgtcatcagtattgga

SEQ ID NO: 556987 - DNA, 19 bp, Mus musculus
  siRNA target sequence for B130024H06Rik (NM_173392.1,3947-3965).
cagtattggagctagtttt

SEQ ID NO: 556988 - DNA, 19 bp, Mus musculus
  siRNA target sequence for B130024H06Rik (NM_173392.1,4065-4083).
gcaagttttgtggtgttta

SEQ ID NO: 556989 - DNA, 19 bp, Mus musculus
  siRNA target sequence for B130024H06Rik (NM_173392.1,4107-4125).
ggatttcttgccaaatcca

SEQ ID NO: 556990 - DNA, 19 bp, Mus musculus
  siRNA target sequence for B130024H06Rik (NM_173392.1,4140-4158).
ggcttaatggtacaaataa

SEQ ID NO: 556991 - DNA, 19 bp, Mus musculus
  siRNA target sequence for B130024H06Rik (NM_173392.1,4142-4160).
cttaatggtacaaataact

SEQ ID NO: 556992 - DNA, 19 bp, Mus musculus
  siRNA target sequence for B130024H06Rik (NM_173392.1,4178-4196).
cttgcggctggctttacga

SEQ ID NO: 556993 - DNA, 19 bp, Mus musculus
  siRNA target sequence for B130024H06Rik (NM_173392.1,4213-4231).
gaatccagtgtggaaaagt

SEQ ID NO: 556994 - DNA, 19 bp, Mus musculus
  siRNA target sequence for B130024H06Rik (NM_173392.1,4321-4339).
gaatgtcagtggaaggatt

SEQ ID NO: 556995 - DNA, 19 bp, Mus musculus
  siRNA target sequence for B130024H06Rik (NM_173392.1,4380-4398).
gaggagaagactgtgaaat

SEQ ID NO: 556996 - DNA, 19 bp, Mus musculus
  siRNA target sequence for B130024H06Rik (NM_173392.1,4419-4437).
ctaaaggaccaagatatat

SEQ ID NO: 556997 - DNA, 19 bp, Mus musculus
  siRNA target sequence for B130024H06Rik (NM_173392.1,4424-4442).
ggaccaagatatatctatt

SEQ ID NO: 556998 - DNA, 19 bp, Mus musculus
  siRNA target sequence for B130024H06Rik (NM_173392.1,4504-4522).
ctcacctgagaactctaaa

SEQ ID NO: 556999 - DNA, 19 bp, Mus musculus
  siRNA target sequence for B130024H06Rik (NM_173392.1,4516-4534).
ctctaaagagtaacagaat

SEQ ID NO: 557000 - DNA, 19 bp, Mus musculus
  siRNA target sequence for B130024H06Rik (NM_173392.1,4554-4572).
gtgtccattgacactgata

SEQ ID NO: 557001 - DNA, 19 bp, Mus musculus
  siRNA target sequence for B130024H06Rik (NM_173392.1,4681-4699).
gtctgccactagaaataga

SEQ ID NO: 557002 - DNA, 19 bp, Mus musculus
  siRNA target sequence for B130024H06Rik (NM_173392.1,4685-4703).
gccactagaaatagagtta

SEQ ID NO: 557003 - DNA, 19 bp, Mus musculus
  siRNA target sequence for B130024L21Rik (NM_175546.2,312-330).
cgcaggaggtggtcaacat

SEQ ID NO: 557004 - DNA, 19 bp, Mus musculus
  siRNA target sequence for B130024L21Rik (NM_175546.2,325-343).
caacatggcggtgattgta

SEQ ID NO: 557005 - DNA, 19 bp, Mus musculus
  siRNA target sequence for B130024L21Rik (NM_175546.2,331-349).
ggcggtgattgtacctaaa

SEQ ID NO: 557006 - DNA, 19 bp, Mus musculus
  siRNA target sequence for B130024L21Rik (NM_175546.2,334-352).
ggtgattgtacctaaagaa

SEQ ID NO: 557007 - DNA, 19 bp, Mus musculus
  siRNA target sequence for B130024L21Rik (NM_175546.2,381-399).
ggacagttcgtgtttggtt

SEQ ID NO: 557008 - DNA, 19 bp, Mus musculus
  siRNA target sequence for B130024L21Rik (NM_175546.2,426-444).
caagcatctaccatgcaat

SEQ ID NO: 557009 - DNA, 19 bp, Mus musculus
  siRNA target sequence for B130024L21Rik (NM_175546.2,501-519).
gtctagacaatggtacaat

SEQ ID NO: 557010 - DNA, 19 bp, Mus musculus
  siRNA target sequence for B130024L21Rik (NM_175546.2,539-557).
gaagattataacaagatga

SEQ ID NO: 557011 - DNA, 19 bp, Mus musculus
  siRNA target sequence for B130024L21Rik (NM_175546.2,556-574).
gacacctgtgaaaaactat

SEQ ID NO: 557012 - DNA, 19 bp, Mus musculus
  siRNA target sequence for B130024L21Rik (NM_175546.2,558-576).
cacctgtgaaaaactatca

SEQ ID NO: 557013 - DNA, 19 bp, Mus musculus
  siRNA target sequence for B130024L21Rik (NM_175546.2,578-596).
gcacatcagagcagagtaa

SEQ ID NO: 557014 - DNA, 19 bp, Mus musculus
  siRNA target sequence for B130024L21Rik (NM_175546.2,717-735).
cctcaggcctgcaatttga

SEQ ID NO: 557015 - DNA, 19 bp, Mus musculus
  siRNA target sequence for B130024L21Rik (NM_175546.2,718-736).
ctcaggcctgcaatttgat

SEQ ID NO: 557016 - DNA, 19 bp, Mus musculus
  siRNA target sequence for B130024L21Rik (NM_175546.2,720-738).
caggcctgcaatttgatgt

SEQ ID NO: 557017 - DNA, 19 bp, Mus musculus
  siRNA target sequence for B130024L21Rik (NM_175546.2,740-758).
gaaacccgtcatgtgttta

SEQ ID NO: 557018 - DNA, 19 bp, Mus musculus
  siRNA target sequence for B130024L21Rik (NM_175546.2,872-890).
gtgcagcgcgtgctattct

SEQ ID NO: 557019 - DNA, 19 bp, Mus musculus
  siRNA target sequence for B130024L21Rik (NM_175546.2,874-892).
gcagcgcgtgctattctca

SEQ ID NO: 557020 - DNA, 19 bp, Mus musculus
  siRNA target sequence for B130024L21Rik (NM_175546.2,900-918).
ccgatcactctgtcatcat

SEQ ID NO: 557021 - DNA, 19 bp, Mus musculus
  siRNA target sequence for B130024L21Rik (NM_175546.2,902-920).
gatcactctgtcatcatgt

SEQ ID NO: 557022 - DNA, 19 bp, Mus musculus
  siRNA target sequence for B130024L21Rik (NM_175546.2,922-940).
ggacatcggtgggagaaaa

SEQ ID NO: 557023 - DNA, 19 bp, Mus musculus
  siRNA target sequence for B130024L21Rik (NM_175546.2,956-974).
ctccaaggacacaatgaca

SEQ ID NO: 557024 - DNA, 19 bp, Mus musculus
  siRNA target sequence for B130024L21Rik (NM_175546.2,1142-1160).
caaatgtgggacagtaaga

SEQ ID NO: 557025 - DNA, 19 bp, Mus musculus
  siRNA target sequence for B130024L21Rik (NM_175546.2,1147-1165).
gtgggacagtaagaaaatt

SEQ ID NO: 557026 - DNA, 19 bp, Mus musculus
  siRNA target sequence for B130024L21Rik (NM_175546.2,1202-1220).
gccgtgtgcggcaagtgta

SEQ ID NO: 557027 - DNA, 19 bp, Mus musculus
  siRNA target sequence for B130024L21Rik (NM_175546.2,1327-1345).
cttccatgacagtaagcat

SEQ ID NO: 557028 - DNA, 19 bp, Mus musculus
  siRNA target sequence for B130024L21Rik (NM_175546.2,1331-1349).
catgacagtaagcataaca

SEQ ID NO: 557029 - DNA, 19 bp, Mus musculus
  siRNA target sequence for B130024L21Rik (NM_175546.2,1395-1413).
ctggaactgacaaggtaat

SEQ ID NO: 557030 - DNA, 19 bp, Mus musculus
  siRNA target sequence for B130024L21Rik (NM_175546.2,1401-1419).
ctgacaaggtaattaagct

SEQ ID NO: 557031 - DNA, 19 bp, Mus musculus
  siRNA target sequence for BC011487 (NM_146174.1,234-252).
gatctccctaaagaattca

SEQ ID NO: 557032 - DNA, 19 bp, Mus musculus
  siRNA target sequence for BC011487 (NM_146174.1,442-460).
cagggactcccattgaagt

SEQ ID NO: 557033 - DNA, 19 bp, Mus musculus
  siRNA target sequence for BC011487 (NM_146174.1,664-682).
gcagtgacaaggtgctatt

SEQ ID NO: 557034 - DNA, 19 bp, Mus musculus
  siRNA target sequence for BC011487 (NM_146174.1,753-771).
cggttcaaagtctctaaga

SEQ ID NO: 557035 - DNA, 19 bp, Mus musculus
  siRNA target sequence for BC011487 (NM_146174.1,754-772).
ggttcaaagtctctaagaa

SEQ ID NO: 557036 - DNA, 19 bp, Mus musculus
  siRNA target sequence for BC011487 (NM_146174.1,833-851).
gcttctggatggaatctct

SEQ ID NO: 557037 - DNA, 19 bp, Mus musculus
  siRNA target sequence for BC011487 (NM_146174.1,834-852).
cttctggatggaatctcta

SEQ ID NO: 557038 - DNA, 19 bp, Mus musculus
  siRNA target sequence for BC011487 (NM_146174.1,915-933).
cctctggggctcgataact

SEQ ID NO: 557039 - DNA, 19 bp, Mus musculus
  siRNA target sequence for BC011487 (NM_146174.1,1088-1106).
gaacacacgtctcaagaat

SEQ ID NO: 557040 - DNA, 19 bp, Mus musculus
  siRNA target sequence for BC011487 (NM_146174.1,1095-1113).
cgtctcaagaatctgaatt

SEQ ID NO: 557041 - DNA, 19 bp, Mus musculus
  siRNA target sequence for BC011487 (NM_146174.1,1107-1125).
ctgaattccctattgttga

SEQ ID NO: 557042 - DNA, 19 bp, Mus musculus
  siRNA target sequence for BC011487 (NM_146174.1,1121-1139).
gttgaagcatggcttgaaa

SEQ ID NO: 557043 - DNA, 19 bp, Mus musculus
  siRNA target sequence for BC011487 (NM_146174.1,1153-1171).
cccatttgaccgatgatat

SEQ ID NO: 557044 - DNA, 19 bp, Mus musculus
  siRNA target sequence for BC011487 (NM_146174.1,1155-1173).
catttgaccgatgatatgt

SEQ ID NO: 557045 - DNA, 19 bp, Mus musculus
  siRNA target sequence for BC011487 (NM_146174.1,1181-1199).
ctgctgtgcagcttatagt

SEQ ID NO: 557046 - DNA, 19 bp, Mus musculus
  siRNA target sequence for BC011487 (NM_146174.1,1293-1311).
ggcagctctgctttaggta

SEQ ID NO: 557047 - DNA, 19 bp, Mus musculus
  siRNA target sequence for BC011487 (NM_146174.1,1297-1315).
gctctgctttaggtagttt

SEQ ID NO: 557048 - DNA, 19 bp, Mus musculus
  siRNA target sequence for BC011487 (NM_146174.1,1372-1390).
gcccaggctgttttcctat

SEQ ID NO: 557049 - DNA, 19 bp, Mus musculus
  siRNA target sequence for BC011487 (NM_146174.1,1386-1404).
cctatccttcatatagata

SEQ ID NO: 557050 - DNA, 19 bp, Mus musculus
  siRNA target sequence for BC011487 (NM_146174.1,1387-1405).
ctatccttcatatagatat

SEQ ID NO: 557051 - DNA, 19 bp, Mus musculus
  siRNA target sequence for BC011487 (NM_146174.1,1401-1419).
gatataagaaactatcact

SEQ ID NO: 557052 - DNA, 19 bp, Mus musculus
  siRNA target sequence for BC011487 (NM_146174.1,1437-1455).
gagttccaagctatgttga

SEQ ID NO: 557053 - DNA, 19 bp, Mus musculus
  siRNA target sequence for BC011487 (NM_146174.1,1490-1508).
gggaaagttgggagtagat

SEQ ID NO: 557054 - DNA, 19 bp, Mus musculus
  siRNA target sequence for BC011487 (NM_146174.1,1565-1583).
ccggatcctgaggaagata

SEQ ID NO: 557055 - DNA, 19 bp, Mus musculus
  siRNA target sequence for BC011487 (NM_146174.1,1567-1585).
ggatcctgaggaagatact

SEQ ID NO: 557056 - DNA, 19 bp, Mus musculus
  siRNA target sequence for BC011487 (NM_146174.1,1602-1620).
ccagctgtgagcaagagta

SEQ ID NO: 557057 - DNA, 19 bp, Mus musculus
  siRNA target sequence for BC011487 (NM_146174.1,1677-1695).
gcacactctgggagtgatt

SEQ ID NO: 557058 - DNA, 19 bp, Mus musculus
  siRNA target sequence for BC011487 (NM_146174.1,1700-1718).
ccagatagcacataacctt

SEQ ID NO: 557059 - DNA, 19 bp, Mus musculus
  siRNA target sequence for BC011487 (NM_146174.1,1701-1719).
cagatagcacataacctta

SEQ ID NO: 557060 - DNA, 19 bp, Mus musculus
  siRNA target sequence for BC011487 (NM_146174.1,1763-1781).
cattaccgtggagatcaat

SEQ ID NO: 557061 - DNA, 19 bp, Mus musculus
  siRNA target sequence for BC011487 (NM_146174.1,1910-1928).
cactgatgaccttaccttt

SEQ ID NO: 557062 - DNA, 19 bp, Mus musculus
  siRNA target sequence for BC011487 (NM_146174.1,1945-1963).
gagcccctgtggtaactta

SEQ ID NO: 557063 - DNA, 19 bp, Mus musculus
  siRNA target sequence for BC011487 (NM_146174.1,2053-2071).
gccctgtgtctgttaccat

SEQ ID NO: 557064 - DNA, 19 bp, Mus musculus
  siRNA target sequence for BC011487 (NM_146174.1,2092-2110).
catactacaagctaggtaa

SEQ ID NO: 557065 - DNA, 19 bp, Mus musculus
  siRNA target sequence for BC011487 (NM_146174.1,2303-2321).
ccaaagacctgagagaatt

SEQ ID NO: 557066 - DNA, 19 bp, Mus musculus
  siRNA target sequence for BC011487 (NM_146174.1,2403-2421).
gtcagtttggcaaacataa

SEQ ID NO: 557067 - DNA, 19 bp, Mus musculus
  siRNA target sequence for BC011487 (NM_146174.1,2405-2423).
cagtttggcaaacataaga

SEQ ID NO: 557068 - DNA, 19 bp, Mus musculus
  siRNA target sequence for BC011487 (NM_146174.1,2516-2534).
caatctctggtcagtctat

SEQ ID NO: 557069 - DNA, 19 bp, Mus musculus
  siRNA target sequence for BC011487 (NM_146174.1,2522-2540).
ctggtcagtctatgttcat

SEQ ID NO: 557070 - DNA, 19 bp, Mus musculus
  siRNA target sequence for BC011487 (NM_146174.1,2524-2542).
ggtcagtctatgttcatga

SEQ ID NO: 557071 - DNA, 19 bp, Mus musculus
  siRNA target sequence for BC011487 (NM_146174.1,2640-2658).
ctgcaaaactggaatgtct

SEQ ID NO: 557072 - DNA, 19 bp, Mus musculus
  siRNA target sequence for BC011487 (NM_146174.1,2700-2718).
gggtgggaaccgttcatca

SEQ ID NO: 557073 - DNA, 19 bp, Mus musculus
  siRNA target sequence for BC011487 (NM_146174.1,2719-2737).
ccctctttgctgaatacca

SEQ ID NO: 557074 - DNA, 19 bp, Mus musculus
  siRNA target sequence for BC011487 (NM_146174.1,2721-2739).
ctctttgctgaataccaaa

SEQ ID NO: 557075 - DNA, 19 bp, Mus musculus
  siRNA target sequence for BC026666 (NM_146077.1,281-299).
catggaaattctacaagat

SEQ ID NO: 557076 - DNA, 19 bp, Mus musculus
  siRNA target sequence for BC026666 (NM_146077.1,340-358).
gtatcagtcaggttggaaa

SEQ ID NO: 557077 - DNA, 19 bp, Mus musculus
  siRNA target sequence for BC026666 (NM_146077.1,351-369).
gttggaaaaacgtcagaaa

SEQ ID NO: 557078 - DNA, 19 bp, Mus musculus
  siRNA target sequence for BC026666 (NM_146077.1,354-372).
ggaaaaacgtcagaaaaga

SEQ ID NO: 557079 - DNA, 19 bp, Mus musculus
  siRNA target sequence for BC026666 (NM_146077.1,388-406).
gcaaactctctgtgaataa

SEQ ID NO: 557080 - DNA, 19 bp, Mus musculus
  siRNA target sequence for BC026666 (NM_146077.1,397-415).
ctgtgaataagaatacgtt

SEQ ID NO: 557081 - DNA, 19 bp, Mus musculus
  siRNA target sequence for BC026666 (NM_146077.1,412-430).
cgttcaggcccaataagct

SEQ ID NO: 557082 - DNA, 19 bp, Mus musculus
  siRNA target sequence for BC026666 (NM_146077.1,441-459).
cttgcagagaagatccaaa

SEQ ID NO: 557083 - DNA, 19 bp, Mus musculus
  siRNA target sequence for BC026666 (NM_146077.1,449-467).
gaagatccaaagtatggat

SEQ ID NO: 557084 - DNA, 19 bp, Mus musculus
  siRNA target sequence for BC026666 (NM_146077.1,733-751).
gggcccaggtggatctaga

SEQ ID NO: 557085 - DNA, 19 bp, Mus musculus
  siRNA target sequence for BC026666 (NM_146077.1,736-754).
cccaggtggatctagagaa

SEQ ID NO: 557086 - DNA, 19 bp, Mus musculus
  siRNA target sequence for BC026666 (NM_146077.1,853-871).
ccaagcagttgagacaata

SEQ ID NO: 557087 - DNA, 19 bp, Mus musculus
  siRNA target sequence for BC026666 (NM_146077.1,854-872).
caagcagttgagacaatat

SEQ ID NO: 557088 - DNA, 19 bp, Mus musculus
  siRNA target sequence for BC026666 (NM_146077.1,901-919).
ctctaaggaagctcactaa

SEQ ID NO: 557089 - DNA, 19 bp, Mus musculus
  siRNA target sequence for BC026666 (NM_146077.1,907-925).
ggaagctcactaaatcctt

SEQ ID NO: 557090 - DNA, 19 bp, Mus musculus
  siRNA target sequence for BC026666 (NM_146077.1,911-929).
gctcactaaatccttgaaa

SEQ ID NO: 557091 - DNA, 19 bp, Mus musculus
  siRNA target sequence for BC026666 (NM_146077.1,912-930).
ctcactaaatccttgaaaa

SEQ ID NO: 557092 - DNA, 19 bp, Mus musculus
  siRNA target sequence for BC026666 (NM_146077.1,949-967).
ccatggagctactaaagga

SEQ ID NO: 557093 - DNA, 19 bp, Mus musculus
  siRNA target sequence for BC026666 (NM_146077.1,954-972).
gagctactaaaggacatta

SEQ ID NO: 557094 - DNA, 19 bp, Mus musculus
  siRNA target sequence for BC026666 (NM_146077.1,956-974).
gctactaaaggacattaaa

SEQ ID NO: 557095 - DNA, 19 bp, Mus musculus
  siRNA target sequence for BC026666 (NM_146077.1,980-998).
cttgagcaggggtaaggaa

SEQ ID NO: 557096 - DNA, 19 bp, Mus musculus
  siRNA target sequence for BC026666 (NM_146077.1,983-1001).
gagcaggggtaaggaattt

SEQ ID NO: 557097 - DNA, 19 bp, Mus musculus
  siRNA target sequence for BC026666 (NM_146077.1,1066-1084).
ggcatgagtccatcataaa

SEQ ID NO: 557098 - DNA, 19 bp, Mus musculus
  siRNA target sequence for BC026666 (NM_146077.1,1095-1113).
gaactcaaagacgatatga

SEQ ID NO: 557099 - DNA, 19 bp, Mus musculus
  siRNA target sequence for BC026666 (NM_146077.1,1131-1149).
gataaaagcgcattcatga

SEQ ID NO: 557100 - DNA, 19 bp, Mus musculus
  siRNA target sequence for BC026666 (NM_146077.1,1145-1163).
catgaacagcctgaataaa

SEQ ID NO: 557101 - DNA, 19 bp, Mus musculus
  siRNA target sequence for BC026666 (NM_146077.1,1148-1166).
gaacagcctgaataaagaa

SEQ ID NO: 557102 - DNA, 19 bp, Mus musculus
  siRNA target sequence for BC026666 (NM_146077.1,1151-1169).
cagcctgaataaagaagaa

SEQ ID NO: 557103 - DNA, 19 bp, Mus musculus
  siRNA target sequence for BC026666 (NM_146077.1,1181-1199).
gagcctgttacagaagaat

SEQ ID NO: 557104 - DNA, 19 bp, Mus musculus
  siRNA target sequence for BC026666 (NM_146077.1,1187-1205).
gttacagaagaataattca

SEQ ID NO: 557105 - DNA, 19 bp, Mus musculus
  siRNA target sequence for BC026666 (NM_146077.1,1264-1282).
ccttttctcaggatctaaa

SEQ ID NO: 557106 - DNA, 19 bp, Mus musculus
  siRNA target sequence for BC026666 (NM_146077.1,1305-1323).
gctggaaaagcttccaata

SEQ ID NO: 557107 - DNA, 19 bp, Mus musculus
  siRNA target sequence for BC026666 (NM_146077.1,1319-1337).
caataggcaggcaaaacct

SEQ ID NO: 557108 - DNA, 19 bp, Mus musculus
  siRNA target sequence for BC026666 (NM_146077.1,1424-1442).
ctcaggtggggcatgcatt

SEQ ID NO: 557109 - DNA, 19 bp, Mus musculus
  siRNA target sequence for BC026666 (NM_146077.1,1490-1508).
gagcgcgcagagctacata

SEQ ID NO: 557110 - DNA, 19 bp, Mus musculus
  siRNA target sequence for BC026666 (NM_146077.1,1595-1613).
gggtgtctatgtgaatcat

SEQ ID NO: 557111 - DNA, 19 bp, Mus musculus
  siRNA target sequence for BC026666 (NM_146077.1,1597-1615).
gtgtctatgtgaatcatga

SEQ ID NO: 557112 - DNA, 19 bp, Mus musculus
  siRNA target sequence for BC026666 (NM_146077.1,1618-1636).
gtggagaggtcgtcttcta

SEQ ID NO: 557113 - DNA, 19 bp, Mus musculus
  siRNA target sequence for BC026666 (NM_146077.1,1641-1659).
gccatcactagcaaacaca

SEQ ID NO: 557114 - DNA, 19 bp, Mus musculus
  siRNA target sequence for BC026666 (NM_146077.1,1642-1660).
ccatcactagcaaacacat

SEQ ID NO: 557115 - DNA, 19 bp, Mus musculus
  siRNA target sequence for BC026666 (NM_146077.1,1646-1664).
cactagcaaacacatctat

SEQ ID NO: 557116 - DNA, 19 bp, Mus musculus
  siRNA target sequence for BC026666 (NM_146077.1,1651-1669).
gcaaacacatctatacttt

SEQ ID NO: 557117 - DNA, 19 bp, Mus musculus
  siRNA target sequence for BC026666 (NM_146077.1,1656-1674).
cacatctatactttccaaa

SEQ ID NO: 557118 - DNA, 19 bp, Mus musculus
  siRNA target sequence for Bspry (NM_138653.1,762-780).
gattcggagaaattaagct

SEQ ID NO: 557119 - DNA, 19 bp, Mus musculus
  siRNA target sequence for Bspry (NM_138653.1,1029-1047).
gcctggatagtgaacgtta

SEQ ID NO: 557120 - DNA, 19 bp, Mus musculus
  siRNA target sequence for Bspry (NM_138653.1,1030-1048).
cctggatagtgaacgttaa

SEQ ID NO: 557121 - DNA, 19 bp, Mus musculus
  siRNA target sequence for Bspry (NM_138653.1,1031-1049).
ctggatagtgaacgttaaa

SEQ ID NO: 557122 - DNA, 19 bp, Mus musculus
  siRNA target sequence for Bspry (NM_138653.1,1033-1051).
ggatagtgaacgttaaaca

SEQ ID NO: 557123 - DNA, 19 bp, Mus musculus
  siRNA target sequence for Bspry (NM_138653.1,1145-1163).
ggtcttctcccgctatgat

SEQ ID NO: 557124 - DNA, 19 bp, Mus musculus
  siRNA target sequence for Bspry (NM_138653.1,1153-1171).
cccgctatgatcaagagtt

SEQ ID NO: 557125 - DNA, 19 bp, Mus musculus
  siRNA target sequence for Bspry (NM_138653.1,1161-1179).
gatcaagagttctgtttct

SEQ ID NO: 557126 - DNA, 19 bp, Mus musculus
  siRNA target sequence for Bspry (NM_138653.1,1180-1198).
cacacaatgggtatcatga

SEQ ID NO: 557127 - DNA, 19 bp, Mus musculus
  siRNA target sequence for Bspry (NM_138653.1,1285-1303).
cagggacggtgcttcatat

SEQ ID NO: 557128 - DNA, 19 bp, Mus musculus
  siRNA target sequence for Bspry (NM_138653.1,1288-1306).
ggacggtgcttcatatcca

SEQ ID NO: 557129 - DNA, 19 bp, Mus musculus
  siRNA target sequence for Bspry (NM_138653.1,1385-1403).
ggccacagtgagactagat

SEQ ID NO: 557130 - DNA, 19 bp, Mus musculus
  siRNA target sequence for Bspry (NM_138653.1,1386-1404).
gccacagtgagactagatt

SEQ ID NO: 557131 - DNA, 19 bp, Mus musculus
  siRNA target sequence for Bspry (NM_138653.1,1388-1406).
cacagtgagactagattca

SEQ ID NO: 557132 - DNA, 19 bp, Mus musculus
  siRNA target sequence for Bspry (NM_138653.1,1416-1434).
cacccttgcagcatacgaa

SEQ ID NO: 557133 - DNA, 19 bp, Mus musculus
  siRNA target sequence for C530046K17Rik (NM_146090.2,124-142).
cccggctgagccctaactt

SEQ ID NO: 557134 - DNA, 19 bp, Mus musculus
  siRNA target sequence for C530046K17Rik (NM_146090.2,206-224).
cgtccggaaccgattcgtt

SEQ ID NO: 557135 - DNA, 19 bp, Mus musculus
  siRNA target sequence for C530046K17Rik (NM_146090.2,211-229).
ggaaccgattcgttggtat

SEQ ID NO: 557136 - DNA, 19 bp, Mus musculus
  siRNA target sequence for C530046K17Rik (NM_146090.2,212-230).
gaaccgattcgttggtatt

SEQ ID NO: 557137 - DNA, 19 bp, Mus musculus
  siRNA target sequence for C530046K17Rik (NM_146090.2,233-251).
cgcatctgacatcaactat

SEQ ID NO: 557138 - DNA, 19 bp, Mus musculus
  siRNA target sequence for C530046K17Rik (NM_146090.2,234-252).
gcatctgacatcaactatt

SEQ ID NO: 557139 - DNA, 19 bp, Mus musculus
  siRNA target sequence for C530046K17Rik (NM_146090.2,276-294).
ctgaagccaccctttgaca

SEQ ID NO: 557140 - DNA, 19 bp, Mus musculus
  siRNA target sequence for C530046K17Rik (NM_146090.2,278-296).
gaagccaccctttgacata

SEQ ID NO: 557141 - DNA, 19 bp, Mus musculus
  siRNA target sequence for C530046K17Rik (NM_146090.2,282-300).
ccaccctttgacataggtt

SEQ ID NO: 557142 - DNA, 19 bp, Mus musculus
  siRNA target sequence for C530046K17Rik (NM_146090.2,286-304).
cctttgacataggttttga

SEQ ID NO: 557143 - DNA, 19 bp, Mus musculus
  siRNA target sequence for C530046K17Rik (NM_146090.2,361-379).
gccaggctgtggcttatat

SEQ ID NO: 557144 - DNA, 19 bp, Mus musculus
  siRNA target sequence for C530046K17Rik (NM_146090.2,391-409).
cctttgctgagtatacagt

SEQ ID NO: 557145 - DNA, 19 bp, Mus musculus
  siRNA target sequence for C530046K17Rik (NM_146090.2,411-429).
gtgcctgctagcattgcaa

SEQ ID NO: 557146 - DNA, 19 bp, Mus musculus
  siRNA target sequence for C530046K17Rik (NM_146090.2,413-431).
gcctgctagcattgcaatt

SEQ ID NO: 557147 - DNA, 19 bp, Mus musculus
  siRNA target sequence for C530046K17Rik (NM_146090.2,442-460).
cagtgaaaccagagtatct

SEQ ID NO: 557148 - DNA, 19 bp, Mus musculus
  siRNA target sequence for C530046K17Rik (NM_146090.2,637-655).
cagcttttctgaaatcaat

SEQ ID NO: 557149 - DNA, 19 bp, Mus musculus
  siRNA target sequence for C530046K17Rik (NM_146090.2,661-679).
gtgatcggcccatcaacta

SEQ ID NO: 557150 - DNA, 19 bp, Mus musculus
  siRNA target sequence for C530046K17Rik (NM_146090.2,663-681).
gatcggcccatcaactaca

SEQ ID NO: 557151 - DNA, 19 bp, Mus musculus
  siRNA target sequence for C530046K17Rik (NM_146090.2,691-709).
ctgtggagacggttctgaa

SEQ ID NO: 557152 - DNA, 19 bp, Mus musculus
  siRNA target sequence for C530046K17Rik (NM_146090.2,727-745).
gcgttgacgtagtctatga

SEQ ID NO: 557153 - DNA, 19 bp, Mus musculus
  siRNA target sequence for C530046K17Rik (NM_146090.2,729-747).
gttgacgtagtctatgagt

SEQ ID NO: 557154 - DNA, 19 bp, Mus musculus
  siRNA target sequence for C530046K17Rik (NM_146090.2,791-809).
caccaaagggcgcttgata

SEQ ID NO: 557155 - DNA, 19 bp, Mus musculus
  siRNA target sequence for C530046K17Rik (NM_146090.2,793-811).
ccaaagggcgcttgatagt

SEQ ID NO: 557156 - DNA, 19 bp, Mus musculus
  siRNA target sequence for C530046K17Rik (NM_146090.2,844-862).
caggactctcaccaataaa

SEQ ID NO: 557157 - DNA, 19 bp, Mus musculus
  siRNA target sequence for C530046K17Rik (NM_146090.2,904-922).
gcctcaggggtttctttct

SEQ ID NO: 557158 - DNA, 19 bp, Mus musculus
  siRNA target sequence for C530046K17Rik (NM_146090.2,1059-1077).
caggctgtcgactatatgt

SEQ ID NO: 557159 - DNA, 19 bp, Mus musculus
  siRNA target sequence for C530046K17Rik (NM_146090.2,1062-1080).
gctgtcgactatatgtaca

SEQ ID NO: 557160 - DNA, 19 bp, Mus musculus
  siRNA target sequence for C530046K17Rik (NM_146090.2,1076-1094).
gtacacggggaaaaatact

SEQ ID NO: 557161 - DNA, 19 bp, Mus musculus
  siRNA target sequence for C530046K17Rik (NM_146090.2,1093-1111).
ctgggaagcttgttgttga

SEQ ID NO: 557162 - DNA, 19 bp, Mus musculus
  siRNA target sequence for C530046K17Rik (NM_146090.2,1097-1115).
gaagcttgttgttgagtta

SEQ ID NO: 557163 - DNA, 19 bp, Mus musculus
  siRNA target sequence for Car1 (NM_009799.1,189-207).
cagcatctcctataatcct

SEQ ID NO: 557164 - DNA, 19 bp, Mus musculus
  siRNA target sequence for Car1 (NM_009799.1,215-233).
ccaaagaaattgttaacgt

SEQ ID NO: 557165 - DNA, 19 bp, Mus musculus
  siRNA target sequence for Car1 (NM_009799.1,226-244).
gttaacgtgggacattctt

SEQ ID NO: 557166 - DNA, 19 bp, Mus musculus
  siRNA target sequence for Car1 (NM_009799.1,259-277).
gatgacagtagcaaccaat

SEQ ID NO: 557167 - DNA, 19 bp, Mus musculus
  siRNA target sequence for Car1 (NM_009799.1,269-287).
gcaaccaatctgttctgaa

SEQ ID NO: 557168 - DNA, 19 bp, Mus musculus
  siRNA target sequence for Car1 (NM_009799.1,293-311).
gccctcttgctgatagcta

SEQ ID NO: 557169 - DNA, 19 bp, Mus musculus
  siRNA target sequence for Car1 (NM_009799.1,313-331).
cggctcactcagttccatt

SEQ ID NO: 557170 - DNA, 19 bp, Mus musculus
  siRNA target sequence for Car1 (NM_009799.1,369-387).
caccgtggatggaactaga

SEQ ID NO: 557171 - DNA, 19 bp, Mus musculus
  siRNA target sequence for Car1 (NM_009799.1,372-390).
cgtggatggaactagatat

SEQ ID NO: 557172 - DNA, 19 bp, Mus musculus
  siRNA target sequence for Car1 (NM_009799.1,375-393).
ggatggaactagatattct

SEQ ID NO: 557173 - DNA, 19 bp, Mus musculus
  siRNA target sequence for Car1 (NM_009799.1,429-447).
gtactccagtgcttctgaa

SEQ ID NO: 557174 - DNA, 19 bp, Mus musculus
  siRNA target sequence for Car1 (NM_009799.1,473-491).
caatccttggcgttttgat

SEQ ID NO: 557175 - DNA, 19 bp, Mus musculus
  siRNA target sequence for Car1 (NM_009799.1,516-534).
cctgcagaaagtacttgat

SEQ ID NO: 557176 - DNA, 19 bp, Mus musculus
  siRNA target sequence for Car1 (NM_009799.1,535-553).
gctctaaactcagttaaaa

SEQ ID NO: 557177 - DNA, 19 bp, Mus musculus
  siRNA target sequence for Car11 (NM_009800.2,911-929).
ctcaaccgggacactatca

SEQ ID NO: 557178 - DNA, 19 bp, Mus musculus
  siRNA target sequence for Car11 (NM_009800.2,928-946).
cacccgaatctcctacaaa

SEQ ID NO: 557179 - DNA, 19 bp, Mus musculus
  siRNA target sequence for Car11 (NM_009800.2,930-948).
cccgaatctcctacaaaaa

SEQ ID NO: 557180 - DNA, 19 bp, Mus musculus
  siRNA target sequence for Car11 (NM_009800.2,933-951).
gaatctcctacaaaaatga

SEQ ID NO: 557181 - DNA, 19 bp, Mus musculus
  siRNA target sequence for Car11 (NM_009800.2,1069-1087).
catcgacagggctctcaat

SEQ ID NO: 557182 - DNA, 19 bp, Mus musculus
  siRNA target sequence for Car11 (NM_009800.2,1072-1090).
cgacagggctctcaatatt

SEQ ID NO: 557183 - DNA, 19 bp, Mus musculus
  siRNA target sequence for Car11 (NM_009800.2,1073-1091).
gacagggctctcaatatta

SEQ ID NO: 557184 - DNA, 19 bp, Mus musculus
  siRNA target sequence for Car13 (NM_024495.2,67-85).
cacaacggtcccattcact

SEQ ID NO: 557185 - DNA, 19 bp, Mus musculus
  siRNA target sequence for Car13 (NM_024495.2,76-94).
cccattcactggaatgaat

SEQ ID NO: 557186 - DNA, 19 bp, Mus musculus
  siRNA target sequence for Car13 (NM_024495.2,77-95).
ccattcactggaatgaatt

SEQ ID NO: 557187 - DNA, 19 bp, Mus musculus
  siRNA target sequence for Car13 (NM_024495.2,120-138).
gcagtctccaattgagatt

SEQ ID NO: 557188 - DNA, 19 bp, Mus musculus
  siRNA target sequence for Car13 (NM_024495.2,167-185).
cactccgacctctcagtat

SEQ ID NO: 557189 - DNA, 19 bp, Mus musculus
  siRNA target sequence for Car13 (NM_024495.2,169-187).
ctccgacctctcagtatca

SEQ ID NO: 557190 - DNA, 19 bp, Mus musculus
  siRNA target sequence for Car13 (NM_024495.2,172-190).
cgacctctcagtatcaagt

SEQ ID NO: 557191 - DNA, 19 bp, Mus musculus
  siRNA target sequence for Car13 (NM_024495.2,173-191).
gacctctcagtatcaagta

SEQ ID NO: 557192 - DNA, 19 bp, Mus musculus
  siRNA target sequence for Car13 (NM_024495.2,176-194).
ctctcagtatcaagtatga

SEQ ID NO: 557193 - DNA, 19 bp, Mus musculus
  siRNA target sequence for Car13 (NM_024495.2,196-214).
cctgcctcagctaaaatca

SEQ ID NO: 557194 - DNA, 19 bp, Mus musculus
  siRNA target sequence for Car13 (NM_024495.2,197-215).
ctgcctcagctaaaatcat

SEQ ID NO: 557195 - DNA, 19 bp, Mus musculus
  siRNA target sequence for Car13 (NM_024495.2,205-223).
gctaaaatcatcagcaata

SEQ ID NO: 557196 - DNA, 19 bp, Mus musculus
  siRNA target sequence for Car13 (NM_024495.2,250-268).
gacgacacggaggacaaat

SEQ ID NO: 557197 - DNA, 19 bp, Mus musculus
  siRNA target sequence for Car13 (NM_024495.2,255-273).
cacggaggacaaatcagtt

SEQ ID NO: 557198 - DNA, 19 bp, Mus musculus
  siRNA target sequence for Car13 (NM_024495.2,305-323).
ggttgcggcagttccattt

SEQ ID NO: 557199 - DNA, 19 bp, Mus musculus
  siRNA target sequence for Car13 (NM_024495.2,383-401).
ctgcagagctgcatgttgt

SEQ ID NO: 557200 - DNA, 19 bp, Mus musculus
  siRNA target sequence for Car13 (NM_024495.2,462-480).
ggctgtcctgggagtattt

SEQ ID NO: 557201 - DNA, 19 bp, Mus musculus
  siRNA target sequence for Car13 (NM_024495.2,502-520).
cctcaactgcaaaagatca

SEQ ID NO: 557202 - DNA, 19 bp, Mus musculus
  siRNA target sequence for Car13 (NM_024495.2,508-526).
ctgcaaaagatcactgata

SEQ ID NO: 557203 - DNA, 19 bp, Mus musculus
  siRNA target sequence for Car13 (NM_024495.2,523-541).
gatattttggattccataa

SEQ ID NO: 557204 - DNA, 19 bp, Mus musculus
  siRNA target sequence for Car13 (NM_024495.2,556-574).
caaacacggttcacaaatt

SEQ ID NO: 557205 - DNA, 19 bp, Mus musculus
  siRNA target sequence for Car13 (NM_024495.2,560-578).
cacggttcacaaattttga

SEQ ID NO: 557206 - DNA, 19 bp, Mus musculus
  siRNA target sequence for Car13 (NM_024495.2,658-676).
gtcacgtggattgttttaa

SEQ ID NO: 557207 - DNA, 19 bp, Mus musculus
  siRNA target sequence for Car13 (NM_024495.2,670-688).
gttttaaaacaacctataa

SEQ ID NO: 557208 - DNA, 19 bp, Mus musculus
  siRNA target sequence for Car13 (NM_024495.2,747-765).
gagtgcggcttttttgtta

SEQ ID NO: 557209 - DNA, 19 bp, Mus musculus
  siRNA target sequence for Car13 (NM_024495.2,751-769).
gcggcttttttgttaagca

SEQ ID NO: 557210 - DNA, 19 bp, Mus musculus
  siRNA target sequence for Car14 (NM_011797.1,319-337).
gggtcaccactggacatat

SEQ ID NO: 557211 - DNA, 19 bp, Mus musculus
  siRNA target sequence for Car14 (NM_011797.1,321-339).
gtcaccactggacatatga

SEQ ID NO: 557212 - DNA, 19 bp, Mus musculus
  siRNA target sequence for Car14 (NM_011797.1,395-413).
gcccagtcccccatcaata

SEQ ID NO: 557213 - DNA, 19 bp, Mus musculus
  siRNA target sequence for Car14 (NM_011797.1,453-471).
ctgtacagccccatggata

SEQ ID NO: 557214 - DNA, 19 bp, Mus musculus
  siRNA target sequence for Car14 (NM_011797.1,491-509).
cctttggatctacacaata

SEQ ID NO: 557215 - DNA, 19 bp, Mus musculus
  siRNA target sequence for Car14 (NM_011797.1,492-510).
ctttggatctacacaataa

SEQ ID NO: 557216 - DNA, 19 bp, Mus musculus
  siRNA target sequence for Car14 (NM_011797.1,554-572).
ggtggactgccccgaaaat

SEQ ID NO: 557217 - DNA, 19 bp, Mus musculus
  siRNA target sequence for Car14 (NM_011797.1,555-573).
gtggactgccccgaaaata

SEQ ID NO: 557218 - DNA, 19 bp, Mus musculus
  siRNA target sequence for Car14 (NM_011797.1,557-575).
ggactgccccgaaaataca

SEQ ID NO: 557219 - DNA, 19 bp, Mus musculus
  siRNA target sequence for Car14 (NM_011797.1,760-778).
ggtgggcgagactgagaat

SEQ ID NO: 557220 - DNA, 19 bp, Mus musculus
  siRNA target sequence for Car14 (NM_011797.1,769-787).
gactgagaatccagcttat

SEQ ID NO: 557221 - DNA, 19 bp, Mus musculus
  siRNA target sequence for Car14 (NM_011797.1,771-789).
ctgagaatccagcttatga

SEQ ID NO: 557222 - DNA, 19 bp, Mus musculus
  siRNA target sequence for Car14 (NM_011797.1,793-811).
cattctgagtcgtctacat

SEQ ID NO: 557223 - DNA, 19 bp, Mus musculus
  siRNA target sequence for Car14 (NM_011797.1,803-821).
cgtctacatgaaataagat

SEQ ID NO: 557224 - DNA, 19 bp, Mus musculus
  siRNA target sequence for Car14 (NM_011797.1,804-822).
gtctacatgaaataagata

SEQ ID NO: 557225 - DNA, 19 bp, Mus musculus
  siRNA target sequence for Car14 (NM_011797.1,806-824).
ctacatgaaataagataca

SEQ ID NO: 557226 - DNA, 19 bp, Mus musculus
  siRNA target sequence for Car14 (NM_011797.1,960-978).
gaagggcccagatttcaat

SEQ ID NO: 557227 - DNA, 19 bp, Mus musculus
  siRNA target sequence for Car14 (NM_011797.1,1037-1055).
ccccttgtacagaactaca

SEQ ID NO: 557228 - DNA, 19 bp, Mus musculus
  siRNA target sequence for Car14 (NM_011797.1,1106-1124).
gcaggaccactgtatacca

SEQ ID NO: 557229 - DNA, 19 bp, Mus musculus
  siRNA target sequence for Car14 (NM_011797.1,1140-1158).
gtctaggtgtgggaatctt

SEQ ID NO: 557230 - DNA, 19 bp, Mus musculus
  siRNA target sequence for Car15 (NM_030558.2,103-121).
cagcttcctccttatacaa

SEQ ID NO: 557231 - DNA, 19 bp, Mus musculus
  siRNA target sequence for Car15 (NM_030558.2,225-243).
caacccagtcccctatcaa

SEQ ID NO: 557232 - DNA, 19 bp, Mus musculus
  siRNA target sequence for Car15 (NM_030558.2,263-281).
cagcgggactacactctta

SEQ ID NO: 557233 - DNA, 19 bp, Mus musculus
  siRNA target sequence for Car15 (NM_030558.2,351-369).
cagtgctacttcgagtaaa

SEQ ID NO: 557234 - DNA, 19 bp, Mus musculus
  siRNA target sequence for Car15 (NM_030558.2,353-371).
gtgctacttcgagtaaatt

SEQ ID NO: 557235 - DNA, 19 bp, Mus musculus
  siRNA target sequence for Car15 (NM_030558.2,524-542).
gtccacatgaacacaaagt

SEQ ID NO: 557236 - DNA, 19 bp, Mus musculus
  siRNA target sequence for Car15 (NM_030558.2,569-587).
caaccagatgggtttgcta

SEQ ID NO: 557237 - DNA, 19 bp, Mus musculus
  siRNA target sequence for Car15 (NM_030558.2,614-632).
gacagggacaataccaatt

SEQ ID NO: 557238 - DNA, 19 bp, Mus musculus
  siRNA target sequence for Car15 (NM_030558.2,650-668).
ggcctgaaaaatttatctt

SEQ ID NO: 557239 - DNA, 19 bp, Mus musculus
  siRNA target sequence for Car15 (NM_030558.2,742-760).
gcggtactaccgatactct

SEQ ID NO: 557240 - DNA, 19 bp, Mus musculus
  siRNA target sequence for Car15 (NM_030558.2,796-814).
gctctggactgtctttgaa

SEQ ID NO: 557241 - DNA, 19 bp, Mus musculus
  siRNA target sequence for Car15 (NM_030558.2,892-910).
cagaccactcacgagtaat

SEQ ID NO: 557242 - DNA, 19 bp, Mus musculus
  siRNA target sequence for Car15 (NM_030558.2,894-912).
gaccactcacgagtaattt

SEQ ID NO: 557243 - DNA, 19 bp, Mus musculus
  siRNA target sequence for Car2 (NM_009801.3,163-181).
gcctctgctcatatcttat

SEQ ID NO: 557244 - DNA, 19 bp, Mus musculus
  siRNA target sequence for Car2 (NM_009801.3,165-183).
ctctgctcatatcttatga

SEQ ID NO: 557245 - DNA, 19 bp, Mus musculus
  siRNA target sequence for Car2 (NM_009801.3,167-185).
ctgctcatatcttatgata

SEQ ID NO: 557246 - DNA, 19 bp, Mus musculus
  siRNA target sequence for Car2 (NM_009801.3,214-232).
cggccactcctttaacgtt

SEQ ID NO: 557247 - DNA, 19 bp, Mus musculus
  siRNA target sequence for Car2 (NM_009801.3,220-238).
ctcctttaacgttgagttt

SEQ ID NO: 557248 - DNA, 19 bp, Mus musculus
  siRNA target sequence for Car2 (NM_009801.3,223-241).
ctttaacgttgagtttgat

SEQ ID NO: 557249 - DNA, 19 bp, Mus musculus
  siRNA target sequence for Car2 (NM_009801.3,282-300).
gtgactcctacagattgat

SEQ ID NO: 557250 - DNA, 19 bp, Mus musculus
  siRNA target sequence for Car2 (NM_009801.3,344-362).
gagcacactgtgaacaaaa

SEQ ID NO: 557251 - DNA, 19 bp, Mus musculus
  siRNA target sequence for Car2 (NM_009801.3,438-456).
cggatggattggctgtttt

SEQ ID NO: 557252 - DNA, 19 bp, Mus musculus
  siRNA target sequence for Car2 (NM_009801.3,515-533).
ctgcattccattaaaacaa

SEQ ID NO: 557253 - DNA, 19 bp, Mus musculus
  siRNA target sequence for Car2 (NM_009801.3,658-676).
gctcagggagcccattact

SEQ ID NO: 557254 - DNA, 19 bp, Mus musculus
  siRNA target sequence for Car2 (NM_009801.3,703-721).
ccgtacgctgaacttcaat

SEQ ID NO: 557255 - DNA, 19 bp, Mus musculus
  siRNA target sequence for Car2 (NM_009801.3,767-785).
gctcagccgctaaagaata

SEQ ID NO: 557256 - DNA, 19 bp, Mus musculus
  siRNA target sequence for Car2 (NM_009801.3,770-788).
cagccgctaaagaatagaa

SEQ ID NO: 557257 - DNA, 19 bp, Mus musculus
  siRNA target sequence for Car2 (NM_009801.3,773-791).
ccgctaaagaatagaaaga

SEQ ID NO: 557258 - DNA, 19 bp, Mus musculus
  siRNA target sequence for Car2 (NM_009801.3,774-792).
cgctaaagaatagaaagat

SEQ ID NO: 557259 - DNA, 19 bp, Mus musculus
  siRNA target sequence for Car3 (NM_007606.2,81-99).
ggcatgaactttatccaat

SEQ ID NO: 557260 - DNA, 19 bp, Mus musculus
  siRNA target sequence for Car3 (NM_007606.2,122-140).
cccattgaactgcatacta

SEQ ID NO: 557261 - DNA, 19 bp, Mus musculus
  siRNA target sequence for Car3 (NM_007606.2,124-142).
cattgaactgcatactaaa

SEQ ID NO: 557262 - DNA, 19 bp, Mus musculus
  siRNA target sequence for Car3 (NM_007606.2,128-146).
gaactgcatactaaagaca

SEQ ID NO: 557263 - DNA, 19 bp, Mus musculus
  siRNA target sequence for Car3 (NM_007606.2,226-244).
gacctgcagagttgtgttt

SEQ ID NO: 557264 - DNA, 19 bp, Mus musculus
  siRNA target sequence for Car3 (NM_007606.2,228-246).
cctgcagagttgtgtttga

SEQ ID NO: 557265 - DNA, 19 bp, Mus musculus
  siRNA target sequence for Car3 (NM_007606.2,357-375).
ccgtggacggagtaaaata

SEQ ID NO: 557266 - DNA, 19 bp, Mus musculus
  siRNA target sequence for Car3 (NM_007606.2,495-513).
gcgagttccagattcttct

SEQ ID NO: 557267 - DNA, 19 bp, Mus musculus
  siRNA target sequence for Car3 (NM_007606.2,496-514).
cgagttccagattcttctt

SEQ ID NO: 557268 - DNA, 19 bp, Mus musculus
  siRNA target sequence for Car3 (NM_007606.2,499-517).
gttccagattcttcttgat

SEQ ID NO: 557269 - DNA, 19 bp, Mus musculus
  siRNA target sequence for Car3 (NM_007606.2,550-568).
ggccccttttacacacttt

SEQ ID NO: 557270 - DNA, 19 bp, Mus musculus
  siRNA target sequence for Car3 (NM_007606.2,552-570).
ccccttttacacactttga

SEQ ID NO: 557271 - DNA, 19 bp, Mus musculus
  siRNA target sequence for Car3 (NM_007606.2,587-605).
cctgcttgccgggactatt

SEQ ID NO: 557272 - DNA, 19 bp, Mus musculus
  siRNA target sequence for Car3 (NM_007606.2,590-608).
gcttgccgggactattgga

SEQ ID NO: 557273 - DNA, 19 bp, Mus musculus
  siRNA target sequence for Car3 (NM_007606.2,718-736).
cttctccagcgcagagaat

SEQ ID NO: 557274 - DNA, 19 bp, Mus musculus
  siRNA target sequence for Car4 (NM_007607.1,107-125).
ctggtgctatgagattcaa

SEQ ID NO: 557275 - DNA, 19 bp, Mus musculus
  siRNA target sequence for Car4 (NM_007607.1,172-190).
gagcctgtaaggagaatca

SEQ ID NO: 557276 - DNA, 19 bp, Mus musculus
  siRNA target sequence for Car4 (NM_007607.1,284-302).
gccaattaagaacaatcaa

SEQ ID NO: 557277 - DNA, 19 bp, Mus musculus
  siRNA target sequence for Car4 (NM_007607.1,324-342).
gggggaggtgcgtgcatta

SEQ ID NO: 557278 - DNA, 19 bp, Mus musculus
  siRNA target sequence for Car4 (NM_007607.1,325-343).
ggggaggtgcgtgcattat

SEQ ID NO: 557279 - DNA, 19 bp, Mus musculus
  siRNA target sequence for Car4 (NM_007607.1,413-431).
cggttcagagcacagtatt

SEQ ID NO: 557280 - DNA, 19 bp, Mus musculus
  siRNA target sequence for Car4 (NM_007607.1,415-433).
gttcagagcacagtattga

SEQ ID NO: 557281 - DNA, 19 bp, Mus musculus
  siRNA target sequence for Car4 (NM_007607.1,465-483).
gtgcacaagaagttgacat

SEQ ID NO: 557282 - DNA, 19 bp, Mus musculus
  siRNA target sequence for Car4 (NM_007607.1,468-486).
cacaagaagttgacatcta

SEQ ID NO: 557283 - DNA, 19 bp, Mus musculus
  siRNA target sequence for Car4 (NM_007607.1,494-512).
ggactcgaaggacaagttt

SEQ ID NO: 557284 - DNA, 19 bp, Mus musculus
  siRNA target sequence for Car4 (NM_007607.1,513-531).
gcagtgctggcatttatga

SEQ ID NO: 557285 - DNA, 19 bp, Mus musculus
  siRNA target sequence for Car4 (NM_007607.1,645-663).
cttcccccgagcaccaaaa

SEQ ID NO: 557286 - DNA, 19 bp, Mus musculus
  siRNA target sequence for Car4 (NM_007607.1,649-667).
ccccgagcaccaaaatgta

SEQ ID NO: 557287 - DNA, 19 bp, Mus musculus
  siRNA target sequence for Car4 (NM_007607.1,655-673).
gcaccaaaatgtataccta

SEQ ID NO: 557288 - DNA, 19 bp, Mus musculus
  siRNA target sequence for Car4 (NM_007607.1,678-696).
cgttacaatggctcactaa

SEQ ID NO: 557289 - DNA, 19 bp, Mus musculus
  siRNA target sequence for Car4 (NM_007607.1,779-797).
ctcaaaaaatctgtactat

SEQ ID NO: 557290 - DNA, 19 bp, Mus musculus
  siRNA target sequence for Car4 (NM_007607.1,853-871).
gaaaacgccaggtgttcaa

SEQ ID NO: 557291 - DNA, 19 bp, Mus musculus
  siRNA target sequence for Car5a (NM_007608.1,524-542).
cagtggacggccataccta

SEQ ID NO: 557292 - DNA, 19 bp, Mus musculus
  siRNA target sequence for Car5a (NM_007608.1,623-641).
cggtcatcggcgtgtttct

SEQ ID NO: 557293 - DNA, 19 bp, Mus musculus
  siRNA target sequence for Car5a (NM_007608.1,625-643).
gtcatcggcgtgtttctga

SEQ ID NO: 557294 - DNA, 19 bp, Mus musculus
  siRNA target sequence for Car5a (NM_007608.1,682-700).
gatgtcttgccggaagtaa

SEQ ID NO: 557295 - DNA, 19 bp, Mus musculus
  siRNA target sequence for Car5a (NM_007608.1,754-772).
cctgcctgccgggattact

SEQ ID NO: 557296 - DNA, 19 bp, Mus musculus
  siRNA target sequence for Car5b (NM_019513.1,159-177).
gaatcacctgagagtgatt

SEQ ID NO: 557297 - DNA, 19 bp, Mus musculus
  siRNA target sequence for Car5b (NM_019513.1,165-183).
cctgagagtgattctacaa

SEQ ID NO: 557298 - DNA, 19 bp, Mus musculus
  siRNA target sequence for Car5b (NM_019513.1,356-374).
gatggagggacagtgttta

SEQ ID NO: 557299 - DNA, 19 bp, Mus musculus
  siRNA target sequence for Car5b (NM_019513.1,392-410).
cactcaccatttcttatga

SEQ ID NO: 557300 - DNA, 19 bp, Mus musculus
  siRNA target sequence for Car5b (NM_019513.1,434-452).
ggaacaatgggtactcttt

SEQ ID NO: 557301 - DNA, 19 bp, Mus musculus
  siRNA target sequence for Car5b (NM_019513.1,435-453).
gaacaatgggtactctttt

SEQ ID NO: 557302 - DNA, 19 bp, Mus musculus
  siRNA target sequence for Car5b (NM_019513.1,438-456).
caatgggtactcttttctt

SEQ ID NO: 557303 - DNA, 19 bp, Mus musculus
  siRNA target sequence for Car5b (NM_019513.1,573-591).
gcacaccgtggacagtaaa

SEQ ID NO: 557304 - DNA, 19 bp, Mus musculus
  siRNA target sequence for Car5b (NM_019513.1,574-592).
cacaccgtggacagtaaat

SEQ ID NO: 557305 - DNA, 19 bp, Mus musculus
  siRNA target sequence for Car5b (NM_019513.1,627-645).
cgcagtcaaatttgaaagt

SEQ ID NO: 557306 - DNA, 19 bp, Mus musculus
  siRNA target sequence for Car5b (NM_019513.1,628-646).
gcagtcaaatttgaaagtt

SEQ ID NO: 557307 - DNA, 19 bp, Mus musculus
  siRNA target sequence for Car5b (NM_019513.1,811-829).
cctacttgcccagattact

SEQ ID NO: 557308 - DNA, 19 bp, Mus musculus
  siRNA target sequence for Car5b (NM_019513.1,870-888).
gtctgtcacctggatcatt

SEQ ID NO: 557309 - DNA, 19 bp, Mus musculus
  siRNA target sequence for Car5b (NM_019513.1,872-890).
ctgtcacctggatcattaa

SEQ ID NO: 557310 - DNA, 19 bp, Mus musculus
  siRNA target sequence for Car5b (NM_019513.1,874-892).
gtcacctggatcattaaga

SEQ ID NO: 557311 - DNA, 19 bp, Mus musculus
  siRNA target sequence for Car5b (NM_019513.1,1028-1046).
catccttccgccatgacta

SEQ ID NO: 557312 - DNA, 19 bp, Mus musculus
  siRNA target sequence for Car5b (NM_019513.1,1031-1049).
ccttccgccatgactatgt

SEQ ID NO: 557313 - DNA, 19 bp, Mus musculus
  siRNA target sequence for Car6 (NM_009802.1,339-357).
ctggagttcactatgacta

SEQ ID NO: 557314 - DNA, 19 bp, Mus musculus
  siRNA target sequence for Car6 (NM_009802.1,390-408).
ccctccatgtaccttgaaa

SEQ ID NO: 557315 - DNA, 19 bp, Mus musculus
  siRNA target sequence for Car6 (NM_009802.1,412-430).
ctgacggcactgagttcat

SEQ ID NO: 557316 - DNA, 19 bp, Mus musculus
  siRNA target sequence for Car6 (NM_009802.1,414-432).
gacggcactgagttcatct

SEQ ID NO: 557317 - DNA, 19 bp, Mus musculus
  siRNA target sequence for Car6 (NM_009802.1,418-436).
gcactgagttcatctcaaa

SEQ ID NO: 557318 - DNA, 19 bp, Mus musculus
  siRNA target sequence for Car6 (NM_009802.1,431-449).
ctcaaaggcctttcacttt

SEQ ID NO: 557319 - DNA, 19 bp, Mus musculus
  siRNA target sequence for Car6 (NM_009802.1,498-516).
gatgggatcaggagtataa

SEQ ID NO: 557320 - DNA, 19 bp, Mus musculus
  siRNA target sequence for Car6 (NM_009802.1,502-520).
ggatcaggagtataatgga

SEQ ID NO: 557321 - DNA, 19 bp, Mus musculus
  siRNA target sequence for Car6 (NM_009802.1,525-543).
cactttgttcacttcaata

SEQ ID NO: 557322 - DNA, 19 bp, Mus musculus
  siRNA target sequence for Car6 (NM_009802.1,531-549).
gttcacttcaataaggaat

SEQ ID NO: 557323 - DNA, 19 bp, Mus musculus
  siRNA target sequence for Car6 (NM_009802.1,561-579).
gagaatgccaaggatcaaa

SEQ ID NO: 557324 - DNA, 19 bp, Mus musculus
  siRNA target sequence for Car6 (NM_009802.1,594-612).
gtgttagccgtcttgttta

SEQ ID NO: 557325 - DNA, 19 bp, Mus musculus
  siRNA target sequence for Car6 (NM_009802.1,601-619).
ccgtcttgtttaagattga

SEQ ID NO: 557326 - DNA, 19 bp, Mus musculus
  siRNA target sequence for Car6 (NM_009802.1,620-638).
cgagtatgccgaaaacact

SEQ ID NO: 557327 - DNA, 19 bp, Mus musculus
  siRNA target sequence for Car6 (NM_009802.1,621-639).
gagtatgccgaaaacactt

SEQ ID NO: 557328 - DNA, 19 bp, Mus musculus
  siRNA target sequence for Car6 (NM_009802.1,627-645).
gccgaaaacacttactaca

SEQ ID NO: 557329 - DNA, 19 bp, Mus musculus
  siRNA target sequence for Car6 (NM_009802.1,637-655).
cttactacagcgacatcat

SEQ ID NO: 557330 - DNA, 19 bp, Mus musculus
  siRNA target sequence for Car6 (NM_009802.1,735-753).
gacgtccaccactattaca

SEQ ID NO: 557331 - DNA, 19 bp, Mus musculus
  siRNA target sequence for Car6 (NM_009802.1,778-796).
ccccctgcacagagaatgt

SEQ ID NO: 557332 - DNA, 19 bp, Mus musculus
  siRNA target sequence for Car7 (NM_053070.1,113-131).
ggacgacggcccttcaaat

SEQ ID NO: 557333 - DNA, 19 bp, Mus musculus
  siRNA target sequence for Car7 (NM_053070.1,114-132).
gacgacggcccttcaaatt

SEQ ID NO: 557334 - DNA, 19 bp, Mus musculus
  siRNA target sequence for Car7 (NM_053070.1,164-182).
ccgccagtcacccatcaat

SEQ ID NO: 557335 - DNA, 19 bp, Mus musculus
  siRNA target sequence for Car7 (NM_053070.1,165-183).
cgccagtcacccatcaata

SEQ ID NO: 557336 - DNA, 19 bp, Mus musculus
  siRNA target sequence for Car7 (NM_053070.1,174-192).
cccatcaatatcatatcca

SEQ ID NO: 557337 - DNA, 19 bp, Mus musculus
  siRNA target sequence for Car7 (NM_053070.1,219-237).
cagccactggaacttttct

SEQ ID NO: 557338 - DNA, 19 bp, Mus musculus
  siRNA target sequence for Car7 (NM_053070.1,221-239).
gccactggaacttttctat

SEQ ID NO: 557339 - DNA, 19 bp, Mus musculus
  siRNA target sequence for Car7 (NM_053070.1,574-592).
ccctctacatggttcgatt

SEQ ID NO: 557340 - DNA, 19 bp, Mus musculus
  siRNA target sequence for Car7 (NM_053070.1,575-593).
cctctacatggttcgattt

SEQ ID NO: 557341 - DNA, 19 bp, Mus musculus
  siRNA target sequence for Car7 (NM_053070.1,843-861).
ggccgagtggtcaaagcat

SEQ ID NO: 557342 - DNA, 19 bp, Mus musculus
  siRNA target sequence for Car8 (NM_007592.1,141-159).
gttgagtggggcttagtgt

SEQ ID NO: 557343 - DNA, 19 bp, Mus musculus
  siRNA target sequence for Car8 (NM_007592.1,183-201).
cagtcacctatcaacctaa

SEQ ID NO: 557344 - DNA, 19 bp, Mus musculus
  siRNA target sequence for Car8 (NM_007592.1,240-258).
gtccgcctgtctccaaatt

SEQ ID NO: 557345 - DNA, 19 bp, Mus musculus
  siRNA target sequence for Car8 (NM_007592.1,242-260).
ccgcctgtctccaaattat

SEQ ID NO: 557346 - DNA, 19 bp, Mus musculus
  siRNA target sequence for Car8 (NM_007592.1,244-262).
gcctgtctccaaattatgt

SEQ ID NO: 557347 - DNA, 19 bp, Mus musculus
  siRNA target sequence for Car8 (NM_007592.1,290-308).
cgatggacacaccattcaa

SEQ ID NO: 557348 - DNA, 19 bp, Mus musculus
  siRNA target sequence for Car8 (NM_007592.1,295-313).
gacacaccattcaagtcat

SEQ ID NO: 557349 - DNA, 19 bp, Mus musculus
  siRNA target sequence for Car8 (NM_007592.1,369-387).
gagctgtatgaagttagat

SEQ ID NO: 557350 - DNA, 19 bp, Mus musculus
  siRNA target sequence for Car8 (NM_007592.1,420-438).
gagcacacggtcaatttca

SEQ ID NO: 557351 - DNA, 19 bp, Mus musculus
  siRNA target sequence for Car8 (NM_007592.1,518-536).
ccatggtatcgccatcatt

SEQ ID NO: 557352 - DNA, 19 bp, Mus musculus
  siRNA target sequence for Car8 (NM_007592.1,527-545).
cgccatcattgcactattt

SEQ ID NO: 557353 - DNA, 19 bp, Mus musculus
  siRNA target sequence for Car8 (NM_007592.1,551-569).
gatcgggaaggaacatgtt

SEQ ID NO: 557354 - DNA, 19 bp, Mus musculus
  siRNA target sequence for Car8 (NM_007592.1,590-608).
gatcctccaggatattcaa

SEQ ID NO: 557355 - DNA, 19 bp, Mus musculus
  siRNA target sequence for Car8 (NM_007592.1,606-624).
caatataagggaaaatcca

SEQ ID NO: 557356 - DNA, 19 bp, Mus musculus
  siRNA target sequence for Car8 (NM_007592.1,666-684).
cctcttctgcgggattact

SEQ ID NO: 557357 - DNA, 19 bp, Mus musculus
  siRNA target sequence for Car8 (NM_007592.1,676-694).
gggattactgggtctatga

SEQ ID NO: 557358 - DNA, 19 bp, Mus musculus
  siRNA target sequence for Car8 (NM_007592.1,677-695).
ggattactgggtctatgaa

SEQ ID NO: 557359 - DNA, 19 bp, Mus musculus
  siRNA target sequence for Car8 (NM_007592.1,686-704).
ggtctatgaaggatctctt

SEQ ID NO: 557360 - DNA, 19 bp, Mus musculus
  siRNA target sequence for Car8 (NM_007592.1,726-744).
ggagttacctggatattat

SEQ ID NO: 557361 - DNA, 19 bp, Mus musculus
  siRNA target sequence for Car8 (NM_007592.1,746-764).
ccgataccctttaactata

SEQ ID NO: 557362 - DNA, 19 bp, Mus musculus
  siRNA target sequence for Car8 (NM_007592.1,747-765).
cgataccctttaactatat

SEQ ID NO: 557363 - DNA, 19 bp, Mus musculus
  siRNA target sequence for Car8 (NM_007592.1,766-784).
cccagatgcagatagaaga

SEQ ID NO: 557364 - DNA, 19 bp, Mus musculus
  siRNA target sequence for Cryz (NM_009968.1,103-121).
gcaactgggcagaagttga

SEQ ID NO: 557365 - DNA, 19 bp, Mus musculus
  siRNA target sequence for Cryz (NM_009968.1,123-141).
gagggctattcgagtgttt

SEQ ID NO: 557366 - DNA, 19 bp, Mus musculus
  siRNA target sequence for Cryz (NM_009968.1,125-143).
gggctattcgagtgtttga

SEQ ID NO: 557367 - DNA, 19 bp, Mus musculus
  siRNA target sequence for Cryz (NM_009968.1,127-145).
gctattcgagtgtttgagt

SEQ ID NO: 557368 - DNA, 19 bp, Mus musculus
  siRNA target sequence for Cryz (NM_009968.1,128-146).
ctattcgagtgtttgagtt

SEQ ID NO: 557369 - DNA, 19 bp, Mus musculus
  siRNA target sequence for Cryz (NM_009968.1,203-221).
gccatcaggtcctaatcaa

SEQ ID NO: 557370 - DNA, 19 bp, Mus musculus
  siRNA target sequence for Cryz (NM_009968.1,243-261).
cccagtagagacatacatt

SEQ ID NO: 557371 - DNA, 19 bp, Mus musculus
  siRNA target sequence for Cryz (NM_009968.1,270-288).
ggcctacagtcgaaaacct

SEQ ID NO: 557372 - DNA, 19 bp, Mus musculus
  siRNA target sequence for Cryz (NM_009968.1,316-334).
gtggctgggatcatagaat

SEQ ID NO: 557373 - DNA, 19 bp, Mus musculus
  siRNA target sequence for Cryz (NM_009968.1,424-442).
gcagccgatgacactatct

SEQ ID NO: 557374 - DNA, 19 bp, Mus musculus
  siRNA target sequence for Cryz (NM_009968.1,425-443).
cagccgatgacactatcta

SEQ ID NO: 557375 - DNA, 19 bp, Mus musculus
  siRNA target sequence for Cryz (NM_009968.1,484-502).
ctggggatcccgtacttca

SEQ ID NO: 557376 - DNA, 19 bp, Mus musculus
  siRNA target sequence for Cryz (NM_009968.1,542-560).
ctggcgaaagcgttttggt

SEQ ID NO: 557377 - DNA, 19 bp, Mus musculus
  siRNA target sequence for Cryz (NM_009968.1,675-693).
cggagcccacgaagtgttt

SEQ ID NO: 557378 - DNA, 19 bp, Mus musculus
  siRNA target sequence for Cryz (NM_009968.1,680-698).
cccacgaagtgtttaatca

SEQ ID NO: 557379 - DNA, 19 bp, Mus musculus
  siRNA target sequence for Cryz (NM_009968.1,682-700).
cacgaagtgtttaatcaca

SEQ ID NO: 557380 - DNA, 19 bp, Mus musculus
  siRNA target sequence for Cryz (NM_009968.1,684-702).
cgaagtgtttaatcacaaa

SEQ ID NO: 557381 - DNA, 19 bp, Mus musculus
  siRNA target sequence for Cryz (NM_009968.1,706-724).
gccaactatattgataaaa

SEQ ID NO: 557382 - DNA, 19 bp, Mus musculus
  siRNA target sequence for Cryz (NM_009968.1,707-725).
ccaactatattgataaaat

SEQ ID NO: 557383 - DNA, 19 bp, Mus musculus
  siRNA target sequence for Cryz (NM_009968.1,750-768).
caagggggttgatgtgatt

SEQ ID NO: 557384 - DNA, 19 bp, Mus musculus
  siRNA target sequence for Cryz (NM_009968.1,757-775).
gttgatgtgattattgaga

SEQ ID NO: 557385 - DNA, 19 bp, Mus musculus
  siRNA target sequence for Cryz (NM_009968.1,778-796).
ctggcgaatgagaacctta

SEQ ID NO: 557386 - DNA, 19 bp, Mus musculus
  siRNA target sequence for Cryz (NM_009968.1,782-800).
cgaatgagaaccttagcaa

SEQ ID NO: 557387 - DNA, 19 bp, Mus musculus
  siRNA target sequence for Cryz (NM_009968.1,848-866).
gtcgaggtcccattgagat

SEQ ID NO: 557388 - DNA, 19 bp, Mus musculus
  siRNA target sequence for Cryz (NM_009968.1,851-869).
gaggtcccattgagataaa

SEQ ID NO: 557389 - DNA, 19 bp, Mus musculus
  siRNA target sequence for Cryz (NM_009968.1,930-948).
caaggaggaatttcaacaa

SEQ ID NO: 557390 - DNA, 19 bp, Mus musculus
  siRNA target sequence for Cryz (NM_009968.1,957-975).
ccttctccaagcaggaata

SEQ ID NO: 557391 - DNA, 19 bp, Mus musculus
  siRNA target sequence for Cryz (NM_009968.1,1035-1053).
ggcccacgaagatatcatt

SEQ ID NO: 557392 - DNA, 19 bp, Mus musculus
  siRNA target sequence for Cryz (NM_009968.1,1037-1055).
cccacgaagatatcattca

SEQ ID NO: 557393 - DNA, 19 bp, Mus musculus
  siRNA target sequence for Cryz (NM_009968.1,1061-1079).
gtgggaagacggggaaaat

SEQ ID NO: 557394 - DNA, 19 bp, Mus musculus
  siRNA target sequence for Cryzl1 (NM_133679.1,51-69).
gaaaggcttgtattttcaa

SEQ ID NO: 557395 - DNA, 19 bp, Mus musculus
  siRNA target sequence for Cryzl1 (NM_133679.1,85-103).
gaagaagtaacatttgtat

SEQ ID NO: 557396 - DNA, 19 bp, Mus musculus
  siRNA target sequence for Cryzl1 (NM_133679.1,147-165).
gagagttcaagttaaagct

SEQ ID NO: 557397 - DNA, 19 bp, Mus musculus
  siRNA target sequence for Cryzl1 (NM_133679.1,272-290).
ggaaggtaacgttctttca

SEQ ID NO: 557398 - DNA, 19 bp, Mus musculus
  siRNA target sequence for Cryzl1 (NM_133679.1,309-327).
cggaattctgcctttggat

SEQ ID NO: 557399 - DNA, 19 bp, Mus musculus
  siRNA target sequence for Cryzl1 (NM_133679.1,310-328).
ggaattctgcctttggatt

SEQ ID NO: 557400 - DNA, 19 bp, Mus musculus
  siRNA target sequence for Cryzl1 (NM_133679.1,359-377).
gagtacatgagcattacct

SEQ ID NO: 557401 - DNA, 19 bp, Mus musculus
  siRNA target sequence for Cryzl1 (NM_133679.1,367-385).
gagcattacctggttcata

SEQ ID NO: 557402 - DNA, 19 bp, Mus musculus
  siRNA target sequence for Cryzl1 (NM_133679.1,520-538).
ggcacaatagccattcagt

SEQ ID NO: 557403 - DNA, 19 bp, Mus musculus
  siRNA target sequence for Cryzl1 (NM_133679.1,521-539).
gcacaatagccattcagtt

SEQ ID NO: 557404 - DNA, 19 bp, Mus musculus
  siRNA target sequence for Cryzl1 (NM_133679.1,522-540).
cacaatagccattcagtta

SEQ ID NO: 557405 - DNA, 19 bp, Mus musculus
  siRNA target sequence for Cryzl1 (NM_133679.1,547-565).
cacagaggagccaaggtta

SEQ ID NO: 557406 - DNA, 19 bp, Mus musculus
  siRNA target sequence for Cryzl1 (NM_133679.1,553-571).
ggagccaaggttatctcaa

SEQ ID NO: 557407 - DNA, 19 bp, Mus musculus
  siRNA target sequence for Cryzl1 (NM_133679.1,585-603).
ggaggacaagcaacatctt

SEQ ID NO: 557408 - DNA, 19 bp, Mus musculus
  siRNA target sequence for Cryzl1 (NM_133679.1,589-607).
gacaagcaacatcttgaaa

SEQ ID NO: 557409 - DNA, 19 bp, Mus musculus
  siRNA target sequence for Cryzl1 (NM_133679.1,620-638).
ctatagcccgtgtgattga

SEQ ID NO: 557410 - DNA, 19 bp, Mus musculus
  siRNA target sequence for Cryzl1 (NM_133679.1,629-647).
gtgtgattgatgtgtctaa

SEQ ID NO: 557411 - DNA, 19 bp, Mus musculus
  siRNA target sequence for Cryzl1 (NM_133679.1,689-707).
gtggcctgggagtagatat

SEQ ID NO: 557412 - DNA, 19 bp, Mus musculus
  siRNA target sequence for Cryzl1 (NM_133679.1,692-710).
gcctgggagtagatattgt

SEQ ID NO: 557413 - DNA, 19 bp, Mus musculus
  siRNA target sequence for Cryzl1 (NM_133679.1,694-712).
ctgggagtagatattgtca

SEQ ID NO: 557414 - DNA, 19 bp, Mus musculus
  siRNA target sequence for Cryzl1 (NM_133679.1,715-733).
gatgcaggagtgagattat

SEQ ID NO: 557415 - DNA, 19 bp, Mus musculus
  siRNA target sequence for Cryzl1 (NM_133679.1,721-739).
ggagtgagattatatagta

SEQ ID NO: 557416 - DNA, 19 bp, Mus musculus
  siRNA target sequence for Cryzl1 (NM_133679.1,722-740).
gagtgagattatatagtaa

SEQ ID NO: 557417 - DNA, 19 bp, Mus musculus
  siRNA target sequence for Cryzl1 (NM_133679.1,726-744).
gagattatatagtaaagat

SEQ ID NO: 557418 - DNA, 19 bp, Mus musculus
  siRNA target sequence for Cryzl1 (NM_133679.1,745-763).
gatgaaccagctgtaaagt

SEQ ID NO: 557419 - DNA, 19 bp, Mus musculus
  siRNA target sequence for Cryzl1 (NM_133679.1,773-791).
cacataagcatgacatcat

SEQ ID NO: 557420 - DNA, 19 bp, Mus musculus
  siRNA target sequence for Cryzl1 (NM_133679.1,808-826).
ggaggccattgggtaacaa

SEQ ID NO: 557421 - DNA, 19 bp, Mus musculus
  siRNA target sequence for Cryzl1 (NM_133679.1,887-905).
cggtggctttccttaatga

SEQ ID NO: 557422 - DNA, 19 bp, Mus musculus
  siRNA target sequence for Cryzl1 (NM_133679.1,934-952).
cagggaaaatatctttgta

SEQ ID NO: 557423 - DNA, 19 bp, Mus musculus
  siRNA target sequence for Cyfip2 (NM_133769.1,158-176).
cagaccagcagccatgtat

SEQ ID NO: 557424 - DNA, 19 bp, Mus musculus
  siRNA target sequence for Cyfip2 (NM_133769.1,185-203).
cgccatcctccatcatgta

SEQ ID NO: 557425 - DNA, 19 bp, Mus musculus
  siRNA target sequence for Cyfip2 (NM_133769.1,198-216).
catgtaccaggctaacttt

SEQ ID NO: 557426 - DNA, 19 bp, Mus musculus
  siRNA target sequence for Cyfip2 (NM_133769.1,252-270).
gggcattgcaaggtacatt

SEQ ID NO: 557427 - DNA, 19 bp, Mus musculus
  siRNA target sequence for Cyfip2 (NM_133769.1,395-413).
ccaatcgggtcgagatcta

SEQ ID NO: 557428 - DNA, 19 bp, Mus musculus
  siRNA target sequence for Cyfip2 (NM_133769.1,532-550).
cgcaggaaggactttgtct

SEQ ID NO: 557429 - DNA, 19 bp, Mus musculus
  siRNA target sequence for Cyfip2 (NM_133769.1,596-614).
cggtcttggacgagctaaa

SEQ ID NO: 557430 - DNA, 19 bp, Mus musculus
  siRNA target sequence for Cyfip2 (NM_133769.1,893-911).
gctttggtctctatctgat

SEQ ID NO: 557431 - DNA, 19 bp, Mus musculus
  siRNA target sequence for Cyfip2 (NM_133769.1,913-931).
gacggaaatgtcagtaaca

SEQ ID NO: 557432 - DNA, 19 bp, Mus musculus
  siRNA target sequence for Cyfip2 (NM_133769.1,915-933).
cggaaatgtcagtaacatt

SEQ ID NO: 557433 - DNA, 19 bp, Mus musculus
  siRNA target sequence for Cyfip2 (NM_133769.1,954-972).
gagaatcaaccttagcaaa

SEQ ID NO: 557434 - DNA, 19 bp, Mus musculus
  siRNA target sequence for Cyfip2 (NM_133769.1,1050-1068).
gaccagtgctcactatgaa

SEQ ID NO: 557435 - DNA, 19 bp, Mus musculus
  siRNA target sequence for Cyfip2 (NM_133769.1,1058-1076).
ctcactatgaagagaacaa

SEQ ID NO: 557436 - DNA, 19 bp, Mus musculus
  siRNA target sequence for Cyfip2 (NM_133769.1,1153-1171).
gatcacatccgcttcatct

SEQ ID NO: 557437 - DNA, 19 bp, Mus musculus
  siRNA target sequence for Cyfip2 (NM_133769.1,1277-1295).
gcctgcagcttctatccaa

SEQ ID NO: 557438 - DNA, 19 bp, Mus musculus
  siRNA target sequence for Cyfip2 (NM_133769.1,1395-1413).
gagagccacgcgctacaat

SEQ ID NO: 557439 - DNA, 19 bp, Mus musculus
  siRNA target sequence for Cyfip2 (NM_133769.1,1399-1417).
gccacgcgctacaattata

SEQ ID NO: 557440 - DNA, 19 bp, Mus musculus
  siRNA target sequence for Cyfip2 (NM_133769.1,1507-1525).
caggccatccgcaacacta

SEQ ID NO: 557441 - DNA, 19 bp, Mus musculus
  siRNA target sequence for Cyfip2 (NM_133769.1,1510-1528).
gccatccgcaacactatct

SEQ ID NO: 557442 - DNA, 19 bp, Mus musculus
  siRNA target sequence for Cyfip2 (NM_133769.1,1611-1629).
cagcgttctgcaagcaatt

SEQ ID NO: 557443 - DNA, 19 bp, Mus musculus
  siRNA target sequence for Cyfip2 (NM_133769.1,1614-1632).
cgttctgcaagcaattcga

SEQ ID NO: 557444 - DNA, 19 bp, Mus musculus
  siRNA target sequence for Cyfip2 (NM_133769.1,1615-1633).
gttctgcaagcaattcgaa

SEQ ID NO: 557445 - DNA, 19 bp, Mus musculus
  siRNA target sequence for Cyfip2 (NM_133769.1,1669-1687).
cccaatgacccatgcttaa

SEQ ID NO: 557446 - DNA, 19 bp, Mus musculus
  siRNA target sequence for Cyfip2 (NM_133769.1,1671-1689).
caatgacccatgcttaaga

SEQ ID NO: 557447 - DNA, 19 bp, Mus musculus
  siRNA target sequence for Cyfip2 (NM_133769.1,1703-1721).
ccaaaggtggctttgacat

SEQ ID NO: 557448 - DNA, 19 bp, Mus musculus
  siRNA target sequence for Cyfip2 (NM_133769.1,1872-1890).
ccacaagcagtccttcttt

SEQ ID NO: 557449 - DNA, 19 bp, Mus musculus
  siRNA target sequence for Cyfip2 (NM_133769.1,1873-1891).
cacaagcagtccttctttt

SEQ ID NO: 557450 - DNA, 19 bp, Mus musculus
  siRNA target sequence for Cyfip2 (NM_133769.1,2025-2043).
gattctaacggaccatatt

SEQ ID NO: 557451 - DNA, 19 bp, Mus musculus
  siRNA target sequence for Cyfip2 (NM_133769.1,2119-2137).
gccctcaccaaattcaaaa

SEQ ID NO: 557452 - DNA, 19 bp, Mus musculus
  siRNA target sequence for Cyfip2 (NM_133769.1,2120-2138).
ccctcaccaaattcaaaaa

SEQ ID NO: 557453 - DNA, 19 bp, Mus musculus
  siRNA target sequence for Cyfip2 (NM_133769.1,2212-2230).
cagatcttcgcctactaca

SEQ ID NO: 557454 - DNA, 19 bp, Mus musculus
  siRNA target sequence for Cyfip2 (NM_133769.1,2214-2232).
gatcttcgcctactacaaa

SEQ ID NO: 557455 - DNA, 19 bp, Mus musculus
  siRNA target sequence for Cyfip2 (NM_133769.1,2248-2266).
gtcctgctggataaacgtt

SEQ ID NO: 557456 - DNA, 19 bp, Mus musculus
  siRNA target sequence for Cyfip2 (NM_133769.1,2250-2268).
cctgctggataaacgtttt

SEQ ID NO: 557457 - DNA, 19 bp, Mus musculus
  siRNA target sequence for Cyfip2 (NM_133769.1,2251-2269).
ctgctggataaacgtttta

SEQ ID NO: 557458 - DNA, 19 bp, Mus musculus
  siRNA target sequence for Cyfip2 (NM_133769.1,2253-2271).
gctggataaacgttttaga

SEQ ID NO: 557459 - DNA, 19 bp, Mus musculus
  siRNA target sequence for Cyfip2 (NM_133769.1,2270-2288).
gagctgagtgtaagaacta

SEQ ID NO: 557460 - DNA, 19 bp, Mus musculus
  siRNA target sequence for Cyfip2 (NM_133769.1,2283-2301).
gaactatggggtgatcata

SEQ ID NO: 557461 - DNA, 19 bp, Mus musculus
  siRNA target sequence for Cyfip2 (NM_133769.1,2355-2373).
gctgttggggagatcaatt

SEQ ID NO: 557462 - DNA, 19 bp, Mus musculus
  siRNA target sequence for Cyfip2 (NM_133769.1,2363-2381).
ggagatcaattgacttgaa

SEQ ID NO: 557463 - DNA, 19 bp, Mus musculus
  siRNA target sequence for Cyfip2 (NM_133769.1,2564-2582).
gagaagccaatcataacgt

SEQ ID NO: 557464 - DNA, 19 bp, Mus musculus
  siRNA target sequence for Cyfip2 (NM_133769.1,2635-2653).
gactttctccccaactact

SEQ ID NO: 557465 - DNA, 19 bp, Mus musculus
  siRNA target sequence for Cyfip2 (NM_133769.1,2740-2758).
ccttattacctctatggat

SEQ ID NO: 557466 - DNA, 19 bp, Mus musculus
  siRNA target sequence for Cyfip2 (NM_133769.1,2756-2774).
gatccaagcctctcaacat

SEQ ID NO: 557467 - DNA, 19 bp, Mus musculus
  siRNA target sequence for Cyfip2 (NM_133769.1,2776-2794).
gcctacagccacatctata

SEQ ID NO: 557468 - DNA, 19 bp, Mus musculus
  siRNA target sequence for Cyfip2 (NM_133769.1,2949-2967).
ggtgatgccgaaaatctgt

SEQ ID NO: 557469 - DNA, 19 bp, Mus musculus
  siRNA target sequence for Cyfip2 (NM_133769.1,3042-3060).
gtatgcagaactcaaaaca

SEQ ID NO: 557470 - DNA, 19 bp, Mus musculus
  siRNA target sequence for Cyfip2 (NM_133769.1,3183-3201).
gccccgagtctacatcaaa

SEQ ID NO: 557471 - DNA, 19 bp, Mus musculus
  siRNA target sequence for Cyfip2 (NM_133769.1,3185-3203).
cccgagtctacatcaaaga

SEQ ID NO: 557472 - DNA, 19 bp, Mus musculus
  siRNA target sequence for Cyfip2 (NM_133769.1,3657-3675).
cgggaaggatgagatcatt

SEQ ID NO: 557473 - DNA, 19 bp, Mus musculus
  siRNA target sequence for Cyfip2 (NM_133769.1,3658-3676).
gggaaggatgagatcatta

SEQ ID NO: 557474 - DNA, 19 bp, Mus musculus
  siRNA target sequence for Cyfip2 (NM_133769.1,3659-3677).
ggaaggatgagatcattaa

SEQ ID NO: 557475 - DNA, 19 bp, Mus musculus
  siRNA target sequence for Cyfip2 (NM_133769.1,3713-3731).
ggaagtaccagatcttgaa

SEQ ID NO: 557476 - DNA, 19 bp, Mus musculus
  siRNA target sequence for Cyfip2 (NM_133769.1,3717-3735).
gtaccagatcttgaacaat

SEQ ID NO: 557477 - DNA, 19 bp, Mus musculus
  siRNA target sequence for Cyhr1 (NM_019396.1,766-784).
gatcggctacacagaagtt

SEQ ID NO: 557478 - DNA, 19 bp, Mus musculus
  siRNA target sequence for Cyhr1 (NM_019396.1,800-818).
cgcactgatgacttcatca

SEQ ID NO: 557479 - DNA, 19 bp, Mus musculus
  siRNA target sequence for Cyhr1 (NM_019396.1,814-832).
catcacacgcctgtactat

SEQ ID NO: 557480 - DNA, 19 bp, Mus musculus
  siRNA target sequence for Cyhr1 (NM_019396.1,840-858).
cacggttcacagtactgaa

SEQ ID NO: 557481 - DNA, 19 bp, Mus musculus
  siRNA target sequence for Cyhr1 (NM_019396.1,871-889).
cctgaaggctcgtgtgaat

SEQ ID NO: 557482 - DNA, 19 bp, Mus musculus
  siRNA target sequence for Cyhr1 (NM_019396.1,1028-1046).
gttatctaccactttgtct

SEQ ID NO: 557483 - DNA, 19 bp, Mus musculus
  siRNA target sequence for Cyhr1 (NM_180962.1,568-586).
cctcttctggccttcgatt

SEQ ID NO: 557484 - DNA, 19 bp, Mus musculus
  siRNA target sequence for Cyhr1 (NM_180962.1,574-592).
ctggccttcgattttcact

SEQ ID NO: 557485 - DNA, 19 bp, Mus musculus
  siRNA target sequence for Cyhr1 (NM_180962.1,715-733).
gttgcagtgaccatcctta

SEQ ID NO: 557486 - DNA, 19 bp, Mus musculus
  siRNA target sequence for Dctd (NM_178788.2,294-312).
gcaaaaaacgggatgacta

SEQ ID NO: 557487 - DNA, 19 bp, Mus musculus
  siRNA target sequence for Dctd (NM_178788.2,295-313).
caaaaaacgggatgactat

SEQ ID NO: 557488 - DNA, 19 bp, Mus musculus
  siRNA target sequence for Dctd (NM_178788.2,314-332).
ctggaatggcccgagtatt

SEQ ID NO: 557489 - DNA, 19 bp, Mus musculus
  siRNA target sequence for Dctd (NM_178788.2,363-381).
gaagcaaggacccaagttt

SEQ ID NO: 557490 - DNA, 19 bp, Mus musculus
  siRNA target sequence for Dctd (NM_178788.2,403-421).
gaacacagaaaacaagatt

SEQ ID NO: 557491 - DNA, 19 bp, Mus musculus
  siRNA target sequence for Dctd (NM_178788.2,502-520).
ggatactaaatatccttat

SEQ ID NO: 557492 - DNA, 19 bp, Mus musculus
  siRNA target sequence for Dctd (NM_178788.2,595-613).
cttgttcccgtgtaacgaa

SEQ ID NO: 557493 - DNA, 19 bp, Mus musculus
  siRNA target sequence for Dctd (NM_178788.2,606-624).
gtaacgaatgtgctaaact

SEQ ID NO: 557494 - DNA, 19 bp, Mus musculus
  siRNA target sequence for Dctd (NM_178788.2,628-646).
catccaggcaggtataaaa

SEQ ID NO: 557495 - DNA, 19 bp, Mus musculus
  siRNA target sequence for Dctd (NM_178788.2,720-738).
ctggggttacgttcagaaa

SEQ ID NO: 557496 - DNA, 19 bp, Mus musculus
  siRNA target sequence for Dctd (NM_178788.2,722-740).
ggggttacgttcagaaaat

SEQ ID NO: 557497 - DNA, 19 bp, Mus musculus
  siRNA target sequence for Dctd (NM_178788.2,723-741).
gggttacgttcagaaaatt

SEQ ID NO: 557498 - DNA, 19 bp, Mus musculus
  siRNA target sequence for Dctd (NM_178788.2,747-765).
cgaagtacagcaagattgt

SEQ ID NO: 557499 - DNA, 19 bp, Mus musculus
  siRNA target sequence for Dctd (NM_178788.2,770-788).
gactttgattcgatcaata

SEQ ID NO: 557500 - DNA, 19 bp, Mus musculus
  siRNA target sequence for Deadc1 (NM_025748.2,181-199).
gctgccttatggtctataa

SEQ ID NO: 557501 - DNA, 19 bp, Mus musculus
  siRNA target sequence for Deadc1 (NM_025748.2,191-209).
ggtctataacaatgaagtt

SEQ ID NO: 557502 - DNA, 19 bp, Mus musculus
  siRNA target sequence for Deadc1 (NM_025748.2,250-268).
ctactcggcatgctgaaat

SEQ ID NO: 557503 - DNA, 19 bp, Mus musculus
  siRNA target sequence for Deadc1 (NM_025748.2,253-271).
ctcggcatgctgaaatggt

SEQ ID NO: 557504 - DNA, 19 bp, Mus musculus
  siRNA target sequence for Deadc1 (NM_025748.2,357-375).
gtggagccgtgcatcatgt

SEQ ID NO: 557505 - DNA, 19 bp, Mus musculus
  siRNA target sequence for Deadc1 (NM_025748.2,384-402).
gccctgcgccttatgaaaa

SEQ ID NO: 557506 - DNA, 19 bp, Mus musculus
  siRNA target sequence for Deadc1 (NM_025748.2,385-403).
ccctgcgccttatgaaaat

SEQ ID NO: 557507 - DNA, 19 bp, Mus musculus
  siRNA target sequence for Deadc1 (NM_025748.2,445-463).
gttgcggttccgtcctaaa

SEQ ID NO: 557508 - DNA, 19 bp, Mus musculus
  siRNA target sequence for Deadc1 (NM_025748.2,448-466).
gcggttccgtcctaaacat

SEQ ID NO: 557509 - DNA, 19 bp, Mus musculus
  siRNA target sequence for Deadc1 (NM_025748.2,449-467).
cggttccgtcctaaacatt

SEQ ID NO: 557510 - DNA, 19 bp, Mus musculus
  siRNA target sequence for Deadc1 (NM_025748.2,572-590).
cccaaatgcgccaaaatca

SEQ ID NO: 557511 - DNA, 19 bp, Mus musculus
  siRNA target sequence for Deadc1 (NM_025748.2,573-591).
ccaaatgcgccaaaatcaa

SEQ ID NO: 557512 - DNA, 19 bp, Mus musculus
  siRNA target sequence for Deadc1 (NM_025748.2,589-607).
caaaagttcggaaaaagga

SEQ ID NO: 557513 - DNA, 19 bp, Mus musculus
  siRNA target sequence for E130318E12Rik (NM_145510.1,230-248).
ggctggttaatgacatgtt

SEQ ID NO: 557514 - DNA, 19 bp, Mus musculus
  siRNA target sequence for E130318E12Rik (NM_145510.1,277-295).
gacgtgggcaacatcaagt

SEQ ID NO: 557515 - DNA, 19 bp, Mus musculus
  siRNA target sequence for E130318E12Rik (NM_145510.1,332-350).
gctggcattgcctagatga

SEQ ID NO: 557516 - DNA, 19 bp, Mus musculus
  siRNA target sequence for E130318E12Rik (NM_145510.1,335-353).
ggcattgcctagatgacaa

SEQ ID NO: 557517 - DNA, 19 bp, Mus musculus
  siRNA target sequence for Ecel1 (NM_021306.2,77-95).
gttccaggaagtcaagtat

SEQ ID NO: 557518 - DNA, 19 bp, Mus musculus
  siRNA target sequence for Ecel1 (NM_021306.2,271-289).
ccatgctggcgctcaaata

SEQ ID NO: 557519 - DNA, 19 bp, Mus musculus
  siRNA target sequence for Ecel1 (NM_021306.2,766-784).
cgctcttctcgcttacagt

SEQ ID NO: 557520 - DNA, 19 bp, Mus musculus
  siRNA target sequence for Ecel1 (NM_021306.2,901-919).
ctgcatacagggtgttcat

SEQ ID NO: 557521 - DNA, 19 bp, Mus musculus
  siRNA target sequence for Ecel1 (NM_021306.2,992-1010).
gaggctggccaatatctct

SEQ ID NO: 557522 - DNA, 19 bp, Mus musculus
  siRNA target sequence for Ecel1 (NM_021306.2,1041-1059).
gtcagctccgcgtacaaca

SEQ ID NO: 557523 - DNA, 19 bp, Mus musculus
  siRNA target sequence for Ecel1 (NM_021306.2,1043-1061).
cagctccgcgtacaacaaa

SEQ ID NO: 557524 - DNA, 19 bp, Mus musculus
  siRNA target sequence for Ecel1 (NM_021306.2,1045-1063).
gctccgcgtacaacaaagt

SEQ ID NO: 557525 - DNA, 19 bp, Mus musculus
  siRNA target sequence for Ecel1 (NM_021306.2,1219-1237).
gaaggatcctgcacaacta

SEQ ID NO: 557526 - DNA, 19 bp, Mus musculus
  siRNA target sequence for Ecel1 (NM_021306.2,1393-1411).
ctcttggtgccctctttgt

SEQ ID NO: 557527 - DNA, 19 bp, Mus musculus
  siRNA target sequence for Ecel1 (NM_021306.2,1461-1479).
gaagatatcaagtacatct

SEQ ID NO: 557528 - DNA, 19 bp, Mus musculus
  siRNA target sequence for Ecel1 (NM_021306.2,1658-1676).
gaacagcatccgattcagt

SEQ ID NO: 557529 - DNA, 19 bp, Mus musculus
  siRNA target sequence for Ecel1 (NM_021306.2,1682-1700).
gttgtccgtcaaaaagatt

SEQ ID NO: 557530 - DNA, 19 bp, Mus musculus
  siRNA target sequence for Ecel1 (NM_021306.2,1701-1719).
cgacaggaggtggacaaat

SEQ ID NO: 557531 - DNA, 19 bp, Mus musculus
  siRNA target sequence for Ecel1 (NM_021306.2,1744-1762).
cgctcaatgcctactatct

SEQ ID NO: 557532 - DNA, 19 bp, Mus musculus
  siRNA target sequence for Ecel1 (NM_021306.2,1761-1779).
ctgcccaacaagaatcaaa

SEQ ID NO: 557533 - DNA, 19 bp, Mus musculus
  siRNA target sequence for Ecel1 (NM_021306.2,1850-1868).
gggtattggcaccatcatt

SEQ ID NO: 557534 - DNA, 19 bp, Mus musculus
  siRNA target sequence for Ecel1 (NM_021306.2,1984-2002).
gcatcgttcgcctctatga

SEQ ID NO: 557535 - DNA, 19 bp, Mus musculus
  siRNA target sequence for Ecel1 (NM_021306.2,2025-2043).
cgcgtgaatgggaaacaca

SEQ ID NO: 557536 - DNA, 19 bp, Mus musculus
  siRNA target sequence for Ecel1 (NM_021306.2,2075-2093).
cctcaagctggcctactat

SEQ ID NO: 557537 - DNA, 19 bp, Mus musculus
  siRNA target sequence for Ecel1 (NM_021306.2,2136-2154).
ctgcaccggctcaagtaca

SEQ ID NO: 557538 - DNA, 19 bp, Mus musculus
  siRNA target sequence for Ecel1 (NM_021306.2,2275-2293).
gcagcgtatcccagtttga

SEQ ID NO: 557539 - DNA, 19 bp, Mus musculus
  siRNA target sequence for Ecel1 (NM_021306.2,2332-2350).
ccatgaaccccgtccataa

SEQ ID NO: 557540 - DNA, 19 bp, Mus musculus
  siRNA target sequence for Enpep (NM_007934.1,519-537).
ggagcaggtaccaattcga

SEQ ID NO: 557541 - DNA, 19 bp, Mus musculus
  siRNA target sequence for Enpep (NM_007934.1,535-553).
cgacggtgcttcgagtata

SEQ ID NO: 557542 - DNA, 19 bp, Mus musculus
  siRNA target sequence for Enpep (NM_007934.1,536-554).
gacggtgcttcgagtataa

SEQ ID NO: 557543 - DNA, 19 bp, Mus musculus
  siRNA target sequence for Enpep (NM_007934.1,538-556).
cggtgcttcgagtataaga

SEQ ID NO: 557544 - DNA, 19 bp, Mus musculus
  siRNA target sequence for Enpep (NM_007934.1,622-640).
cggctgaccatggagttta

SEQ ID NO: 557545 - DNA, 19 bp, Mus musculus
  siRNA target sequence for Enpep (NM_007934.1,746-764).
ggaagtccttcccttgttt

SEQ ID NO: 557546 - DNA, 19 bp, Mus musculus
  siRNA target sequence for Enpep (NM_007934.1,766-784).
gacgaacccaacaagaagt

SEQ ID NO: 557547 - DNA, 19 bp, Mus musculus
  siRNA target sequence for Enpep (NM_007934.1,773-791).
ccaacaagaagtcaactta

SEQ ID NO: 557548 - DNA, 19 bp, Mus musculus
  siRNA target sequence for Enpep (NM_007934.1,936-954).
gcatcggttcactgctata

SEQ ID NO: 557549 - DNA, 19 bp, Mus musculus
  siRNA target sequence for Enpep (NM_007934.1,940-958).
cggttcactgctatagaga

SEQ ID NO: 557550 - DNA, 19 bp, Mus musculus
  siRNA target sequence for Enpep (NM_007934.1,1019-1037).
cagagtatgcggcaaacat

SEQ ID NO: 557551 - DNA, 19 bp, Mus musculus
  siRNA target sequence for Enpep (NM_007934.1,1021-1039).
gagtatgcggcaaacataa

SEQ ID NO: 557552 - DNA, 19 bp, Mus musculus
  siRNA target sequence for Enpep (NM_007934.1,1040-1058).
cccaagctgtatttgatta

SEQ ID NO: 557553 - DNA, 19 bp, Mus musculus
  siRNA target sequence for Enpep (NM_007934.1,1088-1106).
cgcttcctaaactggataa

SEQ ID NO: 557554 - DNA, 19 bp, Mus musculus
  siRNA target sequence for Enpep (NM_007934.1,1101-1119).
ggataaaattgctattcca

SEQ ID NO: 557555 - DNA, 19 bp, Mus musculus
  siRNA target sequence for Enpep (NM_007934.1,1156-1174).
gtcacttaccgagaaacaa

SEQ ID NO: 557556 - DNA, 19 bp, Mus musculus
  siRNA target sequence for Enpep (NM_007934.1,1180-1198).
ctttacgaccccctactat

SEQ ID NO: 557557 - DNA, 19 bp, Mus musculus
  siRNA target sequence for Enpep (NM_007934.1,1192-1210).
ctactatcggcctcatcta

SEQ ID NO: 557558 - DNA, 19 bp, Mus musculus
  siRNA target sequence for Enpep (NM_007934.1,1233-1251).
ggttgcccacgaacttgta

SEQ ID NO: 557559 - DNA, 19 bp, Mus musculus
  siRNA target sequence for Enpep (NM_007934.1,1319-1337).
cttcgttcttcgagttctt

SEQ ID NO: 557560 - DNA, 19 bp, Mus musculus
  siRNA target sequence for Enpep (NM_007934.1,1340-1358).
gagtaaaccacgcagaaaa

SEQ ID NO: 557561 - DNA, 19 bp, Mus musculus
  siRNA target sequence for Enpep (NM_007934.1,1455-1473).
gtccacgccagctgaaata

SEQ ID NO: 557562 - DNA, 19 bp, Mus musculus
  siRNA target sequence for Enpep (NM_007934.1,1500-1518).
cagcaagggagcttctatt

SEQ ID NO: 557563 - DNA, 19 bp, Mus musculus
  siRNA target sequence for Enpep (NM_007934.1,1527-1545).
gctccaagactggataaca

SEQ ID NO: 557564 - DNA, 19 bp, Mus musculus
  siRNA target sequence for Enpep (NM_007934.1,1538-1556).
ggataacaccagagaaatt

SEQ ID NO: 557565 - DNA, 19 bp, Mus musculus
  siRNA target sequence for Enpep (NM_007934.1,1544-1562).
caccagagaaattccaaaa

SEQ ID NO: 557566 - DNA, 19 bp, Mus musculus
  siRNA target sequence for Enpep (NM_007934.1,1558-1576).
caaaaaggctgtcagattt

SEQ ID NO: 557567 - DNA, 19 bp, Mus musculus
  siRNA target sequence for Enpep (NM_007934.1,1564-1582).
ggctgtcagatttacttga

SEQ ID NO: 557568 - DNA, 19 bp, Mus musculus
  siRNA target sequence for Enpep (NM_007934.1,1565-1583).
gctgtcagatttacttgaa

SEQ ID NO: 557569 - DNA, 19 bp, Mus musculus
  siRNA target sequence for Enpep (NM_007934.1,1566-1584).
ctgtcagatttacttgaaa

SEQ ID NO: 557570 - DNA, 19 bp, Mus musculus
  siRNA target sequence for Enpep (NM_007934.1,1590-1608).
ccagttcgcgaatgcaaaa

SEQ ID NO: 557571 - DNA, 19 bp, Mus musculus
  siRNA target sequence for Enpep (NM_007934.1,1591-1609).
cagttcgcgaatgcaaaaa

SEQ ID NO: 557572 - DNA, 19 bp, Mus musculus
  siRNA target sequence for Enpep (NM_007934.1,1593-1611).
gttcgcgaatgcaaaaact

SEQ ID NO: 557573 - DNA, 19 bp, Mus musculus
  siRNA target sequence for Enpep (NM_007934.1,1643-1661).
gcaatctgccagtgaaaga

SEQ ID NO: 557574 - DNA, 19 bp, Mus musculus
  siRNA target sequence for Enpep (NM_007934.1,1644-1662).
caatctgccagtgaaagaa

SEQ ID NO: 557575 - DNA, 19 bp, Mus musculus
  siRNA target sequence for Enpep (NM_007934.1,1785-1803).
gctcggttacacatggaat

SEQ ID NO: 557576 - DNA, 19 bp, Mus musculus
  siRNA target sequence for Enpep (NM_007934.1,1786-1804).
ctcggttacacatggaata

SEQ ID NO: 557577 - DNA, 19 bp, Mus musculus
  siRNA target sequence for Enpep (NM_007934.1,1788-1806).
cggttacacatggaatatt

SEQ ID NO: 557578 - DNA, 19 bp, Mus musculus
  siRNA target sequence for Enpep (NM_007934.1,1835-1853).
caaggatcaccgtgtacaa

SEQ ID NO: 557579 - DNA, 19 bp, Mus musculus
  siRNA target sequence for Enpep (NM_007934.1,1842-1860).
caccgtgtacaataggtta

SEQ ID NO: 557580 - DNA, 19 bp, Mus musculus
  siRNA target sequence for Enpep (NM_007934.1,1871-1889).
gaatcactctgaatgctaa

SEQ ID NO: 557581 - DNA, 19 bp, Mus musculus
  siRNA target sequence for Enpep (NM_007934.1,1875-1893).
cactctgaatgctaatctt

SEQ ID NO: 557582 - DNA, 19 bp, Mus musculus
  siRNA target sequence for Enpep (NM_007934.1,1895-1913).
gcggagatgcttttctcaa

SEQ ID NO: 557583 - DNA, 19 bp, Mus musculus
  siRNA target sequence for Enpep (NM_007934.1,1933-1951).
gggttttatcgtgtaaatt

SEQ ID NO: 557584 - DNA, 19 bp, Mus musculus
  siRNA target sequence for Enpep (NM_007934.1,1934-1952).
ggttttatcgtgtaaatta

SEQ ID NO: 557585 - DNA, 19 bp, Mus musculus
  siRNA target sequence for Enpep (NM_007934.1,1958-1976).
gaggaacgtgggattggat

SEQ ID NO: 557586 - DNA, 19 bp, Mus musculus
  siRNA target sequence for Enpep (NM_007934.1,2014-2032).
gctgctgaccggtcaagtt

SEQ ID NO: 557587 - DNA, 19 bp, Mus musculus
  siRNA target sequence for Enpep (NM_007934.1,2015-2033).
ctgctgaccggtcaagttt

SEQ ID NO: 557588 - DNA, 19 bp, Mus musculus
  siRNA target sequence for Enpep (NM_007934.1,2017-2035).
gctgaccggtcaagtttta

SEQ ID NO: 557589 - DNA, 19 bp, Mus musculus
  siRNA target sequence for Enpep (NM_007934.1,2018-2036).
ctgaccggtcaagttttat

SEQ ID NO: 557590 - DNA, 19 bp, Mus musculus
  siRNA target sequence for Enpep (NM_007934.1,2022-2040).
ccggtcaagttttattgat

SEQ ID NO: 557591 - DNA, 19 bp, Mus musculus
  siRNA target sequence for Enpep (NM_007934.1,2057-2075).
caagagctcaacttctgaa

SEQ ID NO: 557592 - DNA, 19 bp, Mus musculus
  siRNA target sequence for Enpep (NM_007934.1,2062-2080).
gctcaacttctgaattata

SEQ ID NO: 557593 - DNA, 19 bp, Mus musculus
  siRNA target sequence for Enpep (NM_007934.1,2099-2117).
ccatgtatctcaaatcaga

SEQ ID NO: 557594 - DNA, 19 bp, Mus musculus
  siRNA target sequence for Enpep (NM_007934.1,2100-2118).
catgtatctcaaatcagaa

SEQ ID NO: 557595 - DNA, 19 bp, Mus musculus
  siRNA target sequence for Enpep (NM_007934.1,2150-2168).
catctgtaagctacatcat

SEQ ID NO: 557596 - DNA, 19 bp, Mus musculus
  siRNA target sequence for Enpep (NM_007934.1,2160-2178).
ctacatcattagcatgttt

SEQ ID NO: 557597 - DNA, 19 bp, Mus musculus
  siRNA target sequence for Enpep (NM_007934.1,2166-2184).
cattagcatgtttgaagat

SEQ ID NO: 557598 - DNA, 19 bp, Mus musculus
  siRNA target sequence for Enpep (NM_007934.1,2205-2223).
gatagagacgtactttcaa

SEQ ID NO: 557599 - DNA, 19 bp, Mus musculus
  siRNA target sequence for Enpep (NM_007934.1,2273-2291).
gccacatcacaaagttact

SEQ ID NO: 557600 - DNA, 19 bp, Mus musculus
  siRNA target sequence for Enpep (NM_007934.1,2345-2363).
gcaatgcttcccagttatt

SEQ ID NO: 557601 - DNA, 19 bp, Mus musculus
  siRNA target sequence for Enpep (NM_007934.1,2376-2394).
gaaagggagcgcaagtatt

SEQ ID NO: 557602 - DNA, 19 bp, Mus musculus
  siRNA target sequence for Enpep (NM_007934.1,2387-2405).
caagtattccggtaaacct

SEQ ID NO: 557603 - DNA, 19 bp, Mus musculus
  siRNA target sequence for Enpep (NM_007934.1,2449-2467).
gaggcagcgtggaactata

SEQ ID NO: 557604 - DNA, 19 bp, Mus musculus
  siRNA target sequence for Enpep (NM_007934.1,2468-2486).
ccctagagcagtatcagaa

SEQ ID NO: 557605 - DNA, 19 bp, Mus musculus
  siRNA target sequence for Enpep (NM_007934.1,2469-2487).
cctagagcagtatcagaaa

SEQ ID NO: 557606 - DNA, 19 bp, Mus musculus
  siRNA target sequence for Enpep (NM_007934.1,2473-2491).
gagcagtatcagaaaacat

SEQ ID NO: 557607 - DNA, 19 bp, Mus musculus
  siRNA target sequence for Enpep (NM_007934.1,2515-2533).
ctgctctatgggttagctt

SEQ ID NO: 557608 - DNA, 19 bp, Mus musculus
  siRNA target sequence for Enpep (NM_007934.1,2530-2548).
gcttcagtgaaggatgtta

SEQ ID NO: 557609 - DNA, 19 bp, Mus musculus
  siRNA target sequence for Enpep (NM_007934.1,2692-2710).
ctggtcagcagatttacaa

SEQ ID NO: 557610 - DNA, 19 bp, Mus musculus
  siRNA target sequence for Enpep (NM_007934.1,2695-2713).
gtcagcagatttacaatca

SEQ ID NO: 557611 - DNA, 19 bp, Mus musculus
  siRNA target sequence for Fasn (NM_007988.1,167-185).
ggctgggctctatggatta

SEQ ID NO: 557612 - DNA, 19 bp, Mus musculus
  siRNA target sequence for Fasn (NM_007988.1,290-308).
gttggaagtcagctatgaa

SEQ ID NO: 557613 - DNA, 19 bp, Mus musculus
  siRNA target sequence for Fasn (NM_007988.1,491-509).
cttcaaaggaccaagcatt

SEQ ID NO: 557614 - DNA, 19 bp, Mus musculus
  siRNA target sequence for Fasn (NM_007988.1,535-553).
gcttgctggcactacagaa

SEQ ID NO: 557615 - DNA, 19 bp, Mus musculus
  siRNA target sequence for Fasn (NM_007988.1,676-694).
cctgcagatcctttgatga

SEQ ID NO: 557616 - DNA, 19 bp, Mus musculus
  siRNA target sequence for Fasn (NM_007988.1,677-695).
ctgcagatcctttgatgat

SEQ ID NO: 557617 - DNA, 19 bp, Mus musculus
  siRNA target sequence for Fasn (NM_007988.1,680-698).
cagatcctttgatgattca

SEQ ID NO: 557618 - DNA, 19 bp, Mus musculus
  siRNA target sequence for Fasn (NM_007988.1,783-801).
ctgaatgccggcaccaata

SEQ ID NO: 557619 - DNA, 19 bp, Mus musculus
  siRNA target sequence for Fasn (NM_007988.1,894-912).
ccggagtcgcttgagtata

SEQ ID NO: 557620 - DNA, 19 bp, Mus musculus
  siRNA target sequence for Fasn (NM_007988.1,895-913).
cggagtcgcttgagtatat

SEQ ID NO: 557621 - DNA, 19 bp, Mus musculus
  siRNA target sequence for Fasn (NM_007988.1,896-914).
ggagtcgcttgagtatatt

SEQ ID NO: 557622 - DNA, 19 bp, Mus musculus
  siRNA target sequence for Fasn (NM_007988.1,899-917).
gtcgcttgagtatattgaa

SEQ ID NO: 557623 - DNA, 19 bp, Mus musculus
  siRNA target sequence for Fasn (NM_007988.1,943-961).
gtgacccccaggaactgaa

SEQ ID NO: 557624 - DNA, 19 bp, Mus musculus
  siRNA target sequence for Fasn (NM_007988.1,953-971).
ggaactgaatggcattact

SEQ ID NO: 557625 - DNA, 19 bp, Mus musculus
  siRNA target sequence for Fasn (NM_007988.1,991-1009).
gccaggcccctctgttaat

SEQ ID NO: 557626 - DNA, 19 bp, Mus musculus
  siRNA target sequence for Fasn (NM_007988.1,1065-1083).
ctgaccaaggtgctgttat

SEQ ID NO: 557627 - DNA, 19 bp, Mus musculus
  siRNA target sequence for Fasn (NM_007988.1,1205-1223).
cgtgggcatcaactcattt

SEQ ID NO: 557628 - DNA, 19 bp, Mus musculus
  siRNA target sequence for Fasn (NM_007988.1,1226-1244).
cttcggaggctccaatgtt

SEQ ID NO: 557629 - DNA, 19 bp, Mus musculus
  siRNA target sequence for Fasn (NM_007988.1,1229-1247).
cggaggctccaatgttcat

SEQ ID NO: 557630 - DNA, 19 bp, Mus musculus
  siRNA target sequence for Fasn (NM_007988.1,1231-1249).
gaggctccaatgttcatgt

SEQ ID NO: 557631 - DNA, 19 bp, Mus musculus
  siRNA target sequence for Fasn (NM_007988.1,1625-1643).
gaagccgttgggagtgaaa

SEQ ID NO: 557632 - DNA, 19 bp, Mus musculus
  siRNA target sequence for Fasn (NM_007988.1,2005-2023).
ctcaggctgcagtgaatga

SEQ ID NO: 557633 - DNA, 19 bp, Mus musculus
  siRNA target sequence for Fasn (NM_007988.1,2233-2251).
cttctgccgagtacaatgt

SEQ ID NO: 557634 - DNA, 19 bp, Mus musculus
  siRNA target sequence for Fasn (NM_007988.1,2236-2254).
ctgccgagtacaatgtcaa

SEQ ID NO: 557635 - DNA, 19 bp, Mus musculus
  siRNA target sequence for Fasn (NM_007988.1,2372-2390).
gtccagctgcaccatcatt

SEQ ID NO: 557636 - DNA, 19 bp, Mus musculus
  siRNA target sequence for Fasn (NM_007988.1,2404-2422).
gggatcataaagataactt

SEQ ID NO: 557637 - DNA, 19 bp, Mus musculus
  siRNA target sequence for Fasn (NM_007988.1,2884-2902).
ctgacactggcaatctgat

SEQ ID NO: 557638 - DNA, 19 bp, Mus musculus
  siRNA target sequence for Fasn (NM_007988.1,2935-2953).
cgaactccaagttattcga

SEQ ID NO: 557639 - DNA, 19 bp, Mus musculus
  siRNA target sequence for Fasn (NM_007988.1,3004-3022).
cccagggagaagtatacaa

SEQ ID NO: 557640 - DNA, 19 bp, Mus musculus
  siRNA target sequence for Fasn (NM_007988.1,3029-3047).
gcggctgcgtggctatgat

SEQ ID NO: 557641 - DNA, 19 bp, Mus musculus
  siRNA target sequence for Fasn (NM_007988.1,3030-3048).
cggctgcgtggctatgatt

SEQ ID NO: 557642 - DNA, 19 bp, Mus musculus
  siRNA target sequence for Fasn (NM_007988.1,3031-3049).
ggctgcgtggctatgatta

SEQ ID NO: 557643 - DNA, 19 bp, Mus musculus
  siRNA target sequence for Fasn (NM_007988.1,3032-3050).
gctgcgtggctatgattat

SEQ ID NO: 557644 - DNA, 19 bp, Mus musculus
  siRNA target sequence for Fasn (NM_007988.1,3197-3215).
ccgtgtgaccgccatctat

SEQ ID NO: 557645 - DNA, 19 bp, Mus musculus
  siRNA target sequence for Fasn (NM_007988.1,3198-3216).
cgtgtgaccgccatctata

SEQ ID NO: 557646 - DNA, 19 bp, Mus musculus
  siRNA target sequence for Fasn (NM_007988.1,3315-3333).
ggtggtatccacatctcaa

SEQ ID NO: 557647 - DNA, 19 bp, Mus musculus
  siRNA target sequence for Fasn (NM_007988.1,3378-3396).
gtccccaccttggaaaagt

SEQ ID NO: 557648 - DNA, 19 bp, Mus musculus
  siRNA target sequence for Fasn (NM_007988.1,3389-3407).
ggaaaagttcgttttcaca

SEQ ID NO: 557649 - DNA, 19 bp, Mus musculus
  siRNA target sequence for Fasn (NM_007988.1,3769-3787).
ctggagaaggccacttgta

SEQ ID NO: 557650 - DNA, 19 bp, Mus musculus
  siRNA target sequence for Fasn (NM_007988.1,3814-3832).
cccagcccatgctacaact

SEQ ID NO: 557651 - DNA, 19 bp, Mus musculus
  siRNA target sequence for Fasn (NM_007988.1,3820-3838).
ccatgctacaactggaata

SEQ ID NO: 557652 - DNA, 19 bp, Mus musculus
  siRNA target sequence for Fasn (NM_007988.1,3824-3842).
gctacaactggaatacaca

SEQ ID NO: 557653 - DNA, 19 bp, Mus musculus
  siRNA target sequence for Fasn (NM_007988.1,4249-4267).
cacaggagaaacctatctt

SEQ ID NO: 557654 - DNA, 19 bp, Mus musculus
  siRNA target sequence for Fasn (NM_007988.1,4380-4398).
gtggtgggtttggtgaatt

SEQ ID NO: 557655 - DNA, 19 bp, Mus musculus
  siRNA target sequence for Fasn (NM_007988.1,4604-4622).
gacagcgcatgcctttgta

SEQ ID NO: 557656 - DNA, 19 bp, Mus musculus
  siRNA target sequence for Fasn (NM_007988.1,4609-4627).
cgcatgcctttgtaaacgt

SEQ ID NO: 557657 - DNA, 19 bp, Mus musculus
  siRNA target sequence for Fasn (NM_007988.1,4965-4983).
gtgcccgtcgtctatacca

SEQ ID NO: 557658 - DNA, 19 bp, Mus musculus
  siRNA target sequence for Fasn (NM_007988.1,5064-5082).
ggccaagcggccatttcca

SEQ ID NO: 557659 - DNA, 19 bp, Mus musculus
  siRNA target sequence for Fasn (NM_007988.1,5065-5083).
gccaagcggccatttccat

SEQ ID NO: 557660 - DNA, 19 bp, Mus musculus
  siRNA target sequence for Fasn (NM_007988.1,5066-5084).
ccaagcggccatttccatt

SEQ ID NO: 557661 - DNA, 19 bp, Mus musculus
  siRNA target sequence for Fasn (NM_007988.1,5155-5173).
ggttccctcagcttgatga

SEQ ID NO: 557662 - DNA, 19 bp, Mus musculus
  siRNA target sequence for Fasn (NM_007988.1,5310-5328).
catggtcgcttcttagaga

SEQ ID NO: 557663 - DNA, 19 bp, Mus musculus
  siRNA target sequence for Fasn (NM_007988.1,5331-5349).
ggcaaatttgatctttcta

SEQ ID NO: 557664 - DNA, 19 bp, Mus musculus
  siRNA target sequence for Fasn (NM_007988.1,5359-5377).
ctctgggcatggctatctt

SEQ ID NO: 557665 - DNA, 19 bp, Mus musculus
  siRNA target sequence for Fasn (NM_007988.1,5361-5379).
ctgggcatggctatcttct

SEQ ID NO: 557666 - DNA, 19 bp, Mus musculus
  siRNA target sequence for Fasn (NM_007988.1,5364-5382).
ggcatggctatcttcttga

SEQ ID NO: 557667 - DNA, 19 bp, Mus musculus
  siRNA target sequence for Fasn (NM_007988.1,5381-5399).
gaagaacgtcactttccat

SEQ ID NO: 557668 - DNA, 19 bp, Mus musculus
  siRNA target sequence for Fasn (NM_007988.1,5668-5686).
cagcccataagagttacat

SEQ ID NO: 557669 - DNA, 19 bp, Mus musculus
  siRNA target sequence for Fasn (NM_007988.1,5670-5688).
gcccataagagttacatca

SEQ ID NO: 557670 - DNA, 19 bp, Mus musculus
  siRNA target sequence for Fasn (NM_007988.1,5835-5853).
caagtgctcgtgtcaacaa

SEQ ID NO: 557671 - DNA, 19 bp, Mus musculus
  siRNA target sequence for Fasn (NM_007988.1,5996-6014).
caacaagcccaaatacaat

SEQ ID NO: 557672 - DNA, 19 bp, Mus musculus
  siRNA target sequence for Fasn (NM_007988.1,6143-6161).
catggagcgtatatgtgaa

SEQ ID NO: 557673 - DNA, 19 bp, Mus musculus
  siRNA target sequence for Fasn (NM_007988.1,6237-6255).
gcgatgggcaccaatgaca

SEQ ID NO: 557674 - DNA, 19 bp, Mus musculus
  siRNA target sequence for Fasn (NM_007988.1,6437-6455).
ccgagacctcgcaggtatt

SEQ ID NO: 557675 - DNA, 19 bp, Mus musculus
  siRNA target sequence for Fasn (NM_007988.1,6438-6456).
cgagacctcgcaggtatta

SEQ ID NO: 557676 - DNA, 19 bp, Mus musculus
  siRNA target sequence for Fasn (NM_007988.1,6439-6457).
gagacctcgcaggtattaa

SEQ ID NO: 557677 - DNA, 19 bp, Mus musculus
  siRNA target sequence for Fasn (NM_007988.1,6569-6587).
gctcacgctgcggaaactt

SEQ ID NO: 557678 - DNA, 19 bp, Mus musculus
  siRNA target sequence for Fasn (NM_007988.1,6579-6597).
cggaaacttcaggaaatgt

SEQ ID NO: 557679 - DNA, 19 bp, Mus musculus
  siRNA target sequence for Fasn (NM_007988.1,6883-6901).
cctactacatagattgcat

SEQ ID NO: 557680 - DNA, 19 bp, Mus musculus
  siRNA target sequence for Fasn (NM_007988.1,6932-6950).
catagctgggtactcattt

SEQ ID NO: 557681 - DNA, 19 bp, Mus musculus
  siRNA target sequence for Fasn (NM_007988.1,7003-7021).
cagccccgacccacaacaa

SEQ ID NO: 557682 - DNA, 19 bp, Mus musculus
  siRNA target sequence for Fasn (NM_007988.1,7113-7131).
gaggctgaggccttatgct

SEQ ID NO: 557683 - DNA, 19 bp, Mus musculus
  siRNA target sequence for Fasn (NM_007988.1,7119-7137).
gaggccttatgcttcttca

SEQ ID NO: 557684 - DNA, 19 bp, Mus musculus
  siRNA target sequence for Fasn (NM_007988.1,7122-7140).
gccttatgcttcttcataa

SEQ ID NO: 557685 - DNA, 19 bp, Mus musculus
  siRNA target sequence for Fasn (NM_007988.1,7123-7141).
ccttatgcttcttcataaa

SEQ ID NO: 557686 - DNA, 19 bp, Mus musculus
  siRNA target sequence for Fasn (NM_007988.1,7218-7236).
gcctccgtggaccttatca

SEQ ID NO: 557687 - DNA, 19 bp, Mus musculus
  siRNA target sequence for Fasn (NM_007988.1,7220-7238).
ctccgtggaccttatcact

SEQ ID NO: 557688 - DNA, 19 bp, Mus musculus
  siRNA target sequence for Fasn (NM_007988.1,7222-7240).
ccgtggaccttatcactaa

SEQ ID NO: 557689 - DNA, 19 bp, Mus musculus
  siRNA target sequence for Fasn (NM_007988.1,7224-7242).
gtggaccttatcactaaga

SEQ ID NO: 557690 - DNA, 19 bp, Mus musculus
  siRNA target sequence for Fasn (NM_007988.1,7304-7322).
ccgggcagctgatcagtat

SEQ ID NO: 557691 - DNA, 19 bp, Mus musculus
  siRNA target sequence for Fasn (NM_007988.1,7305-7323).
cgggcagctgatcagtata

SEQ ID NO: 557692 - DNA, 19 bp, Mus musculus
  siRNA target sequence for Fasn (NM_007988.1,7306-7324).
gggcagctgatcagtataa

SEQ ID NO: 557693 - DNA, 19 bp, Mus musculus
  siRNA target sequence for Fgd1 (NM_008001.2,488-506).
gaacgctcagcggcaaata

SEQ ID NO: 557694 - DNA, 19 bp, Mus musculus
  siRNA target sequence for Fgd1 (NM_008001.2,604-622).
ccctttggatcctcagttt

SEQ ID NO: 557695 - DNA, 19 bp, Mus musculus
  siRNA target sequence for Fgd1 (NM_008001.2,762-780).
gaaaccggatcctggttaa

SEQ ID NO: 557696 - DNA, 19 bp, Mus musculus
  siRNA target sequence for Fgd1 (NM_008001.2,766-784).
ccggatcctggttaaaagt

SEQ ID NO: 557697 - DNA, 19 bp, Mus musculus
  siRNA target sequence for Fgd1 (NM_008001.2,767-785).
cggatcctggttaaaagtt

SEQ ID NO: 557698 - DNA, 19 bp, Mus musculus
  siRNA target sequence for Fgd1 (NM_008001.2,768-786).
ggatcctggttaaaagttt

SEQ ID NO: 557699 - DNA, 19 bp, Mus musculus
  siRNA target sequence for Fgd1 (NM_008001.2,1046-1064).
gctgaggccagcactagtt

SEQ ID NO: 557700 - DNA, 19 bp, Mus musculus
  siRNA target sequence for Fgd1 (NM_008001.2,1065-1083).
ctgcagcagtatcatcatt

SEQ ID NO: 557701 - DNA, 19 bp, Mus musculus
  siRNA target sequence for Fgd1 (NM_008001.2,1067-1085).
gcagcagtatcatcattga

SEQ ID NO: 557702 - DNA, 19 bp, Mus musculus
  siRNA target sequence for Fgd1 (NM_008001.2,1068-1086).
cagcagtatcatcattgat

SEQ ID NO: 557703 - DNA, 19 bp, Mus musculus
  siRNA target sequence for Fgd1 (NM_008001.2,1395-1413).
ctagtatgccagtagcttt

SEQ ID NO: 557704 - DNA, 19 bp, Mus musculus
  siRNA target sequence for Fgd1 (NM_008001.2,1688-1706).
gttgtccacggcatcttct

SEQ ID NO: 557705 - DNA, 19 bp, Mus musculus
  siRNA target sequence for Fgd1 (NM_008001.2,1691-1709).
gtccacggcatcttctcta

SEQ ID NO: 557706 - DNA, 19 bp, Mus musculus
  siRNA target sequence for Fgd1 (NM_008001.2,1694-1712).
cacggcatcttctctaaca

SEQ ID NO: 557707 - DNA, 19 bp, Mus musculus
  siRNA target sequence for Fgd1 (NM_008001.2,1789-1807).
cccacgcattggtgacatt

SEQ ID NO: 557708 - DNA, 19 bp, Mus musculus
  siRNA target sequence for Fgd1 (NM_008001.2,1791-1809).
cacgcattggtgacattct

SEQ ID NO: 557709 - DNA, 19 bp, Mus musculus
  siRNA target sequence for Fgd1 (NM_008001.2,1820-1838).
gcacccttcctcaagatgt

SEQ ID NO: 557710 - DNA, 19 bp, Mus musculus
  siRNA target sequence for Fgd1 (NM_008001.2,1837-1855).
gtatggcgagtatgtgaaa

SEQ ID NO: 557711 - DNA, 19 bp, Mus musculus
  siRNA target sequence for Fgd1 (NM_008001.2,1841-1859).
ggcgagtatgtgaaaaact

SEQ ID NO: 557712 - DNA, 19 bp, Mus musculus
  siRNA target sequence for Fgd1 (NM_008001.2,1895-1913).
gagcggtctacccagttta

SEQ ID NO: 557713 - DNA, 19 bp, Mus musculus
  siRNA target sequence for Fgd1 (NM_008001.2,1897-1915).
gcggtctacccagtttaaa

SEQ ID NO: 557714 - DNA, 19 bp, Mus musculus
  siRNA target sequence for Fgd1 (NM_008001.2,1899-1917).
ggtctacccagtttaaagt

SEQ ID NO: 557715 - DNA, 19 bp, Mus musculus
  siRNA target sequence for Fgd1 (NM_008001.2,1902-1920).
ctacccagtttaaagtcat

SEQ ID NO: 557716 - DNA, 19 bp, Mus musculus
  siRNA target sequence for Fgd1 (NM_008001.2,2004-2022).
gctatgaacttcttctcaa

SEQ ID NO: 557717 - DNA, 19 bp, Mus musculus
  siRNA target sequence for Fgd1 (NM_008001.2,2097-2115).
cagcagcagaacactctaa

SEQ ID NO: 557718 - DNA, 19 bp, Mus musculus
  siRNA target sequence for Fgd1 (NM_008001.2,2198-2216).
cccaccaaagagctcataa

SEQ ID NO: 557719 - DNA, 19 bp, Mus musculus
  siRNA target sequence for Fgd1 (NM_008001.2,2199-2217).
ccaccaaagagctcataaa

SEQ ID NO: 557720 - DNA, 19 bp, Mus musculus
  siRNA target sequence for Fgd1 (NM_008001.2,2261-2279).
caagatcgatacctcatat

SEQ ID NO: 557721 - DNA, 19 bp, Mus musculus
  siRNA target sequence for Fgd1 (NM_008001.2,2264-2282).
gatcgatacctcatattat

SEQ ID NO: 557722 - DNA, 19 bp, Mus musculus
  siRNA target sequence for Fgd1 (NM_008001.2,2267-2285).
cgatacctcatattattca

SEQ ID NO: 557723 - DNA, 19 bp, Mus musculus
  siRNA target sequence for Fgd1 (NM_008001.2,2319-2337).
ggctccttggtcagaagtt

SEQ ID NO: 557724 - DNA, 19 bp, Mus musculus
  siRNA target sequence for Fgd1 (NM_008001.2,2321-2339).
ctccttggtcagaagttta

SEQ ID NO: 557725 - DNA, 19 bp, Mus musculus
  siRNA target sequence for Fgd1 (NM_008001.2,2341-2359).
cgtgcgggcacgcattgat

SEQ ID NO: 557726 - DNA, 19 bp, Mus musculus
  siRNA target sequence for Fgd1 (NM_008001.2,2344-2362).
gcgggcacgcattgatgta

SEQ ID NO: 557727 - DNA, 19 bp, Mus musculus
  siRNA target sequence for Fgd1 (NM_008001.2,2346-2364).
gggcacgcattgatgtaga

SEQ ID NO: 557728 - DNA, 19 bp, Mus musculus
  siRNA target sequence for Fgd1 (NM_008001.2,2347-2365).
ggcacgcattgatgtagat

SEQ ID NO: 557729 - DNA, 19 bp, Mus musculus
  siRNA target sequence for Fgd1 (NM_008001.2,2516-2534).
cagaccctggagactttca

SEQ ID NO: 557730 - DNA, 19 bp, Mus musculus
  siRNA target sequence for Fgd1 (NM_008001.2,2547-2565).
caacaaacagggatgatga

SEQ ID NO: 557731 - DNA, 19 bp, Mus musculus
  siRNA target sequence for Fgd1 (NM_008001.2,2616-2634).
cgcctatccgggaaaagga

SEQ ID NO: 557732 - DNA, 19 bp, Mus musculus
  siRNA target sequence for Fgd1 (NM_008001.2,2617-2635).
gcctatccgggaaaaggaa

SEQ ID NO: 557733 - DNA, 19 bp, Mus musculus
  siRNA target sequence for Fgd1 (NM_008001.2,2740-2758).
ccgagcccgactcatctat

SEQ ID NO: 557734 - DNA, 19 bp, Mus musculus
  siRNA target sequence for Fgd1 (NM_008001.2,2742-2760).
gagcccgactcatctatga

SEQ ID NO: 557735 - DNA, 19 bp, Mus musculus
  siRNA target sequence for Fgd1 (NM_008001.2,2744-2762).
gcccgactcatctatgaca

SEQ ID NO: 557736 - DNA, 19 bp, Mus musculus
  siRNA target sequence for Fgd1 (NM_008001.2,2745-2763).
cccgactcatctatgacaa

SEQ ID NO: 557737 - DNA, 19 bp, Mus musculus
  siRNA target sequence for Fgd1 (NM_008001.2,2987-3005).
cccttggtgctgtacatct

SEQ ID NO: 557738 - DNA, 19 bp, Mus musculus
  siRNA target sequence for Fgd1 (NM_008001.2,2989-3007).
cttggtgctgtacatctat

SEQ ID NO: 557739 - DNA, 19 bp, Mus musculus
  siRNA target sequence for Fgd1 (NM_008001.2,3090-3108).
cagacaggaggcatgtctt

SEQ ID NO: 557740 - DNA, 19 bp, Mus musculus
  siRNA target sequence for Fgd2 (NM_013710.1,597-615).
gtttccacgcccagttctt

SEQ ID NO: 557741 - DNA, 19 bp, Mus musculus
  siRNA target sequence for Fgd2 (NM_013710.1,1117-1135).
ccgcagcgacccaatggaa

SEQ ID NO: 557742 - DNA, 19 bp, Mus musculus
  siRNA target sequence for Fgd2 (NM_013710.1,1133-1151).
gaacgctacctggttttgt

SEQ ID NO: 557743 - DNA, 19 bp, Mus musculus
  siRNA target sequence for Fgd2 (NM_013710.1,1136-1154).
cgctacctggttttgttca

SEQ ID NO: 557744 - DNA, 19 bp, Mus musculus
  siRNA target sequence for Fgd2 (NM_013710.1,1142-1160).
ctggttttgttcaacaaca

SEQ ID NO: 557745 - DNA, 19 bp, Mus musculus
  siRNA target sequence for Fgd2 (NM_013710.1,1323-1341).
ggtcccgagatgaaatggt

SEQ ID NO: 557746 - DNA, 19 bp, Mus musculus
  siRNA target sequence for Fgd2 (NM_013710.1,1566-1584).
gggcttgcggctatgtagt

SEQ ID NO: 557747 - DNA, 19 bp, Mus musculus
  siRNA target sequence for Fgd2 (NM_013710.1,1606-1624).
ccgtgcggagctgaaatat

SEQ ID NO: 557748 - DNA, 19 bp, Mus musculus
  siRNA target sequence for Fgd2 (NM_013710.1,1650-1668).
gcctgacctgctacacatt

SEQ ID NO: 557749 - DNA, 19 bp, Mus musculus
  siRNA target sequence for Fgd2 (NM_013710.1,1842-1860).
cccttgtcctgtatgtcta

SEQ ID NO: 557750 - DNA, 19 bp, Mus musculus
  siRNA target sequence for Fgd2 (NM_013710.1,1843-1861).
ccttgtcctgtatgtctat

SEQ ID NO: 557751 - DNA, 19 bp, Mus musculus
  siRNA target sequence for Fgd2 (NM_013710.1,1904-1922).
ctgggctatcaggtgattt

SEQ ID NO: 557752 - DNA, 19 bp, Mus musculus
  siRNA target sequence for Fgd2 (NM_013710.1,2128-2146).
gcctaccccatggttctat

SEQ ID NO: 557753 - DNA, 19 bp, Mus musculus
  siRNA target sequence for Fgd2 (NM_013710.1,2130-2148).
ctaccccatggttctatca

SEQ ID NO: 557754 - DNA, 19 bp, Mus musculus
  siRNA target sequence for Fgd2 (NM_013710.1,2174-2192).
gacccacctgatgtctata

SEQ ID NO: 557755 - DNA, 19 bp, Mus musculus
  siRNA target sequence for Fgd2 (NM_013710.1,2188-2206).
ctataccgagacaattcat

SEQ ID NO: 557756 - DNA, 19 bp, Mus musculus
  siRNA target sequence for Fgd3 (NM_015759.1,289-307).
cctcgacaccccaagaaga

SEQ ID NO: 557757 - DNA, 19 bp, Mus musculus
  siRNA target sequence for Fgd3 (NM_015759.1,290-308).
ctcgacaccccaagaagaa

SEQ ID NO: 557758 - DNA, 19 bp, Mus musculus
  siRNA target sequence for Fgd3 (NM_015759.1,508-526).
gtgtggccagtgagaactt

SEQ ID NO: 557759 - DNA, 19 bp, Mus musculus
  siRNA target sequence for Fgd3 (NM_015759.1,663-681).
cccaaggtcaccctgttta

SEQ ID NO: 557760 - DNA, 19 bp, Mus musculus
  siRNA target sequence for Fgd3 (NM_015759.1,792-810).
ctggaccaggttttctgta

SEQ ID NO: 557761 - DNA, 19 bp, Mus musculus
  siRNA target sequence for Fgd3 (NM_015759.1,843-861).
gtcaccaccggcatcttct

SEQ ID NO: 557762 - DNA, 19 bp, Mus musculus
  siRNA target sequence for Fgd3 (NM_015759.1,1053-1071).
cagcgttctccgcagttta

SEQ ID NO: 557763 - DNA, 19 bp, Mus musculus
  siRNA target sequence for Fgd3 (NM_015759.1,1063-1081).
cgcagtttaaggatgtcat

SEQ ID NO: 557764 - DNA, 19 bp, Mus musculus
  siRNA target sequence for Fgd3 (NM_015759.1,1270-1288).
ccaatgctgccattaggaa

SEQ ID NO: 557765 - DNA, 19 bp, Mus musculus
  siRNA target sequence for Fgd3 (NM_015759.1,1357-1375).
cagccaatgagctgatcaa

SEQ ID NO: 557766 - DNA, 19 bp, Mus musculus
  siRNA target sequence for Fgd3 (NM_015759.1,1379-1397).
gggcagcatccagaagtta

SEQ ID NO: 557767 - DNA, 19 bp, Mus musculus
  siRNA target sequence for Fgd3 (NM_015759.1,1380-1398).
ggcagcatccagaagttat

SEQ ID NO: 557768 - DNA, 19 bp, Mus musculus
  siRNA target sequence for Fgd3 (NM_015759.1,1493-1511).
gctaagtgtacgggaaaaa

SEQ ID NO: 557769 - DNA, 19 bp, Mus musculus
  siRNA target sequence for Fgd3 (NM_015759.1,1530-1548).
caggtacaagatattgtga

SEQ ID NO: 557770 - DNA, 19 bp, Mus musculus
  siRNA target sequence for Fgd3 (NM_015759.1,1557-1575).
gcagcctgcacgttcatca

SEQ ID NO: 557771 - DNA, 19 bp, Mus musculus
  siRNA target sequence for Fgd3 (NM_015759.1,1558-1576).
cagcctgcacgttcatcat

SEQ ID NO: 557772 - DNA, 19 bp, Mus musculus
  siRNA target sequence for Fgd3 (NM_015759.1,1560-1578).
gcctgcacgttcatcataa

SEQ ID NO: 557773 - DNA, 19 bp, Mus musculus
  siRNA target sequence for Fgd3 (NM_015759.1,1562-1580).
ctgcacgttcatcataaca

SEQ ID NO: 557774 - DNA, 19 bp, Mus musculus
  siRNA target sequence for Fgd3 (NM_015759.1,1812-1830).
gggatcgagtccagaaagt

SEQ ID NO: 557775 - DNA, 19 bp, Mus musculus
  siRNA target sequence for Fgd3 (NM_015759.1,1843-1861).
caagacgcgacaaagagaa

SEQ ID NO: 557776 - DNA, 19 bp, Mus musculus
  siRNA target sequence for Fgd3 (NM_015759.1,1990-2008).
gcgtctgccgagagtgttt

SEQ ID NO: 557777 - DNA, 19 bp, Mus musculus
  siRNA target sequence for Fgd3 (NM_015759.1,2143-2161).
gtacgacctggaatgaagt

SEQ ID NO: 557778 - DNA, 19 bp, Mus musculus
  siRNA target sequence for Fgd3 (NM_015759.1,2223-2241).
ggcagactgctgtatagca

SEQ ID NO: 557779 - DNA, 19 bp, Mus musculus
  siRNA target sequence for Fgd3 (NM_015759.1,2224-2242).
gcagactgctgtatagcat

SEQ ID NO: 557780 - DNA, 19 bp, Mus musculus
  siRNA target sequence for Fgd3 (NM_015759.1,2251-2269).
ctggctgtaatataacgat

SEQ ID NO: 557781 - DNA, 19 bp, Mus musculus
  siRNA target sequence for Fgd4 (NM_139232.1,368-386).
gggaagcatagtaaggtat

SEQ ID NO: 557782 - DNA, 19 bp, Mus musculus
  siRNA target sequence for Fgd4 (NM_139232.1,378-396).
gtaaggtatcggatctcat

SEQ ID NO: 557783 - DNA, 19 bp, Mus musculus
  siRNA target sequence for Fgd4 (NM_139232.1,414-432).
gcagtgttttgtcaagtta

SEQ ID NO: 557784 - DNA, 19 bp, Mus musculus
  siRNA target sequence for Fgd4 (NM_139232.1,417-435).
gtgttttgtcaagttacat

SEQ ID NO: 557785 - DNA, 19 bp, Mus musculus
  siRNA target sequence for Fgd4 (NM_139232.1,443-461).
cagaaagattctactatga

SEQ ID NO: 557786 - DNA, 19 bp, Mus musculus
  siRNA target sequence for Fgd4 (NM_139232.1,453-471).
ctactatgaacctcaatat

SEQ ID NO: 557787 - DNA, 19 bp, Mus musculus
  siRNA target sequence for Fgd4 (NM_139232.1,466-484).
caatattcctcaaactcta

SEQ ID NO: 557788 - DNA, 19 bp, Mus musculus
  siRNA target sequence for Fgd4 (NM_139232.1,507-525).
cacctccacgaaaatttct

SEQ ID NO: 557789 - DNA, 19 bp, Mus musculus
  siRNA target sequence for Fgd4 (NM_139232.1,638-656).
gagaaggagactactctta

SEQ ID NO: 557790 - DNA, 19 bp, Mus musculus
  siRNA target sequence for Fgd4 (NM_139232.1,685-703).
cgcctctcctgatacacat

SEQ ID NO: 557791 - DNA, 19 bp, Mus musculus
  siRNA target sequence for Fgd4 (NM_139232.1,751-769).
catagccaatagtcatgat

SEQ ID NO: 557792 - DNA, 19 bp, Mus musculus
  siRNA target sequence for Fgd4 (NM_139232.1,880-898).
gaacaccatgggattggat

SEQ ID NO: 557793 - DNA, 19 bp, Mus musculus
  siRNA target sequence for Fgd4 (NM_139232.1,925-943).
ggagactaatgaacagaaa

SEQ ID NO: 557794 - DNA, 19 bp, Mus musculus
  siRNA target sequence for Fgd4 (NM_139232.1,956-974).
gccactgaacttttactta

SEQ ID NO: 557795 - DNA, 19 bp, Mus musculus
  siRNA target sequence for Fgd4 (NM_139232.1,996-1014).
ggctcgacctcctagatca

SEQ ID NO: 557796 - DNA, 19 bp, Mus musculus
  siRNA target sequence for Fgd4 (NM_139232.1,1007-1025).
ctagatcaggtattttatt

SEQ ID NO: 557797 - DNA, 19 bp, Mus musculus
  siRNA target sequence for Fgd4 (NM_139232.1,1010-1028).
gatcaggtattttattgca

SEQ ID NO: 557798 - DNA, 19 bp, Mus musculus
  siRNA target sequence for Fgd4 (NM_139232.1,1016-1034).
gtattttattgcaaactat

SEQ ID NO: 557799 - DNA, 19 bp, Mus musculus
  siRNA target sequence for Fgd4 (NM_139232.1,1133-1151).
cctgagctggagaaacgaa

SEQ ID NO: 557800 - DNA, 19 bp, Mus musculus
  siRNA target sequence for Fgd4 (NM_139232.1,1142-1160).
gagaaacgaatgcaagaat

SEQ ID NO: 557801 - DNA, 19 bp, Mus musculus
  siRNA target sequence for Fgd4 (NM_139232.1,1170-1188).
cacccagaattggagatat

SEQ ID NO: 557802 - DNA, 19 bp, Mus musculus
  siRNA target sequence for Fgd4 (NM_139232.1,1231-1249).
cgtgaagggatttgataat

SEQ ID NO: 557803 - DNA, 19 bp, Mus musculus
  siRNA target sequence for Fgd4 (NM_139232.1,1234-1252).
gaagggatttgataatgca

SEQ ID NO: 557804 - DNA, 19 bp, Mus musculus
  siRNA target sequence for Fgd4 (NM_139232.1,1324-1342).
gaagatctgtggaagctta

SEQ ID NO: 557805 - DNA, 19 bp, Mus musculus
  siRNA target sequence for Fgd4 (NM_139232.1,1376-1394).
cgcattcctcgctatgaga

SEQ ID NO: 557806 - DNA, 19 bp, Mus musculus
  siRNA target sequence for Fgd4 (NM_139232.1,1377-1395).
gcattcctcgctatgagat

SEQ ID NO: 557807 - DNA, 19 bp, Mus musculus
  siRNA target sequence for Fgd4 (NM_139232.1,1406-1424).
gactacctgaagaagttgt

SEQ ID NO: 557808 - DNA, 19 bp, Mus musculus
  siRNA target sequence for Fgd4 (NM_139232.1,1432-1450).
ctccccagactggaatgat

SEQ ID NO: 557809 - DNA, 19 bp, Mus musculus
  siRNA target sequence for Fgd4 (NM_139232.1,1444-1462).
gaatgatgcaaaaaagtca

SEQ ID NO: 557810 - DNA, 19 bp, Mus musculus
  siRNA target sequence for Fgd4 (NM_139232.1,1459-1477).
gtcacttgaaattatatct

SEQ ID NO: 557811 - DNA, 19 bp, Mus musculus
  siRNA target sequence for Fgd4 (NM_139232.1,1481-1499).
gcagcaagccattctaata

SEQ ID NO: 557812 - DNA, 19 bp, Mus musculus
  siRNA target sequence for Fgd4 (NM_139232.1,1489-1507).
ccattctaatagtgcaata

SEQ ID NO: 557813 - DNA, 19 bp, Mus musculus
  siRNA target sequence for Fgd4 (NM_139232.1,1490-1508).
cattctaatagtgcaataa

SEQ ID NO: 557814 - DNA, 19 bp, Mus musculus
  siRNA target sequence for Fgd4 (NM_139232.1,1494-1512).
ctaatagtgcaataagaaa

SEQ ID NO: 557815 - DNA, 19 bp, Mus musculus
  siRNA target sequence for Fgd4 (NM_139232.1,1666-1684).
caacaacatgttgctatat

SEQ ID NO: 557816 - DNA, 19 bp, Mus musculus
  siRNA target sequence for Fgd4 (NM_139232.1,1825-1843).
gctgcaggccagttctgaa

SEQ ID NO: 557817 - DNA, 19 bp, Mus musculus
  siRNA target sequence for Fgd4 (NM_139232.1,1895-1913).
catcaaaggcatgaaactt

SEQ ID NO: 557818 - DNA, 19 bp, Mus musculus
  siRNA target sequence for Fgd4 (NM_139232.1,1898-1916).
caaaggcatgaaactttca

SEQ ID NO: 557819 - DNA, 19 bp, Mus musculus
  siRNA target sequence for Fgd4 (NM_139232.1,1927-1945).
cgcaaaggaaaatgacatt

SEQ ID NO: 557820 - DNA, 19 bp, Mus musculus
  siRNA target sequence for Fgd4 (NM_139232.1,1940-1958).
gacattcccctagaagttt

SEQ ID NO: 557821 - DNA, 19 bp, Mus musculus
  siRNA target sequence for Fgd4 (NM_139232.1,1942-1960).
cattcccctagaagtttct

SEQ ID NO: 557822 - DNA, 19 bp, Mus musculus
  siRNA target sequence for Fgd4 (NM_139232.1,1986-2004).
caagatggatacgtgataa

SEQ ID NO: 557823 - DNA, 19 bp, Mus musculus
  siRNA target sequence for Fgd4 (NM_139232.1,1989-2007).
gatggatacgtgataatga

SEQ ID NO: 557824 - DNA, 19 bp, Mus musculus
  siRNA target sequence for Fgd4 (NM_139232.1,2142-2160).
gattgaacaaggtttgtaa

SEQ ID NO: 557825 - DNA, 19 bp, Mus musculus
  siRNA target sequence for Fgd4 (NM_139232.1,2162-2180).
gactgttaccagataataa

SEQ ID NO: 557826 - DNA, 19 bp, Mus musculus
  siRNA target sequence for Fgd4 (NM_139232.1,2164-2182).
ctgttaccagataataagt

SEQ ID NO: 557827 - DNA, 19 bp, Mus musculus
  siRNA target sequence for Fgd4 (NM_139232.1,2173-2191).
gataataagtggattcaca

SEQ ID NO: 557828 - DNA, 19 bp, Mus musculus
  siRNA target sequence for Fgd4 (NM_139232.1,2214-2232).
ggggcattttagagattga

SEQ ID NO: 557829 - DNA, 19 bp, Mus musculus
  siRNA target sequence for Fgd4 (NM_139232.1,2227-2245).
gattgaatcagcagaagta

SEQ ID NO: 557830 - DNA, 19 bp, Mus musculus
  siRNA target sequence for Fgd4 (NM_139232.1,2265-2283).
gcagtttccttcagtacat

SEQ ID NO: 557831 - DNA, 19 bp, Mus musculus
  siRNA target sequence for Fgd4 (NM_139232.1,2336-2354).
ccccttgtgctgtacatgt

SEQ ID NO: 557832 - DNA, 19 bp, Mus musculus
  siRNA target sequence for Fgd4 (NM_139232.1,2337-2355).
cccttgtgctgtacatgta

SEQ ID NO: 557833 - DNA, 19 bp, Mus musculus
  siRNA target sequence for Fgd4 (NM_139232.1,2402-2420).
ggctacgttgtggatgata

SEQ ID NO: 557834 - DNA, 19 bp, Mus musculus
  siRNA target sequence for Fgd4 (NM_139232.1,2403-2421).
gctacgttgtggatgatat

SEQ ID NO: 557835 - DNA, 19 bp, Mus musculus
  siRNA target sequence for Fgd4 (NM_139232.1,2432-2450).
gcagatctgccacatagtt

SEQ ID NO: 557836 - DNA, 19 bp, Mus musculus
  siRNA target sequence for Fgd4 (NM_139232.1,2433-2451).
cagatctgccacatagttt

SEQ ID NO: 557837 - DNA, 19 bp, Mus musculus
  siRNA target sequence for Fgd4 (NM_139232.1,2435-2453).
gatctgccacatagtttca

SEQ ID NO: 557838 - DNA, 19 bp, Mus musculus
  siRNA target sequence for Fgd4 (NM_139232.1,2573-2591).
catctagccaccttgaaca

SEQ ID NO: 557839 - DNA, 19 bp, Mus musculus
  siRNA target sequence for Fgd4 (NM_139233.1,2000-2018).
cattatcacagctgttaga

SEQ ID NO: 557840 - DNA, 19 bp, Mus musculus
  siRNA target sequence for Fgd4 (NM_139233.1,2011-2029).
ctgttagaaatggtatata

SEQ ID NO: 557841 - DNA, 19 bp, Mus musculus
  siRNA target sequence for Fgd5 (NM_172731.1,323-341).
ggaactgctctcgaaacaa

SEQ ID NO: 557842 - DNA, 19 bp, Mus musculus
  siRNA target sequence for Fgd5 (NM_172731.1,347-365).
cattgaagtgcctcaagaa

SEQ ID NO: 557843 - DNA, 19 bp, Mus musculus
  siRNA target sequence for Fgd5 (NM_172731.1,521-539).
gtattagcccctcaacttt

SEQ ID NO: 557844 - DNA, 19 bp, Mus musculus
  siRNA target sequence for Fgd5 (NM_172731.1,615-633).
cttgagccgctgtaagagt

SEQ ID NO: 557845 - DNA, 19 bp, Mus musculus
  siRNA target sequence for Fgd5 (NM_172731.1,663-681).
cgtcatcaagggcaaagta

SEQ ID NO: 557846 - DNA, 19 bp, Mus musculus
  siRNA target sequence for Fgd5 (NM_172731.1,730-748).
cctctgctgggttttacta

SEQ ID NO: 557847 - DNA, 19 bp, Mus musculus
  siRNA target sequence for Fgd5 (NM_172731.1,731-749).
ctctgctgggttttactat

SEQ ID NO: 557848 - DNA, 19 bp, Mus musculus
  siRNA target sequence for Fgd5 (NM_172731.1,776-794).
gcgaagtgggccctgtttt

SEQ ID NO: 557849 - DNA, 19 bp, Mus musculus
  siRNA target sequence for Fgd5 (NM_172731.1,777-795).
cgaagtgggccctgttttt

SEQ ID NO: 557850 - DNA, 19 bp, Mus musculus
  siRNA target sequence for Fgd5 (NM_172731.1,876-894).
ggaagatgccagtgtgtta

SEQ ID NO: 557851 - DNA, 19 bp, Mus musculus
  siRNA target sequence for Fgd6 (NM_053072.2,332-350).
ctcccaagccaaagttagt

SEQ ID NO: 557852 - DNA, 19 bp, Mus musculus
  siRNA target sequence for Fgd6 (NM_053072.2,345-363).
gttagtggggaccaataat

SEQ ID NO: 557853 - DNA, 19 bp, Mus musculus
  siRNA target sequence for Fgd6 (NM_053072.2,375-393).
ccctcctattgcacctaaa

SEQ ID NO: 557854 - DNA, 19 bp, Mus musculus
  siRNA target sequence for Fgd6 (NM_053072.2,413-431).
gtgttccacggttaacgaa

SEQ ID NO: 557855 - DNA, 19 bp, Mus musculus
  siRNA target sequence for Fgd6 (NM_053072.2,418-436).
ccacggttaacgaagaaga

SEQ ID NO: 557856 - DNA, 19 bp, Mus musculus
  siRNA target sequence for Fgd6 (NM_053072.2,444-462).
ggcaattgcgccaaaacca

SEQ ID NO: 557857 - DNA, 19 bp, Mus musculus
  siRNA target sequence for Fgd6 (NM_053072.2,445-463).
gcaattgcgccaaaaccaa

SEQ ID NO: 557858 - DNA, 19 bp, Mus musculus
  siRNA target sequence for Fgd6 (NM_053072.2,460-478).
ccaaaagtcccgacaaact

SEQ ID NO: 557859 - DNA, 19 bp, Mus musculus
  siRNA target sequence for Fgd6 (NM_053072.2,468-486).
cccgacaaactcagttgtt

SEQ ID NO: 557860 - DNA, 19 bp, Mus musculus
  siRNA target sequence for Fgd6 (NM_053072.2,470-488).
cgacaaactcagttgttca

SEQ ID NO: 557861 - DNA, 19 bp, Mus musculus
  siRNA target sequence for Fgd6 (NM_053072.2,473-491).
caaactcagttgttcaaga

SEQ ID NO: 557862 - DNA, 19 bp, Mus musculus
  siRNA target sequence for Fgd6 (NM_053072.2,479-497).
cagttgttcaagacattaa

SEQ ID NO: 557863 - DNA, 19 bp, Mus musculus
  siRNA target sequence for Fgd6 (NM_053072.2,563-581).
ctggcaagtctaattgcaa

SEQ ID NO: 557864 - DNA, 19 bp, Mus musculus
  siRNA target sequence for Fgd6 (NM_053072.2,627-645).
ctgcagttctgggtgtatt

SEQ ID NO: 557865 - DNA, 19 bp, Mus musculus
  siRNA target sequence for Fgd6 (NM_053072.2,702-720).
gggaatgaaggaaaattta

SEQ ID NO: 557866 - DNA, 19 bp, Mus musculus
  siRNA target sequence for Fgd6 (NM_053072.2,766-784).
gattcaagcagcgaaaagt

SEQ ID NO: 557867 - DNA, 19 bp, Mus musculus
  siRNA target sequence for Fgd6 (NM_053072.2,884-902).
ggcacagagctccaaaaaa

SEQ ID NO: 557868 - DNA, 19 bp, Mus musculus
  siRNA target sequence for Fgd6 (NM_053072.2,932-950).
ccaggcagatcagaattga

SEQ ID NO: 557869 - DNA, 19 bp, Mus musculus
  siRNA target sequence for Fgd6 (NM_053072.2,975-993).
gaccggctttgaaaaagtt

SEQ ID NO: 557870 - DNA, 19 bp, Mus musculus
  siRNA target sequence for Fgd6 (NM_053072.2,1018-1036).
caacttcctagggatgaat

SEQ ID NO: 557871 - DNA, 19 bp, Mus musculus
  siRNA target sequence for Fgd6 (NM_053072.2,1041-1059).
gactctcaagacttgtcaa

SEQ ID NO: 557872 - DNA, 19 bp, Mus musculus
  siRNA target sequence for Fgd6 (NM_053072.2,1115-1133).
gagtggcttcagatggaat

SEQ ID NO: 557873 - DNA, 19 bp, Mus musculus
  siRNA target sequence for Fgd6 (NM_053072.2,1152-1170).
caaaggtctcggtccttta

SEQ ID NO: 557874 - DNA, 19 bp, Mus musculus
  siRNA target sequence for Fgd6 (NM_053072.2,1156-1174).
ggtctcggtcctttagaaa

SEQ ID NO: 557875 - DNA, 19 bp, Mus musculus
  siRNA target sequence for Fgd6 (NM_053072.2,1157-1175).
gtctcggtcctttagaaat

SEQ ID NO: 557876 - DNA, 19 bp, Mus musculus
  siRNA target sequence for Fgd6 (NM_053072.2,1177-1195).
cacttactaccgtatacct

SEQ ID NO: 557877 - DNA, 19 bp, Mus musculus
  siRNA target sequence for Fgd6 (NM_053072.2,1249-1267).
cgccagaagcatgtagata

SEQ ID NO: 557878 - DNA, 19 bp, Mus musculus
  siRNA target sequence for Fgd6 (NM_053072.2,1290-1308).
gccagggaactcaaacaat

SEQ ID NO: 557879 - DNA, 19 bp, Mus musculus
  siRNA target sequence for Fgd6 (NM_053072.2,1357-1375).
gttcttcgtcagaatgctt

SEQ ID NO: 557880 - DNA, 19 bp, Mus musculus
  siRNA target sequence for Fgd6 (NM_053072.2,1485-1503).
gcagcaaacgccttcttta

SEQ ID NO: 557881 - DNA, 19 bp, Mus musculus
  siRNA target sequence for Fgd6 (NM_053072.2,1488-1506).
gcaaacgccttctttagat

SEQ ID NO: 557882 - DNA, 19 bp, Mus musculus
  siRNA target sequence for Fgd6 (NM_053072.2,1489-1507).
caaacgccttctttagata

SEQ ID NO: 557883 - DNA, 19 bp, Mus musculus
  siRNA target sequence for Fgd6 (NM_053072.2,1493-1511).
cgccttctttagatacaga

SEQ ID NO: 557884 - DNA, 19 bp, Mus musculus
  siRNA target sequence for Fgd6 (NM_053072.2,1494-1512).
gccttctttagatacagat

SEQ ID NO: 557885 - DNA, 19 bp, Mus musculus
  siRNA target sequence for Fgd6 (NM_053072.2,1495-1513).
ccttctttagatacagatt

SEQ ID NO: 557886 - DNA, 19 bp, Mus musculus
  siRNA target sequence for Fgd6 (NM_053072.2,1561-1579).
gacaaagagactacttaca

SEQ ID NO: 557887 - DNA, 19 bp, Mus musculus
  siRNA target sequence for Fgd6 (NM_053072.2,1668-1686).
gtcagctcctcccatacaa

SEQ ID NO: 557888 - DNA, 19 bp, Mus musculus
  siRNA target sequence for Fgd6 (NM_053072.2,1675-1693).
cctcccatacaaaaggaat

SEQ ID NO: 557889 - DNA, 19 bp, Mus musculus
  siRNA target sequence for Fgd6 (NM_053072.2,1703-1721).
cgagaatcattcccaaaaa

SEQ ID NO: 557890 - DNA, 19 bp, Mus musculus
  siRNA target sequence for Fgd6 (NM_053072.2,1745-1763).
cagcaggggtgcttaaaaa

SEQ ID NO: 557891 - DNA, 19 bp, Mus musculus
  siRNA target sequence for Fgd6 (NM_053072.2,1772-1790).
cggaggagcttgtagaaaa

SEQ ID NO: 557892 - DNA, 19 bp, Mus musculus
  siRNA target sequence for Fgd6 (NM_053072.2,1875-1893).
gtcagcatcaccctttgat

SEQ ID NO: 557893 - DNA, 19 bp, Mus musculus
  siRNA target sequence for Fgd6 (NM_053072.2,1877-1895).
cagcatcaccctttgatat

SEQ ID NO: 557894 - DNA, 19 bp, Mus musculus
  siRNA target sequence for Fgd6 (NM_053072.2,1929-1947).
gttacctcatcctattcta

SEQ ID NO: 557895 - DNA, 19 bp, Mus musculus
  siRNA target sequence for Fgd6 (NM_053072.2,1970-1988).
ccttgaaacgcgtcacttt

SEQ ID NO: 557896 - DNA, 19 bp, Mus musculus
  siRNA target sequence for Fgd6 (NM_053072.2,1971-1989).
cttgaaacgcgtcacttta

SEQ ID NO: 557897 - DNA, 19 bp, Mus musculus
  siRNA target sequence for Fgd6 (NM_053072.2,1978-1996).
cgcgtcactttatccttaa

SEQ ID NO: 557898 - DNA, 19 bp, Mus musculus
  siRNA target sequence for Fgd6 (NM_053072.2,1979-1997).
gcgtcactttatccttaaa

SEQ ID NO: 557899 - DNA, 19 bp, Mus musculus
  siRNA target sequence for Fgd6 (NM_053072.2,1980-1998).
cgtcactttatccttaaat

SEQ ID NO: 557900 - DNA, 19 bp, Mus musculus
  siRNA target sequence for Fgd6 (NM_053072.2,1985-2003).
ctttatccttaaataacga

SEQ ID NO: 557901 - DNA, 19 bp, Mus musculus
  siRNA target sequence for Fgd6 (NM_053072.2,2053-2071).
gatgcggaccggtgtaaca

SEQ ID NO: 557902 - DNA, 19 bp, Mus musculus
  siRNA target sequence for Fgd6 (NM_053072.2,2064-2082).
gtgtaacaagccttgcaaa

SEQ ID NO: 557903 - DNA, 19 bp, Mus musculus
  siRNA target sequence for Fgd6 (NM_053072.2,2148-2166).
gagcgactttcagaaaatt

SEQ ID NO: 557904 - DNA, 19 bp, Mus musculus
  siRNA target sequence for Fgd6 (NM_053072.2,2152-2170).
gactttcagaaaattaggt

SEQ ID NO: 557905 - DNA, 19 bp, Mus musculus
  siRNA target sequence for Fgd6 (NM_053072.2,2214-2232).
cgctagagagccaaaagga

SEQ ID NO: 557906 - DNA, 19 bp, Mus musculus
  siRNA target sequence for Fgd6 (NM_053072.2,2424-2442).
cgacttcgggccagagtat

SEQ ID NO: 557907 - DNA, 19 bp, Mus musculus
  siRNA target sequence for Fgd6 (NM_053072.2,2427-2445).
cttcgggccagagtatgaa

SEQ ID NO: 557908 - DNA, 19 bp, Mus musculus
  siRNA target sequence for Fgd6 (NM_053072.2,2430-2448).
cgggccagagtatgaaaat

SEQ ID NO: 557909 - DNA, 19 bp, Mus musculus
  siRNA target sequence for Fgd6 (NM_053072.2,2464-2482).
gagatacccgagtatgaga

SEQ ID NO: 557910 - DNA, 19 bp, Mus musculus
  siRNA target sequence for Fgd6 (NM_053072.2,2466-2484).
gatacccgagtatgagaat

SEQ ID NO: 557911 - DNA, 19 bp, Mus musculus
  siRNA target sequence for Fgd6 (NM_053072.2,2479-2497).
gagaatttgccctttgtca

SEQ ID NO: 557912 - DNA, 19 bp, Mus musculus
  siRNA target sequence for Fgd6 (NM_053072.2,2610-2628).
gcaacttgatcctagacat

SEQ ID NO: 557913 - DNA, 19 bp, Mus musculus
  siRNA target sequence for Fgd6 (NM_053072.2,2706-2724).
ggaagtcatcaatagttct

SEQ ID NO: 557914 - DNA, 19 bp, Mus musculus
  siRNA target sequence for Fgd6 (NM_053072.2,2801-2819).
ggatgaaaagcaaagttca

SEQ ID NO: 557915 - DNA, 19 bp, Mus musculus
  siRNA target sequence for Fgd6 (NM_053072.2,3033-3051).
cacctggacagaacaacaa

SEQ ID NO: 557916 - DNA, 19 bp, Mus musculus
  siRNA target sequence for Fgd6 (NM_053072.2,3075-3093).
gaaggggccatacttaaaa

SEQ ID NO: 557917 - DNA, 19 bp, Mus musculus
  siRNA target sequence for Fgd6 (NM_053072.2,3079-3097).
gggccatacttaaaaatgt

SEQ ID NO: 557918 - DNA, 19 bp, Mus musculus
  siRNA target sequence for Fgd6 (NM_053072.2,3080-3098).
ggccatacttaaaaatgta

SEQ ID NO: 557919 - DNA, 19 bp, Mus musculus
  siRNA target sequence for Fgd6 (NM_053072.2,3081-3099).
gccatacttaaaaatgtat

SEQ ID NO: 557920 - DNA, 19 bp, Mus musculus
  siRNA target sequence for Fgd6 (NM_053072.2,3147-3165).
gcagtgcaagaaaaatcca

SEQ ID NO: 557921 - DNA, 19 bp, Mus musculus
  siRNA target sequence for Fgd6 (NM_053072.2,3173-3191).
ctgcagttgtcagagaatt

SEQ ID NO: 557922 - DNA, 19 bp, Mus musculus
  siRNA target sequence for Fgd6 (NM_053072.2,3273-3291).
gctactgacagattactta

SEQ ID NO: 557923 - DNA, 19 bp, Mus musculus
  siRNA target sequence for Fgd6 (NM_053072.2,3274-3292).
ctactgacagattacttaa

SEQ ID NO: 557924 - DNA, 19 bp, Mus musculus
  siRNA target sequence for Fgd6 (NM_053072.2,3351-3369).
catagaggtagctaaccat

SEQ ID NO: 557925 - DNA, 19 bp, Mus musculus
  siRNA target sequence for Fgd6 (NM_053072.2,3361-3379).
gctaaccatgccaatgaca

SEQ ID NO: 557926 - DNA, 19 bp, Mus musculus
  siRNA target sequence for Fgd6 (NM_053072.2,3567-3585).
gcagtctgggatgtacaaa

SEQ ID NO: 557927 - DNA, 19 bp, Mus musculus
  siRNA target sequence for Fgd6 (NM_053072.2,3572-3590).
ctgggatgtacaaactgaa

SEQ ID NO: 557928 - DNA, 19 bp, Mus musculus
  siRNA target sequence for Fgd6 (NM_053072.2,3575-3593).
ggatgtacaaactgaacaa

SEQ ID NO: 557929 - DNA, 19 bp, Mus musculus
  siRNA target sequence for Fgd6 (NM_053072.2,3629-3647).
ctacccaggaggcatatca

SEQ ID NO: 557930 - DNA, 19 bp, Mus musculus
  siRNA target sequence for Fgd6 (NM_053072.2,3648-3666).
gaacgagttaaagattgaa

SEQ ID NO: 557931 - DNA, 19 bp, Mus musculus
  siRNA target sequence for Fgd6 (NM_053072.2,3651-3669).
cgagttaaagattgaaagt

SEQ ID NO: 557932 - DNA, 19 bp, Mus musculus
  siRNA target sequence for Fgd6 (NM_053072.2,3654-3672).
gttaaagattgaaagtgta

SEQ ID NO: 557933 - DNA, 19 bp, Mus musculus
  siRNA target sequence for Fgd6 (NM_053072.2,3668-3686).
gtgtagagcgttctttcat

SEQ ID NO: 557934 - DNA, 19 bp, Mus musculus
  siRNA target sequence for Fgd6 (NM_053072.2,3684-3702).
catcctctcagctagttct

SEQ ID NO: 557935 - DNA, 19 bp, Mus musculus
  siRNA target sequence for Fgd6 (NM_053072.2,3698-3716).
gttctgccgcagaaagaga

SEQ ID NO: 557936 - DNA, 19 bp, Mus musculus
  siRNA target sequence for Fgd6 (NM_053072.2,3732-3750).
catatccagctccatagaa

SEQ ID NO: 557937 - DNA, 19 bp, Mus musculus
  siRNA target sequence for Fgd6 (NM_053072.2,3793-3811).
cttgacgaggactcagaaa

SEQ ID NO: 557938 - DNA, 19 bp, Mus musculus
  siRNA target sequence for Fgd6 (NM_053072.2,3871-3889).
gccaccatgtgtatgattt

SEQ ID NO: 557939 - DNA, 19 bp, Mus musculus
  siRNA target sequence for Fgd6 (NM_053072.2,3953-3971).
gccaagcttgctcatcaaa

SEQ ID NO: 557940 - DNA, 19 bp, Mus musculus
  siRNA target sequence for Fgd6 (NM_053072.2,3955-3973).
caagcttgctcatcaaaca

SEQ ID NO: 557941 - DNA, 19 bp, Mus musculus
  siRNA target sequence for Fgd6 (NM_053072.2,3959-3977).
cttgctcatcaaacaagta

SEQ ID NO: 557942 - DNA, 19 bp, Mus musculus
  siRNA target sequence for Fgd6 (NM_053072.2,4029-4047).
ccaagagctacagaaatta

SEQ ID NO: 557943 - DNA, 19 bp, Mus musculus
  siRNA target sequence for Fgd6 (NM_053072.2,4112-4130).
cgtcagtcttacatagcat

SEQ ID NO: 557944 - DNA, 19 bp, Mus musculus
  siRNA target sequence for Fgd6 (NM_053072.2,4160-4178).
ccgctgctctcaaagaagt

SEQ ID NO: 557945 - DNA, 19 bp, Mus musculus
  siRNA target sequence for Fgd6 (NM_053072.2,4243-4261).
ccatggaaacacttatggt

SEQ ID NO: 557946 - DNA, 19 bp, Mus musculus
  siRNA target sequence for Fgd6 (NM_053072.2,4305-4323).
ggacgtggcagctttggaa

SEQ ID NO: 557947 - DNA, 19 bp, Mus musculus
  siRNA target sequence for Fgd6 (NM_053072.2,4399-4417).
cacaaaggcatggtgtttt

SEQ ID NO: 557948 - DNA, 19 bp, Mus musculus
  siRNA target sequence for Fgd6 (NM_053072.2,4454-4472).
ggtggatagacgcatttca

SEQ ID NO: 557949 - DNA, 19 bp, Mus musculus
  siRNA target sequence for Fyco1 (NM_148925.1,399-417).
gaggatcatccgtgatcta

SEQ ID NO: 557950 - DNA, 19 bp, Mus musculus
  siRNA target sequence for Fyco1 (NM_148925.1,401-419).
ggatcatccgtgatctaca

SEQ ID NO: 557951 - DNA, 19 bp, Mus musculus
  siRNA target sequence for Fyco1 (NM_148925.1,405-423).
catccgtgatctacaagat

SEQ ID NO: 557952 - DNA, 19 bp, Mus musculus
  siRNA target sequence for Fyco1 (NM_148925.1,421-439).
gatgcagcgacagaactaa

SEQ ID NO: 557953 - DNA, 19 bp, Mus musculus
  siRNA target sequence for Fyco1 (NM_148925.1,431-449).
cagaactaagccatgaatt

SEQ ID NO: 557954 - DNA, 19 bp, Mus musculus
  siRNA target sequence for Fyco1 (NM_148925.1,492-510).
gcacaagttttcttacaaa

SEQ ID NO: 557955 - DNA, 19 bp, Mus musculus
  siRNA target sequence for Fyco1 (NM_148925.1,495-513).
caagttttcttacaaactt

SEQ ID NO: 557956 - DNA, 19 bp, Mus musculus
  siRNA target sequence for Fyco1 (NM_148925.1,503-521).
cttacaaacttgagtatct

SEQ ID NO: 557957 - DNA, 19 bp, Mus musculus
  siRNA target sequence for Fyco1 (NM_148925.1,516-534).
gtatcttctgcaatttgat

SEQ ID NO: 557958 - DNA, 19 bp, Mus musculus
  siRNA target sequence for Fyco1 (NM_148925.1,573-591).
ctactgggattacttttgt

SEQ ID NO: 557959 - DNA, 19 bp, Mus musculus
  siRNA target sequence for Fyco1 (NM_148925.1,617-635).
caaatgatggcattcgatt

SEQ ID NO: 557960 - DNA, 19 bp, Mus musculus
  siRNA target sequence for Fyco1 (NM_148925.1,672-690).
gaaagggagagccttcatt

SEQ ID NO: 557961 - DNA, 19 bp, Mus musculus
  siRNA target sequence for Fyco1 (NM_148925.1,682-700).
gccttcattcgctactctt

SEQ ID NO: 557962 - DNA, 19 bp, Mus musculus
  siRNA target sequence for Fyco1 (NM_148925.1,683-701).
ccttcattcgctactcttt

SEQ ID NO: 557963 - DNA, 19 bp, Mus musculus
  siRNA target sequence for Fyco1 (NM_148925.1,737-755).
gcttcatgaacactaaagt

SEQ ID NO: 557964 - DNA, 19 bp, Mus musculus
  siRNA target sequence for Fyco1 (NM_148925.1,754-772).
gtgaccagtgactggtatt

SEQ ID NO: 557965 - DNA, 19 bp, Mus musculus
  siRNA target sequence for Fyco1 (NM_148925.1,959-977).
gctccagcatgagtagttt

SEQ ID NO: 557966 - DNA, 19 bp, Mus musculus
  siRNA target sequence for Fyco1 (NM_148925.1,960-978).
ctccagcatgagtagttta

SEQ ID NO: 557967 - DNA, 19 bp, Mus musculus
  siRNA target sequence for Fyco1 (NM_148925.1,1317-1335).
ggccttggagctaaatgta

SEQ ID NO: 557968 - DNA, 19 bp, Mus musculus
  siRNA target sequence for Fyco1 (NM_148925.1,1452-1470).
ccttgctagggcagagaaa

SEQ ID NO: 557969 - DNA, 19 bp, Mus musculus
  siRNA target sequence for Fyco1 (NM_148925.1,1665-1683).
ggctagcctagcacactta

SEQ ID NO: 557970 - DNA, 19 bp, Mus musculus
  siRNA target sequence for Fyco1 (NM_148925.1,1667-1685).
ctagcctagcacacttagt

SEQ ID NO: 557971 - DNA, 19 bp, Mus musculus
  siRNA target sequence for Fyco1 (NM_148925.1,1670-1688).
gcctagcacacttagtgaa

SEQ ID NO: 557972 - DNA, 19 bp, Mus musculus
  siRNA target sequence for Fyco1 (NM_148925.1,1857-1875).
ggaagccacgtctcttaca

SEQ ID NO: 557973 - DNA, 19 bp, Mus musculus
  siRNA target sequence for Fyco1 (NM_148925.1,1858-1876).
gaagccacgtctcttacat

SEQ ID NO: 557974 - DNA, 19 bp, Mus musculus
  siRNA target sequence for Fyco1 (NM_148925.1,1911-1929).
ggtgagtcagcttgtaagt

SEQ ID NO: 557975 - DNA, 19 bp, Mus musculus
  siRNA target sequence for Fyco1 (NM_148925.1,2035-2053).
gcggagatgccggaaaaga

SEQ ID NO: 557976 - DNA, 19 bp, Mus musculus
  siRNA target sequence for Fyco1 (NM_148925.1,2074-2092).
gaacaggtaaacaatagca

SEQ ID NO: 557977 - DNA, 19 bp, Mus musculus
  siRNA target sequence for Fyco1 (NM_148925.1,2178-2196).
ggccttgcaaactgactat

SEQ ID NO: 557978 - DNA, 19 bp, Mus musculus
  siRNA target sequence for Fyco1 (NM_148925.1,2180-2198).
ccttgcaaactgactataa

SEQ ID NO: 557979 - DNA, 19 bp, Mus musculus
  siRNA target sequence for Fyco1 (NM_148925.1,2597-2615).
cccagcggttacagaatga

SEQ ID NO: 557980 - DNA, 19 bp, Mus musculus
  siRNA target sequence for Fyco1 (NM_148925.1,2654-2672).
gtgatcgagacaagttaca

SEQ ID NO: 557981 - DNA, 19 bp, Mus musculus
  siRNA target sequence for Fyco1 (NM_148925.1,2656-2674).
gatcgagacaagttacaga

SEQ ID NO: 557982 - DNA, 19 bp, Mus musculus
  siRNA target sequence for Fyco1 (NM_148925.1,2717-2735).
ccctggtgcaacaactgaa

SEQ ID NO: 557983 - DNA, 19 bp, Mus musculus
  siRNA target sequence for Fyco1 (NM_148925.1,2990-3008).
cagctgagaaggatcgaat

SEQ ID NO: 557984 - DNA, 19 bp, Mus musculus
  siRNA target sequence for Fyco1 (NM_148925.1,3151-3169).
gaggcagccagttcattct

SEQ ID NO: 557985 - DNA, 19 bp, Mus musculus
  siRNA target sequence for Fyco1 (NM_148925.1,3227-3245).
ctgcacaccaggaacaaga

SEQ ID NO: 557986 - DNA, 19 bp, Mus musculus
  siRNA target sequence for Fyco1 (NM_148925.1,3247-3265).
gccctcaagttccaactaa

SEQ ID NO: 557987 - DNA, 19 bp, Mus musculus
  siRNA target sequence for Fyco1 (NM_148925.1,3249-3267).
cctcaagttccaactaagt

SEQ ID NO: 557988 - DNA, 19 bp, Mus musculus
  siRNA target sequence for Fyco1 (NM_148925.1,3280-3298).
gaccaccagaaccgattaa

SEQ ID NO: 557989 - DNA, 19 bp, Mus musculus
  siRNA target sequence for Fyco1 (NM_148925.1,3283-3301).
caccagaaccgattaaaga

SEQ ID NO: 557990 - DNA, 19 bp, Mus musculus
  siRNA target sequence for Fyco1 (NM_148925.1,3459-3477).
cactttactgcgcaaagat

SEQ ID NO: 557991 - DNA, 19 bp, Mus musculus
  siRNA target sequence for Fyco1 (NM_148925.1,3461-3479).
ctttactgcgcaaagatga

SEQ ID NO: 557992 - DNA, 19 bp, Mus musculus
  siRNA target sequence for Fyco1 (NM_148925.1,3496-3514).
caaaccagtctagaaagaa

SEQ ID NO: 557993 - DNA, 19 bp, Mus musculus
  siRNA target sequence for Fyco1 (NM_148925.1,3830-3848).
ggatatgtggccgtatctt

SEQ ID NO: 557994 - DNA, 19 bp, Mus musculus
  siRNA target sequence for Fyco1 (NM_148925.1,3836-3854).
gtggccgtatcttctgtta

SEQ ID NO: 557995 - DNA, 19 bp, Mus musculus
  siRNA target sequence for Fyco1 (NM_148925.1,3839-3857).
gccgtatcttctgttacta

SEQ ID NO: 557996 - DNA, 19 bp, Mus musculus
  siRNA target sequence for Fyco1 (NM_148925.1,3855-3873).
ctactgctgtaataactat

SEQ ID NO: 557997 - DNA, 19 bp, Mus musculus
  siRNA target sequence for Fyco1 (NM_148925.1,3940-3958).
ggctctggatccaatgata

SEQ ID NO: 557998 - DNA, 19 bp, Mus musculus
  siRNA target sequence for Fyco1 (NM_148925.1,4107-4125).
gtgccagatccaagaatct

SEQ ID NO: 557999 - DNA, 19 bp, Mus musculus
  siRNA target sequence for Fyco1 (NM_148925.1,4147-4165).
cccactgaaactgattcaa

SEQ ID NO: 558000 - DNA, 19 bp, Mus musculus
  siRNA target sequence for Fyco1 (NM_148925.1,4148-4166).
ccactgaaactgattcaat

SEQ ID NO: 558001 - DNA, 19 bp, Mus musculus
  siRNA target sequence for Fyco1 (NM_148925.1,4191-4209).
caccacatcaaactcatta

SEQ ID NO: 558002 - DNA, 19 bp, Mus musculus
  siRNA target sequence for Fyco1 (NM_148925.1,4558-4576).
cgaatccctggcatctact

SEQ ID NO: 558003 - DNA, 19 bp, Mus musculus
  siRNA target sequence for G630053K23 (NM_183154.1,62-80).
catgtgccaggagagttat

SEQ ID NO: 558004 - DNA, 19 bp, Mus musculus
  siRNA target sequence for G630053K23 (NM_183154.1,65-83).
gtgccaggagagttatgca

SEQ ID NO: 558005 - DNA, 19 bp, Mus musculus
  siRNA target sequence for G630053K23 (NM_183154.1,91-109).
ggactgatgaagctatctt

SEQ ID NO: 558006 - DNA, 19 bp, Mus musculus
  siRNA target sequence for G630053K23 (NM_183154.1,94-112).
ctgatgaagctatctttga

SEQ ID NO: 558007 - DNA, 19 bp, Mus musculus
  siRNA target sequence for G630053K23 (NM_183154.1,166-184).
gacaggagcgccttcgaaa

SEQ ID NO: 558008 - DNA, 19 bp, Mus musculus
  siRNA target sequence for G630053K23 (NM_183154.1,170-188).
ggagcgccttcgaaaccat

SEQ ID NO: 558009 - DNA, 19 bp, Mus musculus
  siRNA target sequence for G630053K23 (NM_183154.1,211-229).
gccatgtcccttattgtga

SEQ ID NO: 558010 - DNA, 19 bp, Mus musculus
  siRNA target sequence for G630053K23 (NM_183154.1,334-352).
ctcattcagggggtaacaa

SEQ ID NO: 558011 - DNA, 19 bp, Mus musculus
  siRNA target sequence for G630053K23 (NM_183154.1,336-354).
cattcagggggtaacaaga

SEQ ID NO: 558012 - DNA, 19 bp, Mus musculus
  siRNA target sequence for G630053K23 (NM_183154.1,470-488).
cctggtagacgaaaatgaa

SEQ ID NO: 558013 - DNA, 19 bp, Mus musculus
  siRNA target sequence for G630053K23 (NM_183154.1,502-520).
caaatgaagaggactttat

SEQ ID NO: 558014 - DNA, 19 bp, Mus musculus
  siRNA target sequence for G630053K23 (NM_183154.1,791-809).
ctcagacttggtcatctat

SEQ ID NO: 558015 - DNA, 19 bp, Mus musculus
  siRNA target sequence for G630053K23 (NM_183154.1,795-813).
gacttggtcatctatcgaa

SEQ ID NO: 558016 - DNA, 19 bp, Mus musculus
  siRNA target sequence for G630053K23 (NM_183154.1,800-818).
ggtcatctatcgaactcat

SEQ ID NO: 558017 - DNA, 19 bp, Mus musculus
  siRNA target sequence for G630053K23 (NM_183154.1,947-965).
gggccctgcagttattatt

SEQ ID NO: 558018 - DNA, 19 bp, Mus musculus
  siRNA target sequence for G630053K23 (NM_183154.1,948-966).
ggccctgcagttattattt

SEQ ID NO: 558019 - DNA, 19 bp, Mus musculus
  siRNA target sequence for G630053K23 (NM_183154.1,1072-1090).
cctttagctccattcacta

SEQ ID NO: 558020 - DNA, 19 bp, Mus musculus
  siRNA target sequence for G630053K23 (NM_183154.1,1188-1206).
cacccaggggtcatcttca

SEQ ID NO: 558021 - DNA, 19 bp, Mus musculus
  siRNA target sequence for G630053K23 (NM_183154.1,1210-1228).
ccctgaaggcactaagtga

SEQ ID NO: 558022 - DNA, 19 bp, Mus musculus
  siRNA target sequence for G630053K23 (NM_183154.1,1257-1275).
cagatggcgcacagttcat

SEQ ID NO: 558023 - DNA, 19 bp, Mus musculus
  siRNA target sequence for G630053K23 (NM_183154.1,1410-1428).
gacaaccgcgtctatacct

SEQ ID NO: 558024 - DNA, 19 bp, Mus musculus
  siRNA target sequence for G630053K23 (NM_183154.1,1522-1540).
cctggtctgggtatgtgat

SEQ ID NO: 558025 - DNA, 19 bp, Mus musculus
  siRNA target sequence for G630053K23 (NM_183154.1,1538-1556).
gatcgagtgtcctaactgt

SEQ ID NO: 558026 - DNA, 19 bp, Mus musculus
  siRNA target sequence for G630053K23 (NM_183154.1,1613-1631).
ggtggtgcggacagagatt

SEQ ID NO: 558027 - DNA, 19 bp, Mus musculus
  siRNA target sequence for G630053K23 (NM_183154.1,1637-1655).
cgtgtggcctggaactgat

SEQ ID NO: 558028 - DNA, 19 bp, Mus musculus
  siRNA target sequence for G630053K23 (NM_183154.1,1642-1660).
ggcctggaactgatgcatt

SEQ ID NO: 558029 - DNA, 19 bp, Mus musculus
  siRNA target sequence for G630053K23 (NM_183154.1,1643-1661).
gcctggaactgatgcattt

SEQ ID NO: 558030 - DNA, 19 bp, Mus musculus
  siRNA target sequence for G630053K23 (NM_183154.1,1645-1663).
ctggaactgatgcatttct

SEQ ID NO: 558031 - DNA, 19 bp, Mus musculus
  siRNA target sequence for G630053K23 (NM_183154.1,1647-1665).
ggaactgatgcatttctga

SEQ ID NO: 558032 - DNA, 19 bp, Mus musculus
  siRNA target sequence for G630053K23 (NM_183154.1,1657-1675).
catttctgaaggataacaa

SEQ ID NO: 558033 - DNA, 19 bp, Mus musculus
  siRNA target sequence for G630053K23 (NM_183154.1,1765-1783).
cttggctaacggatcagat

SEQ ID NO: 558034 - DNA, 19 bp, Mus musculus
  siRNA target sequence for G630053K23 (NM_183154.1,1985-2003).
caggaatgtccagttagat

SEQ ID NO: 558035 - DNA, 19 bp, Mus musculus
  siRNA target sequence for G630053K23 (NM_183154.1,2086-2104).
ccgtggtgacagctattga

SEQ ID NO: 558036 - DNA, 19 bp, Mus musculus
  siRNA target sequence for G630053K23 (NM_183154.1,2110-2128).
cactaggcctggtaaaaga

SEQ ID NO: 558037 - DNA, 19 bp, Mus musculus
  siRNA target sequence for Hgs (NM_008244.2,60-78).
cgagcgtctcctagacaaa

SEQ ID NO: 558038 - DNA, 19 bp, Mus musculus
  siRNA target sequence for Hgs (NM_008244.2,110-128).
gggagtccattctacagat

SEQ ID NO: 558039 - DNA, 19 bp, Mus musculus
  siRNA target sequence for Hgs (NM_008244.2,207-225).
cccacacgtggctttgtat

SEQ ID NO: 558040 - DNA, 19 bp, Mus musculus
  siRNA target sequence for Hgs (NM_008244.2,264-282).
ccagacagtccatgatgaa

SEQ ID NO: 558041 - DNA, 19 bp, Mus musculus
  siRNA target sequence for Hgs (NM_008244.2,330-348).
gcaagtggaagttaatgtt

SEQ ID NO: 558042 - DNA, 19 bp, Mus musculus
  siRNA target sequence for Hgs (NM_008244.2,340-358).
gttaatgttcggaacaaga

SEQ ID NO: 558043 - DNA, 19 bp, Mus musculus
  siRNA target sequence for Hgs (NM_008244.2,346-364).
gttcggaacaagatcttgt

SEQ ID NO: 558044 - DNA, 19 bp, Mus musculus
  siRNA target sequence for Hgs (NM_008244.2,394-412).
cggaacgaacccaagtaca

SEQ ID NO: 558045 - DNA, 19 bp, Mus musculus
  siRNA target sequence for Hgs (NM_008244.2,395-413).
ggaacgaacccaagtacaa

SEQ ID NO: 558046 - DNA, 19 bp, Mus musculus
  siRNA target sequence for Hgs (NM_008244.2,1273-1291).
gccgtgagcacttttgtca

SEQ ID NO: 558047 - DNA, 19 bp, Mus musculus
  siRNA target sequence for Hgs (NM_008244.2,1274-1292).
ccgtgagcacttttgtcaa

SEQ ID NO: 558048 - DNA, 19 bp, Mus musculus
  siRNA target sequence for Hgs (NM_008244.2,1484-1502).
gcgccctgcgtgaagaaca

SEQ ID NO: 558049 - DNA, 19 bp, Mus musculus
  siRNA target sequence for Hgs (NM_008244.2,1754-1772).
cggctgggggtgtactcta

SEQ ID NO: 558050 - DNA, 19 bp, Mus musculus
  siRNA target sequence for Hgs (NM_008244.2,2142-2160).
gggctaccagccgtacaat

SEQ ID NO: 558051 - DNA, 19 bp, Mus musculus
  siRNA target sequence for Hgs (NM_008244.2,2143-2161).
ggctaccagccgtacaata

SEQ ID NO: 558052 - DNA, 19 bp, Mus musculus
  siRNA target sequence for Hgs (NM_008244.2,2144-2162).
gctaccagccgtacaatat

SEQ ID NO: 558053 - DNA, 19 bp, Mus musculus
  siRNA target sequence for Hgs (NM_008244.2,2153-2171).
cgtacaatatgcagaatct

SEQ ID NO: 558054 - DNA, 19 bp, Mus musculus
  siRNA target sequence for Kel (NM_032540.1,341-359).
ctgctccttggttcttcta

SEQ ID NO: 558055 - DNA, 19 bp, Mus musculus
  siRNA target sequence for Kel (NM_032540.1,531-549).
cacttacagaagagaacaa

SEQ ID NO: 558056 - DNA, 19 bp, Mus musculus
  siRNA target sequence for Kel (NM_032540.1,614-632).
gccttccaattttataact

SEQ ID NO: 558057 - DNA, 19 bp, Mus musculus
  siRNA target sequence for Kel (NM_032540.1,666-684).
ggtctggtccactcataca

SEQ ID NO: 558058 - DNA, 19 bp, Mus musculus
  siRNA target sequence for Kel (NM_032540.1,667-685).
gtctggtccactcatacaa

SEQ ID NO: 558059 - DNA, 19 bp, Mus musculus
  siRNA target sequence for Kel (NM_032540.1,669-687).
ctggtccactcatacaaat

SEQ ID NO: 558060 - DNA, 19 bp, Mus musculus
  siRNA target sequence for Kel (NM_032540.1,672-690).
gtccactcatacaaattat

SEQ ID NO: 558061 - DNA, 19 bp, Mus musculus
  siRNA target sequence for Kel (NM_032540.1,733-751).
cttggacttcaaccaaaat

SEQ ID NO: 558062 - DNA, 19 bp, Mus musculus
  siRNA target sequence for Kel (NM_032540.1,831-849).
caccaatcatccagataga

SEQ ID NO: 558063 - DNA, 19 bp, Mus musculus
  siRNA target sequence for Kel (NM_032540.1,855-873).
cggagtttgacattcttct

SEQ ID NO: 558064 - DNA, 19 bp, Mus musculus
  siRNA target sequence for Kel (NM_032540.1,1013-1031).
cggctgttccagtttctga

SEQ ID NO: 558065 - DNA, 19 bp, Mus musculus
  siRNA target sequence for Kel (NM_032540.1,1066-1084).
ctttcatgtggttactatt

SEQ ID NO: 558066 - DNA, 19 bp, Mus musculus
  siRNA target sequence for Kel (NM_032540.1,1106-1124).
ccagccatcgactggttat

SEQ ID NO: 558067 - DNA, 19 bp, Mus musculus
  siRNA target sequence for Kel (NM_032540.1,1114-1132).
cgactggttatcctgttta

SEQ ID NO: 558068 - DNA, 19 bp, Mus musculus
  siRNA target sequence for Kel (NM_032540.1,1125-1143).
cctgtttacaagcaatatt

SEQ ID NO: 558069 - DNA, 19 bp, Mus musculus
  siRNA target sequence for Kel (NM_032540.1,1144-1162).
cacaccgatgtcactgaat

SEQ ID NO: 558070 - DNA, 19 bp, Mus musculus
  siRNA target sequence for Kel (NM_032540.1,1148-1166).
ccgatgtcactgaattcct

SEQ ID NO: 558071 - DNA, 19 bp, Mus musculus
  siRNA target sequence for Kel (NM_032540.1,1184-1202).
catgacctagactacttga

SEQ ID NO: 558072 - DNA, 19 bp, Mus musculus
  siRNA target sequence for Kel (NM_032540.1,1299-1317).
cactggacactaaattcca

SEQ ID NO: 558073 - DNA, 19 bp, Mus musculus
  siRNA target sequence for Kel (NM_032540.1,1340-1358).
caggaactacggaaactga

SEQ ID NO: 558074 - DNA, 19 bp, Mus musculus
  siRNA target sequence for Kel (NM_032540.1,1342-1360).
ggaactacggaaactgaaa

SEQ ID NO: 558075 - DNA, 19 bp, Mus musculus
  siRNA target sequence for Kel (NM_032540.1,1478-1496).
caaagtgctgccatggaat

SEQ ID NO: 558076 - DNA, 19 bp, Mus musculus
  siRNA target sequence for Kel (NM_032540.1,1482-1500).
gtgctgccatggaattatt

SEQ ID NO: 558077 - DNA, 19 bp, Mus musculus
  siRNA target sequence for Kel (NM_032540.1,1492-1510).
ggaattatttgctgagata

SEQ ID NO: 558078 - DNA, 19 bp, Mus musculus
  siRNA target sequence for Kel (NM_032540.1,1520-1538).
gtcatcatacgcctcaaaa

SEQ ID NO: 558079 - DNA, 19 bp, Mus musculus
  siRNA target sequence for Kel (NM_032540.1,1525-1543).
catacgcctcaaaaagctt

SEQ ID NO: 558080 - DNA, 19 bp, Mus musculus
  siRNA target sequence for Kel (NM_032540.1,1639-1657).
catagccacacaggaatat

SEQ ID NO: 558081 - DNA, 19 bp, Mus musculus
  siRNA target sequence for Kel (NM_032540.1,1644-1662).
ccacacaggaatataatga

SEQ ID NO: 558082 - DNA, 19 bp, Mus musculus
  siRNA target sequence for Kel (NM_032540.1,1647-1665).
cacaggaatataatgatat

SEQ ID NO: 558083 - DNA, 19 bp, Mus musculus
  siRNA target sequence for Kel (NM_032540.1,1779-1797).
cctgggaggtcaatgctta

SEQ ID NO: 558084 - DNA, 19 bp, Mus musculus
  siRNA target sequence for Kel (NM_032540.1,1782-1800).
gggaggtcaatgcttacta

SEQ ID NO: 558085 - DNA, 19 bp, Mus musculus
  siRNA target sequence for Kel (NM_032540.1,1783-1801).
ggaggtcaatgcttactat

SEQ ID NO: 558086 - DNA, 19 bp, Mus musculus
  siRNA target sequence for Kel (NM_032540.1,1784-1802).
gaggtcaatgcttactatt

SEQ ID NO: 558087 - DNA, 19 bp, Mus musculus
  siRNA target sequence for Kel (NM_032540.1,1787-1805).
gtcaatgcttactattcaa

SEQ ID NO: 558088 - DNA, 19 bp, Mus musculus
  siRNA target sequence for Kel (NM_032540.1,1789-1807).
caatgcttactattcaata

SEQ ID NO: 558089 - DNA, 19 bp, Mus musculus
  siRNA target sequence for Kel (NM_032540.1,1794-1812).
cttactattcaatatctga

SEQ ID NO: 558090 - DNA, 19 bp, Mus musculus
  siRNA target sequence for Kel (NM_032540.1,1902-1920).
gcatcatggcccatgaatt

SEQ ID NO: 558091 - DNA, 19 bp, Mus musculus
  siRNA target sequence for Kel (NM_032540.1,1910-1928).
gcccatgaattgttgcata

SEQ ID NO: 558092 - DNA, 19 bp, Mus musculus
  siRNA target sequence for Kel (NM_032540.1,1911-1929).
cccatgaattgttgcatat

SEQ ID NO: 558093 - DNA, 19 bp, Mus musculus
  siRNA target sequence for Kel (NM_032540.1,1913-1931).
catgaattgttgcatatct

SEQ ID NO: 558094 - DNA, 19 bp, Mus musculus
  siRNA target sequence for Kel (NM_032540.1,1916-1934).
gaattgttgcatatcttct

SEQ ID NO: 558095 - DNA, 19 bp, Mus musculus
  siRNA target sequence for Kel (NM_032540.1,2002-2020).
cctggagcgccattatgct

SEQ ID NO: 558096 - DNA, 19 bp, Mus musculus
  siRNA target sequence for Kel (NM_032540.1,2023-2041).
cttccctttgcctagcata

SEQ ID NO: 558097 - DNA, 19 bp, Mus musculus
  siRNA target sequence for Kel (NM_032540.1,2062-2080).
cacactcctggaaaatgct

SEQ ID NO: 558098 - DNA, 19 bp, Mus musculus
  siRNA target sequence for Kel (NM_032540.1,2071-2089).
ggaaaatgctgcagacata

SEQ ID NO: 558099 - DNA, 19 bp, Mus musculus
  siRNA target sequence for Kel (NM_032540.1,2090-2108).
ggaggcgtagccattgcat

SEQ ID NO: 558100 - DNA, 19 bp, Mus musculus
  siRNA target sequence for Kel (NM_032540.1,2106-2124).
cattccaggcatatagcaa

SEQ ID NO: 558101 - DNA, 19 bp, Mus musculus
  siRNA target sequence for Kel (NM_032540.1,2167-2185).
ggatcttagcccctatcaa

SEQ ID NO: 558102 - DNA, 19 bp, Mus musculus
  siRNA target sequence for Kel (NM_032540.1,2171-2189).
cttagcccctatcaacttt

SEQ ID NO: 558103 - DNA, 19 bp, Mus musculus
  siRNA target sequence for Kel (NM_032540.1,2196-2214).
gaagctatgcccaggtaat

SEQ ID NO: 558104 - DNA, 19 bp, Mus musculus
  siRNA target sequence for Kel (NM_032540.1,2200-2218).
ctatgcccaggtaatgtgt

SEQ ID NO: 558105 - DNA, 19 bp, Mus musculus
  siRNA target sequence for Kel (NM_032540.1,2325-2343).
cacgtgggacccttctgaa

SEQ ID NO: 558106 - DNA, 19 bp, Mus musculus
  siRNA target sequence for Lta4h (NM_008517.1,84-102).
cccgaggtcgcggatactt

SEQ ID NO: 558107 - DNA, 19 bp, Mus musculus
  siRNA target sequence for Lta4h (NM_008517.1,275-293).
ggtgatcaatggacaagaa

SEQ ID NO: 558108 - DNA, 19 bp, Mus musculus
  siRNA target sequence for Lta4h (NM_008517.1,330-348).
gggtcaccgatggaaatct

SEQ ID NO: 558109 - DNA, 19 bp, Mus musculus
  siRNA target sequence for Lta4h (NM_008517.1,332-350).
gtcaccgatggaaatctct

SEQ ID NO: 558110 - DNA, 19 bp, Mus musculus
  siRNA target sequence for Lta4h (NM_008517.1,354-372).
cccatcgccctgagcaaaa

SEQ ID NO: 558111 - DNA, 19 bp, Mus musculus
  siRNA target sequence for Lta4h (NM_008517.1,355-373).
ccatcgccctgagcaaaaa

SEQ ID NO: 558112 - DNA, 19 bp, Mus musculus
  siRNA target sequence for Lta4h (NM_008517.1,356-374).
catcgccctgagcaaaaat

SEQ ID NO: 558113 - DNA, 19 bp, Mus musculus
  siRNA target sequence for Lta4h (NM_008517.1,527-545).
cactccttccgtgaaatta

SEQ ID NO: 558114 - DNA, 19 bp, Mus musculus
  siRNA target sequence for Lta4h (NM_008517.1,531-549).
ccttccgtgaaattaacat

SEQ ID NO: 558115 - DNA, 19 bp, Mus musculus
  siRNA target sequence for Lta4h (NM_008517.1,532-550).
cttccgtgaaattaacata

SEQ ID NO: 558116 - DNA, 19 bp, Mus musculus
  siRNA target sequence for Lta4h (NM_008517.1,676-694).
catgctacctgattgcttt

SEQ ID NO: 558117 - DNA, 19 bp, Mus musculus
  siRNA target sequence for Lta4h (NM_008517.1,761-779).
ggtggagaaatctgctaat

SEQ ID NO: 558118 - DNA, 19 bp, Mus musculus
  siRNA target sequence for Lta4h (NM_008517.1,789-807).
gagaccgaatccatgctta

SEQ ID NO: 558119 - DNA, 19 bp, Mus musculus
  siRNA target sequence for Lta4h (NM_008517.1,793-811).
ccgaatccatgcttaaaat

SEQ ID NO: 558120 - DNA, 19 bp, Mus musculus
  siRNA target sequence for Lta4h (NM_008517.1,944-962).
gtcactctccaacgttatt

SEQ ID NO: 558121 - DNA, 19 bp, Mus musculus
  siRNA target sequence for Lta4h (NM_008517.1,953-971).
caacgttattgcacatgaa

SEQ ID NO: 558122 - DNA, 19 bp, Mus musculus
  siRNA target sequence for Lta4h (NM_008517.1,956-974).
cgttattgcacatgaaata

SEQ ID NO: 558123 - DNA, 19 bp, Mus musculus
  siRNA target sequence for Lta4h (NM_008517.1,988-1006).
caggaaacctagtgactaa

SEQ ID NO: 558124 - DNA, 19 bp, Mus musculus
  siRNA target sequence for Lta4h (NM_008517.1,990-1008).
ggaaacctagtgactaaca

SEQ ID NO: 558125 - DNA, 19 bp, Mus musculus
  siRNA target sequence for Lta4h (NM_008517.1,1007-1025).
caagacgtgggatcacttt

SEQ ID NO: 558126 - DNA, 19 bp, Mus musculus
  siRNA target sequence for Lta4h (NM_008517.1,1012-1030).
cgtgggatcacttttggtt

SEQ ID NO: 558127 - DNA, 19 bp, Mus musculus
  siRNA target sequence for Lta4h (NM_008517.1,1013-1031).
gtgggatcacttttggtta

SEQ ID NO: 558128 - DNA, 19 bp, Mus musculus
  siRNA target sequence for Lta4h (NM_008517.1,1015-1033).
gggatcacttttggttaaa

SEQ ID NO: 558129 - DNA, 19 bp, Mus musculus
  siRNA target sequence for Lta4h (NM_008517.1,1028-1046).
gttaaacgaaggacatact

SEQ ID NO: 558130 - DNA, 19 bp, Mus musculus
  siRNA target sequence for Lta4h (NM_008517.1,1039-1057).
gacatactgtctacttaga

SEQ ID NO: 558131 - DNA, 19 bp, Mus musculus
  siRNA target sequence for Lta4h (NM_008517.1,1084-1102).
gggaaaagttcagacattt

SEQ ID NO: 558132 - DNA, 19 bp, Mus musculus
  siRNA target sequence for Lta4h (NM_008517.1,1123-1141).
gagagctacagaatacgat

SEQ ID NO: 558133 - DNA, 19 bp, Mus musculus
  siRNA target sequence for Lta4h (NM_008517.1,1203-1221).
cccgatgtagcctattcct

SEQ ID NO: 558134 - DNA, 19 bp, Mus musculus
  siRNA target sequence for Lta4h (NM_008517.1,1276-1294).
ggggaccagaggtgtttct

SEQ ID NO: 558135 - DNA, 19 bp, Mus musculus
  siRNA target sequence for Lta4h (NM_008517.1,1297-1315).
gattcttaaaggcttatgt

SEQ ID NO: 558136 - DNA, 19 bp, Mus musculus
  siRNA target sequence for Lta4h (NM_008517.1,1463-1481).
cgacgtgactctgacaaat

SEQ ID NO: 558137 - DNA, 19 bp, Mus musculus
  siRNA target sequence for Lta4h (NM_008517.1,1665-1683).
gccattaacaattctgaaa

SEQ ID NO: 558138 - DNA, 19 bp, Mus musculus
  siRNA target sequence for Lta4h (NM_008517.1,1889-1907).
ggtggggagagatctgaaa

SEQ ID NO: 558139 - DNA, 19 bp, Mus musculus
  siRNA target sequence for Ltb4dh (NM_025968.2,110-128).
ggtaacttcgagttgaaga

SEQ ID NO: 558140 - DNA, 19 bp, Mus musculus
  siRNA target sequence for Ltb4dh (NM_025968.2,136-154).
gctcccacccttaaataat

SEQ ID NO: 558141 - DNA, 19 bp, Mus musculus
  siRNA target sequence for Ltb4dh (NM_025968.2,257-275).
gccagagtcgtggaaagta

SEQ ID NO: 558142 - DNA, 19 bp, Mus musculus
  siRNA target sequence for Ltb4dh (NM_025968.2,259-277).
cagagtcgtggaaagtaaa

SEQ ID NO: 558143 - DNA, 19 bp, Mus musculus
  siRNA target sequence for Ltb4dh (NM_025968.2,263-281).
gtcgtggaaagtaaaaact

SEQ ID NO: 558144 - DNA, 19 bp, Mus musculus
  siRNA target sequence for Ltb4dh (NM_025968.2,286-304).
cttcccaaaaggaacgatt

SEQ ID NO: 558145 - DNA, 19 bp, Mus musculus
  siRNA target sequence for Ltb4dh (NM_025968.2,300-318).
cgattgtagcggctttatt

SEQ ID NO: 558146 - DNA, 19 bp, Mus musculus
  siRNA target sequence for Ltb4dh (NM_025968.2,301-319).
gattgtagcggctttatta

SEQ ID NO: 558147 - DNA, 19 bp, Mus musculus
  siRNA target sequence for Ltb4dh (NM_025968.2,305-323).
gtagcggctttattaggtt

SEQ ID NO: 558148 - DNA, 19 bp, Mus musculus
  siRNA target sequence for Ltb4dh (NM_025968.2,321-339).
gttggacatcacattccat

SEQ ID NO: 558149 - DNA, 19 bp, Mus musculus
  siRNA target sequence for Ltb4dh (NM_025968.2,521-539).
gttgtggggcagatagcta

SEQ ID NO: 558150 - DNA, 19 bp, Mus musculus
  siRNA target sequence for Ltb4dh (NM_025968.2,541-559).
gctcaagggctgcaaagtt

SEQ ID NO: 558151 - DNA, 19 bp, Mus musculus
  siRNA target sequence for Ltb4dh (NM_025968.2,567-585).
cagcagggtctgatgaaaa

SEQ ID NO: 558152 - DNA, 19 bp, Mus musculus
  siRNA target sequence for Ltb4dh (NM_025968.2,581-599).
gaaaaggttgcctatctta

SEQ ID NO: 558153 - DNA, 19 bp, Mus musculus
  siRNA target sequence for Ltb4dh (NM_025968.2,609-627).
gattcgacgtggcctttaa

SEQ ID NO: 558154 - DNA, 19 bp, Mus musculus
  siRNA target sequence for Ltb4dh (NM_025968.2,617-635).
gtggcctttaactacaaga

SEQ ID NO: 558155 - DNA, 19 bp, Mus musculus
  siRNA target sequence for Ltb4dh (NM_025968.2,628-646).
ctacaagacagtaaagtca

SEQ ID NO: 558156 - DNA, 19 bp, Mus musculus
  siRNA target sequence for Ltb4dh (NM_025968.2,669-687).
cctctcccgatggttatga

SEQ ID NO: 558157 - DNA, 19 bp, Mus musculus
  siRNA target sequence for Ltb4dh (NM_025968.2,670-688).
ctctcccgatggttatgat

SEQ ID NO: 558158 - DNA, 19 bp, Mus musculus
  siRNA target sequence for Ltb4dh (NM_025968.2,704-722).
gtaggtggagagttttcaa

SEQ ID NO: 558159 - DNA, 19 bp, Mus musculus
  siRNA target sequence for Ltb4dh (NM_025968.2,726-744).
ctgttatactccagatgaa

SEQ ID NO: 558160 - DNA, 19 bp, Mus musculus
  siRNA target sequence for Ltb4dh (NM_025968.2,728-746).
gttatactccagatgaaga

SEQ ID NO: 558161 - DNA, 19 bp, Mus musculus
  siRNA target sequence for Ltb4dh (NM_025968.2,768-786).
gtggtgccatctctcaata

SEQ ID NO: 558162 - DNA, 19 bp, Mus musculus
  siRNA target sequence for Ltb4dh (NM_025968.2,770-788).
ggtgccatctctcaataca

SEQ ID NO: 558163 - DNA, 19 bp, Mus musculus
  siRNA target sequence for Ltb4dh (NM_025968.2,771-789).
gtgccatctctcaatacaa

SEQ ID NO: 558164 - DNA, 19 bp, Mus musculus
  siRNA target sequence for Ltb4dh (NM_025968.2,956-974).
gtcactgaaggatttgaga

SEQ ID NO: 558165 - DNA, 19 bp, Mus musculus
  siRNA target sequence for Ltb4dh (NM_025968.2,973-991).
gaaaatgcccgcagcattt

SEQ ID NO: 558166 - DNA, 19 bp, Mus musculus
  siRNA target sequence for Ltb4dh (NM_025968.2,986-1004).
gcatttatgggaatgttga

SEQ ID NO: 558167 - DNA, 19 bp, Mus musculus
  siRNA target sequence for Mbtps2 (NM_172307.1,130-148).
gccgacttggtgttgaagt

SEQ ID NO: 558168 - DNA, 19 bp, Mus musculus
  siRNA target sequence for Mbtps2 (NM_172307.1,133-151).
gacttggtgttgaagtcat

SEQ ID NO: 558169 - DNA, 19 bp, Mus musculus
  siRNA target sequence for Mbtps2 (NM_172307.1,207-225).
ctctccttttcatataaga

SEQ ID NO: 558170 - DNA, 19 bp, Mus musculus
  siRNA target sequence for Mbtps2 (NM_172307.1,277-295).
gcaaggatgctttaccaat

SEQ ID NO: 558171 - DNA, 19 bp, Mus musculus
  siRNA target sequence for Mbtps2 (NM_172307.1,281-299).
ggatgctttaccaatggtt

SEQ ID NO: 558172 - DNA, 19 bp, Mus musculus
  siRNA target sequence for Mbtps2 (NM_172307.1,291-309).
ccaatggttcaattttgga

SEQ ID NO: 558173 - DNA, 19 bp, Mus musculus
  siRNA target sequence for Mbtps2 (NM_172307.1,319-337).
ggcgtgattgccatgttca

SEQ ID NO: 558174 - DNA, 19 bp, Mus musculus
  siRNA target sequence for Mbtps2 (NM_172307.1,493-511).
gttgtggttcccggtataa

SEQ ID NO: 558175 - DNA, 19 bp, Mus musculus
  siRNA target sequence for Mbtps2 (NM_172307.1,496-514).
gtggttcccggtataaatt

SEQ ID NO: 558176 - DNA, 19 bp, Mus musculus
  siRNA target sequence for Mbtps2 (NM_172307.1,498-516).
ggttcccggtataaattta

SEQ ID NO: 558177 - DNA, 19 bp, Mus musculus
  siRNA target sequence for Mbtps2 (NM_172307.1,518-536).
ctgtcaatcagctgactta

SEQ ID NO: 558178 - DNA, 19 bp, Mus musculus
  siRNA target sequence for Mbtps2 (NM_172307.1,543-561).
cgctgcagtcctcattagt

SEQ ID NO: 558179 - DNA, 19 bp, Mus musculus
  siRNA target sequence for Mbtps2 (NM_172307.1,583-601).
cacggtatagcagctatta

SEQ ID NO: 558180 - DNA, 19 bp, Mus musculus
  siRNA target sequence for Mbtps2 (NM_172307.1,593-611).
cagctattagggaacaagt

SEQ ID NO: 558181 - DNA, 19 bp, Mus musculus
  siRNA target sequence for Mbtps2 (NM_172307.1,653-671).
ctggggcatttgttgatct

SEQ ID NO: 558182 - DNA, 19 bp, Mus musculus
  siRNA target sequence for Mbtps2 (NM_172307.1,672-690).
gttcaccacccatttgcaa

SEQ ID NO: 558183 - DNA, 19 bp, Mus musculus
  siRNA target sequence for Mbtps2 (NM_172307.1,677-695).
ccacccatttgcaacttat

SEQ ID NO: 558184 - DNA, 19 bp, Mus musculus
  siRNA target sequence for Mbtps2 (NM_172307.1,678-696).
cacccatttgcaacttata

SEQ ID NO: 558185 - DNA, 19 bp, Mus musculus
  siRNA target sequence for Mbtps2 (NM_172307.1,681-699).
ccatttgcaacttatatca

SEQ ID NO: 558186 - DNA, 19 bp, Mus musculus
  siRNA target sequence for Mbtps2 (NM_172307.1,703-721).
gtccagcagctaaggatat

SEQ ID NO: 558187 - DNA, 19 bp, Mus musculus
  siRNA target sequence for Mbtps2 (NM_172307.1,708-726).
gcagctaaggatattttgt

SEQ ID NO: 558188 - DNA, 19 bp, Mus musculus
  siRNA target sequence for Mbtps2 (NM_172307.1,727-745).
gcaggtatatggcataatt

SEQ ID NO: 558189 - DNA, 19 bp, Mus musculus
  siRNA target sequence for Mbtps2 (NM_172307.1,815-833).
ctggagttggggtacttat

SEQ ID NO: 558190 - DNA, 19 bp, Mus musculus
  siRNA target sequence for Mbtps2 (NM_172307.1,817-835).
ggagttggggtacttatca

SEQ ID NO: 558191 - DNA, 19 bp, Mus musculus
  siRNA target sequence for Mbtps2 (NM_172307.1,907-925).
caggattgtcccgttacta

SEQ ID NO: 558192 - DNA, 19 bp, Mus musculus
  siRNA target sequence for Mbtps2 (NM_172307.1,909-927).
ggattgtcccgttactaat

SEQ ID NO: 558193 - DNA, 19 bp, Mus musculus
  siRNA target sequence for Mbtps2 (NM_172307.1,947-965).
gtttagacaccattgcata

SEQ ID NO: 558194 - DNA, 19 bp, Mus musculus
  siRNA target sequence for Mbtps2 (NM_172307.1,969-987).
gccccaaattgggtattgt

SEQ ID NO: 558195 - DNA, 19 bp, Mus musculus
  siRNA target sequence for Mbtps2 (NM_172307.1,971-989).
cccaaattgggtattgtat

SEQ ID NO: 558196 - DNA, 19 bp, Mus musculus
  siRNA target sequence for Mbtps2 (NM_172307.1,972-990).
ccaaattgggtattgtata

SEQ ID NO: 558197 - DNA, 19 bp, Mus musculus
  siRNA target sequence for Mbtps2 (NM_172307.1,973-991).
caaattgggtattgtataa

SEQ ID NO: 558198 - DNA, 19 bp, Mus musculus
  siRNA target sequence for Mbtps2 (NM_172307.1,992-1010).
gtgcatcaacgttacaaca

SEQ ID NO: 558199 - DNA, 19 bp, Mus musculus
  siRNA target sequence for Mbtps2 (NM_172307.1,994-1012).
gcatcaacgttacaacaat

SEQ ID NO: 558200 - DNA, 19 bp, Mus musculus
  siRNA target sequence for Mbtps2 (NM_172307.1,995-1013).
catcaacgttacaacaatt

SEQ ID NO: 558201 - DNA, 19 bp, Mus musculus
  siRNA target sequence for Mbtps2 (NM_172307.1,1001-1019).
cgttacaacaattaagctt

SEQ ID NO: 558202 - DNA, 19 bp, Mus musculus
  siRNA target sequence for Mbtps2 (NM_172307.1,1020-1038).
cccagttagagcatacaaa

SEQ ID NO: 558203 - DNA, 19 bp, Mus musculus
  siRNA target sequence for Mbtps2 (NM_172307.1,1295-1313).
ggcacccactgcatcttca

SEQ ID NO: 558204 - DNA, 19 bp, Mus musculus
  siRNA target sequence for Mbtps2 (NM_172307.1,1321-1339).
gtgagcattacaagtttca

SEQ ID NO: 558205 - DNA, 19 bp, Mus musculus
  siRNA target sequence for Mbtps2 (NM_172307.1,1334-1352).
gtttcatcccacgtttcaa

SEQ ID NO: 558206 - DNA, 19 bp, Mus musculus
  siRNA target sequence for Mbtps2 (NM_172307.1,1338-1356).
catcccacgtttcaacttt

SEQ ID NO: 558207 - DNA, 19 bp, Mus musculus
  siRNA target sequence for Mbtps2 (NM_172307.1,1342-1360).
ccacgtttcaactttctaa

SEQ ID NO: 558208 - DNA, 19 bp, Mus musculus
  siRNA target sequence for Mbtps2 (NM_172307.1,1362-1380).
catagatctgccagtgatt

SEQ ID NO: 558209 - DNA, 19 bp, Mus musculus
  siRNA target sequence for Mbtps2 (NM_172307.1,1454-1472).
ccttggatggtcaatggat

SEQ ID NO: 558210 - DNA, 19 bp, Mus musculus
  siRNA target sequence for Mbtps2 (NM_172307.1,1492-1510).
gctacccttacttcagtaa

SEQ ID NO: 558211 - DNA, 19 bp, Mus musculus
  siRNA target sequence for Mbtps2 (NM_172307.1,1505-1523).
cagtaattggagacaatga

SEQ ID NO: 558212 - DNA, 19 bp, Mus musculus
  siRNA target sequence for Mbtps2 (NM_172307.1,1525-1543).
gtcaaagatctgattggat

SEQ ID NO: 558213 - DNA, 19 bp, Mus musculus
  siRNA target sequence for Mbtps2 (NM_172307.1,1527-1545).
caaagatctgattggattt

SEQ ID NO: 558214 - DNA, 19 bp, Mus musculus
  siRNA target sequence for Mbtps2 (NM_172307.1,1531-1549).
gatctgattggatttttca

SEQ ID NO: 558215 - DNA, 19 bp, Mus musculus
  siRNA target sequence for Mbtps2 (NM_172307.1,1570-1588).
cttttggctgccaatgtga

SEQ ID NO: 558216 - DNA, 19 bp, Mus musculus
  siRNA target sequence for Mbtps2 (NM_178266.2,1105-1123).
cacagaaagcgcagagatt

SEQ ID NO: 558217 - DNA, 19 bp, Mus musculus
  siRNA target sequence for Mbtps2 (NM_178266.2,1142-1160).
ctgctgccaccggataata

SEQ ID NO: 558218 - DNA, 19 bp, Mus musculus
  siRNA target sequence for Mbtps2 (NM_178266.2,1200-1218).
gccaaaccatcgaagtata

SEQ ID NO: 558219 - DNA, 19 bp, Mus musculus
  siRNA target sequence for Mbtps2 (NM_178266.2,1201-1219).
ccaaaccatcgaagtatat

SEQ ID NO: 558220 - DNA, 19 bp, Mus musculus
  siRNA target sequence for Mbtps2 (NM_178266.2,1210-1228).
cgaagtatatggagatgta

SEQ ID NO: 558221 - DNA, 19 bp, Mus musculus
  siRNA target sequence for Mbtps2 (NM_178266.2,1300-1318).
cctgagtagtagagatcat

SEQ ID NO: 558222 - DNA, 19 bp, Mus musculus
  siRNA target sequence for Mbtps2 (NM_178266.2,1303-1321).
gagtagtagagatcatgat

SEQ ID NO: 558223 - DNA, 19 bp, Mus musculus
  siRNA target sequence for Mbtps2 (NM_178266.2,1305-1323).
gtagtagagatcatgataa

SEQ ID NO: 558224 - DNA, 19 bp, Mus musculus
  siRNA target sequence for Mbtps2 (NM_178266.2,1414-1432).
gatggttttgccagttaat

SEQ ID NO: 558225 - DNA, 19 bp, Mus musculus
  siRNA target sequence for Mbtps2 (NM_178266.2,1450-1468).
gccgaccactgcctctttt

SEQ ID NO: 558226 - DNA, 19 bp, Mus musculus
  siRNA target sequence for Mbtps2 (NM_178266.2,1451-1469).
ccgaccactgcctctttta

SEQ ID NO: 558227 - DNA, 19 bp, Mus musculus
  siRNA target sequence for Mbtps2 (NM_178266.2,1474-1492).
ctttctggcggcagagaat

SEQ ID NO: 558228 - DNA, 19 bp, Mus musculus
  siRNA target sequence for Mbtps2 (NM_178266.2,1530-1548).
gtggtttgacgacctttat

SEQ ID NO: 558229 - DNA, 19 bp, Mus musculus
  siRNA target sequence for Mbtps2 (NM_178266.2,1533-1551).
gtttgacgacctttataga

SEQ ID NO: 558230 - DNA, 19 bp, Mus musculus
  siRNA target sequence for Mbtps2 (NM_178266.2,1578-1596).
ctgacctgggtgacaaaca

SEQ ID NO: 558231 - DNA, 19 bp, Mus musculus
  siRNA target sequence for Mbtps2 (NM_178266.2,1609-1627).
gcagatcgatggtcttgat

SEQ ID NO: 558232 - DNA, 19 bp, Mus musculus
  siRNA target sequence for Mbtps2 (NM_178266.2,1644-1662).
ccatgtgggacgatgttaa

SEQ ID NO: 558233 - DNA, 19 bp, Mus musculus
  siRNA target sequence for Mbtps2 (NM_178266.2,1654-1672).
cgatgttaatgaaaaagaa

SEQ ID NO: 558234 - DNA, 19 bp, Mus musculus
  siRNA target sequence for Mbtps2 (NM_178266.2,1803-1821).
ctagcatgagacccaaaaa

SEQ ID NO: 558235 - DNA, 19 bp, Mus musculus
  siRNA target sequence for Mbtps2 (NM_178266.2,1844-1862).
cctatagcatgctctcata

SEQ ID NO: 558236 - DNA, 19 bp, Mus musculus
  siRNA target sequence for Mbtps2 (NM_178266.2,1845-1863).
ctatagcatgctctcataa

SEQ ID NO: 558237 - DNA, 19 bp, Mus musculus
  siRNA target sequence for Mbtps2 (NM_178266.2,1866-1884).
gctgcgagaagatgttcaa

SEQ ID NO: 558238 - DNA, 19 bp, Mus musculus
  siRNA target sequence for Mbtps2 (NM_178266.2,1869-1887).
gcgagaagatgttcaaaga

SEQ ID NO: 558239 - DNA, 19 bp, Mus musculus
  siRNA target sequence for Mbtps2 (NM_178266.2,1876-1894).
gatgttcaaagataattct

SEQ ID NO: 558240 - DNA, 19 bp, Mus musculus
  siRNA target sequence for Mbtps2 (NM_178266.2,2017-2035).
ctaccagtgtacctttgaa

SEQ ID NO: 558241 - DNA, 19 bp, Mus musculus
  siRNA target sequence for Mbtps2 (NM_178266.2,2106-2124).
ctttcgtgtgtccatttga

SEQ ID NO: 558242 - DNA, 19 bp, Mus musculus
  siRNA target sequence for Mell1 (NM_013783.1,296-314).
ggctggtgtcggaagaagt

SEQ ID NO: 558243 - DNA, 19 bp, Mus musculus
  siRNA target sequence for Mell1 (NM_013783.1,446-464).
gatgagaggacggttgtaa

SEQ ID NO: 558244 - DNA, 19 bp, Mus musculus
  siRNA target sequence for Mell1 (NM_013783.1,451-469).
gaggacggttgtaaaacga

SEQ ID NO: 558245 - DNA, 19 bp, Mus musculus
  siRNA target sequence for Mell1 (NM_013783.1,467-485).
cgagccctcagggattcat

SEQ ID NO: 558246 - DNA, 19 bp, Mus musculus
  siRNA target sequence for Mell1 (NM_013783.1,478-496).
ggattcatcactgaaaagt

SEQ ID NO: 558247 - DNA, 19 bp, Mus musculus
  siRNA target sequence for Mell1 (NM_013783.1,533-551).
gccagaatcctcgaaaaca

SEQ ID NO: 558248 - DNA, 19 bp, Mus musculus
  siRNA target sequence for Mell1 (NM_013783.1,534-552).
ccagaatcctcgaaaacat

SEQ ID NO: 558249 - DNA, 19 bp, Mus musculus
  siRNA target sequence for Mell1 (NM_013783.1,561-579).
cgaggaacccctgtgaaaa

SEQ ID NO: 558250 - DNA, 19 bp, Mus musculus
  siRNA target sequence for Mell1 (NM_013783.1,564-582).
ggaacccctgtgaaaactt

SEQ ID NO: 558251 - DNA, 19 bp, Mus musculus
  siRNA target sequence for Mell1 (NM_013783.1,734-752).
gagaaggccaagacactat

SEQ ID NO: 558252 - DNA, 19 bp, Mus musculus
  siRNA target sequence for Mell1 (NM_013783.1,736-754).
gaaggccaagacactatat

SEQ ID NO: 558253 - DNA, 19 bp, Mus musculus
  siRNA target sequence for Mell1 (NM_013783.1,755-773).
cgctcctgcatgaaccaaa

SEQ ID NO: 558254 - DNA, 19 bp, Mus musculus
  siRNA target sequence for Mell1 (NM_013783.1,801-819).
ccctgctgagcgtcttaaa

SEQ ID NO: 558255 - DNA, 19 bp, Mus musculus
  siRNA target sequence for Mell1 (NM_013783.1,973-991).
ccggcatgtcatctacata

SEQ ID NO: 558256 - DNA, 19 bp, Mus musculus
  siRNA target sequence for Mell1 (NM_013783.1,1012-1030).
gccatcccgggagtactat

SEQ ID NO: 558257 - DNA, 19 bp, Mus musculus
  siRNA target sequence for Mell1 (NM_013783.1,1013-1031).
ccatcccgggagtactatt

SEQ ID NO: 558258 - DNA, 19 bp, Mus musculus
  siRNA target sequence for Mell1 (NM_013783.1,1014-1032).
catcccgggagtactattt

SEQ ID NO: 558259 - DNA, 19 bp, Mus musculus
  siRNA target sequence for Mell1 (NM_013783.1,1017-1035).
cccgggagtactatttcca

SEQ ID NO: 558260 - DNA, 19 bp, Mus musculus
  siRNA target sequence for Mell1 (NM_013783.1,1090-1108).
ggccactatgcttaggaaa

SEQ ID NO: 558261 - DNA, 19 bp, Mus musculus
  siRNA target sequence for Mell1 (NM_013783.1,1385-1403).
ctggaggatatcattgata

SEQ ID NO: 558262 - DNA, 19 bp, Mus musculus
  siRNA target sequence for Mell1 (NM_013783.1,1443-1461).
gcctggtgctagatcgaat

SEQ ID NO: 558263 - DNA, 19 bp, Mus musculus
  siRNA target sequence for Mell1 (NM_013783.1,1444-1462).
cctggtgctagatcgaatt

SEQ ID NO: 558264 - DNA, 19 bp, Mus musculus
  siRNA target sequence for Mell1 (NM_013783.1,1464-1482).
gcagcctgagccagagatt

SEQ ID NO: 558265 - DNA, 19 bp, Mus musculus
  siRNA target sequence for Mell1 (NM_013783.1,1638-1656).
cggtcagagagctgattga

SEQ ID NO: 558266 - DNA, 19 bp, Mus musculus
  siRNA target sequence for Mell1 (NM_013783.1,1701-1719).
ggatggacgaggaatccaa

SEQ ID NO: 558267 - DNA, 19 bp, Mus musculus
  siRNA target sequence for Mell1 (NM_013783.1,1706-1724).
gacgaggaatccaagaaga

SEQ ID NO: 558268 - DNA, 19 bp, Mus musculus
  siRNA target sequence for Mell1 (NM_013783.1,1763-1781).
ggctaccctgactacattt

SEQ ID NO: 558269 - DNA, 19 bp, Mus musculus
  siRNA target sequence for Mell1 (NM_013783.1,1764-1782).
gctaccctgactacatttt

SEQ ID NO: 558270 - DNA, 19 bp, Mus musculus
  siRNA target sequence for Mell1 (NM_013783.1,1799-1817).
cacctggatgaggaatact

SEQ ID NO: 558271 - DNA, 19 bp, Mus musculus
  siRNA target sequence for Mell1 (NM_013783.1,1941-1959).
ctgcagtggtcaatgcatt

SEQ ID NO: 558272 - DNA, 19 bp, Mus musculus
  siRNA target sequence for Mell1 (NM_013783.1,1944-1962).
cagtggtcaatgcattcta

SEQ ID NO: 558273 - DNA, 19 bp, Mus musculus
  siRNA target sequence for Mell1 (NM_013783.1,1946-1964).
gtggtcaatgcattctact

SEQ ID NO: 558274 - DNA, 19 bp, Mus musculus
  siRNA target sequence for Mell1 (NM_013783.1,2029-2047).
ccaaccacagtccttgaat

SEQ ID NO: 558275 - DNA, 19 bp, Mus musculus
  siRNA target sequence for Mell1 (NM_013783.1,2030-2048).
caaccacagtccttgaatt

SEQ ID NO: 558276 - DNA, 19 bp, Mus musculus
  siRNA target sequence for Mell1 (NM_013783.1,2083-2101).
cacacacggctttgatgat

SEQ ID NO: 558277 - DNA, 19 bp, Mus musculus
  siRNA target sequence for Mell1 (NM_013783.1,2177-2195).
cagtcgcaatgcatgatct

SEQ ID NO: 558278 - DNA, 19 bp, Mus musculus
  siRNA target sequence for Mell1 (NM_013783.1,2183-2201).
caatgcatgatctatcagt

SEQ ID NO: 558279 - DNA, 19 bp, Mus musculus
  siRNA target sequence for Mell1 (NM_013783.1,2286-2304).
gtgtgcgacaggcatacaa

SEQ ID NO: 558280 - DNA, 19 bp, Mus musculus
  siRNA target sequence for Mell1 (NM_013783.1,2323-2341).
ggctgatggcggcaaagat

SEQ ID NO: 558281 - DNA, 19 bp, Mus musculus
  siRNA target sequence for Mell1 (NM_013783.1,2402-2420).
gtgtggtgtgggtcctata

SEQ ID NO: 558282 - DNA, 19 bp, Mus musculus
  siRNA target sequence for Mep1a (NM_008585.2,29-47).
cttggcagatccagttcat

SEQ ID NO: 558283 - DNA, 19 bp, Mus musculus
  siRNA target sequence for Mep1a (NM_008585.2,106-124).
catagcagctgtatcgatt

SEQ ID NO: 558284 - DNA, 19 bp, Mus musculus
  siRNA target sequence for Mep1a (NM_008585.2,111-129).
cagctgtatcgattaagca

SEQ ID NO: 558285 - DNA, 19 bp, Mus musculus
  siRNA target sequence for Mep1a (NM_008585.2,116-134).
gtatcgattaagcatcttt

SEQ ID NO: 558286 - DNA, 19 bp, Mus musculus
  siRNA target sequence for Mep1a (NM_008585.2,161-179).
gttggtgaacagaaggata

SEQ ID NO: 558287 - DNA, 19 bp, Mus musculus
  siRNA target sequence for Mep1a (NM_008585.2,170-188).
cagaaggatattttcgaaa

SEQ ID NO: 558288 - DNA, 19 bp, Mus musculus
  siRNA target sequence for Mep1a (NM_008585.2,175-193).
ggatattttcgaaatcaat

SEQ ID NO: 558289 - DNA, 19 bp, Mus musculus
  siRNA target sequence for Mep1a (NM_008585.2,176-194).
gatattttcgaaatcaatt

SEQ ID NO: 558290 - DNA, 19 bp, Mus musculus
  siRNA target sequence for Mep1a (NM_008585.2,276-294).
ggaagctccccattccata

SEQ ID NO: 558291 - DNA, 19 bp, Mus musculus
  siRNA target sequence for Mep1a (NM_008585.2,391-409).
cgaaggggagagttcgtat

SEQ ID NO: 558292 - DNA, 19 bp, Mus musculus
  siRNA target sequence for Mep1a (NM_008585.2,392-410).
gaaggggagagttcgtata

SEQ ID NO: 558293 - DNA, 19 bp, Mus musculus
  siRNA target sequence for Mep1a (NM_008585.2,396-414).
gggagagttcgtatatcat

SEQ ID NO: 558294 - DNA, 19 bp, Mus musculus
  siRNA target sequence for Mep1a (NM_008585.2,398-416).
gagagttcgtatatcatct

SEQ ID NO: 558295 - DNA, 19 bp, Mus musculus
  siRNA target sequence for Mep1a (NM_008585.2,439-457).
gtctatgattggtgatcaa

SEQ ID NO: 558296 - DNA, 19 bp, Mus musculus
  siRNA target sequence for Mep1a (NM_008585.2,441-459).
ctatgattggtgatcaaca

SEQ ID NO: 558297 - DNA, 19 bp, Mus musculus
  siRNA target sequence for Mep1a (NM_008585.2,483-501).
gtgagggatgtgactttaa

SEQ ID NO: 558298 - DNA, 19 bp, Mus musculus
  siRNA target sequence for Mep1a (NM_008585.2,568-586).
ggatgattatgtgaacatt

SEQ ID NO: 558299 - DNA, 19 bp, Mus musculus
  siRNA target sequence for Mep1a (NM_008585.2,569-587).
gatgattatgtgaacattt

SEQ ID NO: 558300 - DNA, 19 bp, Mus musculus
  siRNA target sequence for Mep1a (NM_008585.2,589-607).
gtgggatcaaatcattaca

SEQ ID NO: 558301 - DNA, 19 bp, Mus musculus
  siRNA target sequence for Mep1a (NM_008585.2,800-818).
ctaataagactgaatcgaa

SEQ ID NO: 558302 - DNA, 19 bp, Mus musculus
  siRNA target sequence for Mep1a (NM_008585.2,807-825).
gactgaatcgaatgtacaa

SEQ ID NO: 558303 - DNA, 19 bp, Mus musculus
  siRNA target sequence for Mep1a (NM_008585.2,823-841).
caactgcaccgcaacacat

SEQ ID NO: 558304 - DNA, 19 bp, Mus musculus
  siRNA target sequence for Mep1a (NM_008585.2,826-844).
ctgcaccgcaacacatact

SEQ ID NO: 558305 - DNA, 19 bp, Mus musculus
  siRNA target sequence for Mep1a (NM_008585.2,828-846).
gcaccgcaacacatactct

SEQ ID NO: 558306 - DNA, 19 bp, Mus musculus
  siRNA target sequence for Mep1a (NM_008585.2,980-998).
ggtgccggctacttcatgt

SEQ ID NO: 558307 - DNA, 19 bp, Mus musculus
  siRNA target sequence for Mep1a (NM_008585.2,981-999).
gtgccggctacttcatgtt

SEQ ID NO: 558308 - DNA, 19 bp, Mus musculus
  siRNA target sequence for Mep1a (NM_008585.2,1040-1058).
ctggagtctcgaatccttt

SEQ ID NO: 558309 - DNA, 19 bp, Mus musculus
  siRNA target sequence for Mep1a (NM_008585.2,1042-1060).
ggagtctcgaatcctttat

SEQ ID NO: 558310 - DNA, 19 bp, Mus musculus
  siRNA target sequence for Mep1a (NM_008585.2,1080-1098).
gtttgcagtttttttataa

SEQ ID NO: 558311 - DNA, 19 bp, Mus musculus
  siRNA target sequence for Mep1a (NM_008585.2,1110-1128).
gccctgcagacagatttga

SEQ ID NO: 558312 - DNA, 19 bp, Mus musculus
  siRNA target sequence for Mep1a (NM_008585.2,1111-1129).
ccctgcagacagatttgaa

SEQ ID NO: 558313 - DNA, 19 bp, Mus musculus
  siRNA target sequence for Mep1a (NM_008585.2,1177-1195).
caagatccagacctttcaa

SEQ ID NO: 558314 - DNA, 19 bp, Mus musculus
  siRNA target sequence for Mep1a (NM_008585.2,1280-1298).
ggggaccctggtaactcaa

SEQ ID NO: 558315 - DNA, 19 bp, Mus musculus
  siRNA target sequence for Mep1a (NM_008585.2,1302-1320).
gtggtatttaccttgatga

SEQ ID NO: 558316 - DNA, 19 bp, Mus musculus
  siRNA target sequence for Mep1a (NM_008585.2,1415-1433).
gtgagccctcggttctaca

SEQ ID NO: 558317 - DNA, 19 bp, Mus musculus
  siRNA target sequence for Mep1a (NM_008585.2,1420-1438).
ccctcggttctacaattct

SEQ ID NO: 558318 - DNA, 19 bp, Mus musculus
  siRNA target sequence for Mep1a (NM_008585.2,1422-1440).
ctcggttctacaattctga

SEQ ID NO: 558319 - DNA, 19 bp, Mus musculus
  siRNA target sequence for Mep1a (NM_008585.2,1475-1493).
ggtagaatcaccagtaact

SEQ ID NO: 558320 - DNA, 19 bp, Mus musculus
  siRNA target sequence for Mep1a (NM_008585.2,1702-1720).
caaggtgggagtctatgat

SEQ ID NO: 558321 - DNA, 19 bp, Mus musculus
  siRNA target sequence for Mep1a (NM_008585.2,1808-1826).
ggcgacagcctcatcattt

SEQ ID NO: 558322 - DNA, 19 bp, Mus musculus
  siRNA target sequence for Mep1a (NM_008585.2,2151-2169).
ctgggcacgcctttttcta

SEQ ID NO: 558323 - DNA, 19 bp, Mus musculus
  siRNA target sequence for Mep1b (NM_008586.1,93-111).
gccagctccggaaaagttt

SEQ ID NO: 558324 - DNA, 19 bp, Mus musculus
  siRNA target sequence for Mep1b (NM_008586.1,101-119).
cggaaaagtttgtcaaaga

SEQ ID NO: 558325 - DNA, 19 bp, Mus musculus
  siRNA target sequence for Mep1b (NM_008586.1,130-148).
ggaattgaccaagacatat

SEQ ID NO: 558326 - DNA, 19 bp, Mus musculus
  siRNA target sequence for Mep1b (NM_008586.1,131-149).
gaattgaccaagacatatt

SEQ ID NO: 558327 - DNA, 19 bp, Mus musculus
  siRNA target sequence for Mep1b (NM_008586.1,201-219).
cgaggcaaatgggaagaat

SEQ ID NO: 558328 - DNA, 19 bp, Mus musculus
  siRNA target sequence for Mep1b (NM_008586.1,205-223).
gcaaatgggaagaattcca

SEQ ID NO: 558329 - DNA, 19 bp, Mus musculus
  siRNA target sequence for Mep1b (NM_008586.1,240-258).
gagatggccacataccatt

SEQ ID NO: 558330 - DNA, 19 bp, Mus musculus
  siRNA target sequence for Mep1b (NM_008586.1,273-291).
ggacagcttggaaatgaat

SEQ ID NO: 558331 - DNA, 19 bp, Mus musculus
  siRNA target sequence for Mep1b (NM_008586.1,298-316).
ggagttatcctcaatgctt

SEQ ID NO: 558332 - DNA, 19 bp, Mus musculus
  siRNA target sequence for Mep1b (NM_008586.1,299-317).
gagttatcctcaatgcttt

SEQ ID NO: 558333 - DNA, 19 bp, Mus musculus
  siRNA target sequence for Mep1b (NM_008586.1,319-337).
gagcgctatcgccttaaaa

SEQ ID NO: 558334 - DNA, 19 bp, Mus musculus
  siRNA target sequence for Mep1b (NM_008586.1,356-374).
cttggtccggagaagctaa

SEQ ID NO: 558335 - DNA, 19 bp, Mus musculus
  siRNA target sequence for Mep1b (NM_008586.1,359-377).
ggtccggagaagctaacta

SEQ ID NO: 558336 - DNA, 19 bp, Mus musculus
  siRNA target sequence for Mep1b (NM_008586.1,360-378).
gtccggagaagctaactat

SEQ ID NO: 558337 - DNA, 19 bp, Mus musculus
  siRNA target sequence for Mep1b (NM_008586.1,362-380).
ccggagaagctaactatat

SEQ ID NO: 558338 - DNA, 19 bp, Mus musculus
  siRNA target sequence for Mep1b (NM_008586.1,476-494).
caacagttcagcatgagtt

SEQ ID NO: 558339 - DNA, 19 bp, Mus musculus
  siRNA target sequence for Mep1b (NM_008586.1,529-547).
cgtgctgaccgggatgatt

SEQ ID NO: 558340 - DNA, 19 bp, Mus musculus
  siRNA target sequence for Mep1b (NM_008586.1,538-556).
cgggatgattacgtcatta

SEQ ID NO: 558341 - DNA, 19 bp, Mus musculus
  siRNA target sequence for Mep1b (NM_008586.1,539-557).
gggatgattacgtcattat

SEQ ID NO: 558342 - DNA, 19 bp, Mus musculus
  siRNA target sequence for Mep1b (NM_008586.1,540-558).
ggatgattacgtcattata

SEQ ID NO: 558343 - DNA, 19 bp, Mus musculus
  siRNA target sequence for Mep1b (NM_008586.1,544-562).
gattacgtcattatagttt

SEQ ID NO: 558344 - DNA, 19 bp, Mus musculus
  siRNA target sequence for Mep1b (NM_008586.1,578-596).
caggcaaggaacacaactt

SEQ ID NO: 558345 - DNA, 19 bp, Mus musculus
  siRNA target sequence for Mep1b (NM_008586.1,626-644).
ccctgaatgtcccatatga

SEQ ID NO: 558346 - DNA, 19 bp, Mus musculus
  siRNA target sequence for Mep1b (NM_008586.1,655-673).
gtaatgcactacagtaaaa

SEQ ID NO: 558347 - DNA, 19 bp, Mus musculus
  siRNA target sequence for Mep1b (NM_008586.1,702-720).
catcgtcacgagaatctca

SEQ ID NO: 558348 - DNA, 19 bp, Mus musculus
  siRNA target sequence for Mep1b (NM_008586.1,778-796).
ctaaatcagctgtataact

SEQ ID NO: 558349 - DNA, 19 bp, Mus musculus
  siRNA target sequence for Mep1b (NM_008586.1,803-821).
cttccttgagttttatgga

SEQ ID NO: 558350 - DNA, 19 bp, Mus musculus
  siRNA target sequence for Mep1b (NM_008586.1,819-837).
ggactcctgtgattttgaa

SEQ ID NO: 558351 - DNA, 19 bp, Mus musculus
  siRNA target sequence for Mep1b (NM_008586.1,820-838).
gactcctgtgattttgaat

SEQ ID NO: 558352 - DNA, 19 bp, Mus musculus
  siRNA target sequence for Mep1b (NM_008586.1,959-977).
gcttcttcatgcatttcaa

SEQ ID NO: 558353 - DNA, 19 bp, Mus musculus
  siRNA target sequence for Mep1b (NM_008586.1,1033-1051).
cccaagagagggtttcagt

SEQ ID NO: 558354 - DNA, 19 bp, Mus musculus
  siRNA target sequence for Mep1b (NM_008586.1,1052-1070).
gcttggagttttatctgta

SEQ ID NO: 558355 - DNA, 19 bp, Mus musculus
  siRNA target sequence for Mep1b (NM_008586.1,1082-1100).
gtggaaatgaccaactgaa

SEQ ID NO: 558356 - DNA, 19 bp, Mus musculus
  siRNA target sequence for Mep1b (NM_008586.1,1129-1147).
cagcagggtggtgttttaa

SEQ ID NO: 558357 - DNA, 19 bp, Mus musculus
  siRNA target sequence for Mep1b (NM_008586.1,1181-1199).
ggagctggcaacttcacta

SEQ ID NO: 558358 - DNA, 19 bp, Mus musculus
  siRNA target sequence for Mep1b (NM_008586.1,1182-1200).
gagctggcaacttcactat

SEQ ID NO: 558359 - DNA, 19 bp, Mus musculus
  siRNA target sequence for Mep1b (NM_008586.1,1184-1202).
gctggcaacttcactatgt

SEQ ID NO: 558360 - DNA, 19 bp, Mus musculus
  siRNA target sequence for Mep1b (NM_008586.1,1207-1225).
ctgcaagtgactaaaaagt

SEQ ID NO: 558361 - DNA, 19 bp, Mus musculus
  siRNA target sequence for Mep1b (NM_008586.1,1209-1227).
gcaagtgactaaaaagttt

SEQ ID NO: 558362 - DNA, 19 bp, Mus musculus
  siRNA target sequence for Mep1b (NM_008586.1,1224-1242).
gtttcgagtggtgtttgaa

SEQ ID NO: 558363 - DNA, 19 bp, Mus musculus
  siRNA target sequence for Mep1b (NM_008586.1,1274-1292).
gtctgtctatcgatgacat

SEQ ID NO: 558364 - DNA, 19 bp, Mus musculus
  siRNA target sequence for Mep1b (NM_008586.1,1278-1296).
gtctatcgatgacatcaat

SEQ ID NO: 558365 - DNA, 19 bp, Mus musculus
  siRNA target sequence for Mep1b (NM_008586.1,1280-1298).
ctatcgatgacatcaatct

SEQ ID NO: 558366 - DNA, 19 bp, Mus musculus
  siRNA target sequence for Mep1b (NM_008586.1,1363-1381).
caggacacatctgtataca

SEQ ID NO: 558367 - DNA, 19 bp, Mus musculus
  siRNA target sequence for Mep1b (NM_008586.1,1400-1418).
ctaaaggttacgcttttca

SEQ ID NO: 558368 - DNA, 19 bp, Mus musculus
  siRNA target sequence for Mep1b (NM_008586.1,1406-1424).
gttacgcttttcagatcta

SEQ ID NO: 558369 - DNA, 19 bp, Mus musculus
  siRNA target sequence for Mep1b (NM_008586.1,1419-1437).
gatctacatggatctaaga

SEQ ID NO: 558370 - DNA, 19 bp, Mus musculus
  siRNA target sequence for Mep1b (NM_008586.1,1470-1488).
gatctccggtgccaatgat

SEQ ID NO: 558371 - DNA, 19 bp, Mus musculus
  siRNA target sequence for Mep1b (NM_008586.1,1473-1491).
ctccggtgccaatgatgat

SEQ ID NO: 558372 - DNA, 19 bp, Mus musculus
  siRNA target sequence for Mep1b (NM_008586.1,1475-1493).
ccggtgccaatgatgatca

SEQ ID NO: 558373 - DNA, 19 bp, Mus musculus
  siRNA target sequence for Mep1b (NM_008586.1,1476-1494).
cggtgccaatgatgatcaa

SEQ ID NO: 558374 - DNA, 19 bp, Mus musculus
  siRNA target sequence for Mep1b (NM_008586.1,1477-1495).
ggtgccaatgatgatcaat

SEQ ID NO: 558375 - DNA, 19 bp, Mus musculus
  siRNA target sequence for Mep1b (NM_008586.1,1478-1496).
gtgccaatgatgatcaatt

SEQ ID NO: 558376 - DNA, 19 bp, Mus musculus
  siRNA target sequence for Mep1b (NM_008586.1,1530-1548).
gacactcttggatcaaaat

SEQ ID NO: 558377 - DNA, 19 bp, Mus musculus
  siRNA target sequence for Mep1b (NM_008586.1,1569-1587).
gttcaaccagcggagtata

SEQ ID NO: 558378 - DNA, 19 bp, Mus musculus
  siRNA target sequence for Mep1b (NM_008586.1,1597-1615).
ccaacgatgaccagtgata

SEQ ID NO: 558379 - DNA, 19 bp, Mus musculus
  siRNA target sequence for Mep1b (NM_008586.1,1602-1620).
gatgaccagtgataatgga

SEQ ID NO: 558380 - DNA, 19 bp, Mus musculus
  siRNA target sequence for Mep1b (NM_008586.1,1648-1666).
gtgggagtgacggatgttt

SEQ ID NO: 558381 - DNA, 19 bp, Mus musculus
  siRNA target sequence for Mep1b (NM_008586.1,1668-1686).
ccctaacggaactcagttt

SEQ ID NO: 558382 - DNA, 19 bp, Mus musculus
  siRNA target sequence for Mep1b (NM_008586.1,1669-1687).
cctaacggaactcagttta

SEQ ID NO: 558383 - DNA, 19 bp, Mus musculus
  siRNA target sequence for Mep1b (NM_008586.1,1705-1723).
ggaacgactgtcttcataa

SEQ ID NO: 558384 - DNA, 19 bp, Mus musculus
  siRNA target sequence for Mep1b (NM_008586.1,1752-1770).
cataaaaggagatgacatt

SEQ ID NO: 558385 - DNA, 19 bp, Mus musculus
  siRNA target sequence for Mep1b (NM_008586.1,1760-1778).
gagatgacatttacatctt

SEQ ID NO: 558386 - DNA, 19 bp, Mus musculus
  siRNA target sequence for Mep1b (NM_008586.1,1838-1856).
ccaccttggctgtccataa

SEQ ID NO: 558387 - DNA, 19 bp, Mus musculus
  siRNA target sequence for Mep1b (NM_008586.1,1982-2000).
ccacccgagacactgttat

SEQ ID NO: 558388 - DNA, 19 bp, Mus musculus
  siRNA target sequence for Mep1b (NM_008586.1,2070-2088).
caccaggaggaaatatcgt

SEQ ID NO: 558389 - DNA, 19 bp, Mus musculus
  siRNA target sequence for Mid1 (NM_010797.1,202-220).
ggagctgacctgtcctatt

SEQ ID NO: 558390 - DNA, 19 bp, Mus musculus
  siRNA target sequence for Mid1 (NM_010797.1,417-435).
ccctccaaaacatcattga

SEQ ID NO: 558391 - DNA, 19 bp, Mus musculus
  siRNA target sequence for Mid1 (NM_010797.1,430-448).
cattgacagatttcagaaa

SEQ ID NO: 558392 - DNA, 19 bp, Mus musculus
  siRNA target sequence for Mid1 (NM_010797.1,434-452).
gacagatttcagaaagcat

SEQ ID NO: 558393 - DNA, 19 bp, Mus musculus
  siRNA target sequence for Mid1 (NM_010797.1,575-593).
gtgaagacttgcgttactt

SEQ ID NO: 558394 - DNA, 19 bp, Mus musculus
  siRNA target sequence for Mid1 (NM_010797.1,580-598).
gacttgcgttacttgtgaa

SEQ ID NO: 558395 - DNA, 19 bp, Mus musculus
  siRNA target sequence for Mid1 (NM_010797.1,626-644).
gccactcatccgaacaaga

SEQ ID NO: 558396 - DNA, 19 bp, Mus musculus
  siRNA target sequence for Mid1 (NM_010797.1,627-645).
ccactcatccgaacaagaa

SEQ ID NO: 558397 - DNA, 19 bp, Mus musculus
  siRNA target sequence for Mid1 (NM_010797.1,654-672).
caggccatcgtctgattga

SEQ ID NO: 558398 - DNA, 19 bp, Mus musculus
  siRNA target sequence for Mid1 (NM_010797.1,746-764).
gtgaccgatgaccagttaa

SEQ ID NO: 558399 - DNA, 19 bp, Mus musculus
  siRNA target sequence for Mid1 (NM_010797.1,751-769).
cgatgaccagttaatctgt

SEQ ID NO: 558400 - DNA, 19 bp, Mus musculus
  siRNA target sequence for Mid1 (NM_010797.1,822-840).
gtgagcgctatgacaaatt

SEQ ID NO: 558401 - DNA, 19 bp, Mus musculus
  siRNA target sequence for Mid1 (NM_010797.1,824-842).
gagcgctatgacaaattga

SEQ ID NO: 558402 - DNA, 19 bp, Mus musculus
  siRNA target sequence for Mid1 (NM_010797.1,833-851).
gacaaattgaagcaaaact

SEQ ID NO: 558403 - DNA, 19 bp, Mus musculus
  siRNA target sequence for Mid1 (NM_010797.1,844-862).
gcaaaacttggagagtaat

SEQ ID NO: 558404 - DNA, 19 bp, Mus musculus
  siRNA target sequence for Mid1 (NM_010797.1,856-874).
gagtaatctcaccaatctt

SEQ ID NO: 558405 - DNA, 19 bp, Mus musculus
  siRNA target sequence for Mid1 (NM_010797.1,858-876).
gtaatctcaccaatcttat

SEQ ID NO: 558406 - DNA, 19 bp, Mus musculus
  siRNA target sequence for Mid1 (NM_010797.1,863-881).
ctcaccaatcttattaaga

SEQ ID NO: 558407 - DNA, 19 bp, Mus musculus
  siRNA target sequence for Mid1 (NM_010797.1,865-883).
caccaatcttattaagaga

SEQ ID NO: 558408 - DNA, 19 bp, Mus musculus
  siRNA target sequence for Mid1 (NM_010797.1,867-885).
ccaatcttattaagagaaa

SEQ ID NO: 558409 - DNA, 19 bp, Mus musculus
  siRNA target sequence for Mid1 (NM_010797.1,932-950).
catgttgaagtcaatgcat

SEQ ID NO: 558410 - DNA, 19 bp, Mus musculus
  siRNA target sequence for Mid1 (NM_010797.1,943-961).
caatgcatcccgtcaagaa

SEQ ID NO: 558411 - DNA, 19 bp, Mus musculus
  siRNA target sequence for Mid1 (NM_010797.1,953-971).
cgtcaagaagccaaactga

SEQ ID NO: 558412 - DNA, 19 bp, Mus musculus
  siRNA target sequence for Mid1 (NM_010797.1,962-980).
gccaaactgacagaagaat

SEQ ID NO: 558413 - DNA, 19 bp, Mus musculus
  siRNA target sequence for Mid1 (NM_010797.1,1000-1018).
cattcagcaacgaagacaa

SEQ ID NO: 558414 - DNA, 19 bp, Mus musculus
  siRNA target sequence for Mid1 (NM_010797.1,1004-1022).
cagcaacgaagacaaatta

SEQ ID NO: 558415 - DNA, 19 bp, Mus musculus
  siRNA target sequence for Mid1 (NM_010797.1,1010-1028).
cgaagacaaattattggaa

SEQ ID NO: 558416 - DNA, 19 bp, Mus musculus
  siRNA target sequence for Mid2 (NM_011845.1,415-433).
ctgcctcgagttgtttgaa

SEQ ID NO: 558417 - DNA, 19 bp, Mus musculus
  siRNA target sequence for Mid2 (NM_011845.1,417-435).
gcctcgagttgtttgaaga

SEQ ID NO: 558418 - DNA, 19 bp, Mus musculus
  siRNA target sequence for Mid2 (NM_011845.1,504-522).
gcagctctggtgaatccat

SEQ ID NO: 558419 - DNA, 19 bp, Mus musculus
  siRNA target sequence for Mid2 (NM_011845.1,505-523).
cagctctggtgaatccatt

SEQ ID NO: 558420 - DNA, 19 bp, Mus musculus
  siRNA target sequence for Mid2 (NM_011845.1,508-526).
ctctggtgaatccattgaa

SEQ ID NO: 558421 - DNA, 19 bp, Mus musculus
  siRNA target sequence for Mid2 (NM_011845.1,548-566).
cctacatgcaggtatgtta

SEQ ID NO: 558422 - DNA, 19 bp, Mus musculus
  siRNA target sequence for Mid2 (NM_011845.1,549-567).
ctacatgcaggtatgttat

SEQ ID NO: 558423 - DNA, 19 bp, Mus musculus
  siRNA target sequence for Mid2 (NM_011845.1,711-729).
ccatgtcgagtgagagaat

SEQ ID NO: 558424 - DNA, 19 bp, Mus musculus
  siRNA target sequence for Mid2 (NM_011845.1,712-730).
catgtcgagtgagagaatt

SEQ ID NO: 558425 - DNA, 19 bp, Mus musculus
  siRNA target sequence for Mid2 (NM_011845.1,715-733).
gtcgagtgagagaattgca

SEQ ID NO: 558426 - DNA, 19 bp, Mus musculus
  siRNA target sequence for Mid2 (NM_011845.1,931-949).
catgtactgtgtatctgat

SEQ ID NO: 558427 - DNA, 19 bp, Mus musculus
  siRNA target sequence for Mid2 (NM_011845.1,934-952).
gtactgtgtatctgatgat

SEQ ID NO: 558428 - DNA, 19 bp, Mus musculus
  siRNA target sequence for Mid2 (NM_011845.1,958-976).
gatctgtgccttatgcaaa

SEQ ID NO: 558429 - DNA, 19 bp, Mus musculus
  siRNA target sequence for Mid2 (NM_011845.1,1003-1021).
ggtcgcttctctgaatgat

SEQ ID NO: 558430 - DNA, 19 bp, Mus musculus
  siRNA target sequence for Mid2 (NM_011845.1,1019-1037).
gatcgatttgagaaactaa

SEQ ID NO: 558431 - DNA, 19 bp, Mus musculus
  siRNA target sequence for Mid2 (NM_011845.1,1075-1093).
gcgcaacagtgaactagaa

SEQ ID NO: 558432 - DNA, 19 bp, Mus musculus
  siRNA target sequence for Mid2 (NM_011845.1,1146-1164).
ctatgcatgaggcaaaact

SEQ ID NO: 558433 - DNA, 19 bp, Mus musculus
  siRNA target sequence for Mid2 (NM_011845.1,1322-1340).
caagctgagcatatcctaa

SEQ ID NO: 558434 - DNA, 19 bp, Mus musculus
  siRNA target sequence for Mid2 (NM_011845.1,1326-1344).
ctgagcatatcctaaagga

SEQ ID NO: 558435 - DNA, 19 bp, Mus musculus
  siRNA target sequence for Mid2 (NM_011845.1,1360-1378).
gtttctgcagtctgcaaaa

SEQ ID NO: 558436 - DNA, 19 bp, Mus musculus
  siRNA target sequence for Mid2 (NM_011845.1,1407-1425).
ctgcatcttcgcaagttct

SEQ ID NO: 558437 - DNA, 19 bp, Mus musculus
  siRNA target sequence for Mid2 (NM_011845.1,1426-1444).
gattccagacatcaatttt

SEQ ID NO: 558438 - DNA, 19 bp, Mus musculus
  siRNA target sequence for Mid2 (NM_011845.1,1498-1516).
ggaggggctagactattta

SEQ ID NO: 558439 - DNA, 19 bp, Mus musculus
  siRNA target sequence for Mid2 (NM_011845.1,1499-1517).
gaggggctagactatttaa

SEQ ID NO: 558440 - DNA, 19 bp, Mus musculus
  siRNA target sequence for Mid2 (NM_011845.1,1644-1662).
ctggccaggctaacttcat

SEQ ID NO: 558441 - DNA, 19 bp, Mus musculus
  siRNA target sequence for Mid2 (NM_011845.1,1646-1664).
ggccaggctaacttcatca

SEQ ID NO: 558442 - DNA, 19 bp, Mus musculus
  siRNA target sequence for Mid2 (NM_011845.1,1660-1678).
catcagcctgtacaattca

SEQ ID NO: 558443 - DNA, 19 bp, Mus musculus
  siRNA target sequence for Mid2 (NM_011845.1,1746-1764).
ggacacgctacatctttat

SEQ ID NO: 558444 - DNA, 19 bp, Mus musculus
  siRNA target sequence for Mid2 (NM_011845.1,1749-1767).
cacgctacatctttatcgt

SEQ ID NO: 558445 - DNA, 19 bp, Mus musculus
  siRNA target sequence for Mid2 (NM_011845.1,1800-1818).
gcgaacccaccagactaaa

SEQ ID NO: 558446 - DNA, 19 bp, Mus musculus
  siRNA target sequence for Mid2 (NM_011845.1,1805-1823).
cccaccagactaaaaacga

SEQ ID NO: 558447 - DNA, 19 bp, Mus musculus
  siRNA target sequence for Mid2 (NM_011845.1,1827-1845).
gccaaccatttaaactaga

SEQ ID NO: 558448 - DNA, 19 bp, Mus musculus
  siRNA target sequence for Mid2 (NM_011845.1,1926-1944).
gccacactccggagagatt

SEQ ID NO: 558449 - DNA, 19 bp, Mus musculus
  siRNA target sequence for Mid2 (NM_011845.1,1927-1945).
ccacactccggagagattt

SEQ ID NO: 558450 - DNA, 19 bp, Mus musculus
  siRNA target sequence for Mid2 (NM_011845.1,1928-1946).
cacactccggagagattta

SEQ ID NO: 558451 - DNA, 19 bp, Mus musculus
  siRNA target sequence for Mid2 (NM_011845.1,1964-1982).
ggggcagcaggaaatatat

SEQ ID NO: 558452 - DNA, 19 bp, Mus musculus
  siRNA target sequence for Mid2 (NM_011845.1,1965-1983).
gggcagcaggaaatatatt

SEQ ID NO: 558453 - DNA, 19 bp, Mus musculus
  siRNA target sequence for Mid2 (NM_011845.1,2014-2032).
ggtcatgggttcttcaaca

SEQ ID NO: 558454 - DNA, 19 bp, Mus musculus
  siRNA target sequence for Mid2 (NM_011845.1,2015-2033).
gtcatgggttcttcaacat

SEQ ID NO: 558455 - DNA, 19 bp, Mus musculus
  siRNA target sequence for Mid2 (NM_011845.1,2025-2043).
cttcaacatggtatgctat

SEQ ID NO: 558456 - DNA, 19 bp, Mus musculus
  siRNA target sequence for Mid2 (NM_011845.1,2031-2049).
catggtatgctattggtat

SEQ ID NO: 558457 - DNA, 19 bp, Mus musculus
  siRNA target sequence for Mid2 (NM_011845.1,2112-2130).
ctcgatgcaacagtaactt

SEQ ID NO: 558458 - DNA, 19 bp, Mus musculus
  siRNA target sequence for Mid2 (NM_011845.1,2132-2150).
gtggttcggcacaacaaca

SEQ ID NO: 558459 - DNA, 19 bp, Mus musculus
  siRNA target sequence for Mid2 (NM_011845.1,2138-2156).
cggcacaacaacaaggaaa

SEQ ID NO: 558460 - DNA, 19 bp, Mus musculus
  siRNA target sequence for Mid2 (NM_011845.1,2193-2211).
gtgtccttctggattatga

SEQ ID NO: 558461 - DNA, 19 bp, Mus musculus
  siRNA target sequence for Mid2 (NM_011845.1,2195-2213).
gtccttctggattatgaca

SEQ ID NO: 558462 - DNA, 19 bp, Mus musculus
  siRNA target sequence for Mid2 (NM_011845.1,2288-2306).
gtttgtccaacattcacaa

SEQ ID NO: 558463 - DNA, 19 bp, Mus musculus
  siRNA target sequence for Mid2 (NM_011845.1,2338-2356).
cttgcctgcccctgatttt

SEQ ID NO: 558464 - DNA, 19 bp, Mus musculus
  siRNA target sequence for Mid2 (NM_011845.1,2394-2412).
ctcaagaatccccttatgt

SEQ ID NO: 558465 - DNA, 19 bp, Mus musculus
  siRNA target sequence for Mid2 (NM_011845.1,2396-2414).
caagaatccccttatgtgt

SEQ ID NO: 558466 - DNA, 19 bp, Mus musculus
  siRNA target sequence for Mid2 (NM_011845.1,2411-2429).
gtgtcagggatgaaagctt

SEQ ID NO: 558467 - DNA, 19 bp, Mus musculus
  siRNA target sequence for Mipep (NM_027436.1,405-423).
ccacagacagtcctcattt

SEQ ID NO: 558468 - DNA, 19 bp, Mus musculus
  siRNA target sequence for Mipep (NM_027436.1,406-424).
cacagacagtcctcatttt

SEQ ID NO: 558469 - DNA, 19 bp, Mus musculus
  siRNA target sequence for Mipep (NM_027436.1,461-479).
cttggcggactttgtgaaa

SEQ ID NO: 558470 - DNA, 19 bp, Mus musculus
  siRNA target sequence for Mipep (NM_027436.1,541-559).
ccatggtggaaaagttgaa

SEQ ID NO: 558471 - DNA, 19 bp, Mus musculus
  siRNA target sequence for Mipep (NM_027436.1,542-560).
catggtggaaaagttgaat

SEQ ID NO: 558472 - DNA, 19 bp, Mus musculus
  siRNA target sequence for Mipep (NM_027436.1,545-563).
ggtggaaaagttgaataca

SEQ ID NO: 558473 - DNA, 19 bp, Mus musculus
  siRNA target sequence for Mipep (NM_027436.1,562-580).
caaacgtggagctgtatca

SEQ ID NO: 558474 - DNA, 19 bp, Mus musculus
  siRNA target sequence for Mipep (NM_027436.1,592-610).
ggttactgggtgataagaa

SEQ ID NO: 558475 - DNA, 19 bp, Mus musculus
  siRNA target sequence for Mipep (NM_027436.1,597-615).
ctgggtgataagaagctta

SEQ ID NO: 558476 - DNA, 19 bp, Mus musculus
  siRNA target sequence for Mipep (NM_027436.1,601-619).
gtgataagaagcttatgga

SEQ ID NO: 558477 - DNA, 19 bp, Mus musculus
  siRNA target sequence for Mipep (NM_027436.1,640-658).
ggcgagtggccgaactatt

SEQ ID NO: 558478 - DNA, 19 bp, Mus musculus
  siRNA target sequence for Mipep (NM_027436.1,641-659).
gcgagtggccgaactattt

SEQ ID NO: 558479 - DNA, 19 bp, Mus musculus
  siRNA target sequence for Mipep (NM_027436.1,642-660).
cgagtggccgaactattta

SEQ ID NO: 558480 - DNA, 19 bp, Mus musculus
  siRNA target sequence for Mipep (NM_027436.1,643-661).
gagtggccgaactatttat

SEQ ID NO: 558481 - DNA, 19 bp, Mus musculus
  siRNA target sequence for Mipep (NM_027436.1,645-663).
gtggccgaactatttatgt

SEQ ID NO: 558482 - DNA, 19 bp, Mus musculus
  siRNA target sequence for Mipep (NM_027436.1,647-665).
ggccgaactatttatgttt

SEQ ID NO: 558483 - DNA, 19 bp, Mus musculus
  siRNA target sequence for Mipep (NM_027436.1,649-667).
ccgaactatttatgtttga

SEQ ID NO: 558484 - DNA, 19 bp, Mus musculus
  siRNA target sequence for Mipep (NM_027436.1,650-668).
cgaactatttatgtttgat

SEQ ID NO: 558485 - DNA, 19 bp, Mus musculus
  siRNA target sequence for Mipep (NM_027436.1,677-695).
cagtggaatccatctagat

SEQ ID NO: 558486 - DNA, 19 bp, Mus musculus
  siRNA target sequence for Mipep (NM_027436.1,714-732).
gcagtggacctcaatgtta

SEQ ID NO: 558487 - DNA, 19 bp, Mus musculus
  siRNA target sequence for Mipep (NM_027436.1,717-735).
gtggacctcaatgttaaga

SEQ ID NO: 558488 - DNA, 19 bp, Mus musculus
  siRNA target sequence for Mipep (NM_027436.1,720-738).
gacctcaatgttaagatct

SEQ ID NO: 558489 - DNA, 19 bp, Mus musculus
  siRNA target sequence for Mipep (NM_027436.1,769-787).
ccaactttcccaacaagat

SEQ ID NO: 558490 - DNA, 19 bp, Mus musculus
  siRNA target sequence for Mipep (NM_027436.1,785-803).
gatccggaagagtctctta

SEQ ID NO: 558491 - DNA, 19 bp, Mus musculus
  siRNA target sequence for Mipep (NM_027436.1,831-849).
cgtgacggaagccacttaa

SEQ ID NO: 558492 - DNA, 19 bp, Mus musculus
  siRNA target sequence for Mipep (NM_027436.1,832-850).
gtgacggaagccacttaat

SEQ ID NO: 558493 - DNA, 19 bp, Mus musculus
  siRNA target sequence for Mipep (NM_027436.1,834-852).
gacggaagccacttaatca

SEQ ID NO: 558494 - DNA, 19 bp, Mus musculus
  siRNA target sequence for Mipep (NM_027436.1,836-854).
cggaagccacttaatcatt

SEQ ID NO: 558495 - DNA, 19 bp, Mus musculus
  siRNA target sequence for Mipep (NM_027436.1,838-856).
gaagccacttaatcattga

SEQ ID NO: 558496 - DNA, 19 bp, Mus musculus
  siRNA target sequence for Mipep (NM_027436.1,868-886).
cagaagcctccgatgactt

SEQ ID NO: 558497 - DNA, 19 bp, Mus musculus
  siRNA target sequence for Mipep (NM_027436.1,888-906).
gttcgggaggctgcttata

SEQ ID NO: 558498 - DNA, 19 bp, Mus musculus
  siRNA target sequence for Mipep (NM_027436.1,891-909).
cgggaggctgcttataaaa

SEQ ID NO: 558499 - DNA, 19 bp, Mus musculus
  siRNA target sequence for Mipep (NM_027436.1,892-910).
gggaggctgcttataaaat

SEQ ID NO: 558500 - DNA, 19 bp, Mus musculus
  siRNA target sequence for Mipep (NM_027436.1,922-940).
ccaatgccgatcagttgaa

SEQ ID NO: 558501 - DNA, 19 bp, Mus musculus
  siRNA target sequence for Mipep (NM_027436.1,923-941).
caatgccgatcagttgaaa

SEQ ID NO: 558502 - DNA, 19 bp, Mus musculus
  siRNA target sequence for Mipep (NM_027436.1,927-945).
gccgatcagttgaaatgtt

SEQ ID NO: 558503 - DNA, 19 bp, Mus musculus
  siRNA target sequence for Mipep (NM_027436.1,977-995).
ggcaaaattagtaggttat

SEQ ID NO: 558504 - DNA, 19 bp, Mus musculus
  siRNA target sequence for Mipep (NM_027436.1,1013-1031).
ggccctccaaggaaccata

SEQ ID NO: 558505 - DNA, 19 bp, Mus musculus
  siRNA target sequence for Mipep (NM_027436.1,1056-1074).
cagttccttgagaagctat

SEQ ID NO: 558506 - DNA, 19 bp, Mus musculus
  siRNA target sequence for Mipep (NM_027436.1,1061-1079).
ccttgagaagctatctgaa

SEQ ID NO: 558507 - DNA, 19 bp, Mus musculus
  siRNA target sequence for Mipep (NM_027436.1,1137-1155).
ctaaatcctcaaaattcta

SEQ ID NO: 558508 - DNA, 19 bp, Mus musculus
  siRNA target sequence for Mipep (NM_027436.1,1143-1161).
cctcaaaattctaaactaa

SEQ ID NO: 558509 - DNA, 19 bp, Mus musculus
  siRNA target sequence for Mipep (NM_027436.1,1197-1215).
cgtgcagagaggtataata

SEQ ID NO: 558510 - DNA, 19 bp, Mus musculus
  siRNA target sequence for Mipep (NM_027436.1,1201-1219).
cagagaggtataatattga

SEQ ID NO: 558511 - DNA, 19 bp, Mus musculus
  siRNA target sequence for Mipep (NM_027436.1,1263-1281).
gaaggcctgaatgtcttat

SEQ ID NO: 558512 - DNA, 19 bp, Mus musculus
  siRNA target sequence for Mipep (NM_027436.1,1266-1284).
ggcctgaatgtcttattta

SEQ ID NO: 558513 - DNA, 19 bp, Mus musculus
  siRNA target sequence for Mipep (NM_027436.1,1330-1348).
gagaggtgtggtgtaatga

SEQ ID NO: 558514 - DNA, 19 bp, Mus musculus
  siRNA target sequence for Mipep (NM_027436.1,1332-1350).
gaggtgtggtgtaatgaca

SEQ ID NO: 558515 - DNA, 19 bp, Mus musculus
  siRNA target sequence for Mipep (NM_027436.1,1361-1379).
ggctgttgttcatgaatct

SEQ ID NO: 558516 - DNA, 19 bp, Mus musculus
  siRNA target sequence for Mipep (NM_027436.1,1386-1404).
ctgctggggtacatttact

SEQ ID NO: 558517 - DNA, 19 bp, Mus musculus
  siRNA target sequence for Mipep (NM_027436.1,1388-1406).
gctggggtacatttactgt

SEQ ID NO: 558518 - DNA, 19 bp, Mus musculus
  siRNA target sequence for Mipep (NM_027436.1,1505-1523).
cgttctcatgctgaatctt

SEQ ID NO: 558519 - DNA, 19 bp, Mus musculus
  siRNA target sequence for Mipep (NM_027436.1,1535-1553).
cagggatttccctacatta

SEQ ID NO: 558520 - DNA, 19 bp, Mus musculus
  siRNA target sequence for Mipep (NM_027436.1,1593-1611).
ggccatgccatgcattcaa

SEQ ID NO: 558521 - DNA, 19 bp, Mus musculus
  siRNA target sequence for Mipep (NM_027436.1,1621-1639).
gaactcggtaccaacatgt

SEQ ID NO: 558522 - DNA, 19 bp, Mus musculus
  siRNA target sequence for Mipep (NM_027436.1,1681-1699).
ctattctgatggagtactt

SEQ ID NO: 558523 - DNA, 19 bp, Mus musculus
  siRNA target sequence for Mipep (NM_027436.1,1724-1742).
ccagttcgccaagcattat

SEQ ID NO: 558524 - DNA, 19 bp, Mus musculus
  siRNA target sequence for Mme (NM_008604.2,106-124).
gtcagatggatataactga

SEQ ID NO: 558525 - DNA, 19 bp, Mus musculus
  siRNA target sequence for Mme (NM_008604.2,113-131).
ggatataactgatatcaat

SEQ ID NO: 558526 - DNA, 19 bp, Mus musculus
  siRNA target sequence for Mme (NM_008604.2,194-212).
cttgctcctgactatcata

SEQ ID NO: 558527 - DNA, 19 bp, Mus musculus
  siRNA target sequence for Mme (NM_008604.2,205-223).
ctatcatagcggtgacaat

SEQ ID NO: 558528 - DNA, 19 bp, Mus musculus
  siRNA target sequence for Mme (NM_008604.2,218-236).
gacaatgatcgctctctat

SEQ ID NO: 558529 - DNA, 19 bp, Mus musculus
  siRNA target sequence for Mme (NM_008604.2,227-245).
cgctctctatgcaacctat

SEQ ID NO: 558530 - DNA, 19 bp, Mus musculus
  siRNA target sequence for Mme (NM_008604.2,233-251).
ctatgcaacctatgatgat

SEQ ID NO: 558531 - DNA, 19 bp, Mus musculus
  siRNA target sequence for Mme (NM_008604.2,286-304).
ctgctcgactgattcagaa

SEQ ID NO: 558532 - DNA, 19 bp, Mus musculus
  siRNA target sequence for Mme (NM_008604.2,288-306).
gctcgactgattcagaata

SEQ ID NO: 558533 - DNA, 19 bp, Mus musculus
  siRNA target sequence for Mme (NM_008604.2,289-307).
ctcgactgattcagaatat

SEQ ID NO: 558534 - DNA, 19 bp, Mus musculus
  siRNA target sequence for Mme (NM_008604.2,386-404).
gaccagttcccgatacagt

SEQ ID NO: 558535 - DNA, 19 bp, Mus musculus
  siRNA target sequence for Mme (NM_008604.2,388-406).
ccagttcccgatacagtaa

SEQ ID NO: 558536 - DNA, 19 bp, Mus musculus
  siRNA target sequence for Mme (NM_008604.2,389-407).
cagttcccgatacagtaat

SEQ ID NO: 558537 - DNA, 19 bp, Mus musculus
  siRNA target sequence for Mme (NM_008604.2,391-409).
gttcccgatacagtaattt

SEQ ID NO: 558538 - DNA, 19 bp, Mus musculus
  siRNA target sequence for Mme (NM_008604.2,397-415).
gatacagtaattttgacat

SEQ ID NO: 558539 - DNA, 19 bp, Mus musculus
  siRNA target sequence for Mme (NM_008604.2,428-446).
gctagaagtcattttgaaa

SEQ ID NO: 558540 - DNA, 19 bp, Mus musculus
  siRNA target sequence for Mme (NM_008604.2,463-481).
ccaaaactgaagacatagt

SEQ ID NO: 558541 - DNA, 19 bp, Mus musculus
  siRNA target sequence for Mme (NM_008604.2,495-513).
gcaaaaaccttgtacagat

SEQ ID NO: 558542 - DNA, 19 bp, Mus musculus
  siRNA target sequence for Mme (NM_008604.2,503-521).
cttgtacagatcgtgtata

SEQ ID NO: 558543 - DNA, 19 bp, Mus musculus
  siRNA target sequence for Mme (NM_008604.2,506-524).
gtacagatcgtgtataaat

SEQ ID NO: 558544 - DNA, 19 bp, Mus musculus
  siRNA target sequence for Mme (NM_008604.2,547-565).
gcggacaacctctactcaa

SEQ ID NO: 558545 - DNA, 19 bp, Mus musculus
  siRNA target sequence for Mme (NM_008604.2,548-566).
cggacaacctctactcaaa

SEQ ID NO: 558546 - DNA, 19 bp, Mus musculus
  siRNA target sequence for Mme (NM_008604.2,587-605).
gtggccagtagcatcagat

SEQ ID NO: 558547 - DNA, 19 bp, Mus musculus
  siRNA target sequence for Mme (NM_008604.2,589-607).
ggccagtagcatcagataa

SEQ ID NO: 558548 - DNA, 19 bp, Mus musculus
  siRNA target sequence for Mme (NM_008604.2,677-695).
gaaaaaggtcctcattaat

SEQ ID NO: 558549 - DNA, 19 bp, Mus musculus
  siRNA target sequence for Mme (NM_008604.2,702-720).
gttggcactgatgataaga

SEQ ID NO: 558550 - DNA, 19 bp, Mus musculus
  siRNA target sequence for Mme (NM_008604.2,719-737).
gaattctacccagcatata

SEQ ID NO: 558551 - DNA, 19 bp, Mus musculus
  siRNA target sequence for Mme (NM_008604.2,724-742).
ctacccagcatataattca

SEQ ID NO: 558552 - DNA, 19 bp, Mus musculus
  siRNA target sequence for Mme (NM_008604.2,727-745).
cccagcatataattcattt

SEQ ID NO: 558553 - DNA, 19 bp, Mus musculus
  siRNA target sequence for Mme (NM_008604.2,728-746).
ccagcatataattcatttt

SEQ ID NO: 558554 - DNA, 19 bp, Mus musculus
  siRNA target sequence for Mme (NM_008604.2,782-800).
ctatgagtgcactggaata

SEQ ID NO: 558555 - DNA, 19 bp, Mus musculus
  siRNA target sequence for Mme (NM_008604.2,852-870).
ctgattcgtcaggaacaaa

SEQ ID NO: 558556 - DNA, 19 bp, Mus musculus
  siRNA target sequence for Mme (NM_008604.2,854-872).
gattcgtcaggaacaaagt

SEQ ID NO: 558557 - DNA, 19 bp, Mus musculus
  siRNA target sequence for Mme (NM_008604.2,941-959).
caatgctacaactaaacca

SEQ ID NO: 558558 - DNA, 19 bp, Mus musculus
  siRNA target sequence for Mme (NM_008604.2,972-990).
gacccaatgctgctttata

SEQ ID NO: 558559 - DNA, 19 bp, Mus musculus
  siRNA target sequence for Mme (NM_008604.2,984-1002).
ctttataacaaaatgacat

SEQ ID NO: 558560 - DNA, 19 bp, Mus musculus
  siRNA target sequence for Mme (NM_008604.2,1032-1050).
gaggtcaatgggaagtcat

SEQ ID NO: 558561 - DNA, 19 bp, Mus musculus
  siRNA target sequence for Mme (NM_008604.2,1046-1064).
gtcattcagctggtcaaat

SEQ ID NO: 558562 - DNA, 19 bp, Mus musculus
  siRNA target sequence for Mme (NM_008604.2,1048-1066).
cattcagctggtcaaattt

SEQ ID NO: 558563 - DNA, 19 bp, Mus musculus
  siRNA target sequence for Mme (NM_008604.2,1054-1072).
gctggtcaaatttcacaaa

SEQ ID NO: 558564 - DNA, 19 bp, Mus musculus
  siRNA target sequence for Mme (NM_008604.2,1079-1097).
catgtcaactgtgaatatt

SEQ ID NO: 558565 - DNA, 19 bp, Mus musculus
  siRNA target sequence for Mme (NM_008604.2,1125-1143).
gtctatgctccagaatatt

SEQ ID NO: 558566 - DNA, 19 bp, Mus musculus
  siRNA target sequence for Mme (NM_008604.2,1127-1145).
ctatgctccagaatattta

SEQ ID NO: 558567 - DNA, 19 bp, Mus musculus
  siRNA target sequence for Mme (NM_008604.2,1137-1155).
gaatatttaaccaaactta

SEQ ID NO: 558568 - DNA, 19 bp, Mus musculus
  siRNA target sequence for Mme (NM_008604.2,1148-1166).
caaacttaagcctattctt

SEQ ID NO: 558569 - DNA, 19 bp, Mus musculus
  siRNA target sequence for Mme (NM_008604.2,1234-1252).
gcctcagccgaaactacaa

SEQ ID NO: 558570 - DNA, 19 bp, Mus musculus
  siRNA target sequence for Mme (NM_008604.2,1250-1268).
caaggagtccagaaatgct

SEQ ID NO: 558571 - DNA, 19 bp, Mus musculus
  siRNA target sequence for Mme (NM_008604.2,1278-1296).
gccctttatgggactacat

SEQ ID NO: 558572 - DNA, 19 bp, Mus musculus
  siRNA target sequence for Mme (NM_008604.2,1280-1298).
cctttatgggactacatca

SEQ ID NO: 558573 - DNA, 19 bp, Mus musculus
  siRNA target sequence for Mme (NM_008604.2,1312-1330).
ggagacggtgtgctaacta

SEQ ID NO: 558574 - DNA, 19 bp, Mus musculus
  siRNA target sequence for Mme (NM_008604.2,1396-1414).
gcaagcacgtggttgaaga

SEQ ID NO: 558575 - DNA, 19 bp, Mus musculus
  siRNA target sequence for Mme (NM_008604.2,1403-1421).
cgtggttgaagacttgatt

SEQ ID NO: 558576 - DNA, 19 bp, Mus musculus
  siRNA target sequence for Mme (NM_008604.2,1423-1441).
cacaaatccgggaagtttt

SEQ ID NO: 558577 - DNA, 19 bp, Mus musculus
  siRNA target sequence for Mme (NM_008604.2,1505-1523).
ggccttggcaattaaagaa

SEQ ID NO: 558578 - DNA, 19 bp, Mus musculus
  siRNA target sequence for Mme (NM_008604.2,1532-1550).
ctatcctgatgacatcatt

SEQ ID NO: 558579 - DNA, 19 bp, Mus musculus
  siRNA target sequence for Mme (NM_008604.2,1705-1723).
cagctgtagtcaatgcatt

SEQ ID NO: 558580 - DNA, 19 bp, Mus musculus
  siRNA target sequence for Mme (NM_008604.2,1710-1728).
gtagtcaatgcattttatt

SEQ ID NO: 558581 - DNA, 19 bp, Mus musculus
  siRNA target sequence for Mme (NM_008604.2,1730-1748).
ctcaggccgaaatcagata

SEQ ID NO: 558582 - DNA, 19 bp, Mus musculus
  siRNA target sequence for Mme (NM_008604.2,1732-1750).
caggccgaaatcagatagt

SEQ ID NO: 558583 - DNA, 19 bp, Mus musculus
  siRNA target sequence for Mme (NM_008604.2,1734-1752).
ggccgaaatcagatagtct

SEQ ID NO: 558584 - DNA, 19 bp, Mus musculus
  siRNA target sequence for Mme (NM_008604.2,1735-1753).
gccgaaatcagatagtctt

SEQ ID NO: 558585 - DNA, 19 bp, Mus musculus
  siRNA target sequence for Mme (NM_008604.2,1788-1806).
gctcagcaatccaactcat

SEQ ID NO: 558586 - DNA, 19 bp, Mus musculus
  siRNA target sequence for Mme (NM_008604.2,1789-1807).
ctcagcaatccaactcatt

SEQ ID NO: 558587 - DNA, 19 bp, Mus musculus
  siRNA target sequence for Mme (NM_008604.2,1791-1809).
cagcaatccaactcattga

SEQ ID NO: 558588 - DNA, 19 bp, Mus musculus
  siRNA target sequence for Mme (NM_008604.2,1830-1848).
gtcattggacatgaaatca

SEQ ID NO: 558589 - DNA, 19 bp, Mus musculus
  siRNA target sequence for Mme (NM_008604.2,1854-1872).
ggatttgatgacaatggaa

SEQ ID NO: 558590 - DNA, 19 bp, Mus musculus
  siRNA target sequence for Mme (NM_008604.2,1913-1931).
gcagcagtcggcaaataat

SEQ ID NO: 558591 - DNA, 19 bp, Mus musculus
  siRNA target sequence for Mme (NM_008604.2,1914-1932).
cagcagtcggcaaataatt

SEQ ID NO: 558592 - DNA, 19 bp, Mus musculus
  siRNA target sequence for Mme (NM_008604.2,1916-1934).
gcagtcggcaaataatttt

SEQ ID NO: 558593 - DNA, 19 bp, Mus musculus
  siRNA target sequence for Mme (NM_008604.2,1917-1935).
cagtcggcaaataatttta

SEQ ID NO: 558594 - DNA, 19 bp, Mus musculus
  siRNA target sequence for Mme (NM_008604.2,1940-1958).
ccaatcccagtgtatggta

SEQ ID NO: 558595 - DNA, 19 bp, Mus musculus
  siRNA target sequence for Mme (NM_008604.2,1941-1959).
caatcccagtgtatggtat

SEQ ID NO: 558596 - DNA, 19 bp, Mus musculus
  siRNA target sequence for Mme (NM_008604.2,1995-2013).
ggacagcatctcaatggaa

SEQ ID NO: 558597 - DNA, 19 bp, Mus musculus
  siRNA target sequence for Mme (NM_008604.2,2047-2065).
gaggtattggccaagcata

SEQ ID NO: 558598 - DNA, 19 bp, Mus musculus
  siRNA target sequence for Mme (NM_008604.2,2070-2088).
gcctatcagaattatgtta

SEQ ID NO: 558599 - DNA, 19 bp, Mus musculus
  siRNA target sequence for Mme (NM_008604.2,2129-2147).
caatcacaaacaactattt

SEQ ID NO: 558600 - DNA, 19 bp, Mus musculus
  siRNA target sequence for Mme (NM_008604.2,2177-2195).
gacctaccggccagagtat

SEQ ID NO: 558601 - DNA, 19 bp, Mus musculus
  siRNA target sequence for Mme (NM_008604.2,2187-2205).
ccagagtatgcagtcaatt

SEQ ID NO: 558602 - DNA, 19 bp, Mus musculus
  siRNA target sequence for Mme (NM_008604.2,2192-2210).
gtatgcagtcaattctatt

SEQ ID NO: 558603 - DNA, 19 bp, Mus musculus
  siRNA target sequence for Mme (NM_008604.2,2196-2214).
gcagtcaattctattaaaa

SEQ ID NO: 558604 - DNA, 19 bp, Mus musculus
  siRNA target sequence for Mme (NM_008604.2,2201-2219).
caattctattaaaacagat

SEQ ID NO: 558605 - DNA, 19 bp, Mus musculus
  siRNA target sequence for Mme (NM_008604.2,2206-2224).
ctattaaaacagatgtaca

SEQ ID NO: 558606 - DNA, 19 bp, Mus musculus
  siRNA target sequence for Mme (NM_008604.2,2285-2303).
ctttcattgccgcaagaat

SEQ ID NO: 558607 - DNA, 19 bp, Mus musculus
  siRNA target sequence for Mme (NM_008604.2,2289-2307).
cattgccgcaagaattcat

SEQ ID NO: 558608 - DNA, 19 bp, Mus musculus
  siRNA target sequence for Mme (NM_008604.2,2293-2311).
gccgcaagaattcatacat

SEQ ID NO: 558609 - DNA, 19 bp, Mus musculus
  siRNA target sequence for Mme (NM_008604.2,2295-2313).
cgcaagaattcatacatga

SEQ ID NO: 558610 - DNA, 19 bp, Mus musculus
  siRNA target sequence for Mmp10 (NM_019471.1,141-159).
gctcagcaatacctagaaa

SEQ ID NO: 558611 - DNA, 19 bp, Mus musculus
  siRNA target sequence for Mmp10 (NM_019471.1,142-160).
ctcagcaatacctagaaaa

SEQ ID NO: 558612 - DNA, 19 bp, Mus musculus
  siRNA target sequence for Mmp10 (NM_019471.1,610-628).
gattttatggagatgttca

SEQ ID NO: 558613 - DNA, 19 bp, Mus musculus
  siRNA target sequence for Mmp10 (NM_019471.1,660-678).
ccctcagggaccaacttat

SEQ ID NO: 558614 - DNA, 19 bp, Mus musculus
  siRNA target sequence for Mmp10 (NM_019471.1,661-679).
cctcagggaccaacttatt

SEQ ID NO: 558615 - DNA, 19 bp, Mus musculus
  siRNA target sequence for Mmp10 (NM_019471.1,719-737).
ctttcattccgacaagaaa

SEQ ID NO: 558616 - DNA, 19 bp, Mus musculus
  siRNA target sequence for Mmp10 (NM_019471.1,723-741).
cattccgacaagaaagaat

SEQ ID NO: 558617 - DNA, 19 bp, Mus musculus
  siRNA target sequence for Mmp10 (NM_019471.1,727-745).
ccgacaagaaagaatctct

SEQ ID NO: 558618 - DNA, 19 bp, Mus musculus
  siRNA target sequence for Mmp10 (NM_019471.1,769-787).
ccacaagcccagctaactt

SEQ ID NO: 558619 - DNA, 19 bp, Mus musculus
  siRNA target sequence for Mmp10 (NM_019471.1,781-799).
ctaacttccacctttctca

SEQ ID NO: 558620 - DNA, 19 bp, Mus musculus
  siRNA target sequence for Mmp10 (NM_019471.1,804-822).
gatatagagggcattcaat

SEQ ID NO: 558621 - DNA, 19 bp, Mus musculus
  siRNA target sequence for Mmp10 (NM_019471.1,888-906).
cctgagaccccagacaaat

SEQ ID NO: 558622 - DNA, 19 bp, Mus musculus
  siRNA target sequence for Mmp10 (NM_019471.1,946-964).
gaggggaagtcctattctt

SEQ ID NO: 558623 - DNA, 19 bp, Mus musculus
  siRNA target sequence for Mmp10 (NM_019471.1,948-966).
ggggaagtcctattcttta

SEQ ID NO: 558624 - DNA, 19 bp, Mus musculus
  siRNA target sequence for Mmp10 (NM_019471.1,949-967).
gggaagtcctattctttaa

SEQ ID NO: 558625 - DNA, 19 bp, Mus musculus
  siRNA target sequence for Mmp10 (NM_019471.1,950-968).
ggaagtcctattctttaaa

SEQ ID NO: 558626 - DNA, 19 bp, Mus musculus
  siRNA target sequence for Mmp10 (NM_019471.1,982-1000).
ggcgcagatcccattggaa

SEQ ID NO: 558627 - DNA, 19 bp, Mus musculus
  siRNA target sequence for Mmp10 (NM_019471.1,983-1001).
gcgcagatcccattggaat

SEQ ID NO: 558628 - DNA, 19 bp, Mus musculus
  siRNA target sequence for Mmp10 (NM_019471.1,1118-1136).
ctgggcagtccgaggaaat

SEQ ID NO: 558629 - DNA, 19 bp, Mus musculus
  siRNA target sequence for Mmp10 (NM_019471.1,1277-1295).
gacaagacatgttatggat

SEQ ID NO: 558630 - DNA, 19 bp, Mus musculus
  siRNA target sequence for Mmp10 (NM_019471.1,1301-1319).
cttcccaagacagataaca

SEQ ID NO: 558631 - DNA, 19 bp, Mus musculus
  siRNA target sequence for Mmp10 (NM_019471.1,1333-1351).
gaattgagccacaagttga

SEQ ID NO: 558632 - DNA, 19 bp, Mus musculus
  siRNA target sequence for Mmp10 (NM_019471.1,1396-1414).
catcacagttcgagtttga

SEQ ID NO: 558633 - DNA, 19 bp, Mus musculus
  siRNA target sequence for Mmp10 (NM_019471.1,1424-1442).
caggacggtgacacacata

SEQ ID NO: 558634 - DNA, 19 bp, Mus musculus
  siRNA target sequence for Mmp14 (NM_008608.2,443-461).
ccgccatgcaaaagttcta

SEQ ID NO: 558635 - DNA, 19 bp, Mus musculus
  siRNA target sequence for Mmp14 (NM_008608.2,444-462).
cgccatgcaaaagttctat

SEQ ID NO: 558636 - DNA, 19 bp, Mus musculus
  siRNA target sequence for Mmp14 (NM_008608.2,524-542).
gtggtgttccggataagtt

SEQ ID NO: 558637 - DNA, 19 bp, Mus musculus
  siRNA target sequence for Mmp14 (NM_008608.2,593-611).
gcctcaagtggcagcataa

SEQ ID NO: 558638 - DNA, 19 bp, Mus musculus
  siRNA target sequence for Mmp14 (NM_008608.2,594-612).
cctcaagtggcagcataat

SEQ ID NO: 558639 - DNA, 19 bp, Mus musculus
  siRNA target sequence for Mmp14 (NM_008608.2,807-825).
cgacagtacaccctttgat

SEQ ID NO: 558640 - DNA, 19 bp, Mus musculus
  siRNA target sequence for Mmp14 (NM_008608.2,858-876).
cccaggccccaatattgga

SEQ ID NO: 558641 - DNA, 19 bp, Mus musculus
  siRNA target sequence for Mmp14 (NM_008608.2,903-921).
gccctggactgtccaaaat

SEQ ID NO: 558642 - DNA, 19 bp, Mus musculus
  siRNA target sequence for Mmp14 (NM_008608.2,905-923).
cctggactgtccaaaatga

SEQ ID NO: 558643 - DNA, 19 bp, Mus musculus
  siRNA target sequence for Mmp14 (NM_008608.2,913-931).
gtccaaaatgaggatctaa

SEQ ID NO: 558644 - DNA, 19 bp, Mus musculus
  siRNA target sequence for Mmp14 (NM_008608.2,925-943).
gatctaaatgggaatgaca

SEQ ID NO: 558645 - DNA, 19 bp, Mus musculus
  siRNA target sequence for Mmp14 (NM_008608.2,1075-1093).
cgtggcatccagcaacttt

SEQ ID NO: 558646 - DNA, 19 bp, Mus musculus
  siRNA target sequence for Mmp14 (NM_008608.2,1106-1124).
cagggtcacccacaaagat

SEQ ID NO: 558647 - DNA, 19 bp, Mus musculus
  siRNA target sequence for Mmp14 (NM_008608.2,1271-1289).
ggcgggtgaggaataacca

SEQ ID NO: 558648 - DNA, 19 bp, Mus musculus
  siRNA target sequence for Mmp14 (NM_008608.2,1272-1290).
gcgggtgaggaataaccaa

SEQ ID NO: 558649 - DNA, 19 bp, Mus musculus
  siRNA target sequence for Mmp14 (NM_008608.2,1338-1356).
gcctgcatccatcaatact

SEQ ID NO: 558650 - DNA, 19 bp, Mus musculus
  siRNA target sequence for Mmp14 (NM_008608.2,1375-1393).
ggcaaatttgtcttcttca

SEQ ID NO: 558651 - DNA, 19 bp, Mus musculus
  siRNA target sequence for Mmp14 (NM_008608.2,1548-1566).
gtactaccggttcaatgaa

SEQ ID NO: 558652 - DNA, 19 bp, Mus musculus
  siRNA target sequence for Mmp14 (NM_008608.2,1551-1569).
ctaccggttcaatgaagaa

SEQ ID NO: 558653 - DNA, 19 bp, Mus musculus
  siRNA target sequence for Mmp14 (NM_008608.2,1586-1604).
gcgagtaccctaaaaacat

SEQ ID NO: 558654 - DNA, 19 bp, Mus musculus
  siRNA target sequence for Mmp14 (NM_008608.2,1631-1649).
ctcccagggggtcattcat

SEQ ID NO: 558655 - DNA, 19 bp, Mus musculus
  siRNA target sequence for Mmp15 (NM_008609.2,341-359).
ccgagatgcagagtttcta

SEQ ID NO: 558656 - DNA, 19 bp, Mus musculus
  siRNA target sequence for Mmp15 (NM_008609.2,372-390).
cacgggtgtgcttgatgaa

SEQ ID NO: 558657 - DNA, 19 bp, Mus musculus
  siRNA target sequence for Mmp15 (NM_008609.2,382-400).
cttgatgaagagacgaaaa

SEQ ID NO: 558658 - DNA, 19 bp, Mus musculus
  siRNA target sequence for Mmp15 (NM_008609.2,422-440).
gtggggttcctgatcagtt

SEQ ID NO: 558659 - DNA, 19 bp, Mus musculus
  siRNA target sequence for Mmp15 (NM_008609.2,466-484).
cgtcgacggcggaaacgtt

SEQ ID NO: 558660 - DNA, 19 bp, Mus musculus
  siRNA target sequence for Mmp15 (NM_008609.2,467-485).
gtcgacggcggaaacgtta

SEQ ID NO: 558661 - DNA, 19 bp, Mus musculus
  siRNA target sequence for Mmp15 (NM_008609.2,779-797).
gtggggacacccatttcga

SEQ ID NO: 558662 - DNA, 19 bp, Mus musculus
  siRNA target sequence for Mmp15 (NM_008609.2,789-807).
ccatttcgacgcagatgaa

SEQ ID NO: 558663 - DNA, 19 bp, Mus musculus
  siRNA target sequence for Mmp15 (NM_008609.2,886-904).
gggctagaacactcaagta

SEQ ID NO: 558664 - DNA, 19 bp, Mus musculus
  siRNA target sequence for Mmp15 (NM_008609.2,887-905).
ggctagaacactcaagtaa

SEQ ID NO: 558665 - DNA, 19 bp, Mus musculus
  siRNA target sequence for Mmp15 (NM_008609.2,902-920).
gtaaccccagcgctattat

SEQ ID NO: 558666 - DNA, 19 bp, Mus musculus
  siRNA target sequence for Mmp15 (NM_008609.2,938-956).
ggatggataccgacaactt

SEQ ID NO: 558667 - DNA, 19 bp, Mus musculus
  siRNA target sequence for Mmp15 (NM_008609.2,1277-1295).
ggcacaaccgcgttctaga

SEQ ID NO: 558668 - DNA, 19 bp, Mus musculus
  siRNA target sequence for Mmp15 (NM_008609.2,1362-1380).
gcgccaggatggacatttt

SEQ ID NO: 558669 - DNA, 19 bp, Mus musculus
  siRNA target sequence for Mmp15 (NM_008609.2,1364-1382).
gccaggatggacattttgt

SEQ ID NO: 558670 - DNA, 19 bp, Mus musculus
  siRNA target sequence for Mmp15 (NM_008609.2,1366-1384).
caggatggacattttgtct

SEQ ID NO: 558671 - DNA, 19 bp, Mus musculus
  siRNA target sequence for Mmp15 (NM_008609.2,1474-1492).
ccctatgaccgcattgaca

SEQ ID NO: 558672 - DNA, 19 bp, Mus musculus
  siRNA target sequence for Mmp15 (NM_008609.2,1517-1535).
gtcacaccttcttctttca

SEQ ID NO: 558673 - DNA, 19 bp, Mus musculus
  siRNA target sequence for Mmp15 (NM_008609.2,1682-1700).
gcaccaagtactggaaatt

SEQ ID NO: 558674 - DNA, 19 bp, Mus musculus
  siRNA target sequence for Mmp15 (NM_008609.2,1685-1703).
ccaagtactggaaattcaa

SEQ ID NO: 558675 - DNA, 19 bp, Mus musculus
  siRNA target sequence for Mmp16 (NM_019724.2,264-282).
ctggaagaaggttggattt

SEQ ID NO: 558676 - DNA, 19 bp, Mus musculus
  siRNA target sequence for Mmp16 (NM_019724.2,286-304).
gcatcgttcgggtgtgttt

SEQ ID NO: 558677 - DNA, 19 bp, Mus musculus
  siRNA target sequence for Mmp16 (NM_019724.2,287-305).
catcgttcgggtgtgtttt

SEQ ID NO: 558678 - DNA, 19 bp, Mus musculus
  siRNA target sequence for Mmp16 (NM_019724.2,290-308).
cgttcgggtgtgtttttct

SEQ ID NO: 558679 - DNA, 19 bp, Mus musculus
  siRNA target sequence for Mmp16 (NM_019724.2,404-422).
ccgactgaccccagaatgt

SEQ ID NO: 558680 - DNA, 19 bp, Mus musculus
  siRNA target sequence for Mmp16 (NM_019724.2,566-584).
ggcagctctaaattcaaca

SEQ ID NO: 558681 - DNA, 19 bp, Mus musculus
  siRNA target sequence for Mmp16 (NM_019724.2,568-586).
cagctctaaattcaacatt

SEQ ID NO: 558682 - DNA, 19 bp, Mus musculus
  siRNA target sequence for Mmp16 (NM_019724.2,590-608).
cgaaagcgctacgcattaa

SEQ ID NO: 558683 - DNA, 19 bp, Mus musculus
  siRNA target sequence for Mmp16 (NM_019724.2,601-619).
cgcattaactggacagaaa

SEQ ID NO: 558684 - DNA, 19 bp, Mus musculus
  siRNA target sequence for Mmp16 (NM_019724.2,652-670).
gaacgtaactccaaaagtt

SEQ ID NO: 558685 - DNA, 19 bp, Mus musculus
  siRNA target sequence for Mmp16 (NM_019724.2,732-750).
ctctaacgtttgaagaagt

SEQ ID NO: 558686 - DNA, 19 bp, Mus musculus
  siRNA target sequence for Mmp16 (NM_019724.2,779-797).
cgtgatgtggatataacca

SEQ ID NO: 558687 - DNA, 19 bp, Mus musculus
  siRNA target sequence for Mmp16 (NM_019724.2,891-909).
gaggcgacacccattttga

SEQ ID NO: 558688 - DNA, 19 bp, Mus musculus
  siRNA target sequence for Mmp16 (NM_019724.2,893-911).
ggcgacacccattttgatt

SEQ ID NO: 558689 - DNA, 19 bp, Mus musculus
  siRNA target sequence for Mmp16 (NM_019724.2,895-913).
cgacacccattttgattct

SEQ ID NO: 558690 - DNA, 19 bp, Mus musculus
  siRNA target sequence for Mmp16 (NM_019724.2,931-949).
gggaaatcccaatcatgat

SEQ ID NO: 558691 - DNA, 19 bp, Mus musculus
  siRNA target sequence for Mmp16 (NM_019724.2,940-958).
caatcatgatggaaacgat

SEQ ID NO: 558692 - DNA, 19 bp, Mus musculus
  siRNA target sequence for Mmp16 (NM_019724.2,944-962).
catgatggaaacgatttat

SEQ ID NO: 558693 - DNA, 19 bp, Mus musculus
  siRNA target sequence for Mmp16 (NM_019724.2,951-969).
gaaacgatttatttcttgt

SEQ ID NO: 558694 - DNA, 19 bp, Mus musculus
  siRNA target sequence for Mmp16 (NM_019724.2,1066-1084).
cttcaagcttcctaatgat

SEQ ID NO: 558695 - DNA, 19 bp, Mus musculus
  siRNA target sequence for Mmp16 (NM_019724.2,1096-1114).
catccagaagatatatggt

SEQ ID NO: 558696 - DNA, 19 bp, Mus musculus
  siRNA target sequence for Mmp16 (NM_019724.2,1279-1297).
cttcaacactctagctatt

SEQ ID NO: 558697 - DNA, 19 bp, Mus musculus
  siRNA target sequence for Mmp16 (NM_019724.2,1282-1300).
caacactctagctattctt

SEQ ID NO: 558698 - DNA, 19 bp, Mus musculus
  siRNA target sequence for Mmp16 (NM_019724.2,1367-1385).
ggatacccaatgcaaatta

SEQ ID NO: 558699 - DNA, 19 bp, Mus musculus
  siRNA target sequence for Mmp16 (NM_019724.2,1373-1391).
ccaatgcaaattacttact

SEQ ID NO: 558700 - DNA, 19 bp, Mus musculus
  siRNA target sequence for Mmp16 (NM_019724.2,1374-1392).
caatgcaaattacttactt

SEQ ID NO: 558701 - DNA, 19 bp, Mus musculus
  siRNA target sequence for Mmp16 (NM_019724.2,1401-1419).
gccttcctcccagtattga

SEQ ID NO: 558702 - DNA, 19 bp, Mus musculus
  siRNA target sequence for Mmp16 (NM_019724.2,1430-1448).
gaaaacagtgacggaaatt

SEQ ID NO: 558703 - DNA, 19 bp, Mus musculus
  siRNA target sequence for Mmp16 (NM_019724.2,1441-1459).
cggaaatttcgtcttcttt

SEQ ID NO: 558704 - DNA, 19 bp, Mus musculus
  siRNA target sequence for Mmp16 (NM_019724.2,1442-1460).
ggaaatttcgtcttcttta

SEQ ID NO: 558705 - DNA, 19 bp, Mus musculus
  siRNA target sequence for Mmp16 (NM_019724.2,1443-1461).
gaaatttcgtcttctttaa

SEQ ID NO: 558706 - DNA, 19 bp, Mus musculus
  siRNA target sequence for Mmp16 (NM_019724.2,1503-1521).
ctggttaccctcatgactt

SEQ ID NO: 558707 - DNA, 19 bp, Mus musculus
  siRNA target sequence for Mmp16 (NM_019724.2,1506-1524).
gttaccctcatgacttgat

SEQ ID NO: 558708 - DNA, 19 bp, Mus musculus
  siRNA target sequence for Mmp16 (NM_019724.2,1539-1557).
gaatcccccctcatggtat

SEQ ID NO: 558709 - DNA, 19 bp, Mus musculus
  siRNA target sequence for Mmp16 (NM_019724.2,1543-1561).
cccccctcatggtattgat

SEQ ID NO: 558710 - DNA, 19 bp, Mus musculus
  siRNA target sequence for Mmp16 (NM_019724.2,1544-1562).
ccccctcatggtattgatt

SEQ ID NO: 558711 - DNA, 19 bp, Mus musculus
  siRNA target sequence for Mmp16 (NM_019724.2,1567-1585).
catatggtgggaagatgtt

SEQ ID NO: 558712 - DNA, 19 bp, Mus musculus
  siRNA target sequence for Mmp16 (NM_019724.2,1580-1598).
gatgttggcaaaacctatt

SEQ ID NO: 558713 - DNA, 19 bp, Mus musculus
  siRNA target sequence for Mmp16 (NM_019724.2,1681-1699).
gaaggggatccctgaatca

SEQ ID NO: 558714 - DNA, 19 bp, Mus musculus
  siRNA target sequence for Mmp16 (NM_019724.2,1730-1748).
ggctttacctatttctaca

SEQ ID NO: 558715 - DNA, 19 bp, Mus musculus
  siRNA target sequence for Mmp16 (NM_019724.2,1731-1749).
gctttacctatttctacaa

SEQ ID NO: 558716 - DNA, 19 bp, Mus musculus
  siRNA target sequence for Mmp16 (NM_019724.2,1790-1808).
gtagaacctggttatccaa

SEQ ID NO: 558717 - DNA, 19 bp, Mus musculus
  siRNA target sequence for Mmp16 (NM_019724.2,1875-1893).
caccagatgatgtagacat

SEQ ID NO: 558718 - DNA, 19 bp, Mus musculus
  siRNA target sequence for Mmp16 (NM_019724.2,1968-1986).
gcctccttgtattggttta

SEQ ID NO: 558719 - DNA, 19 bp, Mus musculus
  siRNA target sequence for Mmp16 (NM_019724.2,2021-2039).
cgccacatactgtactgta

SEQ ID NO: 558720 - DNA, 19 bp, Mus musculus
  siRNA target sequence for Mmp16 (NM_019724.2,2022-2040).
gccacatactgtactgtaa

SEQ ID NO: 558721 - DNA, 19 bp, Mus musculus
  siRNA target sequence for Mmp16 (NM_019724.2,2023-2041).
ccacatactgtactgtaaa

SEQ ID NO: 558722 - DNA, 19 bp, Mus musculus
  siRNA target sequence for Mmp16 (NM_019724.2,2035-2053).
ctgtaaacgctctatgcaa

SEQ ID NO: 558723 - DNA, 19 bp, Mus musculus
  siRNA target sequence for Mmp17 (NM_011846.3,354-372).
ccactggcatcctagatga

SEQ ID NO: 558724 - DNA, 19 bp, Mus musculus
  siRNA target sequence for Mmp17 (NM_011846.3,645-663).
ccaaggccgaccacaatga

SEQ ID NO: 558725 - DNA, 19 bp, Mus musculus
  siRNA target sequence for Mmp17 (NM_011846.3,693-711).
cggtggcccacgcattctt

SEQ ID NO: 558726 - DNA, 19 bp, Mus musculus
  siRNA target sequence for Mmp17 (NM_011846.3,807-825).
cagtggccgtccatgagtt

SEQ ID NO: 558727 - DNA, 19 bp, Mus musculus
  siRNA target sequence for Mmp17 (NM_011846.3,1119-1137).
gaggcgaagcattcttttt

SEQ ID NO: 558728 - DNA, 19 bp, Mus musculus
  siRNA target sequence for Mmp17 (NM_011846.3,1122-1140).
gcgaagcattctttttcaa

SEQ ID NO: 558729 - DNA, 19 bp, Mus musculus
  siRNA target sequence for Mmp17 (NM_011846.3,1185-1203).
cgctgcagccggctcaaat

SEQ ID NO: 558730 - DNA, 19 bp, Mus musculus
  siRNA target sequence for Mmp17 (NM_011846.3,1269-1287).
gtgaccacaagattgtctt

SEQ ID NO: 558731 - DNA, 19 bp, Mus musculus
  siRNA target sequence for Mmp17 (NM_011846.3,1298-1316).
gacagatactgggtgttta

SEQ ID NO: 558732 - DNA, 19 bp, Mus musculus
  siRNA target sequence for Mmp17 (NM_011846.3,1302-1320).
gatactgggtgtttaagga

SEQ ID NO: 558733 - DNA, 19 bp, Mus musculus
  siRNA target sequence for Mmp17 (NM_011846.3,1308-1326).
gggtgtttaaggacaacaa

SEQ ID NO: 558734 - DNA, 19 bp, Mus musculus
  siRNA target sequence for Mmp17 (NM_011846.3,1416-1434).
ggacttatttctttaagga

SEQ ID NO: 558735 - DNA, 19 bp, Mus musculus
  siRNA target sequence for Mmp17 (NM_011846.3,1438-1456).
gctgtactggcgctatgat

SEQ ID NO: 558736 - DNA, 19 bp, Mus musculus
  siRNA target sequence for Mmp19 (NM_021412.1,181-199).
gttgcagtatgggtatcta

SEQ ID NO: 558737 - DNA, 19 bp, Mus musculus
  siRNA target sequence for Mmp19 (NM_021412.1,187-205).
gtatgggtatctacagaaa

SEQ ID NO: 558738 - DNA, 19 bp, Mus musculus
  siRNA target sequence for Mmp19 (NM_021412.1,239-257).
gatatcacagaggctttaa

SEQ ID NO: 558739 - DNA, 19 bp, Mus musculus
  siRNA target sequence for Mmp19 (NM_021412.1,358-376).
caaccagaaatctcttaaa

SEQ ID NO: 558740 - DNA, 19 bp, Mus musculus
  siRNA target sequence for Mmp19 (NM_021412.1,412-430).
gacattccgcatcttcaat

SEQ ID NO: 558741 - DNA, 19 bp, Mus musculus
  siRNA target sequence for Mmp19 (NM_021412.1,544-562).
cattcgcctctctttccat

SEQ ID NO: 558742 - DNA, 19 bp, Mus musculus
  siRNA target sequence for Mmp19 (NM_021412.1,577-595).
gtactgctccaataccttt

SEQ ID NO: 558743 - DNA, 19 bp, Mus musculus
  siRNA target sequence for Mmp19 (NM_021412.1,631-649).
cccagaacttgggagtata

SEQ ID NO: 558744 - DNA, 19 bp, Mus musculus
  siRNA target sequence for Mmp19 (NM_021412.1,635-653).
gaacttgggagtatacact

SEQ ID NO: 558745 - DNA, 19 bp, Mus musculus
  siRNA target sequence for Mmp19 (NM_021412.1,641-659).
gggagtatacactttgata

SEQ ID NO: 558746 - DNA, 19 bp, Mus musculus
  siRNA target sequence for Mmp19 (NM_021412.1,642-660).
ggagtatacactttgataa

SEQ ID NO: 558747 - DNA, 19 bp, Mus musculus
  siRNA target sequence for Mmp19 (NM_021412.1,643-661).
gagtatacactttgataaa

SEQ ID NO: 558748 - DNA, 19 bp, Mus musculus
  siRNA target sequence for Mmp19 (NM_021412.1,673-691).
gactgaggggacctatcaa

SEQ ID NO: 558749 - DNA, 19 bp, Mus musculus
  siRNA target sequence for Mmp19 (NM_021412.1,743-761).
cttgggcactcccgatata

SEQ ID NO: 558750 - DNA, 19 bp, Mus musculus
  siRNA target sequence for Mmp19 (NM_021412.1,977-995).
gggcctcgtgggaagactt

SEQ ID NO: 558751 - DNA, 19 bp, Mus musculus
  siRNA target sequence for Mmp19 (NM_021412.1,978-996).
ggcctcgtgggaagactta

SEQ ID NO: 558752 - DNA, 19 bp, Mus musculus
  siRNA target sequence for Mmp19 (NM_021412.1,979-997).
gcctcgtgggaagacttat

SEQ ID NO: 558753 - DNA, 19 bp, Mus musculus
  siRNA target sequence for Mmp19 (NM_021412.1,983-1001).
cgtgggaagacttatgctt

SEQ ID NO: 558754 - DNA, 19 bp, Mus musculus
  siRNA target sequence for Mmp19 (NM_021412.1,987-1005).
ggaagacttatgctttcaa

SEQ ID NO: 558755 - DNA, 19 bp, Mus musculus
  siRNA target sequence for Mmp19 (NM_021412.1,1012-1030).
ctatgtgtggactgtaaca

SEQ ID NO: 558756 - DNA, 19 bp, Mus musculus
  siRNA target sequence for Mmp19 (NM_021412.1,1016-1034).
gtgtggactgtaacagatt

SEQ ID NO: 558757 - DNA, 19 bp, Mus musculus
  siRNA target sequence for Mmp19 (NM_021412.1,1040-1058).
ccaggccccttgttccaaa

SEQ ID NO: 558758 - DNA, 19 bp, Mus musculus
  siRNA target sequence for Mmp19 (NM_021412.1,1041-1059).
caggccccttgttccaaat

SEQ ID NO: 558759 - DNA, 19 bp, Mus musculus
  siRNA target sequence for Mmp19 (NM_021412.1,1043-1061).
ggccccttgttccaaatat

SEQ ID NO: 558760 - DNA, 19 bp, Mus musculus
  siRNA target sequence for Mmp19 (NM_021412.1,1091-1109).
ctagatgctgccgtttact

SEQ ID NO: 558761 - DNA, 19 bp, Mus musculus
  siRNA target sequence for Mmp19 (NM_021412.1,1115-1133).
cggacacgacggactcatt

SEQ ID NO: 558762 - DNA, 19 bp, Mus musculus
  siRNA target sequence for Mmp19 (NM_021412.1,1116-1134).
ggacacgacggactcattt

SEQ ID NO: 558763 - DNA, 19 bp, Mus musculus
  siRNA target sequence for Mmp19 (NM_021412.1,1119-1137).
cacgacggactcatttctt

SEQ ID NO: 558764 - DNA, 19 bp, Mus musculus
  siRNA target sequence for Mmp19 (NM_021412.1,1157-1175).
cggtatgtggatttcaaga

SEQ ID NO: 558765 - DNA, 19 bp, Mus musculus
  siRNA target sequence for Mmp19 (NM_021412.1,1158-1176).
ggtatgtggatttcaagat

SEQ ID NO: 558766 - DNA, 19 bp, Mus musculus
  siRNA target sequence for Mmp19 (NM_021412.1,1250-1268).
caaaaggtgttcctgttta

SEQ ID NO: 558767 - DNA, 19 bp, Mus musculus
  siRNA target sequence for Mmp19 (NM_021412.1,1317-1335).
gccgctaccctaaaccaat

SEQ ID NO: 558768 - DNA, 19 bp, Mus musculus
  siRNA target sequence for Mmp19 (NM_021412.1,1331-1349).
ccaatcaaggaactgttta

SEQ ID NO: 558769 - DNA, 19 bp, Mus musculus
  siRNA target sequence for Mmp19 (NM_021412.1,1386-1404).
ggcaagatggccaagtcta

SEQ ID NO: 558770 - DNA, 19 bp, Mus musculus
  siRNA target sequence for Mmp19 (NM_021412.1,1460-1478).
ggctatcccagaaatacga

SEQ ID NO: 558771 - DNA, 19 bp, Mus musculus
  siRNA target sequence for Mmp19 (NM_021412.1,1508-1526).
ccagacactaactcatcaa

SEQ ID NO: 558772 - DNA, 19 bp, Mus musculus
  siRNA target sequence for Mmp1a (NM_032006.2,123-141).
caacggagaccggcaaaat

SEQ ID NO: 558773 - DNA, 19 bp, Mus musculus
  siRNA target sequence for Mmp1a (NM_032006.2,554-572).
gtgacaacaacccatttga

SEQ ID NO: 558774 - DNA, 19 bp, Mus musculus
  siRNA target sequence for Mmp1a (NM_032006.2,656-674).
ggaccaacagcagtgaaaa

SEQ ID NO: 558775 - DNA, 19 bp, Mus musculus
  siRNA target sequence for Mmp1a (NM_032006.2,657-675).
gaccaacagcagtgaaaat

SEQ ID NO: 558776 - DNA, 19 bp, Mus musculus
  siRNA target sequence for Mmp1a (NM_032006.2,668-686).
gtgaaaatttcaacttgtt

SEQ ID NO: 558777 - DNA, 19 bp, Mus musculus
  siRNA target sequence for Mmp1a (NM_032006.2,739-757).
gatataggagcactaatgt

SEQ ID NO: 558778 - DNA, 19 bp, Mus musculus
  siRNA target sequence for Mmp1a (NM_032006.2,770-788).
cgtggtacactgaagactt

SEQ ID NO: 558779 - DNA, 19 bp, Mus musculus
  siRNA target sequence for Mmp1a (NM_032006.2,988-1006).
gagctcaatttaataggta

SEQ ID NO: 558780 - DNA, 19 bp, Mus musculus
  siRNA target sequence for Mmp1a (NM_032006.2,1004-1022).
gtattctctggccaaatct

SEQ ID NO: 558781 - DNA, 19 bp, Mus musculus
  siRNA target sequence for Mmp1a (NM_032006.2,1052-1070).
ctagtatgatagatcaagt

SEQ ID NO: 558782 - DNA, 19 bp, Mus musculus
  siRNA target sequence for Mmp1a (NM_032006.2,1310-1328).
ctggaattgatgataaagt

SEQ ID NO: 558783 - DNA, 19 bp, Mus musculus
  siRNA target sequence for Mmp1a (NM_032006.2,1398-1416).
ccaaataagaagagttgat

SEQ ID NO: 558784 - DNA, 19 bp, Mus musculus
  siRNA target sequence for Mmp1a (NM_032006.2,1414-1432).
gatgattcccgtgattcta

SEQ ID NO: 558785 - DNA, 19 bp, Mus musculus
  siRNA target sequence for Mmp1a (NM_032006.2,1417-1435).
gattcccgtgattctagta

SEQ ID NO: 558786 - DNA, 19 bp, Mus musculus
  siRNA target sequence for Mmp1b (NM_032007.1,69-87).
ggatggactccagaaaaat

SEQ ID NO: 558787 - DNA, 19 bp, Mus musculus
  siRNA target sequence for Mmp1b (NM_032007.1,510-528).
cacatttgatggatctaaa

SEQ ID NO: 558788 - DNA, 19 bp, Mus musculus
  siRNA target sequence for Mmp1b (NM_032007.1,572-590).
gcaatgttcattatgatct

SEQ ID NO: 558789 - DNA, 19 bp, Mus musculus
  siRNA target sequence for Mmp1b (NM_032007.1,664-682).
cttggactctcccattcta

SEQ ID NO: 558790 - DNA, 19 bp, Mus musculus
  siRNA target sequence for Mmp1b (NM_032007.1,812-830).
caacactggatccatgtaa

SEQ ID NO: 558791 - DNA, 19 bp, Mus musculus
  siRNA target sequence for Mmp1b (NM_032007.1,868-886).
ggggaggtgatattcttta

SEQ ID NO: 558792 - DNA, 19 bp, Mus musculus
  siRNA target sequence for Mmp1b (NM_032007.1,869-887).
gggaggtgatattctttaa

SEQ ID NO: 558793 - DNA, 19 bp, Mus musculus
  siRNA target sequence for Mmp1b (NM_032007.1,929-947).
ctttgatcgatgtgataga

SEQ ID NO: 558794 - DNA, 19 bp, Mus musculus
  siRNA target sequence for Mmp1b (NM_032007.1,958-976).
ccaaatctgccaggtaaat

SEQ ID NO: 558795 - DNA, 19 bp, Mus musculus
  siRNA target sequence for Mmp1b (NM_032007.1,959-977).
caaatctgccaggtaaatt

SEQ ID NO: 558796 - DNA, 19 bp, Mus musculus
  siRNA target sequence for Mmp1b (NM_032007.1,979-997).
gatgcagcttatgaagtta

SEQ ID NO: 558797 - DNA, 19 bp, Mus musculus
  siRNA target sequence for Mmp1b (NM_032007.1,1043-1061).
ctgttcaggaacagaatgt

SEQ ID NO: 558798 - DNA, 19 bp, Mus musculus
  siRNA target sequence for Mmp1b (NM_032007.1,1260-1278).
cgactataaagttgatgat

SEQ ID NO: 558799 - DNA, 19 bp, Mus musculus
  siRNA target sequence for Mmp1b (NM_032007.1,1357-1375).
gatgattccagtgatatta

SEQ ID NO: 558800 - DNA, 19 bp, Mus musculus
  siRNA target sequence for Mmp1b (NM_032007.1,1360-1378).
gattccagtgatattaata

SEQ ID NO: 558801 - DNA, 19 bp, Mus musculus
  siRNA target sequence for Mmp20 (NM_013903.1,56-74).
cttgtcacagctttaaagt

SEQ ID NO: 558802 - DNA, 19 bp, Mus musculus
  siRNA target sequence for Mmp20 (NM_013903.1,136-154).
ccttgcacaggcctatctt

SEQ ID NO: 558803 - DNA, 19 bp, Mus musculus
  siRNA target sequence for Mmp20 (NM_013903.1,146-164).
gcctatcttgacaagtatt

SEQ ID NO: 558804 - DNA, 19 bp, Mus musculus
  siRNA target sequence for Mmp20 (NM_013903.1,147-165).
cctatcttgacaagtatta

SEQ ID NO: 558805 - DNA, 19 bp, Mus musculus
  siRNA target sequence for Mmp20 (NM_013903.1,148-166).
ctatcttgacaagtattat

SEQ ID NO: 558806 - DNA, 19 bp, Mus musculus
  siRNA target sequence for Mmp20 (NM_013903.1,193-211).
cgagatggtggcaagagaa

SEQ ID NO: 558807 - DNA, 19 bp, Mus musculus
  siRNA target sequence for Mmp20 (NM_013903.1,218-236).
cccatgatcaggaggatta

SEQ ID NO: 558808 - DNA, 19 bp, Mus musculus
  siRNA target sequence for Mmp20 (NM_013903.1,219-237).
ccatgatcaggaggattaa

SEQ ID NO: 558809 - DNA, 19 bp, Mus musculus
  siRNA target sequence for Mmp20 (NM_013903.1,272-290).
gggaagttggaccagaata

SEQ ID NO: 558810 - DNA, 19 bp, Mus musculus
  siRNA target sequence for Mmp20 (NM_013903.1,280-298).
ggaccagaatacaatgaat

SEQ ID NO: 558811 - DNA, 19 bp, Mus musculus
  siRNA target sequence for Mmp20 (NM_013903.1,284-302).
cagaatacaatgaatgtga

SEQ ID NO: 558812 - DNA, 19 bp, Mus musculus
  siRNA target sequence for Mmp20 (NM_013903.1,387-405).
catacagaatctctaagta

SEQ ID NO: 558813 - DNA, 19 bp, Mus musculus
  siRNA target sequence for Mmp20 (NM_013903.1,476-494).
gtccctctgaacttcgtta

SEQ ID NO: 558814 - DNA, 19 bp, Mus musculus
  siRNA target sequence for Mmp20 (NM_013903.1,480-498).
ctctgaacttcgttagaat

SEQ ID NO: 558815 - DNA, 19 bp, Mus musculus
  siRNA target sequence for Mmp20 (NM_013903.1,482-500).
ctgaacttcgttagaataa

SEQ ID NO: 558816 - DNA, 19 bp, Mus musculus
  siRNA target sequence for Mmp20 (NM_013903.1,487-505).
cttcgttagaataaactct

SEQ ID NO: 558817 - DNA, 19 bp, Mus musculus
  siRNA target sequence for Mmp20 (NM_013903.1,540-558).
gagatcatggggattccta

SEQ ID NO: 558818 - DNA, 19 bp, Mus musculus
  siRNA target sequence for Mmp20 (NM_013903.1,618-636).
gaggagacacacatttcga

SEQ ID NO: 558819 - DNA, 19 bp, Mus musculus
  siRNA target sequence for Mmp20 (NM_013903.1,649-667).
gtggactatgggaacgaat

SEQ ID NO: 558820 - DNA, 19 bp, Mus musculus
  siRNA target sequence for Mmp20 (NM_013903.1,663-681).
cgaatgggttcaatttatt

SEQ ID NO: 558821 - DNA, 19 bp, Mus musculus
  siRNA target sequence for Mmp20 (NM_013903.1,682-700).
caccgttgctgctcatgaa

SEQ ID NO: 558822 - DNA, 19 bp, Mus musculus
  siRNA target sequence for Mmp20 (NM_013903.1,746-764).
ctgatgtacccaacttata

SEQ ID NO: 558823 - DNA, 19 bp, Mus musculus
  siRNA target sequence for Mmp20 (NM_013903.1,766-784).
gtaccagaacccctataga

SEQ ID NO: 558824 - DNA, 19 bp, Mus musculus
  siRNA target sequence for Mmp20 (NM_013903.1,769-787).
ccagaacccctatagattt

SEQ ID NO: 558825 - DNA, 19 bp, Mus musculus
  siRNA target sequence for Mmp20 (NM_013903.1,808-826).
gaaagggatccaagcatta

SEQ ID NO: 558826 - DNA, 19 bp, Mus musculus
  siRNA target sequence for Mmp20 (NM_013903.1,876-894).
cacctcacaagccatctat

SEQ ID NO: 558827 - DNA, 19 bp, Mus musculus
  siRNA target sequence for Mmp20 (NM_013903.1,910-928).
ctccagctcgtcctttgat

SEQ ID NO: 558828 - DNA, 19 bp, Mus musculus
  siRNA target sequence for Mmp20 (NM_013903.1,958-976).
gttcttcaaggataggatt

SEQ ID NO: 558829 - DNA, 19 bp, Mus musculus
  siRNA target sequence for Mmp20 (NM_013903.1,1032-1050).
gctcctttccccagctaat

SEQ ID NO: 558830 - DNA, 19 bp, Mus musculus
  siRNA target sequence for Mmp20 (NM_013903.1,1123-1141).
ggtcactcgaggattccat

SEQ ID NO: 558831 - DNA, 19 bp, Mus musculus
  siRNA target sequence for Mmp20 (NM_013903.1,1124-1142).
gtcactcgaggattccata

SEQ ID NO: 558832 - DNA, 19 bp, Mus musculus
  siRNA target sequence for Mmp20 (NM_013903.1,1128-1146).
ctcgaggattccatatgca

SEQ ID NO: 558833 - DNA, 19 bp, Mus musculus
  siRNA target sequence for Mmp20 (NM_013903.1,1154-1172).
ccacggacaatttatgact

SEQ ID NO: 558834 - DNA, 19 bp, Mus musculus
  siRNA target sequence for Mmp20 (NM_013903.1,1155-1173).
cacggacaatttatgactt

SEQ ID NO: 558835 - DNA, 19 bp, Mus musculus
  siRNA target sequence for Mmp20 (NM_013903.1,1185-1203).
ggcatgtgcaacgaataga

SEQ ID NO: 558836 - DNA, 19 bp, Mus musculus
  siRNA target sequence for Mmp20 (NM_013903.1,1186-1204).
gcatgtgcaacgaatagat

SEQ ID NO: 558837 - DNA, 19 bp, Mus musculus
  siRNA target sequence for Mmp20 (NM_013903.1,1255-1273).
ggaatactacagctatgat

SEQ ID NO: 558838 - DNA, 19 bp, Mus musculus
  siRNA target sequence for Mmp20 (NM_013903.1,1360-1378).
ggaactgaatggctacatt

SEQ ID NO: 558839 - DNA, 19 bp, Mus musculus
  siRNA target sequence for Mmp20 (NM_013903.1,1384-1402).
cttttcaggacggaaaaca

SEQ ID NO: 558840 - DNA, 19 bp, Mus musculus
  siRNA target sequence for Mmp20 (NM_013903.1,1391-1409).
ggacggaaaacattcaagt

SEQ ID NO: 558841 - DNA, 19 bp, Mus musculus
  siRNA target sequence for Mmp20 (NM_013903.1,1392-1410).
gacggaaaacattcaagta

SEQ ID NO: 558842 - DNA, 19 bp, Mus musculus
  siRNA target sequence for Mmp20 (NM_013903.1,1395-1413).
ggaaaacattcaagtatga

SEQ ID NO: 558843 - DNA, 19 bp, Mus musculus
  siRNA target sequence for Mmp20 (NM_013903.1,1401-1419).
cattcaagtatgatacaga

SEQ ID NO: 558844 - DNA, 19 bp, Mus musculus
  siRNA target sequence for Mmp20 (NM_013903.1,1429-1447).
cgtggttagtgtggtaaaa

SEQ ID NO: 558845 - DNA, 19 bp, Mus musculus
  siRNA target sequence for Mmp21 (NM_152944.1,257-275).
ctcaagctgtacgtagatt

SEQ ID NO: 558846 - DNA, 19 bp, Mus musculus
  siRNA target sequence for Mmp21 (NM_152944.1,320-338).
ctacactggccgctatgaa

SEQ ID NO: 558847 - DNA, 19 bp, Mus musculus
  siRNA target sequence for Mmp21 (NM_152944.1,323-341).
cactggccgctatgaacaa

SEQ ID NO: 558848 - DNA, 19 bp, Mus musculus
  siRNA target sequence for Mmp21 (NM_152944.1,405-423).
cctgctgacctctttaggt

SEQ ID NO: 558849 - DNA, 19 bp, Mus musculus
  siRNA target sequence for Mmp21 (NM_152944.1,589-607).
gagcagaggtacatcttta

SEQ ID NO: 558850 - DNA, 19 bp, Mus musculus
  siRNA target sequence for Mmp21 (NM_152944.1,673-691).
ggcaccatggtggacataa

SEQ ID NO: 558851 - DNA, 19 bp, Mus musculus
  siRNA target sequence for Mmp21 (NM_152944.1,677-695).
ccatggtggacataaagct

SEQ ID NO: 558852 - DNA, 19 bp, Mus musculus
  siRNA target sequence for Mmp21 (NM_152944.1,722-740).
gctgtccacgggtgtttga

SEQ ID NO: 558853 - DNA, 19 bp, Mus musculus
  siRNA target sequence for Mmp21 (NM_152944.1,894-912).
ctacagggtgggatccata

SEQ ID NO: 558854 - DNA, 19 bp, Mus musculus
  siRNA target sequence for Mmp21 (NM_152944.1,899-917).
gggtgggatccataatgca

SEQ ID NO: 558855 - DNA, 19 bp, Mus musculus
  siRNA target sequence for Mmp21 (NM_152944.1,905-923).
gatccataatgcaaccaaa

SEQ ID NO: 558856 - DNA, 19 bp, Mus musculus
  siRNA target sequence for Mmp21 (NM_152944.1,908-926).
ccataatgcaaccaaacta

SEQ ID NO: 558857 - DNA, 19 bp, Mus musculus
  siRNA target sequence for Mmp21 (NM_152944.1,996-1014).
gtgcaaggggtcatttgat

SEQ ID NO: 558858 - DNA, 19 bp, Mus musculus
  siRNA target sequence for Mmp21 (NM_152944.1,999-1017).
caaggggtcatttgataca

SEQ ID NO: 558859 - DNA, 19 bp, Mus musculus
  siRNA target sequence for Mmp21 (NM_152944.1,1007-1025).
catttgatacagtgtttga

SEQ ID NO: 558860 - DNA, 19 bp, Mus musculus
  siRNA target sequence for Mmp21 (NM_152944.1,1034-1052).
gcaaggagaggaaccaata

SEQ ID NO: 558861 - DNA, 19 bp, Mus musculus
  siRNA target sequence for Mmp21 (NM_152944.1,1035-1053).
caaggagaggaaccaatat

SEQ ID NO: 558862 - DNA, 19 bp, Mus musculus
  siRNA target sequence for Mmp21 (NM_152944.1,1038-1056).
ggagaggaaccaatatggt

SEQ ID NO: 558863 - DNA, 19 bp, Mus musculus
  siRNA target sequence for Mmp21 (NM_152944.1,1070-1088).
gattcaacacgtacttctt

SEQ ID NO: 558864 - DNA, 19 bp, Mus musculus
  siRNA target sequence for Mmp21 (NM_152944.1,1100-1118).
ggtactggctctacgaaaa

SEQ ID NO: 558865 - DNA, 19 bp, Mus musculus
  siRNA target sequence for Mmp21 (NM_152944.1,1142-1160).
gggaccccctccaaatcct

SEQ ID NO: 558866 - DNA, 19 bp, Mus musculus
  siRNA target sequence for Mmp21 (NM_152944.1,1228-1246).
gacgagcgctactttttca

SEQ ID NO: 558867 - DNA, 19 bp, Mus musculus
  siRNA target sequence for Mmp21 (NM_152944.1,1230-1248).
cgagcgctactttttcaaa

SEQ ID NO: 558868 - DNA, 19 bp, Mus musculus
  siRNA target sequence for Mmp21 (NM_152944.1,1310-1328).
gaaggagctaccctaaact

SEQ ID NO: 558869 - DNA, 19 bp, Mus musculus
  siRNA target sequence for Mmp21 (NM_152944.1,1313-1331).
ggagctaccctaaactgat

SEQ ID NO: 558870 - DNA, 19 bp, Mus musculus
  siRNA target sequence for Mmp21 (NM_152944.1,1381-1399).
gatcggaggcagcagttaa

SEQ ID NO: 558871 - DNA, 19 bp, Mus musculus
  siRNA target sequence for Mmp21 (NM_152944.1,1384-1402).
cggaggcagcagttaattt

SEQ ID NO: 558872 - DNA, 19 bp, Mus musculus
  siRNA target sequence for Mmp21 (NM_152944.1,1385-1403).
ggaggcagcagttaattta

SEQ ID NO: 558873 - DNA, 19 bp, Mus musculus
  siRNA target sequence for Mmp21 (NM_152944.1,1418-1436).
ctctagtatttgcatttga

SEQ ID NO: 558874 - DNA, 19 bp, Mus musculus
  siRNA target sequence for Mmp21 (NM_152944.1,1444-1462).
cgaaaccaagtacttaatt

SEQ ID NO: 558875 - DNA, 19 bp, Mus musculus
  siRNA target sequence for Mmp21 (NM_152944.1,1453-1471).
gtacttaattcttatccaa

SEQ ID NO: 558876 - DNA, 19 bp, Mus musculus
  siRNA target sequence for Mmp21 (NM_152944.1,1482-1500).
ccaagtgtttccagcaata

SEQ ID NO: 558877 - DNA, 19 bp, Mus musculus
  siRNA target sequence for Mmp21 (NM_152944.1,1483-1501).
caagtgtttccagcaataa

SEQ ID NO: 558878 - DNA, 19 bp, Mus musculus
  siRNA target sequence for Mmp21 (NM_152944.1,1496-1514).
caataatgcctcaaaacca

SEQ ID NO: 558879 - DNA, 19 bp, Mus musculus
  siRNA target sequence for Mmp21 (NM_152944.1,1528-1546).
ctcgattcagcgtactact

SEQ ID NO: 558880 - DNA, 19 bp, Mus musculus
  siRNA target sequence for Mmp21 (NM_152944.1,1552-1570).
gcacacaactccatcttct

SEQ ID NO: 558881 - DNA, 19 bp, Mus musculus
  siRNA target sequence for Mmp21 (NM_152944.1,1639-1657).
ctgaatggcttatttccaa

SEQ ID NO: 558882 - DNA, 19 bp, Mus musculus
  siRNA target sequence for Mmp21 (NM_152944.1,1670-1688).
ccgagaagtggtttgatgt

SEQ ID NO: 558883 - DNA, 19 bp, Mus musculus
  siRNA target sequence for Mmp21 (NM_152944.1,1671-1689).
cgagaagtggtttgatgtt

SEQ ID NO: 558884 - DNA, 19 bp, Mus musculus
  siRNA target sequence for Mmp23 (NM_011985.1,547-565).
ctggctgctgcctttcgaa

SEQ ID NO: 558885 - DNA, 19 bp, Mus musculus
  siRNA target sequence for Mmp23 (NM_011985.1,574-592).
gatgtttccccattcagtt

SEQ ID NO: 558886 - DNA, 19 bp, Mus musculus
  siRNA target sequence for Mmp23 (NM_011985.1,620-638).
gtgacctcaagataggttt

SEQ ID NO: 558887 - DNA, 19 bp, Mus musculus
  siRNA target sequence for Mmp23 (NM_011985.1,730-748).
ccccacggtggcattcact

SEQ ID NO: 558888 - DNA, 19 bp, Mus musculus
  siRNA target sequence for Mmp23 (NM_011985.1,731-749).
cccacggtggcattcactt

SEQ ID NO: 558889 - DNA, 19 bp, Mus musculus
  siRNA target sequence for Mmp23 (NM_011985.1,732-750).
ccacggtggcattcacttt

SEQ ID NO: 558890 - DNA, 19 bp, Mus musculus
  siRNA target sequence for Mmp23 (NM_011985.1,948-966).
ggggttacaccgactctat

SEQ ID NO: 558891 - DNA, 19 bp, Mus musculus
  siRNA target sequence for Mmp23 (NM_011985.1,968-986).
gctgcctggaccggatttt

SEQ ID NO: 558892 - DNA, 19 bp, Mus musculus
  siRNA target sequence for Mmp23 (NM_011985.1,969-987).
ctgcctggaccggattttt

SEQ ID NO: 558893 - DNA, 19 bp, Mus musculus
  siRNA target sequence for Mmp23 (NM_011985.1,971-989).
gcctggaccggatttttgt

SEQ ID NO: 558894 - DNA, 19 bp, Mus musculus
  siRNA target sequence for Mmp23 (NM_011985.1,973-991).
ctggaccggatttttgtgt

SEQ ID NO: 558895 - DNA, 19 bp, Mus musculus
  siRNA target sequence for Mmp23 (NM_011985.1,1002-1020).
ggcacgaaagggattttgt

SEQ ID NO: 558896 - DNA, 19 bp, Mus musculus
  siRNA target sequence for Mmp23 (NM_011985.1,1004-1022).
cacgaaagggattttgtga

SEQ ID NO: 558897 - DNA, 19 bp, Mus musculus
  siRNA target sequence for Mmp23 (NM_011985.1,1052-1070).
gccccagaagctgtgattt

SEQ ID NO: 558898 - DNA, 19 bp, Mus musculus
  siRNA target sequence for Mmp23 (NM_011985.1,1064-1082).
gtgatttctgttatgaatt

SEQ ID NO: 558899 - DNA, 19 bp, Mus musculus
  siRNA target sequence for Mmp23 (NM_011985.1,1172-1190).
gacagaagatcctacacaa

SEQ ID NO: 558900 - DNA, 19 bp, Mus musculus
  siRNA target sequence for Mmp24 (NM_010808.1,329-347).
ccactatgcagcagtttta

SEQ ID NO: 558901 - DNA, 19 bp, Mus musculus
  siRNA target sequence for Mmp24 (NM_010808.1,498-516).
cacctacagcattcacaat

SEQ ID NO: 558902 - DNA, 19 bp, Mus musculus
  siRNA target sequence for Mmp24 (NM_010808.1,500-518).
cctacagcattcacaatta

SEQ ID NO: 558903 - DNA, 19 bp, Mus musculus
  siRNA target sequence for Mmp24 (NM_010808.1,543-561).
cacacggaaggctattcgt

SEQ ID NO: 558904 - DNA, 19 bp, Mus musculus
  siRNA target sequence for Mmp24 (NM_010808.1,588-606).
gactccactgacctttgaa

SEQ ID NO: 558905 - DNA, 19 bp, Mus musculus
  siRNA target sequence for Mmp24 (NM_010808.1,612-630).
gccataccatgagatcaaa

SEQ ID NO: 558906 - DNA, 19 bp, Mus musculus
  siRNA target sequence for Mmp24 (NM_010808.1,759-777).
cactcactttgattcagat

SEQ ID NO: 558907 - DNA, 19 bp, Mus musculus
  siRNA target sequence for Mmp24 (NM_010808.1,858-876).
gggcttggagcactctaat

SEQ ID NO: 558908 - DNA, 19 bp, Mus musculus
  siRNA target sequence for Mmp24 (NM_010808.1,895-913).
gctcccttctaccaataca

SEQ ID NO: 558909 - DNA, 19 bp, Mus musculus
  siRNA target sequence for Mmp24 (NM_010808.1,1235-1253).
ccatgcagatcgaacagtt

SEQ ID NO: 558910 - DNA, 19 bp, Mus musculus
  siRNA target sequence for Mmp24 (NM_010808.1,1275-1293).
catagacgcagcctatgaa

SEQ ID NO: 558911 - DNA, 19 bp, Mus musculus
  siRNA target sequence for Mmp24 (NM_010808.1,1303-1321).
gggagattcgtcttcttca

SEQ ID NO: 558912 - DNA, 19 bp, Mus musculus
  siRNA target sequence for Mmp24 (NM_010808.1,1621-1639).
gactactggaagtttgaca

SEQ ID NO: 558913 - DNA, 19 bp, Mus musculus
  siRNA target sequence for Mmp24 (NM_010808.1,1843-1861).
gtgctgctctacactatct

SEQ ID NO: 558914 - DNA, 19 bp, Mus musculus
  siRNA target sequence for Mmp24 (NM_010808.1,1849-1867).
ctctacactatcttccaat

SEQ ID NO: 558915 - DNA, 19 bp, Mus musculus
  siRNA target sequence for Mmp24 (NM_010808.1,1888-1906).
cagcccgtcacctactata

SEQ ID NO: 558916 - DNA, 19 bp, Mus musculus
  siRNA target sequence for Mmp28 (NM_080453.1,375-393).
gtggggttgcggatactga

SEQ ID NO: 558917 - DNA, 19 bp, Mus musculus
  siRNA target sequence for Mmp28 (NM_080453.1,435-453).
ctggacaccgagccaaaat

SEQ ID NO: 558918 - DNA, 19 bp, Mus musculus
  siRNA target sequence for Mmp28 (NM_080453.1,437-455).
ggacaccgagccaaaatga

SEQ ID NO: 558919 - DNA, 19 bp, Mus musculus
  siRNA target sequence for Mmp28 (NM_080453.1,448-466).
caaaatgaggcgtaagaaa

SEQ ID NO: 558920 - DNA, 19 bp, Mus musculus
  siRNA target sequence for Mmp28 (NM_080453.1,458-476).
cgtaagaaacgctttgcaa

SEQ ID NO: 558921 - DNA, 19 bp, Mus musculus
  siRNA target sequence for Mmp28 (NM_080453.1,577-595).
cttccagctgtggagtaat

SEQ ID NO: 558922 - DNA, 19 bp, Mus musculus
  siRNA target sequence for Mmp28 (NM_080453.1,789-807).
gccgtgggcgcaacttgtt

SEQ ID NO: 558923 - DNA, 19 bp, Mus musculus
  siRNA target sequence for Mmp28 (NM_080453.1,1051-1069).
ggaaaccagaggtcctaaa

SEQ ID NO: 558924 - DNA, 19 bp, Mus musculus
  siRNA target sequence for Mmp28 (NM_080453.1,1151-1169).
cgtccactacagaaaagat

SEQ ID NO: 558925 - DNA, 19 bp, Mus musculus
  siRNA target sequence for Mmp28 (NM_080453.1,1217-1235).
gatggagacttctacttct

SEQ ID NO: 558926 - DNA, 19 bp, Mus musculus
  siRNA target sequence for Mmp28 (NM_080453.1,1411-1429).
gcaagtggagccctactat

SEQ ID NO: 558927 - DNA, 19 bp, Mus musculus
  siRNA target sequence for Mmp28 (NM_080453.1,1488-1506).
ggccggatggctccattat

SEQ ID NO: 558928 - DNA, 19 bp, Mus musculus
  siRNA target sequence for Mmp28 (NM_080453.1,1490-1508).
ccggatggctccattatct

SEQ ID NO: 558929 - DNA, 19 bp, Mus musculus
  siRNA target sequence for Mmp28 (NM_080453.1,1491-1509).
cggatggctccattatctt

SEQ ID NO: 558930 - DNA, 19 bp, Mus musculus
  siRNA target sequence for Mmp9 (NM_013599.2,72-90).
ccagcgccagccgactttt

SEQ ID NO: 558931 - DNA, 19 bp, Mus musculus
  siRNA target sequence for Mmp9 (NM_013599.2,346-364).
ctcaagtgggaccatcata

SEQ ID NO: 558932 - DNA, 19 bp, Mus musculus
  siRNA target sequence for Mmp9 (NM_013599.2,358-376).
catcataacatcacatact

SEQ ID NO: 558933 - DNA, 19 bp, Mus musculus
  siRNA target sequence for Mmp9 (NM_013599.2,371-389).
catactggatccaaaacta

SEQ ID NO: 558934 - DNA, 19 bp, Mus musculus
  siRNA target sequence for Mmp9 (NM_013599.2,488-506).
gacccgaagcggacattgt

SEQ ID NO: 558935 - DNA, 19 bp, Mus musculus
  siRNA target sequence for Mmp9 (NM_013599.2,654-672).
cgtgatccccacttactat

SEQ ID NO: 558936 - DNA, 19 bp, Mus musculus
  siRNA target sequence for Mmp9 (NM_013599.2,665-683).
cttactatggaaactcaaa

SEQ ID NO: 558937 - DNA, 19 bp, Mus musculus
  siRNA target sequence for Mmp9 (NM_013599.2,779-797).
caacagctgactacgataa

SEQ ID NO: 558938 - DNA, 19 bp, Mus musculus
  siRNA target sequence for Mmp9 (NM_013599.2,792-810).
cgataaggacggcaaattt

SEQ ID NO: 558939 - DNA, 19 bp, Mus musculus
  siRNA target sequence for Mmp9 (NM_013599.2,1258-1276).
ctcatgtacccgctgtata

SEQ ID NO: 558940 - DNA, 19 bp, Mus musculus
  siRNA target sequence for Mmp9 (NM_013599.2,1284-1302).
cgagggcttccctctgaat

SEQ ID NO: 558941 - DNA, 19 bp, Mus musculus
  siRNA target sequence for Mmp9 (NM_013599.2,1285-1303).
gagggcttccctctgaata

SEQ ID NO: 558942 - DNA, 19 bp, Mus musculus
  siRNA target sequence for Mmp9 (NM_013599.2,1315-1333).
gacggcatccagtatctgt

SEQ ID NO: 558943 - DNA, 19 bp, Mus musculus
  siRNA target sequence for Mmp9 (NM_013599.2,1317-1335).
cggcatccagtatctgtat

SEQ ID NO: 558944 - DNA, 19 bp, Mus musculus
  siRNA target sequence for Mmp9 (NM_013599.2,1593-1611).
ggcagacaatccttgcaat

SEQ ID NO: 558945 - DNA, 19 bp, Mus musculus
  siRNA target sequence for Mmp9 (NM_013599.2,1614-1632).
ggatgtttttgatgctatt

SEQ ID NO: 558946 - DNA, 19 bp, Mus musculus
  siRNA target sequence for Mmp9 (NM_013599.2,1646-1664).
gcgctctgcatttcttcaa

SEQ ID NO: 558947 - DNA, 19 bp, Mus musculus
  siRNA target sequence for Mmp9 (NM_013599.2,1783-1801).
cagaccaagagggttttct

SEQ ID NO: 558948 - DNA, 19 bp, Mus musculus
  siRNA target sequence for Mmp9 (NM_013599.2,1852-1870).
cccaggagtctggataagt

SEQ ID NO: 558949 - DNA, 19 bp, Mus musculus
  siRNA target sequence for Mmp9 (NM_013599.2,1853-1871).
ccaggagtctggataagtt

SEQ ID NO: 558950 - DNA, 19 bp, Mus musculus
  siRNA target sequence for Mmp9 (NM_013599.2,1997-2015).
gcgtcattcgcgtggataa

SEQ ID NO: 558951 - DNA, 19 bp, Mus musculus
  siRNA target sequence for Mmp9 (NM_013599.2,2036-2054).
ggaactcacacgacatctt

SEQ ID NO: 558952 - DNA, 19 bp, Mus musculus
  siRNA target sequence for Mmp9 (NM_013599.2,2052-2070).
cttccagtaccaagacaaa

SEQ ID NO: 558953 - DNA, 19 bp, Mus musculus
  siRNA target sequence for Mmp9 (NM_013599.2,2100-2118).
gcgtgtgagtttccaaaat

SEQ ID NO: 558954 - DNA, 19 bp, Mus musculus
  siRNA target sequence for Mtmr3 (NM_028860.1,346-364).
gattcgggaggatgagaat

SEQ ID NO: 558955 - DNA, 19 bp, Mus musculus
  siRNA target sequence for Mtmr3 (NM_028860.1,1091-1109).
gtttccactcggaacagtt

SEQ ID NO: 558956 - DNA, 19 bp, Mus musculus
  siRNA target sequence for Mtmr3 (NM_028860.1,1123-1141).
caacgcaggggatctttca

SEQ ID NO: 558957 - DNA, 19 bp, Mus musculus
  siRNA target sequence for Mtmr3 (NM_028860.1,1159-1177).
ctctctgtcaaatacttca

SEQ ID NO: 558958 - DNA, 19 bp, Mus musculus
  siRNA target sequence for Mtmr3 (NM_028860.1,1279-1297).
gtgcccagagtattatcct

SEQ ID NO: 558959 - DNA, 19 bp, Mus musculus
  siRNA target sequence for Mtmr3 (NM_028860.1,1281-1299).
gcccagagtattatcctaa

SEQ ID NO: 558960 - DNA, 19 bp, Mus musculus
  siRNA target sequence for Mtmr3 (NM_028860.1,1318-1336).
gggaatggcaaacatacat

SEQ ID NO: 558961 - DNA, 19 bp, Mus musculus
  siRNA target sequence for Mtmr3 (NM_028860.1,1409-1427).
gcccttgaaagtacaaagt

SEQ ID NO: 558962 - DNA, 19 bp, Mus musculus
  siRNA target sequence for Mtmr3 (NM_028860.1,1573-1591).
cccttattaccgaaccata

SEQ ID NO: 558963 - DNA, 19 bp, Mus musculus
  siRNA target sequence for Mtmr3 (NM_028860.1,1604-1622).
gtcctggtggagatggaat

SEQ ID NO: 558964 - DNA, 19 bp, Mus musculus
  siRNA target sequence for Mtmr3 (NM_028860.1,1625-1643).
ctcgattttggccataagt

SEQ ID NO: 558965 - DNA, 19 bp, Mus musculus
  siRNA target sequence for Mtmr3 (NM_028860.1,1627-1645).
cgattttggccataagttt

SEQ ID NO: 558966 - DNA, 19 bp, Mus musculus
  siRNA target sequence for Mtmr3 (NM_028860.1,1690-1708).
gcgctgcccagtgtttcta

SEQ ID NO: 558967 - DNA, 19 bp, Mus musculus
  siRNA target sequence for Mtmr3 (NM_028860.1,1692-1710).
gctgcccagtgtttctaca

SEQ ID NO: 558968 - DNA, 19 bp, Mus musculus
  siRNA target sequence for Mtmr3 (NM_028860.1,1693-1711).
ctgcccagtgtttctacaa

SEQ ID NO: 558969 - DNA, 19 bp, Mus musculus
  siRNA target sequence for Mtmr3 (NM_028860.1,1768-1786).
cgaagcattccttgtgaaa

SEQ ID NO: 558970 - DNA, 19 bp, Mus musculus
  siRNA target sequence for Mtmr3 (NM_028860.1,1790-1808).
gtacagcatacctattcct

SEQ ID NO: 558971 - DNA, 19 bp, Mus musculus
  siRNA target sequence for Mtmr3 (NM_028860.1,1968-1986).
gccatgtgcggaatctgat

SEQ ID NO: 558972 - DNA, 19 bp, Mus musculus
  siRNA target sequence for Mtmr3 (NM_028860.1,2096-2114).
cggctacccaagactagat

SEQ ID NO: 558973 - DNA, 19 bp, Mus musculus
  siRNA target sequence for Mtmr3 (NM_028860.1,2099-2117).
ctacccaagactagatcat

SEQ ID NO: 558974 - DNA, 19 bp, Mus musculus
  siRNA target sequence for Mtmr3 (NM_028860.1,2130-2148).
ccacaacctgcgaaaacat

SEQ ID NO: 558975 - DNA, 19 bp, Mus musculus
  siRNA target sequence for Mtmr3 (NM_028860.1,2437-2455).
ggcacccctagcaaaagaa

SEQ ID NO: 558976 - DNA, 19 bp, Mus musculus
  siRNA target sequence for Mtmr3 (NM_028860.1,2438-2456).
gcacccctagcaaaagaaa

SEQ ID NO: 558977 - DNA, 19 bp, Mus musculus
  siRNA target sequence for Mtmr3 (NM_028860.1,2503-2521).
gctggatgacgctacttta

SEQ ID NO: 558978 - DNA, 19 bp, Mus musculus
  siRNA target sequence for Mtmr3 (NM_028860.1,2506-2524).
ggatgacgctactttaaga

SEQ ID NO: 558979 - DNA, 19 bp, Mus musculus
  siRNA target sequence for Mtmr3 (NM_028860.1,2507-2525).
gatgacgctactttaagaa

SEQ ID NO: 558980 - DNA, 19 bp, Mus musculus
  siRNA target sequence for Mtmr3 (NM_028860.1,2557-2575).
ccagggtattcctgaacat

SEQ ID NO: 558981 - DNA, 19 bp, Mus musculus
  siRNA target sequence for Mtmr3 (NM_028860.1,2635-2653).
ccaggaggtccctgtagaa

SEQ ID NO: 558982 - DNA, 19 bp, Mus musculus
  siRNA target sequence for Mtmr3 (NM_028860.1,2656-2674).
gcctcaagtagagaatatt

SEQ ID NO: 558983 - DNA, 19 bp, Mus musculus
  siRNA target sequence for Mtmr3 (NM_028860.1,2707-2725).
cccagtagatgcaaaagtt

SEQ ID NO: 558984 - DNA, 19 bp, Mus musculus
  siRNA target sequence for Mtmr3 (NM_028860.1,2718-2736).
caaaagttggccttggtat

SEQ ID NO: 558985 - DNA, 19 bp, Mus musculus
  siRNA target sequence for Mtmr3 (NM_028860.1,2784-2802).
gaggaccacacatcaacaa

SEQ ID NO: 558986 - DNA, 19 bp, Mus musculus
  siRNA target sequence for Mtmr3 (NM_028860.1,2786-2804).
ggaccacacatcaacaact

SEQ ID NO: 558987 - DNA, 19 bp, Mus musculus
  siRNA target sequence for Mtmr3 (NM_028860.1,2810-2828).
cacatgttactcgaagata

SEQ ID NO: 558988 - DNA, 19 bp, Mus musculus
  siRNA target sequence for Mtmr3 (NM_028860.1,2815-2833).
gttactcgaagataaggta

SEQ ID NO: 558989 - DNA, 19 bp, Mus musculus
  siRNA target sequence for Mtmr3 (NM_028860.1,2819-2837).
ctcgaagataaggtaaagt

SEQ ID NO: 558990 - DNA, 19 bp, Mus musculus
  siRNA target sequence for Mtmr3 (NM_028860.1,2821-2839).
cgaagataaggtaaagtca

SEQ ID NO: 558991 - DNA, 19 bp, Mus musculus
  siRNA target sequence for Mtmr3 (NM_028860.1,2960-2978).
gtgctacacaggacttcat

SEQ ID NO: 558992 - DNA, 19 bp, Mus musculus
  siRNA target sequence for Mtmr3 (NM_028860.1,3015-3033).
gtgccttgccgttagataa

SEQ ID NO: 558993 - DNA, 19 bp, Mus musculus
  siRNA target sequence for Mtmr3 (NM_028860.1,3017-3035).
gccttgccgttagataaat

SEQ ID NO: 558994 - DNA, 19 bp, Mus musculus
  siRNA target sequence for Mtmr3 (NM_028860.1,3019-3037).
cttgccgttagataaatgt

SEQ ID NO: 558995 - DNA, 19 bp, Mus musculus
  siRNA target sequence for Mtmr3 (NM_028860.1,3059-3077).
ggtgccctagagactgaaa

SEQ ID NO: 558996 - DNA, 19 bp, Mus musculus
  siRNA target sequence for Mtmr3 (NM_028860.1,3102-3120).
ggtttgacacccttcagaa

SEQ ID NO: 558997 - DNA, 19 bp, Mus musculus
  siRNA target sequence for Mtmr3 (NM_028860.1,3333-3351).
ctgtgtacacggacacaat

SEQ ID NO: 558998 - DNA, 19 bp, Mus musculus
  siRNA target sequence for Mtmr3 (NM_028860.1,3337-3355).
gtacacggacacaatccaa

SEQ ID NO: 558999 - DNA, 19 bp, Mus musculus
  siRNA target sequence for Mtmr3 (NM_028860.1,3359-3377).
cgcctgcgacagatagagt

SEQ ID NO: 559000 - DNA, 19 bp, Mus musculus
  siRNA target sequence for Mtmr4 (NM_133215.1,286-304).
cgtgcccctccggatgatt

SEQ ID NO: 559001 - DNA, 19 bp, Mus musculus
  siRNA target sequence for Mtmr4 (NM_133215.1,290-308).
cccctccggatgattgaca

SEQ ID NO: 559002 - DNA, 19 bp, Mus musculus
  siRNA target sequence for Mtmr4 (NM_133215.1,365-383).
gtgaggtgccacttctcta

SEQ ID NO: 559003 - DNA, 19 bp, Mus musculus
  siRNA target sequence for Mtmr4 (NM_133215.1,576-594).
gttttgacctgcagaatgt

SEQ ID NO: 559004 - DNA, 19 bp, Mus musculus
  siRNA target sequence for Mtmr4 (NM_133215.1,597-615).
ggagagtctcgcatatcaa

SEQ ID NO: 559005 - DNA, 19 bp, Mus musculus
  siRNA target sequence for Mtmr4 (NM_133215.1,606-624).
cgcatatcaacagcaatta

SEQ ID NO: 559006 - DNA, 19 bp, Mus musculus
  siRNA target sequence for Mtmr4 (NM_133215.1,662-680).
cctgtgtggatcacagata

SEQ ID NO: 559007 - DNA, 19 bp, Mus musculus
  siRNA target sequence for Mtmr4 (NM_133215.1,720-738).
gcatccctgttgtggtata

SEQ ID NO: 559008 - DNA, 19 bp, Mus musculus
  siRNA target sequence for Mtmr4 (NM_133215.1,921-939).
catgtgacacagatttcga

SEQ ID NO: 559009 - DNA, 19 bp, Mus musculus
  siRNA target sequence for Mtmr4 (NM_133215.1,1077-1095).
cgaactgtgaggtcttgtt

SEQ ID NO: 559010 - DNA, 19 bp, Mus musculus
  siRNA target sequence for Mtmr4 (NM_133215.1,1115-1133).
cacgccatccggaatagct

SEQ ID NO: 559011 - DNA, 19 bp, Mus musculus
  siRNA target sequence for Mtmr4 (NM_133215.1,1189-1207).
ggcactggagagtaccaaa

SEQ ID NO: 559012 - DNA, 19 bp, Mus musculus
  siRNA target sequence for Mtmr4 (NM_133215.1,1217-1235).
cacttgtcagtgatgctaa

SEQ ID NO: 559013 - DNA, 19 bp, Mus musculus
  siRNA target sequence for Mtmr4 (NM_133215.1,1309-1327).
ggaccgtacaccacagatt

SEQ ID NO: 559014 - DNA, 19 bp, Mus musculus
  siRNA target sequence for Mtmr4 (NM_133215.1,1312-1330).
ccgtacaccacagattgta

SEQ ID NO: 559015 - DNA, 19 bp, Mus musculus
  siRNA target sequence for Mtmr4 (NM_133215.1,1332-1350).
ccctggccaaaatactact

SEQ ID NO: 559016 - DNA, 19 bp, Mus musculus
  siRNA target sequence for Mtmr4 (NM_133215.1,1385-1403).
gtgttagtggagtctgatt

SEQ ID NO: 559017 - DNA, 19 bp, Mus musculus
  siRNA target sequence for Mtmr4 (NM_133215.1,1408-1426).
ggatttcggacacaagttt

SEQ ID NO: 559018 - DNA, 19 bp, Mus musculus
  siRNA target sequence for Mtmr4 (NM_133215.1,1531-1549).
ctgcctgtttgagttcaat

SEQ ID NO: 559019 - DNA, 19 bp, Mus musculus
  siRNA target sequence for Mtmr4 (NM_133215.1,1628-1646).
cgagagaagcgcaacatct

SEQ ID NO: 559020 - DNA, 19 bp, Mus musculus
  siRNA target sequence for Mtmr4 (NM_133215.1,1633-1651).
gaagcgcaacatctataaa

SEQ ID NO: 559021 - DNA, 19 bp, Mus musculus
  siRNA target sequence for Mtmr4 (NM_133215.1,1676-1694).
ctgcgagctggcaacaaga

SEQ ID NO: 559022 - DNA, 19 bp, Mus musculus
  siRNA target sequence for Mtmr4 (NM_133215.1,1685-1703).
ggcaacaagaactttcata

SEQ ID NO: 559023 - DNA, 19 bp, Mus musculus
  siRNA target sequence for Mtmr4 (NM_133215.1,1880-1898).
ctggacaggttacctaaaa

SEQ ID NO: 559024 - DNA, 19 bp, Mus musculus
  siRNA target sequence for Mtmr4 (NM_133215.1,1883-1901).
gacaggttacctaaaacca

SEQ ID NO: 559025 - DNA, 19 bp, Mus musculus
  siRNA target sequence for Mtmr4 (NM_133215.1,1962-1980).
gcgaccctaacctgaataa

SEQ ID NO: 559026 - DNA, 19 bp, Mus musculus
  siRNA target sequence for Mtmr4 (NM_133215.1,2111-2129).
cccagtagccagaaagagt

SEQ ID NO: 559027 - DNA, 19 bp, Mus musculus
  siRNA target sequence for Mtmr4 (NM_133215.1,2128-2146).
gtacttgagcaataaacct

SEQ ID NO: 559028 - DNA, 19 bp, Mus musculus
  siRNA target sequence for Mtmr4 (NM_133215.1,2144-2162).
cctttcaagggtcataaaa

SEQ ID NO: 559029 - DNA, 19 bp, Mus musculus
  siRNA target sequence for Mtmr4 (NM_133215.1,2171-2189).
cttagttataagttgctta

SEQ ID NO: 559030 - DNA, 19 bp, Mus musculus
  siRNA target sequence for Mtmr4 (NM_133215.1,2287-2305).
gcagggtaggacttctgat

SEQ ID NO: 559031 - DNA, 19 bp, Mus musculus
  siRNA target sequence for Mtmr4 (NM_133215.1,2319-2337).
cacctgaacagtttctaga

SEQ ID NO: 559032 - DNA, 19 bp, Mus musculus
  siRNA target sequence for Mtmr4 (NM_133215.1,2322-2340).
ctgaacagtttctagagaa

SEQ ID NO: 559033 - DNA, 19 bp, Mus musculus
  siRNA target sequence for Mtmr4 (NM_133215.1,2493-2511).
gtcagggcagcctttgcaa

SEQ ID NO: 559034 - DNA, 19 bp, Mus musculus
  siRNA target sequence for Mtmr4 (NM_133215.1,2574-2592).
ctggttctacggcaagtat

SEQ ID NO: 559035 - DNA, 19 bp, Mus musculus
  siRNA target sequence for Mtmr4 (NM_133215.1,2576-2594).
ggttctacggcaagtatct

SEQ ID NO: 559036 - DNA, 19 bp, Mus musculus
  siRNA target sequence for Mtmr4 (NM_133215.1,2613-2631).
gctctgtgccggatctgat

SEQ ID NO: 559037 - DNA, 19 bp, Mus musculus
  siRNA target sequence for Mtmr4 (NM_133215.1,2616-2634).
ctgtgccggatctgatcta

SEQ ID NO: 559038 - DNA, 19 bp, Mus musculus
  siRNA target sequence for Mtmr4 (NM_133215.1,2618-2636).
gtgccggatctgatctaca

SEQ ID NO: 559039 - DNA, 19 bp, Mus musculus
  siRNA target sequence for Mtmr4 (NM_133215.1,2684-2702).
gaaaatcctcgctttggaa

SEQ ID NO: 559040 - DNA, 19 bp, Mus musculus
  siRNA target sequence for Mtmr4 (NM_133215.1,2721-2739).
cccgaaagccaatttctca

SEQ ID NO: 559041 - DNA, 19 bp, Mus musculus
  siRNA target sequence for Mtmr4 (NM_133215.1,2746-2764).
gatcagtgagttctcattt

SEQ ID NO: 559042 - DNA, 19 bp, Mus musculus
  siRNA target sequence for Mtmr4 (NM_133215.1,2789-2807).
caagggatgatgacttcat

SEQ ID NO: 559043 - DNA, 19 bp, Mus musculus
  siRNA target sequence for Mtmr4 (NM_133215.1,2840-2858).
cttgcttatggctgttgta

SEQ ID NO: 559044 - DNA, 19 bp, Mus musculus
  siRNA target sequence for Mtmr4 (NM_133215.1,2859-2877).
gcaagaggccgagcaataa

SEQ ID NO: 559045 - DNA, 19 bp, Mus musculus
  siRNA target sequence for Mtmr4 (NM_133215.1,2863-2881).
gaggccgagcaataagcat

SEQ ID NO: 559046 - DNA, 19 bp, Mus musculus
  siRNA target sequence for Mtmr4 (NM_133215.1,2865-2883).
ggccgagcaataagcatat

SEQ ID NO: 559047 - DNA, 19 bp, Mus musculus
  siRNA target sequence for Mtmr4 (NM_133215.1,2866-2884).
gccgagcaataagcatatt

SEQ ID NO: 559048 - DNA, 19 bp, Mus musculus
  siRNA target sequence for Mtmr4 (NM_133215.1,2942-2960).
cctgtctgttctagtcatt

SEQ ID NO: 559049 - DNA, 19 bp, Mus musculus
  siRNA target sequence for Mtmr4 (NM_133215.1,3105-3123).
cctttcccacggatgtgat

SEQ ID NO: 559050 - DNA, 19 bp, Mus musculus
  siRNA target sequence for Mtmr4 (NM_133215.1,3262-3280).
ggatgactttacgtgttta

SEQ ID NO: 559051 - DNA, 19 bp, Mus musculus
  siRNA target sequence for Mtmr4 (NM_133215.1,3263-3281).
gatgactttacgtgtttaa

SEQ ID NO: 559052 - DNA, 19 bp, Mus musculus
  siRNA target sequence for Mtmr4 (NM_133215.1,3354-3372).
gggaacccgttgataagaa

SEQ ID NO: 559053 - DNA, 19 bp, Mus musculus
  siRNA target sequence for Mtmr4 (NM_133215.1,3410-3428).
gcatcccactgctttaact

SEQ ID NO: 559054 - DNA, 19 bp, Mus musculus
  siRNA target sequence for Mtmr4 (NM_133215.1,3445-3463).
gttggccaaacgaagacat

SEQ ID NO: 559055 - DNA, 19 bp, Mus musculus
  siRNA target sequence for Mtmr4 (NM_133215.1,3448-3466).
ggccaaacgaagacatcat

SEQ ID NO: 559056 - DNA, 19 bp, Mus musculus
  siRNA target sequence for Mtmr4 (NM_133215.1,3545-3563).
ccagttctcgtctgtaact

SEQ ID NO: 559057 - DNA, 19 bp, Mus musculus
  siRNA target sequence for Mtmr4 (NM_133215.1,3548-3566).
gttctcgtctgtaactcat

SEQ ID NO: 559058 - DNA, 19 bp, Mus musculus
  siRNA target sequence for Mtmr4 (NM_133215.1,3553-3571).
cgtctgtaactcatgttat

SEQ ID NO: 559059 - DNA, 19 bp, Mus musculus
  siRNA target sequence for Mtmr4 (NM_133215.1,3556-3574).
ctgtaactcatgttatgaa

SEQ ID NO: 559060 - DNA, 19 bp, Mus musculus
  siRNA target sequence for Mtmr4 (NM_133215.1,3558-3576).
gtaactcatgttatgaaca

SEQ ID NO: 559061 - DNA, 19 bp, Mus musculus
  siRNA target sequence for Mtmr4 (NM_133215.1,3562-3580).
ctcatgttatgaacacatt

SEQ ID NO: 559062 - DNA, 19 bp, Mus musculus
  siRNA target sequence for Mtmr4 (NM_133215.1,3588-3606).
ctcgtgccagggaactcat

SEQ ID NO: 559063 - DNA, 19 bp, Mus musculus
  siRNA target sequence for Mtmr4 (NM_133215.1,3617-3635).
ctgaagaaacccattgcta

SEQ ID NO: 559064 - DNA, 19 bp, Mus musculus
  siRNA target sequence for Nrbf1 (NM_025297.1,263-281).
gctggcagcccctatcaat

SEQ ID NO: 559065 - DNA, 19 bp, Mus musculus
  siRNA target sequence for Nrbf1 (NM_025297.1,382-400).
gcagtgtgtctgcattgaa

SEQ ID NO: 559066 - DNA, 19 bp, Mus musculus
  siRNA target sequence for Nrbf1 (NM_025297.1,679-697).
gagacagacccgacatcaa

SEQ ID NO: 559067 - DNA, 19 bp, Mus musculus
  siRNA target sequence for Nrbf1 (NM_025297.1,896-914).
ggccaaacagcctgtaaca

SEQ ID NO: 559068 - DNA, 19 bp, Mus musculus
  siRNA target sequence for Ogfr (NM_031373.2,78-96).
gatggccaggcggatgata

SEQ ID NO: 559069 - DNA, 19 bp, Mus musculus
  siRNA target sequence for Ogfr (NM_031373.2,192-210).
gctatgcaggacatgcaaa

SEQ ID NO: 559070 - DNA, 19 bp, Mus musculus
  siRNA target sequence for Ogfr (NM_031373.2,221-239).
caactacccggatttgaca

SEQ ID NO: 559071 - DNA, 19 bp, Mus musculus
  siRNA target sequence for Ogfr (NM_031373.2,227-245).
cccggatttgacagatcaa

SEQ ID NO: 559072 - DNA, 19 bp, Mus musculus
  siRNA target sequence for Ogfr (NM_031373.2,335-353).
gaactggaaagacaactat

SEQ ID NO: 559073 - DNA, 19 bp, Mus musculus
  siRNA target sequence for Ogfr (NM_031373.2,582-600).
ccacgcttccacaatctca

SEQ ID NO: 559074 - DNA, 19 bp, Mus musculus
  siRNA target sequence for Ogfr (NM_031373.2,583-601).
cacgcttccacaatctcaa

SEQ ID NO: 559075 - DNA, 19 bp, Mus musculus
  siRNA target sequence for Ogfr (NM_031373.2,604-622).
gccacagccacaacaatct

SEQ ID NO: 559076 - DNA, 19 bp, Mus musculus
  siRNA target sequence for Ogfr (NM_031373.2,612-630).
cacaacaatctgcgtatta

SEQ ID NO: 559077 - DNA, 19 bp, Mus musculus
  siRNA target sequence for Ogfr (NM_031373.2,614-632).
caacaatctgcgtattaca

SEQ ID NO: 559078 - DNA, 19 bp, Mus musculus
  siRNA target sequence for Ogfr (NM_031373.2,795-813).
gagctcgtgcactttgctt

SEQ ID NO: 559079 - DNA, 19 bp, Mus musculus
  siRNA target sequence for Ogfr (NM_031373.2,824-842).
caagcctcgccgagagttt

SEQ ID NO: 559080 - DNA, 19 bp, Mus musculus
  siRNA target sequence for Ogfr (NM_031373.2,1094-1112).
gtccccgagtcccaaagaa

SEQ ID NO: 559081 - DNA, 19 bp, Mus musculus
  siRNA target sequence for Ogfr (NM_031373.2,1332-1350).
gatggagtagccagtaaca

SEQ ID NO: 559082 - DNA, 19 bp, Mus musculus
  siRNA target sequence for Ogfr (NM_031373.2,1803-1821).
gagcaagctgcctctaaga

SEQ ID NO: 559083 - DNA, 19 bp, Mus musculus
  siRNA target sequence for Pip5k3 (NM_011086.1,142-160).
gccacagatgacaagagtt

SEQ ID NO: 559084 - DNA, 19 bp, Mus musculus
  siRNA target sequence for Pip5k3 (NM_011086.1,169-187).
ctggactctgctaatgatt

SEQ ID NO: 559085 - DNA, 19 bp, Mus musculus
  siRNA target sequence for Pip5k3 (NM_011086.1,258-276).
ccccttcaagtcagcatat

SEQ ID NO: 559086 - DNA, 19 bp, Mus musculus
  siRNA target sequence for Pip5k3 (NM_011086.1,259-277).
cccttcaagtcagcatata

SEQ ID NO: 559087 - DNA, 19 bp, Mus musculus
  siRNA target sequence for Pip5k3 (NM_011086.1,261-279).
cttcaagtcagcatatagt

SEQ ID NO: 559088 - DNA, 19 bp, Mus musculus
  siRNA target sequence for Pip5k3 (NM_011086.1,267-285).
gtcagcatatagttctttt

SEQ ID NO: 559089 - DNA, 19 bp, Mus musculus
  siRNA target sequence for Pip5k3 (NM_011086.1,291-309).
cctttttcgttttaacaaa

SEQ ID NO: 559090 - DNA, 19 bp, Mus musculus
  siRNA target sequence for Pip5k3 (NM_011086.1,396-414).
gaggtcgcctgtaccttat

SEQ ID NO: 559091 - DNA, 19 bp, Mus musculus
  siRNA target sequence for Pip5k3 (NM_011086.1,398-416).
ggtcgcctgtaccttataa

SEQ ID NO: 559092 - DNA, 19 bp, Mus musculus
  siRNA target sequence for Pip5k3 (NM_011086.1,401-419).
cgcctgtaccttataaaaa

SEQ ID NO: 559093 - DNA, 19 bp, Mus musculus
  siRNA target sequence for Pip5k3 (NM_011086.1,445-463).
cgctcttcagtgttagaga

SEQ ID NO: 559094 - DNA, 19 bp, Mus musculus
  siRNA target sequence for Pip5k3 (NM_011086.1,452-470).
cagtgttagagaacacttt

SEQ ID NO: 559095 - DNA, 19 bp, Mus musculus
  siRNA target sequence for Pip5k3 (NM_011086.1,557-575).
gaagcctcagcacagtatt

SEQ ID NO: 559096 - DNA, 19 bp, Mus musculus
  siRNA target sequence for Pip5k3 (NM_011086.1,615-633).
cagtgacctgaagcaatat

SEQ ID NO: 559097 - DNA, 19 bp, Mus musculus
  siRNA target sequence for Pip5k3 (NM_011086.1,662-680).
gctatgactgcagtgaaaa

SEQ ID NO: 559098 - DNA, 19 bp, Mus musculus
  siRNA target sequence for Pip5k3 (NM_011086.1,667-685).
gactgcagtgaaaagttta

SEQ ID NO: 559099 - DNA, 19 bp, Mus musculus
  siRNA target sequence for Pip5k3 (NM_011086.1,734-752).
gcagtcgttgttgtaatca

SEQ ID NO: 559100 - DNA, 19 bp, Mus musculus
  siRNA target sequence for Pip5k3 (NM_011086.1,735-753).
cagtcgttgttgtaatcaa

SEQ ID NO: 559101 - DNA, 19 bp, Mus musculus
  siRNA target sequence for Pip5k3 (NM_011086.1,822-840).
cttaagttatgctcattct

SEQ ID NO: 559102 - DNA, 19 bp, Mus musculus
  siRNA target sequence for Pip5k3 (NM_011086.1,833-851).
ctcattctacagacagtaa

SEQ ID NO: 559103 - DNA, 19 bp, Mus musculus
  siRNA target sequence for Pip5k3 (NM_011086.1,835-853).
cattctacagacagtaatt

SEQ ID NO: 559104 - DNA, 19 bp, Mus musculus
  siRNA target sequence for Pip5k3 (NM_011086.1,854-872).
ccattggggaagacttgaa

SEQ ID NO: 559105 - DNA, 19 bp, Mus musculus
  siRNA target sequence for Pip5k3 (NM_011086.1,855-873).
cattggggaagacttgaat

SEQ ID NO: 559106 - DNA, 19 bp, Mus musculus
  siRNA target sequence for Pip5k3 (NM_011086.1,867-885).
cttgaatgctctttcagat

SEQ ID NO: 559107 - DNA, 19 bp, Mus musculus
  siRNA target sequence for Pip5k3 (NM_011086.1,870-888).
gaatgctctttcagattca

SEQ ID NO: 559108 - DNA, 19 bp, Mus musculus
  siRNA target sequence for Pip5k3 (NM_011086.1,874-892).
gctctttcagattcaactt

SEQ ID NO: 559109 - DNA, 19 bp, Mus musculus
  siRNA target sequence for Pip5k3 (NM_011086.1,944-962).
gaaaagccagtcgtaacat

SEQ ID NO: 559110 - DNA, 19 bp, Mus musculus
  siRNA target sequence for Pip5k3 (NM_011086.1,949-967).
gccagtcgtaacatattct

SEQ ID NO: 559111 - DNA, 19 bp, Mus musculus
  siRNA target sequence for Pip5k3 (NM_011086.1,950-968).
ccagtcgtaacatattctt

SEQ ID NO: 559112 - DNA, 19 bp, Mus musculus
  siRNA target sequence for Pip5k3 (NM_011086.1,983-1001).
cctggcaaagcttgattca

SEQ ID NO: 559113 - DNA, 19 bp, Mus musculus
  siRNA target sequence for Pip5k3 (NM_011086.1,984-1002).
ctggcaaagcttgattcat

SEQ ID NO: 559114 - DNA, 19 bp, Mus musculus
  siRNA target sequence for Pip5k3 (NM_011086.1,1000-1018).
catccggattcctcaaata

SEQ ID NO: 559115 - DNA, 19 bp, Mus musculus
  siRNA target sequence for Pip5k3 (NM_011086.1,1034-1052).
gactcgtatctgttcaaga

SEQ ID NO: 559116 - DNA, 19 bp, Mus musculus
  siRNA target sequence for Pip5k3 (NM_011086.1,1082-1100).
gatcagccagcattactaa

SEQ ID NO: 559117 - DNA, 19 bp, Mus musculus
  siRNA target sequence for Pip5k3 (NM_011086.1,1087-1105).
gccagcattactaatctgt

SEQ ID NO: 559118 - DNA, 19 bp, Mus musculus
  siRNA target sequence for Pip5k3 (NM_011086.1,1116-1134).
gtctggttctcctatggtt

SEQ ID NO: 559119 - DNA, 19 bp, Mus musculus
  siRNA target sequence for Pip5k3 (NM_011086.1,1160-1178).
cccaggctaaccgaaacta

SEQ ID NO: 559120 - DNA, 19 bp, Mus musculus
  siRNA target sequence for Pip5k3 (NM_011086.1,1162-1180).
caggctaaccgaaactaca

SEQ ID NO: 559121 - DNA, 19 bp, Mus musculus
  siRNA target sequence for Pip5k3 (NM_011086.1,1164-1182).
ggctaaccgaaactacatt

SEQ ID NO: 559122 - DNA, 19 bp, Mus musculus
  siRNA target sequence for Pip5k3 (NM_011086.1,1165-1183).
gctaaccgaaactacatta

SEQ ID NO: 559123 - DNA, 19 bp, Mus musculus
  siRNA target sequence for Pip5k3 (NM_011086.1,1200-1218).
ggatgaacgcaaaattctt

SEQ ID NO: 559124 - DNA, 19 bp, Mus musculus
  siRNA target sequence for Pip5k3 (NM_011086.1,1240-1258).
gatctgtggaagaaaatct

SEQ ID NO: 559125 - DNA, 19 bp, Mus musculus
  siRNA target sequence for Pip5k3 (NM_011086.1,1266-1284).
caccagtgggatggaattt

SEQ ID NO: 559126 - DNA, 19 bp, Mus musculus
  siRNA target sequence for Pip5k3 (NM_011086.1,1268-1286).
ccagtgggatggaatttca

SEQ ID NO: 559127 - DNA, 19 bp, Mus musculus
  siRNA target sequence for Pip5k3 (NM_011086.1,1322-1340).
gcattgtagggaaggaatt

SEQ ID NO: 559128 - DNA, 19 bp, Mus musculus
  siRNA target sequence for Pip5k3 (NM_011086.1,1327-1345).
gtagggaaggaattagtca

SEQ ID NO: 559129 - DNA, 19 bp, Mus musculus
  siRNA target sequence for Pip5k3 (NM_011086.1,1342-1360).
gtcaactggctaatcagaa

SEQ ID NO: 559130 - DNA, 19 bp, Mus musculus
  siRNA target sequence for Pip5k3 (NM_011086.1,1344-1362).
caactggctaatcagaaat

SEQ ID NO: 559131 - DNA, 19 bp, Mus musculus
  siRNA target sequence for Pip5k3 (NM_011086.1,1414-1432).
gatggacgttggttggatt

SEQ ID NO: 559132 - DNA, 19 bp, Mus musculus
  siRNA target sequence for Pip5k3 (NM_011086.1,1418-1436).
gacgttggttggattgtgt

SEQ ID NO: 559133 - DNA, 19 bp, Mus musculus
  siRNA target sequence for Pip5k3 (NM_011086.1,1420-1438).
cgttggttggattgtgtta

SEQ ID NO: 559134 - DNA, 19 bp, Mus musculus
  siRNA target sequence for Pip5k3 (NM_011086.1,1428-1446).
ggattgtgttagtcatcat

SEQ ID NO: 559135 - DNA, 19 bp, Mus musculus
  siRNA target sequence for Pip5k3 (NM_011086.1,1433-1451).
gtgttagtcatcatgatca

SEQ ID NO: 559136 - DNA, 19 bp, Mus musculus
  siRNA target sequence for Pip5k3 (NM_011086.1,1461-1479).
ggacgaatatgcgttgtat

SEQ ID NO: 559137 - DNA, 19 bp, Mus musculus
  siRNA target sequence for Pip5k3 (NM_011086.1,1462-1480).
gacgaatatgcgttgtata

SEQ ID NO: 559138 - DNA, 19 bp, Mus musculus
  siRNA target sequence for Pip5k3 (NM_011086.1,1464-1482).
cgaatatgcgttgtataga

SEQ ID NO: 559139 - DNA, 19 bp, Mus musculus
  siRNA target sequence for Pip5k3 (NM_011086.1,1556-1574).
ccgagccatcctggtttaa

SEQ ID NO: 559140 - DNA, 19 bp, Mus musculus
  siRNA target sequence for Pip5k3 (NM_011086.1,1557-1575).
cgagccatcctggtttaaa

SEQ ID NO: 559141 - DNA, 19 bp, Mus musculus
  siRNA target sequence for Pip5k3 (NM_011086.1,1626-1644).
cgataatttggctaagtat

SEQ ID NO: 559142 - DNA, 19 bp, Mus musculus
  siRNA target sequence for Pip5k3 (NM_011086.1,1637-1655).
ctaagtatttggtttctga

SEQ ID NO: 559143 - DNA, 19 bp, Mus musculus
  siRNA target sequence for Pip5k3 (NM_011086.1,1695-1713).
caaagagtccttatttaat

SEQ ID NO: 559144 - DNA, 19 bp, Mus musculus
  siRNA target sequence for Pip5k3 (NM_011086.1,1714-1732).
cgacgagtagaggaaaaat

SEQ ID NO: 559145 - DNA, 19 bp, Mus musculus
  siRNA target sequence for Pip5k3 (NM_011086.1,1717-1735).
cgagtagaggaaaaatcca

SEQ ID NO: 559146 - DNA, 19 bp, Mus musculus
  siRNA target sequence for Pip5k3 (NM_011086.1,1753-1771).
cctttgggctggcatcata

SEQ ID NO: 559147 - DNA, 19 bp, Mus musculus
  siRNA target sequence for Pip5k3 (NM_011086.1,1835-1853).
ctaatcataaccacatgat

SEQ ID NO: 559148 - DNA, 19 bp, Mus musculus
  siRNA target sequence for Pip5k3 (NM_011086.1,1873-1891).
cttcaaaacgagtcattgt

SEQ ID NO: 559149 - DNA, 19 bp, Mus musculus
  siRNA target sequence for Pip5k3 (NM_011086.1,1895-1913).
cgtcttggagggacatcat

SEQ ID NO: 559150 - DNA, 19 bp, Mus musculus
  siRNA target sequence for Pip5k3 (NM_011086.1,1896-1914).
gtcttggagggacatcatt

SEQ ID NO: 559151 - DNA, 19 bp, Mus musculus
  siRNA target sequence for Pip5k3 (NM_011086.1,1898-1916).
cttggagggacatcattgt

SEQ ID NO: 559152 - DNA, 19 bp, Mus musculus
  siRNA target sequence for Pip5k3 (NM_011086.1,1977-1995).
catggatatccgtcagttt

SEQ ID NO: 559153 - DNA, 19 bp, Mus musculus
  siRNA target sequence for Pip5k3 (NM_011086.1,1988-2006).
gtcagtttgtccatatcaa

SEQ ID NO: 559154 - DNA, 19 bp, Mus musculus
  siRNA target sequence for Pip5k3 (NM_011086.1,1990-2008).
cagtttgtccatatcaaga

SEQ ID NO: 559155 - DNA, 19 bp, Mus musculus
  siRNA target sequence for Pip5k3 (NM_011086.1,2013-2031).
cccaggtggaaagaaattt

SEQ ID NO: 559156 - DNA, 19 bp, Mus musculus
  siRNA target sequence for Pip5k3 (NM_011086.1,2063-2081).
ccaagaacattgcacataa

SEQ ID NO: 559157 - DNA, 19 bp, Mus musculus
  siRNA target sequence for Pip5k3 (NM_011086.1,2064-2082).
caagaacattgcacataaa

SEQ ID NO: 559158 - DNA, 19 bp, Mus musculus
  siRNA target sequence for Pip5k3 (NM_011086.1,2139-2157).
gtatctctatagagaagaa

SEQ ID NO: 559159 - DNA, 19 bp, Mus musculus
  siRNA target sequence for Pip5k3 (NM_011086.1,2246-2264).
cattggttcttgttgagaa

SEQ ID NO: 559160 - DNA, 19 bp, Mus musculus
  siRNA target sequence for Pip5k3 (NM_011086.1,2276-2294).
ggattgctcaggacatgtt

SEQ ID NO: 559161 - DNA, 19 bp, Mus musculus
  siRNA target sequence for Pip5k3 (NM_011086.1,2277-2295).
gattgctcaggacatgtta

SEQ ID NO: 559162 - DNA, 19 bp, Mus musculus
  siRNA target sequence for Pip5k3 (NM_011086.1,2305-2323).
ggcattactctggtcatta

SEQ ID NO: 559163 - DNA, 19 bp, Mus musculus
  siRNA target sequence for Pip5k3 (NM_011086.1,2312-2330).
ctctggtcattaatgtaaa

SEQ ID NO: 559164 - DNA, 19 bp, Mus musculus
  siRNA target sequence for Pip5k3 (NM_011086.1,2314-2332).
ctggtcattaatgtaaagt

SEQ ID NO: 559165 - DNA, 19 bp, Mus musculus
  siRNA target sequence for Pip5k3 (NM_011086.1,2357-2375).
gaatgacccaaggtgattt

SEQ ID NO: 559166 - DNA, 19 bp, Mus musculus
  siRNA target sequence for Pip5k3 (NM_011086.1,2415-2433).
gggcacttgccacaaattt

SEQ ID NO: 559167 - DNA, 19 bp, Mus musculus
  siRNA target sequence for Pip5k3 (NM_011086.1,2416-2434).
ggcacttgccacaaatttt

SEQ ID NO: 559168 - DNA, 19 bp, Mus musculus
  siRNA target sequence for Pip5k3 (NM_011086.1,2417-2435).
gcacttgccacaaatttta

SEQ ID NO: 559169 - DNA, 19 bp, Mus musculus
  siRNA target sequence for Pip5k3 (NM_011086.1,2423-2441).
gccacaaattttatatgca

SEQ ID NO: 559170 - DNA, 19 bp, Mus musculus
  siRNA target sequence for Pip5k3 (NM_011086.1,2449-2467).
cagctgcctaatgaacaaa

SEQ ID NO: 559171 - DNA, 19 bp, Mus musculus
  siRNA target sequence for Pip5k3 (NM_011086.1,2454-2472).
gcctaatgaacaaaccaaa

SEQ ID NO: 559172 - DNA, 19 bp, Mus musculus
  siRNA target sequence for Pip5k3 (NM_011086.1,2503-2521).
catctaggctgcacaatca

SEQ ID NO: 559173 - DNA, 19 bp, Mus musculus
  siRNA target sequence for Pip5k3 (NM_011086.1,2554-2572).
cgagttaaggagatcctaa

SEQ ID NO: 559174 - DNA, 19 bp, Mus musculus
  siRNA target sequence for Pip5k3 (NM_011086.1,2557-2575).
gttaaggagatcctaatat

SEQ ID NO: 559175 - DNA, 19 bp, Mus musculus
  siRNA target sequence for Pip5k3 (NM_011086.1,2563-2581).
gagatcctaatatttatga

SEQ ID NO: 559176 - DNA, 19 bp, Mus musculus
  siRNA target sequence for Pip5k3 (NM_011086.1,2585-2603).
gtgtagcttatcattctca

SEQ ID NO: 559177 - DNA, 19 bp, Mus musculus
  siRNA target sequence for Pip5k3 (NM_011086.1,2600-2618).
ctcagctagaaatctcttt

SEQ ID NO: 559178 - DNA, 19 bp, Mus musculus
  siRNA target sequence for Pip5k3 (NM_011086.1,2634-2652).
cgctatgcctccaacatta

SEQ ID NO: 559179 - DNA, 19 bp, Mus musculus
  siRNA target sequence for Pip5k3 (NM_011086.1,2635-2653).
gctatgcctccaacattaa

SEQ ID NO: 559180 - DNA, 19 bp, Mus musculus
  siRNA target sequence for Pip5k3 (NM_011086.1,2636-2654).
ctatgcctccaacattaat

SEQ ID NO: 559181 - DNA, 19 bp, Mus musculus
  siRNA target sequence for Pip5k3 (NM_011086.1,2640-2658).
gcctccaacattaatgcaa

SEQ ID NO: 559182 - DNA, 19 bp, Mus musculus
  siRNA target sequence for Pip5k3 (NM_011086.1,2774-2792).
ctgaggatagcactttgtt

SEQ ID NO: 559183 - DNA, 19 bp, Mus musculus
  siRNA target sequence for Pip5k3 (NM_011086.1,2779-2797).
gatagcactttgttggaat

SEQ ID NO: 559184 - DNA, 19 bp, Mus musculus
  siRNA target sequence for Pip5k3 (NM_011086.1,2808-2826).
gctagagaagggtgaacta

SEQ ID NO: 559185 - DNA, 19 bp, Mus musculus
  siRNA target sequence for Pip5k3 (NM_011086.1,2845-2863).
caagctgttgcctctttga

SEQ ID NO: 559186 - DNA, 19 bp, Mus musculus
  siRNA target sequence for Pip5k3 (NM_011086.1,2855-2873).
cctctttgaagcatcaaga

SEQ ID NO: 559187 - DNA, 19 bp, Mus musculus
  siRNA target sequence for Pip5k3 (NM_011086.1,2886-2904).
cacttgcccagcaggtatt

SEQ ID NO: 559188 - DNA, 19 bp, Mus musculus
  siRNA target sequence for Pip5k3 (NM_011086.1,2900-2918).
gtattccctgtgctctttt

SEQ ID NO: 559189 - DNA, 19 bp, Mus musculus
  siRNA target sequence for Pip5k3 (NM_011086.1,2964-2982).
ggatgccgtaggaaatgaa

SEQ ID NO: 559190 - DNA, 19 bp, Mus musculus
  siRNA target sequence for Pip5k3 (NM_011086.1,3030-3048).
ccagatgaaagcttttaga

SEQ ID NO: 559191 - DNA, 19 bp, Mus musculus
  siRNA target sequence for Pip5k3 (NM_011086.1,3064-3082).
gacactggaatgtacgtta

SEQ ID NO: 559192 - DNA, 19 bp, Mus musculus
  siRNA target sequence for Pip5k3 (NM_011086.1,3068-3086).
ctggaatgtacgttactga

SEQ ID NO: 559193 - DNA, 19 bp, Mus musculus
  siRNA target sequence for Pip5k3 (NM_011086.1,3098-3116).
cctctgaagatcaacgaaa

SEQ ID NO: 559194 - DNA, 19 bp, Mus musculus
  siRNA target sequence for Pip5k3 (NM_011086.1,3117-3135).
gacttatgccttgacattt

SEQ ID NO: 559195 - DNA, 19 bp, Mus musculus
  siRNA target sequence for Pip5k3 (NM_011086.1,3162-3180).
ctgtatctctccagttatt

SEQ ID NO: 559196 - DNA, 19 bp, Mus musculus
  siRNA target sequence for Pip5k3 (NM_011086.1,3186-3204).
ccgtgaacctttcctttta

SEQ ID NO: 559197 - DNA, 19 bp, Mus musculus
  siRNA target sequence for Pip5k3 (NM_011086.1,3187-3205).
cgtgaacctttccttttaa

SEQ ID NO: 559198 - DNA, 19 bp, Mus musculus
  siRNA target sequence for Pip5k3 (NM_011086.1,3221-3239).
gatgctcaactcgagatta

SEQ ID NO: 559199 - DNA, 19 bp, Mus musculus
  siRNA target sequence for Pip5k3 (NM_011086.1,3224-3242).
gctcaactcgagattattt

SEQ ID NO: 559200 - DNA, 19 bp, Mus musculus
  siRNA target sequence for Pip5k3 (NM_011086.1,3225-3243).
ctcaactcgagattatttt

SEQ ID NO: 559201 - DNA, 19 bp, Mus musculus
  siRNA target sequence for Pip5k3 (NM_011086.1,3356-3374).
gtgttcaggccaagtctat

SEQ ID NO: 559202 - DNA, 19 bp, Mus musculus
  siRNA target sequence for Pip5k3 (NM_011086.1,3366-3384).
caagtctattcaagtctta

SEQ ID NO: 559203 - DNA, 19 bp, Mus musculus
  siRNA target sequence for Pip5k3 (NM_011086.1,3438-3456).
gaccttgggtagaatgcta

SEQ ID NO: 559204 - DNA, 19 bp, Mus musculus
  siRNA target sequence for Pip5k3 (NM_011086.1,3504-3522).
cccctttgtccattcaaaa

SEQ ID NO: 559205 - DNA, 19 bp, Mus musculus
  siRNA target sequence for Pip5k3 (NM_011086.1,3506-3524).
cctttgtccattcaaaaga

SEQ ID NO: 559206 - DNA, 19 bp, Mus musculus
  siRNA target sequence for Pip5k3 (NM_011086.1,3580-3598).
gagaggggattgattccaa

SEQ ID NO: 559207 - DNA, 19 bp, Mus musculus
  siRNA target sequence for Pip5k3 (NM_011086.1,3585-3603).
gggattgattccaagtgat

SEQ ID NO: 559208 - DNA, 19 bp, Mus musculus
  siRNA target sequence for Pip5k3 (NM_011086.1,3714-3732).
cagtccttggattgtaaca

SEQ ID NO: 559209 - DNA, 19 bp, Mus musculus
  siRNA target sequence for Pip5k3 (NM_011086.1,3846-3864).
cattcgacgctttgttcat

SEQ ID NO: 559210 - DNA, 19 bp, Mus musculus
  siRNA target sequence for Pip5k3 (NM_011086.1,3912-3930).
gcctggatatcaacataca

SEQ ID NO: 559211 - DNA, 19 bp, Mus musculus
  siRNA target sequence for Pip5k3 (NM_011086.1,3914-3932).
ctggatatcaacatacaat

SEQ ID NO: 559212 - DNA, 19 bp, Mus musculus
  siRNA target sequence for Pip5k3 (NM_011086.1,3917-3935).
gatatcaacatacaattct

SEQ ID NO: 559213 - DNA, 19 bp, Mus musculus
  siRNA target sequence for Pip5k3 (NM_011086.1,3925-3943).
catacaattctcacatatt

SEQ ID NO: 559214 - DNA, 19 bp, Mus musculus
  siRNA target sequence for Pip5k3 (NM_011086.1,3994-4012).
gaatcctggtctatgtcat

SEQ ID NO: 559215 - DNA, 19 bp, Mus musculus
  siRNA target sequence for Pip5k3 (NM_011086.1,4020-4038).
gtaccttgaacttcgattt

SEQ ID NO: 559216 - DNA, 19 bp, Mus musculus
  siRNA target sequence for Pip5k3 (NM_011086.1,4086-4104).
ctctatccaccatgattat

SEQ ID NO: 559217 - DNA, 19 bp, Mus musculus
  siRNA target sequence for Pip5k3 (NM_011086.1,4088-4106).
ctatccaccatgattatca

SEQ ID NO: 559218 - DNA, 19 bp, Mus musculus
  siRNA target sequence for Pip5k3 (NM_011086.1,4099-4117).
gattatcaccagtatttct

SEQ ID NO: 559219 - DNA, 19 bp, Mus musculus
  siRNA target sequence for Pip5k3 (NM_011086.1,4105-4123).
caccagtatttctcttata

SEQ ID NO: 559220 - DNA, 19 bp, Mus musculus
  siRNA target sequence for Pip5k3 (NM_011086.1,4151-4169).
ctcctattcggcttcttga

SEQ ID NO: 559221 - DNA, 19 bp, Mus musculus
  siRNA target sequence for Pip5k3 (NM_011086.1,4154-4172).
ctattcggcttcttgaagt

SEQ ID NO: 559222 - DNA, 19 bp, Mus musculus
  siRNA target sequence for Pip5k3 (NM_011086.1,4160-4178).
ggcttcttgaagtatgtgt

SEQ ID NO: 559223 - DNA, 19 bp, Mus musculus
  siRNA target sequence for Pip5k3 (NM_011086.1,4177-4195).
gttccactaccaaaaatat

SEQ ID NO: 559224 - DNA, 19 bp, Mus musculus
  siRNA target sequence for Pip5k3 (NM_011086.1,4211-4229).
ccccactgaaggtatctct

SEQ ID NO: 559225 - DNA, 19 bp, Mus musculus
  siRNA target sequence for Pip5k3 (NM_011086.1,4269-4287).
ggtgtacctagctgttgat

SEQ ID NO: 559226 - DNA, 19 bp, Mus musculus
  siRNA target sequence for Pip5k3 (NM_011086.1,4302-4320).
cttgaaaacggatacattt

SEQ ID NO: 559227 - DNA, 19 bp, Mus musculus
  siRNA target sequence for Pip5k3 (NM_011086.1,4375-4393).
gagggtgagtttaagaact

SEQ ID NO: 559228 - DNA, 19 bp, Mus musculus
  siRNA target sequence for Pip5k3 (NM_011086.1,4799-4817).
gtggctctgaagatgtatt

SEQ ID NO: 559229 - DNA, 19 bp, Mus musculus
  siRNA target sequence for Pip5k3 (NM_011086.1,4843-4861).
gacagccaggtgaaggaaa

SEQ ID NO: 559230 - DNA, 19 bp, Mus musculus
  siRNA target sequence for Pip5k3 (NM_011086.1,4916-4934).
ccattccatttccttttga

SEQ ID NO: 559231 - DNA, 19 bp, Mus musculus
  siRNA target sequence for Pip5k3 (NM_011086.1,4917-4935).
cattccatttccttttgat

SEQ ID NO: 559232 - DNA, 19 bp, Mus musculus
  siRNA target sequence for Pip5k3 (NM_011086.1,4928-4946).
cttttgatccagataaaca

SEQ ID NO: 559233 - DNA, 19 bp, Mus musculus
  siRNA target sequence for Pip5k3 (NM_011086.1,4936-4954).
ccagataaacactacttaa

SEQ ID NO: 559234 - DNA, 19 bp, Mus musculus
  siRNA target sequence for Pip5k3 (NM_011086.1,4939-4957).
gataaacactacttaatgt

SEQ ID NO: 559235 - DNA, 19 bp, Mus musculus
  siRNA target sequence for Pip5k3 (NM_011086.1,4947-4965).
ctacttaatgtatgaacat

SEQ ID NO: 559236 - DNA, 19 bp, Mus musculus
  siRNA target sequence for Pip5k3 (NM_011086.1,5014-5032).
gcttttgcactcagttgta

SEQ ID NO: 559237 - DNA, 19 bp, Mus musculus
  siRNA target sequence for Pip5k3 (NM_011086.1,5015-5033).
cttttgcactcagttgtaa

SEQ ID NO: 559238 - DNA, 19 bp, Mus musculus
  siRNA target sequence for Pip5k3 (NM_011086.1,5021-5039).
cactcagttgtaaagaata

SEQ ID NO: 559239 - DNA, 19 bp, Mus musculus
  siRNA target sequence for Pip5k3 (NM_011086.1,5102-5120).
cagccaatagtgctttaga

SEQ ID NO: 559240 - DNA, 19 bp, Mus musculus
  siRNA target sequence for Pip5k3 (NM_011086.1,5104-5122).
gccaatagtgctttagata

SEQ ID NO: 559241 - DNA, 19 bp, Mus musculus
  siRNA target sequence for Pip5k3 (NM_011086.1,5105-5123).
ccaatagtgctttagataa

SEQ ID NO: 559242 - DNA, 19 bp, Mus musculus
  siRNA target sequence for Pip5k3 (NM_011086.1,5133-5151).
gagtagcagccctattaga

SEQ ID NO: 559243 - DNA, 19 bp, Mus musculus
  siRNA target sequence for Pip5k3 (NM_011086.1,5135-5153).
gtagcagccctattagact

SEQ ID NO: 559244 - DNA, 19 bp, Mus musculus
  siRNA target sequence for Pip5k3 (NM_011086.1,5144-5162).
ctattagactacctgaaat

SEQ ID NO: 559245 - DNA, 19 bp, Mus musculus
  siRNA target sequence for Pip5k3 (NM_011086.1,5403-5421).
gaaacaactcacaaatcct

SEQ ID NO: 559246 - DNA, 19 bp, Mus musculus
  siRNA target sequence for Pip5k3 (NM_011086.1,5422-5440).
catgtggaacttcaatttt

SEQ ID NO: 559247 - DNA, 19 bp, Mus musculus
  siRNA target sequence for Pip5k3 (NM_011086.1,5427-5445).
ggaacttcaattttctgat

SEQ ID NO: 559248 - DNA, 19 bp, Mus musculus
  siRNA target sequence for Pip5k3 (NM_011086.1,5602-5620).
gccaccgaagatgatagat

SEQ ID NO: 559249 - DNA, 19 bp, Mus musculus
  siRNA target sequence for Pip5k3 (NM_011086.1,5603-5621).
ccaccgaagatgatagatt

SEQ ID NO: 559250 - DNA, 19 bp, Mus musculus
  siRNA target sequence for Pip5k3 (NM_011086.1,5674-5692).
ccacactacttcaattata

SEQ ID NO: 559251 - DNA, 19 bp, Mus musculus
  siRNA target sequence for Pip5k3 (NM_011086.1,5675-5693).
cacactacttcaattatat

SEQ ID NO: 559252 - DNA, 19 bp, Mus musculus
  siRNA target sequence for Pip5k3 (NM_011086.1,5679-5697).
ctacttcaattatatcaca

SEQ ID NO: 559253 - DNA, 19 bp, Mus musculus
  siRNA target sequence for Pip5k3 (NM_011086.1,5682-5700).
cttcaattatatcacaaat

SEQ ID NO: 559254 - DNA, 19 bp, Mus musculus
  siRNA target sequence for Pip5k3 (NM_011086.1,5685-5703).
caattatatcacaaatgct

SEQ ID NO: 559255 - DNA, 19 bp, Mus musculus
  siRNA target sequence for Pip5k3 (NM_011086.1,5720-5738).
ccaccgccttggctaaaat

SEQ ID NO: 559256 - DNA, 19 bp, Mus musculus
  siRNA target sequence for Pip5k3 (NM_011086.1,5721-5739).
caccgccttggctaaaatt

SEQ ID NO: 559257 - DNA, 19 bp, Mus musculus
  siRNA target sequence for Pip5k3 (NM_011086.1,5743-5761).
ggagtttacagaattggtt

SEQ ID NO: 559258 - DNA, 19 bp, Mus musculus
  siRNA target sequence for Pip5k3 (NM_011086.1,5744-5762).
gagtttacagaattggtta

SEQ ID NO: 559259 - DNA, 19 bp, Mus musculus
  siRNA target sequence for Pip5k3 (NM_011086.1,5797-5815).
gatctccttgtcatggaaa

SEQ ID NO: 559260 - DNA, 19 bp, Mus musculus
  siRNA target sequence for Pip5k3 (NM_011086.1,5851-5869).
gatttgaagggttcactta

SEQ ID NO: 559261 - DNA, 19 bp, Mus musculus
  siRNA target sequence for Pip5k3 (NM_011086.1,5860-5878).
ggttcacttaggaatcgaa

SEQ ID NO: 559262 - DNA, 19 bp, Mus musculus
  siRNA target sequence for Pip5k3 (NM_011086.1,5861-5879).
gttcacttaggaatcgaaa

SEQ ID NO: 559263 - DNA, 19 bp, Mus musculus
  siRNA target sequence for Pip5k3 (NM_011086.1,5864-5882).
cacttaggaatcgaaatgt

SEQ ID NO: 559264 - DNA, 19 bp, Mus musculus
  siRNA target sequence for Pip5k3 (NM_011086.1,5914-5932).
gtggttctgttggatgaaa

SEQ ID NO: 559265 - DNA, 19 bp, Mus musculus
  siRNA target sequence for Pip5k3 (NM_011086.1,5950-5968).
cgagacaaccctctctata

SEQ ID NO: 559266 - DNA, 19 bp, Mus musculus
  siRNA target sequence for Pip5k3 (NM_011086.1,5951-5969).
gagacaaccctctctatat

SEQ ID NO: 559267 - DNA, 19 bp, Mus musculus
  siRNA target sequence for Pip5k3 (NM_011086.1,5955-5973).
caaccctctctatattcgt

SEQ ID NO: 559268 - DNA, 19 bp, Mus musculus
  siRNA target sequence for Pip5k3 (NM_011086.1,6029-6047).
ccagccacctcattataga

SEQ ID NO: 559269 - DNA, 19 bp, Mus musculus
  siRNA target sequence for Pip5k3 (NM_011086.1,6032-6050).
gccacctcattatagacta

SEQ ID NO: 559270 - DNA, 19 bp, Mus musculus
  siRNA target sequence for Pip5k3 (NM_011086.1,6033-6051).
ccacctcattatagactat

SEQ ID NO: 559271 - DNA, 19 bp, Mus musculus
  siRNA target sequence for Pip5k3 (NM_011086.1,6034-6052).
cacctcattatagactatt

SEQ ID NO: 559272 - DNA, 19 bp, Mus musculus
  siRNA target sequence for Pip5k3 (NM_011086.1,6036-6054).
cctcattatagactattct

SEQ ID NO: 559273 - DNA, 19 bp, Mus musculus
  siRNA target sequence for Pip5k3 (NM_011086.1,6066-6084).
gcgagatgacactagcaat

SEQ ID NO: 559274 - DNA, 19 bp, Mus musculus
  siRNA target sequence for Pip5k3 (NM_011086.1,6094-6112).
gttggcatcatagattaca

SEQ ID NO: 559275 - DNA, 19 bp, Mus musculus
  siRNA target sequence for Pip5k3 (NM_011086.1,6106-6124).
gattacattcgaacattta

SEQ ID NO: 559276 - DNA, 19 bp, Mus musculus
  siRNA target sequence for Pip5k3 (NM_011086.1,6142-6160).
gagatggttgtgaagtcaa

SEQ ID NO: 559277 - DNA, 19 bp, Mus musculus
  siRNA target sequence for Pip5k3 (NM_011086.1,6151-6169).
gtgaagtcaacaggaattt

SEQ ID NO: 559278 - DNA, 19 bp, Mus musculus
  siRNA target sequence for Pip5k3 (NM_011086.1,6199-6217).
gtctctccagagttgtata

SEQ ID NO: 559279 - DNA, 19 bp, Mus musculus
  siRNA target sequence for Pip5k3 (NM_011086.1,6208-6226).
gagttgtataggactagat

SEQ ID NO: 559280 - DNA, 19 bp, Mus musculus
  siRNA target sequence for Pip5k3 (NM_011086.1,6210-6228).
gttgtataggactagattt

SEQ ID NO: 559281 - DNA, 19 bp, Mus musculus
  siRNA target sequence for Pip5k3 (NM_011086.1,6213-6231).
gtataggactagattttgt

SEQ ID NO: 559282 - DNA, 19 bp, Mus musculus
  siRNA target sequence for Pip5k3 (NM_011086.1,6235-6253).
gcaatggacaagtatttct

SEQ ID NO: 559283 - DNA, 19 bp, Mus musculus
  siRNA target sequence for Pip5k3 (NM_011086.1,6236-6254).
caatggacaagtatttctt

SEQ ID NO: 559284 - DNA, 19 bp, Mus musculus
  siRNA target sequence for Pip5k3 (NM_011086.1,6272-6290).
ggacagggttggatctgaa

SEQ ID NO: 559285 - DNA, 19 bp, Mus musculus
  siRNA target sequence for Psa (NM_008942.1,363-381).
ggtaaggcaggcaaccaat

SEQ ID NO: 559286 - DNA, 19 bp, Mus musculus
  siRNA target sequence for Psa (NM_008942.1,368-386).
ggcaggcaaccaatcaaat

SEQ ID NO: 559287 - DNA, 19 bp, Mus musculus
  siRNA target sequence for Psa (NM_008942.1,369-387).
gcaggcaaccaatcaaatt

SEQ ID NO: 559288 - DNA, 19 bp, Mus musculus
  siRNA target sequence for Psa (NM_008942.1,373-391).
gcaaccaatcaaattgtga

SEQ ID NO: 559289 - DNA, 19 bp, Mus musculus
  siRNA target sequence for Psa (NM_008942.1,454-472).
catgcgacaggatttaact

SEQ ID NO: 559290 - DNA, 19 bp, Mus musculus
  siRNA target sequence for Psa (NM_008942.1,458-476).
cgacaggatttaactatca

SEQ ID NO: 559291 - DNA, 19 bp, Mus musculus
  siRNA target sequence for Psa (NM_008942.1,464-482).
gatttaactatcagaatga

SEQ ID NO: 559292 - DNA, 19 bp, Mus musculus
  siRNA target sequence for Psa (NM_008942.1,524-542).
caggtacaggaaccttaaa

SEQ ID NO: 559293 - DNA, 19 bp, Mus musculus
  siRNA target sequence for Psa (NM_008942.1,526-544).
ggtacaggaaccttaaaga

SEQ ID NO: 559294 - DNA, 19 bp, Mus musculus
  siRNA target sequence for Psa (NM_008942.1,527-545).
gtacaggaaccttaaagat

SEQ ID NO: 559295 - DNA, 19 bp, Mus musculus
  siRNA target sequence for Psa (NM_008942.1,556-574).
ggagagctgaatgacaaaa

SEQ ID NO: 559296 - DNA, 19 bp, Mus musculus
  siRNA target sequence for Psa (NM_008942.1,559-577).
gagctgaatgacaaaatga

SEQ ID NO: 559297 - DNA, 19 bp, Mus musculus
  siRNA target sequence for Psa (NM_008942.1,685-703).
gagcctgctatcaaagcaa

SEQ ID NO: 559298 - DNA, 19 bp, Mus musculus
  siRNA target sequence for Psa (NM_008942.1,692-710).
ctatcaaagcaacttttga

SEQ ID NO: 559299 - DNA, 19 bp, Mus musculus
  siRNA target sequence for Psa (NM_008942.1,716-734).
cgctggttgtgcctaaaga

SEQ ID NO: 559300 - DNA, 19 bp, Mus musculus
  siRNA target sequence for Psa (NM_008942.1,718-736).
ctggttgtgcctaaagaca

SEQ ID NO: 559301 - DNA, 19 bp, Mus musculus
  siRNA target sequence for Psa (NM_008942.1,735-753).
cagagtggctttatcaaat

SEQ ID NO: 559302 - DNA, 19 bp, Mus musculus
  siRNA target sequence for Psa (NM_008942.1,743-761).
ctttatcaaatatgaatgt

SEQ ID NO: 559303 - DNA, 19 bp, Mus musculus
  siRNA target sequence for Psa (NM_008942.1,771-789).
gaaaccatatcctgatgat

SEQ ID NO: 559304 - DNA, 19 bp, Mus musculus
  siRNA target sequence for Psa (NM_008942.1,814-832).
gctcgcacacctgttatgt

SEQ ID NO: 559305 - DNA, 19 bp, Mus musculus
  siRNA target sequence for Psa (NM_008942.1,836-854).
cgtatctggtggcatttgt

SEQ ID NO: 559306 - DNA, 19 bp, Mus musculus
  siRNA target sequence for Psa (NM_008942.1,853-871).
gttgtgggtgaatatgact

SEQ ID NO: 559307 - DNA, 19 bp, Mus musculus
  siRNA target sequence for Psa (NM_008942.1,964-982).
gctaagaccttgccttttt

SEQ ID NO: 559308 - DNA, 19 bp, Mus musculus
  siRNA target sequence for Psa (NM_008942.1,965-983).
ctaagaccttgccttttta

SEQ ID NO: 559309 - DNA, 19 bp, Mus musculus
  siRNA target sequence for Psa (NM_008942.1,993-1011).
cttcaatgttccttatcct

SEQ ID NO: 559310 - DNA, 19 bp, Mus musculus
  siRNA target sequence for Psa (NM_008942.1,1003-1021).
ccttatcctctacctaaaa

SEQ ID NO: 559311 - DNA, 19 bp, Mus musculus
  siRNA target sequence for Psa (NM_008942.1,1004-1022).
cttatcctctacctaaaat

SEQ ID NO: 559312 - DNA, 19 bp, Mus musculus
  siRNA target sequence for Psa (NM_008942.1,1065-1083).
gaactggggccttgttact

SEQ ID NO: 559313 - DNA, 19 bp, Mus musculus
  siRNA target sequence for Psa (NM_008942.1,1068-1086).
ctggggccttgttacttat

SEQ ID NO: 559314 - DNA, 19 bp, Mus musculus
  siRNA target sequence for Psa (NM_008942.1,1097-1115).
ccttgcttattgatccaaa

SEQ ID NO: 559315 - DNA, 19 bp, Mus musculus
  siRNA target sequence for Psa (NM_008942.1,1098-1116).
cttgcttattgatccaaaa

SEQ ID NO: 559316 - DNA, 19 bp, Mus musculus
  siRNA target sequence for Psa (NM_008942.1,1162-1180).
catgaactcgcccatcaat

SEQ ID NO: 559317 - DNA, 19 bp, Mus musculus
  siRNA target sequence for Psa (NM_008942.1,1214-1232).
ctcatctctggttgaatga

SEQ ID NO: 559318 - DNA, 19 bp, Mus musculus
  siRNA target sequence for Psa (NM_008942.1,1248-1266).
gattgagtatctttgtgta

SEQ ID NO: 559319 - DNA, 19 bp, Mus musculus
  siRNA target sequence for Psa (NM_008942.1,1274-1292).
gctttccagagtatgatat

SEQ ID NO: 559320 - DNA, 19 bp, Mus musculus
  siRNA target sequence for Psa (NM_008942.1,1323-1341).
ccgtgcccaggaacttgat

SEQ ID NO: 559321 - DNA, 19 bp, Mus musculus
  siRNA target sequence for Psa (NM_008942.1,1336-1354).
cttgatgccttagataaca

SEQ ID NO: 559322 - DNA, 19 bp, Mus musculus
  siRNA target sequence for Psa (NM_008942.1,1401-1419).
gatatttgatgctatatca

SEQ ID NO: 559323 - DNA, 19 bp, Mus musculus
  siRNA target sequence for Psa (NM_008942.1,1424-1442).
gcaaaggtgcatctgtaat

SEQ ID NO: 559324 - DNA, 19 bp, Mus musculus
  siRNA target sequence for Psa (NM_008942.1,1445-1463).
gaatgctacatgactacat

SEQ ID NO: 559325 - DNA, 19 bp, Mus musculus
  siRNA target sequence for Psa (NM_008942.1,1721-1739).
ctcagtggatggttcctat

SEQ ID NO: 559326 - DNA, 19 bp, Mus musculus
  siRNA target sequence for Psa (NM_008942.1,1731-1749).
ggttcctatcacaatttca

SEQ ID NO: 559327 - DNA, 19 bp, Mus musculus
  siRNA target sequence for Psa (NM_008942.1,1776-1794).
gctgaaaatactaatggat

SEQ ID NO: 559328 - DNA, 19 bp, Mus musculus
  siRNA target sequence for Psa (NM_008942.1,1801-1819).
gagatgagtgtggttttga

SEQ ID NO: 559329 - DNA, 19 bp, Mus musculus
  siRNA target sequence for Psa (NM_008942.1,1834-1852).
gaccaatgggtaaagctaa

SEQ ID NO: 559330 - DNA, 19 bp, Mus musculus
  siRNA target sequence for Psa (NM_008942.1,1836-1854).
ccaatgggtaaagctaaat

SEQ ID NO: 559331 - DNA, 19 bp, Mus musculus
  siRNA target sequence for Psa (NM_008942.1,1892-1910).
ctgccatgctcgaaagttt

SEQ ID NO: 559332 - DNA, 19 bp, Mus musculus
  siRNA target sequence for Psa (NM_008942.1,1894-1912).
gccatgctcgaaagtttat

SEQ ID NO: 559333 - DNA, 19 bp, Mus musculus
  siRNA target sequence for Psa (NM_008942.1,1895-1913).
ccatgctcgaaagtttatt

SEQ ID NO: 559334 - DNA, 19 bp, Mus musculus
  siRNA target sequence for Psa (NM_008942.1,1896-1914).
catgctcgaaagtttatta

SEQ ID NO: 559335 - DNA, 19 bp, Mus musculus
  siRNA target sequence for Psa (NM_008942.1,1899-1917).
gctcgaaagtttattacca

SEQ ID NO: 559336 - DNA, 19 bp, Mus musculus
  siRNA target sequence for Psa (NM_008942.1,1943-1961).
cagtggatcgacttggatt

SEQ ID NO: 559337 - DNA, 19 bp, Mus musculus
  siRNA target sequence for Psa (NM_008942.1,1948-1966).
gatcgacttggattacaga

SEQ ID NO: 559338 - DNA, 19 bp, Mus musculus
  siRNA target sequence for Psa (NM_008942.1,1984-2002).
gctcgagctggcatcatta

SEQ ID NO: 559339 - DNA, 19 bp, Mus musculus
  siRNA target sequence for Psa (NM_008942.1,1987-2005).
cgagctggcatcattagca

SEQ ID NO: 559340 - DNA, 19 bp, Mus musculus
  siRNA target sequence for Psa (NM_008942.1,2006-2024).
ctgtagaggttctaaaagt

SEQ ID NO: 559341 - DNA, 19 bp, Mus musculus
  siRNA target sequence for Psa (NM_008942.1,2038-2056).
gtgaatgagcccaattata

SEQ ID NO: 559342 - DNA, 19 bp, Mus musculus
  siRNA target sequence for Psa (NM_008942.1,2040-2058).
gaatgagcccaattatact

SEQ ID NO: 559343 - DNA, 19 bp, Mus musculus
  siRNA target sequence for Psa (NM_008942.1,2082-2100).
cctggggattctttcaact

SEQ ID NO: 559344 - DNA, 19 bp, Mus musculus
  siRNA target sequence for Psa (NM_008942.1,2108-2126).
cccacacagacttctatga

SEQ ID NO: 559345 - DNA, 19 bp, Mus musculus
  siRNA target sequence for Psa (NM_008942.1,2255-2273).
caggccataaggcaacttt

SEQ ID NO: 559346 - DNA, 19 bp, Mus musculus
  siRNA target sequence for Psa (NM_008942.1,2282-2300).
cccgtcgtcggtttaagga

SEQ ID NO: 559347 - DNA, 19 bp, Mus musculus
  siRNA target sequence for Psa (NM_008942.1,2304-2322).
cgtggaagggaaacagatt

SEQ ID NO: 559348 - DNA, 19 bp, Mus musculus
  siRNA target sequence for Psa (NM_008942.1,2373-2391).
ggatggcgctaccttagat

SEQ ID NO: 559349 - DNA, 19 bp, Mus musculus
  siRNA target sequence for Psa (NM_008942.1,2374-2392).
gatggcgctaccttagata

SEQ ID NO: 559350 - DNA, 19 bp, Mus musculus
  siRNA target sequence for Psa (NM_008942.1,2377-2395).
ggcgctaccttagatatca

SEQ ID NO: 559351 - DNA, 19 bp, Mus musculus
  siRNA target sequence for Psa (NM_008942.1,2378-2396).
gcgctaccttagatatcat

SEQ ID NO: 559352 - DNA, 19 bp, Mus musculus
  siRNA target sequence for Psa (NM_008942.1,2465-2483).
ctctttcacctgaactgat

SEQ ID NO: 559353 - DNA, 19 bp, Mus musculus
  siRNA target sequence for Psa (NM_008942.1,2471-2489).
cacctgaactgattcaaaa

SEQ ID NO: 559354 - DNA, 19 bp, Mus musculus
  siRNA target sequence for Psa (NM_008942.1,2579-2597).
ggaaagctgcttggaaatt

SEQ ID NO: 559355 - DNA, 19 bp, Mus musculus
  siRNA target sequence for Psa (NM_008942.1,2584-2602).
gctgcttggaaattcatca

SEQ ID NO: 559356 - DNA, 19 bp, Mus musculus
  siRNA target sequence for Psa (NM_008942.1,2634-2652).
ccagggagggttcttaata

SEQ ID NO: 559357 - DNA, 19 bp, Mus musculus
  siRNA target sequence for Psa (NM_008942.1,2635-2653).
cagggagggttcttaatat

SEQ ID NO: 559358 - DNA, 19 bp, Mus musculus
  siRNA target sequence for Psa (NM_008942.1,2638-2656).
ggagggttcttaatatcca

SEQ ID NO: 559359 - DNA, 19 bp, Mus musculus
  siRNA target sequence for Psa (NM_008942.1,2646-2664).
cttaatatccagactaata

SEQ ID NO: 559360 - DNA, 19 bp, Mus musculus
  siRNA target sequence for Psa (NM_008942.1,2677-2695).
gaggggtttgcagttgata

SEQ ID NO: 559361 - DNA, 19 bp, Mus musculus
  siRNA target sequence for Psa (NM_008942.1,2679-2697).
ggggtttgcagttgataaa

SEQ ID NO: 559362 - DNA, 19 bp, Mus musculus
  siRNA target sequence for Psa (NM_008942.1,2681-2699).
ggtttgcagttgataaaat

SEQ ID NO: 559363 - DNA, 19 bp, Mus musculus
  siRNA target sequence for Psa (NM_008942.1,2757-2775).
catccagcagtgttgtgaa

SEQ ID NO: 559364 - DNA, 19 bp, Mus musculus
  siRNA target sequence for Psa (NM_008942.1,2833-2851).
ctccttcagcggaaaacct

SEQ ID NO: 559365 - DNA, 19 bp, Mus musculus
  siRNA target sequence for Pter (NM_008961.1,109-127).
ccttaagtgggaaagtaca

SEQ ID NO: 559366 - DNA, 19 bp, Mus musculus
  siRNA target sequence for Pter (NM_008961.1,110-128).
cttaagtgggaaagtacaa

SEQ ID NO: 559367 - DNA, 19 bp, Mus musculus
  siRNA target sequence for Pter (NM_008961.1,175-193).
cccacgagcatctgacaat

SEQ ID NO: 559368 - DNA, 19 bp, Mus musculus
  siRNA target sequence for Pter (NM_008961.1,190-208).
caatgacctttgacagttt

SEQ ID NO: 559369 - DNA, 19 bp, Mus musculus
  siRNA target sequence for Pter (NM_008961.1,248-266).
ggaacctatcatgatgaaa

SEQ ID NO: 559370 - DNA, 19 bp, Mus musculus
  siRNA target sequence for Pter (NM_008961.1,449-467).
gactggagtccacatcata

SEQ ID NO: 559371 - DNA, 19 bp, Mus musculus
  siRNA target sequence for Pter (NM_008961.1,472-490).
gagctgggttttatgttga

SEQ ID NO: 559372 - DNA, 19 bp, Mus musculus
  siRNA target sequence for Pter (NM_008961.1,583-601).
gcatcaagtgtggagttat

SEQ ID NO: 559373 - DNA, 19 bp, Mus musculus
  siRNA target sequence for Pter (NM_008961.1,587-605).
caagtgtggagttattgga

SEQ ID NO: 559374 - DNA, 19 bp, Mus musculus
  siRNA target sequence for Pter (NM_008961.1,635-653).
cagcgagagaaagatactt

SEQ ID NO: 559375 - DNA, 19 bp, Mus musculus
  siRNA target sequence for Pter (NM_008961.1,791-809).
ccttgacaggactatattt

SEQ ID NO: 559376 - DNA, 19 bp, Mus musculus
  siRNA target sequence for Pter (NM_008961.1,795-813).
gacaggactatatttgata

SEQ ID NO: 559377 - DNA, 19 bp, Mus musculus
  siRNA target sequence for Pter (NM_008961.1,799-817).
ggactatatttgataagaa

SEQ ID NO: 559378 - DNA, 19 bp, Mus musculus
  siRNA target sequence for Pter (NM_008961.1,845-863).
ctgctacttggaatacgat

SEQ ID NO: 559379 - DNA, 19 bp, Mus musculus
  siRNA target sequence for Pter (NM_008961.1,855-873).
gaatacgatctctttggta

SEQ ID NO: 559380 - DNA, 19 bp, Mus musculus
  siRNA target sequence for Pter (NM_008961.1,870-888).
ggtacggaactccttaatt

SEQ ID NO: 559381 - DNA, 19 bp, Mus musculus
  siRNA target sequence for Pter (NM_008961.1,909-927).
gatatgcctgatgataaca

SEQ ID NO: 559382 - DNA, 19 bp, Mus musculus
  siRNA target sequence for Pter (NM_008961.1,931-949).
gaattagaagggtccattt

SEQ ID NO: 559383 - DNA, 19 bp, Mus musculus
  siRNA target sequence for Pter (NM_008961.1,937-955).
gaagggtccattttctagt

SEQ ID NO: 559384 - DNA, 19 bp, Mus musculus
  siRNA target sequence for Pter (NM_008961.1,1090-1108).
ctgagagggtgcttgacaa

SEQ ID NO: 559385 - DNA, 19 bp, Mus musculus
  siRNA target sequence for Pter (NM_008961.1,1094-1112).
gagggtgcttgacaagata

SEQ ID NO: 559386 - DNA, 19 bp, Mus musculus
  siRNA target sequence for Pter (NM_008961.1,1096-1114).
gggtgcttgacaagatact

SEQ ID NO: 559387 - DNA, 19 bp, Mus musculus
  siRNA target sequence for Pter (NM_008961.1,1098-1116).
gtgcttgacaagatactca

SEQ ID NO: 559388 - DNA, 19 bp, Mus musculus
  siRNA target sequence for Pter (NM_008961.1,1131-1149).
caatggctgacttttaaat

SEQ ID NO: 559389 - DNA, 19 bp, Mus musculus
  siRNA target sequence for Ptprg (NM_008981.1,252-270).
gaaccgtgttggtggattt

SEQ ID NO: 559390 - DNA, 19 bp, Mus musculus
  siRNA target sequence for Ptprg (NM_008981.1,311-329).
gtgcttcccggcattgact

SEQ ID NO: 559391 - DNA, 19 bp, Mus musculus
  siRNA target sequence for Ptprg (NM_008981.1,476-494).
cagccatcagtctcctata

SEQ ID NO: 559392 - DNA, 19 bp, Mus musculus
  siRNA target sequence for Ptprg (NM_008981.1,485-503).
gtctcctatagacatttta

SEQ ID NO: 559393 - DNA, 19 bp, Mus musculus
  siRNA target sequence for Ptprg (NM_008981.1,487-505).
ctcctatagacattttaga

SEQ ID NO: 559394 - DNA, 19 bp, Mus musculus
  siRNA target sequence for Ptprg (NM_008981.1,513-531).
gctcgcgttggcgatgaat

SEQ ID NO: 559395 - DNA, 19 bp, Mus musculus
  siRNA target sequence for Ptprg (NM_008981.1,514-532).
ctcgcgttggcgatgaata

SEQ ID NO: 559396 - DNA, 19 bp, Mus musculus
  siRNA target sequence for Ptprg (NM_008981.1,517-535).
gcgttggcgatgaatacca

SEQ ID NO: 559397 - DNA, 19 bp, Mus musculus
  siRNA target sequence for Ptprg (NM_008981.1,533-551).
ccaggagcttcaacttgat

SEQ ID NO: 559398 - DNA, 19 bp, Mus musculus
  siRNA target sequence for Ptprg (NM_008981.1,543-561).
caacttgatgggtttgaca

SEQ ID NO: 559399 - DNA, 19 bp, Mus musculus
  siRNA target sequence for Ptprg (NM_008981.1,558-576).
gacaacgagtcctctaaca

SEQ ID NO: 559400 - DNA, 19 bp, Mus musculus
  siRNA target sequence for Ptprg (NM_008981.1,564-582).
gagtcctctaacaaaacct

SEQ ID NO: 559401 - DNA, 19 bp, Mus musculus
  siRNA target sequence for Ptprg (NM_008981.1,614-632).
cctgctgaaagacgattat

SEQ ID NO: 559402 - DNA, 19 bp, Mus musculus
  siRNA target sequence for Ptprg (NM_008981.1,615-633).
ctgctgaaagacgattatt

SEQ ID NO: 559403 - DNA, 19 bp, Mus musculus
  siRNA target sequence for Ptprg (NM_008981.1,617-635).
gctgaaagacgattatttt

SEQ ID NO: 559404 - DNA, 19 bp, Mus musculus
  siRNA target sequence for Ptprg (NM_008981.1,782-800).
cgactttgacagctttcaa

SEQ ID NO: 559405 - DNA, 19 bp, Mus musculus
  siRNA target sequence for Ptprg (NM_008981.1,828-846).
ggagctatggccatatttt

SEQ ID NO: 559406 - DNA, 19 bp, Mus musculus
  siRNA target sequence for Ptprg (NM_008981.1,829-847).
gagctatggccatattttt

SEQ ID NO: 559407 - DNA, 19 bp, Mus musculus
  siRNA target sequence for Ptprg (NM_008981.1,832-850).
ctatggccatatttttcca

SEQ ID NO: 559408 - DNA, 19 bp, Mus musculus
  siRNA target sequence for Ptprg (NM_008981.1,852-870).
gtcagtccgagggacaatt

SEQ ID NO: 559409 - DNA, 19 bp, Mus musculus
  siRNA target sequence for Ptprg (NM_008981.1,854-872).
cagtccgagggacaattct

SEQ ID NO: 559410 - DNA, 19 bp, Mus musculus
  siRNA target sequence for Ptprg (NM_008981.1,871-889).
ctgcactggatcctattat

SEQ ID NO: 559411 - DNA, 19 bp, Mus musculus
  siRNA target sequence for Ptprg (NM_008981.1,965-983).
cgcatccctggggagttat

SEQ ID NO: 559412 - DNA, 19 bp, Mus musculus
  siRNA target sequence for Ptprg (NM_008981.1,966-984).
gcatccctggggagttatt

SEQ ID NO: 559413 - DNA, 19 bp, Mus musculus
  siRNA target sequence for Ptprg (NM_008981.1,967-985).
catccctggggagttatta

SEQ ID NO: 559414 - DNA, 19 bp, Mus musculus
  siRNA target sequence for Ptprg (NM_008981.1,1009-1027).
cgccaccctgtagtgaaat

SEQ ID NO: 559415 - DNA, 19 bp, Mus musculus
  siRNA target sequence for Ptprg (NM_008981.1,1012-1030).
caccctgtagtgaaatagt

SEQ ID NO: 559416 - DNA, 19 bp, Mus musculus
  siRNA target sequence for Ptprg (NM_008981.1,1131-1149).
gtggagtacctgagaaata

SEQ ID NO: 559417 - DNA, 19 bp, Mus musculus
  siRNA target sequence for Ptprg (NM_008981.1,1252-1270).
gcacagaagcctctaaagt

SEQ ID NO: 559418 - DNA, 19 bp, Mus musculus
  siRNA target sequence for Ptprg (NM_008981.1,1336-1354).
ggagccaacctgaaaccat

SEQ ID NO: 559419 - DNA, 19 bp, Mus musculus
  siRNA target sequence for Ptprg (NM_008981.1,1388-1406).
ctatagctggaccaagaat

SEQ ID NO: 559420 - DNA, 19 bp, Mus musculus
  siRNA target sequence for Ptprg (NM_008981.1,1439-1457).
cagtgacaaggacttgaaa

SEQ ID NO: 559421 - DNA, 19 bp, Mus musculus
  siRNA target sequence for Ptprg (NM_008981.1,1477-1495).
cacccgatagcctttacct

SEQ ID NO: 559422 - DNA, 19 bp, Mus musculus
  siRNA target sequence for Ptprg (NM_008981.1,1479-1497).
cccgatagcctttacctat

SEQ ID NO: 559423 - DNA, 19 bp, Mus musculus
  siRNA target sequence for Ptprg (NM_008981.1,1480-1498).
ccgatagcctttacctatt

SEQ ID NO: 559424 - DNA, 19 bp, Mus musculus
  siRNA target sequence for Ptprg (NM_008981.1,1544-1562).
ccagacaatgctctttcaa

SEQ ID NO: 559425 - DNA, 19 bp, Mus musculus
  siRNA target sequence for Ptprg (NM_008981.1,1553-1571).
gctctttcaagctaatact

SEQ ID NO: 559426 - DNA, 19 bp, Mus musculus
  siRNA target sequence for Ptprg (NM_008981.1,2141-2159).
gggaggacatcagactata

SEQ ID NO: 559427 - DNA, 19 bp, Mus musculus
  siRNA target sequence for Ptprg (NM_008981.1,2265-2283).
gccacagaggaacattatt

SEQ ID NO: 559428 - DNA, 19 bp, Mus musculus
  siRNA target sequence for Ptprg (NM_008981.1,2302-2320).
ggcccgaaatgccatctaa

SEQ ID NO: 559429 - DNA, 19 bp, Mus musculus
  siRNA target sequence for Ptprg (NM_008981.1,2303-2321).
gcccgaaatgccatctaaa

SEQ ID NO: 559430 - DNA, 19 bp, Mus musculus
  siRNA target sequence for Ptprg (NM_008981.1,2305-2323).
ccgaaatgccatctaaaaa

SEQ ID NO: 559431 - DNA, 19 bp, Mus musculus
  siRNA target sequence for Ptprg (NM_008981.1,2333-2351).
ccgaggggaccgattttct

SEQ ID NO: 559432 - DNA, 19 bp, Mus musculus
  siRNA target sequence for Ptprg (NM_008981.1,2335-2353).
gaggggaccgattttctga

SEQ ID NO: 559433 - DNA, 19 bp, Mus musculus
  siRNA target sequence for Ptprg (NM_008981.1,2344-2362).
gattttctgaggatagcaa

SEQ ID NO: 559434 - DNA, 19 bp, Mus musculus
  siRNA target sequence for Ptprg (NM_008981.1,2512-2530).
ggagagggtgtaacaaaat

SEQ ID NO: 559435 - DNA, 19 bp, Mus musculus
  siRNA target sequence for Ptprg (NM_008981.1,2513-2531).
gagagggtgtaacaaaata

SEQ ID NO: 559436 - DNA, 19 bp, Mus musculus
  siRNA target sequence for Ptprg (NM_008981.1,2652-2670).
cgggtggtccccaacgaaa

SEQ ID NO: 559437 - DNA, 19 bp, Mus musculus
  siRNA target sequence for Ptprg (NM_008981.1,2657-2675).
ggtccccaacgaaagtgtt

SEQ ID NO: 559438 - DNA, 19 bp, Mus musculus
  siRNA target sequence for Ptprg (NM_008981.1,2662-2680).
ccaacgaaagtgttcctat

SEQ ID NO: 559439 - DNA, 19 bp, Mus musculus
  siRNA target sequence for Ptprg (NM_008981.1,2663-2681).
caacgaaagtgttcctatt

SEQ ID NO: 559440 - DNA, 19 bp, Mus musculus
  siRNA target sequence for Ptprg (NM_008981.1,2712-2730).
cctgtcaaacagtttggta

SEQ ID NO: 559441 - DNA, 19 bp, Mus musculus
  siRNA target sequence for Ptprg (NM_008981.1,2733-2751).
cacatcggtgagctctatt

SEQ ID NO: 559442 - DNA, 19 bp, Mus musculus
  siRNA target sequence for Ptprg (NM_008981.1,2738-2756).
cggtgagctctattccaat

SEQ ID NO: 559443 - DNA, 19 bp, Mus musculus
  siRNA target sequence for Ptprg (NM_008981.1,2739-2757).
ggtgagctctattccaata

SEQ ID NO: 559444 - DNA, 19 bp, Mus musculus
  siRNA target sequence for Ptprg (NM_008981.1,2763-2781).
catggcttctcggaagatt

SEQ ID NO: 559445 - DNA, 19 bp, Mus musculus
  siRNA target sequence for Ptprg (NM_008981.1,2767-2785).
gcttctcggaagattttga

SEQ ID NO: 559446 - DNA, 19 bp, Mus musculus
  siRNA target sequence for Ptprg (NM_008981.1,2796-2814).
cgctgtacagctgatatga

SEQ ID NO: 559447 - DNA, 19 bp, Mus musculus
  siRNA target sequence for Ptprg (NM_008981.1,2797-2815).
gctgtacagctgatatgaa

SEQ ID NO: 559448 - DNA, 19 bp, Mus musculus
  siRNA target sequence for Ptprg (NM_008981.1,2800-2818).
gtacagctgatatgaacat

SEQ ID NO: 559449 - DNA, 19 bp, Mus musculus
  siRNA target sequence for Ptprg (NM_008981.1,2833-2851).
ccaatcatccggataacaa

SEQ ID NO: 559450 - DNA, 19 bp, Mus musculus
  siRNA target sequence for Ptprg (NM_008981.1,2841-2859).
ccggataacaagcacaaaa

SEQ ID NO: 559451 - DNA, 19 bp, Mus musculus
  siRNA target sequence for Ptprg (NM_008981.1,2870-2888).
caacattttagcatatgat

SEQ ID NO: 559452 - DNA, 19 bp, Mus musculus
  siRNA target sequence for Ptprg (NM_008981.1,2933-2951).
gcacagcgactacattaat

SEQ ID NO: 559453 - DNA, 19 bp, Mus musculus
  siRNA target sequence for Ptprg (NM_008981.1,2938-2956).
gcgactacattaatgcaaa

SEQ ID NO: 559454 - DNA, 19 bp, Mus musculus
  siRNA target sequence for Ptprg (NM_008981.1,2953-2971).
caaactatgtcgatggtta

SEQ ID NO: 559455 - DNA, 19 bp, Mus musculus
  siRNA target sequence for Ptprg (NM_008981.1,2994-3012).
gccacccagggacctttaa

SEQ ID NO: 559456 - DNA, 19 bp, Mus musculus
  siRNA target sequence for Ptprg (NM_008981.1,3051-3069).
caaaacacgggaatcatca

SEQ ID NO: 559457 - DNA, 19 bp, Mus musculus
  siRNA target sequence for Ptprg (NM_008981.1,3058-3076).
cgggaatcatcatcatgat

SEQ ID NO: 559458 - DNA, 19 bp, Mus musculus
  siRNA target sequence for Ptprg (NM_008981.1,3138-3156).
gaggagtacgggaacatta

SEQ ID NO: 559459 - DNA, 19 bp, Mus musculus
  siRNA target sequence for Ptprg (NM_008981.1,3140-3158).
ggagtacgggaacattatt

SEQ ID NO: 559460 - DNA, 19 bp, Mus musculus
  siRNA target sequence for Ptprg (NM_008981.1,3196-3214).
ccgtccgtcgtctttcagt

SEQ ID NO: 559461 - DNA, 19 bp, Mus musculus
  siRNA target sequence for Ptprg (NM_008981.1,3197-3215).
cgtccgtcgtctttcagtt

SEQ ID NO: 559462 - DNA, 19 bp, Mus musculus
  siRNA target sequence for Ptprg (NM_008981.1,3198-3216).
gtccgtcgtctttcagtta

SEQ ID NO: 559463 - DNA, 19 bp, Mus musculus
  siRNA target sequence for Ptprg (NM_008981.1,3200-3218).
ccgtcgtctttcagttaga

SEQ ID NO: 559464 - DNA, 19 bp, Mus musculus
  siRNA target sequence for Ptprg (NM_008981.1,3201-3219).
cgtcgtctttcagttagaa

SEQ ID NO: 559465 - DNA, 19 bp, Mus musculus
  siRNA target sequence for Ptprg (NM_008981.1,3213-3231).
gttagaaacacaaaagtga

SEQ ID NO: 559466 - DNA, 19 bp, Mus musculus
  siRNA target sequence for Ptprg (NM_008981.1,3251-3269).
ccccaaaggtcgtcagaat

SEQ ID NO: 559467 - DNA, 19 bp, Mus musculus
  siRNA target sequence for Ptprg (NM_008981.1,3582-3600).
gccattctcgggaaggaaa

SEQ ID NO: 559468 - DNA, 19 bp, Mus musculus
  siRNA target sequence for Ptprg (NM_008981.1,3621-3639).
ctgcatagctatgttaaca

SEQ ID NO: 559469 - DNA, 19 bp, Mus musculus
  siRNA target sequence for Ptprg (NM_008981.1,3692-3710).
gctgatcacgcagtgtaat

SEQ ID NO: 559470 - DNA, 19 bp, Mus musculus
  siRNA target sequence for Ptprg (NM_008981.1,3700-3718).
cgcagtgtaatgcaaagta

SEQ ID NO: 559471 - DNA, 19 bp, Mus musculus
  siRNA target sequence for Ptprg (NM_008981.1,3701-3719).
gcagtgtaatgcaaagtat

SEQ ID NO: 559472 - DNA, 19 bp, Mus musculus
  siRNA target sequence for Ptprg (NM_008981.1,3908-3926).
gccacacactacgaaagat

SEQ ID NO: 559473 - DNA, 19 bp, Mus musculus
  siRNA target sequence for Ptprg (NM_008981.1,3909-3927).
ccacacactacgaaagatt

SEQ ID NO: 559474 - DNA, 19 bp, Mus musculus
  siRNA target sequence for Ptprg (NM_008981.1,3934-3952).
gaatgatttgggatcataa

SEQ ID NO: 559475 - DNA, 19 bp, Mus musculus
  siRNA target sequence for Ptprg (NM_008981.1,4018-4036).
cgagtcgtgaggaatccat

SEQ ID NO: 559476 - DNA, 19 bp, Mus musculus
  siRNA target sequence for Ptprg (NM_008981.1,4023-4041).
cgtgaggaatccatgaact

SEQ ID NO: 559477 - DNA, 19 bp, Mus musculus
  siRNA target sequence for Ptprg (NM_008981.1,4084-4102).
gcctctcgaatgaagaaca

SEQ ID NO: 559478 - DNA, 19 bp, Mus musculus
  siRNA target sequence for Ptprg (NM_008981.1,4085-4103).
cctctcgaatgaagaacaa

SEQ ID NO: 559479 - DNA, 19 bp, Mus musculus
  siRNA target sequence for Ptprg (NM_008981.1,4155-4173).
gaggttcggcactttcagt

SEQ ID NO: 559480 - DNA, 19 bp, Mus musculus
  siRNA target sequence for Ptprg (NM_008981.1,4190-4208).
cccagatgcccctataagt

SEQ ID NO: 559481 - DNA, 19 bp, Mus musculus
  siRNA target sequence for Ptprg (NM_008981.1,4191-4209).
ccagatgcccctataagta

SEQ ID NO: 559482 - DNA, 19 bp, Mus musculus
  siRNA target sequence for Ptprg (NM_008981.1,4194-4212).
gatgcccctataagtagta

SEQ ID NO: 559483 - DNA, 19 bp, Mus musculus
  siRNA target sequence for Ptprg (NM_008981.1,4210-4228).
gtaccttcgaactgatcaa

SEQ ID NO: 559484 - DNA, 19 bp, Mus musculus
  siRNA target sequence for Ptprg (NM_008981.1,4213-4231).
ccttcgaactgatcaatgt

SEQ ID NO: 559485 - DNA, 19 bp, Mus musculus
  siRNA target sequence for Ptprg (NM_008981.1,4256-4274).
ggatggccccaccattgtt

SEQ ID NO: 559486 - DNA, 19 bp, Mus musculus
  siRNA target sequence for Ptprg (NM_008981.1,4262-4280).
ccccaccattgttcatgat

SEQ ID NO: 559487 - DNA, 19 bp, Mus musculus
  siRNA target sequence for Ptprg (NM_008981.1,4264-4282).
ccaccattgttcatgatga

SEQ ID NO: 559488 - DNA, 19 bp, Mus musculus
  siRNA target sequence for Ptprg (NM_008981.1,4368-4386).
caggtggcaaaaatgatca

SEQ ID NO: 559489 - DNA, 19 bp, Mus musculus
  siRNA target sequence for Ptprg (NM_008981.1,4370-4388).
ggtggcaaaaatgatcaat

SEQ ID NO: 559490 - DNA, 19 bp, Mus musculus
  siRNA target sequence for Ptprg (NM_008981.1,4375-4393).
caaaaatgatcaatcttat

SEQ ID NO: 559491 - DNA, 19 bp, Mus musculus
  siRNA target sequence for Ptprg (NM_008981.1,4402-4420).
gagtattcacagacattga

SEQ ID NO: 559492 - DNA, 19 bp, Mus musculus
  siRNA target sequence for Ptprg (NM_008981.1,4411-4429).
cagacattgaacaatacca

SEQ ID NO: 559493 - DNA, 19 bp, Mus musculus
  siRNA target sequence for Ptprg (NM_008981.1,4443-4461).
gcaatgctcagcttgatca

SEQ ID NO: 559494 - DNA, 19 bp, Mus musculus
  siRNA target sequence for Ptprg (NM_008981.1,4453-4471).
gcttgatcagtactaaaga

SEQ ID NO: 559495 - DNA, 19 bp, Mus musculus
  siRNA target sequence for Ptprg (NM_008981.1,4460-4478).
cagtactaaagaaaatgga

SEQ ID NO: 559496 - DNA, 19 bp, Mus musculus
  siRNA target sequence for Ptprg (NM_008981.1,4485-4503).
cccatgaccggggacaaaa

SEQ ID NO: 559497 - DNA, 19 bp, Mus musculus
  siRNA target sequence for Ptprg (NM_008981.1,4486-4504).
ccatgaccggggacaaaaa

SEQ ID NO: 559498 - DNA, 19 bp, Mus musculus
  siRNA target sequence for RFWD1 (NM_153792.1,474-492).
gagccggagccgttggtat

SEQ ID NO: 559499 - DNA, 19 bp, Mus musculus
  siRNA target sequence for RFWD1 (NM_153792.1,476-494).
gccggagccgttggtattt

SEQ ID NO: 559500 - DNA, 19 bp, Mus musculus
  siRNA target sequence for RFWD1 (NM_153792.1,671-689).
gattggagagctcttcata

SEQ ID NO: 559501 - DNA, 19 bp, Mus musculus
  siRNA target sequence for RFWD1 (NM_153792.1,675-693).
ggagagctcttcatacatt

SEQ ID NO: 559502 - DNA, 19 bp, Mus musculus
  siRNA target sequence for RFWD1 (NM_153792.1,791-809).
ggaccacgagagtagttgt

SEQ ID NO: 559503 - DNA, 19 bp, Mus musculus
  siRNA target sequence for RFWD1 (NM_153792.1,847-865).
gcccaccccttctcaagat

SEQ ID NO: 559504 - DNA, 19 bp, Mus musculus
  siRNA target sequence for RFWD1 (NM_153792.1,853-871).
cccttctcaagatgaatct

SEQ ID NO: 559505 - DNA, 19 bp, Mus musculus
  siRNA target sequence for RFWD1 (NM_153792.1,920-938).
gtacgggtgcacatttatt

SEQ ID NO: 559506 - DNA, 19 bp, Mus musculus
  siRNA target sequence for RFWD1 (NM_153792.1,950-968).
cacctatgagacacactta

SEQ ID NO: 559507 - DNA, 19 bp, Mus musculus
  siRNA target sequence for RFWD1 (NM_153792.1,952-970).
cctatgagacacacttaga

SEQ ID NO: 559508 - DNA, 19 bp, Mus musculus
  siRNA target sequence for RFWD1 (NM_153792.1,953-971).
ctatgagacacacttagaa

SEQ ID NO: 559509 - DNA, 19 bp, Mus musculus
  siRNA target sequence for RFWD1 (NM_153792.1,1124-1142).
gagccttgagcttaagttt

SEQ ID NO: 559510 - DNA, 19 bp, Mus musculus
  siRNA target sequence for RFWD1 (NM_153792.1,1202-1220).
cgcgtccatgctgaatgat

SEQ ID NO: 559511 - DNA, 19 bp, Mus musculus
  siRNA target sequence for RFWD1 (NM_153792.1,1253-1271).
gggtatccttggatcctat

SEQ ID NO: 559512 - DNA, 19 bp, Mus musculus
  siRNA target sequence for RFWD1 (NM_153792.1,1371-1389).
ggctcttctgacaagacaa

SEQ ID NO: 559513 - DNA, 19 bp, Mus musculus
  siRNA target sequence for RFWD1 (NM_153792.1,1375-1393).
cttctgacaagacaatcaa

SEQ ID NO: 559514 - DNA, 19 bp, Mus musculus
  siRNA target sequence for RFWD1 (NM_153792.1,1380-1398).
gacaagacaatcaaggtat

SEQ ID NO: 559515 - DNA, 19 bp, Mus musculus
  siRNA target sequence for RFWD1 (NM_153792.1,1535-1553).
cctacagaaggtgaatact

SEQ ID NO: 559516 - DNA, 19 bp, Mus musculus
  siRNA target sequence for RFWD1 (NM_153792.1,1536-1554).
ctacagaaggtgaatacta

SEQ ID NO: 559517 - DNA, 19 bp, Mus musculus
  siRNA target sequence for RFWD1 (NM_153792.1,1647-1665).
gtgggcactgagctaaagt

SEQ ID NO: 559518 - DNA, 19 bp, Mus musculus
  siRNA target sequence for RFWD1 (NM_153792.1,1858-1876).
cctatgagaacctcattca

SEQ ID NO: 559519 - DNA, 19 bp, Mus musculus
  siRNA target sequence for RFWD1 (NM_153792.1,1859-1877).
ctatgagaacctcattcat

SEQ ID NO: 559520 - DNA, 19 bp, Mus musculus
  siRNA target sequence for RFWD1 (NM_153792.1,1875-1893).
catgtgtgggacattgaat

SEQ ID NO: 559521 - DNA, 19 bp, Mus musculus
  siRNA target sequence for RFWD1 (NM_153792.1,1941-1959).
gccctggcagtcatttcaa

SEQ ID NO: 559522 - DNA, 19 bp, Mus musculus
  siRNA target sequence for RFWD1 (NM_153792.1,1962-1980).
ccagaccagaccaaagtct

SEQ ID NO: 559523 - DNA, 19 bp, Mus musculus
  siRNA target sequence for RFWD1 (NM_153792.1,2052-2070).
cgccatcagggcagtgtaa

SEQ ID NO: 559524 - DNA, 19 bp, Mus musculus
  siRNA target sequence for RFWD1 (NM_153792.1,2054-2072).
ccatcagggcagtgtaact

SEQ ID NO: 559525 - DNA, 19 bp, Mus musculus
  siRNA target sequence for Rnpep (NM_145417.1,552-570).
cagggtcaggcggtcttaa

SEQ ID NO: 559526 - DNA, 19 bp, Mus musculus
  siRNA target sequence for Rnpep (NM_145417.1,613-631).
gcacgtattcggctcttat

SEQ ID NO: 559527 - DNA, 19 bp, Mus musculus
  siRNA target sequence for Rnpep (NM_145417.1,614-632).
cacgtattcggctcttatt

SEQ ID NO: 559528 - DNA, 19 bp, Mus musculus
  siRNA target sequence for Rnpep (NM_145417.1,616-634).
cgtattcggctcttattga

SEQ ID NO: 559529 - DNA, 19 bp, Mus musculus
  siRNA target sequence for Rnpep (NM_145417.1,685-703).
gaggaccaaataagttctt

SEQ ID NO: 559530 - DNA, 19 bp, Mus musculus
  siRNA target sequence for Rnpep (NM_145417.1,687-705).
ggaccaaataagttcttct

SEQ ID NO: 559531 - DNA, 19 bp, Mus musculus
  siRNA target sequence for Rnpep (NM_145417.1,726-744).
ccctcctatctgatagctt

SEQ ID NO: 559532 - DNA, 19 bp, Mus musculus
  siRNA target sequence for Rnpep (NM_145417.1,727-745).
cctcctatctgatagcttt

SEQ ID NO: 559533 - DNA, 19 bp, Mus musculus
  siRNA target sequence for Rnpep (NM_145417.1,838-856).
gtggggtcatagaagaatt

SEQ ID NO: 559534 - DNA, 19 bp, Mus musculus
  siRNA target sequence for Rnpep (NM_145417.1,875-893).
gcttttcggaccctatgtt

SEQ ID NO: 559535 - DNA, 19 bp, Mus musculus
  siRNA target sequence for Rnpep (NM_145417.1,876-894).
cttttcggaccctatgttt

SEQ ID NO: 559536 - DNA, 19 bp, Mus musculus
  siRNA target sequence for Rnpep (NM_145417.1,887-905).
ctatgtttggggaaggtat

SEQ ID NO: 559537 - DNA, 19 bp, Mus musculus
  siRNA target sequence for Rnpep (NM_145417.1,901-919).
ggtatgacttgctctttat

SEQ ID NO: 559538 - DNA, 19 bp, Mus musculus
  siRNA target sequence for Rnpep (NM_145417.1,920-938).
gccaccgtcctttccattt

SEQ ID NO: 559539 - DNA, 19 bp, Mus musculus
  siRNA target sequence for Rnpep (NM_145417.1,1025-1043).
gatctcccacagttggttt

SEQ ID NO: 559540 - DNA, 19 bp, Mus musculus
  siRNA target sequence for Rnpep (NM_145417.1,1072-1090).
gggagttctggctcaatga

SEQ ID NO: 559541 - DNA, 19 bp, Mus musculus
  siRNA target sequence for Rnpep (NM_145417.1,1073-1091).
ggagttctggctcaatgaa

SEQ ID NO: 559542 - DNA, 19 bp, Mus musculus
  siRNA target sequence for Rnpep (NM_145417.1,1133-1151).
gtttggagctgcttacact

SEQ ID NO: 559543 - DNA, 19 bp, Mus musculus
  siRNA target sequence for Rnpep (NM_145417.1,1185-1203).
cgtcagcacatgaatgtct

SEQ ID NO: 559544 - DNA, 19 bp, Mus musculus
  siRNA target sequence for Rnpep (NM_145417.1,1229-1247).
gctccgggtgaagattgaa

SEQ ID NO: 559545 - DNA, 19 bp, Mus musculus
  siRNA target sequence for Rnpep (NM_145417.1,1344-1362).
cagtttgacaagtttctca

SEQ ID NO: 559546 - DNA, 19 bp, Mus musculus
  siRNA target sequence for Rnpep (NM_145417.1,1365-1383).
gcctatgtagatgagttta

SEQ ID NO: 559547 - DNA, 19 bp, Mus musculus
  siRNA target sequence for Rnpep (NM_145417.1,1367-1385).
ctatgtagatgagtttaaa

SEQ ID NO: 559548 - DNA, 19 bp, Mus musculus
  siRNA target sequence for Rnpep (NM_145417.1,1374-1392).
gatgagtttaaattccaaa

SEQ ID NO: 559549 - DNA, 19 bp, Mus musculus
  siRNA target sequence for Rnpep (NM_145417.1,1466-1484).
cattccaggttttgagttt

SEQ ID NO: 559550 - DNA, 19 bp, Mus musculus
  siRNA target sequence for Rnpep (NM_145417.1,1537-1555).
ctggggactcactcatgaa

SEQ ID NO: 559551 - DNA, 19 bp, Mus musculus
  siRNA target sequence for Rnpep (NM_145417.1,1614-1632).
gaagccgtggccatctcta

SEQ ID NO: 559552 - DNA, 19 bp, Mus musculus
  siRNA target sequence for Rnpep (NM_145417.1,1650-1668).
cttgtctacttcctagata

SEQ ID NO: 559553 - DNA, 19 bp, Mus musculus
  siRNA target sequence for Rnpep (NM_145417.1,1653-1671).
gtctacttcctagataaga

SEQ ID NO: 559554 - DNA, 19 bp, Mus musculus
  siRNA target sequence for Rnpep (NM_145417.1,1752-1770).
gctgagttacggctaagat

SEQ ID NO: 559555 - DNA, 19 bp, Mus musculus
  siRNA target sequence for Rnpep (NM_145417.1,1764-1782).
ctaagatggggccaaatca

SEQ ID NO: 559556 - DNA, 19 bp, Mus musculus
  siRNA target sequence for Rnpep (NM_145417.1,1771-1789).
ggggccaaatcatccttaa

SEQ ID NO: 559557 - DNA, 19 bp, Mus musculus
  siRNA target sequence for Rnpep (NM_145417.1,1773-1791).
ggccaaatcatccttaaga

SEQ ID NO: 559558 - DNA, 19 bp, Mus musculus
  siRNA target sequence for Rnpep (NM_145417.1,1774-1792).
gccaaatcatccttaagaa

SEQ ID NO: 559559 - DNA, 19 bp, Mus musculus
  siRNA target sequence for Rnpep (NM_145417.1,1775-1793).
ccaaatcatccttaagaat

SEQ ID NO: 559560 - DNA, 19 bp, Mus musculus
  siRNA target sequence for Rnpep (NM_145417.1,1949-1967).
cagcaacgtcgtcaactat

SEQ ID NO: 559561 - DNA, 19 bp, Mus musculus
  siRNA target sequence for Rnpep (NM_145417.1,1951-1969).
gcaacgtcgtcaactatgt

SEQ ID NO: 559562 - DNA, 19 bp, Mus musculus
  siRNA target sequence for Rtn4ip1 (NM_130892.2,475-493).
ctgtgtacttagaagaagt

SEQ ID NO: 559563 - DNA, 19 bp, Mus musculus
  siRNA target sequence for Rtn4ip1 (NM_130892.2,586-604).
gcccgcttgggtgatagat

SEQ ID NO: 559564 - DNA, 19 bp, Mus musculus
  siRNA target sequence for Rtn4ip1 (NM_130892.2,587-605).
cccgcttgggtgatagata

SEQ ID NO: 559565 - DNA, 19 bp, Mus musculus
  siRNA target sequence for Rtn4ip1 (NM_130892.2,588-606).
ccgcttgggtgatagataa

SEQ ID NO: 559566 - DNA, 19 bp, Mus musculus
  siRNA target sequence for Rtn4ip1 (NM_130892.2,589-607).
cgcttgggtgatagataaa

SEQ ID NO: 559567 - DNA, 19 bp, Mus musculus
  siRNA target sequence for Rtn4ip1 (NM_130892.2,590-608).
gcttgggtgatagataaat

SEQ ID NO: 559568 - DNA, 19 bp, Mus musculus
  siRNA target sequence for Rtn4ip1 (NM_130892.2,591-609).
cttgggtgatagataaata

SEQ ID NO: 559569 - DNA, 19 bp, Mus musculus
  siRNA target sequence for Rtn4ip1 (NM_130892.2,630-648).
gattcacccagaacatgat

SEQ ID NO: 559570 - DNA, 19 bp, Mus musculus
  siRNA target sequence for Rtn4ip1 (NM_130892.2,638-656).
cagaacatgatgttaccta

SEQ ID NO: 559571 - DNA, 19 bp, Mus musculus
  siRNA target sequence for Rtn4ip1 (NM_130892.2,653-671).
cctatcatacactatccaa

SEQ ID NO: 559572 - DNA, 19 bp, Mus musculus
  siRNA target sequence for Rtn4ip1 (NM_130892.2,654-672).
ctatcatacactatccaaa

SEQ ID NO: 559573 - DNA, 19 bp, Mus musculus
  siRNA target sequence for Rtn4ip1 (NM_130892.2,689-707).
gtccacgctgccagtgtaa

SEQ ID NO: 559574 - DNA, 19 bp, Mus musculus
  siRNA target sequence for Rtn4ip1 (NM_130892.2,691-709).
ccacgctgccagtgtaaat

SEQ ID NO: 559575 - DNA, 19 bp, Mus musculus
  siRNA target sequence for Rtn4ip1 (NM_130892.2,694-712).
cgctgccagtgtaaatcct

SEQ ID NO: 559576 - DNA, 19 bp, Mus musculus
  siRNA target sequence for Rtn4ip1 (NM_130892.2,695-713).
gctgccagtgtaaatccta

SEQ ID NO: 559577 - DNA, 19 bp, Mus musculus
  siRNA target sequence for Rtn4ip1 (NM_130892.2,704-722).
gtaaatcctatagatgtta

SEQ ID NO: 559578 - DNA, 19 bp, Mus musculus
  siRNA target sequence for Rtn4ip1 (NM_130892.2,710-728).
cctatagatgttaatatga

SEQ ID NO: 559579 - DNA, 19 bp, Mus musculus
  siRNA target sequence for Rtn4ip1 (NM_130892.2,740-758).
ggagccacagccctaaata

SEQ ID NO: 559580 - DNA, 19 bp, Mus musculus
  siRNA target sequence for Rtn4ip1 (NM_130892.2,764-782).
cgtgatcccctgcatatga

SEQ ID NO: 559581 - DNA, 19 bp, Mus musculus
  siRNA target sequence for Rtn4ip1 (NM_130892.2,846-864).
gtgggcttgatgtgaagta

SEQ ID NO: 559582 - DNA, 19 bp, Mus musculus
  siRNA target sequence for Rtn4ip1 (NM_130892.2,911-929).
caaggcactctctcagaat

SEQ ID NO: 559583 - DNA, 19 bp, Mus musculus
  siRNA target sequence for Rtn4ip1 (NM_130892.2,942-960).
gtgggaatgaggtttcaca

SEQ ID NO: 559584 - DNA, 19 bp, Mus musculus
  siRNA target sequence for Rtn4ip1 (NM_130892.2,964-982).
gcccaaatcgcttactcat

SEQ ID NO: 559585 - DNA, 19 bp, Mus musculus
  siRNA target sequence for Rtn4ip1 (NM_130892.2,965-983).
cccaaatcgcttactcata

SEQ ID NO: 559586 - DNA, 19 bp, Mus musculus
  siRNA target sequence for Rtn4ip1 (NM_130892.2,1017-1035).
cggcctggtctgccataaa

SEQ ID NO: 559587 - DNA, 19 bp, Mus musculus
  siRNA target sequence for Rtn4ip1 (NM_130892.2,1071-1089).
ggaagcgtgccttaatctt

SEQ ID NO: 559588 - DNA, 19 bp, Mus musculus
  siRNA target sequence for Rtn4ip1 (NM_130892.2,1202-1220).
gcagatgaggtcattgatt

SEQ ID NO: 559589 - DNA, 19 bp, Mus musculus
  siRNA target sequence for Rtn4ip1 (NM_130892.2,1233-1251).
gtgtggaagagcaattgaa

SEQ ID NO: 559590 - DNA, 19 bp, Mus musculus
  siRNA target sequence for Rtn4ip1 (NM_130892.2,1270-1288).
ctttatccttgataacgtt

SEQ ID NO: 559591 - DNA, 19 bp, Mus musculus
  siRNA target sequence for Rtn4ip1 (NM_130892.2,1285-1303).
cgttggtggatctactgaa

SEQ ID NO: 559592 - DNA, 19 bp, Mus musculus
  siRNA target sequence for Rtn4ip1 (NM_130892.2,1305-1323).
catgggctctaaattttct

SEQ ID NO: 559593 - DNA, 19 bp, Mus musculus
  siRNA target sequence for Rtn4ip1 (NM_130892.2,1308-1326).
gggctctaaattttctcaa

SEQ ID NO: 559594 - DNA, 19 bp, Mus musculus
  siRNA target sequence for Rtn4ip1 (NM_130892.2,1313-1331).
ctaaattttctcaagaagt

SEQ ID NO: 559595 - DNA, 19 bp, Mus musculus
  siRNA target sequence for Rtn4ip1 (NM_130892.2,1419-1437).
gagtcaccgtgggtacaaa

SEQ ID NO: 559596 - DNA, 19 bp, Mus musculus
  siRNA target sequence for Rtn4ip1 (NM_130892.2,1456-1474).
gcaaggagtccattacaga

SEQ ID NO: 559597 - DNA, 19 bp, Mus musculus
  siRNA target sequence for Rtn4ip1 (NM_130892.2,1496-1514).
ggtccatatctagatgaaa

SEQ ID NO: 559598 - DNA, 19 bp, Mus musculus
  siRNA target sequence for Rtn4ip1 (NM_130892.2,1497-1515).
gtccatatctagatgaaat

SEQ ID NO: 559599 - DNA, 19 bp, Mus musculus
  siRNA target sequence for Rtn4ip1 (NM_130892.2,1536-1554).
gaaagatccggccagttat

SEQ ID NO: 559600 - DNA, 19 bp, Mus musculus
  siRNA target sequence for Rtn4ip1 (NM_130892.2,1612-1630).
ccacgcccgaggaaagact

SEQ ID NO: 559601 - DNA, 19 bp, Mus musculus
  siRNA target sequence for Rtn4ip1 (NM_130892.2,1627-1645).
gactgtggttaatgtagtt

SEQ ID NO: 559602 - DNA, 19 bp, Mus musculus
  siRNA target sequence for Rufy2 (NM_027425.2,34-52).
gagagagccaacctgttaa

SEQ ID NO: 559603 - DNA, 19 bp, Mus musculus
  siRNA target sequence for Rufy2 (NM_027425.2,57-75).
ggctaaactgagtatcaaa

SEQ ID NO: 559604 - DNA, 19 bp, Mus musculus
  siRNA target sequence for Rufy2 (NM_027425.2,175-193).
ggcctgaaagggagaaaat

SEQ ID NO: 559605 - DNA, 19 bp, Mus musculus
  siRNA target sequence for Rufy2 (NM_027425.2,178-196).
ctgaaagggagaaaatcat

SEQ ID NO: 559606 - DNA, 19 bp, Mus musculus
  siRNA target sequence for Rufy2 (NM_027425.2,363-381).
cgattacttgcgttgctta

SEQ ID NO: 559607 - DNA, 19 bp, Mus musculus
  siRNA target sequence for Rufy2 (NM_027425.2,364-382).
gattacttgcgttgcttaa

SEQ ID NO: 559608 - DNA, 19 bp, Mus musculus
  siRNA target sequence for Rufy2 (NM_027425.2,471-489).
cggcttgaacgtgattgat

SEQ ID NO: 559609 - DNA, 19 bp, Mus musculus
  siRNA target sequence for Rufy2 (NM_027425.2,481-499).
gtgattgatgccaatctgt

SEQ ID NO: 559610 - DNA, 19 bp, Mus musculus
  siRNA target sequence for Rufy2 (NM_027425.2,541-559).
gacttctccatgtacttaa

SEQ ID NO: 559611 - DNA, 19 bp, Mus musculus
  siRNA target sequence for Rufy2 (NM_027425.2,546-564).
ctccatgtacttaaagaat

SEQ ID NO: 559612 - DNA, 19 bp, Mus musculus
  siRNA target sequence for Rufy2 (NM_027425.2,571-589).
gagatcggaaacaaggaaa

SEQ ID NO: 559613 - DNA, 19 bp, Mus musculus
  siRNA target sequence for Rufy2 (NM_027425.2,608-626).
ccatcttagaccaaaagaa

SEQ ID NO: 559614 - DNA, 19 bp, Mus musculus
  siRNA target sequence for Rufy2 (NM_027425.2,685-703).
gtggactcgttagaaaagt

SEQ ID NO: 559615 - DNA, 19 bp, Mus musculus
  siRNA target sequence for Rufy2 (NM_027425.2,687-705).
ggactcgttagaaaagtca

SEQ ID NO: 559616 - DNA, 19 bp, Mus musculus
  siRNA target sequence for Rufy2 (NM_027425.2,710-728).
ctaagctgatcgaagagtt

SEQ ID NO: 559617 - DNA, 19 bp, Mus musculus
  siRNA target sequence for Rufy2 (NM_027425.2,717-735).
gatcgaagagttagcaata

SEQ ID NO: 559618 - DNA, 19 bp, Mus musculus
  siRNA target sequence for Rufy2 (NM_027425.2,730-748).
gcaatagcgaagaataata

SEQ ID NO: 559619 - DNA, 19 bp, Mus musculus
  siRNA target sequence for Rufy2 (NM_027425.2,731-749).
caatagcgaagaataatat

SEQ ID NO: 559620 - DNA, 19 bp, Mus musculus
  siRNA target sequence for Rufy2 (NM_027425.2,736-754).
gcgaagaataatatcataa

SEQ ID NO: 559621 - DNA, 19 bp, Mus musculus
  siRNA target sequence for Rufy2 (NM_027425.2,771-789).
ccatcaattgcgtagtgaa

SEQ ID NO: 559622 - DNA, 19 bp, Mus musculus
  siRNA target sequence for Rufy2 (NM_027425.2,772-790).
catcaattgcgtagtgaaa

SEQ ID NO: 559623 - DNA, 19 bp, Mus musculus
  siRNA target sequence for Rufy2 (NM_027425.2,819-837).
gcacctggaggttaccaaa

SEQ ID NO: 559624 - DNA, 19 bp, Mus musculus
  siRNA target sequence for Rufy2 (NM_027425.2,851-869).
cggagcttcaaacatacaa

SEQ ID NO: 559625 - DNA, 19 bp, Mus musculus
  siRNA target sequence for Rufy2 (NM_027425.2,883-901).
ggcctagacgagatgtata

SEQ ID NO: 559626 - DNA, 19 bp, Mus musculus
  siRNA target sequence for Rufy2 (NM_027425.2,884-902).
gcctagacgagatgtataa

SEQ ID NO: 559627 - DNA, 19 bp, Mus musculus
  siRNA target sequence for Rufy2 (NM_027425.2,951-969).
ggagaatgagctatcagta

SEQ ID NO: 559628 - DNA, 19 bp, Mus musculus
  siRNA target sequence for Rufy2 (NM_027425.2,954-972).
gaatgagctatcagtacaa

SEQ ID NO: 559629 - DNA, 19 bp, Mus musculus
  siRNA target sequence for Rufy2 (NM_027425.2,1008-1026).
gctgttggagaaagacatt

SEQ ID NO: 559630 - DNA, 19 bp, Mus musculus
  siRNA target sequence for Rufy2 (NM_027425.2,1032-1050).
gaaacaagacactctcata

SEQ ID NO: 559631 - DNA, 19 bp, Mus musculus
  siRNA target sequence for Rufy2 (NM_027425.2,1082-1100).
caatcaacattgagatgta

SEQ ID NO: 559632 - DNA, 19 bp, Mus musculus
  siRNA target sequence for Rufy2 (NM_027425.2,1438-1456).
caaaaagtcataagtctta

SEQ ID NO: 559633 - DNA, 19 bp, Mus musculus
  siRNA target sequence for Rufy2 (NM_027425.2,1491-1509).
gcagttgaaaaggatttat

SEQ ID NO: 559634 - DNA, 19 bp, Mus musculus
  siRNA target sequence for Rufy2 (NM_027425.2,1534-1552).
gaacttggcagcaaactct

SEQ ID NO: 559635 - DNA, 19 bp, Mus musculus
  siRNA target sequence for Rufy2 (NM_027425.2,1544-1562).
gcaaactctgcgaatcgaa

SEQ ID NO: 559636 - DNA, 19 bp, Mus musculus
  siRNA target sequence for Rufy2 (NM_027425.2,1545-1563).
caaactctgcgaatcgaaa

SEQ ID NO: 559637 - DNA, 19 bp, Mus musculus
  siRNA target sequence for Rufy2 (NM_027425.2,1549-1567).
ctctgcgaatcgaaactta

SEQ ID NO: 559638 - DNA, 19 bp, Mus musculus
  siRNA target sequence for Rufy2 (NM_027425.2,1551-1569).
ctgcgaatcgaaacttaaa

SEQ ID NO: 559639 - DNA, 19 bp, Mus musculus
  siRNA target sequence for Rufy2 (NM_027425.2,1553-1571).
gcgaatcgaaacttaaaat

SEQ ID NO: 559640 - DNA, 19 bp, Mus musculus
  siRNA target sequence for Rufy2 (NM_027425.2,1554-1572).
cgaatcgaaacttaaaata

SEQ ID NO: 559641 - DNA, 19 bp, Mus musculus
  siRNA target sequence for Rufy2 (NM_027425.2,1564-1582).
cttaaaatagacgatataa

SEQ ID NO: 559642 - DNA, 19 bp, Mus musculus
  siRNA target sequence for Rufy2 (NM_027425.2,1611-1629).
ggtctggttaaaagacaaa

SEQ ID NO: 559643 - DNA, 19 bp, Mus musculus
  siRNA target sequence for Rufy2 (NM_027425.2,1614-1632).
ctggttaaaagacaaagat

SEQ ID NO: 559644 - DNA, 19 bp, Mus musculus
  siRNA target sequence for Rufy2 (NM_027425.2,1633-1651).
gcaacccactgtaagcttt

SEQ ID NO: 559645 - DNA, 19 bp, Mus musculus
  siRNA target sequence for Rufy2 (NM_027425.2,1679-1697).
gaaagcaccactgtagaaa

SEQ ID NO: 559646 - DNA, 19 bp, Mus musculus
  siRNA target sequence for Rufy2 (NM_027425.2,1691-1709).
gtagaaactgcggagaaat

SEQ ID NO: 559647 - DNA, 19 bp, Mus musculus
  siRNA target sequence for Rufy2 (NM_027425.2,1694-1712).
gaaactgcggagaaatttt

SEQ ID NO: 559648 - DNA, 19 bp, Mus musculus
  siRNA target sequence for Rufy2 (NM_027425.2,1700-1718).
gcggagaaattttctgtaa

SEQ ID NO: 559649 - DNA, 19 bp, Mus musculus
  siRNA target sequence for Rufy2 (NM_027425.2,1762-1780).
ccagtgcgagtctgtgatt

SEQ ID NO: 559650 - DNA, 19 bp, Mus musculus
  siRNA target sequence for Sdh1 (NM_146126.1,346-364).
cgttccccgagaagtagat

SEQ ID NO: 559651 - DNA, 19 bp, Mus musculus
  siRNA target sequence for Sdh1 (NM_146126.1,435-453).
gaaacctctgccgattcta

SEQ ID NO: 559652 - DNA, 19 bp, Mus musculus
  siRNA target sequence for Slc30a7 (NM_023214.3,179-197).
ccatcaaggatgatgaata

SEQ ID NO: 559653 - DNA, 19 bp, Mus musculus
  siRNA target sequence for Slc30a7 (NM_023214.3,198-216).
caaaccacccaagttcaat

SEQ ID NO: 559654 - DNA, 19 bp, Mus musculus
  siRNA target sequence for Slc30a7 (NM_023214.3,269-287).
cccggaacctgtttttctt

SEQ ID NO: 559655 - DNA, 19 bp, Mus musculus
  siRNA target sequence for Slc30a7 (NM_023214.3,372-390).
ccacatgttttttgatagt

SEQ ID NO: 559656 - DNA, 19 bp, Mus musculus
  siRNA target sequence for Slc30a7 (NM_023214.3,373-391).
cacatgttttttgatagta

SEQ ID NO: 559657 - DNA, 19 bp, Mus musculus
  siRNA target sequence for Slc30a7 (NM_023214.3,439-457).
gataatgacgctttctctt

SEQ ID NO: 559658 - DNA, 19 bp, Mus musculus
  siRNA target sequence for Slc30a7 (NM_023214.3,493-511).
gtcaatgggctgtttttga

SEQ ID NO: 559659 - DNA, 19 bp, Mus musculus
  siRNA target sequence for Slc30a7 (NM_023214.3,584-602).
gactgctgcttgtttcaat

SEQ ID NO: 559660 - DNA, 19 bp, Mus musculus
  siRNA target sequence for Slc30a7 (NM_023214.3,588-606).
gctgcttgtttcaattctt

SEQ ID NO: 559661 - DNA, 19 bp, Mus musculus
  siRNA target sequence for Slc30a7 (NM_023214.3,621-639).
cctagtaggaatatttgtt

SEQ ID NO: 559662 - DNA, 19 bp, Mus musculus
  siRNA target sequence for Slc30a7 (NM_023214.3,650-668).
gaggtcacggacattctca

SEQ ID NO: 559663 - DNA, 19 bp, Mus musculus
  siRNA target sequence for Slc30a7 (NM_023214.3,685-703).
cacagtcattccctcttta

SEQ ID NO: 559664 - DNA, 19 bp, Mus musculus
  siRNA target sequence for Slc30a7 (NM_023214.3,825-843).
cgatggcccatccttcaaa

SEQ ID NO: 559665 - DNA, 19 bp, Mus musculus
  siRNA target sequence for Slc30a7 (NM_023214.3,829-847).
ggcccatccttcaaagcaa

SEQ ID NO: 559666 - DNA, 19 bp, Mus musculus
  siRNA target sequence for Slc30a7 (NM_023214.3,899-917).
ccgatacactgggaagtat

SEQ ID NO: 559667 - DNA, 19 bp, Mus musculus
  siRNA target sequence for Slc30a7 (NM_023214.3,900-918).
cgatacactgggaagtatt

SEQ ID NO: 559668 - DNA, 19 bp, Mus musculus
  siRNA target sequence for Slc30a7 (NM_023214.3,932-950).
ctgccatcatgatgcaaaa

SEQ ID NO: 559669 - DNA, 19 bp, Mus musculus
  siRNA target sequence for Slc30a7 (NM_023214.3,935-953).
ccatcatgatgcaaaattt

SEQ ID NO: 559670 - DNA, 19 bp, Mus musculus
  siRNA target sequence for Slc30a7 (NM_023214.3,963-981).
gatagcagatcctatctgt

SEQ ID NO: 559671 - DNA, 19 bp, Mus musculus
  siRNA target sequence for Slc30a7 (NM_023214.3,973-991).
cctatctgttcgattctta

SEQ ID NO: 559672 - DNA, 19 bp, Mus musculus
  siRNA target sequence for Slc30a7 (NM_023214.3,974-992).
ctatctgttcgattcttat

SEQ ID NO: 559673 - DNA, 19 bp, Mus musculus
  siRNA target sequence for Slc30a7 (NM_023214.3,1031-1049).
gagagtctgttggaatatt

SEQ ID NO: 559674 - DNA, 19 bp, Mus musculus
  siRNA target sequence for Slc30a7 (NM_023214.3,1037-1055).
ctgttggaatattaatgca

SEQ ID NO: 559675 - DNA, 19 bp, Mus musculus
  siRNA target sequence for Slc30a7 (NM_023214.3,1061-1079).
ctcctccctcgttggaaaa

SEQ ID NO: 559676 - DNA, 19 bp, Mus musculus
  siRNA target sequence for Slc30a7 (NM_023214.3,1063-1081).
cctccctcgttggaaaata

SEQ ID NO: 559677 - DNA, 19 bp, Mus musculus
  siRNA target sequence for Slc30a7 (NM_023214.3,1111-1129).
cagttacaaggagtttaca

SEQ ID NO: 559678 - DNA, 19 bp, Mus musculus
  siRNA target sequence for Slc30a7 (NM_023214.3,1152-1170).
gacactctgttctgatgtt

SEQ ID NO: 559679 - DNA, 19 bp, Mus musculus
  siRNA target sequence for Slc30a7 (NM_023214.3,1154-1172).
cactctgttctgatgttta

SEQ ID NO: 559680 - DNA, 19 bp, Mus musculus
  siRNA target sequence for Slc30a7 (NM_023214.3,1210-1228).
gacgccaggtggatcttaa

SEQ ID NO: 559681 - DNA, 19 bp, Mus musculus
  siRNA target sequence for Slc30a7 (NM_023214.3,1229-1247).
gccaaacgcataatatttt

SEQ ID NO: 559682 - DNA, 19 bp, Mus musculus
  siRNA target sequence for Slc30a7 (NM_023214.3,1231-1249).
caaacgcataatattttta

SEQ ID NO: 559683 - DNA, 19 bp, Mus musculus
  siRNA target sequence for Thop1 (NM_022653.2,164-182).
cagcctccaccgtgaatca

SEQ ID NO: 559684 - DNA, 19 bp, Mus musculus
  siRNA target sequence for Thop1 (NM_022653.2,167-185).
cctccaccgtgaatcatct

SEQ ID NO: 559685 - DNA, 19 bp, Mus musculus
  siRNA target sequence for Thop1 (NM_022653.2,168-186).
ctccaccgtgaatcatctt

SEQ ID NO: 559686 - DNA, 19 bp, Mus musculus
  siRNA target sequence for Thop1 (NM_022653.2,263-281).
gagtgggtgctcagaactt

SEQ ID NO: 559687 - DNA, 19 bp, Mus musculus
  siRNA target sequence for Thop1 (NM_022653.2,283-301).
gaggatgtgtcgtatgaga

SEQ ID NO: 559688 - DNA, 19 bp, Mus musculus
  siRNA target sequence for Thop1 (NM_022653.2,426-444).
gctctcggagtttgatgta

SEQ ID NO: 559689 - DNA, 19 bp, Mus musculus
  siRNA target sequence for Thop1 (NM_022653.2,431-449).
cggagtttgatgtagagat

SEQ ID NO: 559690 - DNA, 19 bp, Mus musculus
  siRNA target sequence for Thop1 (NM_022653.2,1120-1138).
gacatgcgctactacatga

SEQ ID NO: 559691 - DNA, 19 bp, Mus musculus
  siRNA target sequence for Thop1 (NM_022653.2,1914-1932).
cctagctggcggctatgat

SEQ ID NO: 559692 - DNA, 19 bp, Mus musculus
  siRNA target sequence for Timm9 (NM_013895.2,33-51).
cggcttcggctcggatttt

SEQ ID NO: 559693 - DNA, 19 bp, Mus musculus
  siRNA target sequence for Timm9 (NM_013895.2,292-310).
cgggaacgagccaacatgt

SEQ ID NO: 559694 - DNA, 19 bp, Mus musculus
  siRNA target sequence for Traf2 (NM_009422.1,461-479).
ggagtgtcctgcatgtaaa

SEQ ID NO: 559695 - DNA, 19 bp, Mus musculus
  siRNA target sequence for Traf2 (NM_009422.1,606-624).
cccaagtttcccttaacct

SEQ ID NO: 559696 - DNA, 19 bp, Mus musculus
  siRNA target sequence for Traf2 (NM_009422.1,662-680).
gtttcaggaccatgttaga

SEQ ID NO: 559697 - DNA, 19 bp, Mus musculus
  siRNA target sequence for Traf2 (NM_009422.1,795-813).
ctactgctgagctcattct

SEQ ID NO: 559698 - DNA, 19 bp, Mus musculus
  siRNA target sequence for Traf2 (NM_009422.1,864-882).
ctccagcggtgccagattt

SEQ ID NO: 559699 - DNA, 19 bp, Mus musculus
  siRNA target sequence for Traf2 (NM_009422.1,887-905).
gcagaagatagcaaccttt

SEQ ID NO: 559700 - DNA, 19 bp, Mus musculus
  siRNA target sequence for Traf2 (NM_009422.1,920-938).
cgtcttgaaccgtgaagta

SEQ ID NO: 559701 - DNA, 19 bp, Mus musculus
  siRNA target sequence for Traf2 (NM_009422.1,982-1000).
ggctagaccaggacaagat

SEQ ID NO: 559702 - DNA, 19 bp, Mus musculus
  siRNA target sequence for Traf2 (NM_009422.1,983-1001).
gctagaccaggacaagatt

SEQ ID NO: 559703 - DNA, 19 bp, Mus musculus
  siRNA target sequence for Traf2 (NM_009422.1,1083-1101).
gtctccgagttggaagtat

SEQ ID NO: 559704 - DNA, 19 bp, Mus musculus
  siRNA target sequence for Traf2 (NM_009422.1,1231-1249).
gtctacgagtctacttgaa

SEQ ID NO: 559705 - DNA, 19 bp, Mus musculus
  siRNA target sequence for Traf2 (NM_009422.1,1395-1413).
gcattcaggcccgatgtaa

SEQ ID NO: 559706 - DNA, 19 bp, Mus musculus
  siRNA target sequence for Traf2 (NM_009422.1,1435-1453).
ctgtcagtgacatgaacat

SEQ ID NO: 559707 - DNA, 19 bp, Mus musculus
  siRNA target sequence for Traf2 (NM_009422.1,1493-1511).
ggaggccaagaattcctat

SEQ ID NO: 559708 - DNA, 19 bp, Mus musculus
  siRNA target sequence for Traf2 (NM_009422.1,1524-1542).
gcgatcttcatcaaagcta

SEQ ID NO: 559709 - DNA, 19 bp, Mus musculus
  siRNA target sequence for Traf2 (NM_009422.1,1525-1543).
cgatcttcatcaaagctat

SEQ ID NO: 559710 - DNA, 19 bp, Mus musculus
  siRNA target sequence for Traf2 (NM_009422.1,1526-1544).
gatcttcatcaaagctatt

SEQ ID NO: 559711 - DNA, 19 bp, Mus musculus
  siRNA target sequence for Traf3 (NM_011632.1,777-795).
gtggaagacaagtacaagt

SEQ ID NO: 559712 - DNA, 19 bp, Mus musculus
  siRNA target sequence for Traf3 (NM_011632.1,1035-1053).
ctgctggtgcacctaaaaa

SEQ ID NO: 559713 - DNA, 19 bp, Mus musculus
  siRNA target sequence for Traf3 (NM_011632.1,1037-1055).
gctggtgcacctaaaaaat

SEQ ID NO: 559714 - DNA, 19 bp, Mus musculus
  siRNA target sequence for Traf3 (NM_011632.1,1041-1059).
gtgcacctaaaaaatgaat

SEQ ID NO: 559715 - DNA, 19 bp, Mus musculus
  siRNA target sequence for Traf3 (NM_011632.1,1043-1061).
gcacctaaaaaatgaatgt

SEQ ID NO: 559716 - DNA, 19 bp, Mus musculus
  siRNA target sequence for Traf3 (NM_011632.1,1085-1103).
gcgtgccgactgcaaagaa

SEQ ID NO: 559717 - DNA, 19 bp, Mus musculus
  siRNA target sequence for Traf3 (NM_011632.1,1086-1104).
cgtgccgactgcaaagaaa

SEQ ID NO: 559718 - DNA, 19 bp, Mus musculus
  siRNA target sequence for Traf3 (NM_011632.1,1183-1201).
gccaagtgcccatgatcaa

SEQ ID NO: 559719 - DNA, 19 bp, Mus musculus
  siRNA target sequence for Traf3 (NM_011632.1,1184-1202).
ccaagtgcccatgatcaaa

SEQ ID NO: 559720 - DNA, 19 bp, Mus musculus
  siRNA target sequence for Traf3 (NM_011632.1,1301-1319).
cttgtccgagtgtgtcaat

SEQ ID NO: 559721 - DNA, 19 bp, Mus musculus
  siRNA target sequence for Traf3 (NM_011632.1,1343-1361).
gcgctatggctgcgttttt

SEQ ID NO: 559722 - DNA, 19 bp, Mus musculus
  siRNA target sequence for Traf3 (NM_011632.1,1354-1372).
gcgtttttcagggtacaaa

SEQ ID NO: 559723 - DNA, 19 bp, Mus musculus
  siRNA target sequence for Traf3 (NM_011632.1,1366-1384).
gtacaaaccagcagatcaa

SEQ ID NO: 559724 - DNA, 19 bp, Mus musculus
  siRNA target sequence for Traf3 (NM_011632.1,1528-1546).
gctttgagatcgagattga

SEQ ID NO: 559725 - DNA, 19 bp, Mus musculus
  siRNA target sequence for Traf3 (NM_011632.1,1795-1813).
gccggcatgaccagatgtt

SEQ ID NO: 559726 - DNA, 19 bp, Mus musculus
  siRNA target sequence for Traf3 (NM_011632.1,1797-1815).
cggcatgaccagatgttga

SEQ ID NO: 559727 - DNA, 19 bp, Mus musculus
  siRNA target sequence for Traf3 (NM_011632.1,1978-1996).
caggttattttggctataa

SEQ ID NO: 559728 - DNA, 19 bp, Mus musculus
  siRNA target sequence for Traf3 (NM_011632.1,2066-2084).
cattatgcgtggagaatat

SEQ ID NO: 559729 - DNA, 19 bp, Mus musculus
  siRNA target sequence for Traf3 (NM_011632.1,2103-2121).
ccgttcaagcagaaagtga

SEQ ID NO: 559730 - DNA, 19 bp, Mus musculus
  siRNA target sequence for Traf3 (NM_011632.1,2208-2226).
cccaccggagagatgaata

SEQ ID NO: 559731 - DNA, 19 bp, Mus musculus
  siRNA target sequence for Traf3 (NM_011632.1,2209-2227).
ccaccggagagatgaatat

SEQ ID NO: 559732 - DNA, 19 bp, Mus musculus
  siRNA target sequence for Traf3 (NM_011632.1,2265-2283).
ctagagaacgggacgtata

SEQ ID NO: 559733 - DNA, 19 bp, Mus musculus
  siRNA target sequence for Traf3 (NM_011632.1,2268-2286).
gagaacgggacgtatatta

SEQ ID NO: 559734 - DNA, 19 bp, Mus musculus
  siRNA target sequence for Traf3 (NM_011632.1,2270-2288).
gaacgggacgtatattaaa

SEQ ID NO: 559735 - DNA, 19 bp, Mus musculus
  siRNA target sequence for Traf3 (NM_011632.1,2273-2291).
cgggacgtatattaaagat

SEQ ID NO: 559736 - DNA, 19 bp, Mus musculus
  siRNA target sequence for Traf3 (NM_011632.1,2276-2294).
gacgtatattaaagatgat

SEQ ID NO: 559737 - DNA, 19 bp, Mus musculus
  siRNA target sequence for Traf3 (NM_011632.1,2289-2307).
gatgatacaatctttatta

SEQ ID NO: 559738 - DNA, 19 bp, Mus musculus
  siRNA target sequence for Traf4 (NM_009423.2,500-518).
cgcctcaagtgtgaattct

SEQ ID NO: 559739 - DNA, 19 bp, Mus musculus
  siRNA target sequence for Traf4 (NM_009423.2,581-599).
gtgtactgtgagaacaagt

SEQ ID NO: 559740 - DNA, 19 bp, Mus musculus
  siRNA target sequence for Traf4 (NM_009423.2,674-692).
gcctactgtaccaaggaat

SEQ ID NO: 559741 - DNA, 19 bp, Mus musculus
  siRNA target sequence for Traf4 (NM_009423.2,675-693).
cctactgtaccaaggaatt

SEQ ID NO: 559742 - DNA, 19 bp, Mus musculus
  siRNA target sequence for Traf4 (NM_009423.2,681-699).
gtaccaaggaatttgttta

SEQ ID NO: 559743 - DNA, 19 bp, Mus musculus
  siRNA target sequence for Traf4 (NM_009423.2,684-702).
ccaaggaatttgtttatga

SEQ ID NO: 559744 - DNA, 19 bp, Mus musculus
  siRNA target sequence for Traf4 (NM_009423.2,743-761).
gttccctgccccaaccaat

SEQ ID NO: 559745 - DNA, 19 bp, Mus musculus
  siRNA target sequence for Traf4 (NM_009423.2,1036-1054).
ctatgggcgtcgtctacaa

SEQ ID NO: 559746 - DNA, 19 bp, Mus musculus
  siRNA target sequence for Traf4 (NM_009423.2,1094-1112).
gccttctatacgcataagt

SEQ ID NO: 559747 - DNA, 19 bp, Mus musculus
  siRNA target sequence for Traf4 (NM_009423.2,1095-1113).
ccttctatacgcataagta

SEQ ID NO: 559748 - DNA, 19 bp, Mus musculus
  siRNA target sequence for Trim11 (NM_053168.1,551-569).
gagcacctacggaaacaaa

SEQ ID NO: 559749 - DNA, 19 bp, Mus musculus
  siRNA target sequence for Trim11 (NM_053168.1,1182-1200).
gggcactcggcgtgtgtaa

SEQ ID NO: 559750 - DNA, 19 bp, Mus musculus
  siRNA target sequence for Trim11 (NM_053168.1,1183-1201).
ggcactcggcgtgtgtaaa

SEQ ID NO: 559751 - DNA, 19 bp, Mus musculus
  siRNA target sequence for Trim11 (NM_053168.1,1185-1203).
cactcggcgtgtgtaaaga

SEQ ID NO: 559752 - DNA, 19 bp, Mus musculus
  siRNA target sequence for Trim11 (NM_053168.1,1187-1205).
ctcggcgtgtgtaaagaaa

SEQ ID NO: 559753 - DNA, 19 bp, Mus musculus
  siRNA target sequence for Trim11 (NM_053168.1,1271-1289).
gggagtttctataattcca

SEQ ID NO: 559754 - DNA, 19 bp, Mus musculus
  siRNA target sequence for Trim11 (NM_053168.1,1272-1290).
ggagtttctataattccaa

SEQ ID NO: 559755 - DNA, 19 bp, Mus musculus
  siRNA target sequence for Trim11 (NM_053168.1,1324-1342).
caagcgtgtggggattttt

SEQ ID NO: 559756 - DNA, 19 bp, Mus musculus
  siRNA target sequence for Trim11 (NM_053168.1,1355-1373).
gctggccatctctcattct

SEQ ID NO: 559757 - DNA, 19 bp, Mus musculus
  siRNA target sequence for Trim11 (NM_053168.1,1356-1374).
ctggccatctctcattcta

SEQ ID NO: 559758 - DNA, 19 bp, Mus musculus
  siRNA target sequence for Trim11 (NM_053168.1,1385-1403).
gatgggtcgctgctgttta

SEQ ID NO: 559759 - DNA, 19 bp, Mus musculus
  siRNA target sequence for Trim11 (NM_053168.1,1388-1406).
gggtcgctgctgtttatct

SEQ ID NO: 559760 - DNA, 19 bp, Mus musculus
  siRNA target sequence for Trim11 (NM_053168.1,1389-1407).
ggtcgctgctgtttatctt

SEQ ID NO: 559761 - DNA, 19 bp, Mus musculus
  siRNA target sequence for Trim13 (NM_023233.1,942-960).
ccacaagccctttaatgaa

SEQ ID NO: 559762 - DNA, 19 bp, Mus musculus
  siRNA target sequence for Trim13 (NM_023233.1,949-967).
ccctttaatgaagaacttt

SEQ ID NO: 559763 - DNA, 19 bp, Mus musculus
  siRNA target sequence for Trim13 (NM_023233.1,1272-1290).
gtgaaagagtaaaaaatgt

SEQ ID NO: 559764 - DNA, 19 bp, Mus musculus
  siRNA target sequence for Trim13 (NM_023233.1,1313-1331).
gtggcagagtttatatgca

SEQ ID NO: 559765 - DNA, 19 bp, Mus musculus
  siRNA target sequence for Trim16 (NM_053169.1,3-21).
ggctgaattggatctgatt

SEQ ID NO: 559766 - DNA, 19 bp, Mus musculus
  siRNA target sequence for Trim16 (NM_053169.1,190-208).
gaagaggatcagatcttgt

SEQ ID NO: 559767 - DNA, 19 bp, Mus musculus
  siRNA target sequence for Trim16 (NM_053169.1,564-582).
caggctccaagctaaccat

SEQ ID NO: 559768 - DNA, 19 bp, Mus musculus
  siRNA target sequence for Trim16 (NM_053169.1,568-586).
ctccaagctaaccataagt

SEQ ID NO: 559769 - DNA, 19 bp, Mus musculus
  siRNA target sequence for Trim16 (NM_053169.1,570-588).
ccaagctaaccataagtct

SEQ ID NO: 559770 - DNA, 19 bp, Mus musculus
  siRNA target sequence for Trim16 (NM_053169.1,757-775).
ctcgagatggagaaaagca

SEQ ID NO: 559771 - DNA, 19 bp, Mus musculus
  siRNA target sequence for Trim16 (NM_053169.1,862-880).
gcctcccctagcatttaca

SEQ ID NO: 559772 - DNA, 19 bp, Mus musculus
  siRNA target sequence for Trim16 (NM_053169.1,863-881).
cctcccctagcatttacat

SEQ ID NO: 559773 - DNA, 19 bp, Mus musculus
  siRNA target sequence for Trim16 (NM_053169.1,910-928).
cgcaaggtcatcacagatt

SEQ ID NO: 559774 - DNA, 19 bp, Mus musculus
  siRNA target sequence for Trim16 (NM_053169.1,915-933).
ggtcatcacagattcaact

SEQ ID NO: 559775 - DNA, 19 bp, Mus musculus
  siRNA target sequence for Trim16 (NM_053169.1,945-963).
ccaattgctagaaagctat

SEQ ID NO: 559776 - DNA, 19 bp, Mus musculus
  siRNA target sequence for Trim16 (NM_053169.1,994-1012).
gaggaatatgacatcagaa

SEQ ID NO: 559777 - DNA, 19 bp, Mus musculus
  siRNA target sequence for Trim16 (NM_053169.1,1070-1088).
cccgggatgagtttcttca

SEQ ID NO: 559778 - DNA, 19 bp, Mus musculus
  siRNA target sequence for Trim16 (NM_053169.1,1071-1089).
ccgggatgagtttcttcaa

SEQ ID NO: 559779 - DNA, 19 bp, Mus musculus
  siRNA target sequence for Trim16 (NM_053169.1,1072-1090).
cgggatgagtttcttcaat

SEQ ID NO: 559780 - DNA, 19 bp, Mus musculus
  siRNA target sequence for Trim16 (NM_053169.1,1197-1215).
ggacctccccagtaggttt

SEQ ID NO: 559781 - DNA, 19 bp, Mus musculus
  siRNA target sequence for Trim16 (NM_053169.1,1251-1269).
gtacctgcacagatattat

SEQ ID NO: 559782 - DNA, 19 bp, Mus musculus
  siRNA target sequence for Trim16 (NM_053169.1,1254-1272).
cctgcacagatattatttt

SEQ ID NO: 559783 - DNA, 19 bp, Mus musculus
  siRNA target sequence for Trim16 (NM_053169.1,1457-1475).
gaaggctcggtatctatgt

SEQ ID NO: 559784 - DNA, 19 bp, Mus musculus
  siRNA target sequence for Trim16 (NM_053169.1,1499-1517).
ccttctatggtgtagagta

SEQ ID NO: 559785 - DNA, 19 bp, Mus musculus
  siRNA target sequence for Trim16 (NM_053169.1,1500-1518).
cttctatggtgtagagtat

SEQ ID NO: 559786 - DNA, 19 bp, Mus musculus
  siRNA target sequence for Trim16 (NM_053169.1,1508-1526).
gtgtagagtatgatgctat

SEQ ID NO: 559787 - DNA, 19 bp, Mus musculus
  siRNA target sequence for Trim16 (NM_053169.1,1527-1545).
gactctgattcacaagttt

SEQ ID NO: 559788 - DNA, 19 bp, Mus musculus
  siRNA target sequence for Trim16 (NM_053169.1,1576-1594).
gctttctggctgtctaaga

SEQ ID NO: 559789 - DNA, 19 bp, Mus musculus
  siRNA target sequence for Trim34 (NM_030684.1,244-262).
caacaggtctgacgaatat

SEQ ID NO: 559790 - DNA, 19 bp, Mus musculus
  siRNA target sequence for Trim34 (NM_030684.1,285-303).
gtctgccaagagcttttga

SEQ ID NO: 559791 - DNA, 19 bp, Mus musculus
  siRNA target sequence for Trim34 (NM_030684.1,405-423).
gtgtgtggtactagattct

SEQ ID NO: 559792 - DNA, 19 bp, Mus musculus
  siRNA target sequence for Trim34 (NM_030684.1,418-436).
gattctcgttggaaaatct

SEQ ID NO: 559793 - DNA, 19 bp, Mus musculus
  siRNA target sequence for Trim34 (NM_030684.1,470-488).
gagactcggggaggttaaa

SEQ ID NO: 559794 - DNA, 19 bp, Mus musculus
  siRNA target sequence for Trim34 (NM_030684.1,646-664).
gggaatgtcaggagaatct

SEQ ID NO: 559795 - DNA, 19 bp, Mus musculus
  siRNA target sequence for Trim34 (NM_030684.1,759-777).
gtccagactgagagacaaa

SEQ ID NO: 559796 - DNA, 19 bp, Mus musculus
  siRNA target sequence for Trim34 (NM_030684.1,778-796).
ggattcaaacaggctttaa

SEQ ID NO: 559797 - DNA, 19 bp, Mus musculus
  siRNA target sequence for Trim34 (NM_030684.1,951-969).
cggcgtgagtggtcagata

SEQ ID NO: 559798 - DNA, 19 bp, Mus musculus
  siRNA target sequence for Trim34 (NM_030684.1,981-999).
caggatatgagcggtattt

SEQ ID NO: 559799 - DNA, 19 bp, Mus musculus
  siRNA target sequence for Trim34 (NM_030684.1,1080-1098).
ctgagtggcatgctacaaa

SEQ ID NO: 559800 - DNA, 19 bp, Mus musculus
  siRNA target sequence for Trim34 (NM_030684.1,1084-1102).
gtggcatgctacaaaagtt

SEQ ID NO: 559801 - DNA, 19 bp, Mus musculus
  siRNA target sequence for Trim34 (NM_030684.1,1126-1144).
cctactggggtaagaagtt

SEQ ID NO: 559802 - DNA, 19 bp, Mus musculus
  siRNA target sequence for Trim34 (NM_030684.1,1180-1198).
cacaagtgtgtggttcaat

SEQ ID NO: 559803 - DNA, 19 bp, Mus musculus
  siRNA target sequence for Trim34 (NM_030684.1,1182-1200).
caagtgtgtggttcaatgt

SEQ ID NO: 559804 - DNA, 19 bp, Mus musculus
  siRNA target sequence for Trim34 (NM_030684.1,1221-1239).
ctgtgttacctcatacaca

SEQ ID NO: 559805 - DNA, 19 bp, Mus musculus
  siRNA target sequence for Trim34 (NM_030684.1,1223-1241).
gtgttacctcatacacata

SEQ ID NO: 559806 - DNA, 19 bp, Mus musculus
  siRNA target sequence for Trim35 (NM_029979.1,64-82).
gccttcgcgctccttcaaa

SEQ ID NO: 559807 - DNA, 19 bp, Mus musculus
  siRNA target sequence for Trim35 (NM_029979.1,115-133).
gttccgcgacgcagtaact

SEQ ID NO: 559808 - DNA, 19 bp, Mus musculus
  siRNA target sequence for Trim35 (NM_029979.1,490-508).
gcatgtattgcgagagaaa

SEQ ID NO: 559809 - DNA, 19 bp, Mus musculus
  siRNA target sequence for Trim35 (NM_029979.1,1214-1232).
cacagctgctaccatgata

SEQ ID NO: 559810 - DNA, 19 bp, Mus musculus
  siRNA target sequence for Trim35 (NM_029979.1,1368-1386).
gtgagctatccttctatga

SEQ ID NO: 559811 - DNA, 19 bp, Mus musculus
  siRNA target sequence for Trim35 (NM_029979.1,1394-1412).
cgccactgccatctgtata

SEQ ID NO: 559812 - DNA, 19 bp, Mus musculus
  siRNA target sequence for Trim35 (NM_029979.1,1433-1451).
gaggtgaggccctacttct

SEQ ID NO: 559813 - DNA, 19 bp, Mus musculus
  siRNA target sequence for Trim36 (NM_178872.3,193-211).
gctacattatggaattgct

SEQ ID NO: 559814 - DNA, 19 bp, Mus musculus
  siRNA target sequence for Trim36 (NM_178872.3,214-232).
ccaagggcaaggtgactat

SEQ ID NO: 559815 - DNA, 19 bp, Mus musculus
  siRNA target sequence for Trim36 (NM_178872.3,220-238).
gcaaggtgactattaagaa

SEQ ID NO: 559816 - DNA, 19 bp, Mus musculus
  siRNA target sequence for Trim36 (NM_178872.3,221-239).
caaggtgactattaagaat

SEQ ID NO: 559817 - DNA, 19 bp, Mus musculus
  siRNA target sequence for Trim36 (NM_178872.3,229-247).
ctattaagaatatcgaaaa

SEQ ID NO: 559818 - DNA, 19 bp, Mus musculus
  siRNA target sequence for Trim36 (NM_178872.3,264-282).
gcgtgcaaggagctgttta

SEQ ID NO: 559819 - DNA, 19 bp, Mus musculus
  siRNA target sequence for Trim36 (NM_178872.3,317-335).
ctgtcataagtgtgtgaaa

SEQ ID NO: 559820 - DNA, 19 bp, Mus musculus
  siRNA target sequence for Trim36 (NM_178872.3,330-348).
gtgaaagaacttttactgt

SEQ ID NO: 559821 - DNA, 19 bp, Mus musculus
  siRNA target sequence for Trim36 (NM_178872.3,376-394).
cgtcagacagctcaaatca

SEQ ID NO: 559822 - DNA, 19 bp, Mus musculus
  siRNA target sequence for Trim36 (NM_178872.3,424-442).
ctagcatggataaaatcga

SEQ ID NO: 559823 - DNA, 19 bp, Mus musculus
  siRNA target sequence for Trim36 (NM_178872.3,431-449).
ggataaaatcgacaagatt

SEQ ID NO: 559824 - DNA, 19 bp, Mus musculus
  siRNA target sequence for Trim36 (NM_178872.3,456-474).
ccaggctggaagcgtaatt

SEQ ID NO: 559825 - DNA, 19 bp, Mus musculus
  siRNA target sequence for Trim36 (NM_178872.3,460-478).
gctggaagcgtaattcact

SEQ ID NO: 559826 - DNA, 19 bp, Mus musculus
  siRNA target sequence for Trim36 (NM_178872.3,548-566).
cagtggtctgtttcgaaat

SEQ ID NO: 559827 - DNA, 19 bp, Mus musculus
  siRNA target sequence for Trim36 (NM_178872.3,552-570).
ggtctgtttcgaaatttca

SEQ ID NO: 559828 - DNA, 19 bp, Mus musculus
  siRNA target sequence for Trim36 (NM_178872.3,629-647).
gtgtgacctttgtaaacct

SEQ ID NO: 559829 - DNA, 19 bp, Mus musculus
  siRNA target sequence for Trim36 (NM_178872.3,649-667).
caccccaggaatctacaaa

SEQ ID NO: 559830 - DNA, 19 bp, Mus musculus
  siRNA target sequence for Trim36 (NM_178872.3,668-686).
gagctgcatggattgtagt

SEQ ID NO: 559831 - DNA, 19 bp, Mus musculus
  siRNA target sequence for Trim36 (NM_178872.3,850-868).
cagtttgccacctctgtaa

SEQ ID NO: 559832 - DNA, 19 bp, Mus musculus
  siRNA target sequence for Trim36 (NM_178872.3,988-1006).
gtcaaatttctgaactaaa

SEQ ID NO: 559833 - DNA, 19 bp, Mus musculus
  siRNA target sequence for Trim36 (NM_178872.3,990-1008).
caaatttctgaactaaact

SEQ ID NO: 559834 - DNA, 19 bp, Mus musculus
  siRNA target sequence for Trim36 (NM_178872.3,1056-1074).
gcgctggcgcattttgaaa

SEQ ID NO: 559835 - DNA, 19 bp, Mus musculus
  siRNA target sequence for Trim36 (NM_178872.3,1057-1075).
cgctggcgcattttgaaaa

SEQ ID NO: 559836 - DNA, 19 bp, Mus musculus
  siRNA target sequence for Trim36 (NM_178872.3,1130-1148).
ctctaagaaactaagacta

SEQ ID NO: 559837 - DNA, 19 bp, Mus musculus
  siRNA target sequence for Trim36 (NM_178872.3,1235-1253).
gacggatcagtcttgcttt

SEQ ID NO: 559838 - DNA, 19 bp, Mus musculus
  siRNA target sequence for Trim36 (NM_178872.3,1299-1317).
gagtccctgaagagcttta

SEQ ID NO: 559839 - DNA, 19 bp, Mus musculus
  siRNA target sequence for Trim36 (NM_178872.3,1341-1359).
gaagactatgttgttaaca

SEQ ID NO: 559840 - DNA, 19 bp, Mus musculus
  siRNA target sequence for Trim36 (NM_178872.3,1353-1371).
gttaacatatcgaaacaaa

SEQ ID NO: 559841 - DNA, 19 bp, Mus musculus
  siRNA target sequence for Trim36 (NM_178872.3,1433-1451).
ggaacagagtaaagtgtat

SEQ ID NO: 559842 - DNA, 19 bp, Mus musculus
  siRNA target sequence for Trim36 (NM_178872.3,1434-1452).
gaacagagtaaagtgtata

SEQ ID NO: 559843 - DNA, 19 bp, Mus musculus
  siRNA target sequence for Trim36 (NM_178872.3,1448-1466).
gtataataacgccttgata

SEQ ID NO: 559844 - DNA, 19 bp, Mus musculus
  siRNA target sequence for Trim36 (NM_178872.3,1495-1513).
ccgacagctatgttctaga

SEQ ID NO: 559845 - DNA, 19 bp, Mus musculus
  siRNA target sequence for Trim36 (NM_178872.3,1509-1527).
ctagaataccgcaagatta

SEQ ID NO: 559846 - DNA, 19 bp, Mus musculus
  siRNA target sequence for Trim36 (NM_178872.3,1512-1530).
gaataccgcaagattaata

SEQ ID NO: 559847 - DNA, 19 bp, Mus musculus
  siRNA target sequence for Trim36 (NM_178872.3,1533-1551).
gacgaagaaatgatatcat

SEQ ID NO: 559848 - DNA, 19 bp, Mus musculus
  siRNA target sequence for Trim36 (NM_178872.3,1544-1562).
gatatcatggaatgagata

SEQ ID NO: 559849 - DNA, 19 bp, Mus musculus
  siRNA target sequence for Trim36 (NM_178872.3,1563-1581).
gaagttcacggcacaagta

SEQ ID NO: 559850 - DNA, 19 bp, Mus musculus
  siRNA target sequence for Trim36 (NM_178872.3,1584-1602).
gttgtctccaaccttgaaa

SEQ ID NO: 559851 - DNA, 19 bp, Mus musculus
  siRNA target sequence for Trim36 (NM_178872.3,1632-1650).
gcttacaggggttctatct

SEQ ID NO: 559852 - DNA, 19 bp, Mus musculus
  siRNA target sequence for Trim36 (NM_178872.3,1719-1737).
gagaagtgtggctacaaca

SEQ ID NO: 559853 - DNA, 19 bp, Mus musculus
  siRNA target sequence for Trim36 (NM_178872.3,1780-1798).
gcagagctggatttaacgt

SEQ ID NO: 559854 - DNA, 19 bp, Mus musculus
  siRNA target sequence for Trim36 (NM_178872.3,1820-1838).
ccaagtgggccattacaca

SEQ ID NO: 559855 - DNA, 19 bp, Mus musculus
  siRNA target sequence for Trim36 (NM_178872.3,1821-1839).
caagtgggccattacacaa

SEQ ID NO: 559856 - DNA, 19 bp, Mus musculus
  siRNA target sequence for Trim36 (NM_178872.3,1826-1844).
gggccattacacaagctta

SEQ ID NO: 559857 - DNA, 19 bp, Mus musculus
  siRNA target sequence for Trim36 (NM_178872.3,1830-1848).
cattacacaagcttagact

SEQ ID NO: 559858 - DNA, 19 bp, Mus musculus
  siRNA target sequence for Trim36 (NM_178872.3,1863-1881).
gtcggagtcacgaaaggta

SEQ ID NO: 559859 - DNA, 19 bp, Mus musculus
  siRNA target sequence for Trim36 (NM_178872.3,1865-1883).
cggagtcacgaaaggtaaa

SEQ ID NO: 559860 - DNA, 19 bp, Mus musculus
  siRNA target sequence for Trim36 (NM_178872.3,1867-1885).
gagtcacgaaaggtaaaca

SEQ ID NO: 559861 - DNA, 19 bp, Mus musculus
  siRNA target sequence for Trim36 (NM_178872.3,1869-1887).
gtcacgaaaggtaaacact

SEQ ID NO: 559862 - DNA, 19 bp, Mus musculus
  siRNA target sequence for Trim36 (NM_178872.3,1898-1916).
ccgcgtggaaccgtattca

SEQ ID NO: 559863 - DNA, 19 bp, Mus musculus
  siRNA target sequence for Trim36 (NM_178872.3,1899-1917).
cgcgtggaaccgtattcat

SEQ ID NO: 559864 - DNA, 19 bp, Mus musculus
  siRNA target sequence for Trim36 (NM_178872.3,1900-1918).
gcgtggaaccgtattcata

SEQ ID NO: 559865 - DNA, 19 bp, Mus musculus
  siRNA target sequence for Trim36 (NM_178872.3,2029-2047).
gcgaggacgcctgttttga

SEQ ID NO: 559866 - DNA, 19 bp, Mus musculus
  siRNA target sequence for Trim36 (NM_178872.3,2030-2048).
cgaggacgcctgttttgat

SEQ ID NO: 559867 - DNA, 19 bp, Mus musculus
  siRNA target sequence for Trim36 (NM_178872.3,2053-2071).
cacagccctttacattagt

SEQ ID NO: 559868 - DNA, 19 bp, Mus musculus
  siRNA target sequence for Trim36 (NM_178872.3,2057-2075).
gccctttacattagttact

SEQ ID NO: 559869 - DNA, 19 bp, Mus musculus
  siRNA target sequence for Trim36 (NM_178872.3,2074-2092).
ctataggcatgaagaaatt

SEQ ID NO: 559870 - DNA, 19 bp, Mus musculus
  siRNA target sequence for Trim36 (NM_178872.3,2080-2098).
gcatgaagaaattttttat

SEQ ID NO: 559871 - DNA, 19 bp, Mus musculus
  siRNA target sequence for Trim36 (NM_178872.3,2107-2125).
cacctacttcctctaatga

SEQ ID NO: 559872 - DNA, 19 bp, Mus musculus
  siRNA target sequence for Trim36 (NM_178872.3,2116-2134).
cctctaatgaaccagaaaa

SEQ ID NO: 559873 - DNA, 19 bp, Mus musculus
  siRNA target sequence for Trim36 (NM_178872.3,2144-2162).
ccccatgccaacgagtata

SEQ ID NO: 559874 - DNA, 19 bp, Mus musculus
  siRNA target sequence for Trim36 (NM_178872.3,2152-2170).
caacgagtatagggatttt

SEQ ID NO: 559875 - DNA, 19 bp, Mus musculus
  siRNA target sequence for Trim36 (NM_178872.3,2156-2174).
gagtatagggattttcctt

SEQ ID NO: 559876 - DNA, 19 bp, Mus musculus
  siRNA target sequence for Trim36 (NM_178872.3,2188-2206).
gcaaagtgagcttctatga

SEQ ID NO: 559877 - DNA, 19 bp, Mus musculus
  siRNA target sequence for Trim36 (NM_178872.3,2189-2207).
caaagtgagcttctatgat

SEQ ID NO: 559878 - DNA, 19 bp, Mus musculus
  siRNA target sequence for Trim36 (NM_178872.3,2244-2262).
gactgttcgcatacaatgt

SEQ ID NO: 559879 - DNA, 19 bp, Mus musculus
  siRNA target sequence for Trim36 (NM_178872.3,2246-2264).
ctgttcgcatacaatgtat

SEQ ID NO: 559880 - DNA, 19 bp, Mus musculus
  siRNA target sequence for Trim36 (NM_178872.3,2279-2297).
gatgggcagcggaggaatt

SEQ ID NO: 559881 - DNA, 19 bp, Mus musculus
  siRNA target sequence for Trim39 (NM_024468.1,208-226).
gtatgcctagagtatctga

SEQ ID NO: 559882 - DNA, 19 bp, Mus musculus
  siRNA target sequence for Trim39 (NM_024468.1,228-246).
ggagccagttattattgaa

SEQ ID NO: 559883 - DNA, 19 bp, Mus musculus
  siRNA target sequence for Trim39 (NM_024468.1,316-334).
cctgtctgtcggaagacat

SEQ ID NO: 559884 - DNA, 19 bp, Mus musculus
  siRNA target sequence for Trim39 (NM_024468.1,412-430).
cggaagatcagagatgaaa

SEQ ID NO: 559885 - DNA, 19 bp, Mus musculus
  siRNA target sequence for Trim39 (NM_024468.1,789-807).
gcgacttcgagaaaatgct

SEQ ID NO: 559886 - DNA, 19 bp, Mus musculus
  siRNA target sequence for Trim39 (NM_024468.1,859-877).
gagggcaagtgcttacagt

SEQ ID NO: 559887 - DNA, 19 bp, Mus musculus
  siRNA target sequence for Trim39 (NM_024468.1,878-896).
caggcttcgagatgcttaa

SEQ ID NO: 559888 - DNA, 19 bp, Mus musculus
  siRNA target sequence for Trim39 (NM_024468.1,882-900).
cttcgagatgcttaaggat

SEQ ID NO: 559889 - DNA, 19 bp, Mus musculus
  siRNA target sequence for Trim39 (NM_024468.1,891-909).
gcttaaggatgtgaaaagt

SEQ ID NO: 559890 - DNA, 19 bp, Mus musculus
  siRNA target sequence for Trim39 (NM_024468.1,892-910).
cttaaggatgtgaaaagta

SEQ ID NO: 559891 - DNA, 19 bp, Mus musculus
  siRNA target sequence for Trim39 (NM_024468.1,908-926).
gtaccctagaaaaatgtga

SEQ ID NO: 559892 - DNA, 19 bp, Mus musculus
  siRNA target sequence for Trim39 (NM_024468.1,1006-1024).
gccctaaggaaaattctta

SEQ ID NO: 559893 - DNA, 19 bp, Mus musculus
  siRNA target sequence for Trim39 (NM_024468.1,1094-1112).
ggaaaagcgtcaagtttgt

SEQ ID NO: 559894 - DNA, 19 bp, Mus musculus
  siRNA target sequence for Trim39 (NM_024468.1,1140-1158).
cacaccgcagcgtttcact

SEQ ID NO: 559895 - DNA, 19 bp, Mus musculus
  siRNA target sequence for Trim39 (NM_024468.1,1144-1162).
ccgcagcgtttcactttct

SEQ ID NO: 559896 - DNA, 19 bp, Mus musculus
  siRNA target sequence for Trim39 (NM_024468.1,1145-1163).
cgcagcgtttcactttcta

SEQ ID NO: 559897 - DNA, 19 bp, Mus musculus
  siRNA target sequence for Trim39 (NM_024468.1,1391-1409).
ccaagcgggtaggcatatt

SEQ ID NO: 559898 - DNA, 19 bp, Mus musculus
  siRNA target sequence for Trim39 (NM_024468.1,1395-1413).
gcgggtaggcatattccta

SEQ ID NO: 559899 - DNA, 19 bp, Mus musculus
  siRNA target sequence for Trim39 (NM_024468.1,1426-1444).
ggcacactgtccttttaca

SEQ ID NO: 559900 - DNA, 19 bp, Mus musculus
  siRNA target sequence for Trim39 (NM_024468.1,1427-1445).
gcacactgtccttttacaa

SEQ ID NO: 559901 - DNA, 19 bp, Mus musculus
  siRNA target sequence for Trim39 (NM_024468.1,1446-1464).
cgtcacagaccgttcacat

SEQ ID NO: 559902 - DNA, 19 bp, Mus musculus
  siRNA target sequence for Trim39 (NM_024468.1,1447-1465).
gtcacagaccgttcacata

SEQ ID NO: 559903 - DNA, 19 bp, Mus musculus
  siRNA target sequence for Trim39 (NM_024468.1,1451-1469).
cagaccgttcacatatcta

SEQ ID NO: 559904 - DNA, 19 bp, Mus musculus
  siRNA target sequence for Trim39 (NM_024468.1,1453-1471).
gaccgttcacatatctaca

SEQ ID NO: 559905 - DNA, 19 bp, Mus musculus
  siRNA target sequence for Trim39 (NM_024468.1,1470-1488).
caccttcactgatactttt

SEQ ID NO: 559906 - DNA, 19 bp, Mus musculus
  siRNA target sequence for Trim39 (NM_024468.1,1473-1491).
cttcactgatacttttact

SEQ ID NO: 559907 - DNA, 19 bp, Mus musculus
  siRNA target sequence for Trim39 (NM_024468.1,1476-1494).
cactgatacttttactgaa

SEQ ID NO: 559908 - DNA, 19 bp, Mus musculus
  siRNA target sequence for Trim39 (NM_024468.1,1478-1496).
ctgatacttttactgaaaa

SEQ ID NO: 559909 - DNA, 19 bp, Mus musculus
  siRNA target sequence for Trim39 (NM_024468.1,1543-1561).
gctgcaccacttaccatta

SEQ ID NO: 559910 - DNA, 19 bp, Mus musculus
  siRNA target sequence for Trim50 (NM_178240.1,112-130).
gactgcctggataacttgt

SEQ ID NO: 559911 - DNA, 19 bp, Mus musculus
  siRNA target sequence for Trim50 (NM_178240.1,463-481).
ggcaaactggtgaacaaca

SEQ ID NO: 559912 - DNA, 19 bp, Mus musculus
  siRNA target sequence for Trim50 (NM_178240.1,477-495).
caacaggacccggattatt

SEQ ID NO: 559913 - DNA, 19 bp, Mus musculus
  siRNA target sequence for Trim50 (NM_178240.1,480-498).
caggacccggattattaat

SEQ ID NO: 559914 - DNA, 19 bp, Mus musculus
  siRNA target sequence for Trim50 (NM_178240.1,482-500).
ggacccggattattaatga

SEQ ID NO: 559915 - DNA, 19 bp, Mus musculus
  siRNA target sequence for Trim50 (NM_178240.1,639-657).
gcaggctcagggtacacaa

SEQ ID NO: 559916 - DNA, 19 bp, Mus musculus
  siRNA target sequence for Trim50 (NM_178240.1,911-929).
ctctgctggagctctctaa

SEQ ID NO: 559917 - DNA, 19 bp, Mus musculus
  siRNA target sequence for Trim50 (NM_178240.1,985-1003).
gagcgcttcgactatagca

SEQ ID NO: 559918 - DNA, 19 bp, Mus musculus
  siRNA target sequence for Trim50 (NM_178240.1,1140-1158).
gcacggtgtgtggctaatt

SEQ ID NO: 559919 - DNA, 19 bp, Mus musculus
  siRNA target sequence for Trim50 (NM_178240.1,1235-1253).
gcatcggcgtctacttaca

SEQ ID NO: 559920 - DNA, 19 bp, Mus musculus
  siRNA target sequence for Trim50 (NM_178240.1,1239-1257).
cggcgtctacttacactat

SEQ ID NO: 559921 - DNA, 19 bp, Mus musculus
  siRNA target sequence for Trim50 (NM_178240.1,1241-1259).
gcgtctacttacactatga

SEQ ID NO: 559922 - DNA, 19 bp, Mus musculus
  siRNA target sequence for Trim50 (NM_178240.1,1284-1302).
cgctgaccgtcctgatgat

SEQ ID NO: 559923 - DNA, 19 bp, Mus musculus
  siRNA target sequence for Trim50 (NM_178240.1,1286-1304).
ctgaccgtcctgatgatct

SEQ ID NO: 559924 - DNA, 19 bp, Mus musculus
  siRNA target sequence for Trim50 (NM_178240.1,1300-1318).
gatctgcggacactctata

SEQ ID NO: 559925 - DNA, 19 bp, Mus musculus
  siRNA target sequence for Trim50 (NM_178240.1,1303-1321).
ctgcggacactctatactt

SEQ ID NO: 559926 - DNA, 19 bp, Mus musculus
  siRNA target sequence for Trim7 (NM_053166.1,153-171).
gctccatctgcctagagtt

SEQ ID NO: 559927 - DNA, 19 bp, Mus musculus
  siRNA target sequence for Trim7 (NM_053166.1,619-637).
gaaggtactggaagactat

SEQ ID NO: 559928 - DNA, 19 bp, Mus musculus
  siRNA target sequence for Vat1 (NM_012037.1,270-288).
ggcttcggtggctacgata

SEQ ID NO: 559929 - DNA, 19 bp, Mus musculus
  siRNA target sequence for Vat1 (NM_012037.1,271-289).
gcttcggtggctacgataa

SEQ ID NO: 559930 - DNA, 19 bp, Mus musculus
  siRNA target sequence for Vat1 (NM_012037.1,358-376).
gagcctgtgggctcaactt

SEQ ID NO: 559931 - DNA, 19 bp, Mus musculus
  siRNA target sequence for Vat1 (NM_012037.1,631-649).
ccgcctacatggttctctt

SEQ ID NO: 559932 - DNA, 19 bp, Mus musculus
  siRNA target sequence for Vat1 (NM_012037.1,846-864).
gacgagatcaaaaagatct

SEQ ID NO: 559933 - DNA, 19 bp, Mus musculus
  siRNA target sequence for Vat1 (NM_012037.1,1107-1125).
gaggtggaactcgtcaata

SEQ ID NO: 559934 - DNA, 19 bp, Mus musculus
  siRNA target sequence for X83328 (NM_025275.2,404-422).
cacgcagtaacctgtttga

SEQ ID NO: 559935 - DNA, 19 bp, Mus musculus
  siRNA target sequence for X83328 (NM_025275.2,661-679).
cctgtttcggtctctgaaa

SEQ ID NO: 559936 - DNA, 19 bp, Mus musculus
  siRNA target sequence for X83328 (NM_025275.2,670-688).
gtctctgaaaccaagtgtt

SEQ ID NO: 559937 - DNA, 19 bp, Mus musculus
  siRNA target sequence for X83328 (NM_025275.2,676-694).
gaaaccaagtgttccttta

SEQ ID NO: 559938 - DNA, 19 bp, Mus musculus
  siRNA target sequence for X83328 (NM_025275.2,736-754).
catatcctggcattcttga

SEQ ID NO: 559939 - DNA, 19 bp, Mus musculus
  siRNA target sequence for X83328 (NM_025275.2,782-800).
gcatcgtggggatcacaat

SEQ ID NO: 559940 - DNA, 19 bp, Mus musculus
  siRNA target sequence for X83328 (NM_025275.2,841-859).
ggacaggcctccttgtcaa

SEQ ID NO: 559941 - DNA, 19 bp, Mus musculus
  siRNA target sequence for X83328 (NM_025275.2,898-916).
gacttctacacctcgaaat

SEQ ID NO: 559942 - DNA, 19 bp, Mus musculus
  siRNA target sequence for X83328 (NM_025275.2,903-921).
ctacacctcgaaatacgaa

SEQ ID NO: 559943 - DNA, 19 bp, Mus musculus
  siRNA target sequence for X83328 (NM_025275.2,952-970).
cccactgactactccattt

SEQ ID NO: 559944 - DNA, 19 bp, Mus musculus
  siRNA target sequence for X83328 (NM_025275.2,953-971).
ccactgactactccatttt

SEQ ID NO: 559945 - DNA, 19 bp, Mus musculus
  siRNA target sequence for X83328 (NM_025275.2,954-972).
cactgactactccattttt

SEQ ID NO: 559946 - DNA, 19 bp, Mus musculus
  siRNA target sequence for X83328 (NM_025275.2,958-976).
gactactccatttttgata

SEQ ID NO: 559947 - DNA, 19 bp, Mus musculus
  siRNA target sequence for X83328 (NM_025275.2,1009-1027).
ctgttgcgatcctgtaaga

SEQ ID NO: 559948 - DNA, 19 bp, Mus musculus
  siRNA target sequence for X83328 (NM_025275.2,1011-1029).
gttgcgatcctgtaagact

SEQ ID NO: 559949 - DNA, 19 bp, Mus musculus
  siRNA target sequence for X83328 (NM_025275.2,1014-1032).
gcgatcctgtaagacttta

SEQ ID NO: 559950 - DNA, 19 bp, Mus musculus
  siRNA target sequence for X83328 (NM_025275.2,1015-1033).
cgatcctgtaagactttaa

SEQ ID NO: 559951 - DNA, 19 bp, Mus musculus
  siRNA target sequence for X83328 (NM_025275.2,1035-1053).
ccatgagatcggacacata

SEQ ID NO: 559952 - DNA, 19 bp, Mus musculus
  siRNA target sequence for X83328 (NM_025275.2,1071-1089).
ccagtggcttgcgtgttta

SEQ ID NO: 559953 - DNA, 19 bp, Mus musculus
  siRNA target sequence for X83328 (NM_025275.2,1072-1090).
cagtggcttgcgtgtttaa

SEQ ID NO: 559954 - DNA, 19 bp, Mus musculus
  siRNA target sequence for X83328 (NM_025275.2,1076-1094).
ggcttgcgtgtttaatgca

SEQ ID NO: 559955 - DNA, 19 bp, Mus musculus
  siRNA target sequence for X83328 (NM_025275.2,1077-1095).
gcttgcgtgtttaatgcaa

SEQ ID NO: 559956 - DNA, 19 bp, Mus musculus
  siRNA target sequence for X83328 (NM_025275.2,1122-1140).
ccggcgtcctctgaatgtt

SEQ ID NO: 559957 - DNA, 19 bp, Mus musculus
  siRNA target sequence for X83328 (NM_025275.2,1123-1141).
cggcgtcctctgaatgttt

SEQ ID NO: 559958 - DNA, 19 bp, Mus musculus
  siRNA target sequence for X83328 (NM_025275.2,1142-1160).
gccctatctgcttacgaaa

SEQ ID NO: 559959 - DNA, 19 bp, Mus musculus
  siRNA target sequence for 1600015I10Rik (NM_027205.1,177-195).
gtgaccgagtaccaagatt

SEQ ID NO: 559960 - DNA, 19 bp, Mus musculus
  siRNA target sequence for 1600015I10Rik (NM_027205.1,179-197).
gaccgagtaccaagattct

SEQ ID NO: 559961 - DNA, 19 bp, Mus musculus
  siRNA target sequence for 1600015I10Rik (NM_027205.1,218-236).
ctacagccaaaataatcct

SEQ ID NO: 559962 - DNA, 19 bp, Mus musculus
  siRNA target sequence for 1600015I10Rik (NM_027205.1,249-267).
gtggtcttcgaggatttta

SEQ ID NO: 559963 - DNA, 19 bp, Mus musculus
  siRNA target sequence for 1600015I10Rik (NM_027205.1,316-334).
cagtgggcttccacaacat

SEQ ID NO: 559964 - DNA, 19 bp, Mus musculus
  siRNA target sequence for 1600015I10Rik (NM_027205.1,345-363).
gaggctagtaccaacatga

SEQ ID NO: 559965 - DNA, 19 bp, Mus musculus
  siRNA target sequence for Aoc2 (NM_178932.1,541-559).
gagtttgttcagatatgga

SEQ ID NO: 559966 - DNA, 19 bp, Mus musculus
  siRNA target sequence for Aoc2 (NM_178932.1,636-654).
ggcacctttgcattctact

SEQ ID NO: 559967 - DNA, 19 bp, Mus musculus
  siRNA target sequence for Aoc2 (NM_178932.1,689-707).
ggatagccctctaccataa

SEQ ID NO: 559968 - DNA, 19 bp, Mus musculus
  siRNA target sequence for Aoc2 (NM_178932.1,807-825).
ctaccttgggcattactat

SEQ ID NO: 559969 - DNA, 19 bp, Mus musculus
  siRNA target sequence for Aoc2 (NM_178932.1,829-847).
gacttggcccagttggaat

SEQ ID NO: 559970 - DNA, 19 bp, Mus musculus
  siRNA target sequence for Aoc2 (NM_178932.1,838-856).
cagttggaatgggagttta

SEQ ID NO: 559971 - DNA, 19 bp, Mus musculus
  siRNA target sequence for Aoc2 (NM_178932.1,843-861).
ggaatgggagtttaaagtt

SEQ ID NO: 559972 - DNA, 19 bp, Mus musculus
  siRNA target sequence for Aoc2 (NM_178932.1,967-985).
cttcagggtccccagtata

SEQ ID NO: 559973 - DNA, 19 bp, Mus musculus
  siRNA target sequence for Aoc2 (NM_178932.1,970-988).
cagggtccccagtataaca

SEQ ID NO: 559974 - DNA, 19 bp, Mus musculus
  siRNA target sequence for Aoc2 (NM_178932.1,972-990).
gggtccccagtataacata

SEQ ID NO: 559975 - DNA, 19 bp, Mus musculus
  siRNA target sequence for Aoc2 (NM_178932.1,974-992).
gtccccagtataacataca

SEQ ID NO: 559976 - DNA, 19 bp, Mus musculus
  siRNA target sequence for Aoc2 (NM_178932.1,1012-1030).
cccctctggacatttacct

SEQ ID NO: 559977 - DNA, 19 bp, Mus musculus
  siRNA target sequence for Aoc2 (NM_178932.1,1041-1059).
ggtgttcagtggcttaaga

SEQ ID NO: 559978 - DNA, 19 bp, Mus musculus
  siRNA target sequence for Aoc2 (NM_178932.1,1047-1065).
cagtggcttaagaattttt

SEQ ID NO: 559979 - DNA, 19 bp, Mus musculus
  siRNA target sequence for Aoc2 (NM_178932.1,1049-1067).
gtggcttaagaatttttga

SEQ ID NO: 559980 - DNA, 19 bp, Mus musculus
  siRNA target sequence for Aoc2 (NM_178932.1,1053-1071).
cttaagaatttttgatatt

SEQ ID NO: 559981 - DNA, 19 bp, Mus musculus
  siRNA target sequence for Aoc2 (NM_178932.1,1116-1134).
gtgtctgacagtttatggt

SEQ ID NO: 559982 - DNA, 19 bp, Mus musculus
  siRNA target sequence for Aoc2 (NM_178932.1,1135-1153).
gctgattcccccaaaacaa

SEQ ID NO: 559983 - DNA, 19 bp, Mus musculus
  siRNA target sequence for Aoc2 (NM_178932.1,1218-1236).
ggtggattgcccctatcaa

SEQ ID NO: 559984 - DNA, 19 bp, Mus musculus
  siRNA target sequence for Aoc2 (NM_178932.1,1330-1348).
ccccttcgaaggcatcata

SEQ ID NO: 559985 - DNA, 19 bp, Mus musculus
  siRNA target sequence for Aoc2 (NM_178932.1,1331-1349).
cccttcgaaggcatcataa

SEQ ID NO: 559986 - DNA, 19 bp, Mus musculus
  siRNA target sequence for Aoc2 (NM_178932.1,1351-1369).
ggcatcgggggtcatttct

SEQ ID NO: 559987 - DNA, 19 bp, Mus musculus
  siRNA target sequence for Aoc2 (NM_178932.1,1352-1370).
gcatcgggggtcatttcta

SEQ ID NO: 559988 - DNA, 19 bp, Mus musculus
  siRNA target sequence for Aoc2 (NM_178932.1,1410-1428).
gtcatcagtgggcaactat

SEQ ID NO: 559989 - DNA, 19 bp, Mus musculus
  siRNA target sequence for Aoc2 (NM_178932.1,1412-1430).
catcagtgggcaactatga

SEQ ID NO: 559990 - DNA, 19 bp, Mus musculus
  siRNA target sequence for Aoc2 (NM_178932.1,1417-1435).
gtgggcaactatgattaca

SEQ ID NO: 559991 - DNA, 19 bp, Mus musculus
  siRNA target sequence for Aoc2 (NM_178932.1,1486-1504).
gccacgggctatatcaaca

SEQ ID NO: 559992 - DNA, 19 bp, Mus musculus
  siRNA target sequence for Aoc2 (NM_178932.1,1545-1563).
gaaccgtgtgggagaaaga

SEQ ID NO: 559993 - DNA, 19 bp, Mus musculus
  siRNA target sequence for Aoc2 (NM_178932.1,1612-1630).
gatgtagcaggtttgaaaa

SEQ ID NO: 559994 - DNA, 19 bp, Mus musculus
  siRNA target sequence for Aoc2 (NM_178932.1,1765-1783).
cctcttcctcgataccttt

SEQ ID NO: 559995 - DNA, 19 bp, Mus musculus
  siRNA target sequence for Aoc2 (NM_178932.1,1952-1970).
gcagcagcatctattacca

SEQ ID NO: 559996 - DNA, 19 bp, Mus musculus
  siRNA target sequence for Aoc2 (NM_178932.1,1983-2001).
gagcccagctacggttttt

SEQ ID NO: 559997 - DNA, 19 bp, Mus musculus
  siRNA target sequence for Aoc2 (NM_178932.1,1986-2004).
cccagctacggtttttgct

SEQ ID NO: 559998 - DNA, 19 bp, Mus musculus
  siRNA target sequence for Aoc2 (NM_178932.1,2134-2152).
ctccgaccctacaatttct

SEQ ID NO: 559999 - DNA, 19 bp, Mus musculus
  siRNA target sequence for Aoc2 (NM_178932.1,2137-2155).
cgaccctacaatttcttca

SEQ ID NO: 560000 - DNA, 19 bp, Mus musculus
  siRNA target sequence for Aoc2 (NM_178932.1,2138-2156).
gaccctacaatttcttcaa

SEQ ID NO: 560001 - DNA, 19 bp, Mus musculus
  siRNA target sequence for Aoc2 (NM_178932.1,2177-2195).
cccctggcagcgtgtactt

SEQ ID NO: 560002 - DNA, 19 bp, Mus musculus
  siRNA target sequence for Aoc2 (NM_178932.1,2178-2196).
ccctggcagcgtgtacttt

SEQ ID NO: 560003 - DNA, 19 bp, Mus musculus
  siRNA target sequence for Aoc2 (NM_178932.1,2180-2198).
ctggcagcgtgtactttga

SEQ ID NO: 560004 - DNA, 19 bp, Mus musculus
  siRNA target sequence for Aoc2 (NM_178932.1,2274-2292).
cttaccctccttttcctat

SEQ ID NO: 560005 - DNA, 19 bp, Mus musculus
  siRNA target sequence for Aoc3 (NM_009675.1,389-407).
gtcatcaccatctttgctt

SEQ ID NO: 560006 - DNA, 19 bp, Mus musculus
  siRNA target sequence for Aoc3 (NM_009675.1,870-888).
gagagtatcaggatatcga

SEQ ID NO: 560007 - DNA, 19 bp, Mus musculus
  siRNA target sequence for Aoc3 (NM_009675.1,881-899).
gatatcgaggagatgatct

SEQ ID NO: 560008 - DNA, 19 bp, Mus musculus
  siRNA target sequence for Aoc3 (NM_009675.1,935-953).
catcactgttgcttctaca

SEQ ID NO: 560009 - DNA, 19 bp, Mus musculus
  siRNA target sequence for Aoc3 (NM_009675.1,967-985).
gaacctgctaacaatgact

SEQ ID NO: 560010 - DNA, 19 bp, Mus musculus
  siRNA target sequence for Aoc3 (NM_009675.1,1023-1041).
cctggtttggcttgtatta

SEQ ID NO: 560011 - DNA, 19 bp, Mus musculus
  siRNA target sequence for Aoc3 (NM_009675.1,1027-1045).
gtttggcttgtattacaat

SEQ ID NO: 560012 - DNA, 19 bp, Mus musculus
  siRNA target sequence for Aoc3 (NM_009675.1,1128-1146).
ccatccagaaggtattcta

SEQ ID NO: 560013 - DNA, 19 bp, Mus musculus
  siRNA target sequence for Aoc3 (NM_009675.1,1129-1147).
catccagaaggtattctat

SEQ ID NO: 560014 - DNA, 19 bp, Mus musculus
  siRNA target sequence for Aoc3 (NM_009675.1,1132-1150).
ccagaaggtattctatcaa

SEQ ID NO: 560015 - DNA, 19 bp, Mus musculus
  siRNA target sequence for Aoc3 (NM_009675.1,1144-1162).
ctatcaaggccgttactat

SEQ ID NO: 560016 - DNA, 19 bp, Mus musculus
  siRNA target sequence for Aoc3 (NM_009675.1,1148-1166).
caaggccgttactatgaga

SEQ ID NO: 560017 - DNA, 19 bp, Mus musculus
  siRNA target sequence for Aoc3 (NM_009675.1,1213-1231).
ggtattggtcccaaacaat

SEQ ID NO: 560018 - DNA, 19 bp, Mus musculus
  siRNA target sequence for Aoc3 (NM_009675.1,1238-1256).
ggtgggtcctggtctctaa

SEQ ID NO: 560019 - DNA, 19 bp, Mus musculus
  siRNA target sequence for Aoc3 (NM_009675.1,1239-1257).
gtgggtcctggtctctaaa

SEQ ID NO: 560020 - DNA, 19 bp, Mus musculus
  siRNA target sequence for Aoc3 (NM_009675.1,1241-1259).
gggtcctggtctctaaagt

SEQ ID NO: 560021 - DNA, 19 bp, Mus musculus
  siRNA target sequence for Aoc3 (NM_009675.1,1381-1399).
cagtggcccaaggatcttt

SEQ ID NO: 560022 - DNA, 19 bp, Mus musculus
  siRNA target sequence for Aoc3 (NM_009675.1,1386-1404).
gcccaaggatctttgatat

SEQ ID NO: 560023 - DNA, 19 bp, Mus musculus
  siRNA target sequence for Aoc3 (NM_009675.1,1498-1516).
ctacgtggacggtagcttt

SEQ ID NO: 560024 - DNA, 19 bp, Mus musculus
  siRNA target sequence for Aoc3 (NM_009675.1,1517-1535).
ggcattggcaaatactcta

SEQ ID NO: 560025 - DNA, 19 bp, Mus musculus
  siRNA target sequence for Aoc3 (NM_009675.1,1618-1636).
gacactacgtgatgcattt

SEQ ID NO: 560026 - DNA, 19 bp, Mus musculus
  siRNA target sequence for Aoc3 (NM_009675.1,1685-1703).
gatttctactcccattatt

SEQ ID NO: 560027 - DNA, 19 bp, Mus musculus
  siRNA target sequence for Aoc3 (NM_009675.1,1753-1771).
gctcaattacgactacata

SEQ ID NO: 560028 - DNA, 19 bp, Mus musculus
  siRNA target sequence for Aoc3 (NM_009675.1,1754-1772).
ctcaattacgactacatat

SEQ ID NO: 560029 - DNA, 19 bp, Mus musculus
  siRNA target sequence for Aoc3 (NM_009675.1,1797-1815).
gggccatagaagtcaaatt

SEQ ID NO: 560030 - DNA, 19 bp, Mus musculus
  siRNA target sequence for Aoc3 (NM_009675.1,1962-1980).
gggcctgggcagaggatat

SEQ ID NO: 560031 - DNA, 19 bp, Mus musculus
  siRNA target sequence for Aoc3 (NM_009675.1,2154-2172).
gctaccgcatccagatact

SEQ ID NO: 560032 - DNA, 19 bp, Mus musculus
  siRNA target sequence for Aoc3 (NM_009675.1,2200-2218).
ggaaagtcccatagagaaa

SEQ ID NO: 560033 - DNA, 19 bp, Mus musculus
  siRNA target sequence for Aoc3 (NM_009675.1,2277-2295).
gcagctctagcatcttcaa

SEQ ID NO: 560034 - DNA, 19 bp, Mus musculus
  siRNA target sequence for Aoc3 (NM_009675.1,2541-2559).
ccacggcctgtgaggttaa

SEQ ID NO: 560035 - DNA, 19 bp, Mus musculus
  siRNA target sequence for Ccs (NM_016892.2,289-307).
ggcagtagccaattacaga

SEQ ID NO: 560036 - DNA, 19 bp, Mus musculus
  siRNA target sequence for Ccs (NM_016892.2,290-308).
gcagtagccaattacagaa

SEQ ID NO: 560037 - DNA, 19 bp, Mus musculus
  siRNA target sequence for Ccs (NM_016892.2,291-309).
cagtagccaattacagaat

SEQ ID NO: 560038 - DNA, 19 bp, Mus musculus
  siRNA target sequence for Ccs (NM_016892.2,463-481).
cttacgagggactgcaata

SEQ ID NO: 560039 - DNA, 19 bp, Mus musculus
  siRNA target sequence for Cp (NM_007752.1,117-135).
gctgcttagcacatttata

SEQ ID NO: 560040 - DNA, 19 bp, Mus musculus
  siRNA target sequence for Cp (NM_007752.1,160-178).
gcaagagataagcattatt

SEQ ID NO: 560041 - DNA, 19 bp, Mus musculus
  siRNA target sequence for Cp (NM_007752.1,251-269).
cggaacagtccaatttcta

SEQ ID NO: 560042 - DNA, 19 bp, Mus musculus
  siRNA target sequence for Cp (NM_007752.1,252-270).
ggaacagtccaatttctat

SEQ ID NO: 560043 - DNA, 19 bp, Mus musculus
  siRNA target sequence for Cp (NM_007752.1,260-278).
ccaatttctatcttcaaaa

SEQ ID NO: 560044 - DNA, 19 bp, Mus musculus
  siRNA target sequence for Cp (NM_007752.1,280-298).
ggtccagatcgtattggaa

SEQ ID NO: 560045 - DNA, 19 bp, Mus musculus
  siRNA target sequence for Cp (NM_007752.1,330-348).
cacagatggcacctttagt

SEQ ID NO: 560046 - DNA, 19 bp, Mus musculus
  siRNA target sequence for Cp (NM_007752.1,334-352).
gatggcacctttagtaaga

SEQ ID NO: 560047 - DNA, 19 bp, Mus musculus
  siRNA target sequence for Cp (NM_007752.1,339-357).
cacctttagtaagactata

SEQ ID NO: 560048 - DNA, 19 bp, Mus musculus
  siRNA target sequence for Cp (NM_007752.1,341-359).
cctttagtaagactataga

SEQ ID NO: 560049 - DNA, 19 bp, Mus musculus
  siRNA target sequence for Cp (NM_007752.1,442-460).
gcctctaggatctacactt

SEQ ID NO: 560050 - DNA, 19 bp, Mus musculus
  siRNA target sequence for Cp (NM_007752.1,444-462).
ctctaggatctacactttt

SEQ ID NO: 560051 - DNA, 19 bp, Mus musculus
  siRNA target sequence for Cp (NM_007752.1,446-464).
ctaggatctacacttttca

SEQ ID NO: 560052 - DNA, 19 bp, Mus musculus
  siRNA target sequence for Cp (NM_007752.1,479-497).
cgtacaccaaggagtatga

SEQ ID NO: 560053 - DNA, 19 bp, Mus musculus
  siRNA target sequence for Cp (NM_007752.1,552-570).
gcttcccggacaacagtat

SEQ ID NO: 560054 - DNA, 19 bp, Mus musculus
  siRNA target sequence for Cp (NM_007752.1,556-574).
cccggacaacagtatgtgt

SEQ ID NO: 560055 - DNA, 19 bp, Mus musculus
  siRNA target sequence for Cp (NM_007752.1,557-575).
ccggacaacagtatgtgta

SEQ ID NO: 560056 - DNA, 19 bp, Mus musculus
  siRNA target sequence for Cp (NM_007752.1,558-576).
cggacaacagtatgtgtat

SEQ ID NO: 560057 - DNA, 19 bp, Mus musculus
  siRNA target sequence for Cp (NM_007752.1,560-578).
gacaacagtatgtgtatgt

SEQ ID NO: 560058 - DNA, 19 bp, Mus musculus
  siRNA target sequence for Cp (NM_007752.1,655-673).
gctccaaaagatattgcat

SEQ ID NO: 560059 - DNA, 19 bp, Mus musculus
  siRNA target sequence for Cp (NM_007752.1,677-695).
gactcataggacctctaat

SEQ ID NO: 560060 - DNA, 19 bp, Mus musculus
  siRNA target sequence for Cp (NM_007752.1,701-719).
gtaaaaaaggttctctata

SEQ ID NO: 560061 - DNA, 19 bp, Mus musculus
  siRNA target sequence for Cp (NM_007752.1,709-727).
ggttctctatataaggaaa

SEQ ID NO: 560062 - DNA, 19 bp, Mus musculus
  siRNA target sequence for Cp (NM_007752.1,742-760).
gaccaagaatttgtactaa

SEQ ID NO: 560063 - DNA, 19 bp, Mus musculus
  siRNA target sequence for Cp (NM_007752.1,745-763).
caagaatttgtactaatgt

SEQ ID NO: 560064 - DNA, 19 bp, Mus musculus
  siRNA target sequence for Cp (NM_007752.1,822-840).
ctctgaacccgagaaagtt

SEQ ID NO: 560065 - DNA, 19 bp, Mus musculus
  siRNA target sequence for Cp (NM_007752.1,865-883).
gaaagcaacaggatgtact

SEQ ID NO: 560066 - DNA, 19 bp, Mus musculus
  siRNA target sequence for Cp (NM_007752.1,870-888).
caacaggatgtactctata

SEQ ID NO: 560067 - DNA, 19 bp, Mus musculus
  siRNA target sequence for Cp (NM_007752.1,876-894).
gatgtactctataaatgga

SEQ ID NO: 560068 - DNA, 19 bp, Mus musculus
  siRNA target sequence for Cp (NM_007752.1,882-900).
ctctataaatggatataca

SEQ ID NO: 560069 - DNA, 19 bp, Mus musculus
  siRNA target sequence for Cp (NM_007752.1,884-902).
ctataaatggatatacatt

SEQ ID NO: 560070 - DNA, 19 bp, Mus musculus
  siRNA target sequence for Cp (NM_007752.1,962-980).
gtatgggtaatgaagttga

SEQ ID NO: 560071 - DNA, 19 bp, Mus musculus
  siRNA target sequence for Cp (NM_007752.1,984-1002).
gcattcagctttctttcat

SEQ ID NO: 560072 - DNA, 19 bp, Mus musculus
  siRNA target sequence for Cp (NM_007752.1,1023-1041).
gaactatcaaaccgatata

SEQ ID NO: 560073 - DNA, 19 bp, Mus musculus
  siRNA target sequence for Cp (NM_007752.1,1050-1068).
gttccctgccaccctaatt

SEQ ID NO: 560074 - DNA, 19 bp, Mus musculus
  siRNA target sequence for Cp (NM_007752.1,1053-1071).
ccctgccaccctaattgat

SEQ ID NO: 560075 - DNA, 19 bp, Mus musculus
  siRNA target sequence for Cp (NM_007752.1,1058-1076).
ccaccctaattgatgctta

SEQ ID NO: 560076 - DNA, 19 bp, Mus musculus
  siRNA target sequence for Cp (NM_007752.1,1061-1079).
ccctaattgatgcttatat

SEQ ID NO: 560077 - DNA, 19 bp, Mus musculus
  siRNA target sequence for Cp (NM_007752.1,1108-1126).
ctcagttgccagaacctaa

SEQ ID NO: 560078 - DNA, 19 bp, Mus musculus
  siRNA target sequence for Cp (NM_007752.1,1332-1350).
gcaaggtgccacaagaatt

SEQ ID NO: 560079 - DNA, 19 bp, Mus musculus
  siRNA target sequence for Cp (NM_007752.1,1388-1406).
cagatggttccttcacaaa

SEQ ID NO: 560080 - DNA, 19 bp, Mus musculus
  siRNA target sequence for Cp (NM_007752.1,1422-1440).
ccctgatgaggaacatctt

SEQ ID NO: 560081 - DNA, 19 bp, Mus musculus
  siRNA target sequence for Cp (NM_007752.1,1468-1486).
gaagtaggagacaccatta

SEQ ID NO: 560082 - DNA, 19 bp, Mus musculus
  siRNA target sequence for Cp (NM_007752.1,1681-1699).
gatcctgtgtgcctatcta

SEQ ID NO: 560083 - DNA, 19 bp, Mus musculus
  siRNA target sequence for Cp (NM_007752.1,1720-1738).
gaccccaccaaagatatat

SEQ ID NO: 560084 - DNA, 19 bp, Mus musculus
  siRNA target sequence for Cp (NM_007752.1,1722-1740).
ccccaccaaagatatattt

SEQ ID NO: 560085 - DNA, 19 bp, Mus musculus
  siRNA target sequence for Cp (NM_007752.1,1723-1741).
cccaccaaagatatattta

SEQ ID NO: 560086 - DNA, 19 bp, Mus musculus
  siRNA target sequence for Cp (NM_007752.1,1745-1763).
ggcttattgggccaatgaa

SEQ ID NO: 560087 - DNA, 19 bp, Mus musculus
  siRNA target sequence for Cp (NM_007752.1,1746-1764).
gcttattgggccaatgaaa

SEQ ID NO: 560088 - DNA, 19 bp, Mus musculus
  siRNA target sequence for Cp (NM_007752.1,1864-1882).
ctcttagatgataatatca

SEQ ID NO: 560089 - DNA, 19 bp, Mus musculus
  siRNA target sequence for Cp (NM_007752.1,1873-1891).
gataatatcaggatgttca

SEQ ID NO: 560090 - DNA, 19 bp, Mus musculus
  siRNA target sequence for Cp (NM_007752.1,1955-1973).
ccatgaatgggttcatgta

SEQ ID NO: 560091 - DNA, 19 bp, Mus musculus
  siRNA target sequence for Cp (NM_007752.1,2008-2026).
gaatccatcgtgtggtatt

SEQ ID NO: 560092 - DNA, 19 bp, Mus musculus
  siRNA target sequence for Cp (NM_007752.1,2012-2030).
ccatcgtgtggtatttgtt

SEQ ID NO: 560093 - DNA, 19 bp, Mus musculus
  siRNA target sequence for Cp (NM_007752.1,2055-2073).
gcatgggatatacttttca

SEQ ID NO: 560094 - DNA, 19 bp, Mus musculus
  siRNA target sequence for Cp (NM_007752.1,2067-2085).
cttttcaggaaatacttat

SEQ ID NO: 560095 - DNA, 19 bp, Mus musculus
  siRNA target sequence for Cp (NM_007752.1,2105-2123).
gagacactgcaaacctatt

SEQ ID NO: 560096 - DNA, 19 bp, Mus musculus
  siRNA target sequence for Cp (NM_007752.1,2118-2136).
cctattccctcataaaagt

SEQ ID NO: 560097 - DNA, 19 bp, Mus musculus
  siRNA target sequence for Cp (NM_007752.1,2176-2194).
gatgttgagtgccttacaa

SEQ ID NO: 560098 - DNA, 19 bp, Mus musculus
  siRNA target sequence for Cp (NM_007752.1,2186-2204).
gccttacaacggatcacta

SEQ ID NO: 560099 - DNA, 19 bp, Mus musculus
  siRNA target sequence for Cp (NM_007752.1,2241-2259).
gtgccagcggcagtttgaa

SEQ ID NO: 560100 - DNA, 19 bp, Mus musculus
  siRNA target sequence for Cp (NM_007752.1,2244-2262).
ccagcggcagtttgaagat

SEQ ID NO: 560101 - DNA, 19 bp, Mus musculus
  siRNA target sequence for Cp (NM_007752.1,2434-2452).
gttgtgtatcgccagttta

SEQ ID NO: 560102 - DNA, 19 bp, Mus musculus
  siRNA target sequence for Cp (NM_007752.1,2522-2540).
caccaattcatgcaaatgt

SEQ ID NO: 560103 - DNA, 19 bp, Mus musculus
  siRNA target sequence for Cp (NM_007752.1,2575-2593).
gcaaccaggccatattcaa

SEQ ID NO: 560104 - DNA, 19 bp, Mus musculus
  siRNA target sequence for Cp (NM_007752.1,2576-2594).
caaccaggccatattcaat

SEQ ID NO: 560105 - DNA, 19 bp, Mus musculus
  siRNA target sequence for Cp (NM_007752.1,2699-2717).
gagaggattcagcttgtat

SEQ ID NO: 560106 - DNA, 19 bp, Mus musculus
  siRNA target sequence for Cp (NM_007752.1,2714-2732).
gtatcccatgggcttatta

SEQ ID NO: 560107 - DNA, 19 bp, Mus musculus
  siRNA target sequence for Cp (NM_007752.1,2718-2736).
cccatgggcttattactca

SEQ ID NO: 560108 - DNA, 19 bp, Mus musculus
  siRNA target sequence for Cp (NM_007752.1,2735-2753).
caactgtggatcgagttaa

SEQ ID NO: 560109 - DNA, 19 bp, Mus musculus
  siRNA target sequence for Cp (NM_007752.1,2738-2756).
ctgtggatcgagttaagga

SEQ ID NO: 560110 - DNA, 19 bp, Mus musculus
  siRNA target sequence for Cp (NM_007752.1,2768-2786).
ggctaataggcccattgat

SEQ ID NO: 560111 - DNA, 19 bp, Mus musculus
  siRNA target sequence for Cp (NM_007752.1,2769-2787).
gctaataggcccattgatt

SEQ ID NO: 560112 - DNA, 19 bp, Mus musculus
  siRNA target sequence for Cp (NM_007752.1,2808-2826).
gaaagtattcagtcctaaa

SEQ ID NO: 560113 - DNA, 19 bp, Mus musculus
  siRNA target sequence for Cp (NM_007752.1,2879-2897).
ggtacttagatgataacat

SEQ ID NO: 560114 - DNA, 19 bp, Mus musculus
  siRNA target sequence for Cp (NM_007752.1,3011-3029).
caatgcacgtgaaagatga

SEQ ID NO: 560115 - DNA, 19 bp, Mus musculus
  siRNA target sequence for Cp (NM_007752.1,3045-3063).
gatgggaatgggcaatgaa

SEQ ID NO: 560116 - DNA, 19 bp, Mus musculus
  siRNA target sequence for Cp (NM_007752.1,3111-3129).
gcacaggggagtatacagt

SEQ ID NO: 560117 - DNA, 19 bp, Mus musculus
  siRNA target sequence for Cp (NM_007752.1,3112-3130).
cacaggggagtatacagtt

SEQ ID NO: 560118 - DNA, 19 bp, Mus musculus
  siRNA target sequence for Cp (NM_007752.1,3117-3135).
gggagtatacagttctgat

SEQ ID NO: 560119 - DNA, 19 bp, Mus musculus
  siRNA target sequence for Dbh (NM_138942.2,754-772).
cctgtgaccccaaggatta

SEQ ID NO: 560120 - DNA, 19 bp, Mus musculus
  siRNA target sequence for Dbh (NM_138942.2,755-773).
ctgtgaccccaaggattat

SEQ ID NO: 560121 - DNA, 19 bp, Mus musculus
  siRNA target sequence for Dbh (NM_138942.2,757-775).
gtgaccccaaggattatgt

SEQ ID NO: 560122 - DNA, 19 bp, Mus musculus
  siRNA target sequence for Dbh (NM_138942.2,759-777).
gaccccaaggattatgtca

SEQ ID NO: 560123 - DNA, 19 bp, Mus musculus
  siRNA target sequence for Dbh (NM_138942.2,761-779).
ccccaaggattatgtcatt

SEQ ID NO: 560124 - DNA, 19 bp, Mus musculus
  siRNA target sequence for Dbh (NM_138942.2,763-781).
ccaaggattatgtcattga

SEQ ID NO: 560125 - DNA, 19 bp, Mus musculus
  siRNA target sequence for Dbh (NM_138942.2,983-1001).
gtactggtgctatatcact

SEQ ID NO: 560126 - DNA, 19 bp, Mus musculus
  siRNA target sequence for Dbh (NM_138942.2,1161-1179).
cctgaccgactcaactact

SEQ ID NO: 560127 - DNA, 19 bp, Mus musculus
  siRNA target sequence for Dbh (NM_138942.2,1209-1227).
ggtgccaaggcattttact

SEQ ID NO: 560128 - DNA, 19 bp, Mus musculus
  siRNA target sequence for Dbh (NM_138942.2,1278-1296).
ctccgactggaagttcatt

SEQ ID NO: 560129 - DNA, 19 bp, Mus musculus
  siRNA target sequence for Dbh (NM_138942.2,1298-1316).
ccacaacccacggaagata

SEQ ID NO: 560130 - DNA, 19 bp, Mus musculus
  siRNA target sequence for Dbh (NM_138942.2,1546-1564).
gcaggaaggtggttactgt

SEQ ID NO: 560131 - DNA, 19 bp, Mus musculus
  siRNA target sequence for Dbh (NM_138942.2,1671-1689).
ggggacgtactcatcactt

SEQ ID NO: 560132 - DNA, 19 bp, Mus musculus
  siRNA target sequence for Dbh (NM_138942.2,1918-1936).
ccgtgccctggaactcttt

SEQ ID NO: 560133 - DNA, 19 bp, Mus musculus
  siRNA target sequence for Dbh (NM_138942.2,1971-1989).
gcccctatctccatgcatt

SEQ ID NO: 560134 - DNA, 19 bp, Mus musculus
  siRNA target sequence for Dbhl1 (NM_139296.1,10-28).
gttctactcttcagacttt

SEQ ID NO: 560135 - DNA, 19 bp, Mus musculus
  siRNA target sequence for Dbhl1 (NM_139296.1,23-41).
gacttttcttacttttggt

SEQ ID NO: 560136 - DNA, 19 bp, Mus musculus
  siRNA target sequence for Dbhl1 (NM_139296.1,77-95).
ctacatctccccttcgtta

SEQ ID NO: 560137 - DNA, 19 bp, Mus musculus
  siRNA target sequence for Dbhl1 (NM_139296.1,132-150).
gcgctgggactttgactat

SEQ ID NO: 560138 - DNA, 19 bp, Mus musculus
  siRNA target sequence for Dbhl1 (NM_139296.1,145-163).
gactatgaggctgagataa

SEQ ID NO: 560139 - DNA, 19 bp, Mus musculus
  siRNA target sequence for Dbhl1 (NM_139296.1,151-169).
gaggctgagataatcacat

SEQ ID NO: 560140 - DNA, 19 bp, Mus musculus
  siRNA target sequence for Dbhl1 (NM_139296.1,174-192).
gctccaagtccaaacaact

SEQ ID NO: 560141 - DNA, 19 bp, Mus musculus
  siRNA target sequence for Dbhl1 (NM_139296.1,348-366).
cctaaggctcacagaagat

SEQ ID NO: 560142 - DNA, 19 bp, Mus musculus
  siRNA target sequence for Dbhl1 (NM_139296.1,418-436).
catgatcgtgacattacga

SEQ ID NO: 560143 - DNA, 19 bp, Mus musculus
  siRNA target sequence for Dbhl1 (NM_139296.1,424-442).
cgtgacattacgagtgata

SEQ ID NO: 560144 - DNA, 19 bp, Mus musculus
  siRNA target sequence for Dbhl1 (NM_139296.1,470-488).
cggatgacataccaaagat

SEQ ID NO: 560145 - DNA, 19 bp, Mus musculus
  siRNA target sequence for Dbhl1 (NM_139296.1,491-509).
gtcgggagcatacttttgt

SEQ ID NO: 560146 - DNA, 19 bp, Mus musculus
  siRNA target sequence for Dbhl1 (NM_139296.1,493-511).
cgggagcatacttttgtca

SEQ ID NO: 560147 - DNA, 19 bp, Mus musculus
  siRNA target sequence for Dbhl1 (NM_139296.1,534-552).
gctacaatatgatgatcaa

SEQ ID NO: 560148 - DNA, 19 bp, Mus musculus
  siRNA target sequence for Dbhl1 (NM_139296.1,569-587).
ccatcatccatgacttgaa

SEQ ID NO: 560149 - DNA, 19 bp, Mus musculus
  siRNA target sequence for Dbhl1 (NM_139296.1,577-595).
catgacttgaagatcagta

SEQ ID NO: 560150 - DNA, 19 bp, Mus musculus
  siRNA target sequence for Dbhl1 (NM_139296.1,580-598).
gacttgaagatcagtaatt

SEQ ID NO: 560151 - DNA, 19 bp, Mus musculus
  siRNA target sequence for Dbhl1 (NM_139296.1,588-606).
gatcagtaatttcatcatt

SEQ ID NO: 560152 - DNA, 19 bp, Mus musculus
  siRNA target sequence for Dbhl1 (NM_139296.1,650-668).
ctattgtcagcaaaaagca

SEQ ID NO: 560153 - DNA, 19 bp, Mus musculus
  siRNA target sequence for Dbhl1 (NM_139296.1,724-742).
cacgttctcgtgtatgcat

SEQ ID NO: 560154 - DNA, 19 bp, Mus musculus
  siRNA target sequence for Dbhl1 (NM_139296.1,767-785).
caggcatcggcgaatgcta

SEQ ID NO: 560155 - DNA, 19 bp, Mus musculus
  siRNA target sequence for Dbhl1 (NM_139296.1,919-937).
gaaattcactacagcaatt

SEQ ID NO: 560156 - DNA, 19 bp, Mus musculus
  siRNA target sequence for Dbhl1 (NM_139296.1,970-988).
gggatgcggctgttctaca

SEQ ID NO: 560157 - DNA, 19 bp, Mus musculus
  siRNA target sequence for Dbhl1 (NM_139296.1,989-1007).
cctcgcaccttcgcaaata

SEQ ID NO: 560158 - DNA, 19 bp, Mus musculus
  siRNA target sequence for Dbhl1 (NM_139296.1,990-1008).
ctcgcaccttcgcaaatat

SEQ ID NO: 560159 - DNA, 19 bp, Mus musculus
  siRNA target sequence for Dbhl1 (NM_139296.1,994-1012).
caccttcgcaaatatgaca

SEQ ID NO: 560160 - DNA, 19 bp, Mus musculus
  siRNA target sequence for Dbhl1 (NM_139296.1,1064-1082).
cgggtgcagaggctttctt

SEQ ID NO: 560161 - DNA, 19 bp, Mus musculus
  siRNA target sequence for Dbhl1 (NM_139296.1,1066-1084).
ggtgcagaggctttcttgt

SEQ ID NO: 560162 - DNA, 19 bp, Mus musculus
  siRNA target sequence for Dbhl1 (NM_139296.1,1083-1101).
gtcctatggactatgcaaa

SEQ ID NO: 560163 - DNA, 19 bp, Mus musculus
  siRNA target sequence for Dbhl1 (NM_139296.1,1122-1140).
gaatggggctccagtatct

SEQ ID NO: 560164 - DNA, 19 bp, Mus musculus
  siRNA target sequence for Dbhl1 (NM_139296.1,1128-1146).
ggctccagtatctgacata

SEQ ID NO: 560165 - DNA, 19 bp, Mus musculus
  siRNA target sequence for Dbhl1 (NM_139296.1,1192-1210).
ctgcaagctctgcaataca

SEQ ID NO: 560166 - DNA, 19 bp, Mus musculus
  siRNA target sequence for Dbhl1 (NM_139296.1,1217-1235).
gaacccaactccaagtagt

SEQ ID NO: 560167 - DNA, 19 bp, Mus musculus
  siRNA target sequence for Dbhl1 (NM_139296.1,1222-1240).
caactccaagtagtatgta

SEQ ID NO: 560168 - DNA, 19 bp, Mus musculus
  siRNA target sequence for Dbhl1 (NM_139296.1,1227-1245).
ccaagtagtatgtaaagat

SEQ ID NO: 560169 - DNA, 19 bp, Mus musculus
  siRNA target sequence for Dbhl1 (NM_139296.1,1234-1252).
gtatgtaaagatttttcct

SEQ ID NO: 560170 - DNA, 19 bp, Mus musculus
  siRNA target sequence for Dbhl1 (NM_139296.1,1286-1304).
ctcatcctgtggtgattaa

SEQ ID NO: 560171 - DNA, 19 bp, Mus musculus
  siRNA target sequence for Dbhl1 (NM_139296.1,1310-1328).
gggatgaactgctgataga

SEQ ID NO: 560172 - DNA, 19 bp, Mus musculus
  siRNA target sequence for Dbhl1 (NM_139296.1,1348-1366).
gatcgtgacttcatgactt

SEQ ID NO: 560173 - DNA, 19 bp, Mus musculus
  siRNA target sequence for Dbhl1 (NM_139296.1,1369-1387).
ggaggtgccagcaccatta

SEQ ID NO: 560174 - DNA, 19 bp, Mus musculus
  siRNA target sequence for Dbhl1 (NM_139296.1,1370-1388).
gaggtgccagcaccattaa

SEQ ID NO: 560175 - DNA, 19 bp, Mus musculus
  siRNA target sequence for Dbhl1 (NM_139296.1,1375-1393).
gccagcaccattaatgaga

SEQ ID NO: 560176 - DNA, 19 bp, Mus musculus
  siRNA target sequence for Dbhl1 (NM_139296.1,1447-1465).
ggataccctgatatcatct

SEQ ID NO: 560177 - DNA, 19 bp, Mus musculus
  siRNA target sequence for Dbhl1 (NM_139296.1,1453-1471).
cctgatatcatctatgtga

SEQ ID NO: 560178 - DNA, 19 bp, Mus musculus
  siRNA target sequence for Dbhl1 (NM_139296.1,1586-1604).
cccagcagacagtattgat

SEQ ID NO: 560179 - DNA, 19 bp, Mus musculus
  siRNA target sequence for Dbhl1 (NM_139296.1,1588-1606).
cagcagacagtattgatca

SEQ ID NO: 560180 - DNA, 19 bp, Mus musculus
  siRNA target sequence for Dbhl1 (NM_139296.1,1639-1657).
ggttggattcctgatatta

SEQ ID NO: 560181 - DNA, 19 bp, Mus musculus
  siRNA target sequence for Dbhl1 (NM_139296.1,1644-1662).
gattcctgatattatacca

SEQ ID NO: 560182 - DNA, 19 bp, Mus musculus
  siRNA target sequence for Dbhl1 (NM_139296.1,1702-1720).
gtggaacctcaggacaata

SEQ ID NO: 560183 - DNA, 19 bp, Mus musculus
  siRNA target sequence for Dbhl1 (NM_139296.1,1752-1770).
cctctctggctccaatact

SEQ ID NO: 560184 - DNA, 19 bp, Mus musculus
  siRNA target sequence for F5 (NM_007976.1,91-109).
cgcaactaaggcagttcta

SEQ ID NO: 560185 - DNA, 19 bp, Mus musculus
  siRNA target sequence for F5 (NM_007976.1,92-110).
gcaactaaggcagttctat

SEQ ID NO: 560186 - DNA, 19 bp, Mus musculus
  siRNA target sequence for F5 (NM_007976.1,124-142).
ggatcctctggaactatca

SEQ ID NO: 560187 - DNA, 19 bp, Mus musculus
  siRNA target sequence for F5 (NM_007976.1,172-190).
ctataccttccttcaagaa

SEQ ID NO: 560188 - DNA, 19 bp, Mus musculus
  siRNA target sequence for F5 (NM_007976.1,279-297).
gaagttggggacgtcatta

SEQ ID NO: 560189 - DNA, 19 bp, Mus musculus
  siRNA target sequence for F5 (NM_007976.1,286-304).
gggacgtcattaaagttca

SEQ ID NO: 560190 - DNA, 19 bp, Mus musculus
  siRNA target sequence for F5 (NM_007976.1,290-308).
cgtcattaaagttcacttt

SEQ ID NO: 560191 - DNA, 19 bp, Mus musculus
  siRNA target sequence for F5 (NM_007976.1,338-356).
ccatcctcaagggattaaa

SEQ ID NO: 560192 - DNA, 19 bp, Mus musculus
  siRNA target sequence for F5 (NM_007976.1,503-521).
cctcacccacatctactat

SEQ ID NO: 560193 - DNA, 19 bp, Mus musculus
  siRNA target sequence for F5 (NM_007976.1,504-522).
ctcacccacatctactatt

SEQ ID NO: 560194 - DNA, 19 bp, Mus musculus
  siRNA target sequence for F5 (NM_007976.1,509-527).
ccacatctactattcctat

SEQ ID NO: 560195 - DNA, 19 bp, Mus musculus
  siRNA target sequence for F5 (NM_007976.1,534-552).
ctgacccaggatttcaact

SEQ ID NO: 560196 - DNA, 19 bp, Mus musculus
  siRNA target sequence for F5 (NM_007976.1,632-650).
gcatgtgctcctatttgct

SEQ ID NO: 560197 - DNA, 19 bp, Mus musculus
  siRNA target sequence for F5 (NM_007976.1,678-696).
cagtcaccatccctaatgt

SEQ ID NO: 560198 - DNA, 19 bp, Mus musculus
  siRNA target sequence for F5 (NM_007976.1,684-702).
ccatccctaatgtacacaa

SEQ ID NO: 560199 - DNA, 19 bp, Mus musculus
  siRNA target sequence for F5 (NM_007976.1,685-703).
catccctaatgtacacaat

SEQ ID NO: 560200 - DNA, 19 bp, Mus musculus
  siRNA target sequence for F5 (NM_007976.1,689-707).
cctaatgtacacaattaat

SEQ ID NO: 560201 - DNA, 19 bp, Mus musculus
  siRNA target sequence for F5 (NM_007976.1,791-809).
gccagaattgttttctatt

SEQ ID NO: 560202 - DNA, 19 bp, Mus musculus
  siRNA target sequence for F5 (NM_007976.1,795-813).
gaattgttttctattcact

SEQ ID NO: 560203 - DNA, 19 bp, Mus musculus
  siRNA target sequence for F5 (NM_007976.1,863-881).
cctggtcagcgcaacatct

SEQ ID NO: 560204 - DNA, 19 bp, Mus musculus
  siRNA target sequence for F5 (NM_007976.1,864-882).
ctggtcagcgcaacatcta

SEQ ID NO: 560205 - DNA, 19 bp, Mus musculus
  siRNA target sequence for F5 (NM_007976.1,877-895).
catctacgactgcaaacat

SEQ ID NO: 560206 - DNA, 19 bp, Mus musculus
  siRNA target sequence for F5 (NM_007976.1,883-901).
cgactgcaaacatgactat

SEQ ID NO: 560207 - DNA, 19 bp, Mus musculus
  siRNA target sequence for F5 (NM_007976.1,931-949).
ctctcatcccaaagcatta

SEQ ID NO: 560208 - DNA, 19 bp, Mus musculus
  siRNA target sequence for F5 (NM_007976.1,935-953).
catcccaaagcattatcaa

SEQ ID NO: 560209 - DNA, 19 bp, Mus musculus
  siRNA target sequence for F5 (NM_007976.1,963-981).
caggcttacattgacatta

SEQ ID NO: 560210 - DNA, 19 bp, Mus musculus
  siRNA target sequence for F5 (NM_007976.1,1065-1083).
gccgcagaggaggtcattt

SEQ ID NO: 560211 - DNA, 19 bp, Mus musculus
  siRNA target sequence for F5 (NM_007976.1,1096-1114).
ccgtgatacctgcgaatat

SEQ ID NO: 560212 - DNA, 19 bp, Mus musculus
  siRNA target sequence for F5 (NM_007976.1,1130-1148).
gtctcagcacttggataat

SEQ ID NO: 560213 - DNA, 19 bp, Mus musculus
  siRNA target sequence for F5 (NM_007976.1,1136-1154).
gcacttggataatttctca

SEQ ID NO: 560214 - DNA, 19 bp, Mus musculus
  siRNA target sequence for F5 (NM_007976.1,1142-1160).
ggataatttctcaaaccaa

SEQ ID NO: 560215 - DNA, 19 bp, Mus musculus
  siRNA target sequence for F5 (NM_007976.1,1170-1188).
cattacaagaaagttatct

SEQ ID NO: 560216 - DNA, 19 bp, Mus musculus
  siRNA target sequence for F5 (NM_007976.1,1232-1250).
ccccagcatcaaacaaagt

SEQ ID NO: 560217 - DNA, 19 bp, Mus musculus
  siRNA target sequence for F5 (NM_007976.1,1321-1339).
gccgaccctacagcattta

SEQ ID NO: 560218 - DNA, 19 bp, Mus musculus
  siRNA target sequence for F5 (NM_007976.1,1352-1370).
gaccttctctccttacgaa

SEQ ID NO: 560219 - DNA, 19 bp, Mus musculus
  siRNA target sequence for F5 (NM_007976.1,1360-1378).
ctccttacgaagatggaat

SEQ ID NO: 560220 - DNA, 19 bp, Mus musculus
  siRNA target sequence for F5 (NM_007976.1,1367-1385).
cgaagatggaatcaattct

SEQ ID NO: 560221 - DNA, 19 bp, Mus musculus
  siRNA target sequence for F5 (NM_007976.1,1409-1427).
cacgatcagaccagttcaa

SEQ ID NO: 560222 - DNA, 19 bp, Mus musculus
  siRNA target sequence for F5 (NM_007976.1,1434-1452).
gaaaccttcacttacaaat

SEQ ID NO: 560223 - DNA, 19 bp, Mus musculus
  siRNA target sequence for F5 (NM_007976.1,1721-1739).
gcgtgatgatcccaagttt

SEQ ID NO: 560224 - DNA, 19 bp, Mus musculus
  siRNA target sequence for F5 (NM_007976.1,1722-1740).
cgtgatgatcccaagtttt

SEQ ID NO: 560225 - DNA, 19 bp, Mus musculus
  siRNA target sequence for F5 (NM_007976.1,1723-1741).
gtgatgatcccaagtttta

SEQ ID NO: 560226 - DNA, 19 bp, Mus musculus
  siRNA target sequence for F5 (NM_007976.1,1728-1746).
gatcccaagttttacgaat

SEQ ID NO: 560227 - DNA, 19 bp, Mus musculus
  siRNA target sequence for F5 (NM_007976.1,1838-1856).
cagtgtgggaactcatgat

SEQ ID NO: 560228 - DNA, 19 bp, Mus musculus
  siRNA target sequence for F5 (NM_007976.1,1842-1860).
gtgggaactcatgatgata

SEQ ID NO: 560229 - DNA, 19 bp, Mus musculus
  siRNA target sequence for F5 (NM_007976.1,1879-1897).
ctgggcactcgttcatcta

SEQ ID NO: 560230 - DNA, 19 bp, Mus musculus
  siRNA target sequence for F5 (NM_007976.1,1933-1951).
ccatgcgtggtgaatctgt

SEQ ID NO: 560231 - DNA, 19 bp, Mus musculus
  siRNA target sequence for F5 (NM_007976.1,1944-1962).
gaatctgtgacagttacaa

SEQ ID NO: 560232 - DNA, 19 bp, Mus musculus
  siRNA target sequence for F5 (NM_007976.1,1952-1970).
gacagttacaatggataat

SEQ ID NO: 560233 - DNA, 19 bp, Mus musculus
  siRNA target sequence for F5 (NM_007976.1,1982-2000).
gatgttgaccaccatgaat

SEQ ID NO: 560234 - DNA, 19 bp, Mus musculus
  siRNA target sequence for F5 (NM_007976.1,2021-2039).
cctaagactgagattcaga

SEQ ID NO: 560235 - DNA, 19 bp, Mus musculus
  siRNA target sequence for F5 (NM_007976.1,2070-2088).
gaggactcatatgagattt

SEQ ID NO: 560236 - DNA, 19 bp, Mus musculus
  siRNA target sequence for F5 (NM_007976.1,2072-2090).
ggactcatatgagatttat

SEQ ID NO: 560237 - DNA, 19 bp, Mus musculus
  siRNA target sequence for F5 (NM_007976.1,2111-2129).
catgacaactcggagaatt

SEQ ID NO: 560238 - DNA, 19 bp, Mus musculus
  siRNA target sequence for F5 (NM_007976.1,2116-2134).
caactcggagaattcatga

SEQ ID NO: 560239 - DNA, 19 bp, Mus musculus
  siRNA target sequence for F5 (NM_007976.1,2186-2204).
cttactggcgtcatcatta

SEQ ID NO: 560240 - DNA, 19 bp, Mus musculus
  siRNA target sequence for F5 (NM_007976.1,2190-2208).
ctggcgtcatcattaggaa

SEQ ID NO: 560241 - DNA, 19 bp, Mus musculus
  siRNA target sequence for F5 (NM_007976.1,2192-2210).
ggcgtcatcattaggaatt

SEQ ID NO: 560242 - DNA, 19 bp, Mus musculus
  siRNA target sequence for F5 (NM_007976.1,2193-2211).
gcgtcatcattaggaatta

SEQ ID NO: 560243 - DNA, 19 bp, Mus musculus
  siRNA target sequence for F5 (NM_007976.1,2215-2233).
cattcaaaaactcatcatt

SEQ ID NO: 560244 - DNA, 19 bp, Mus musculus
  siRNA target sequence for F5 (NM_007976.1,2282-2300).
cagctctgagttcatatct

SEQ ID NO: 560245 - DNA, 19 bp, Mus musculus
  siRNA target sequence for F5 (NM_007976.1,2305-2323).
gcacagacagagttgttga

SEQ ID NO: 560246 - DNA, 19 bp, Mus musculus
  siRNA target sequence for F5 (NM_007976.1,2316-2334).
gttgttgactcaaactctt

SEQ ID NO: 560247 - DNA, 19 bp, Mus musculus
  siRNA target sequence for F5 (NM_007976.1,2335-2353).
cacgaatccttagtaaaat

SEQ ID NO: 560248 - DNA, 19 bp, Mus musculus
  siRNA target sequence for F5 (NM_007976.1,2337-2355).
cgaatccttagtaaaatca

SEQ ID NO: 560249 - DNA, 19 bp, Mus musculus
  siRNA target sequence for F5 (NM_007976.1,2412-2430).
gctggtaccctccttagaa

SEQ ID NO: 560250 - DNA, 19 bp, Mus musculus
  siRNA target sequence for F5 (NM_007976.1,2413-2431).
ctggtaccctccttagaaa

SEQ ID NO: 560251 - DNA, 19 bp, Mus musculus
  siRNA target sequence for F5 (NM_007976.1,2486-2504).
cagctcatatcatgaaaat

SEQ ID NO: 560252 - DNA, 19 bp, Mus musculus
  siRNA target sequence for F5 (NM_007976.1,2511-2529).
gaaaatccacagtcaaaca

SEQ ID NO: 560253 - DNA, 19 bp, Mus musculus
  siRNA target sequence for F5 (NM_007976.1,2571-2589).
gggaatcgagaacaagata

SEQ ID NO: 560254 - DNA, 19 bp, Mus musculus
  siRNA target sequence for F5 (NM_007976.1,2572-2590).
ggaatcgagaacaagataa

SEQ ID NO: 560255 - DNA, 19 bp, Mus musculus
  siRNA target sequence for F5 (NM_007976.1,2573-2591).
gaatcgagaacaagataaa

SEQ ID NO: 560256 - DNA, 19 bp, Mus musculus
  siRNA target sequence for F5 (NM_007976.1,2577-2595).
cgagaacaagataaaccta

SEQ ID NO: 560257 - DNA, 19 bp, Mus musculus
  siRNA target sequence for F5 (NM_007976.1,2578-2596).
gagaacaagataaacctaa

SEQ ID NO: 560258 - DNA, 19 bp, Mus musculus
  siRNA target sequence for F5 (NM_007976.1,2608-2626).
caggaagaccccacatgat

SEQ ID NO: 560259 - DNA, 19 bp, Mus musculus
  siRNA target sequence for F5 (NM_007976.1,2610-2628).
ggaagaccccacatgatga

SEQ ID NO: 560260 - DNA, 19 bp, Mus musculus
  siRNA target sequence for F5 (NM_007976.1,2611-2629).
gaagaccccacatgatgaa

SEQ ID NO: 560261 - DNA, 19 bp, Mus musculus
  siRNA target sequence for F5 (NM_007976.1,2648-2666).
gaaagcgccagctggtaaa

SEQ ID NO: 560262 - DNA, 19 bp, Mus musculus
  siRNA target sequence for F5 (NM_007976.1,2676-2694).
cattcaaacccaaagaatt

SEQ ID NO: 560263 - DNA, 19 bp, Mus musculus
  siRNA target sequence for F5 (NM_007976.1,2680-2698).
caaacccaaagaattcgta

SEQ ID NO: 560264 - DNA, 19 bp, Mus musculus
  siRNA target sequence for F5 (NM_007976.1,2684-2702).
cccaaagaattcgtattct

SEQ ID NO: 560265 - DNA, 19 bp, Mus musculus
  siRNA target sequence for F5 (NM_007976.1,2723-2741).
cattcctagcgagttgata

SEQ ID NO: 560266 - DNA, 19 bp, Mus musculus
  siRNA target sequence for F5 (NM_007976.1,2731-2749).
gcgagttgatacccttaaa

SEQ ID NO: 560267 - DNA, 19 bp, Mus musculus
  siRNA target sequence for F5 (NM_007976.1,2750-2768).
gcaaaagatcacttccaaa

SEQ ID NO: 560268 - DNA, 19 bp, Mus musculus
  siRNA target sequence for F5 (NM_007976.1,2858-2876).
gaccaacagtcctcaaaat

SEQ ID NO: 560269 - DNA, 19 bp, Mus musculus
  siRNA target sequence for F5 (NM_007976.1,2935-2953).
caagtgacctcccaacatt

SEQ ID NO: 560270 - DNA, 19 bp, Mus musculus
  siRNA target sequence for F5 (NM_007976.1,3103-3121).
ctttgagaggacataacca

SEQ ID NO: 560271 - DNA, 19 bp, Mus musculus
  siRNA target sequence for F5 (NM_007976.1,3133-3151).
cagacaggagactacttaa

SEQ ID NO: 560272 - DNA, 19 bp, Mus musculus
  siRNA target sequence for F5 (NM_007976.1,3167-3185).
ccacaagtccaatgaaaca

SEQ ID NO: 560273 - DNA, 19 bp, Mus musculus
  siRNA target sequence for F5 (NM_007976.1,3255-3273).
cagtactcgaaaaatgaca

SEQ ID NO: 560274 - DNA, 19 bp, Mus musculus
  siRNA target sequence for F5 (NM_007976.1,3281-3299).
gatgagctcttctttagat

SEQ ID NO: 560275 - DNA, 19 bp, Mus musculus
  siRNA target sequence for F5 (NM_007976.1,3345-3363).
gcccaagatcctgatcaaa

SEQ ID NO: 560276 - DNA, 19 bp, Mus musculus
  siRNA target sequence for F5 (NM_007976.1,3429-3447).
gacctaagtcatgactttt

SEQ ID NO: 560277 - DNA, 19 bp, Mus musculus
  siRNA target sequence for F5 (NM_007976.1,3456-3474).
gacattggtctaacatctt

SEQ ID NO: 560278 - DNA, 19 bp, Mus musculus
  siRNA target sequence for F5 (NM_007976.1,3483-3501).
gaccaaagtcaaaagtcat

SEQ ID NO: 560279 - DNA, 19 bp, Mus musculus
  siRNA target sequence for F5 (NM_007976.1,3565-3583).
cagaattggatcagacaat

SEQ ID NO: 560280 - DNA, 19 bp, Mus musculus
  siRNA target sequence for F5 (NM_007976.1,3567-3585).
gaattggatcagacaatta

SEQ ID NO: 560281 - DNA, 19 bp, Mus musculus
  siRNA target sequence for F5 (NM_007976.1,3939-3957).
cctgaagacaaccagaatt

SEQ ID NO: 560282 - DNA, 19 bp, Mus musculus
  siRNA target sequence for F5 (NM_007976.1,4082-4100).
gccactcccttcagacaat

SEQ ID NO: 560283 - DNA, 19 bp, Mus musculus
  siRNA target sequence for F5 (NM_007976.1,4138-4156).
ccctctcaccagattttaa

SEQ ID NO: 560284 - DNA, 19 bp, Mus musculus
  siRNA target sequence for F5 (NM_007976.1,4300-4318).
catcgcttccagaactgaa

SEQ ID NO: 560285 - DNA, 19 bp, Mus musculus
  siRNA target sequence for F5 (NM_007976.1,4371-4389).
cccacactcaataacactt

SEQ ID NO: 560286 - DNA, 19 bp, Mus musculus
  siRNA target sequence for F5 (NM_007976.1,4377-4395).
ctcaataacacttctttgt

SEQ ID NO: 560287 - DNA, 19 bp, Mus musculus
  siRNA target sequence for F5 (NM_007976.1,4387-4405).
cttctttgtcaaggaaatt

SEQ ID NO: 560288 - DNA, 19 bp, Mus musculus
  siRNA target sequence for F5 (NM_007976.1,4505-4523).
ggatgactttgtaacctat

SEQ ID NO: 560289 - DNA, 19 bp, Mus musculus
  siRNA target sequence for F5 (NM_007976.1,4506-4524).
gatgactttgtaacctata

SEQ ID NO: 560290 - DNA, 19 bp, Mus musculus
  siRNA target sequence for F5 (NM_007976.1,4559-4577).
caattcctccagaaatcct

SEQ ID NO: 560291 - DNA, 19 bp, Mus musculus
  siRNA target sequence for F5 (NM_007976.1,4567-4585).
ccagaaatcctgacactat

SEQ ID NO: 560292 - DNA, 19 bp, Mus musculus
  siRNA target sequence for F5 (NM_007976.1,4608-4626).
cacggtggacacaaaaaat

SEQ ID NO: 560293 - DNA, 19 bp, Mus musculus
  siRNA target sequence for F5 (NM_007976.1,4612-4630).
gtggacacaaaaaattcta

SEQ ID NO: 560294 - DNA, 19 bp, Mus musculus
  siRNA target sequence for F5 (NM_007976.1,4614-4632).
ggacacaaaaaattctact

SEQ ID NO: 560295 - DNA, 19 bp, Mus musculus
  siRNA target sequence for F5 (NM_007976.1,4631-4649).
ctatattgcagctgaagaa

SEQ ID NO: 560296 - DNA, 19 bp, Mus musculus
  siRNA target sequence for F5 (NM_007976.1,4668-4686).
gagtttgcacaaagtgaaa

SEQ ID NO: 560297 - DNA, 19 bp, Mus musculus
  siRNA target sequence for F5 (NM_007976.1,4726-4744).
catacaagaaagtcgtttt

SEQ ID NO: 560298 - DNA, 19 bp, Mus musculus
  siRNA target sequence for F5 (NM_007976.1,4733-4751).
gaaagtcgttttcagaaaa

SEQ ID NO: 560299 - DNA, 19 bp, Mus musculus
  siRNA target sequence for F5 (NM_007976.1,4777-4795).
gtgatcctcgggcagaata

SEQ ID NO: 560300 - DNA, 19 bp, Mus musculus
  siRNA target sequence for F5 (NM_007976.1,4850-4868).
gatccaagttcgatttaaa

SEQ ID NO: 560301 - DNA, 19 bp, Mus musculus
  siRNA target sequence for F5 (NM_007976.1,4853-4871).
ccaagttcgatttaaaaat

SEQ ID NO: 560302 - DNA, 19 bp, Mus musculus
  siRNA target sequence for F5 (NM_007976.1,4854-4872).
caagttcgatttaaaaatt

SEQ ID NO: 560303 - DNA, 19 bp, Mus musculus
  siRNA target sequence for F5 (NM_007976.1,4880-4898).
cagaccgtattctcttcat

SEQ ID NO: 560304 - DNA, 19 bp, Mus musculus
  siRNA target sequence for F5 (NM_007976.1,4902-4920).
cacggactttcctatgaaa

SEQ ID NO: 560305 - DNA, 19 bp, Mus musculus
  siRNA target sequence for F5 (NM_007976.1,4931-4949).
ggggaagacttatgaagat

SEQ ID NO: 560306 - DNA, 19 bp, Mus musculus
  siRNA target sequence for F5 (NM_007976.1,4937-4955).
gacttatgaagatgaatct

SEQ ID NO: 560307 - DNA, 19 bp, Mus musculus
  siRNA target sequence for F5 (NM_007976.1,4986-5004).
cagcccaatagcagttaca

SEQ ID NO: 560308 - DNA, 19 bp, Mus musculus
  siRNA target sequence for F5 (NM_007976.1,5063-5081).
ggcttgggcctactattct

SEQ ID NO: 560309 - DNA, 19 bp, Mus musculus
  siRNA target sequence for F5 (NM_007976.1,5135-5153).
ctgccggaaaggaacactt

SEQ ID NO: 560310 - DNA, 19 bp, Mus musculus
  siRNA target sequence for F5 (NM_007976.1,5246-5264).
caaggggtcacggagaatt

SEQ ID NO: 560311 - DNA, 19 bp, Mus musculus
  siRNA target sequence for F5 (NM_007976.1,5249-5267).
ggggtcacggagaattgaa

SEQ ID NO: 560312 - DNA, 19 bp, Mus musculus
  siRNA target sequence for F5 (NM_007976.1,5250-5268).
gggtcacggagaattgaat

SEQ ID NO: 560313 - DNA, 19 bp, Mus musculus
  siRNA target sequence for F5 (NM_007976.1,5289-5307).
cacaagttttacgcaatta

SEQ ID NO: 560314 - DNA, 19 bp, Mus musculus
  siRNA target sequence for F5 (NM_007976.1,5291-5309).
caagttttacgcaattaat

SEQ ID NO: 560315 - DNA, 19 bp, Mus musculus
  siRNA target sequence for F5 (NM_007976.1,5477-5495).
gcctggttcatttaaaact

SEQ ID NO: 560316 - DNA, 19 bp, Mus musculus
  siRNA target sequence for F5 (NM_007976.1,5624-5642).
cactggtgtcatatctgat

SEQ ID NO: 560317 - DNA, 19 bp, Mus musculus
  siRNA target sequence for F5 (NM_007976.1,5648-5666).
gatcaaggcttcggaatat

SEQ ID NO: 560318 - DNA, 19 bp, Mus musculus
  siRNA target sequence for F5 (NM_007976.1,5656-5674).
cttcggaatatctgactta

SEQ ID NO: 560319 - DNA, 19 bp, Mus musculus
  siRNA target sequence for F5 (NM_007976.1,5681-5699).
gcccagattagcacgatta

SEQ ID NO: 560320 - DNA, 19 bp, Mus musculus
  siRNA target sequence for F5 (NM_007976.1,5682-5700).
cccagattagcacgattaa

SEQ ID NO: 560321 - DNA, 19 bp, Mus musculus
  siRNA target sequence for F5 (NM_007976.1,5683-5701).
ccagattagcacgattaaa

SEQ ID NO: 560322 - DNA, 19 bp, Mus musculus
  siRNA target sequence for F5 (NM_007976.1,5686-5704).
gattagcacgattaaacaa

SEQ ID NO: 560323 - DNA, 19 bp, Mus musculus
  siRNA target sequence for F5 (NM_007976.1,5702-5720).
caatgctggttcatacaat

SEQ ID NO: 560324 - DNA, 19 bp, Mus musculus
  siRNA target sequence for F5 (NM_007976.1,5796-5814).
gtagtcaccgggatacaaa

SEQ ID NO: 560325 - DNA, 19 bp, Mus musculus
  siRNA target sequence for F5 (NM_007976.1,5820-5838).
ggtgctaaacactacctaa

SEQ ID NO: 560326 - DNA, 19 bp, Mus musculus
  siRNA target sequence for F5 (NM_007976.1,5823-5841).
gctaaacactacctaaagt

SEQ ID NO: 560327 - DNA, 19 bp, Mus musculus
  siRNA target sequence for F5 (NM_007976.1,5914-5932).
gcgggaagagcgtgatgta

SEQ ID NO: 560328 - DNA, 19 bp, Mus musculus
  siRNA target sequence for F5 (NM_007976.1,5915-5933).
cgggaagagcgtgatgtat

SEQ ID NO: 560329 - DNA, 19 bp, Mus musculus
  siRNA target sequence for F5 (NM_007976.1,5952-5970).
ggctctacaataaaagaga

SEQ ID NO: 560330 - DNA, 19 bp, Mus musculus
  siRNA target sequence for F5 (NM_007976.1,5953-5971).
gctctacaataaaagagaa

SEQ ID NO: 560331 - DNA, 19 bp, Mus musculus
  siRNA target sequence for F5 (NM_007976.1,5954-5972).
ctctacaataaaagagaat

SEQ ID NO: 560332 - DNA, 19 bp, Mus musculus
  siRNA target sequence for F5 (NM_007976.1,5991-6009).
gtggctagatacattagga

SEQ ID NO: 560333 - DNA, 19 bp, Mus musculus
  siRNA target sequence for F5 (NM_007976.1,5993-6011).
ggctagatacattaggata

SEQ ID NO: 560334 - DNA, 19 bp, Mus musculus
  siRNA target sequence for F5 (NM_007976.1,6012-6030).
cacccaacaaaatcctata

SEQ ID NO: 560335 - DNA, 19 bp, Mus musculus
  siRNA target sequence for F5 (NM_007976.1,6014-6032).
cccaacaaaatcctataat

SEQ ID NO: 560336 - DNA, 19 bp, Mus musculus
  siRNA target sequence for F5 (NM_007976.1,6110-6128).
gattcaagacaagcaaatt

SEQ ID NO: 560337 - DNA, 19 bp, Mus musculus
  siRNA target sequence for F8 (NM_007977.1,434-452).
ctttctgagccttttcaat

SEQ ID NO: 560338 - DNA, 19 bp, Mus musculus
  siRNA target sequence for F8 (NM_007977.1,438-456).
ctgagccttttcaatttct

SEQ ID NO: 560339 - DNA, 19 bp, Mus musculus
  siRNA target sequence for F8 (NM_007977.1,550-568).
caagatttcttcctagaat

SEQ ID NO: 560340 - DNA, 19 bp, Mus musculus
  siRNA target sequence for F8 (NM_007977.1,558-576).
cttcctagaatgtcaacat

SEQ ID NO: 560341 - DNA, 19 bp, Mus musculus
  siRNA target sequence for F8 (NM_007977.1,632-650).
ggaccagcttttcaacatt

SEQ ID NO: 560342 - DNA, 19 bp, Mus musculus
  siRNA target sequence for F8 (NM_007977.1,713-731).
cacagtggtcattacactt

SEQ ID NO: 560343 - DNA, 19 bp, Mus musculus
  siRNA target sequence for F8 (NM_007977.1,717-735).
gtggtcattacacttaaaa

SEQ ID NO: 560344 - DNA, 19 bp, Mus musculus
  siRNA target sequence for F8 (NM_007977.1,720-738).
gtcattacacttaaaaaca

SEQ ID NO: 560345 - DNA, 19 bp, Mus musculus
  siRNA target sequence for F8 (NM_007977.1,774-792).
gtgtcctactggaaagctt

SEQ ID NO: 560346 - DNA, 19 bp, Mus musculus
  siRNA target sequence for F8 (NM_007977.1,855-873).
cctggtgaaagtcatactt

SEQ ID NO: 560347 - DNA, 19 bp, Mus musculus
  siRNA target sequence for F8 (NM_007977.1,918-936).
cctccatgtctcacttact

SEQ ID NO: 560348 - DNA, 19 bp, Mus musculus
  siRNA target sequence for F8 (NM_007977.1,925-943).
gtctcacttactcatatat

SEQ ID NO: 560349 - DNA, 19 bp, Mus musculus
  siRNA target sequence for F8 (NM_007977.1,927-945).
ctcacttactcatatatgt

SEQ ID NO: 560350 - DNA, 19 bp, Mus musculus
  siRNA target sequence for F8 (NM_007977.1,954-972).
gatctggtgaaagatttga

SEQ ID NO: 560351 - DNA, 19 bp, Mus musculus
  siRNA target sequence for F8 (NM_007977.1,987-1005).
ggagctctgctagtatgta

SEQ ID NO: 560352 - DNA, 19 bp, Mus musculus
  siRNA target sequence for F8 (NM_007977.1,988-1006).
gagctctgctagtatgtaa

SEQ ID NO: 560353 - DNA, 19 bp, Mus musculus
  siRNA target sequence for F8 (NM_007977.1,1033-1051).
cacagatgttgtaccaatt

SEQ ID NO: 560354 - DNA, 19 bp, Mus musculus
  siRNA target sequence for F8 (NM_007977.1,1037-1055).
gatgttgtaccaatttgta

SEQ ID NO: 560355 - DNA, 19 bp, Mus musculus
  siRNA target sequence for F8 (NM_007977.1,1046-1064).
ccaatttgtactgcttttt

SEQ ID NO: 560356 - DNA, 19 bp, Mus musculus
  siRNA target sequence for F8 (NM_007977.1,1098-1116).
gaaacaaacgactcttata

SEQ ID NO: 560357 - DNA, 19 bp, Mus musculus
  siRNA target sequence for F8 (NM_007977.1,1141-1159).
ctagagactggcctaaaat

SEQ ID NO: 560358 - DNA, 19 bp, Mus musculus
  siRNA target sequence for F8 (NM_007977.1,1202-1220).
gattggatgccataggaaa

SEQ ID NO: 560359 - DNA, 19 bp, Mus musculus
  siRNA target sequence for F8 (NM_007977.1,1255-1273).
ctcctgaaatacactcaat

SEQ ID NO: 560360 - DNA, 19 bp, Mus musculus
  siRNA target sequence for F8 (NM_007977.1,1277-1295).
cctcgaaggtcacacattt

SEQ ID NO: 560361 - DNA, 19 bp, Mus musculus
  siRNA target sequence for F8 (NM_007977.1,1278-1296).
ctcgaaggtcacacatttt

SEQ ID NO: 560362 - DNA, 19 bp, Mus musculus
  siRNA target sequence for F8 (NM_007977.1,1280-1298).
cgaaggtcacacatttttt

SEQ ID NO: 560363 - DNA, 19 bp, Mus musculus
  siRNA target sequence for F8 (NM_007977.1,1284-1302).
ggtcacacattttttgtga

SEQ ID NO: 560364 - DNA, 19 bp, Mus musculus
  siRNA target sequence for F8 (NM_007977.1,1314-1332).
caagcttcattggagatat

SEQ ID NO: 560365 - DNA, 19 bp, Mus musculus
  siRNA target sequence for F8 (NM_007977.1,1326-1344).
gagatatcaccaataactt

SEQ ID NO: 560366 - DNA, 19 bp, Mus musculus
  siRNA target sequence for F8 (NM_007977.1,1354-1372).
ctcaaacactcttgataga

SEQ ID NO: 560367 - DNA, 19 bp, Mus musculus
  siRNA target sequence for F8 (NM_007977.1,1374-1392).
cttgggcagttcctactat

SEQ ID NO: 560368 - DNA, 19 bp, Mus musculus
  siRNA target sequence for F8 (NM_007977.1,1382-1400).
gttcctactattttgtcat

SEQ ID NO: 560369 - DNA, 19 bp, Mus musculus
  siRNA target sequence for F8 (NM_007977.1,1386-1404).
ctactattttgtcatatct

SEQ ID NO: 560370 - DNA, 19 bp, Mus musculus
  siRNA target sequence for F8 (NM_007977.1,1422-1440).
ggcatggaagcttatgtca

SEQ ID NO: 560371 - DNA, 19 bp, Mus musculus
  siRNA target sequence for F8 (NM_007977.1,1461-1479).
gaatcccaatggcaaaaga

SEQ ID NO: 560372 - DNA, 19 bp, Mus musculus
  siRNA target sequence for F8 (NM_007977.1,1503-1521).
gattatgatgatgatcttt

SEQ ID NO: 560373 - DNA, 19 bp, Mus musculus
  siRNA target sequence for F8 (NM_007977.1,1518-1536).
ctttattcagaaatggata

SEQ ID NO: 560374 - DNA, 19 bp, Mus musculus
  siRNA target sequence for F8 (NM_007977.1,1559-1577).
ctctccttttatccaaatt

SEQ ID NO: 560375 - DNA, 19 bp, Mus musculus
  siRNA target sequence for F8 (NM_007977.1,1578-1596).
cgctcggttgctaaaaagt

SEQ ID NO: 560376 - DNA, 19 bp, Mus musculus
  siRNA target sequence for F8 (NM_007977.1,1579-1597).
gctcggttgctaaaaagta

SEQ ID NO: 560377 - DNA, 19 bp, Mus musculus
  siRNA target sequence for F8 (NM_007977.1,1600-1618).
ctaaaacttggatacatta

SEQ ID NO: 560378 - DNA, 19 bp, Mus musculus
  siRNA target sequence for F8 (NM_007977.1,1662-1680).
cctacctcggataatggaa

SEQ ID NO: 560379 - DNA, 19 bp, Mus musculus
  siRNA target sequence for F8 (NM_007977.1,1666-1684).
cctcggataatggaagtta

SEQ ID NO: 560380 - DNA, 19 bp, Mus musculus
  siRNA target sequence for F8 (NM_007977.1,1667-1685).
ctcggataatggaagttat

SEQ ID NO: 560381 - DNA, 19 bp, Mus musculus
  siRNA target sequence for F8 (NM_007977.1,1669-1687).
cggataatggaagttataa

SEQ ID NO: 560382 - DNA, 19 bp, Mus musculus
  siRNA target sequence for F8 (NM_007977.1,1716-1734).
cggattggtaggaaatata

SEQ ID NO: 560383 - DNA, 19 bp, Mus musculus
  siRNA target sequence for F8 (NM_007977.1,1718-1736).
gattggtaggaaatataaa

SEQ ID NO: 560384 - DNA, 19 bp, Mus musculus
  siRNA target sequence for F8 (NM_007977.1,1769-1787).
ctttaagactcgtgaaact

SEQ ID NO: 560385 - DNA, 19 bp, Mus musculus
  siRNA target sequence for F8 (NM_007977.1,1782-1800).
gaaactattcagcatgaat

SEQ ID NO: 560386 - DNA, 19 bp, Mus musculus
  siRNA target sequence for F8 (NM_007977.1,1804-1822).
gactcttgggacctttact

SEQ ID NO: 560387 - DNA, 19 bp, Mus musculus
  siRNA target sequence for F8 (NM_007977.1,1808-1826).
cttgggacctttactttat

SEQ ID NO: 560388 - DNA, 19 bp, Mus musculus
  siRNA target sequence for F8 (NM_007977.1,1836-1854).
ggagacacactgttgatta

SEQ ID NO: 560389 - DNA, 19 bp, Mus musculus
  siRNA target sequence for F8 (NM_007977.1,1837-1855).
gagacacactgttgattat

SEQ ID NO: 560390 - DNA, 19 bp, Mus musculus
  siRNA target sequence for F8 (NM_007977.1,1866-1884).
caagcaagccgaccatata

SEQ ID NO: 560391 - DNA, 19 bp, Mus musculus
  siRNA target sequence for F8 (NM_007977.1,1869-1887).
gcaagccgaccatataaca

SEQ ID NO: 560392 - DNA, 19 bp, Mus musculus
  siRNA target sequence for F8 (NM_007977.1,1870-1888).
caagccgaccatataacat

SEQ ID NO: 560393 - DNA, 19 bp, Mus musculus
  siRNA target sequence for F8 (NM_007977.1,1873-1891).
gccgaccatataacattta

SEQ ID NO: 560394 - DNA, 19 bp, Mus musculus
  siRNA target sequence for F8 (NM_007977.1,1931-1949).
gagattgccaagaggtata

SEQ ID NO: 560395 - DNA, 19 bp, Mus musculus
  siRNA target sequence for F8 (NM_007977.1,1933-1951).
gattgccaagaggtataaa

SEQ ID NO: 560396 - DNA, 19 bp, Mus musculus
  siRNA target sequence for F8 (NM_007977.1,1958-1976).
gaaggatttgccaattcat

SEQ ID NO: 560397 - DNA, 19 bp, Mus musculus
  siRNA target sequence for F8 (NM_007977.1,1974-1992).
catccaggagagatattca

SEQ ID NO: 560398 - DNA, 19 bp, Mus musculus
  siRNA target sequence for F8 (NM_007977.1,1977-1995).
ccaggagagatattcaagt

SEQ ID NO: 560399 - DNA, 19 bp, Mus musculus
  siRNA target sequence for F8 (NM_007977.1,1978-1996).
caggagagatattcaagta

SEQ ID NO: 560400 - DNA, 19 bp, Mus musculus
  siRNA target sequence for F8 (NM_007977.1,1994-2012).
gtacaagtggacagttaca

SEQ ID NO: 560401 - DNA, 19 bp, Mus musculus
  siRNA target sequence for F8 (NM_007977.1,1997-2015).
caagtggacagttacagta

SEQ ID NO: 560402 - DNA, 19 bp, Mus musculus
  siRNA target sequence for F8 (NM_007977.1,2044-2062).
ggtgcctgacccgctatta

SEQ ID NO: 560403 - DNA, 19 bp, Mus musculus
  siRNA target sequence for F8 (NM_007977.1,2049-2067).
ctgacccgctattattcaa

SEQ ID NO: 560404 - DNA, 19 bp, Mus musculus
  siRNA target sequence for F8 (NM_007977.1,2051-2069).
gacccgctattattcaagt

SEQ ID NO: 560405 - DNA, 19 bp, Mus musculus
  siRNA target sequence for F8 (NM_007977.1,2053-2071).
cccgctattattcaagttt

SEQ ID NO: 560406 - DNA, 19 bp, Mus musculus
  siRNA target sequence for F8 (NM_007977.1,2123-2141).
ctgctacaaagaatctgta

SEQ ID NO: 560407 - DNA, 19 bp, Mus musculus
  siRNA target sequence for F8 (NM_007977.1,2218-2236).
ggtacatcacagagaacat

SEQ ID NO: 560408 - DNA, 19 bp, Mus musculus
  siRNA target sequence for F8 (NM_007977.1,2311-2329).
gcatcaatggctatgtttt

SEQ ID NO: 560409 - DNA, 19 bp, Mus musculus
  siRNA target sequence for F8 (NM_007977.1,2397-2415).
cagacagacttcttatcta

SEQ ID NO: 560410 - DNA, 19 bp, Mus musculus
  siRNA target sequence for F8 (NM_007977.1,2401-2419).
cagacttcttatctatctt

SEQ ID NO: 560411 - DNA, 19 bp, Mus musculus
  siRNA target sequence for F8 (NM_007977.1,2403-2421).
gacttcttatctatcttct

SEQ ID NO: 560412 - DNA, 19 bp, Mus musculus
  siRNA target sequence for F8 (NM_007977.1,2427-2445).
ggatatactttcaaacaca

SEQ ID NO: 560413 - DNA, 19 bp, Mus musculus
  siRNA target sequence for F8 (NM_007977.1,2428-2446).
gatatactttcaaacacaa

SEQ ID NO: 560414 - DNA, 19 bp, Mus musculus
  siRNA target sequence for F8 (NM_007977.1,2444-2462).
caaaatggtctatgaagat

SEQ ID NO: 560415 - DNA, 19 bp, Mus musculus
  siRNA target sequence for F8 (NM_007977.1,2450-2468).
ggtctatgaagatacactt

SEQ ID NO: 560416 - DNA, 19 bp, Mus musculus
  siRNA target sequence for F8 (NM_007977.1,2487-2505).
ggagaaactgtctttatgt

SEQ ID NO: 560417 - DNA, 19 bp, Mus musculus
  siRNA target sequence for F8 (NM_007977.1,2527-2545).
gggtcttggggtgtcataa

SEQ ID NO: 560418 - DNA, 19 bp, Mus musculus
  siRNA target sequence for F8 (NM_007977.1,2528-2546).
ggtcttggggtgtcataat

SEQ ID NO: 560419 - DNA, 19 bp, Mus musculus
  siRNA target sequence for F8 (NM_007977.1,2529-2547).
gtcttggggtgtcataatt

SEQ ID NO: 560420 - DNA, 19 bp, Mus musculus
  siRNA target sequence for F8 (NM_007977.1,2531-2549).
cttggggtgtcataattca

SEQ ID NO: 560421 - DNA, 19 bp, Mus musculus
  siRNA target sequence for F8 (NM_007977.1,2603-2621).
gagcactagtgattattat

SEQ ID NO: 560422 - DNA, 19 bp, Mus musculus
  siRNA target sequence for F8 (NM_007977.1,2605-2623).
gcactagtgattattatga

SEQ ID NO: 560423 - DNA, 19 bp, Mus musculus
  siRNA target sequence for F8 (NM_007977.1,2606-2624).
cactagtgattattatgaa

SEQ ID NO: 560424 - DNA, 19 bp, Mus musculus
  siRNA target sequence for F8 (NM_007977.1,2608-2626).
ctagtgattattatgaaga

SEQ ID NO: 560425 - DNA, 19 bp, Mus musculus
  siRNA target sequence for F8 (NM_007977.1,2651-2669).
gttggtgaatgagaacaat

SEQ ID NO: 560426 - DNA, 19 bp, Mus musculus
  siRNA target sequence for F8 (NM_007977.1,2696-2714).
gaatacaaatcatcctaat

SEQ ID NO: 560427 - DNA, 19 bp, Mus musculus
  siRNA target sequence for F8 (NM_007977.1,2709-2727).
cctaatactaggaaaaaga

SEQ ID NO: 560428 - DNA, 19 bp, Mus musculus
  siRNA target sequence for F8 (NM_007977.1,2821-2839).
cagttagtgacatgttgat

SEQ ID NO: 560429 - DNA, 19 bp, Mus musculus
  siRNA target sequence for F8 (NM_007977.1,2860-2878).
ctactccacatggcttatt

SEQ ID NO: 560430 - DNA, 19 bp, Mus musculus
  siRNA target sequence for F8 (NM_007977.1,2890-2908).
gccaagaagccatctatga

SEQ ID NO: 560431 - DNA, 19 bp, Mus musculus
  siRNA target sequence for F8 (NM_007977.1,2909-2927).
ggctattcatgatgatcat

SEQ ID NO: 560432 - DNA, 19 bp, Mus musculus
  siRNA target sequence for F8 (NM_007977.1,2952-2970).
gaaggcccatctaaagtga

SEQ ID NO: 560433 - DNA, 19 bp, Mus musculus
  siRNA target sequence for F8 (NM_007977.1,3056-3074).
ggagacaactatagaagta

SEQ ID NO: 560434 - DNA, 19 bp, Mus musculus
  siRNA target sequence for F8 (NM_007977.1,3057-3075).
gagacaactatagaagtaa

SEQ ID NO: 560435 - DNA, 19 bp, Mus musculus
  siRNA target sequence for F8 (NM_007977.1,3090-3108).
ggtttgcaagtttctagtt

SEQ ID NO: 560436 - DNA, 19 bp, Mus musculus
  siRNA target sequence for F8 (NM_007977.1,3103-3121).
ctagtttgccaagtaatct

SEQ ID NO: 560437 - DNA, 19 bp, Mus musculus
  siRNA target sequence for F8 (NM_007977.1,3111-3129).
ccaagtaatctaatgacta

SEQ ID NO: 560438 - DNA, 19 bp, Mus musculus
  siRNA target sequence for F8 (NM_007977.1,3133-3151).
caattctgtcagacaattt

SEQ ID NO: 560439 - DNA, 19 bp, Mus musculus
  siRNA target sequence for F8 (NM_007977.1,3170-3188).
gacagattcttcaggattt

SEQ ID NO: 560440 - DNA, 19 bp, Mus musculus
  siRNA target sequence for F8 (NM_007977.1,3197-3215).
gccagttcactctagtagt

SEQ ID NO: 560441 - DNA, 19 bp, Mus musculus
  siRNA target sequence for F8 (NM_007977.1,3198-3216).
ccagttcactctagtagta

SEQ ID NO: 560442 - DNA, 19 bp, Mus musculus
  siRNA target sequence for F8 (NM_007977.1,3199-3217).
cagttcactctagtagtaa

SEQ ID NO: 560443 - DNA, 19 bp, Mus musculus
  siRNA target sequence for F8 (NM_007977.1,3201-3219).
gttcactctagtagtaaat

SEQ ID NO: 560444 - DNA, 19 bp, Mus musculus
  siRNA target sequence for F8 (NM_007977.1,3223-3241).
gtactactgcatttggtaa

SEQ ID NO: 560445 - DNA, 19 bp, Mus musculus
  siRNA target sequence for F8 (NM_007977.1,3226-3244).
ctactgcatttggtaagaa

SEQ ID NO: 560446 - DNA, 19 bp, Mus musculus
  siRNA target sequence for F8 (NM_007977.1,3254-3272).
ccttgttgggtctcatgta

SEQ ID NO: 560447 - DNA, 19 bp, Mus musculus
  siRNA target sequence for F8 (NM_007977.1,3300-3318).
gattccaacatattggatt

SEQ ID NO: 560448 - DNA, 19 bp, Mus musculus
  siRNA target sequence for F8 (NM_007977.1,3305-3323).
caacatattggattcaact

SEQ ID NO: 560449 - DNA, 19 bp, Mus musculus
  siRNA target sequence for F8 (NM_007977.1,3308-3326).
catattggattcaacttta

SEQ ID NO: 560450 - DNA, 19 bp, Mus musculus
  siRNA target sequence for F8 (NM_007977.1,3329-3347).
gtatagtcaagaaagttta

SEQ ID NO: 560451 - DNA, 19 bp, Mus musculus
  siRNA target sequence for F8 (NM_007977.1,3343-3361).
gtttaccaagagataatat

SEQ ID NO: 560452 - DNA, 19 bp, Mus musculus
  siRNA target sequence for F8 (NM_007977.1,3398-3416).
gaggtttcatggaattgct

SEQ ID NO: 560453 - DNA, 19 bp, Mus musculus
  siRNA target sequence for F8 (NM_007977.1,3405-3423).
catggaattgctttattga

SEQ ID NO: 560454 - DNA, 19 bp, Mus musculus
  siRNA target sequence for F8 (NM_007977.1,3424-3442).
ccaaagataatactttatt

SEQ ID NO: 560455 - DNA, 19 bp, Mus musculus
  siRNA target sequence for F8 (NM_007977.1,3520-3538).
gcccaacatcaattgagaa

SEQ ID NO: 560456 - DNA, 19 bp, Mus musculus
  siRNA target sequence for F8 (NM_007977.1,3522-3540).
ccaacatcaattgagaata

SEQ ID NO: 560457 - DNA, 19 bp, Mus musculus
  siRNA target sequence for F8 (NM_007977.1,3563-3581).
catattaaaggtcaatagt

SEQ ID NO: 560458 - DNA, 19 bp, Mus musculus
  siRNA target sequence for F8 (NM_007977.1,3572-3590).
ggtcaatagtgagattcaa

SEQ ID NO: 560459 - DNA, 19 bp, Mus musculus
  siRNA target sequence for F8 (NM_007977.1,3640-3658).
catatttgagactaaacca

SEQ ID NO: 560460 - DNA, 19 bp, Mus musculus
  siRNA target sequence for F8 (NM_007977.1,3656-3674).
ccatatgctaaatagaact

SEQ ID NO: 560461 - DNA, 19 bp, Mus musculus
  siRNA target sequence for F8 (NM_007977.1,3706-3724).
gaaaagatgaagatcctat

SEQ ID NO: 560462 - DNA, 19 bp, Mus musculus
  siRNA target sequence for F8 (NM_007977.1,3745-3763).
caatcatgccattttccaa

SEQ ID NO: 560463 - DNA, 19 bp, Mus musculus
  siRNA target sequence for F8 (NM_007977.1,3778-3796).
cagaatcttcaaattggtt

SEQ ID NO: 560464 - DNA, 19 bp, Mus musculus
  siRNA target sequence for F8 (NM_007977.1,3780-3798).
gaatcttcaaattggttta

SEQ ID NO: 560465 - DNA, 19 bp, Mus musculus
  siRNA target sequence for F8 (NM_007977.1,3844-3862).
gtccaaagcaattagtata

SEQ ID NO: 560466 - DNA, 19 bp, Mus musculus
  siRNA target sequence for F8 (NM_007977.1,3922-3940).
cagtagaacaggatggatt

SEQ ID NO: 560467 - DNA, 19 bp, Mus musculus
  siRNA target sequence for F8 (NM_007977.1,3930-3948).
caggatggatttacaaaga

SEQ ID NO: 560468 - DNA, 19 bp, Mus musculus
  siRNA target sequence for F8 (NM_007977.1,3965-3983).
catggcttttccacataat

SEQ ID NO: 560469 - DNA, 19 bp, Mus musculus
  siRNA target sequence for F8 (NM_007977.1,4003-4021).
ctttgtctaacgtacatga

SEQ ID NO: 560470 - DNA, 19 bp, Mus musculus
  siRNA target sequence for F8 (NM_007977.1,4067-4085).
gaaggaagcactaattgaa

SEQ ID NO: 560471 - DNA, 19 bp, Mus musculus
  siRNA target sequence for F8 (NM_007977.1,4113-4131).
gaagcaactggctctaaga

SEQ ID NO: 560472 - DNA, 19 bp, Mus musculus
  siRNA target sequence for F8 (NM_007977.1,4123-4141).
gctctaagaatttcttgaa

SEQ ID NO: 560473 - DNA, 19 bp, Mus musculus
  siRNA target sequence for F8 (NM_007977.1,4124-4142).
ctctaagaatttcttgaaa

SEQ ID NO: 560474 - DNA, 19 bp, Mus musculus
  siRNA target sequence for F8 (NM_007977.1,4160-4178).
cactaggcaaaatataagt

SEQ ID NO: 560475 - DNA, 19 bp, Mus musculus
  siRNA target sequence for F8 (NM_007977.1,4191-4209).
catgtaccagtacttcaaa

SEQ ID NO: 560476 - DNA, 19 bp, Mus musculus
  siRNA target sequence for F8 (NM_007977.1,4200-4218).
gtacttcaaaacatcacat

SEQ ID NO: 560477 - DNA, 19 bp, Mus musculus
  siRNA target sequence for F8 (NM_007977.1,4251-4269).
cacatggagcatttcttta

SEQ ID NO: 560478 - DNA, 19 bp, Mus musculus
  siRNA target sequence for F8 (NM_007977.1,4337-4355).
ctatccaagccagaagaat

SEQ ID NO: 560479 - DNA, 19 bp, Mus musculus
  siRNA target sequence for F8 (NM_007977.1,4341-4359).
ccaagccagaagaatatta

SEQ ID NO: 560480 - DNA, 19 bp, Mus musculus
  siRNA target sequence for F8 (NM_007977.1,4400-4418).
gtcaactcaatggcttaaa

SEQ ID NO: 560481 - DNA, 19 bp, Mus musculus
  siRNA target sequence for F8 (NM_007977.1,4407-4425).
caatggcttaaaaccataa

SEQ ID NO: 560482 - DNA, 19 bp, Mus musculus
  siRNA target sequence for F8 (NM_007977.1,4429-4447).
gttcaacacagtgtatcat

SEQ ID NO: 560483 - DNA, 19 bp, Mus musculus
  siRNA target sequence for F8 (NM_007977.1,4432-4450).
caacacagtgtatcattaa

SEQ ID NO: 560484 - DNA, 19 bp, Mus musculus
  siRNA target sequence for F8 (NM_007977.1,4435-4453).
cacagtgtatcattaaaca

SEQ ID NO: 560485 - DNA, 19 bp, Mus musculus
  siRNA target sequence for F8 (NM_007977.1,4441-4459).
gtatcattaaacagataga

SEQ ID NO: 560486 - DNA, 19 bp, Mus musculus
  siRNA target sequence for F8 (NM_007977.1,4489-4507).
ctaaatcttccttatcaga

SEQ ID NO: 560487 - DNA, 19 bp, Mus musculus
  siRNA target sequence for F8 (NM_007977.1,4526-4544).
caccactcagacaaatagt

SEQ ID NO: 560488 - DNA, 19 bp, Mus musculus
  siRNA target sequence for F8 (NM_007977.1,4529-4547).
cactcagacaaatagttct

SEQ ID NO: 560489 - DNA, 19 bp, Mus musculus
  siRNA target sequence for F8 (NM_007977.1,4543-4561).
gttctgactcacacattgt

SEQ ID NO: 560490 - DNA, 19 bp, Mus musculus
  siRNA target sequence for F8 (NM_007977.1,4573-4591).
catttccaccaatagatct

SEQ ID NO: 560491 - DNA, 19 bp, Mus musculus
  siRNA target sequence for F8 (NM_007977.1,4578-4596).
ccaccaatagatctcaaaa

SEQ ID NO: 560492 - DNA, 19 bp, Mus musculus
  siRNA target sequence for F8 (NM_007977.1,4581-4599).
ccaatagatctcaaaagga

SEQ ID NO: 560493 - DNA, 19 bp, Mus musculus
  siRNA target sequence for F8 (NM_007977.1,4592-4610).
caaaaggagtccattccaa

SEQ ID NO: 560494 - DNA, 19 bp, Mus musculus
  siRNA target sequence for F8 (NM_007977.1,4643-4661).
catttatgactttaagaca

SEQ ID NO: 560495 - DNA, 19 bp, Mus musculus
  siRNA target sequence for F8 (NM_007977.1,4658-4676).
gacaaaaagttcaagaatt

SEQ ID NO: 560496 - DNA, 19 bp, Mus musculus
  siRNA target sequence for F8 (NM_007977.1,4728-4746).
gccattctaccatggaata

SEQ ID NO: 560497 - DNA, 19 bp, Mus musculus
  siRNA target sequence for F8 (NM_007977.1,4734-4752).
ctaccatggaatatgttca

SEQ ID NO: 560498 - DNA, 19 bp, Mus musculus
  siRNA target sequence for F8 (NM_007977.1,4741-4759).
ggaatatgttcatagatca

SEQ ID NO: 560499 - DNA, 19 bp, Mus musculus
  siRNA target sequence for F8 (NM_007977.1,4755-4773).
gatcaaggaaaatttacct

SEQ ID NO: 560500 - DNA, 19 bp, Mus musculus
  siRNA target sequence for F8 (NM_007977.1,4858-4876).
ctggcaaaattgaattgct

SEQ ID NO: 560501 - DNA, 19 bp, Mus musculus
  siRNA target sequence for F8 (NM_007977.1,4936-4954).
ctggacacttgaatctcat

SEQ ID NO: 560502 - DNA, 19 bp, Mus musculus
  siRNA target sequence for F8 (NM_007977.1,4980-4998).
caggggcctactaaatgga

SEQ ID NO: 560503 - DNA, 19 bp, Mus musculus
  siRNA target sequence for F8 (NM_007977.1,4982-5000).
ggggcctactaaatggaat

SEQ ID NO: 560504 - DNA, 19 bp, Mus musculus
  siRNA target sequence for F8 (NM_007977.1,4983-5001).
gggcctactaaatggaata

SEQ ID NO: 560505 - DNA, 19 bp, Mus musculus
  siRNA target sequence for F8 (NM_007977.1,5056-5074).
ctcgctcaaaactgctaaa

SEQ ID NO: 560506 - DNA, 19 bp, Mus musculus
  siRNA target sequence for F8 (NM_007977.1,5106-5124).
cagataccaaaagatatgt

SEQ ID NO: 560507 - DNA, 19 bp, Mus musculus
  siRNA target sequence for F8 (NM_007977.1,5166-5184).
caagaggacaccattttgt

SEQ ID NO: 560508 - DNA, 19 bp, Mus musculus
  siRNA target sequence for F8 (NM_007977.1,5193-5211).
cctcatggaaacagtcatt

SEQ ID NO: 560509 - DNA, 19 bp, Mus musculus
  siRNA target sequence for F8 (NM_007977.1,5307-5325).
gtgttgaaacgacatcaaa

SEQ ID NO: 560510 - DNA, 19 bp, Mus musculus
  siRNA target sequence for F8 (NM_007977.1,5326-5344).
gggaacttagtgcttttca

SEQ ID NO: 560511 - DNA, 19 bp, Mus musculus
  siRNA target sequence for F8 (NM_007977.1,5327-5345).
ggaacttagtgcttttcaa

SEQ ID NO: 560512 - DNA, 19 bp, Mus musculus
  siRNA target sequence for F8 (NM_007977.1,5328-5346).
gaacttagtgcttttcaat

SEQ ID NO: 560513 - DNA, 19 bp, Mus musculus
  siRNA target sequence for F8 (NM_007977.1,5392-5410).
caatcgaggattttgacat

SEQ ID NO: 560514 - DNA, 19 bp, Mus musculus
  siRNA target sequence for F8 (NM_007977.1,5397-5415).
gaggattttgacatttaca

SEQ ID NO: 560515 - DNA, 19 bp, Mus musculus
  siRNA target sequence for F8 (NM_007977.1,5438-5456).
ccgcagctttcaacagaaa

SEQ ID NO: 560516 - DNA, 19 bp, Mus musculus
  siRNA target sequence for F8 (NM_007977.1,5439-5457).
cgcagctttcaacagaaaa

SEQ ID NO: 560517 - DNA, 19 bp, Mus musculus
  siRNA target sequence for F8 (NM_007977.1,5498-5516).
ctatgggatgagtacatct

SEQ ID NO: 560518 - DNA, 19 bp, Mus musculus
  siRNA target sequence for F8 (NM_007977.1,5507-5525).
gagtacatctcatgttcta

SEQ ID NO: 560519 - DNA, 19 bp, Mus musculus
  siRNA target sequence for F8 (NM_007977.1,5512-5530).
catctcatgttctacgaaa

SEQ ID NO: 560520 - DNA, 19 bp, Mus musculus
  siRNA target sequence for F8 (NM_007977.1,5556-5574).
cagttcaagaaagtagttt

SEQ ID NO: 560521 - DNA, 19 bp, Mus musculus
  siRNA target sequence for F8 (NM_007977.1,5596-5614).
cctttagtcagcccttata

SEQ ID NO: 560522 - DNA, 19 bp, Mus musculus
  siRNA target sequence for F8 (NM_007977.1,5597-5615).
ctttagtcagcccttatat

SEQ ID NO: 560523 - DNA, 19 bp, Mus musculus
  siRNA target sequence for F8 (NM_007977.1,5608-5626).
ccttatatcgtggagaatt

SEQ ID NO: 560524 - DNA, 19 bp, Mus musculus
  siRNA target sequence for F8 (NM_007977.1,5609-5627).
cttatatcgtggagaatta

SEQ ID NO: 560525 - DNA, 19 bp, Mus musculus
  siRNA target sequence for F8 (NM_007977.1,5617-5635).
gtggagaattaaatgaaca

SEQ ID NO: 560526 - DNA, 19 bp, Mus musculus
  siRNA target sequence for F8 (NM_007977.1,5640-5658).
gggttgttgggcccatata

SEQ ID NO: 560527 - DNA, 19 bp, Mus musculus
  siRNA target sequence for F8 (NM_007977.1,5641-5659).
ggttgttgggcccatatat

SEQ ID NO: 560528 - DNA, 19 bp, Mus musculus
  siRNA target sequence for F8 (NM_007977.1,5645-5663).
gttgggcccatatataaga

SEQ ID NO: 560529 - DNA, 19 bp, Mus musculus
  siRNA target sequence for F8 (NM_007977.1,5673-5691).
gaagacaacattatggtaa

SEQ ID NO: 560530 - DNA, 19 bp, Mus musculus
  siRNA target sequence for F8 (NM_007977.1,5711-5729).
ccgtccctactccttctat

SEQ ID NO: 560531 - DNA, 19 bp, Mus musculus
  siRNA target sequence for F8 (NM_007977.1,5715-5733).
ccctactccttctattcta

SEQ ID NO: 560532 - DNA, 19 bp, Mus musculus
  siRNA target sequence for F8 (NM_007977.1,5734-5752).
gcctcatttcttataaaga

SEQ ID NO: 560533 - DNA, 19 bp, Mus musculus
  siRNA target sequence for F8 (NM_007977.1,5773-5791).
ctagaagaaactttgtcaa

SEQ ID NO: 560534 - DNA, 19 bp, Mus musculus
  siRNA target sequence for F8 (NM_007977.1,5818-5836).
ggaaagtacaacatcatat

SEQ ID NO: 560535 - DNA, 19 bp, Mus musculus
  siRNA target sequence for F8 (NM_007977.1,5839-5857).
cacccacagaagatgagtt

SEQ ID NO: 560536 - DNA, 19 bp, Mus musculus
  siRNA target sequence for F8 (NM_007977.1,5863-5881).
gcaaggcctgggcttattt

SEQ ID NO: 560537 - DNA, 19 bp, Mus musculus
  siRNA target sequence for F8 (NM_007977.1,5904-5922).
gatatgcactcgggattaa

SEQ ID NO: 560538 - DNA, 19 bp, Mus musculus
  siRNA target sequence for F8 (NM_007977.1,5909-5927).
gcactcgggattaattgga

SEQ ID NO: 560539 - DNA, 19 bp, Mus musculus
  siRNA target sequence for F8 (NM_007977.1,5942-5960).
ccacgcgaacacactgaat

SEQ ID NO: 560540 - DNA, 19 bp, Mus musculus
  siRNA target sequence for F8 (NM_007977.1,6031-6049).
gctggtacttcactgaaaa

SEQ ID NO: 560541 - DNA, 19 bp, Mus musculus
  siRNA target sequence for F8 (NM_007977.1,6097-6115).
ccactttgaaagagaatta

SEQ ID NO: 560542 - DNA, 19 bp, Mus musculus
  siRNA target sequence for F8 (NM_007977.1,6122-6140).
ccatgcaatcaatggttat

SEQ ID NO: 560543 - DNA, 19 bp, Mus musculus
  siRNA target sequence for F8 (NM_007977.1,6161-6179).
cttagtaatggctcaagat

SEQ ID NO: 560544 - DNA, 19 bp, Mus musculus
  siRNA target sequence for F8 (NM_007977.1,6165-6183).
gtaatggctcaagatcaaa

SEQ ID NO: 560545 - DNA, 19 bp, Mus musculus
  siRNA target sequence for F8 (NM_007977.1,6174-6192).
caagatcaaaggattcgat

SEQ ID NO: 560546 - DNA, 19 bp, Mus musculus
  siRNA target sequence for F8 (NM_007977.1,6264-6282).
cggaaaaaagaggagtata

SEQ ID NO: 560547 - DNA, 19 bp, Mus musculus
  siRNA target sequence for F8 (NM_007977.1,6348-6366).
ggaatatggcgagtagaat

SEQ ID NO: 560548 - DNA, 19 bp, Mus musculus
  siRNA target sequence for F8 (NM_007977.1,6356-6374).
gcgagtagaatgccttatt

SEQ ID NO: 560549 - DNA, 19 bp, Mus musculus
  siRNA target sequence for F8 (NM_007977.1,6390-6408).
gctgggatgagcactcttt

SEQ ID NO: 560550 - DNA, 19 bp, Mus musculus
  siRNA target sequence for F8 (NM_007977.1,6454-6472).
ctggaagcatccgtgattt

SEQ ID NO: 560551 - DNA, 19 bp, Mus musculus
  siRNA target sequence for F8 (NM_007977.1,6457-6475).
gaagcatccgtgatttcca

SEQ ID NO: 560552 - DNA, 19 bp, Mus musculus
  siRNA target sequence for F8 (NM_007977.1,6577-6595).
ggatcaaggtagatctgtt

SEQ ID NO: 560553 - DNA, 19 bp, Mus musculus
  siRNA target sequence for F8 (NM_007977.1,6596-6614).
ggcaccaatgattgttcat

SEQ ID NO: 560554 - DNA, 19 bp, Mus musculus
  siRNA target sequence for F8 (NM_007977.1,6627-6645).
cagggtgctcgtcagaaat

SEQ ID NO: 560555 - DNA, 19 bp, Mus musculus
  siRNA target sequence for F8 (NM_007977.1,6641-6659).
gaaattttccagcctttat

SEQ ID NO: 560556 - DNA, 19 bp, Mus musculus
  siRNA target sequence for F8 (NM_007977.1,6652-6670).
gcctttatatctctcaatt

SEQ ID NO: 560557 - DNA, 19 bp, Mus musculus
  siRNA target sequence for F8 (NM_007977.1,6653-6671).
cctttatatctctcaattt

SEQ ID NO: 560558 - DNA, 19 bp, Mus musculus
  siRNA target sequence for F8 (NM_007977.1,6698-6716).
gaagtggctgagttatcaa

SEQ ID NO: 560559 - DNA, 19 bp, Mus musculus
  siRNA target sequence for F8 (NM_007977.1,6761-6779).
ctcatctgggattaagcat

SEQ ID NO: 560560 - DNA, 19 bp, Mus musculus
  siRNA target sequence for F8 (NM_007977.1,6763-6781).
catctgggattaagcataa

SEQ ID NO: 560561 - DNA, 19 bp, Mus musculus
  siRNA target sequence for F8 (NM_007977.1,6795-6813).
ccaattattgctcgatata

SEQ ID NO: 560562 - DNA, 19 bp, Mus musculus
  siRNA target sequence for F8 (NM_007977.1,6796-6814).
caattattgctcgatatat

SEQ ID NO: 560563 - DNA, 19 bp, Mus musculus
  siRNA target sequence for F8 (NM_007977.1,6816-6834).
cgtttgcaccccactcatt

SEQ ID NO: 560564 - DNA, 19 bp, Mus musculus
  siRNA target sequence for F8 (NM_007977.1,6850-6868).
ctcttcgcatggagttgat

SEQ ID NO: 560565 - DNA, 19 bp, Mus musculus
  siRNA target sequence for F8 (NM_007977.1,6861-6879).
gagttgatgggctgtgatt

SEQ ID NO: 560566 - DNA, 19 bp, Mus musculus
  siRNA target sequence for F8 (NM_007977.1,6863-6881).
gttgatgggctgtgattta

SEQ ID NO: 560567 - DNA, 19 bp, Mus musculus
  siRNA target sequence for F8 (NM_007977.1,6904-6922).
gaatggaaagtaaagtaat

SEQ ID NO: 560568 - DNA, 19 bp, Mus musculus
  siRNA target sequence for F8 (NM_007977.1,7001-7019).
cctccagggaaggactaat

SEQ ID NO: 560569 - DNA, 19 bp, Mus musculus
  siRNA target sequence for F8 (NM_007977.1,7024-7042).
ggcgacctcaggtgaatga

SEQ ID NO: 560570 - DNA, 19 bp, Mus musculus
  siRNA target sequence for F8 (NM_007977.1,7025-7043).
gcgacctcaggtgaatgat

SEQ ID NO: 560571 - DNA, 19 bp, Mus musculus
  siRNA target sequence for F8 (NM_007977.1,7054-7072).
ggttgcaagtggacttaca

SEQ ID NO: 560572 - DNA, 19 bp, Mus musculus
  siRNA target sequence for F8 (NM_007977.1,7059-7077).
caagtggacttacaaaaga

SEQ ID NO: 560573 - DNA, 19 bp, Mus musculus
  siRNA target sequence for F8 (NM_007977.1,7102-7120).
cccagggagtgaaatctct

SEQ ID NO: 560574 - DNA, 19 bp, Mus musculus
  siRNA target sequence for F8 (NM_007977.1,7129-7147).
gcatgtttgtgaaagagtt

SEQ ID NO: 560575 - DNA, 19 bp, Mus musculus
  siRNA target sequence for F8 (NM_007977.1,7137-7155).
gtgaaagagttccttattt

SEQ ID NO: 560576 - DNA, 19 bp, Mus musculus
  siRNA target sequence for F8 (NM_007977.1,7171-7189).
gccatcactggactcaaat

SEQ ID NO: 560577 - DNA, 19 bp, Mus musculus
  siRNA target sequence for F8 (NM_007977.1,7176-7194).
cactggactcaaattttat

SEQ ID NO: 560578 - DNA, 19 bp, Mus musculus
  siRNA target sequence for F8 (NM_007977.1,7234-7252).
catccacacctatgatgaa

SEQ ID NO: 560579 - DNA, 19 bp, Mus musculus
  siRNA target sequence for F8 (NM_007977.1,7255-7273).
ctctagacccaccattact

SEQ ID NO: 560580 - DNA, 19 bp, Mus musculus
  siRNA target sequence for F8 (NM_007977.1,7274-7292).
cactcgctatcttcgaatt

SEQ ID NO: 560581 - DNA, 19 bp, Mus musculus
  siRNA target sequence for F8 (NM_007977.1,7301-7319).
gatctgggagcaccaaatt

SEQ ID NO: 560582 - DNA, 19 bp, Mus musculus
  siRNA target sequence for F8 (NM_007977.1,7304-7322).
ctgggagcaccaaattgct

SEQ ID NO: 560583 - DNA, 19 bp, Mus musculus
  siRNA target sequence for Heph (NM_010417.1,658-676).
gcactccttgtggtctata

SEQ ID NO: 560584 - DNA, 19 bp, Mus musculus
  siRNA target sequence for Heph (NM_010417.1,667-685).
gtggtctataccaactgat

SEQ ID NO: 560585 - DNA, 19 bp, Mus musculus
  siRNA target sequence for Heph (NM_010417.1,681-699).
ctgatggggccattcgaaa

SEQ ID NO: 560586 - DNA, 19 bp, Mus musculus
  siRNA target sequence for Heph (NM_010417.1,686-704).
ggggccattcgaaactact

SEQ ID NO: 560587 - DNA, 19 bp, Mus musculus
  siRNA target sequence for Heph (NM_010417.1,687-705).
gggccattcgaaactacta

SEQ ID NO: 560588 - DNA, 19 bp, Mus musculus
  siRNA target sequence for Heph (NM_010417.1,689-707).
gccattcgaaactactact

SEQ ID NO: 560589 - DNA, 19 bp, Mus musculus
  siRNA target sequence for Heph (NM_010417.1,718-736).
ggatatgcagtggaactat

SEQ ID NO: 560590 - DNA, 19 bp, Mus musculus
  siRNA target sequence for Heph (NM_010417.1,767-785).
cagactctcaacaatgaca

SEQ ID NO: 560591 - DNA, 19 bp, Mus musculus
  siRNA target sequence for Heph (NM_010417.1,803-821).
ctgaagtctggcaaaaaca

SEQ ID NO: 560592 - DNA, 19 bp, Mus musculus
  siRNA target sequence for Heph (NM_010417.1,822-840).
ggatagggagtagttacaa

SEQ ID NO: 560593 - DNA, 19 bp, Mus musculus
  siRNA target sequence for Heph (NM_010417.1,910-928).
cttcctaggaccactgtta

SEQ ID NO: 560594 - DNA, 19 bp, Mus musculus
  siRNA target sequence for Heph (NM_010417.1,940-958).
gggggatgtcatcttgatt

SEQ ID NO: 560595 - DNA, 19 bp, Mus musculus
  siRNA target sequence for Heph (NM_010417.1,942-960).
gggatgtcatcttgattca

SEQ ID NO: 560596 - DNA, 19 bp, Mus musculus
  siRNA target sequence for Heph (NM_010417.1,1050-1068).
gttcttctgggtatctgaa

SEQ ID NO: 560597 - DNA, 19 bp, Mus musculus
  siRNA target sequence for Heph (NM_010417.1,1094-1112).
ggcagccatgtctacaact

SEQ ID NO: 560598 - DNA, 19 bp, Mus musculus
  siRNA target sequence for Heph (NM_010417.1,1201-1219).
cattgcaactggtctcatt

SEQ ID NO: 560599 - DNA, 19 bp, Mus musculus
  siRNA target sequence for Heph (NM_010417.1,1212-1230).
gtctcattggacctcttat

SEQ ID NO: 560600 - DNA, 19 bp, Mus musculus
  siRNA target sequence for Heph (NM_010417.1,1223-1241).
cctcttatcacctgtaaaa

SEQ ID NO: 560601 - DNA, 19 bp, Mus musculus
  siRNA target sequence for Heph (NM_010417.1,1244-1262).
gggaccctggatggtaatt

SEQ ID NO: 560602 - DNA, 19 bp, Mus musculus
  siRNA target sequence for Heph (NM_010417.1,1275-1293).
ggaaggatgtggaccataa

SEQ ID NO: 560603 - DNA, 19 bp, Mus musculus
  siRNA target sequence for Heph (NM_010417.1,1303-1321).
cctcttcagtgtgatagat

SEQ ID NO: 560604 - DNA, 19 bp, Mus musculus
  siRNA target sequence for Heph (NM_010417.1,1346-1364).
gacaacattgctacttact

SEQ ID NO: 560605 - DNA, 19 bp, Mus musculus
  siRNA target sequence for Heph (NM_010417.1,1374-1392).
ctgcctcggtggacaaaga

SEQ ID NO: 560606 - DNA, 19 bp, Mus musculus
  siRNA target sequence for Heph (NM_010417.1,1417-1435).
caggatgcatgcaatcaat

SEQ ID NO: 560607 - DNA, 19 bp, Mus musculus
  siRNA target sequence for Heph (NM_010417.1,1438-1456).
gtttgtctttgggaactta

SEQ ID NO: 560608 - DNA, 19 bp, Mus musculus
  siRNA target sequence for Heph (NM_010417.1,1636-1654).
gtctggaacctggctaatt

SEQ ID NO: 560609 - DNA, 19 bp, Mus musculus
  siRNA target sequence for Heph (NM_010417.1,1640-1658).
ggaacctggctaattagct

SEQ ID NO: 560610 - DNA, 19 bp, Mus musculus
  siRNA target sequence for Heph (NM_010417.1,1749-1767).
gcaaagttcgtcagtactt

SEQ ID NO: 560611 - DNA, 19 bp, Mus musculus
  siRNA target sequence for Heph (NM_010417.1,1768-1786).
cattcaggcccatgagatt

SEQ ID NO: 560612 - DNA, 19 bp, Mus musculus
  siRNA target sequence for Heph (NM_010417.1,1847-1865).
ggaagtggcccagataagt

SEQ ID NO: 560613 - DNA, 19 bp, Mus musculus
  siRNA target sequence for Heph (NM_010417.1,1848-1866).
gaagtggcccagataagta

SEQ ID NO: 560614 - DNA, 19 bp, Mus musculus
  siRNA target sequence for Heph (NM_010417.1,1876-1894).
gagctctagtcgaattgga

SEQ ID NO: 560615 - DNA, 19 bp, Mus musculus
  siRNA target sequence for Heph (NM_010417.1,1899-1917).
cttactggaaagttcgata

SEQ ID NO: 560616 - DNA, 19 bp, Mus musculus
  siRNA target sequence for Heph (NM_010417.1,1903-1921).
ctggaaagttcgatatgaa

SEQ ID NO: 560617 - DNA, 19 bp, Mus musculus
  siRNA target sequence for Heph (NM_010417.1,1914-1932).
gatatgaagcctttcaaga

SEQ ID NO: 560618 - DNA, 19 bp, Mus musculus
  siRNA target sequence for Heph (NM_010417.1,2078-2096).
gtcttttatgagaaaaact

SEQ ID NO: 560619 - DNA, 19 bp, Mus musculus
  siRNA target sequence for Heph (NM_010417.1,2080-2098).
cttttatgagaaaaactct

SEQ ID NO: 560620 - DNA, 19 bp, Mus musculus
  siRNA target sequence for Heph (NM_010417.1,2097-2115).
ctgagggcaccgtgtacaa

SEQ ID NO: 560621 - DNA, 19 bp, Mus musculus
  siRNA target sequence for Heph (NM_010417.1,2101-2119).
gggcaccgtgtacaatgat

SEQ ID NO: 560622 - DNA, 19 bp, Mus musculus
  siRNA target sequence for Heph (NM_010417.1,2122-2140).
cacatctcatcccaaagta

SEQ ID NO: 560623 - DNA, 19 bp, Mus musculus
  siRNA target sequence for Heph (NM_010417.1,2219-2237).
ctaacctggatgtacttct

SEQ ID NO: 560624 - DNA, 19 bp, Mus musculus
  siRNA target sequence for Heph (NM_010417.1,2249-2267).
cccacaagagatacaaatt

SEQ ID NO: 560625 - DNA, 19 bp, Mus musculus
  siRNA target sequence for Heph (NM_010417.1,2326-2344).
gcagaaaggagtggataaa

SEQ ID NO: 560626 - DNA, 19 bp, Mus musculus
  siRNA target sequence for Heph (NM_010417.1,2461-2479).
ggactccaatcgaatgcat

SEQ ID NO: 560627 - DNA, 19 bp, Mus musculus
  siRNA target sequence for Heph (NM_010417.1,2476-2494).
gcatgctattaatggattt

SEQ ID NO: 560628 - DNA, 19 bp, Mus musculus
  siRNA target sequence for Heph (NM_010417.1,2521-2539).
catgtgcaagggtgatact

SEQ ID NO: 560629 - DNA, 19 bp, Mus musculus
  siRNA target sequence for Heph (NM_010417.1,2565-2583).
gcacagagactgatgtaca

SEQ ID NO: 560630 - DNA, 19 bp, Mus musculus
  siRNA target sequence for Heph (NM_010417.1,2576-2594).
gatgtacatggggtaatgt

SEQ ID NO: 560631 - DNA, 19 bp, Mus musculus
  siRNA target sequence for Heph (NM_010417.1,2680-2698).
gcctgacaatcctggaata

SEQ ID NO: 560632 - DNA, 19 bp, Mus musculus
  siRNA target sequence for Heph (NM_010417.1,2681-2699).
cctgacaatcctggaatat

SEQ ID NO: 560633 - DNA, 19 bp, Mus musculus
  siRNA target sequence for Heph (NM_010417.1,2738-2756).
gggatgcaggcaatttata

SEQ ID NO: 560634 - DNA, 19 bp, Mus musculus
  siRNA target sequence for Heph (NM_010417.1,2739-2757).
ggatgcaggcaatttataa

SEQ ID NO: 560635 - DNA, 19 bp, Mus musculus
  siRNA target sequence for Heph (NM_010417.1,2740-2758).
gatgcaggcaatttataat

SEQ ID NO: 560636 - DNA, 19 bp, Mus musculus
  siRNA target sequence for Heph (NM_010417.1,2807-2825).
gcttcaagagtctactata

SEQ ID NO: 560637 - DNA, 19 bp, Mus musculus
  siRNA target sequence for Heph (NM_010417.1,2808-2826).
cttcaagagtctactatat

SEQ ID NO: 560638 - DNA, 19 bp, Mus musculus
  siRNA target sequence for Heph (NM_010417.1,2811-2829).
caagagtctactatatcat

SEQ ID NO: 560639 - DNA, 19 bp, Mus musculus
  siRNA target sequence for Heph (NM_010417.1,2837-2855).
gagatagagtgggattact

SEQ ID NO: 560640 - DNA, 19 bp, Mus musculus
  siRNA target sequence for Heph (NM_010417.1,2848-2866).
ggattactgccctgataga

SEQ ID NO: 560641 - DNA, 19 bp, Mus musculus
  siRNA target sequence for Heph (NM_010417.1,2849-2867).
gattactgccctgatagaa

SEQ ID NO: 560642 - DNA, 19 bp, Mus musculus
  siRNA target sequence for Heph (NM_010417.1,2884-2902).
gcataacacatctgagaaa

SEQ ID NO: 560643 - DNA, 19 bp, Mus musculus
  siRNA target sequence for Heph (NM_010417.1,2907-2925).
gctatggccatgttttcct

SEQ ID NO: 560644 - DNA, 19 bp, Mus musculus
  siRNA target sequence for Heph (NM_010417.1,2915-2933).
catgttttcctgagcaata

SEQ ID NO: 560645 - DNA, 19 bp, Mus musculus
  siRNA target sequence for Heph (NM_010417.1,2945-2963).
ctgggttccaaatataaga

SEQ ID NO: 560646 - DNA, 19 bp, Mus musculus
  siRNA target sequence for Heph (NM_010417.1,2983-3001).
cactgatggtactttcaga

SEQ ID NO: 560647 - DNA, 19 bp, Mus musculus
  siRNA target sequence for Heph (NM_010417.1,3039-3057).
gaatcctgggtccacttat

SEQ ID NO: 560648 - DNA, 19 bp, Mus musculus
  siRNA target sequence for Heph (NM_010417.1,3060-3078).
gaggagaggttggtgatat

SEQ ID NO: 560649 - DNA, 19 bp, Mus musculus
  siRNA target sequence for Heph (NM_010417.1,3062-3080).
ggagaggttggtgatatct

SEQ ID NO: 560650 - DNA, 19 bp, Mus musculus
  siRNA target sequence for Heph (NM_010417.1,3063-3081).
gagaggttggtgatatctt

SEQ ID NO: 560651 - DNA, 19 bp, Mus musculus
  siRNA target sequence for Heph (NM_010417.1,3065-3083).
gaggttggtgatatcttga

SEQ ID NO: 560652 - DNA, 19 bp, Mus musculus
  siRNA target sequence for Heph (NM_010417.1,3082-3100).
gactgtagtgttcaagaat

SEQ ID NO: 560653 - DNA, 19 bp, Mus musculus
  siRNA target sequence for Heph (NM_010417.1,3105-3123).
ccagtcgaccatattctat

SEQ ID NO: 560654 - DNA, 19 bp, Mus musculus
  siRNA target sequence for Heph (NM_010417.1,3106-3124).
cagtcgaccatattctata

SEQ ID NO: 560655 - DNA, 19 bp, Mus musculus
  siRNA target sequence for Heph (NM_010417.1,3108-3126).
gtcgaccatattctataca

SEQ ID NO: 560656 - DNA, 19 bp, Mus musculus
  siRNA target sequence for Heph (NM_010417.1,3128-3146).
gcccatggagttctagaat

SEQ ID NO: 560657 - DNA, 19 bp, Mus musculus
  siRNA target sequence for Heph (NM_010417.1,3173-3191).
gagcctggtgaagtactta

SEQ ID NO: 560658 - DNA, 19 bp, Mus musculus
  siRNA target sequence for Heph (NM_010417.1,3175-3193).
gcctggtgaagtacttact

SEQ ID NO: 560659 - DNA, 19 bp, Mus musculus
  siRNA target sequence for Heph (NM_010417.1,3177-3195).
ctggtgaagtacttactta

SEQ ID NO: 560660 - DNA, 19 bp, Mus musculus
  siRNA target sequence for Heph (NM_010417.1,3280-3298).
catcaaggacatgtatagt

SEQ ID NO: 560661 - DNA, 19 bp, Mus musculus
  siRNA target sequence for Heph (NM_010417.1,3346-3364).
caatggaggccggaatgat

SEQ ID NO: 560662 - DNA, 19 bp, Mus musculus
  siRNA target sequence for Heph (NM_010417.1,3351-3369).
gaggccggaatgatatgga

SEQ ID NO: 560663 - DNA, 19 bp, Mus musculus
  siRNA target sequence for Heph (NM_010417.1,3459-3477).
caagtcatgttaacttgaa

SEQ ID NO: 560664 - DNA, 19 bp, Mus musculus
  siRNA target sequence for Heph (NM_010417.1,3513-3531).
ctatcaatgggaaactcta

SEQ ID NO: 560665 - DNA, 19 bp, Mus musculus
  siRNA target sequence for Heph (NM_010417.1,3538-3556).
cctcaggggtcttactgta

SEQ ID NO: 560666 - DNA, 19 bp, Mus musculus
  siRNA target sequence for Heph (NM_010417.1,3544-3562).
gggtcttactgtataccaa

SEQ ID NO: 560667 - DNA, 19 bp, Mus musculus
  siRNA target sequence for Heph (NM_010417.1,3587-3605).
ctagccatgggccaagata

SEQ ID NO: 560668 - DNA, 19 bp, Mus musculus
  siRNA target sequence for Heph (NM_010417.1,3595-3613).
gggccaagatactgacatt

SEQ ID NO: 560669 - DNA, 19 bp, Mus musculus
  siRNA target sequence for Heph (NM_010417.1,3635-3653).
gagagtttcctctatcaga

SEQ ID NO: 560670 - DNA, 19 bp, Mus musculus
  siRNA target sequence for Heph (NM_010417.1,3672-3690).
cagatgtggtggatctctt

SEQ ID NO: 560671 - DNA, 19 bp, Mus musculus
  siRNA target sequence for Heph (NM_010417.1,3798-3816).
cggtcttgtctcatgaaga

SEQ ID NO: 560672 - DNA, 19 bp, Mus musculus
  siRNA target sequence for Heph (NM_010417.1,3826-3844).
cactatgaccactattact

SEQ ID NO: 560673 - DNA, 19 bp, Mus musculus
  siRNA target sequence for Heph (NM_010417.1,3828-3846).
ctatgaccactattactaa

SEQ ID NO: 560674 - DNA, 19 bp, Mus musculus
  siRNA target sequence for Heph (NM_010417.1,3834-3852).
ccactattactaaagagat

SEQ ID NO: 560675 - DNA, 19 bp, Mus musculus
  siRNA target sequence for Heph (NM_010417.1,3850-3868).
gattggaaaagcagtgatt

SEQ ID NO: 560676 - DNA, 19 bp, Mus musculus
  siRNA target sequence for Heph (NM_010417.1,3898-3916).
gatgctgggcatgaacatt

SEQ ID NO: 560677 - DNA, 19 bp, Mus musculus
  siRNA target sequence for Heph (NM_010417.1,3918-3936).
ccataaaggatgtagagat

SEQ ID NO: 560678 - DNA, 19 bp, Mus musculus
  siRNA target sequence for Heph (NM_010417.1,4009-4027).
gtaccagcatcgacaaaga

SEQ ID NO: 560679 - DNA, 19 bp, Mus musculus
  siRNA target sequence for Heph (NM_010417.1,4039-4057).
caacaggaggtccattctt

SEQ ID NO: 560680 - DNA, 19 bp, Mus musculus
  siRNA target sequence for Heph (NM_010417.1,4042-4060).
caggaggtccattcttgat

SEQ ID NO: 560681 - DNA, 19 bp, Mus musculus
  siRNA target sequence for Heph (NM_010417.1,4045-4063).
gaggtccattcttgatgat

SEQ ID NO: 560682 - DNA, 19 bp, Mus musculus
  siRNA target sequence for Heph (NM_181273.2,2909-2927).
ggtgagttggagcacttaa

SEQ ID NO: 560683 - DNA, 19 bp, Mus musculus
  siRNA target sequence for Heph (NM_181273.2,2910-2928).
gtgagttggagcacttaat

SEQ ID NO: 560684 - DNA, 19 bp, Mus musculus
  siRNA target sequence for Heph (NM_181273.2,2921-2939).
cacttaatgaagagacaaa

SEQ ID NO: 560685 - DNA, 19 bp, Mus musculus
  siRNA target sequence for Heph (NM_181273.2,2936-2954).
caaaggctttacaatcctt

SEQ ID NO: 560686 - DNA, 19 bp, Mus musculus
  siRNA target sequence for Heph (NM_181273.2,2978-2996).
cctttcaacatattacatt

SEQ ID NO: 560687 - DNA, 19 bp, Mus musculus
  siRNA target sequence for Itih1 (NM_008406.1,149-167).
ccatcaagagcttgaaagt

SEQ ID NO: 560688 - DNA, 19 bp, Mus musculus
  siRNA target sequence for Itih1 (NM_008406.1,209-227).
ccagccaagtggtcaacaa

SEQ ID NO: 560689 - DNA, 19 bp, Mus musculus
  siRNA target sequence for Itih1 (NM_008406.1,210-228).
cagccaagtggtcaacaat

SEQ ID NO: 560690 - DNA, 19 bp, Mus musculus
  siRNA target sequence for Itih1 (NM_008406.1,242-260).
gggaagtggcttttgatgt

SEQ ID NO: 560691 - DNA, 19 bp, Mus musculus
  siRNA target sequence for Itih1 (NM_008406.1,316-334).
gcgttcattggggacataa

SEQ ID NO: 560692 - DNA, 19 bp, Mus musculus
  siRNA target sequence for Itih1 (NM_008406.1,317-335).
cgttcattggggacataaa

SEQ ID NO: 560693 - DNA, 19 bp, Mus musculus
  siRNA target sequence for Itih1 (NM_008406.1,363-381).
ccggaaggcagccgtttta

SEQ ID NO: 560694 - DNA, 19 bp, Mus musculus
  siRNA target sequence for Itih1 (NM_008406.1,402-420).
cagagcctcgggcagaaat

SEQ ID NO: 560695 - DNA, 19 bp, Mus musculus
  siRNA target sequence for Itih1 (NM_008406.1,424-442).
gagcagttcaccatccata

SEQ ID NO: 560696 - DNA, 19 bp, Mus musculus
  siRNA target sequence for Itih1 (NM_008406.1,427-445).
cagttcaccatccatatca

SEQ ID NO: 560697 - DNA, 19 bp, Mus musculus
  siRNA target sequence for Itih1 (NM_008406.1,482-500).
cctatgaggaggtactaaa

SEQ ID NO: 560698 - DNA, 19 bp, Mus musculus
  siRNA target sequence for Itih1 (NM_008406.1,546-564).
gcagctggtacagcatttt

SEQ ID NO: 560699 - DNA, 19 bp, Mus musculus
  siRNA target sequence for Itih1 (NM_008406.1,643-661).
gctgctcaaaccatcaaga

SEQ ID NO: 560700 - DNA, 19 bp, Mus musculus
  siRNA target sequence for Itih1 (NM_008406.1,723-741).
ctgccccacatgttctaca

SEQ ID NO: 560701 - DNA, 19 bp, Mus musculus
  siRNA target sequence for Itih1 (NM_008406.1,734-752).
gttctacatccttgctaaa

SEQ ID NO: 560702 - DNA, 19 bp, Mus musculus
  siRNA target sequence for Itih1 (NM_008406.1,765-783).
ggtgacctacgatgtcaat

SEQ ID NO: 560703 - DNA, 19 bp, Mus musculus
  siRNA target sequence for Itih1 (NM_008406.1,807-825).
ggtggccaacaactacttt

SEQ ID NO: 560704 - DNA, 19 bp, Mus musculus
  siRNA target sequence for Itih1 (NM_008406.1,808-826).
gtggccaacaactacttta

SEQ ID NO: 560705 - DNA, 19 bp, Mus musculus
  siRNA target sequence for Itih1 (NM_008406.1,810-828).
ggccaacaactactttaca

SEQ ID NO: 560706 - DNA, 19 bp, Mus musculus
  siRNA target sequence for Itih1 (NM_008406.1,899-917).
ccatggaaggccagaaagt

SEQ ID NO: 560707 - DNA, 19 bp, Mus musculus
  siRNA target sequence for Itih1 (NM_008406.1,962-980).
ggccagtagacaactttga

SEQ ID NO: 560708 - DNA, 19 bp, Mus musculus
  siRNA target sequence for Itih1 (NM_008406.1,1054-1072).
gcagctcaagactttgtga

SEQ ID NO: 560709 - DNA, 19 bp, Mus musculus
  siRNA target sequence for Itih1 (NM_008406.1,1119-1137).
ccgaggaatcgagatctta

SEQ ID NO: 560710 - DNA, 19 bp, Mus musculus
  siRNA target sequence for Itih1 (NM_008406.1,1120-1138).
cgaggaatcgagatcttaa

SEQ ID NO: 560711 - DNA, 19 bp, Mus musculus
  siRNA target sequence for Itih1 (NM_008406.1,1123-1141).
ggaatcgagatcttaaaca

SEQ ID NO: 560712 - DNA, 19 bp, Mus musculus
  siRNA target sequence for Itih1 (NM_008406.1,1124-1142).
gaatcgagatcttaaacaa

SEQ ID NO: 560713 - DNA, 19 bp, Mus musculus
  siRNA target sequence for Itih1 (NM_008406.1,1355-1373).
gggcccagagaatttatga

SEQ ID NO: 560714 - DNA, 19 bp, Mus musculus
  siRNA target sequence for Itih1 (NM_008406.1,1393-1411).
cagctacagggtttctaca

SEQ ID NO: 560715 - DNA, 19 bp, Mus musculus
  siRNA target sequence for Itih1 (NM_008406.1,1395-1413).
gctacagggtttctacaat

SEQ ID NO: 560716 - DNA, 19 bp, Mus musculus
  siRNA target sequence for Itih1 (NM_008406.1,1401-1419).
gggtttctacaatcaagta

SEQ ID NO: 560717 - DNA, 19 bp, Mus musculus
  siRNA target sequence for Itih1 (NM_008406.1,1488-1506).
ccgacataaacagtactat

SEQ ID NO: 560718 - DNA, 19 bp, Mus musculus
  siRNA target sequence for Itih1 (NM_008406.1,1490-1508).
gacataaacagtactatga

SEQ ID NO: 560719 - DNA, 19 bp, Mus musculus
  siRNA target sequence for Itih1 (NM_008406.1,1525-1543).
gtggctgggcgcattgcta

SEQ ID NO: 560720 - DNA, 19 bp, Mus musculus
  siRNA target sequence for Itih1 (NM_008406.1,1535-1553).
gcattgctaaccacaaact

SEQ ID NO: 560721 - DNA, 19 bp, Mus musculus
  siRNA target sequence for Itih1 (NM_008406.1,1658-1676).
gccacgtgctagagaatca

SEQ ID NO: 560722 - DNA, 19 bp, Mus musculus
  siRNA target sequence for Itih1 (NM_008406.1,1659-1677).
ccacgtgctagagaatcat

SEQ ID NO: 560723 - DNA, 19 bp, Mus musculus
  siRNA target sequence for Itih1 (NM_008406.1,1717-1735).
ctggctaagcggatgaaga

SEQ ID NO: 560724 - DNA, 19 bp, Mus musculus
  siRNA target sequence for Itih1 (NM_008406.1,1779-1797).
gatgtcactggactatcat

SEQ ID NO: 560725 - DNA, 19 bp, Mus musculus
  siRNA target sequence for Itih1 (NM_008406.1,1784-1802).
cactggactatcatttcgt

SEQ ID NO: 560726 - DNA, 19 bp, Mus musculus
  siRNA target sequence for Itih1 (NM_008406.1,1786-1804).
ctggactatcatttcgtaa

SEQ ID NO: 560727 - DNA, 19 bp, Mus musculus
  siRNA target sequence for Itih1 (NM_008406.1,1905-1923).
gggacccagaagaacgttt

SEQ ID NO: 560728 - DNA, 19 bp, Mus musculus
  siRNA target sequence for Itih1 (NM_008406.1,2003-2021).
ccgatccccacttcatcat

SEQ ID NO: 560729 - DNA, 19 bp, Mus musculus
  siRNA target sequence for Itih1 (NM_008406.1,2019-2037).
catctatgtgccctcaaaa

SEQ ID NO: 560730 - DNA, 19 bp, Mus musculus
  siRNA target sequence for Itih1 (NM_008406.1,2030-2048).
cctcaaaagaggatagctt

SEQ ID NO: 560731 - DNA, 19 bp, Mus musculus
  siRNA target sequence for Itih1 (NM_008406.1,2045-2063).
gcttgtgcttcaacatcaa

SEQ ID NO: 560732 - DNA, 19 bp, Mus musculus
  siRNA target sequence for Itih1 (NM_008406.1,2046-2064).
cttgtgcttcaacatcaat

SEQ ID NO: 560733 - DNA, 19 bp, Mus musculus
  siRNA target sequence for Itih1 (NM_008406.1,2201-2219).
gtcccacatcagactttca

SEQ ID NO: 560734 - DNA, 19 bp, Mus musculus
  siRNA target sequence for Itih1 (NM_008406.1,2311-2329).
ggggtagtggtgacaatca

SEQ ID NO: 560735 - DNA, 19 bp, Mus musculus
  siRNA target sequence for Itih1 (NM_008406.1,2314-2332).
gtagtggtgacaatcaaca

SEQ ID NO: 560736 - DNA, 19 bp, Mus musculus
  siRNA target sequence for Itih1 (NM_008406.1,2358-2376).
ggatgatggggctaccttt

SEQ ID NO: 560737 - DNA, 19 bp, Mus musculus
  siRNA target sequence for Itih1 (NM_008406.1,2476-2494).
gggctactgggacaattct

SEQ ID NO: 560738 - DNA, 19 bp, Mus musculus
  siRNA target sequence for Itih1 (NM_008406.1,2590-2608).
gtcacccgagggttgcaaa

SEQ ID NO: 560739 - DNA, 19 bp, Mus musculus
  siRNA target sequence for Itih1 (NM_008406.1,2592-2610).
cacccgagggttgcaaaaa

SEQ ID NO: 560740 - DNA, 19 bp, Mus musculus
  siRNA target sequence for Itih1 (NM_008406.1,2596-2614).
cgagggttgcaaaaagact

SEQ ID NO: 560741 - DNA, 19 bp, Mus musculus
  siRNA target sequence for Itih1 (NM_008406.1,2597-2615).
gagggttgcaaaaagacta

SEQ ID NO: 560742 - DNA, 19 bp, Mus musculus
  siRNA target sequence for Itih3 (NM_008407.1,160-178).
ctcccgctttgctcacaat

SEQ ID NO: 560743 - DNA, 19 bp, Mus musculus
  siRNA target sequence for Itih3 (NM_008407.1,162-180).
cccgctttgctcacaatgt

SEQ ID NO: 560744 - DNA, 19 bp, Mus musculus
  siRNA target sequence for Itih3 (NM_008407.1,163-181).
ccgctttgctcacaatgtt

SEQ ID NO: 560745 - DNA, 19 bp, Mus musculus
  siRNA target sequence for Itih3 (NM_008407.1,319-337).
ggaagttgcccagaaacaa

SEQ ID NO: 560746 - DNA, 19 bp, Mus musculus
  siRNA target sequence for Itih3 (NM_008407.1,448-466).
ctttgagctaacctatgaa

SEQ ID NO: 560747 - DNA, 19 bp, Mus musculus
  siRNA target sequence for Itih3 (NM_008407.1,587-605).
gatgctgaagcctcattca

SEQ ID NO: 560748 - DNA, 19 bp, Mus musculus
  siRNA target sequence for Itih3 (NM_008407.1,593-611).
gaagcctcattcatcacta

SEQ ID NO: 560749 - DNA, 19 bp, Mus musculus
  siRNA target sequence for Itih3 (NM_008407.1,732-750).
gggacttcaccattgtcta

SEQ ID NO: 560750 - DNA, 19 bp, Mus musculus
  siRNA target sequence for Itih3 (NM_008407.1,773-791).
gggaatgtgcagatagtca

SEQ ID NO: 560751 - DNA, 19 bp, Mus musculus
  siRNA target sequence for Itih3 (NM_008407.1,774-792).
ggaatgtgcagatagtcaa

SEQ ID NO: 560752 - DNA, 19 bp, Mus musculus
  siRNA target sequence for Itih3 (NM_008407.1,775-793).
gaatgtgcagatagtcaat

SEQ ID NO: 560753 - DNA, 19 bp, Mus musculus
  siRNA target sequence for Itih3 (NM_008407.1,836-854).
gtgcctaagaacatagtct

SEQ ID NO: 560754 - DNA, 19 bp, Mus musculus
  siRNA target sequence for Itih3 (NM_008407.1,838-856).
gcctaagaacatagtcttt

SEQ ID NO: 560755 - DNA, 19 bp, Mus musculus
  siRNA target sequence for Itih3 (NM_008407.1,844-862).
gaacatagtctttgtgatt

SEQ ID NO: 560756 - DNA, 19 bp, Mus musculus
  siRNA target sequence for Itih3 (NM_008407.1,906-924).
gggaagcccttcttaaaat

SEQ ID NO: 560757 - DNA, 19 bp, Mus musculus
  siRNA target sequence for Itih3 (NM_008407.1,990-1008).
ggaaagatcacctagttca

SEQ ID NO: 560758 - DNA, 19 bp, Mus musculus
  siRNA target sequence for Itih3 (NM_008407.1,991-1009).
gaaagatcacctagttcaa

SEQ ID NO: 560759 - DNA, 19 bp, Mus musculus
  siRNA target sequence for Itih3 (NM_008407.1,1068-1086).
gcatgaccaacatcaatga

SEQ ID NO: 560760 - DNA, 19 bp, Mus musculus
  siRNA target sequence for Itih3 (NM_008407.1,1089-1107).
ggctgctgaagggtattga

SEQ ID NO: 560761 - DNA, 19 bp, Mus musculus
  siRNA target sequence for Itih3 (NM_008407.1,1090-1108).
gctgctgaagggtattgaa

SEQ ID NO: 560762 - DNA, 19 bp, Mus musculus
  siRNA target sequence for Itih3 (NM_008407.1,1197-1215).
gcgagagcagaccagaaaa

SEQ ID NO: 560763 - DNA, 19 bp, Mus musculus
  siRNA target sequence for Itih3 (NM_008407.1,1246-1264).
gggcaagttccctttgtat

SEQ ID NO: 560764 - DNA, 19 bp, Mus musculus
  siRNA target sequence for Itih3 (NM_008407.1,1267-1285).
cctgggttttggcaacaat

SEQ ID NO: 560765 - DNA, 19 bp, Mus musculus
  siRNA target sequence for Itih3 (NM_008407.1,1339-1357).
gcgcatttatgaagattct

SEQ ID NO: 560766 - DNA, 19 bp, Mus musculus
  siRNA target sequence for Itih3 (NM_008407.1,1341-1359).
gcatttatgaagattctga

SEQ ID NO: 560767 - DNA, 19 bp, Mus musculus
  siRNA target sequence for Itih3 (NM_008407.1,1384-1402).
ctatgaagaggtagctaat

SEQ ID NO: 560768 - DNA, 19 bp, Mus musculus
  siRNA target sequence for Itih3 (NM_008407.1,1398-1416).
ctaatccactgctgactaa

SEQ ID NO: 560769 - DNA, 19 bp, Mus musculus
  siRNA target sequence for Itih3 (NM_008407.1,1413-1431).
ctaatgtggaggtggaata

SEQ ID NO: 560770 - DNA, 19 bp, Mus musculus
  siRNA target sequence for Itih3 (NM_008407.1,1483-1501).
cgatggctctgagattgtt

SEQ ID NO: 560771 - DNA, 19 bp, Mus musculus
  siRNA target sequence for Itih3 (NM_008407.1,1668-1686).
gggcctacctcactattga

SEQ ID NO: 560772 - DNA, 19 bp, Mus musculus
  siRNA target sequence for Itih3 (NM_008407.1,1763-1781).
ctcaagtaccactttgtaa

SEQ ID NO: 560773 - DNA, 19 bp, Mus musculus
  siRNA target sequence for Itih3 (NM_008407.1,1909-1927).
cagtcagagcccctactat

SEQ ID NO: 560774 - DNA, 19 bp, Mus musculus
  siRNA target sequence for Itih3 (NM_008407.1,1911-1929).
gtcagagcccctactatta

SEQ ID NO: 560775 - DNA, 19 bp, Mus musculus
  siRNA target sequence for Itih3 (NM_008407.1,1938-1956).
gggacccccactttatcat

SEQ ID NO: 560776 - DNA, 19 bp, Mus musculus
  siRNA target sequence for Itih3 (NM_008407.1,1944-1962).
cccactttatcatccaaat

SEQ ID NO: 560777 - DNA, 19 bp, Mus musculus
  siRNA target sequence for Itih3 (NM_008407.1,2035-2053).
cccagtcacaggtatcact

SEQ ID NO: 560778 - DNA, 19 bp, Mus musculus
  siRNA target sequence for Itih3 (NM_008407.1,2052-2070).
ctgtgaccggacagatcat

SEQ ID NO: 560779 - DNA, 19 bp, Mus musculus
  siRNA target sequence for Itih3 (NM_008407.1,2097-2115).
ccaggacagggaaaactta

SEQ ID NO: 560780 - DNA, 19 bp, Mus musculus
  siRNA target sequence for Itih3 (NM_008407.1,2098-2116).
caggacagggaaaacttat

SEQ ID NO: 560781 - DNA, 19 bp, Mus musculus
  siRNA target sequence for Itih3 (NM_008407.1,2101-2119).
gacagggaaaacttatttt

SEQ ID NO: 560782 - DNA, 19 bp, Mus musculus
  siRNA target sequence for Itih3 (NM_008407.1,2535-2553).
ggggctcccagaaagatta

SEQ ID NO: 560783 - DNA, 19 bp, Mus musculus
  siRNA target sequence for Itih3 (NM_008407.1,2627-2645).
ggtgtccataccgactata

SEQ ID NO: 560784 - DNA, 19 bp, Mus musculus
  siRNA target sequence for Itih3 (NM_008407.1,2628-2646).
gtgtccataccgactatat

SEQ ID NO: 560785 - DNA, 19 bp, Mus musculus
  siRNA target sequence for Lox (NM_010728.1,479-497).
ctggcgccagacaatccaa

SEQ ID NO: 560786 - DNA, 19 bp, Mus musculus
  siRNA target sequence for Lox (NM_010728.1,808-826).
ctccgcagctcagtaatct

SEQ ID NO: 560787 - DNA, 19 bp, Mus musculus
  siRNA target sequence for Lox (NM_010728.1,829-847).
ggccacccagccacataga

SEQ ID NO: 560788 - DNA, 19 bp, Mus musculus
  siRNA target sequence for Lox (NM_010728.1,830-848).
gccacccagccacatagat

SEQ ID NO: 560789 - DNA, 19 bp, Mus musculus
  siRNA target sequence for Lox (NM_010728.1,857-875).
gggcgacgacccctacaat

SEQ ID NO: 560790 - DNA, 19 bp, Mus musculus
  siRNA target sequence for Lox (NM_010728.1,889-907).
ccgacgacaacccctatta

SEQ ID NO: 560791 - DNA, 19 bp, Mus musculus
  siRNA target sequence for Lox (NM_010728.1,890-908).
cgacgacaacccctattat

SEQ ID NO: 560792 - DNA, 19 bp, Mus musculus
  siRNA target sequence for Lox (NM_010728.1,891-909).
gacgacaacccctattata

SEQ ID NO: 560793 - DNA, 19 bp, Mus musculus
  siRNA target sequence for Lox (NM_010728.1,894-912).
gacaacccctattataact

SEQ ID NO: 560794 - DNA, 19 bp, Mus musculus
  siRNA target sequence for Lox (NM_010728.1,961-979).
gatacggcaccggttactt

SEQ ID NO: 560795 - DNA, 19 bp, Mus musculus
  siRNA target sequence for Lox (NM_010728.1,1002-1020).
gtgcccgacccctactaca

SEQ ID NO: 560796 - DNA, 19 bp, Mus musculus
  siRNA target sequence for Lox (NM_010728.1,1066-1084).
gatgcgctgcggaagaaaa

SEQ ID NO: 560797 - DNA, 19 bp, Mus musculus
  siRNA target sequence for Lox (NM_010728.1,1089-1107).
ctggccagttcagcatata

SEQ ID NO: 560798 - DNA, 19 bp, Mus musculus
  siRNA target sequence for Lox (NM_010728.1,1109-1127).
ggcggatgtcagagactat

SEQ ID NO: 560799 - DNA, 19 bp, Mus musculus
  siRNA target sequence for Lox (NM_010728.1,1111-1129).
cggatgtcagagactatga

SEQ ID NO: 560800 - DNA, 19 bp, Mus musculus
  siRNA target sequence for Lox (NM_010728.1,1393-1411).
gattgagtcctggatgtta

SEQ ID NO: 560801 - DNA, 19 bp, Mus musculus
  siRNA target sequence for Lox (NM_010728.1,1439-1457).
ccagtggattgatattaca

SEQ ID NO: 560802 - DNA, 19 bp, Mus musculus
  siRNA target sequence for Lox (NM_010728.1,1445-1463).
gattgatattacagatgta

SEQ ID NO: 560803 - DNA, 19 bp, Mus musculus
  siRNA target sequence for Lox (NM_010728.1,1461-1479).
gtacaacctggaaactaca

SEQ ID NO: 560804 - DNA, 19 bp, Mus musculus
  siRNA target sequence for Lox (NM_010728.1,1515-1533).
cctgaatcagactacacta

SEQ ID NO: 560805 - DNA, 19 bp, Mus musculus
  siRNA target sequence for Lox (NM_010728.1,1516-1534).
ctgaatcagactacactaa

SEQ ID NO: 560806 - DNA, 19 bp, Mus musculus
  siRNA target sequence for Lox (NM_010728.1,1518-1536).
gaatcagactacactaaca

SEQ ID NO: 560807 - DNA, 19 bp, Mus musculus
  siRNA target sequence for Lox (NM_010728.1,1522-1540).
cagactacactaacaatgt

SEQ ID NO: 560808 - DNA, 19 bp, Mus musculus
  siRNA target sequence for Loxl2 (NM_033325.1,292-310).
cctccgatgtggtcaagat

SEQ ID NO: 560809 - DNA, 19 bp, Mus musculus
  siRNA target sequence for Loxl2 (NM_033325.1,434-452).
ccggcaagtgggctatgta

SEQ ID NO: 560810 - DNA, 19 bp, Mus musculus
  siRNA target sequence for Loxl2 (NM_033325.1,436-454).
ggcaagtgggctatgtaga

SEQ ID NO: 560811 - DNA, 19 bp, Mus musculus
  siRNA target sequence for Loxl2 (NM_033325.1,611-629).
ggtgtgtagtgagaaaaga

SEQ ID NO: 560812 - DNA, 19 bp, Mus musculus
  siRNA target sequence for Loxl2 (NM_033325.1,612-630).
gtgtgtagtgagaaaagaa

SEQ ID NO: 560813 - DNA, 19 bp, Mus musculus
  siRNA target sequence for Loxl2 (NM_033325.1,636-654).
ggcttcaaatttgacaatt

SEQ ID NO: 560814 - DNA, 19 bp, Mus musculus
  siRNA target sequence for Loxl2 (NM_033325.1,655-673).
cgttgatcaaccaaataga

SEQ ID NO: 560815 - DNA, 19 bp, Mus musculus
  siRNA target sequence for Loxl2 (NM_033325.1,666-684).
caaatagagagcctaaata

SEQ ID NO: 560816 - DNA, 19 bp, Mus musculus
  siRNA target sequence for Loxl2 (NM_033325.1,702-720).
cggattcggcccatccttt

SEQ ID NO: 560817 - DNA, 19 bp, Mus musculus
  siRNA target sequence for Loxl2 (NM_033325.1,804-822).
cactggacagccaagaatt

SEQ ID NO: 560818 - DNA, 19 bp, Mus musculus
  siRNA target sequence for Loxl2 (NM_033325.1,873-891).
cccaaagcctataaaacct

SEQ ID NO: 560819 - DNA, 19 bp, Mus musculus
  siRNA target sequence for Loxl2 (NM_033325.1,909-927).
ctgcgttactggaagtttt

SEQ ID NO: 560820 - DNA, 19 bp, Mus musculus
  siRNA target sequence for Loxl2 (NM_033325.1,912-930).
cgttactggaagttttcta

SEQ ID NO: 560821 - DNA, 19 bp, Mus musculus
  siRNA target sequence for Loxl2 (NM_033325.1,988-1006).
cccgggaccctgtgaagaa

SEQ ID NO: 560822 - DNA, 19 bp, Mus musculus
  siRNA target sequence for Loxl2 (NM_033325.1,1186-1204).
gaaccatctgcgatgacaa

SEQ ID NO: 560823 - DNA, 19 bp, Mus musculus
  siRNA target sequence for Loxl2 (NM_033325.1,1246-1264).
gctttgggaccgctaaaga

SEQ ID NO: 560824 - DNA, 19 bp, Mus musculus
  siRNA target sequence for Loxl2 (NM_033325.1,1459-1477).
gaggccgcaatccttatga

SEQ ID NO: 560825 - DNA, 19 bp, Mus musculus
  siRNA target sequence for Loxl2 (NM_033325.1,1483-1501).
gagtggaggtgctaacaga

SEQ ID NO: 560826 - DNA, 19 bp, Mus musculus
  siRNA target sequence for Loxl2 (NM_033325.1,1515-1533).
cttgtttgggggactgtat

SEQ ID NO: 560827 - DNA, 19 bp, Mus musculus
  siRNA target sequence for Loxl2 (NM_033325.1,1618-1636).
cctggtactggcatggaaa

SEQ ID NO: 560828 - DNA, 19 bp, Mus musculus
  siRNA target sequence for Loxl2 (NM_033325.1,1619-1637).
ctggtactggcatggaaat

SEQ ID NO: 560829 - DNA, 19 bp, Mus musculus
  siRNA target sequence for Loxl2 (NM_033325.1,1780-1798).
cacctgacctggtgcttaa

SEQ ID NO: 560830 - DNA, 19 bp, Mus musculus
  siRNA target sequence for Loxl2 (NM_033325.1,1790-1808).
ggtgcttaatgctgagatt

SEQ ID NO: 560831 - DNA, 19 bp, Mus musculus
  siRNA target sequence for Loxl2 (NM_033325.1,2133-2151).
ggagacattcagaagagtt

SEQ ID NO: 560832 - DNA, 19 bp, Mus musculus
  siRNA target sequence for Loxl2 (NM_033325.1,2134-2152).
gagacattcagaagagtta

SEQ ID NO: 560833 - DNA, 19 bp, Mus musculus
  siRNA target sequence for Loxl2 (NM_033325.1,2201-2219).
catgtaccgtcatgacatt

SEQ ID NO: 560834 - DNA, 19 bp, Mus musculus
  siRNA target sequence for Loxl2 (NM_033325.1,2279-2297).
cattaaccccaactatgaa

SEQ ID NO: 560835 - DNA, 19 bp, Mus musculus
  siRNA target sequence for Loxl2 (NM_033325.1,2298-2316).
gtgccagaatcagatttct

SEQ ID NO: 560836 - DNA, 19 bp, Mus musculus
  siRNA target sequence for Loxl2 (NM_033325.1,2308-2326).
cagatttctctaacaacat

SEQ ID NO: 560837 - DNA, 19 bp, Mus musculus
  siRNA target sequence for Loxl2 (NM_033325.1,2424-2442).
cacttcagtggacttctaa

SEQ ID NO: 560838 - DNA, 19 bp, Mus musculus
  siRNA target sequence for Loxl2 (NM_033325.1,2431-2449).
gtggacttctaaataacca

SEQ ID NO: 560839 - DNA, 19 bp, Mus musculus
  siRNA target sequence for Loxl3 (NM_013586.2,414-432).
gaatctggttggacaatct

SEQ ID NO: 560840 - DNA, 19 bp, Mus musculus
  siRNA target sequence for Loxl3 (NM_013586.2,555-573).
cagactccaacgtcattga

SEQ ID NO: 560841 - DNA, 19 bp, Mus musculus
  siRNA target sequence for Loxl3 (NM_013586.2,688-706).
gtcgcaagtgtgtgacaaa

SEQ ID NO: 560842 - DNA, 19 bp, Mus musculus
  siRNA target sequence for Loxl3 (NM_013586.2,749-767).
ggcttccccggagaaaaga

SEQ ID NO: 560843 - DNA, 19 bp, Mus musculus
  siRNA target sequence for Loxl3 (NM_013586.2,864-882).
ccctttgctctctagagtt

SEQ ID NO: 560844 - DNA, 19 bp, Mus musculus
  siRNA target sequence for Loxl3 (NM_013586.2,950-968).
cctctttatgccaccttta

SEQ ID NO: 560845 - DNA, 19 bp, Mus musculus
  siRNA target sequence for Loxl3 (NM_013586.2,1201-1219).
catccacttgagtgaagtt

SEQ ID NO: 560846 - DNA, 19 bp, Mus musculus
  siRNA target sequence for Loxl3 (NM_013586.2,1381-1399).
gcgagtcgaggtgcaaata

SEQ ID NO: 560847 - DNA, 19 bp, Mus musculus
  siRNA target sequence for Loxl3 (NM_013586.2,1528-1546).
ggactcagggaatgtaact

SEQ ID NO: 560848 - DNA, 19 bp, Mus musculus
  siRNA target sequence for Loxl3 (NM_013586.2,1658-1676).
ggggtcatctgttctgaaa

SEQ ID NO: 560849 - DNA, 19 bp, Mus musculus
  siRNA target sequence for Loxl3 (NM_013586.2,1660-1678).
ggtcatctgttctgaaact

SEQ ID NO: 560850 - DNA, 19 bp, Mus musculus
  siRNA target sequence for Loxl3 (NM_013586.2,2050-2068).
gtatgagtgcgccaacttt

SEQ ID NO: 560851 - DNA, 19 bp, Mus musculus
  siRNA target sequence for Loxl3 (NM_013586.2,2147-2165).
gtgaagccaggaaactaca

SEQ ID NO: 560852 - DNA, 19 bp, Mus musculus
  siRNA target sequence for Loxl3 (NM_013586.2,2149-2167).
gaagccaggaaactacatt

SEQ ID NO: 560853 - DNA, 19 bp, Mus musculus
  siRNA target sequence for Loxl3 (NM_013586.2,2152-2170).
gccaggaaactacattctt

SEQ ID NO: 560854 - DNA, 19 bp, Mus musculus
  siRNA target sequence for Loxl3 (NM_013586.2,2176-2194).
cgttatcaacccaaatttt

SEQ ID NO: 560855 - DNA, 19 bp, Mus musculus
  siRNA target sequence for Lss (NM_146006.1,60-78).
gtcgtgggggaccctataa

SEQ ID NO: 560856 - DNA, 19 bp, Mus musculus
  siRNA target sequence for Lss (NM_146006.1,62-80).
cgtgggggaccctataaaa

SEQ ID NO: 560857 - DNA, 19 bp, Mus musculus
  siRNA target sequence for Lss (NM_146006.1,66-84).
ggggaccctataaaactga

SEQ ID NO: 560858 - DNA, 19 bp, Mus musculus
  siRNA target sequence for Lss (NM_146006.1,105-123).
gctggcggctccagaatga

SEQ ID NO: 560859 - DNA, 19 bp, Mus musculus
  siRNA target sequence for Lss (NM_146006.1,108-126).
ggcggctccagaatgagtt

SEQ ID NO: 560860 - DNA, 19 bp, Mus musculus
  siRNA target sequence for Lss (NM_146006.1,131-149).
cggcagagatggacttatt

SEQ ID NO: 560861 - DNA, 19 bp, Mus musculus
  siRNA target sequence for Lss (NM_146006.1,132-150).
ggcagagatggacttatta

SEQ ID NO: 560862 - DNA, 19 bp, Mus musculus
  siRNA target sequence for Lss (NM_146006.1,186-204).
ggctagaggcccactcttt

SEQ ID NO: 560863 - DNA, 19 bp, Mus musculus
  siRNA target sequence for Lss (NM_146006.1,205-223).
gggactggacacaagaagt

SEQ ID NO: 560864 - DNA, 19 bp, Mus musculus
  siRNA target sequence for Lss (NM_146006.1,212-230).
gacacaagaagttatttca

SEQ ID NO: 560865 - DNA, 19 bp, Mus musculus
  siRNA target sequence for Lss (NM_146006.1,267-285).
ccctgaatggagtaacctt

SEQ ID NO: 560866 - DNA, 19 bp, Mus musculus
  siRNA target sequence for Lss (NM_146006.1,268-286).
cctgaatggagtaaccttt

SEQ ID NO: 560867 - DNA, 19 bp, Mus musculus
  siRNA target sequence for Lss (NM_146006.1,269-287).
ctgaatggagtaacctttt

SEQ ID NO: 560868 - DNA, 19 bp, Mus musculus
  siRNA target sequence for Lss (NM_146006.1,271-289).
gaatggagtaaccttttat

SEQ ID NO: 560869 - DNA, 19 bp, Mus musculus
  siRNA target sequence for Lss (NM_146006.1,361-379).
cctgattacctgtcacata

SEQ ID NO: 560870 - DNA, 19 bp, Mus musculus
  siRNA target sequence for Lss (NM_146006.1,529-547).
gggtattgggcctgatgat

SEQ ID NO: 560871 - DNA, 19 bp, Mus musculus
  siRNA target sequence for Lss (NM_146006.1,564-582).
ctcggaacgtccttcacaa

SEQ ID NO: 560872 - DNA, 19 bp, Mus musculus
  siRNA target sequence for Lss (NM_146006.1,566-584).
cggaacgtccttcacaaaa

SEQ ID NO: 560873 - DNA, 19 bp, Mus musculus
  siRNA target sequence for Lss (NM_146006.1,568-586).
gaacgtccttcacaaaaaa

SEQ ID NO: 560874 - DNA, 19 bp, Mus musculus
  siRNA target sequence for Lss (NM_146006.1,571-589).
cgtccttcacaaaaaaggt

SEQ ID NO: 560875 - DNA, 19 bp, Mus musculus
  siRNA target sequence for Lss (NM_146006.1,743-761).
gtctatctgcccatgagtt

SEQ ID NO: 560876 - DNA, 19 bp, Mus musculus
  siRNA target sequence for Lss (NM_146006.1,836-854).
gattacgccagcatcgatt

SEQ ID NO: 560877 - DNA, 19 bp, Mus musculus
  siRNA target sequence for Lss (NM_146006.1,940-958).
cctgtatgaacgtttccat

SEQ ID NO: 560878 - DNA, 19 bp, Mus musculus
  siRNA target sequence for Lss (NM_146006.1,941-959).
ctgtatgaacgtttccata

SEQ ID NO: 560879 - DNA, 19 bp, Mus musculus
  siRNA target sequence for Lss (NM_146006.1,981-999).
ccgtccagatgctgtatga

SEQ ID NO: 560880 - DNA, 19 bp, Mus musculus
  siRNA target sequence for Lss (NM_146006.1,982-1000).
cgtccagatgctgtatgaa

SEQ ID NO: 560881 - DNA, 19 bp, Mus musculus
  siRNA target sequence for Lss (NM_146006.1,1007-1025).
gcagctgatgactgtttca

SEQ ID NO: 560882 - DNA, 19 bp, Mus musculus
  siRNA target sequence for Lss (NM_146006.1,1010-1028).
gctgatgactgtttcacta

SEQ ID NO: 560883 - DNA, 19 bp, Mus musculus
  siRNA target sequence for Lss (NM_146006.1,1013-1031).
gatgactgtttcactaagt

SEQ ID NO: 560884 - DNA, 19 bp, Mus musculus
  siRNA target sequence for Lss (NM_146006.1,1117-1135).
gcacgtttctcggatcaaa

SEQ ID NO: 560885 - DNA, 19 bp, Mus musculus
  siRNA target sequence for Lss (NM_146006.1,1212-1230).
ctatccaagcactgttaga

SEQ ID NO: 560886 - DNA, 19 bp, Mus musculus
  siRNA target sequence for Lss (NM_146006.1,1404-1422).
gcacagccgagggtttgaa

SEQ ID NO: 560887 - DNA, 19 bp, Mus musculus
  siRNA target sequence for Lss (NM_146006.1,1452-1470).
cgtccatcactgagcatat

SEQ ID NO: 560888 - DNA, 19 bp, Mus musculus
  siRNA target sequence for Lss (NM_146006.1,1532-1550).
gggttcgctacctatgaga

SEQ ID NO: 560889 - DNA, 19 bp, Mus musculus
  siRNA target sequence for Lss (NM_146006.1,1533-1551).
ggttcgctacctatgagaa

SEQ ID NO: 560890 - DNA, 19 bp, Mus musculus
  siRNA target sequence for Lss (NM_146006.1,1602-1620).
gagacatcatgattgacta

SEQ ID NO: 560891 - DNA, 19 bp, Mus musculus
  siRNA target sequence for Lss (NM_146006.1,1612-1630).
gattgactacacgtatgta

SEQ ID NO: 560892 - DNA, 19 bp, Mus musculus
  siRNA target sequence for Lss (NM_146006.1,1654-1672).
ggcactgaagcatttccat

SEQ ID NO: 560893 - DNA, 19 bp, Mus musculus
  siRNA target sequence for Lss (NM_146006.1,1855-1873).
ggctgcttgtgcagaagta

SEQ ID NO: 560894 - DNA, 19 bp, Mus musculus
  siRNA target sequence for Lss (NM_146006.1,1925-1943).
ggagaggactttgaatcat

SEQ ID NO: 560895 - DNA, 19 bp, Mus musculus
  siRNA target sequence for Lss (NM_146006.1,1930-1948).
ggactttgaatcatgtgaa

SEQ ID NO: 560896 - DNA, 19 bp, Mus musculus
  siRNA target sequence for Mox2r (NM_021325.2,257-275).
ccctagcagtgctcttaat

SEQ ID NO: 560897 - DNA, 19 bp, Mus musculus
  siRNA target sequence for Mox2r (NM_021325.2,258-276).
cctagcagtgctcttaata

SEQ ID NO: 560898 - DNA, 19 bp, Mus musculus
  siRNA target sequence for Mox2r (NM_021325.2,259-277).
ctagcagtgctcttaatat

SEQ ID NO: 560899 - DNA, 19 bp, Mus musculus
  siRNA target sequence for Mox2r (NM_021325.2,920-938).
gaggtggtaaccaatcatt

SEQ ID NO: 560900 - DNA, 19 bp, Mus musculus
  siRNA target sequence for Mox2r (NM_021325.2,930-948).
ccaatcattacgaccatat

SEQ ID NO: 560901 - DNA, 19 bp, Mus musculus
  siRNA target sequence for Mox2r (NM_021325.2,931-949).
caatcattacgaccatata

SEQ ID NO: 560902 - DNA, 19 bp, Mus musculus
  siRNA target sequence for Mox2r (NM_021325.2,953-971).
catacatcataccatcaat

SEQ ID NO: 560903 - DNA, 19 bp, Mus musculus
  siRNA target sequence for Mox2r (NM_021325.2,964-982).
ccatcaattatcattttga

SEQ ID NO: 560904 - DNA, 19 bp, Mus musculus
  siRNA target sequence for Mox2r (NM_021325.2,981-999).
gatcatcataggatgcatt

SEQ ID NO: 560905 - DNA, 19 bp, Mus musculus
  siRNA target sequence for Mox2r (NM_021325.2,992-1010).
gatgcatttgtcttttgaa

SEQ ID NO: 560906 - DNA, 19 bp, Mus musculus
  siRNA target sequence for Mox2r (NM_021325.2,1061-1079).
ctattgaggaggatgaaat

SEQ ID NO: 560907 - DNA, 19 bp, Mus musculus
  siRNA target sequence for Mox2r (NM_021325.2,1075-1093).
gaaatgcagccttatgcta

SEQ ID NO: 560908 - DNA, 19 bp, Mus musculus
  siRNA target sequence for Mox2r (NM_021325.2,1081-1099).
cagccttatgctagctata

SEQ ID NO: 560909 - DNA, 19 bp, Mus musculus
  siRNA target sequence for Mox2r (NM_021325.2,1083-1101).
gccttatgctagctataca

SEQ ID NO: 560910 - DNA, 19 bp, Mus musculus
  siRNA target sequence for Mox2r (NM_021325.2,1085-1103).
cttatgctagctatacaga

SEQ ID NO: 560911 - DNA, 19 bp, Mus musculus
  siRNA target sequence for Mox2r (NM_021325.2,1104-1122).
gaagagcaatccactctat

SEQ ID NO: 560912 - DNA, 19 bp, Mus musculus
  siRNA target sequence for Mox2r (NM_021325.2,1110-1128).
caatccactctatgatact

SEQ ID NO: 560913 - DNA, 19 bp, Mus musculus
  siRNA target sequence for Mox2r (NM_021325.2,1143-1161).
ggcatttccagtatcacaa

SEQ ID NO: 560914 - DNA, 19 bp, Mus musculus
  siRNA target sequence for Moxd1 (NM_021509.3,182-200).
gatcccgaaggcaagtact

SEQ ID NO: 560915 - DNA, 19 bp, Mus musculus
  siRNA target sequence for Moxd1 (NM_021509.3,398-416).
caagattaccacctagatt

SEQ ID NO: 560916 - DNA, 19 bp, Mus musculus
  siRNA target sequence for Moxd1 (NM_021509.3,437-455).
cacacagtgatcgagttta

SEQ ID NO: 560917 - DNA, 19 bp, Mus musculus
  siRNA target sequence for Moxd1 (NM_021509.3,466-484).
gcacacgtgcgatgtcaat

SEQ ID NO: 560918 - DNA, 19 bp, Mus musculus
  siRNA target sequence for Moxd1 (NM_021509.3,471-489).
cgtgcgatgtcaatgacaa

SEQ ID NO: 560919 - DNA, 19 bp, Mus musculus
  siRNA target sequence for Moxd1 (NM_021509.3,500-518).
gatagcaccgtgagagtta

SEQ ID NO: 560920 - DNA, 19 bp, Mus musculus
  siRNA target sequence for Moxd1 (NM_021509.3,555-573).
gtcccaagtaccatgactt

SEQ ID NO: 560921 - DNA, 19 bp, Mus musculus
  siRNA target sequence for Moxd1 (NM_021509.3,558-576).
ccaagtaccatgacttaaa

SEQ ID NO: 560922 - DNA, 19 bp, Mus musculus
  siRNA target sequence for Moxd1 (NM_021509.3,589-607).
gagtctacggttactgaat

SEQ ID NO: 560923 - DNA, 19 bp, Mus musculus
  siRNA target sequence for Moxd1 (NM_021509.3,598-616).
gttactgaatcctgagaaa

SEQ ID NO: 560924 - DNA, 19 bp, Mus musculus
  siRNA target sequence for Moxd1 (NM_021509.3,642-660).
cgtactttgatctggtaaa

SEQ ID NO: 560925 - DNA, 19 bp, Mus musculus
  siRNA target sequence for Moxd1 (NM_021509.3,643-661).
gtactttgatctggtaaat

SEQ ID NO: 560926 - DNA, 19 bp, Mus musculus
  siRNA target sequence for Moxd1 (NM_021509.3,662-680).
caaaacgttcccattccaa

SEQ ID NO: 560927 - DNA, 19 bp, Mus musculus
  siRNA target sequence for Moxd1 (NM_021509.3,667-685).
cgttcccattccaaacaaa

SEQ ID NO: 560928 - DNA, 19 bp, Mus musculus
  siRNA target sequence for Moxd1 (NM_021509.3,693-711).
catactggtgccaaatgtt

SEQ ID NO: 560929 - DNA, 19 bp, Mus musculus
  siRNA target sequence for Moxd1 (NM_021509.3,700-718).
gtgccaaatgtttaagatt

SEQ ID NO: 560930 - DNA, 19 bp, Mus musculus
  siRNA target sequence for Moxd1 (NM_021509.3,794-812).
cacatcctggtctatcaat

SEQ ID NO: 560931 - DNA, 19 bp, Mus musculus
  siRNA target sequence for Moxd1 (NM_021509.3,889-907).
cacctgcgaaactgtgatt

SEQ ID NO: 560932 - DNA, 19 bp, Mus musculus
  siRNA target sequence for Moxd1 (NM_021509.3,973-991).
gccactggatcctcgttat

SEQ ID NO: 560933 - DNA, 19 bp, Mus musculus
  siRNA target sequence for Moxd1 (NM_021509.3,1023-1041).
cacggaggaaaggcttaat

SEQ ID NO: 560934 - DNA, 19 bp, Mus musculus
  siRNA target sequence for Moxd1 (NM_021509.3,1026-1044).
ggaggaaaggcttaataga

SEQ ID NO: 560935 - DNA, 19 bp, Mus musculus
  siRNA target sequence for Moxd1 (NM_021509.3,1052-1070).
gggctgagggttttccata

SEQ ID NO: 560936 - DNA, 19 bp, Mus musculus
  siRNA target sequence for Moxd1 (NM_021509.3,1060-1078).
ggttttccatactacagat

SEQ ID NO: 560937 - DNA, 19 bp, Mus musculus
  siRNA target sequence for Moxd1 (NM_021509.3,1148-1166).
gggatgcccgagttccatt

SEQ ID NO: 560938 - DNA, 19 bp, Mus musculus
  siRNA target sequence for Moxd1 (NM_021509.3,1275-1293).
gcatcaggctgcgtcattt

SEQ ID NO: 560939 - DNA, 19 bp, Mus musculus
  siRNA target sequence for Moxd1 (NM_021509.3,1276-1294).
catcaggctgcgtcatttt

SEQ ID NO: 560940 - DNA, 19 bp, Mus musculus
  siRNA target sequence for Moxd1 (NM_021509.3,1279-1297).
caggctgcgtcattttcga

SEQ ID NO: 560941 - DNA, 19 bp, Mus musculus
  siRNA target sequence for Moxd1 (NM_021509.3,1281-1299).
ggctgcgtcattttcgaaa

SEQ ID NO: 560942 - DNA, 19 bp, Mus musculus
  siRNA target sequence for Moxd1 (NM_021509.3,1282-1300).
gctgcgtcattttcgaaaa

SEQ ID NO: 560943 - DNA, 19 bp, Mus musculus
  siRNA target sequence for Moxd1 (NM_021509.3,1460-1478).
ctaagcaccaggaatgaaa

SEQ ID NO: 560944 - DNA, 19 bp, Mus musculus
  siRNA target sequence for Moxd1 (NM_021509.3,1482-1500).
gtctctcataccttcttta

SEQ ID NO: 560945 - DNA, 19 bp, Mus musculus
  siRNA target sequence for Moxd1 (NM_021509.3,1486-1504).
ctcataccttctttattat

SEQ ID NO: 560946 - DNA, 19 bp, Mus musculus
  siRNA target sequence for Moxd1 (NM_021509.3,1620-1638).
gccctaagcagtacagaaa

SEQ ID NO: 560947 - DNA, 19 bp, Mus musculus
  siRNA target sequence for Moxd1 (NM_021509.3,1644-1662).
ctttcatggatgcaatgaa

SEQ ID NO: 560948 - DNA, 19 bp, Mus musculus
  siRNA target sequence for Moxd1 (NM_021509.3,1753-1771).
cgcagagtggtcgattcaa

SEQ ID NO: 560949 - DNA, 19 bp, Mus musculus
  siRNA target sequence for Moxd1 (NM_021509.3,1781-1799).
gcaatacctcctgatatca

SEQ ID NO: 560950 - DNA, 19 bp, Mus musculus
  siRNA target sequence for Moxd1 (NM_021509.3,1848-1866).
cacctctacacggcatttt

SEQ ID NO: 560951 - DNA, 19 bp, Mus musculus
  siRNA target sequence for Ntsr2 (NM_008747.1,126-144).
ctgttcaccgcgctctatt

SEQ ID NO: 560952 - DNA, 19 bp, Mus musculus
  siRNA target sequence for Ntsr2 (NM_008747.1,136-154).
cgctctattcgctcatctt

SEQ ID NO: 560953 - DNA, 19 bp, Mus musculus
  siRNA target sequence for Ntsr2 (NM_008747.1,345-363).
ggctgtcgtggctattact

SEQ ID NO: 560954 - DNA, 19 bp, Mus musculus
  siRNA target sequence for Ntsr2 (NM_008747.1,346-364).
gctgtcgtggctattactt

SEQ ID NO: 560955 - DNA, 19 bp, Mus musculus
  siRNA target sequence for Ntsr2 (NM_008747.1,603-621).
gtgtgcacggtgctagtaa

SEQ ID NO: 560956 - DNA, 19 bp, Mus musculus
  siRNA target sequence for Ntsr2 (NM_008747.1,605-623).
gtgcacggtgctagtaagt

SEQ ID NO: 560957 - DNA, 19 bp, Mus musculus
  siRNA target sequence for Ntsr2 (NM_008747.1,754-772).
cagcttctgcccaagtcaa

SEQ ID NO: 560958 - DNA, 19 bp, Mus musculus
  siRNA target sequence for Ntsr2 (NM_008747.1,1055-1073).
gaccaacacgctcttctat

SEQ ID NO: 560959 - DNA, 19 bp, Mus musculus
  siRNA target sequence for Ntsr2 (NM_008747.1,1194-1212).
gaagccccagagtcaacta

SEQ ID NO: 560960 - DNA, 19 bp, Mus musculus
  siRNA target sequence for Ntsr2 (NM_008747.1,1200-1218).
ccagagtcaactactagta

SEQ ID NO: 560961 - DNA, 19 bp, Mus musculus
  siRNA target sequence for Ntsr2 (NM_008747.1,1210-1228).
ctactagtacgtacagttt

SEQ ID NO: 560962 - DNA, 19 bp, Mus musculus
  siRNA target sequence for Ntsr2 (NM_008747.1,1253-1271).
ccccagcctgggtgaaata

SEQ ID NO: 560963 - DNA, 19 bp, Mus musculus
  siRNA target sequence for Pam (NM_013626.1,485-503).
cagacccatcactcctatt

SEQ ID NO: 560964 - DNA, 19 bp, Mus musculus
  siRNA target sequence for Pam (NM_013626.1,487-505).
gacccatcactcctattga

SEQ ID NO: 560965 - DNA, 19 bp, Mus musculus
  siRNA target sequence for Pam (NM_013626.1,511-529).
cggattttacactggatat

SEQ ID NO: 560966 - DNA, 19 bp, Mus musculus
  siRNA target sequence for Pam (NM_013626.1,536-554).
gcctggggtcacacctaaa

SEQ ID NO: 560967 - DNA, 19 bp, Mus musculus
  siRNA target sequence for Pam (NM_013626.1,538-556).
ctggggtcacacctaaaga

SEQ ID NO: 560968 - DNA, 19 bp, Mus musculus
  siRNA target sequence for Pam (NM_013626.1,540-558).
ggggtcacacctaaagagt

SEQ ID NO: 560969 - DNA, 19 bp, Mus musculus
  siRNA target sequence for Pam (NM_013626.1,555-573).
gagtctgacacgtacttct

SEQ ID NO: 560970 - DNA, 19 bp, Mus musculus
  siRNA target sequence for Pam (NM_013626.1,603-621).
gaagccttcgtgattgact

SEQ ID NO: 560971 - DNA, 19 bp, Mus musculus
  siRNA target sequence for Pam (NM_013626.1,833-851).
cgtccttcaagttcactat

SEQ ID NO: 560972 - DNA, 19 bp, Mus musculus
  siRNA target sequence for Pam (NM_013626.1,854-872).
ggacatcagtgcttttcga

SEQ ID NO: 560973 - DNA, 19 bp, Mus musculus
  siRNA target sequence for Pam (NM_013626.1,862-880).
gtgcttttcgagataatca

SEQ ID NO: 560974 - DNA, 19 bp, Mus musculus
  siRNA target sequence for Pam (NM_013626.1,864-882).
gcttttcgagataatcaca

SEQ ID NO: 560975 - DNA, 19 bp, Mus musculus
  siRNA target sequence for Pam (NM_013626.1,936-954).
gcgggcatgtaccttatga

SEQ ID NO: 560976 - DNA, 19 bp, Mus musculus
  siRNA target sequence for Pam (NM_013626.1,937-955).
cgggcatgtaccttatgat

SEQ ID NO: 560977 - DNA, 19 bp, Mus musculus
  siRNA target sequence for Pam (NM_013626.1,939-957).
ggcatgtaccttatgatgt

SEQ ID NO: 560978 - DNA, 19 bp, Mus musculus
  siRNA target sequence for Pam (NM_013626.1,956-974).
gtctgtcaacactgttata

SEQ ID NO: 560979 - DNA, 19 bp, Mus musculus
  siRNA target sequence for Pam (NM_013626.1,1002-1020).
gacatttcgtgccattaca

SEQ ID NO: 560980 - DNA, 19 bp, Mus musculus
  siRNA target sequence for Pam (NM_013626.1,1004-1022).
catttcgtgccattacaaa

SEQ ID NO: 560981 - DNA, 19 bp, Mus musculus
  siRNA target sequence for Pam (NM_013626.1,1014-1032).
cattacaaaatgtatccaa

SEQ ID NO: 560982 - DNA, 19 bp, Mus musculus
  siRNA target sequence for Pam (NM_013626.1,1025-1043).
gtatccaatgcatgtgttt

SEQ ID NO: 560983 - DNA, 19 bp, Mus musculus
  siRNA target sequence for Pam (NM_013626.1,1045-1063).
cctaccgagtccatactca

SEQ ID NO: 560984 - DNA, 19 bp, Mus musculus
  siRNA target sequence for Pam (NM_013626.1,1055-1073).
ccatactcaccatttaggt

SEQ ID NO: 560985 - DNA, 19 bp, Mus musculus
  siRNA target sequence for Pam (NM_013626.1,1056-1074).
catactcaccatttaggta

SEQ ID NO: 560986 - DNA, 19 bp, Mus musculus
  siRNA target sequence for Pam (NM_013626.1,1163-1181).
ggaacacccagtagatgtt

SEQ ID NO: 560987 - DNA, 19 bp, Mus musculus
  siRNA target sequence for Pam (NM_013626.1,1325-1343).
catgacctgtacacagaat

SEQ ID NO: 560988 - DNA, 19 bp, Mus musculus
  siRNA target sequence for Pam (NM_013626.1,1374-1392).
gaagaggccaatattccaa

SEQ ID NO: 560989 - DNA, 19 bp, Mus musculus
  siRNA target sequence for Pam (NM_013626.1,1398-1416).
gtaaaatccgacatggtta

SEQ ID NO: 560990 - DNA, 19 bp, Mus musculus
  siRNA target sequence for Pam (NM_013626.1,1422-1440).
catgggcatcacaaagaaa

SEQ ID NO: 560991 - DNA, 19 bp, Mus musculus
  siRNA target sequence for Pam (NM_013626.1,1426-1444).
ggcatcacaaagaaacaga

SEQ ID NO: 560992 - DNA, 19 bp, Mus musculus
  siRNA target sequence for Pam (NM_013626.1,1498-1516).
ccttcgagcagggtgattt

SEQ ID NO: 560993 - DNA, 19 bp, Mus musculus
  siRNA target sequence for Pam (NM_013626.1,1549-1567).
gggaagatgttgttcatgt

SEQ ID NO: 560994 - DNA, 19 bp, Mus musculus
  siRNA target sequence for Pam (NM_013626.1,1571-1589).
caaatataatcctacagaa

SEQ ID NO: 560995 - DNA, 19 bp, Mus musculus
  siRNA target sequence for Pam (NM_013626.1,1627-1645).
caaacgtagtccagaaaaa

SEQ ID NO: 560996 - DNA, 19 bp, Mus musculus
  siRNA target sequence for Pam (NM_013626.1,1686-1704).
gaggaagggggtaatgcta

SEQ ID NO: 560997 - DNA, 19 bp, Mus musculus
  siRNA target sequence for Pam (NM_013626.1,1813-1831).
cagaactcgcaggagattt

SEQ ID NO: 560998 - DNA, 19 bp, Mus musculus
  siRNA target sequence for Pam (NM_013626.1,1901-1919).
ggattctaagaataacctt

SEQ ID NO: 560999 - DNA, 19 bp, Mus musculus
  siRNA target sequence for Pam (NM_013626.1,1948-1966).
gggatggaaactcttttga

SEQ ID NO: 561000 - DNA, 19 bp, Mus musculus
  siRNA target sequence for Pam (NM_013626.1,1973-1991).
gttcgtttaccaacaaaga

SEQ ID NO: 561001 - DNA, 19 bp, Mus musculus
  siRNA target sequence for Pam (NM_013626.1,1990-2008).
gaggtcttggaccaattga

SEQ ID NO: 561002 - DNA, 19 bp, Mus musculus
  siRNA target sequence for Pam (NM_013626.1,2022-2040).
ctggtcattgacccaaata

SEQ ID NO: 561003 - DNA, 19 bp, Mus musculus
  siRNA target sequence for Pam (NM_013626.1,2054-2072).
ccagtccagcggcaagaat

SEQ ID NO: 561004 - DNA, 19 bp, Mus musculus
  siRNA target sequence for Pam (NM_013626.1,2062-2080).
gcggcaagaatctgtttta

SEQ ID NO: 561005 - DNA, 19 bp, Mus musculus
  siRNA target sequence for Pam (NM_013626.1,2063-2081).
cggcaagaatctgttttat

SEQ ID NO: 561006 - DNA, 19 bp, Mus musculus
  siRNA target sequence for Pam (NM_013626.1,2064-2082).
ggcaagaatctgttttatt

SEQ ID NO: 561007 - DNA, 19 bp, Mus musculus
  siRNA target sequence for Pam (NM_013626.1,2066-2084).
caagaatctgttttattta

SEQ ID NO: 561008 - DNA, 19 bp, Mus musculus
  siRNA target sequence for Pam (NM_013626.1,2092-2110).
gtttgagcatagatacaga

SEQ ID NO: 561009 - DNA, 19 bp, Mus musculus
  siRNA target sequence for Pam (NM_013626.1,2139-2157).
ctccatcaggtgttcaaat

SEQ ID NO: 561010 - DNA, 19 bp, Mus musculus
  siRNA target sequence for Pam (NM_013626.1,2212-2230).
ctggcagcgaccaaaatca

SEQ ID NO: 561011 - DNA, 19 bp, Mus musculus
  siRNA target sequence for Pam (NM_013626.1,2214-2232).
ggcagcgaccaaaatcatt

SEQ ID NO: 561012 - DNA, 19 bp, Mus musculus
  siRNA target sequence for Pam (NM_013626.1,2215-2233).
gcagcgaccaaaatcattt

SEQ ID NO: 561013 - DNA, 19 bp, Mus musculus
  siRNA target sequence for Pam (NM_013626.1,2323-2341).
caccaagcgggaagttcat

SEQ ID NO: 561014 - DNA, 19 bp, Mus musculus
  siRNA target sequence for Pam (NM_013626.1,2325-2343).
ccaagcgggaagttcatca

SEQ ID NO: 561015 - DNA, 19 bp, Mus musculus
  siRNA target sequence for Pam (NM_013626.1,2461-2479).
gccggatccagtgtttcaa

SEQ ID NO: 561016 - DNA, 19 bp, Mus musculus
  siRNA target sequence for Pam (NM_013626.1,2521-2539).
catttggaaggaatgtctt

SEQ ID NO: 561017 - DNA, 19 bp, Mus musculus
  siRNA target sequence for Pam (NM_013626.1,2527-2545).
gaaggaatgtctttgcaat

SEQ ID NO: 561018 - DNA, 19 bp, Mus musculus
  siRNA target sequence for Pam (NM_013626.1,2531-2549).
gaatgtctttgcaatctca

SEQ ID NO: 561019 - DNA, 19 bp, Mus musculus
  siRNA target sequence for Pam (NM_013626.1,2535-2553).
gtctttgcaatctcatata

SEQ ID NO: 561020 - DNA, 19 bp, Mus musculus
  siRNA target sequence for Pam (NM_013626.1,2560-2578).
gtttcctctttgcagtaaa

SEQ ID NO: 561021 - DNA, 19 bp, Mus musculus
  siRNA target sequence for Pam (NM_013626.1,2608-2626).
ccgtgcaaggatttgtgat

SEQ ID NO: 561022 - DNA, 19 bp, Mus musculus
  siRNA target sequence for Pam (NM_013626.1,2613-2631).
caaggatttgtgatgaact

SEQ ID NO: 561023 - DNA, 19 bp, Mus musculus
  siRNA target sequence for Pam (NM_013626.1,2635-2653).
ccagtggggaaattataga

SEQ ID NO: 561024 - DNA, 19 bp, Mus musculus
  siRNA target sequence for Pam (NM_013626.1,2636-2654).
cagtggggaaattatagat

SEQ ID NO: 561025 - DNA, 19 bp, Mus musculus
  siRNA target sequence for Pam (NM_013626.1,2665-2683).
cagttcgcaagcactttga

SEQ ID NO: 561026 - DNA, 19 bp, Mus musculus
  siRNA target sequence for Pam (NM_013626.1,2678-2696).
ctttgacatgcctcatgat

SEQ ID NO: 561027 - DNA, 19 bp, Mus musculus
  siRNA target sequence for Pam (NM_013626.1,2730-2748).
ggcgacgcacacacaaaca

SEQ ID NO: 561028 - DNA, 19 bp, Mus musculus
  siRNA target sequence for Pam (NM_013626.1,2850-2868).
gttgttgaacccaaagtga

SEQ ID NO: 561029 - DNA, 19 bp, Mus musculus
  siRNA target sequence for Pam (NM_013626.1,2878-2896).
ccacctcctcagaattgca

SEQ ID NO: 561030 - DNA, 19 bp, Mus musculus
  siRNA target sequence for Pam (NM_013626.1,3005-3023).
catgtttattcgatggaaa

SEQ ID NO: 561031 - DNA, 19 bp, Mus musculus
  siRNA target sequence for Pam (NM_013626.1,3101-3119).
gggaagcagcggcttaaat

SEQ ID NO: 561032 - DNA, 19 bp, Mus musculus
  siRNA target sequence for Pam (NM_013626.1,3109-3127).
gcggcttaaatctaggaaa

SEQ ID NO: 561033 - DNA, 19 bp, Mus musculus
  siRNA target sequence for Pam (NM_013626.1,3110-3128).
cggcttaaatctaggaaat

SEQ ID NO: 561034 - DNA, 19 bp, Mus musculus
  siRNA target sequence for Pam (NM_013626.1,3111-3129).
ggcttaaatctaggaaatt

SEQ ID NO: 561035 - DNA, 19 bp, Mus musculus
  siRNA target sequence for Prnd (NM_023043.1,227-245).
cgcccaggagccttcatca

SEQ ID NO: 561036 - DNA, 19 bp, Mus musculus
  siRNA target sequence for Prnd (NM_023043.1,291-309).
ggtactacgcggctaacta

SEQ ID NO: 561037 - DNA, 19 bp, Mus musculus
  siRNA target sequence for Prnd (NM_023043.1,292-310).
gtactacgcggctaactat

SEQ ID NO: 561038 - DNA, 19 bp, Mus musculus
  siRNA target sequence for Prnd (NM_023043.1,429-447).
gggagaagcaggatagcaa

SEQ ID NO: 561039 - DNA, 19 bp, Mus musculus
  siRNA target sequence for Prnd (NM_023043.1,494-512).
gccaagcactgcgatttct

SEQ ID NO: 561040 - DNA, 19 bp, Mus musculus
  siRNA target sequence for Prnd (NM_023043.1,576-594).
gtttcgtttggttcattgt

SEQ ID NO: 561041 - DNA, 19 bp, Mus musculus
  siRNA target sequence for Prnp (NM_011170.1,207-225).
gatgtcggcctctgcaaaa

SEQ ID NO: 561042 - DNA, 19 bp, Mus musculus
  siRNA target sequence for Prnp (NM_011170.1,427-445).
gagggggtacccataatca

SEQ ID NO: 561043 - DNA, 19 bp, Mus musculus
  siRNA target sequence for Prnp (NM_011170.1,429-447).
gggggtacccataatcagt

SEQ ID NO: 561044 - DNA, 19 bp, Mus musculus
  siRNA target sequence for Prnp (NM_011170.1,556-574).
gcaggcccatgatccattt

SEQ ID NO: 561045 - DNA, 19 bp, Mus musculus
  siRNA target sequence for Prnp (NM_011170.1,594-612).
cgctactaccgtgaaaaca

SEQ ID NO: 561046 - DNA, 19 bp, Mus musculus
  siRNA target sequence for Prnp (NM_011170.1,595-613).
gctactaccgtgaaaacat

SEQ ID NO: 561047 - DNA, 19 bp, Mus musculus
  siRNA target sequence for Prnp (NM_011170.1,614-632).
gtaccgctaccctaaccaa

SEQ ID NO: 561048 - DNA, 19 bp, Mus musculus
  siRNA target sequence for Prnp (NM_011170.1,619-637).
gctaccctaaccaagtgta

SEQ ID NO: 561049 - DNA, 19 bp, Mus musculus
  siRNA target sequence for Prnp (NM_011170.1,624-642).
cctaaccaagtgtactaca

SEQ ID NO: 561050 - DNA, 19 bp, Mus musculus
  siRNA target sequence for Prnp (NM_011170.1,681-699).
cacgactgcgtcaatatca

SEQ ID NO: 561051 - DNA, 19 bp, Mus musculus
  siRNA target sequence for Scospondin (NM_173428.1,214-232).
gggctctgtgcgatctaca

SEQ ID NO: 561052 - DNA, 19 bp, Mus musculus
  siRNA target sequence for Scospondin (NM_173428.1,215-233).
ggctctgtgcgatctacaa

SEQ ID NO: 561053 - DNA, 19 bp, Mus musculus
  siRNA target sequence for Scospondin (NM_173428.1,267-285).
gacagtgagggcttgttgt

SEQ ID NO: 561054 - DNA, 19 bp, Mus musculus
  siRNA target sequence for Scospondin (NM_173428.1,673-691).
gctacctttgggaattcat

SEQ ID NO: 561055 - DNA, 19 bp, Mus musculus
  siRNA target sequence for Scospondin (NM_173428.1,757-775).
ctcctaggaggtacattaa

SEQ ID NO: 561056 - DNA, 19 bp, Mus musculus
  siRNA target sequence for Scospondin (NM_173428.1,759-777).
cctaggaggtacattaact

SEQ ID NO: 561057 - DNA, 19 bp, Mus musculus
  siRNA target sequence for Scospondin (NM_173428.1,992-1010).
ccaggcagcacatctatgt

SEQ ID NO: 561058 - DNA, 19 bp, Mus musculus
  siRNA target sequence for Scospondin (NM_173428.1,1416-1434).
ggtgcaggactctgtgaaa

SEQ ID NO: 561059 - DNA, 19 bp, Mus musculus
  siRNA target sequence for Scospondin (NM_173428.1,1436-1454).
gccagctgctggttgtgtt

SEQ ID NO: 561060 - DNA, 19 bp, Mus musculus
  siRNA target sequence for Scospondin (NM_173428.1,1517-1535).
cccacattcagctcagata

SEQ ID NO: 561061 - DNA, 19 bp, Mus musculus
  siRNA target sequence for Scospondin (NM_173428.1,1519-1537).
cacattcagctcagatact

SEQ ID NO: 561062 - DNA, 19 bp, Mus musculus
  siRNA target sequence for Scospondin (NM_173428.1,1586-1604).
gtgttgagggcttcaatat

SEQ ID NO: 561063 - DNA, 19 bp, Mus musculus
  siRNA target sequence for Scospondin (NM_173428.1,1610-1628).
gggcctcttctacattctt

SEQ ID NO: 561064 - DNA, 19 bp, Mus musculus
  siRNA target sequence for Scospondin (NM_173428.1,1670-1688).
ctgagcctgcggcatacat

SEQ ID NO: 561065 - DNA, 19 bp, Mus musculus
  siRNA target sequence for Scospondin (NM_173428.1,1672-1690).
gagcctgcggcatacatca

SEQ ID NO: 561066 - DNA, 19 bp, Mus musculus
  siRNA target sequence for Scospondin (NM_173428.1,1722-1740).
gggtctgtgtggtactttt

SEQ ID NO: 561067 - DNA, 19 bp, Mus musculus
  siRNA target sequence for Scospondin (NM_173428.1,1726-1744).
ctgtgtggtacttttacct

SEQ ID NO: 561068 - DNA, 19 bp, Mus musculus
  siRNA target sequence for Scospondin (NM_173428.1,1941-1959).
ggagtgtcatgggttagta

SEQ ID NO: 561069 - DNA, 19 bp, Mus musculus
  siRNA target sequence for Scospondin (NM_173428.1,1960-1978).
gacagggaaccatttcgat

SEQ ID NO: 561070 - DNA, 19 bp, Mus musculus
  siRNA target sequence for Scospondin (NM_173428.1,1962-1980).
cagggaaccatttcgatta

SEQ ID NO: 561071 - DNA, 19 bp, Mus musculus
  siRNA target sequence for Scospondin (NM_173428.1,2270-2288).
gcatgtgccactgtcaatt

SEQ ID NO: 561072 - DNA, 19 bp, Mus musculus
  siRNA target sequence for Scospondin (NM_173428.1,2271-2289).
catgtgccactgtcaattt

SEQ ID NO: 561073 - DNA, 19 bp, Mus musculus
  siRNA target sequence for Scospondin (NM_173428.1,2293-2311).
ggccatcggtacaccatta

SEQ ID NO: 561074 - DNA, 19 bp, Mus musculus
  siRNA target sequence for Scospondin (NM_173428.1,2294-2312).
gccatcggtacaccattaa

SEQ ID NO: 561075 - DNA, 19 bp, Mus musculus
  siRNA target sequence for Scospondin (NM_173428.1,2296-2314).
catcggtacaccattaaca

SEQ ID NO: 561076 - DNA, 19 bp, Mus musculus
  siRNA target sequence for Scospondin (NM_173428.1,2408-2426).
gccctcgggagctcatcta

SEQ ID NO: 561077 - DNA, 19 bp, Mus musculus
  siRNA target sequence for Scospondin (NM_173428.1,2409-2427).
ccctcgggagctcatctat

SEQ ID NO: 561078 - DNA, 19 bp, Mus musculus
  siRNA target sequence for Scospondin (NM_173428.1,2411-2429).
ctcgggagctcatctatgt

SEQ ID NO: 561079 - DNA, 19 bp, Mus musculus
  siRNA target sequence for Scospondin (NM_173428.1,2570-2588).
gccacaacgggcaatggta

SEQ ID NO: 561080 - DNA, 19 bp, Mus musculus
  siRNA target sequence for Scospondin (NM_173428.1,2786-2804).
gtgtctccgtccagaactt

SEQ ID NO: 561081 - DNA, 19 bp, Mus musculus
  siRNA target sequence for Scospondin (NM_173428.1,2815-2833).
gccagtggcctcacatgta

SEQ ID NO: 561082 - DNA, 19 bp, Mus musculus
  siRNA target sequence for Scospondin (NM_173428.1,2882-2900).
gaggccaggccgtaacagt

SEQ ID NO: 561083 - DNA, 19 bp, Mus musculus
  siRNA target sequence for Scospondin (NM_173428.1,2886-2904).
ccaggccgtaacagtgaat

SEQ ID NO: 561084 - DNA, 19 bp, Mus musculus
  siRNA target sequence for Scospondin (NM_173428.1,3071-3089).
ggctgtgcggaaactttga

SEQ ID NO: 561085 - DNA, 19 bp, Mus musculus
  siRNA target sequence for Scospondin (NM_173428.1,3072-3090).
gctgtgcggaaactttgat

SEQ ID NO: 561086 - DNA, 19 bp, Mus musculus
  siRNA target sequence for Scospondin (NM_173428.1,3073-3091).
ctgtgcggaaactttgata

SEQ ID NO: 561087 - DNA, 19 bp, Mus musculus
  siRNA target sequence for Scospondin (NM_173428.1,3075-3093).
gtgcggaaactttgatagt

SEQ ID NO: 561088 - DNA, 19 bp, Mus musculus
  siRNA target sequence for Scospondin (NM_173428.1,3077-3095).
gcggaaactttgatagtga

SEQ ID NO: 561089 - DNA, 19 bp, Mus musculus
  siRNA target sequence for Scospondin (NM_173428.1,3078-3096).
cggaaactttgatagtgat

SEQ ID NO: 561090 - DNA, 19 bp, Mus musculus
  siRNA target sequence for Scospondin (NM_173428.1,3198-3216).
cctgccacatccttggaat

SEQ ID NO: 561091 - DNA, 19 bp, Mus musculus
  siRNA target sequence for Scospondin (NM_173428.1,4113-4131).
ctctggagaggtatcttgt

SEQ ID NO: 561092 - DNA, 19 bp, Mus musculus
  siRNA target sequence for Scospondin (NM_173428.1,4132-4150).
gttgatggcacttgtgtta

SEQ ID NO: 561093 - DNA, 19 bp, Mus musculus
  siRNA target sequence for Scospondin (NM_173428.1,4151-4169).
ggactatccagctatgtga

SEQ ID NO: 561094 - DNA, 19 bp, Mus musculus
  siRNA target sequence for Scospondin (NM_173428.1,4152-4170).
gactatccagctatgtgat

SEQ ID NO: 561095 - DNA, 19 bp, Mus musculus
  siRNA target sequence for Scospondin (NM_173428.1,4518-4536).
gtgccctgatggttcagat

SEQ ID NO: 561096 - DNA, 19 bp, Mus musculus
  siRNA target sequence for Scospondin (NM_173428.1,4592-4610).
gggctccctgtccagaatt

SEQ ID NO: 561097 - DNA, 19 bp, Mus musculus
  siRNA target sequence for Scospondin (NM_173428.1,4594-4612).
gctccctgtccagaattct

SEQ ID NO: 561098 - DNA, 19 bp, Mus musculus
  siRNA target sequence for Scospondin (NM_173428.1,4625-4643).
gcacttgcattgatttcct

SEQ ID NO: 561099 - DNA, 19 bp, Mus musculus
  siRNA target sequence for Scospondin (NM_173428.1,5055-5073).
cctcaatgccacttgcttt

SEQ ID NO: 561100 - DNA, 19 bp, Mus musculus
  siRNA target sequence for Scospondin (NM_173428.1,5112-5130).
gacttgtgatgacatttct

SEQ ID NO: 561101 - DNA, 19 bp, Mus musculus
  siRNA target sequence for Scospondin (NM_173428.1,5248-5266).
gtggatggtgcccattact

SEQ ID NO: 561102 - DNA, 19 bp, Mus musculus
  siRNA target sequence for Scospondin (NM_173428.1,5269-5287).
cctggacaacgcatcaaga

SEQ ID NO: 561103 - DNA, 19 bp, Mus musculus
  siRNA target sequence for Scospondin (NM_173428.1,5270-5288).
ctggacaacgcatcaagat

SEQ ID NO: 561104 - DNA, 19 bp, Mus musculus
  siRNA target sequence for Scospondin (NM_173428.1,5384-5402).
cttttcggagccctaacaa

SEQ ID NO: 561105 - DNA, 19 bp, Mus musculus
  siRNA target sequence for Scospondin (NM_173428.1,5491-5509).
cagtggggcctcatgtaca

SEQ ID NO: 561106 - DNA, 19 bp, Mus musculus
  siRNA target sequence for Scospondin (NM_173428.1,5493-5511).
gtggggcctcatgtacaat

SEQ ID NO: 561107 - DNA, 19 bp, Mus musculus
  siRNA target sequence for Scospondin (NM_173428.1,5495-5513).
ggggcctcatgtacaatgt

SEQ ID NO: 561108 - DNA, 19 bp, Mus musculus
  siRNA target sequence for Scospondin (NM_173428.1,5560-5578).
cacagcagtatcacacatt

SEQ ID NO: 561109 - DNA, 19 bp, Mus musculus
  siRNA target sequence for Scospondin (NM_173428.1,5629-5647).
gaagggatgggagaatcat

SEQ ID NO: 561110 - DNA, 19 bp, Mus musculus
  siRNA target sequence for Scospondin (NM_173428.1,5632-5650).
gggatgggagaatcatgtt

SEQ ID NO: 561111 - DNA, 19 bp, Mus musculus
  siRNA target sequence for Scospondin (NM_173428.1,5745-5763).
ccatctagtcacctatgtt

SEQ ID NO: 561112 - DNA, 19 bp, Mus musculus
  siRNA target sequence for Scospondin (NM_173428.1,5775-5793).
ggcagatgcctgctattct

SEQ ID NO: 561113 - DNA, 19 bp, Mus musculus
  siRNA target sequence for Scospondin (NM_173428.1,5919-5937).
gcacacccagccactctat

SEQ ID NO: 561114 - DNA, 19 bp, Mus musculus
  siRNA target sequence for Scospondin (NM_173428.1,5996-6014).
gctcctctgccgcttatgt

SEQ ID NO: 561115 - DNA, 19 bp, Mus musculus
  siRNA target sequence for Scospondin (NM_173428.1,6033-6051).
gtttagcagcgacaatcta

SEQ ID NO: 561116 - DNA, 19 bp, Mus musculus
  siRNA target sequence for Scospondin (NM_173428.1,6294-6312).
ctgtgccagtggtgaatgt

SEQ ID NO: 561117 - DNA, 19 bp, Mus musculus
  siRNA target sequence for Scospondin (NM_173428.1,6453-6471).
ggtgagtgaggatttgaga

SEQ ID NO: 561118 - DNA, 19 bp, Mus musculus
  siRNA target sequence for Scospondin (NM_173428.1,6846-6864).
cttcactgtgcctactact

SEQ ID NO: 561119 - DNA, 19 bp, Mus musculus
  siRNA target sequence for Scospondin (NM_173428.1,7080-7098).
ccgagagctgctaagactt

SEQ ID NO: 561120 - DNA, 19 bp, Mus musculus
  siRNA target sequence for Scospondin (NM_173428.1,7257-7275).
ggaccctcctcccaagaat

SEQ ID NO: 561121 - DNA, 19 bp, Mus musculus
  siRNA target sequence for Scospondin (NM_173428.1,7429-7447).
gaccccgaagccaacagaa

SEQ ID NO: 561122 - DNA, 19 bp, Mus musculus
  siRNA target sequence for Scospondin (NM_173428.1,7452-7470).
cagtgggcactgtatggaa

SEQ ID NO: 561123 - DNA, 19 bp, Mus musculus
  siRNA target sequence for Scospondin (NM_173428.1,7587-7605).
caactgcagccaatgcata

SEQ ID NO: 561124 - DNA, 19 bp, Mus musculus
  siRNA target sequence for Scospondin (NM_173428.1,7590-7608).
ctgcagccaatgcatatgt

SEQ ID NO: 561125 - DNA, 19 bp, Mus musculus
  siRNA target sequence for Scospondin (NM_173428.1,8165-8183).
gtcctgggaacatggtatt

SEQ ID NO: 561126 - DNA, 19 bp, Mus musculus
  siRNA target sequence for Scospondin (NM_173428.1,8301-8319).
cctcttcctgcataatgct

SEQ ID NO: 561127 - DNA, 19 bp, Mus musculus
  siRNA target sequence for Scospondin (NM_173428.1,8389-8407).
cacctagactgcaacaact

SEQ ID NO: 561128 - DNA, 19 bp, Mus musculus
  siRNA target sequence for Scospondin (NM_173428.1,8517-8535).
cattcgacggcgctttaga

SEQ ID NO: 561129 - DNA, 19 bp, Mus musculus
  siRNA target sequence for Scospondin (NM_173428.1,8574-8592).
gtgccaaggtcccaatcta

SEQ ID NO: 561130 - DNA, 19 bp, Mus musculus
  siRNA target sequence for Scospondin (NM_173428.1,8576-8594).
gccaaggtcccaatctaga

SEQ ID NO: 561131 - DNA, 19 bp, Mus musculus
  siRNA target sequence for Scospondin (NM_173428.1,8577-8595).
ccaaggtcccaatctagat

SEQ ID NO: 561132 - DNA, 19 bp, Mus musculus
  siRNA target sequence for Scospondin (NM_173428.1,8585-8603).
ccaatctagatgctgaatt

SEQ ID NO: 561133 - DNA, 19 bp, Mus musculus
  siRNA target sequence for Scospondin (NM_173428.1,8596-8614).
gctgaattctgcagtttga

SEQ ID NO: 561134 - DNA, 19 bp, Mus musculus
  siRNA target sequence for Scospondin (NM_173428.1,8780-8798).
ccgaggaccaacaatggtt

SEQ ID NO: 561135 - DNA, 19 bp, Mus musculus
  siRNA target sequence for Scospondin (NM_173428.1,8979-8997).
gcatcttccatgtgagaat

SEQ ID NO: 561136 - DNA, 19 bp, Mus musculus
  siRNA target sequence for Scospondin (NM_173428.1,9360-9378).
ccagggcctgggggatttt

SEQ ID NO: 561137 - DNA, 19 bp, Mus musculus
  siRNA target sequence for Scospondin (NM_173428.1,9361-9379).
cagggcctgggggattttt

SEQ ID NO: 561138 - DNA, 19 bp, Mus musculus
  siRNA target sequence for Scospondin (NM_173428.1,9970-9988).
ctggggcagtcctatcgaa

SEQ ID NO: 561139 - DNA, 19 bp, Mus musculus
  siRNA target sequence for Scospondin (NM_173428.1,10233-10251).
gcatgggctctgtgtgttt

SEQ ID NO: 561140 - DNA, 19 bp, Mus musculus
  siRNA target sequence for Scospondin (NM_173428.1,10435-10453).
cctggtcctgggatatgga

SEQ ID NO: 561141 - DNA, 19 bp, Mus musculus
  siRNA target sequence for Scospondin (NM_173428.1,10549-10567).
gctcagcagagccgaattt

SEQ ID NO: 561142 - DNA, 19 bp, Mus musculus
  siRNA target sequence for Scospondin (NM_173428.1,10598-10616).
gcccagcaggtcgactata

SEQ ID NO: 561143 - DNA, 19 bp, Mus musculus
  siRNA target sequence for Scospondin (NM_173428.1,11366-11384).
gtgggtcagggaactgttt

SEQ ID NO: 561144 - DNA, 19 bp, Mus musculus
  siRNA target sequence for Scospondin (NM_173428.1,11368-11386).
gggtcagggaactgtttct

SEQ ID NO: 561145 - DNA, 19 bp, Mus musculus
  siRNA target sequence for Scospondin (NM_173428.1,11442-11460).
gcgtcgcctaagagcatat

SEQ ID NO: 561146 - DNA, 19 bp, Mus musculus
  siRNA target sequence for Scospondin (NM_173428.1,11444-11462).
gtcgcctaagagcatatca

SEQ ID NO: 561147 - DNA, 19 bp, Mus musculus
  siRNA target sequence for Scospondin (NM_173428.1,11600-11618).
gtggaggaggtcgatcttt

SEQ ID NO: 561148 - DNA, 19 bp, Mus musculus
  siRNA target sequence for Scospondin (NM_173428.1,11602-11620).
ggaggaggtcgatctttga

SEQ ID NO: 561149 - DNA, 19 bp, Mus musculus
  siRNA target sequence for Scospondin (NM_173428.1,12079-12097).
caacagagtcgctttaggt

SEQ ID NO: 561150 - DNA, 19 bp, Mus musculus
  siRNA target sequence for Scospondin (NM_173428.1,12273-12291).
ctgcaaagacactgattgt

SEQ ID NO: 561151 - DNA, 19 bp, Mus musculus
  siRNA target sequence for Scospondin (NM_173428.1,12397-12415).
ccgcatgggagcctatctt

SEQ ID NO: 561152 - DNA, 19 bp, Mus musculus
  siRNA target sequence for Scospondin (NM_173428.1,12578-12596).
ccaagtgtaatgacacatt

SEQ ID NO: 561153 - DNA, 19 bp, Mus musculus
  siRNA target sequence for Scospondin (NM_173428.1,12777-12795).
cttcaggccttgtaccatt

SEQ ID NO: 561154 - DNA, 19 bp, Mus musculus
  siRNA target sequence for Scospondin (NM_173428.1,12815-12833).
gctgcccacctccatttga

SEQ ID NO: 561155 - DNA, 19 bp, Mus musculus
  siRNA target sequence for Scospondin (NM_173428.1,12818-12836).
gcccacctccatttgagtt

SEQ ID NO: 561156 - DNA, 19 bp, Mus musculus
  siRNA target sequence for Scospondin (NM_173428.1,13045-13063).
cagctgggctgtaaggaat

SEQ ID NO: 561157 - DNA, 19 bp, Mus musculus
  siRNA target sequence for Scospondin (NM_173428.1,13375-13393).
cccggagcctgcaatgaca

SEQ ID NO: 561158 - DNA, 19 bp, Mus musculus
  siRNA target sequence for Scospondin (NM_173428.1,13505-13523).
gaccatgggctcaaacaga

SEQ ID NO: 561159 - DNA, 19 bp, Mus musculus
  siRNA target sequence for Scospondin (NM_173428.1,13516-13534).
caaacagaaagctgcaata

SEQ ID NO: 561160 - DNA, 19 bp, Mus musculus
  siRNA target sequence for Scospondin (NM_173428.1,13785-13803).
ccagctggactgccataat

SEQ ID NO: 561161 - DNA, 19 bp, Mus musculus
  siRNA target sequence for Scospondin (NM_173428.1,13786-13804).
cagctggactgccataatt

SEQ ID NO: 561162 - DNA, 19 bp, Mus musculus
  siRNA target sequence for Scospondin (NM_173428.1,13789-13807).
ctggactgccataattgca

SEQ ID NO: 561163 - DNA, 19 bp, Mus musculus
  siRNA target sequence for Scospondin (NM_173428.1,14328-14346).
gtgcgctcctggggaaata

SEQ ID NO: 561164 - DNA, 19 bp, Mus musculus
  siRNA target sequence for Scospondin (NM_173428.1,14365-14383).
gggccttgcgagaagacat

SEQ ID NO: 561165 - DNA, 19 bp, Mus musculus
  siRNA target sequence for Scospondin (NM_173428.1,14381-14399).
catgcccggaaatgaacat

SEQ ID NO: 561166 - DNA, 19 bp, Mus musculus
  siRNA target sequence for Scospondin (NM_173428.1,14493-14511).
cgaagaccactgtgaatgt

SEQ ID NO: 561167 - DNA, 19 bp, Mus musculus
  siRNA target sequence for Scospondin (NM_173428.1,14581-14599).
catgggaagagcgtttgta

SEQ ID NO: 561168 - DNA, 19 bp, Mus musculus
  siRNA target sequence for Scospondin (NM_173428.1,14624-14642).
gtgctcagggtgaagtgat

SEQ ID NO: 561169 - DNA, 19 bp, Mus musculus
  siRNA target sequence for Scospondin (NM_173428.1,14660-14678).
gctgttgccccatttgtca

SEQ ID NO: 561170 - DNA, 19 bp, Mus musculus
  siRNA target sequence for Scospondin (NM_173428.1,14798-14816).
ggtccagcaccaatgtcat

SEQ ID NO: 561171 - DNA, 19 bp, Mus musculus
  siRNA target sequence for Scospondin (NM_173428.1,14879-14897).
gccccgtgcggatcttgaa

SEQ ID NO: 561172 - DNA, 19 bp, Mus musculus
  siRNA target sequence for Slc14a2 (NM_030683.1,424-442).
ctttccagcagatacaaat

SEQ ID NO: 561173 - DNA, 19 bp, Mus musculus
  siRNA target sequence for Slc14a2 (NM_030683.1,429-447).
cagcagatacaaattgtat

SEQ ID NO: 561174 - DNA, 19 bp, Mus musculus
  siRNA target sequence for Slc14a2 (NM_030683.1,431-449).
gcagatacaaattgtatga

SEQ ID NO: 561175 - DNA, 19 bp, Mus musculus
  siRNA target sequence for Slc14a2 (NM_030683.1,479-497).
caagctcccaggatacaca

SEQ ID NO: 561176 - DNA, 19 bp, Mus musculus
  siRNA target sequence for Slc14a2 (NM_030683.1,534-552).
ggatctccgctcatcagat

SEQ ID NO: 561177 - DNA, 19 bp, Mus musculus
  siRNA target sequence for Slc14a2 (NM_030683.1,558-576).
cagccacatagtgaagatt

SEQ ID NO: 561178 - DNA, 19 bp, Mus musculus
  siRNA target sequence for Slc14a2 (NM_030683.1,560-578).
gccacatagtgaagattga

SEQ ID NO: 561179 - DNA, 19 bp, Mus musculus
  siRNA target sequence for Slc14a2 (NM_030683.1,758-776).
gagcagctcaggtgatgtt

SEQ ID NO: 561180 - DNA, 19 bp, Mus musculus
  siRNA target sequence for Slc14a2 (NM_030683.1,788-806).
ccattagtgggctcatcat

SEQ ID NO: 561181 - DNA, 19 bp, Mus musculus
  siRNA target sequence for Slc14a2 (NM_030683.1,974-992).
cggagaagttagactacta

SEQ ID NO: 561182 - DNA, 19 bp, Mus musculus
  siRNA target sequence for Slc14a2 (NM_030683.1,1130-1148).
cagctacgggccactacaa

SEQ ID NO: 561183 - DNA, 19 bp, Mus musculus
  siRNA target sequence for Slc14a2 (NM_030683.1,1136-1154).
cgggccactacaacctttt

SEQ ID NO: 561184 - DNA, 19 bp, Mus musculus
  siRNA target sequence for Slc14a2 (NM_030683.1,1181-1199).
cgtctgcagctcccaatat

SEQ ID NO: 561185 - DNA, 19 bp, Mus musculus
  siRNA target sequence for Slc14a2 (NM_030683.1,1450-1468).
gccattggcggcatgttct

SEQ ID NO: 561186 - DNA, 19 bp, Mus musculus
  siRNA target sequence for Slc14a2 (NM_030683.1,1511-1529).
ccctgttctgtgcatacat

SEQ ID NO: 561187 - DNA, 19 bp, Mus musculus
  siRNA target sequence for Slc14a2 (NM_030683.1,1534-1552).
gctgccctctccaatacaa

SEQ ID NO: 561188 - DNA, 19 bp, Mus musculus
  siRNA target sequence for Slc14a2 (NM_030683.1,1535-1553).
ctgccctctccaatacaat

SEQ ID NO: 561189 - DNA, 19 bp, Mus musculus
  siRNA target sequence for Slc15a4 (NM_133895.1,600-618).
gccactcggagatttttca

SEQ ID NO: 561190 - DNA, 19 bp, Mus musculus
  siRNA target sequence for Slc15a4 (NM_133895.1,601-619).
ccactcggagatttttcaa

SEQ ID NO: 561191 - DNA, 19 bp, Mus musculus
  siRNA target sequence for Slc15a4 (NM_133895.1,606-624).
cggagatttttcaattggt

SEQ ID NO: 561192 - DNA, 19 bp, Mus musculus
  siRNA target sequence for Slc15a4 (NM_133895.1,623-641).
gttttactggagcattaat

SEQ ID NO: 561193 - DNA, 19 bp, Mus musculus
  siRNA target sequence for Slc15a4 (NM_133895.1,644-662).
gggagcaatcctgtcatta

SEQ ID NO: 561194 - DNA, 19 bp, Mus musculus
  siRNA target sequence for Slc15a4 (NM_133895.1,653-671).
cctgtcattaggaggtatt

SEQ ID NO: 561195 - DNA, 19 bp, Mus musculus
  siRNA target sequence for Slc15a4 (NM_133895.1,664-682).
gaggtattgcctatattca

SEQ ID NO: 561196 - DNA, 19 bp, Mus musculus
  siRNA target sequence for Slc15a4 (NM_133895.1,903-921).
cacagtctgtttgattcat

SEQ ID NO: 561197 - DNA, 19 bp, Mus musculus
  siRNA target sequence for Slc15a4 (NM_133895.1,971-989).
gaaagccctggtcaagatt

SEQ ID NO: 561198 - DNA, 19 bp, Mus musculus
  siRNA target sequence for Slc15a4 (NM_133895.1,1014-1032).
ccttactggacagtgtatt

SEQ ID NO: 561199 - DNA, 19 bp, Mus musculus
  siRNA target sequence for Slc15a4 (NM_133895.1,1024-1042).
cagtgtatttccaaatgca

SEQ ID NO: 561200 - DNA, 19 bp, Mus musculus
  siRNA target sequence for Slc15a4 (NM_133895.1,1080-1098).
ccagaaatctcaagtatca

SEQ ID NO: 561201 - DNA, 19 bp, Mus musculus
  siRNA target sequence for Slc15a4 (NM_133895.1,1406-1424).
cattggcatcagtgagata

SEQ ID NO: 561202 - DNA, 19 bp, Mus musculus
  siRNA target sequence for Slc15a4 (NM_133895.1,1432-1450).
gtatagcaggtctggaatt

SEQ ID NO: 561203 - DNA, 19 bp, Mus musculus
  siRNA target sequence for Slc15a4 (NM_133895.1,1572-1590).
gggtggatgagcagtcata

SEQ ID NO: 561204 - DNA, 19 bp, Mus musculus
  siRNA target sequence for Slc15a4 (NM_133895.1,1577-1595).
gatgagcagtcatacagat

SEQ ID NO: 561205 - DNA, 19 bp, Mus musculus
  siRNA target sequence for Slc15a4 (NM_133895.1,1580-1598).
gagcagtcatacagatttt

SEQ ID NO: 561206 - DNA, 19 bp, Mus musculus
  siRNA target sequence for Slc15a4 (NM_133895.1,1615-1633).
gccacctgcattactactt

SEQ ID NO: 561207 - DNA, 19 bp, Mus musculus
  siRNA target sequence for Svs1 (NM_172888.1,225-243).
gttctgggctggatgacta

SEQ ID NO: 561208 - DNA, 19 bp, Mus musculus
  siRNA target sequence for Svs1 (NM_172888.1,384-402).
cagccatccacgttactga

SEQ ID NO: 561209 - DNA, 19 bp, Mus musculus
  siRNA target sequence for Svs1 (NM_172888.1,505-523).
cccgtgttctgatctactt

SEQ ID NO: 561210 - DNA, 19 bp, Mus musculus
  siRNA target sequence for Svs1 (NM_172888.1,506-524).
ccgtgttctgatctacttt

SEQ ID NO: 561211 - DNA, 19 bp, Mus musculus
  siRNA target sequence for Svs1 (NM_172888.1,753-771).
ggctgcctgacctttacca

SEQ ID NO: 561212 - DNA, 19 bp, Mus musculus
  siRNA target sequence for Svs1 (NM_172888.1,758-776).
cctgacctttaccaatgtt

SEQ ID NO: 561213 - DNA, 19 bp, Mus musculus
  siRNA target sequence for Svs1 (NM_172888.1,777-795).
ggccctcgtgctatgacat

SEQ ID NO: 561214 - DNA, 19 bp, Mus musculus
  siRNA target sequence for Svs1 (NM_172888.1,779-797).
ccctcgtgctatgacattt

SEQ ID NO: 561215 - DNA, 19 bp, Mus musculus
  siRNA target sequence for Svs1 (NM_172888.1,804-822).
cgccatagctggtttcttt

SEQ ID NO: 561216 - DNA, 19 bp, Mus musculus
  siRNA target sequence for Svs1 (NM_172888.1,825-843).
caacgcattatgaatgact

SEQ ID NO: 561217 - DNA, 19 bp, Mus musculus
  siRNA target sequence for Svs1 (NM_172888.1,862-880).
ggctagagatccttttgga

SEQ ID NO: 561218 - DNA, 19 bp, Mus musculus
  siRNA target sequence for Svs1 (NM_172888.1,1058-1076).
gccctatgctgaattcctt

SEQ ID NO: 561219 - DNA, 19 bp, Mus musculus
  siRNA target sequence for Svs1 (NM_172888.1,1060-1078).
cctatgctgaattccttat

SEQ ID NO: 561220 - DNA, 19 bp, Mus musculus
  siRNA target sequence for Svs1 (NM_172888.1,1216-1234).
cccagccctatcgtgaatt

SEQ ID NO: 561221 - DNA, 19 bp, Mus musculus
  siRNA target sequence for Svs1 (NM_172888.1,1324-1342).
cccagccccatgctaaatt

SEQ ID NO: 561222 - DNA, 19 bp, Mus musculus
  siRNA target sequence for Svs1 (NM_172888.1,1443-1461).
gttccccactacagactaa

SEQ ID NO: 561223 - DNA, 19 bp, Mus musculus
  siRNA target sequence for Svs1 (NM_172888.1,1447-1465).
cccactacagactaaaaca

SEQ ID NO: 561224 - DNA, 19 bp, Mus musculus
  siRNA target sequence for Svs1 (NM_172888.1,1529-1547).
gctctttaatgtacatttt

SEQ ID NO: 561225 - DNA, 19 bp, Mus musculus
  siRNA target sequence for Svs1 (NM_172888.1,1649-1667).
ctggggcctaggaggtatt

SEQ ID NO: 561226 - DNA, 19 bp, Mus musculus
  siRNA target sequence for Svs1 (NM_172888.1,1652-1670).
gggcctaggaggtattact

SEQ ID NO: 561227 - DNA, 19 bp, Mus musculus
  siRNA target sequence for Svs1 (NM_172888.1,1677-1695).
ctaactcctggcattgact

SEQ ID NO: 561228 - DNA, 19 bp, Mus musculus
  siRNA target sequence for Svs1 (NM_172888.1,1718-1736).
ggacgccatccactactat

SEQ ID NO: 561229 - DNA, 19 bp, Mus musculus
  siRNA target sequence for Svs1 (NM_172888.1,1759-1777).
ctcggcgagccctctgtat

SEQ ID NO: 561230 - DNA, 19 bp, Mus musculus
  siRNA target sequence for Svs1 (NM_172888.1,1761-1779).
cggcgagccctctgtatct

SEQ ID NO: 561231 - DNA, 19 bp, Mus musculus
  siRNA target sequence for Svs1 (NM_172888.1,1763-1781).
gcgagccctctgtatcttt

SEQ ID NO: 561232 - DNA, 19 bp, Mus musculus
  siRNA target sequence for Svs1 (NM_172888.1,1787-1805).
gccccttaggcagtacttt

SEQ ID NO: 561233 - DNA, 19 bp, Mus musculus
  siRNA target sequence for Svs1 (NM_172888.1,1788-1806).
ccccttaggcagtacttta

SEQ ID NO: 561234 - DNA, 19 bp, Mus musculus
  siRNA target sequence for Svs1 (NM_172888.1,1789-1807).
cccttaggcagtactttaa

SEQ ID NO: 561235 - DNA, 19 bp, Mus musculus
  siRNA target sequence for Svs1 (NM_172888.1,1879-1897).
caacaatccacaatcatga

SEQ ID NO: 561236 - DNA, 19 bp, Mus musculus
  siRNA target sequence for Svs1 (NM_172888.1,1949-1967).
gtacgccaccgggtatgtt

SEQ ID NO: 561237 - DNA, 19 bp, Mus musculus
  siRNA target sequence for Svs1 (NM_172888.1,1952-1970).
cgccaccgggtatgttcat

SEQ ID NO: 561238 - DNA, 19 bp, Mus musculus
  siRNA target sequence for Svs1 (NM_172888.1,2078-2096).
ggcaggtaccaagaataga

SEQ ID NO: 561239 - DNA, 19 bp, Mus musculus
  siRNA target sequence for Svs1 (NM_172888.1,2079-2097).
gcaggtaccaagaatagat

SEQ ID NO: 561240 - DNA, 19 bp, Mus musculus
  siRNA target sequence for Svs1 (NM_172888.1,2242-2260).
gcaacactgggaaaagtgt

SEQ ID NO: 561241 - DNA, 19 bp, Mus musculus
  siRNA target sequence for Svs1 (NM_172888.1,2299-2317).
ccatggctgagcaagtgtt

SEQ ID NO: 561242 - DNA, 19 bp, Mus musculus
  siRNA target sequence for Svs1 (NM_172888.1,2427-2445).
caccactgggcttatccta

SEQ ID NO: 561243 - DNA, 19 bp, Mus musculus
  siRNA target sequence for Svs1 (NM_172888.1,2585-2603).
cttgctccagccatttgat

SEQ ID NO: 561244 - DNA, 19 bp, Mus musculus
  siRNA target sequence for Svs1 (NM_172888.1,2592-2610).
cagccatttgatttctaca

SEQ ID NO: 561245 - DNA, 19 bp, Mus musculus
  siRNA target sequence for Svs1 (NM_172888.1,2612-2630).
cagcttccggagatataca

SEQ ID NO: 561246 - DNA, 19 bp, Mus musculus
  siRNA target sequence for Arg1 (NM_007482.2,112-130).
cggagcgcctttctcaaaa

SEQ ID NO: 561247 - DNA, 19 bp, Mus musculus
  siRNA target sequence for Arg1 (NM_007482.2,182-200).
ggtctgctggaaaaactta

SEQ ID NO: 561248 - DNA, 19 bp, Mus musculus
  siRNA target sequence for Arg1 (NM_007482.2,571-589).
ggtgactccctgcatatct

SEQ ID NO: 561249 - DNA, 19 bp, Mus musculus
  siRNA target sequence for Arg1 (NM_007482.2,634-652).
ggaacactatataataaaa

SEQ ID NO: 561250 - DNA, 19 bp, Mus musculus
  siRNA target sequence for Arg1 (NM_007482.2,824-842).
ctgggaggcctatcttaca

SEQ ID NO: 561251 - DNA, 19 bp, Mus musculus
  siRNA target sequence for Arg1 (NM_007482.2,883-901).
gctcctttcaggactagat

SEQ ID NO: 561252 - DNA, 19 bp, Mus musculus
  siRNA target sequence for Arg1 (NM_007482.2,884-902).
ctcctttcaggactagata

SEQ ID NO: 561253 - DNA, 19 bp, Mus musculus
  siRNA target sequence for Arg1 (NM_007482.2,887-905).
ctttcaggactagatatca

SEQ ID NO: 561254 - DNA, 19 bp, Mus musculus
  siRNA target sequence for Arg1 (NM_007482.2,998-1016).
caacgggagggtaaccata

SEQ ID NO: 561255 - DNA, 19 bp, Mus musculus
  siRNA target sequence for Arg1 (NM_007482.2,1019-1037).
ccagggactgactacctta

SEQ ID NO: 561256 - DNA, 19 bp, Mus musculus
  siRNA target sequence for Arg1 (NM_007482.2,1024-1042).
gactgactaccttaaacca

SEQ ID NO: 561257 - DNA, 19 bp, Mus musculus
  siRNA target sequence for Arg2 (NM_009705.1,84-102).
cctccacgggcaaattcct

SEQ ID NO: 561258 - DNA, 19 bp, Mus musculus
  siRNA target sequence for Arg2 (NM_009705.1,85-103).
ctccacgggcaaattcctt

SEQ ID NO: 561259 - DNA, 19 bp, Mus musculus
  siRNA target sequence for Arg2 (NM_009705.1,120-138).
cgtccactctgtagctata

SEQ ID NO: 561260 - DNA, 19 bp, Mus musculus
  siRNA target sequence for Arg2 (NM_009705.1,233-251).
ggttgggatgccacctaaa

SEQ ID NO: 561261 - DNA, 19 bp, Mus musculus
  siRNA target sequence for Arg2 (NM_009705.1,234-252).
gttgggatgccacctaaaa

SEQ ID NO: 561262 - DNA, 19 bp, Mus musculus
  siRNA target sequence for Arg2 (NM_009705.1,238-256).
ggatgccacctaaaagact

SEQ ID NO: 561263 - DNA, 19 bp, Mus musculus
  siRNA target sequence for Arg2 (NM_009705.1,239-257).
gatgccacctaaaagactt

SEQ ID NO: 561264 - DNA, 19 bp, Mus musculus
  siRNA target sequence for Arg2 (NM_009705.1,260-278).
gagacttgagttttactaa

SEQ ID NO: 561265 - DNA, 19 bp, Mus musculus
  siRNA target sequence for Arg2 (NM_009705.1,286-304).
caagatgatccctacaata

SEQ ID NO: 561266 - DNA, 19 bp, Mus musculus
  siRNA target sequence for Arg2 (NM_009705.1,349-367).
ctggctgaagtggttagta

SEQ ID NO: 561267 - DNA, 19 bp, Mus musculus
  siRNA target sequence for Arg2 (NM_009705.1,412-430).
cacagcctggcaataggta

SEQ ID NO: 561268 - DNA, 19 bp, Mus musculus
  siRNA target sequence for Arg2 (NM_009705.1,418-436).
ctggcaataggtaccatta

SEQ ID NO: 561269 - DNA, 19 bp, Mus musculus
  siRNA target sequence for Arg2 (NM_009705.1,481-499).
gatgctcatgcggacatta

SEQ ID NO: 561270 - DNA, 19 bp, Mus musculus
  siRNA target sequence for Arg2 (NM_009705.1,484-502).
gctcatgcggacattaata

SEQ ID NO: 561271 - DNA, 19 bp, Mus musculus
  siRNA target sequence for Arg2 (NM_009705.1,510-528).
caccactgtatctggaaat

SEQ ID NO: 561272 - DNA, 19 bp, Mus musculus
  siRNA target sequence for Arg2 (NM_009705.1,615-633).
cctctctcccccaaatatt

SEQ ID NO: 561273 - DNA, 19 bp, Mus musculus
  siRNA target sequence for Arg2 (NM_009705.1,620-638).
ctcccccaaatattgtgta

SEQ ID NO: 561274 - DNA, 19 bp, Mus musculus
  siRNA target sequence for Arg2 (NM_009705.1,657-675).
ggagcctcctgaacatttt

SEQ ID NO: 561275 - DNA, 19 bp, Mus musculus
  siRNA target sequence for Arg2 (NM_009705.1,658-676).
gagcctcctgaacatttta

SEQ ID NO: 561276 - DNA, 19 bp, Mus musculus
  siRNA target sequence for Arg2 (NM_009705.1,741-759).
ggtgatggaacagacattt

SEQ ID NO: 561277 - DNA, 19 bp, Mus musculus
  siRNA target sequence for Arg2 (NM_009705.1,785-803).
ggccaatccacctgagttt

SEQ ID NO: 561278 - DNA, 19 bp, Mus musculus
  siRNA target sequence for Arg2 (NM_009705.1,786-804).
gccaatccacctgagtttt

SEQ ID NO: 561279 - DNA, 19 bp, Mus musculus
  siRNA target sequence for Arg2 (NM_009705.1,788-806).
caatccacctgagttttga

SEQ ID NO: 561280 - DNA, 19 bp, Mus musculus
  siRNA target sequence for Arg2 (NM_009705.1,792-810).
ccacctgagttttgacatt

SEQ ID NO: 561281 - DNA, 19 bp, Mus musculus
  siRNA target sequence for Arg2 (NM_009705.1,840-858).
cacaggaacccctgttgta

SEQ ID NO: 561282 - DNA, 19 bp, Mus musculus
  siRNA target sequence for Arg2 (NM_009705.1,850-868).
cctgttgtagggggattaa

SEQ ID NO: 561283 - DNA, 19 bp, Mus musculus
  siRNA target sequence for Arg2 (NM_009705.1,853-871).
gttgtagggggattaacct

SEQ ID NO: 561284 - DNA, 19 bp, Mus musculus
  siRNA target sequence for Arg2 (NM_009705.1,870-888).
ctacagagaaggagtgtat

SEQ ID NO: 561285 - DNA, 19 bp, Mus musculus
  siRNA target sequence for Arg2 (NM_009705.1,992-1010).
gactagcagtggatgtgat

SEQ ID NO: 561286 - DNA, 19 bp, Mus musculus
  siRNA target sequence for Arg2 (NM_009705.1,1079-1097).
caccacacgaatcagaaaa

SEQ ID NO: 561287 - DNA, 19 bp, Mus musculus
  siRNA target sequence for Arg2 (NM_009705.1,1082-1100).
cacacgaatcagaaaatga

SEQ ID NO: 561288 - DNA, 19 bp, Mus musculus
  siRNA target sequence for B3galt3 (NM_020026.2,244-262).
ctgagcttcctggtgatat

SEQ ID NO: 561289 - DNA, 19 bp, Mus musculus
  siRNA target sequence for B3galt3 (NM_020026.2,298-316).
cgcgtcaactggatgtact

SEQ ID NO: 561290 - DNA, 19 bp, Mus musculus
  siRNA target sequence for B3galt3 (NM_020026.2,299-317).
gcgtcaactggatgtactt

SEQ ID NO: 561291 - DNA, 19 bp, Mus musculus
  siRNA target sequence for B3galt3 (NM_020026.2,301-319).
gtcaactggatgtacttct

SEQ ID NO: 561292 - DNA, 19 bp, Mus musculus
  siRNA target sequence for B3galt3 (NM_020026.2,303-321).
caactggatgtacttctat

SEQ ID NO: 561293 - DNA, 19 bp, Mus musculus
  siRNA target sequence for B3galt3 (NM_020026.2,308-326).
ggatgtacttctatgagta

SEQ ID NO: 561294 - DNA, 19 bp, Mus musculus
  siRNA target sequence for B3galt3 (NM_020026.2,324-342).
gtatgagccaatttacaga

SEQ ID NO: 561295 - DNA, 19 bp, Mus musculus
  siRNA target sequence for B3galt3 (NM_020026.2,419-437).
cacgcccctcagatgtgaa

SEQ ID NO: 561296 - DNA, 19 bp, Mus musculus
  siRNA target sequence for B3galt3 (NM_020026.2,440-458).
ccagacaagccattagagt

SEQ ID NO: 561297 - DNA, 19 bp, Mus musculus
  siRNA target sequence for B3galt3 (NM_020026.2,441-459).
cagacaagccattagagtt

SEQ ID NO: 561298 - DNA, 19 bp, Mus musculus
  siRNA target sequence for B3galt3 (NM_020026.2,445-463).
caagccattagagttactt

SEQ ID NO: 561299 - DNA, 19 bp, Mus musculus
  siRNA target sequence for B3galt3 (NM_020026.2,493-511).
gaggtgctcacgtttttct

SEQ ID NO: 561300 - DNA, 19 bp, Mus musculus
  siRNA target sequence for B3galt3 (NM_020026.2,495-513).
ggtgctcacgtttttctta

SEQ ID NO: 561301 - DNA, 19 bp, Mus musculus
  siRNA target sequence for B3galt3 (NM_020026.2,498-516).
gctcacgtttttcttacta

SEQ ID NO: 561302 - DNA, 19 bp, Mus musculus
  siRNA target sequence for B3galt3 (NM_020026.2,573-591).
cgttctctatggtgatatt

SEQ ID NO: 561303 - DNA, 19 bp, Mus musculus
  siRNA target sequence for B3galt3 (NM_020026.2,574-592).
gttctctatggtgatatta

SEQ ID NO: 561304 - DNA, 19 bp, Mus musculus
  siRNA target sequence for B3galt3 (NM_020026.2,624-642).
cttgaccttgaaaaccatt

SEQ ID NO: 561305 - DNA, 19 bp, Mus musculus
  siRNA target sequence for B3galt3 (NM_020026.2,671-689).
gccccaatgccaagtatat

SEQ ID NO: 561306 - DNA, 19 bp, Mus musculus
  siRNA target sequence for B3galt3 (NM_020026.2,714-732).
catcaacactggcaattta

SEQ ID NO: 561307 - DNA, 19 bp, Mus musculus
  siRNA target sequence for B3galt3 (NM_020026.2,722-740).
ctggcaatttagtcaagta

SEQ ID NO: 561308 - DNA, 19 bp, Mus musculus
  siRNA target sequence for B3galt3 (NM_020026.2,776-794).
cgggctatcctctaattga

SEQ ID NO: 561309 - DNA, 19 bp, Mus musculus
  siRNA target sequence for B3galt3 (NM_020026.2,784-802).
cctctaattgataactatt

SEQ ID NO: 561310 - DNA, 19 bp, Mus musculus
  siRNA target sequence for B3galt3 (NM_020026.2,787-805).
ctaattgataactattcct

SEQ ID NO: 561311 - DNA, 19 bp, Mus musculus
  siRNA target sequence for B3galt3 (NM_020026.2,803-821).
cctatagaggatttttcca

SEQ ID NO: 561312 - DNA, 19 bp, Mus musculus
  siRNA target sequence for B3galt3 (NM_020026.2,804-822).
ctatagaggatttttccat

SEQ ID NO: 561313 - DNA, 19 bp, Mus musculus
  siRNA target sequence for B3galt3 (NM_020026.2,812-830).
gatttttccataaaaacca

SEQ ID NO: 561314 - DNA, 19 bp, Mus musculus
  siRNA target sequence for B3galt3 (NM_020026.2,939-957).
cgtgaagcccatcaagttt

SEQ ID NO: 561315 - DNA, 19 bp, Mus musculus
  siRNA target sequence for B3galt3 (NM_020026.2,951-969).
caagtttgaagacgtttat

SEQ ID NO: 561316 - DNA, 19 bp, Mus musculus
  siRNA target sequence for B3galt3 (NM_020026.2,990-1008).
gttaaaagtggacattcat

SEQ ID NO: 561317 - DNA, 19 bp, Mus musculus
  siRNA target sequence for B3gat1 (NM_029792.1,656-674).
gagacaccacgcaactata

SEQ ID NO: 561318 - DNA, 19 bp, Mus musculus
  siRNA target sequence for B3gat1 (NM_029792.1,660-678).
caccacgcaactataagct

SEQ ID NO: 561319 - DNA, 19 bp, Mus musculus
  siRNA target sequence for B3gat1 (NM_029792.1,836-854).
gagatgcgcagcacaagaa

SEQ ID NO: 561320 - DNA, 19 bp, Mus musculus
  siRNA target sequence for B3gat1 (NM_029792.1,1018-1036).
gcgaagtcaagcctacttt

SEQ ID NO: 561321 - DNA, 19 bp, Mus musculus
  siRNA target sequence for B3gat1 (NM_029792.1,1019-1037).
cgaagtcaagcctacttta

SEQ ID NO: 561322 - DNA, 19 bp, Mus musculus
  siRNA target sequence for B3gat1 (NM_029792.1,1020-1038).
gaagtcaagcctactttaa

SEQ ID NO: 561323 - DNA, 19 bp, Mus musculus
  siRNA target sequence for B3gat1 (NM_029792.1,1023-1041).
gtcaagcctactttaagct

SEQ ID NO: 561324 - DNA, 19 bp, Mus musculus
  siRNA target sequence for B3gat1 (NM_029792.1,1111-1129).
gcccaaggcagcaaactgt

SEQ ID NO: 561325 - DNA, 19 bp, Mus musculus
  siRNA target sequence for B3gat1 (NM_029792.1,1112-1130).
cccaaggcagcaaactgta

SEQ ID NO: 561326 - DNA, 19 bp, Mus musculus
  siRNA target sequence for B3gat1 (NM_029792.1,1121-1139).
gcaaactgtaccaagatct

SEQ ID NO: 561327 - DNA, 19 bp, Mus musculus
  siRNA target sequence for B3gat2 (NM_172124.1,889-907).
gcgcttgcccaccatctat

SEQ ID NO: 561328 - DNA, 19 bp, Mus musculus
  siRNA target sequence for B3gat2 (NM_172124.1,1257-1275).
ccactcgcaaggtttctgt

SEQ ID NO: 561329 - DNA, 19 bp, Mus musculus
  siRNA target sequence for B3gat2 (NM_172124.1,1276-1294).
ctggcctgtgggactagtt

SEQ ID NO: 561330 - DNA, 19 bp, Mus musculus
  siRNA target sequence for B3gat2 (NM_172124.1,1310-1328).
gaacgtccgttggtaaaaa

SEQ ID NO: 561331 - DNA, 19 bp, Mus musculus
  siRNA target sequence for B3gat2 (NM_172124.1,1401-1419).
ctgtgagtctgcaagtcat

SEQ ID NO: 561332 - DNA, 19 bp, Mus musculus
  siRNA target sequence for B3gat2 (NM_172124.1,1483-1501).
ctttctaaagcagataaca

SEQ ID NO: 561333 - DNA, 19 bp, Mus musculus
  siRNA target sequence for B3gat2 (NM_172124.1,1495-1513).
gataacaacagttgaagaa

SEQ ID NO: 561334 - DNA, 19 bp, Mus musculus
  siRNA target sequence for B3gat2 (NM_172124.1,1564-1582).
gacagagaaggtcaatcta

SEQ ID NO: 561335 - DNA, 19 bp, Mus musculus
  siRNA target sequence for B3gat2 (NM_172124.1,1603-1621).
cctggacacagtgaacatt

SEQ ID NO: 561336 - DNA, 19 bp, Mus musculus
  siRNA target sequence for B3Gat3 (NM_024256.2,186-204).
gctgaagaacgtgtttctt

SEQ ID NO: 561337 - DNA, 19 bp, Mus musculus
  siRNA target sequence for B3Gat3 (NM_024256.2,390-408).
ggccctgcctactatctat

SEQ ID NO: 561338 - DNA, 19 bp, Mus musculus
  siRNA target sequence for B3Gat3 (NM_024256.2,392-410).
ccctgcctactatctatgt

SEQ ID NO: 561339 - DNA, 19 bp, Mus musculus
  siRNA target sequence for B3Gat3 (NM_024256.2,394-412).
ctgcctactatctatgtca

SEQ ID NO: 561340 - DNA, 19 bp, Mus musculus
  siRNA target sequence for B3Gat3 (NM_024256.2,396-414).
gcctactatctatgtcatt

SEQ ID NO: 561341 - DNA, 19 bp, Mus musculus
  siRNA target sequence for B3Gat3 (NM_024256.2,397-415).
cctactatctatgtcatta

SEQ ID NO: 561342 - DNA, 19 bp, Mus musculus
  siRNA target sequence for B3Gat3 (NM_024256.2,553-571).
gcctctggtctcctcttta

SEQ ID NO: 561343 - DNA, 19 bp, Mus musculus
  siRNA target sequence for B3Gat3 (NM_024256.2,644-662).
gagtggaacagcgcaataa

SEQ ID NO: 561344 - DNA, 19 bp, Mus musculus
  siRNA target sequence for B3Gat3 (NM_024256.2,669-687).
cgactggctccgaggaaaa

SEQ ID NO: 561345 - DNA, 19 bp, Mus musculus
  siRNA target sequence for B3Gat3 (NM_024256.2,731-749).
cccaaggagtcgtgtattt

SEQ ID NO: 561346 - DNA, 19 bp, Mus musculus
  siRNA target sequence for B3Gat3 (NM_024256.2,837-855).
gggtggcctgcgatttgaa

SEQ ID NO: 561347 - DNA, 19 bp, Mus musculus
  siRNA target sequence for B3Gat3 (NM_024256.2,1026-1044).
cctgagccaccttgtagat

SEQ ID NO: 561348 - DNA, 19 bp, Mus musculus
  siRNA target sequence for B3Gat3 (NM_024256.2,1059-1077).
gccacgggctgccaattgt

SEQ ID NO: 561349 - DNA, 19 bp, Mus musculus
  siRNA target sequence for B3Gat3 (NM_024256.2,1060-1078).
ccacgggctgccaattgta

SEQ ID NO: 561350 - DNA, 19 bp, Mus musculus
  siRNA target sequence for B4galt6 (NM_019737.1,965-983).
ctccaatcgctctctgatt

SEQ ID NO: 561351 - DNA, 19 bp, Mus musculus
  siRNA target sequence for B4galt6 (NM_019737.1,1018-1036).
gtctctacttcatctatgt

SEQ ID NO: 561352 - DNA, 19 bp, Mus musculus
  siRNA target sequence for B4galt6 (NM_019737.1,1050-1068).
gccaacacgtacctcttta

SEQ ID NO: 561353 - DNA, 19 bp, Mus musculus
  siRNA target sequence for B4galt6 (NM_019737.1,1051-1069).
ccaacacgtacctctttat

SEQ ID NO: 561354 - DNA, 19 bp, Mus musculus
  siRNA target sequence for B4galt6 (NM_019737.1,1055-1073).
cacgtacctctttatggta

SEQ ID NO: 561355 - DNA, 19 bp, Mus musculus
  siRNA target sequence for B4galt6 (NM_019737.1,1119-1137).
cacatgatcaggctgtata

SEQ ID NO: 561356 - DNA, 19 bp, Mus musculus
  siRNA target sequence for B4galt6 (NM_019737.1,1124-1142).
gatcaggctgtataccaat

SEQ ID NO: 561357 - DNA, 19 bp, Mus musculus
  siRNA target sequence for B4galt6 (NM_019737.1,1129-1147).
ggctgtataccaataaaaa

SEQ ID NO: 561358 - DNA, 19 bp, Mus musculus
  siRNA target sequence for B4galt6 (NM_019737.1,1153-1171).
cgctcaacggaacagatta

SEQ ID NO: 561359 - DNA, 19 bp, Mus musculus
  siRNA target sequence for B4galt6 (NM_019737.1,1154-1172).
gctcaacggaacagattat

SEQ ID NO: 561360 - DNA, 19 bp, Mus musculus
  siRNA target sequence for B4galt6 (NM_019737.1,1157-1175).
caacggaacagattatcct

SEQ ID NO: 561361 - DNA, 19 bp, Mus musculus
  siRNA target sequence for B4galt6 (NM_019737.1,1189-1207).
caagtgactatcttgttca

SEQ ID NO: 561362 - DNA, 19 bp, Mus musculus
  siRNA target sequence for B4galt6 (NM_019737.1,1216-1234).
cgtatcttccgcaaaactt

SEQ ID NO: 561363 - DNA, 19 bp, Mus musculus
  siRNA target sequence for B4galt6 (NM_019737.1,1224-1242).
ccgcaaaacttcacgtatt

SEQ ID NO: 561364 - DNA, 19 bp, Mus musculus
  siRNA target sequence for B4galt6 (NM_019737.1,1225-1243).
cgcaaaacttcacgtattt

SEQ ID NO: 561365 - DNA, 19 bp, Mus musculus
  siRNA target sequence for B4galt6 (NM_019737.1,1304-1322).
gagtgagatcagttttgat

SEQ ID NO: 561366 - DNA, 19 bp, Mus musculus
  siRNA target sequence for B4galt6 (NM_019737.1,1371-1389).
cactggaggcccaaagact

SEQ ID NO: 561367 - DNA, 19 bp, Mus musculus
  siRNA target sequence for B4galt6 (NM_019737.1,1402-1420).
ggaaggtggcagttctcat

SEQ ID NO: 561368 - DNA, 19 bp, Mus musculus
  siRNA target sequence for B4galt6 (NM_019737.1,1427-1445).
ccgtaaccgccatgaacat

SEQ ID NO: 561369 - DNA, 19 bp, Mus musculus
  siRNA target sequence for B4galt6 (NM_019737.1,1429-1447).
gtaaccgccatgaacatct

SEQ ID NO: 561370 - DNA, 19 bp, Mus musculus
  siRNA target sequence for B4galt6 (NM_019737.1,1525-1543).
ccggcacacaaccattcaa

SEQ ID NO: 561371 - DNA, 19 bp, Mus musculus
  siRNA target sequence for B4galt6 (NM_019737.1,1526-1544).
cggcacacaaccattcaat

SEQ ID NO: 561372 - DNA, 19 bp, Mus musculus
  siRNA target sequence for B4galt6 (NM_019737.1,1546-1564).
gtgcgatgctctttaatgt

SEQ ID NO: 561373 - DNA, 19 bp, Mus musculus
  siRNA target sequence for B4galt6 (NM_019737.1,1635-1653).
gaaaatgatcggaactact

SEQ ID NO: 561374 - DNA, 19 bp, Mus musculus
  siRNA target sequence for B4galt6 (NM_019737.1,1697-1715).
caagtacatgtacattctt

SEQ ID NO: 561375 - DNA, 19 bp, Mus musculus
  siRNA target sequence for B4galt6 (NM_019737.1,1718-1736).
ctataaggagttttttggt

SEQ ID NO: 561376 - DNA, 19 bp, Mus musculus
  siRNA target sequence for B4galt6 (NM_019737.1,1925-1943).
gttcctaggacggtataaa

SEQ ID NO: 561377 - DNA, 19 bp, Mus musculus
  siRNA target sequence for B4galt6 (NM_019737.1,1928-1946).
cctaggacggtataaatta

SEQ ID NO: 561378 - DNA, 19 bp, Mus musculus
  siRNA target sequence for B4galt6 (NM_019737.1,1985-2003).
gaacaatttattatacaca

SEQ ID NO: 561379 - DNA, 19 bp, Mus musculus
  siRNA target sequence for B4galt6 (NM_019737.1,2004-2022).
cccaaaatactggttgata

SEQ ID NO: 561380 - DNA, 19 bp, Mus musculus
  siRNA target sequence for B4galt6 (NM_019737.1,2013-2031).
ctggttgataggctgtata

SEQ ID NO: 561381 - DNA, 19 bp, Mus musculus
  siRNA target sequence for B4galt6 (NM_019737.1,2015-2033).
ggttgataggctgtataca

SEQ ID NO: 561382 - DNA, 19 bp, Mus musculus
  siRNA target sequence for B4galt6 (NM_019737.1,2016-2034).
gttgataggctgtatacaa

SEQ ID NO: 561383 - DNA, 19 bp, Mus musculus
  siRNA target sequence for B4galt6 (NM_019737.1,2048-2066).
cctcatgccagaattagct

SEQ ID NO: 561384 - DNA, 19 bp, Mus musculus
  siRNA target sequence for B4galt6 (NM_019737.1,2056-2074).
cagaattagctccaattga

SEQ ID NO: 561385 - DNA, 19 bp, Mus musculus
  siRNA target sequence for B4galt6 (NM_019737.1,2064-2082).
gctccaattgaagactatt

SEQ ID NO: 561386 - DNA, 19 bp, Mus musculus
  siRNA target sequence for Galnt1 (NM_013814.2,558-576).
gttagaggggtgtaaaaca

SEQ ID NO: 561387 - DNA, 19 bp, Mus musculus
  siRNA target sequence for Galnt1 (NM_013814.2,579-597).
ggtgtatccagataacctt

SEQ ID NO: 561388 - DNA, 19 bp, Mus musculus
  siRNA target sequence for Galnt1 (NM_013814.2,608-626).
gtgtggtgattgttttcca

SEQ ID NO: 561389 - DNA, 19 bp, Mus musculus
  siRNA target sequence for Galnt1 (NM_013814.2,656-674).
cagtccatagtgtcattaa

SEQ ID NO: 561390 - DNA, 19 bp, Mus musculus
  siRNA target sequence for Galnt1 (NM_013814.2,676-694).
cgctcgccaagacatatga

SEQ ID NO: 561391 - DNA, 19 bp, Mus musculus
  siRNA target sequence for Galnt1 (NM_013814.2,677-695).
gctcgccaagacatatgat

SEQ ID NO: 561392 - DNA, 19 bp, Mus musculus
  siRNA target sequence for Galnt1 (NM_013814.2,678-696).
ctcgccaagacatatgata

SEQ ID NO: 561393 - DNA, 19 bp, Mus musculus
  siRNA target sequence for Galnt1 (NM_013814.2,680-698).
cgccaagacatatgataga

SEQ ID NO: 561394 - DNA, 19 bp, Mus musculus
  siRNA target sequence for Galnt1 (NM_013814.2,681-699).
gccaagacatatgatagaa

SEQ ID NO: 561395 - DNA, 19 bp, Mus musculus
  siRNA target sequence for Galnt1 (NM_013814.2,702-720).
gattgttcttgtagatgat

SEQ ID NO: 561396 - DNA, 19 bp, Mus musculus
  siRNA target sequence for Galnt1 (NM_013814.2,746-764).
gacctctagagagttatgt

SEQ ID NO: 561397 - DNA, 19 bp, Mus musculus
  siRNA target sequence for Galnt1 (NM_013814.2,748-766).
cctctagagagttatgtga

SEQ ID NO: 561398 - DNA, 19 bp, Mus musculus
  siRNA target sequence for Galnt1 (NM_013814.2,749-767).
ctctagagagttatgtgaa

SEQ ID NO: 561399 - DNA, 19 bp, Mus musculus
  siRNA target sequence for Galnt1 (NM_013814.2,780-798).
gccggttcatgtaattcga

SEQ ID NO: 561400 - DNA, 19 bp, Mus musculus
  siRNA target sequence for Galnt1 (NM_013814.2,781-799).
ccggttcatgtaattcgaa

SEQ ID NO: 561401 - DNA, 19 bp, Mus musculus
  siRNA target sequence for Galnt1 (NM_013814.2,782-800).
cggttcatgtaattcgaat

SEQ ID NO: 561402 - DNA, 19 bp, Mus musculus
  siRNA target sequence for Galnt1 (NM_013814.2,815-833).
ggttgatcagagctagatt

SEQ ID NO: 561403 - DNA, 19 bp, Mus musculus
  siRNA target sequence for Galnt1 (NM_013814.2,819-837).
gatcagagctagattgaaa

SEQ ID NO: 561404 - DNA, 19 bp, Mus musculus
  siRNA target sequence for Galnt1 (NM_013814.2,1032-1050).
ctggaagctcaattttcgt

SEQ ID NO: 561405 - DNA, 19 bp, Mus musculus
  siRNA target sequence for Galnt1 (NM_013814.2,1038-1056).
gctcaattttcgttggtat

SEQ ID NO: 561406 - DNA, 19 bp, Mus musculus
  siRNA target sequence for Galnt1 (NM_013814.2,1058-1076).
ctgttccccagcgagaaat

SEQ ID NO: 561407 - DNA, 19 bp, Mus musculus
  siRNA target sequence for Galnt1 (NM_013814.2,1132-1150).
ggccttttttcaatagaca

SEQ ID NO: 561408 - DNA, 19 bp, Mus musculus
  siRNA target sequence for Galnt1 (NM_013814.2,1204-1222).
ggagaaaacctagaaattt

SEQ ID NO: 561409 - DNA, 19 bp, Mus musculus
  siRNA target sequence for Galnt1 (NM_013814.2,1235-1253).
ggcagtgtggaggaacttt

SEQ ID NO: 561410 - DNA, 19 bp, Mus musculus
  siRNA target sequence for Galnt1 (NM_013814.2,1271-1289).
cccatgttggtcatgtgtt

SEQ ID NO: 561411 - DNA, 19 bp, Mus musculus
  siRNA target sequence for Galnt1 (NM_013814.2,1282-1300).
catgtgtttcggaaagcta

SEQ ID NO: 561412 - DNA, 19 bp, Mus musculus
  siRNA target sequence for Galnt1 (NM_013814.2,1293-1311).
gaaagctacaccttacaca

SEQ ID NO: 561413 - DNA, 19 bp, Mus musculus
  siRNA target sequence for Galnt1 (NM_013814.2,1319-1337).
gagggacagggcagattat

SEQ ID NO: 561414 - DNA, 19 bp, Mus musculus
  siRNA target sequence for Galnt1 (NM_013814.2,1321-1339).
gggacagggcagattatca

SEQ ID NO: 561415 - DNA, 19 bp, Mus musculus
  siRNA target sequence for Galnt1 (NM_013814.2,1322-1340).
ggacagggcagattatcaa

SEQ ID NO: 561416 - DNA, 19 bp, Mus musculus
  siRNA target sequence for Galnt1 (NM_013814.2,1412-1430).
gtgttacaaaggtagatta

SEQ ID NO: 561417 - DNA, 19 bp, Mus musculus
  siRNA target sequence for Galnt1 (NM_013814.2,1422-1440).
ggtagattatggagatata

SEQ ID NO: 561418 - DNA, 19 bp, Mus musculus
  siRNA target sequence for Galnt1 (NM_013814.2,1423-1441).
gtagattatggagatatat

SEQ ID NO: 561419 - DNA, 19 bp, Mus musculus
  siRNA target sequence for Galnt1 (NM_013814.2,1426-1444).
gattatggagatatatcat

SEQ ID NO: 561420 - DNA, 19 bp, Mus musculus
  siRNA target sequence for Galnt1 (NM_013814.2,1454-1472).
gcctaagacgtaaactaca

SEQ ID NO: 561421 - DNA, 19 bp, Mus musculus
  siRNA target sequence for Galnt1 (NM_013814.2,1455-1473).
cctaagacgtaaactacaa

SEQ ID NO: 561422 - DNA, 19 bp, Mus musculus
  siRNA target sequence for Galnt1 (NM_013814.2,1456-1474).
ctaagacgtaaactacaat

SEQ ID NO: 561423 - DNA, 19 bp, Mus musculus
  siRNA target sequence for Galnt1 (NM_013814.2,1460-1478).
gacgtaaactacaatgcaa

SEQ ID NO: 561424 - DNA, 19 bp, Mus musculus
  siRNA target sequence for Galnt1 (NM_013814.2,1485-1503).
ctcttggtacctagaaaat

SEQ ID NO: 561425 - DNA, 19 bp, Mus musculus
  siRNA target sequence for Galnt1 (NM_013814.2,1490-1508).
ggtacctagaaaatattta

SEQ ID NO: 561426 - DNA, 19 bp, Mus musculus
  siRNA target sequence for Galnt1 (NM_013814.2,1568-1586).
caaatcagtgtctagataa

SEQ ID NO: 561427 - DNA, 19 bp, Mus musculus
  siRNA target sequence for Galnt1 (NM_013814.2,1591-1609).
gctagaaaagagaatgaaa

SEQ ID NO: 561428 - DNA, 19 bp, Mus musculus
  siRNA target sequence for Galnt1 (NM_013814.2,1611-1629).
ggttggaatctttaattgt

SEQ ID NO: 561429 - DNA, 19 bp, Mus musculus
  siRNA target sequence for Galnt1 (NM_013814.2,1656-1674).
ctcctacactgccaacaaa

SEQ ID NO: 561430 - DNA, 19 bp, Mus musculus
  siRNA target sequence for Galnt1 (NM_013814.2,1658-1676).
cctacactgccaacaaaga

SEQ ID NO: 561431 - DNA, 19 bp, Mus musculus
  siRNA target sequence for Galnt1 (NM_013814.2,1659-1677).
ctacactgccaacaaagaa

SEQ ID NO: 561432 - DNA, 19 bp, Mus musculus
  siRNA target sequence for Galnt1 (NM_013814.2,1682-1700).
gaacagacgacctttgttt

SEQ ID NO: 561433 - DNA, 19 bp, Mus musculus
  siRNA target sequence for Galnt1 (NM_013814.2,1771-1789).
gagtatgacccagtgaaat

SEQ ID NO: 561434 - DNA, 19 bp, Mus musculus
  siRNA target sequence for Galnt1 (NM_013814.2,1801-1819).
catgtgaacagcaatcagt

SEQ ID NO: 561435 - DNA, 19 bp, Mus musculus
  siRNA target sequence for Ggta1 (NM_010283.1,543-561).
gtggatatatcacacaaaa

SEQ ID NO: 561436 - DNA, 19 bp, Mus musculus
  siRNA target sequence for Ggta1 (NM_010283.1,629-647).
cccacagttatcaagaaga

SEQ ID NO: 561437 - DNA, 19 bp, Mus musculus
  siRNA target sequence for Ggta1 (NM_010283.1,705-723).
gctatgggactggttcaat

SEQ ID NO: 561438 - DNA, 19 bp, Mus musculus
  siRNA target sequence for Ggta1 (NM_010283.1,813-831).
gtactacgccacacagaaa

SEQ ID NO: 561439 - DNA, 19 bp, Mus musculus
  siRNA target sequence for Ggta1 (NM_010283.1,867-885).
gtacattgagcattactta

SEQ ID NO: 561440 - DNA, 19 bp, Mus musculus
  siRNA target sequence for Ggta1 (NM_010283.1,876-894).
gcattacttagaagacttt

SEQ ID NO: 561441 - DNA, 19 bp, Mus musculus
  siRNA target sequence for Ggta1 (NM_010283.1,898-916).
gagtctgctgacatgtact

SEQ ID NO: 561442 - DNA, 19 bp, Mus musculus
  siRNA target sequence for Ggta1 (NM_010283.1,922-940).
gttggccatcgggtcatat

SEQ ID NO: 561443 - DNA, 19 bp, Mus musculus
  siRNA target sequence for Ggta1 (NM_010283.1,925-943).
ggccatcgggtcatatttt

SEQ ID NO: 561444 - DNA, 19 bp, Mus musculus
  siRNA target sequence for Ggta1 (NM_010283.1,926-944).
gccatcgggtcatatttta

SEQ ID NO: 561445 - DNA, 19 bp, Mus musculus
  siRNA target sequence for Ggta1 (NM_010283.1,936-954).
catattttacgtcatgata

SEQ ID NO: 561446 - DNA, 19 bp, Mus musculus
  siRNA target sequence for Ggta1 (NM_010283.1,987-1005).
gaaccctctacattcctta

SEQ ID NO: 561447 - DNA, 19 bp, Mus musculus
  siRNA target sequence for Ggta1 (NM_010283.1,1310-1328).
gaacgcctactcacattct

SEQ ID NO: 561448 - DNA, 19 bp, Mus musculus
  siRNA target sequence for Ggta1 (NM_010283.1,1313-1331).
cgcctactcacattctcaa

SEQ ID NO: 561449 - DNA, 19 bp, Mus musculus
  siRNA target sequence for Ggta1 (NM_010283.1,1333-1351).
ctcaccagggagtgcttta

SEQ ID NO: 561450 - DNA, 19 bp, Mus musculus
  siRNA target sequence for Ggta1 (NM_010283.1,1365-1383).
ggacaagaaacatgacata

SEQ ID NO: 561451 - DNA, 19 bp, Mus musculus
  siRNA target sequence for Ggta1 (NM_010283.1,1406-1424).
gccacctcaacaaatactt

SEQ ID NO: 561452 - DNA, 19 bp, Mus musculus
  siRNA target sequence for Ggta1 (NM_010283.1,1483-1501).
ggcctgccttcagatatta

SEQ ID NO: 561453 - DNA, 19 bp, Mus musculus
  siRNA target sequence for Ggta1 (NM_010283.1,1517-1535).
cttggcagacaaaagagta

SEQ ID NO: 561454 - DNA, 19 bp, Mus musculus
  siRNA target sequence for Ggta1 (NM_010283.1,1521-1539).
gcagacaaaagagtataat

SEQ ID NO: 561455 - DNA, 19 bp, Mus musculus
  siRNA target sequence for Ggta1 (NM_010283.1,1531-1549).
gagtataatttggttagaa

SEQ ID NO: 561456 - DNA, 19 bp, Mus musculus
  siRNA target sequence for Lap3 (NM_024434.3,183-201).
cctgccacaatttacaagt

SEQ ID NO: 561457 - DNA, 19 bp, Mus musculus
  siRNA target sequence for Lap3 (NM_024434.3,200-218).
gtgcgggagagagttttaa

SEQ ID NO: 561458 - DNA, 19 bp, Mus musculus
  siRNA target sequence for Lap3 (NM_024434.3,202-220).
gcgggagagagttttaata

SEQ ID NO: 561459 - DNA, 19 bp, Mus musculus
  siRNA target sequence for Lap3 (NM_024434.3,203-221).
cgggagagagttttaataa

SEQ ID NO: 561460 - DNA, 19 bp, Mus musculus
  siRNA target sequence for Lap3 (NM_024434.3,238-256).
ctgagggaaatgttgaaca

SEQ ID NO: 561461 - DNA, 19 bp, Mus musculus
  siRNA target sequence for Lap3 (NM_024434.3,243-261).
ggaaatgttgaacatatct

SEQ ID NO: 561462 - DNA, 19 bp, Mus musculus
  siRNA target sequence for Lap3 (NM_024434.3,282-300).
caaaaccagaaccttctat

SEQ ID NO: 561463 - DNA, 19 bp, Mus musculus
  siRNA target sequence for Lap3 (NM_024434.3,348-366).
gcgatcggctggagttgat

SEQ ID NO: 561464 - DNA, 19 bp, Mus musculus
  siRNA target sequence for Lap3 (NM_024434.3,649-667).
gagtctccagccaatgaga

SEQ ID NO: 561465 - DNA, 19 bp, Mus musculus
  siRNA target sequence for Lap3 (NM_024434.3,674-692).
caaccagattcgctgaaat

SEQ ID NO: 561466 - DNA, 19 bp, Mus musculus
  siRNA target sequence for Lap3 (NM_024434.3,706-724).
ctcaaaagtgccagtagta

SEQ ID NO: 561467 - DNA, 19 bp, Mus musculus
  siRNA target sequence for Lap3 (NM_024434.3,713-731).
gtgccagtagtaaaaccaa

SEQ ID NO: 561468 - DNA, 19 bp, Mus musculus
  siRNA target sequence for Lap3 (NM_024434.3,722-740).
gtaaaaccaaggtccatat

SEQ ID NO: 561469 - DNA, 19 bp, Mus musculus
  siRNA target sequence for Lap3 (NM_024434.3,755-773).
ggatagaggaacaagaaat

SEQ ID NO: 561470 - DNA, 19 bp, Mus musculus
  siRNA target sequence for Lap3 (NM_024434.3,769-787).
gaaatgggttcgttcctaa

SEQ ID NO: 561471 - DNA, 19 bp, Mus musculus
  siRNA target sequence for Lap3 (NM_024434.3,1008-1026).
cttgcccattaacatcatt

SEQ ID NO: 561472 - DNA, 19 bp, Mus musculus
  siRNA target sequence for Lap3 (NM_024434.3,1028-1046).
gtttggcccctctttgtga

SEQ ID NO: 561473 - DNA, 19 bp, Mus musculus
  siRNA target sequence for Lap3 (NM_024434.3,1155-1173).
cgatgcactctgttatgca

SEQ ID NO: 561474 - DNA, 19 bp, Mus musculus
  siRNA target sequence for Lap3 (NM_024434.3,1200-1218).
caatgctgccaccttaaca

SEQ ID NO: 561475 - DNA, 19 bp, Mus musculus
  siRNA target sequence for Lap3 (NM_024434.3,1251-1269).
cactggagtctttaccaat

SEQ ID NO: 561476 - DNA, 19 bp, Mus musculus
  siRNA target sequence for Lap3 (NM_024434.3,1278-1296).
gctgtggaacaaactattt

SEQ ID NO: 561477 - DNA, 19 bp, Mus musculus
  siRNA target sequence for Lap3 (NM_024434.3,1328-1346).
ggaggatgcccctctttga

SEQ ID NO: 561478 - DNA, 19 bp, Mus musculus
  siRNA target sequence for Lap3 (NM_024434.3,1387-1405).
gtcaacaatcttggaaaat

SEQ ID NO: 561479 - DNA, 19 bp, Mus musculus
  siRNA target sequence for Lap3 (NM_024434.3,1434-1452).
cgcattcctgcgagagttt

SEQ ID NO: 561480 - DNA, 19 bp, Mus musculus
  siRNA target sequence for Lap3 (NM_024434.3,1436-1454).
cattcctgcgagagtttgt

SEQ ID NO: 561481 - DNA, 19 bp, Mus musculus
  siRNA target sequence for Lap3 (NM_024434.3,1444-1462).
cgagagtttgtgacacata

SEQ ID NO: 561482 - DNA, 19 bp, Mus musculus
  siRNA target sequence for Lap3 (NM_024434.3,1463-1481).
cgaagtgggcacacttaga

SEQ ID NO: 561483 - DNA, 19 bp, Mus musculus
  siRNA target sequence for Lap3 (NM_024434.3,1547-1565).
ccacgaggactctgattga

SEQ ID NO: 561484 - DNA, 19 bp, Mus musculus
  siRNA target sequence for Lap3 (NM_024434.3,1556-1574).
ctctgattgagttcttact

SEQ ID NO: 561485 - DNA, 19 bp, Mus musculus
  siRNA target sequence for Lap3 (NM_024434.3,1566-1584).
gttcttacttcgattcagt

SEQ ID NO: 561486 - DNA, 19 bp, Mus musculus
  siRNA target sequence for Lap3 (NM_024434.3,1569-1587).
cttacttcgattcagtaaa

SEQ ID NO: 561487 - DNA, 19 bp, Mus musculus
  siRNA target sequence for Lap3 (NM_024434.3,1573-1591).
cttcgattcagtaaagaca

SEQ ID NO: 561488 - DNA, 19 bp, Mus musculus
  siRNA target sequence for Mre11a (NM_018736.1,212-230).
ggttgccactgatattcat

SEQ ID NO: 561489 - DNA, 19 bp, Mus musculus
  siRNA target sequence for Mre11a (NM_018736.1,259-277).
gaggaaatgatacatttgt

SEQ ID NO: 561490 - DNA, 19 bp, Mus musculus
  siRNA target sequence for Mre11a (NM_018736.1,500-518).
ggatggcaatctcaacatt

SEQ ID NO: 561491 - DNA, 19 bp, Mus musculus
  siRNA target sequence for Mre11a (NM_018736.1,501-519).
gatggcaatctcaacattt

SEQ ID NO: 561492 - DNA, 19 bp, Mus musculus
  siRNA target sequence for Mre11a (NM_018736.1,539-557).
ccacggcaaccatgatgat

SEQ ID NO: 561493 - DNA, 19 bp, Mus musculus
  siRNA target sequence for Mre11a (NM_018736.1,601-619).
gtgctgggtttgtgaatca

SEQ ID NO: 561494 - DNA, 19 bp, Mus musculus
  siRNA target sequence for Mre11a (NM_018736.1,618-636).
cactttggacggtcaatgt

SEQ ID NO: 561495 - DNA, 19 bp, Mus musculus
  siRNA target sequence for Mre11a (NM_018736.1,641-659).
ggagaaggttgacattagt

SEQ ID NO: 561496 - DNA, 19 bp, Mus musculus
  siRNA target sequence for Mre11a (NM_018736.1,727-745).
ggctctatcggatgtttgt

SEQ ID NO: 561497 - DNA, 19 bp, Mus musculus
  siRNA target sequence for Mre11a (NM_018736.1,729-747).
ctctatcggatgtttgtga

SEQ ID NO: 561498 - DNA, 19 bp, Mus musculus
  siRNA target sequence for Mre11a (NM_018736.1,731-749).
ctatcggatgtttgtgaat

SEQ ID NO: 561499 - DNA, 19 bp, Mus musculus
  siRNA target sequence for Mre11a (NM_018736.1,735-753).
cggatgtttgtgaataaaa

SEQ ID NO: 561500 - DNA, 19 bp, Mus musculus
  siRNA target sequence for Mre11a (NM_018736.1,783-801).
gagaactcatggtttaact

SEQ ID NO: 561501 - DNA, 19 bp, Mus musculus
  siRNA target sequence for Mre11a (NM_018736.1,785-803).
gaactcatggtttaactta

SEQ ID NO: 561502 - DNA, 19 bp, Mus musculus
  siRNA target sequence for Mre11a (NM_018736.1,910-928).
gtaaaattggcccaatcaa

SEQ ID NO: 561503 - DNA, 19 bp, Mus musculus
  siRNA target sequence for Mre11a (NM_018736.1,1026-1044).
cgcattaaagggagaaaga

SEQ ID NO: 561504 - DNA, 19 bp, Mus musculus
  siRNA target sequence for Mre11a (NM_018736.1,1027-1045).
gcattaaagggagaaagat

SEQ ID NO: 561505 - DNA, 19 bp, Mus musculus
  siRNA target sequence for Mre11a (NM_018736.1,1254-1272).
cgactacgggtggactata

SEQ ID NO: 561506 - DNA, 19 bp, Mus musculus
  siRNA target sequence for Mre11a (NM_018736.1,1273-1291).
gtggaggctttgaaccttt

SEQ ID NO: 561507 - DNA, 19 bp, Mus musculus
  siRNA target sequence for Mre11a (NM_018736.1,1276-1294).
gaggctttgaacctttcaa

SEQ ID NO: 561508 - DNA, 19 bp, Mus musculus
  siRNA target sequence for Mre11a (NM_018736.1,1288-1306).
ctttcaacgttcttcgttt

SEQ ID NO: 561509 - DNA, 19 bp, Mus musculus
  siRNA target sequence for Mre11a (NM_018736.1,1478-1496).
ccaaactgcagagaagaat

SEQ ID NO: 561510 - DNA, 19 bp, Mus musculus
  siRNA target sequence for Mre11a (NM_018736.1,1526-1544).
gatgggcgaagcagttcaa

SEQ ID NO: 561511 - DNA, 19 bp, Mus musculus
  siRNA target sequence for Mre11a (NM_018736.1,1531-1549).
gcgaagcagttcaagagtt

SEQ ID NO: 561512 - DNA, 19 bp, Mus musculus
  siRNA target sequence for Mre11a (NM_018736.1,1532-1550).
cgaagcagttcaagagttt

SEQ ID NO: 561513 - DNA, 19 bp, Mus musculus
  siRNA target sequence for Mre11a (NM_018736.1,1572-1590).
gccatcgaggaattagtga

SEQ ID NO: 561514 - DNA, 19 bp, Mus musculus
  siRNA target sequence for Mre11a (NM_018736.1,1573-1591).
ccatcgaggaattagtgaa

SEQ ID NO: 561515 - DNA, 19 bp, Mus musculus
  siRNA target sequence for Mre11a (NM_018736.1,1687-1705).
gcagacagagaaataccaa

SEQ ID NO: 561516 - DNA, 19 bp, Mus musculus
  siRNA target sequence for Mre11a (NM_018736.1,1696-1714).
gaaataccaacgaagaaga

SEQ ID NO: 561517 - DNA, 19 bp, Mus musculus
  siRNA target sequence for Mre11a (NM_018736.1,1796-1814).
ggacctgagctttgataca

SEQ ID NO: 561518 - DNA, 19 bp, Mus musculus
  siRNA target sequence for Mre11a (NM_018736.1,1797-1815).
gacctgagctttgatacat

SEQ ID NO: 561519 - DNA, 19 bp, Mus musculus
  siRNA target sequence for Mre11a (NM_018736.1,1991-2009).
cacctcatcaacatctaga

SEQ ID NO: 561520 - DNA, 19 bp, Mus musculus
  siRNA target sequence for Mre11a (NM_018736.1,1996-2014).
catcaacatctagaaacat

SEQ ID NO: 561521 - DNA, 19 bp, Mus musculus
  siRNA target sequence for Mre11a (NM_018736.1,2018-2036).
cattatagacgctttcaga

SEQ ID NO: 561522 - DNA, 19 bp, Mus musculus
  siRNA target sequence for Mre11a (NM_018736.1,2043-2061).
cgacaacagccttctagaa

SEQ ID NO: 561523 - DNA, 19 bp, Mus musculus
  siRNA target sequence for Mre11a (NM_018736.1,2107-2125).
ctgacgaagatgacatttt

SEQ ID NO: 561524 - DNA, 19 bp, Mus musculus
  siRNA target sequence for Mre11a (NM_018736.1,2112-2130).
gaagatgacatttttccta

SEQ ID NO: 561525 - DNA, 19 bp, Mus musculus
  siRNA target sequence for Mre11a (NM_018736.1,2153-2171).
gtggtcgggcacaacatct

SEQ ID NO: 561526 - DNA, 19 bp, Mus musculus
  siRNA target sequence for Mre11a (NM_018736.1,2159-2177).
gggcacaacatctagcaaa

SEQ ID NO: 561527 - DNA, 19 bp, Mus musculus
  siRNA target sequence for Mre11a (NM_018736.1,2206-2224).
gggtagactttgaatcaga

SEQ ID NO: 561528 - DNA, 19 bp, Mus musculus
  siRNA target sequence for Pde8a (NM_008803.1,342-360).
cgcctcgaaggtatcagta

SEQ ID NO: 561529 - DNA, 19 bp, Mus musculus
  siRNA target sequence for Pde8a (NM_008803.1,597-615).
caggtctatcagatcatca

SEQ ID NO: 561530 - DNA, 19 bp, Mus musculus
  siRNA target sequence for Pde8a (NM_008803.1,1119-1137).
ctatgtgtccattatcaga

SEQ ID NO: 561531 - DNA, 19 bp, Mus musculus
  siRNA target sequence for Pde8a (NM_008803.1,1312-1330).
cggatacattctatgatga

SEQ ID NO: 561532 - DNA, 19 bp, Mus musculus
  siRNA target sequence for Pde8a (NM_008803.1,1313-1331).
ggatacattctatgatgat

SEQ ID NO: 561533 - DNA, 19 bp, Mus musculus
  siRNA target sequence for Pde8a (NM_008803.1,1336-1354).
gcacccatcaccaaggtaa

SEQ ID NO: 561534 - DNA, 19 bp, Mus musculus
  siRNA target sequence for Pde8a (NM_008803.1,1410-1428).
gaaccgagtgctggatatt

SEQ ID NO: 561535 - DNA, 19 bp, Mus musculus
  siRNA target sequence for Pde8a (NM_008803.1,1414-1432).
cgagtgctggatattctga

SEQ ID NO: 561536 - DNA, 19 bp, Mus musculus
  siRNA target sequence for Pde8a (NM_008803.1,1446-1464).
gtactcgccacagtttaat

SEQ ID NO: 561537 - DNA, 19 bp, Mus musculus
  siRNA target sequence for Pde8a (NM_008803.1,1449-1467).
ctcgccacagtttaatgct

SEQ ID NO: 561538 - DNA, 19 bp, Mus musculus
  siRNA target sequence for Pde8a (NM_008803.1,1492-1510).
ctcgttgggggcttaatgt

SEQ ID NO: 561539 - DNA, 19 bp, Mus musculus
  siRNA target sequence for Pde8a (NM_008803.1,1494-1512).
cgttgggggcttaatgtct

SEQ ID NO: 561540 - DNA, 19 bp, Mus musculus
  siRNA target sequence for Pde8a (NM_008803.1,1592-1610).
cccccgtctcccttcatga

SEQ ID NO: 561541 - DNA, 19 bp, Mus musculus
  siRNA target sequence for Pde8a (NM_008803.1,1593-1611).
ccccgtctcccttcatgat

SEQ ID NO: 561542 - DNA, 19 bp, Mus musculus
  siRNA target sequence for Pde8a (NM_008803.1,1628-1646).
ccctggccatagaaaatga

SEQ ID NO: 561543 - DNA, 19 bp, Mus musculus
  siRNA target sequence for Pde8a (NM_008803.1,1677-1695).
ggaagtagcaacccaaaat

SEQ ID NO: 561544 - DNA, 19 bp, Mus musculus
  siRNA target sequence for Pde8a (NM_008803.1,1678-1696).
gaagtagcaacccaaaata

SEQ ID NO: 561545 - DNA, 19 bp, Mus musculus
  siRNA target sequence for Pde8a (NM_008803.1,1724-1742).
cgtttgcgcgttttggaat

SEQ ID NO: 561546 - DNA, 19 bp, Mus musculus
  siRNA target sequence for Pde8a (NM_008803.1,1861-1879).
gccacggcgtatttccttt

SEQ ID NO: 561547 - DNA, 19 bp, Mus musculus
  siRNA target sequence for Pde8a (NM_008803.1,2088-2106).
gtgcaatatctttaagcaa

SEQ ID NO: 561548 - DNA, 19 bp, Mus musculus
  siRNA target sequence for Pde8a (NM_008803.1,2129-2147).
cactacgccagagcattat

SEQ ID NO: 561549 - DNA, 19 bp, Mus musculus
  siRNA target sequence for Pde8a (NM_008803.1,2135-2153).
gccagagcattattgacat

SEQ ID NO: 561550 - DNA, 19 bp, Mus musculus
  siRNA target sequence for Pde8a (NM_008803.1,2185-2203).
gaacatgtcaacaaattta

SEQ ID NO: 561551 - DNA, 19 bp, Mus musculus
  siRNA target sequence for Pde8a (NM_008803.1,2188-2206).
catgtcaacaaatttatca

SEQ ID NO: 561552 - DNA, 19 bp, Mus musculus
  siRNA target sequence for Pde8a (NM_008803.1,2191-2209).
gtcaacaaatttatcaaca

SEQ ID NO: 561553 - DNA, 19 bp, Mus musculus
  siRNA target sequence for Pde8a (NM_008803.1,2255-2273).
gaagtctggaagacataaa

SEQ ID NO: 561554 - DNA, 19 bp, Mus musculus
  siRNA target sequence for Pde8a (NM_008803.1,2300-2318).
gggctctcatcaaaagaat

SEQ ID NO: 561555 - DNA, 19 bp, Mus musculus
  siRNA target sequence for Pde8a (NM_008803.1,2302-2320).
gctctcatcaaaagaatga

SEQ ID NO: 561556 - DNA, 19 bp, Mus musculus
  siRNA target sequence for Pde8a (NM_008803.1,2303-2321).
ctctcatcaaaagaatgat

SEQ ID NO: 561557 - DNA, 19 bp, Mus musculus
  siRNA target sequence for Pde8a (NM_008803.1,2446-2464).
gtgatgcccgtgtttgaca

SEQ ID NO: 561558 - DNA, 19 bp, Mus musculus
  siRNA target sequence for Pde8a (NM_008803.1,2452-2470).
cccgtgtttgacagaaaca

SEQ ID NO: 561559 - DNA, 19 bp, Mus musculus
  siRNA target sequence for Pde8a (NM_008803.1,2547-2565).
cgttgacctgcctaacctt

SEQ ID NO: 561560 - DNA, 19 bp, Mus musculus
  siRNA target sequence for Pde8a (NM_008803.1,2548-2566).
gttgacctgcctaacctta

SEQ ID NO: 561561 - DNA, 19 bp, Mus musculus
  siRNA target sequence for Pde9a (NM_008804.2,233-251).
caccatgcctgcgaattca

SEQ ID NO: 561562 - DNA, 19 bp, Mus musculus
  siRNA target sequence for Pde9a (NM_008804.2,296-314).
gtctgaacgagaagaactt

SEQ ID NO: 561563 - DNA, 19 bp, Mus musculus
  siRNA target sequence for Pde9a (NM_008804.2,336-354).
gtggcggaacaattttcca

SEQ ID NO: 561564 - DNA, 19 bp, Mus musculus
  siRNA target sequence for Pde9a (NM_008804.2,377-395).
gaaagccgaagttgcaaat

SEQ ID NO: 561565 - DNA, 19 bp, Mus musculus
  siRNA target sequence for Pde9a (NM_008804.2,413-431).
gaaacgggtggaattggaa

SEQ ID NO: 561566 - DNA, 19 bp, Mus musculus
  siRNA target sequence for Pde9a (NM_008804.2,422-440).
ggaattggaaggacttaaa

SEQ ID NO: 561567 - DNA, 19 bp, Mus musculus
  siRNA target sequence for Pde9a (NM_008804.2,511-529).
ggaccaactgtccatgtaa

SEQ ID NO: 561568 - DNA, 19 bp, Mus musculus
  siRNA target sequence for Pde9a (NM_008804.2,512-530).
gaccaactgtccatgtaaa

SEQ ID NO: 561569 - DNA, 19 bp, Mus musculus
  siRNA target sequence for Pde9a (NM_008804.2,668-686).
gctgagctgtttagaacat

SEQ ID NO: 561570 - DNA, 19 bp, Mus musculus
  siRNA target sequence for Pde9a (NM_008804.2,669-687).
ctgagctgtttagaacata

SEQ ID NO: 561571 - DNA, 19 bp, Mus musculus
  siRNA target sequence for Pde9a (NM_008804.2,673-691).
gctgtttagaacatatgta

SEQ ID NO: 561572 - DNA, 19 bp, Mus musculus
  siRNA target sequence for Pde9a (NM_008804.2,811-829).
gtgtgacacagatgatgta

SEQ ID NO: 561573 - DNA, 19 bp, Mus musculus
  siRNA target sequence for Pde9a (NM_008804.2,817-835).
cacagatgatgtacagtat

SEQ ID NO: 561574 - DNA, 19 bp, Mus musculus
  siRNA target sequence for Pde9a (NM_008804.2,847-865).
gtggcctccaggagaagtt

SEQ ID NO: 561575 - DNA, 19 bp, Mus musculus
  siRNA target sequence for Pde9a (NM_008804.2,918-936).
gaccacccagggtacaaca

SEQ ID NO: 561576 - DNA, 19 bp, Mus musculus
  siRNA target sequence for Pde9a (NM_008804.2,921-939).
cacccagggtacaacaata

SEQ ID NO: 561577 - DNA, 19 bp, Mus musculus
  siRNA target sequence for Pde9a (NM_008804.2,923-941).
cccagggtacaacaataca

SEQ ID NO: 561578 - DNA, 19 bp, Mus musculus
  siRNA target sequence for Pde9a (NM_008804.2,924-942).
ccagggtacaacaatacat

SEQ ID NO: 561579 - DNA, 19 bp, Mus musculus
  siRNA target sequence for Pde9a (NM_008804.2,925-943).
cagggtacaacaatacata

SEQ ID NO: 561580 - DNA, 19 bp, Mus musculus
  siRNA target sequence for Pde9a (NM_008804.2,1039-1057).
gacctgagtgcaacatctt

SEQ ID NO: 561581 - DNA, 19 bp, Mus musculus
  siRNA target sequence for Pde9a (NM_008804.2,1093-1111).
ggcaggggatgatcacatt

SEQ ID NO: 561582 - DNA, 19 bp, Mus musculus
  siRNA target sequence for Pde9a (NM_008804.2,1136-1154).
gcatgctgaaattatggat

SEQ ID NO: 561583 - DNA, 19 bp, Mus musculus
  siRNA target sequence for Pde9a (NM_008804.2,1143-1161).
gaaattatggattctttca

SEQ ID NO: 561584 - DNA, 19 bp, Mus musculus
  siRNA target sequence for Pde9a (NM_008804.2,1237-1255).
gtgatatctccaatgaagt

SEQ ID NO: 561585 - DNA, 19 bp, Mus musculus
  siRNA target sequence for Pde9a (NM_008804.2,1279-1297).
cgtgggtggactgtttact

SEQ ID NO: 561586 - DNA, 19 bp, Mus musculus
  siRNA target sequence for Pde9a (NM_008804.2,1291-1309).
gtttactggaagaatattt

SEQ ID NO: 561587 - DNA, 19 bp, Mus musculus
  siRNA target sequence for Pde9a (NM_008804.2,1389-1407).
gcccaaattgggttcatca

SEQ ID NO: 561588 - DNA, 19 bp, Mus musculus
  siRNA target sequence for Pde9a (NM_008804.2,1486-1504).
gggagtcccgagaacacta

SEQ ID NO: 561589 - DNA, 19 bp, Mus musculus
  siRNA target sequence for Pde9a (NM_008804.2,1550-1568).
gaagacagagagcttaaca

SEQ ID NO: 561590 - DNA, 19 bp, Mus musculus
  siRNA target sequence for Pofut1 (NM_080463.2,247-265).
gtacctccatggattgaat

SEQ ID NO: 561591 - DNA, 19 bp, Mus musculus
  siRNA target sequence for Pofut1 (NM_080463.2,251-269).
ctccatggattgaatacca

SEQ ID NO: 561592 - DNA, 19 bp, Mus musculus
  siRNA target sequence for Pofut1 (NM_080463.2,301-319).
gtgtcctaccaaaagtact

SEQ ID NO: 561593 - DNA, 19 bp, Mus musculus
  siRNA target sequence for Pofut1 (NM_080463.2,440-458).
cccagcgaagtcctgataa

SEQ ID NO: 561594 - DNA, 19 bp, Mus musculus
  siRNA target sequence for Pofut1 (NM_080463.2,514-532).
catgtgagtttcaataagt

SEQ ID NO: 561595 - DNA, 19 bp, Mus musculus
  siRNA target sequence for Pofut1 (NM_080463.2,538-556).
ctgttcacaggcatttcct

SEQ ID NO: 561596 - DNA, 19 bp, Mus musculus
  siRNA target sequence for Pofut1 (NM_080463.2,555-573).
cttcagcgcctcctacaaa

SEQ ID NO: 561597 - DNA, 19 bp, Mus musculus
  siRNA target sequence for Pofut1 (NM_080463.2,746-764).
cctatgtgggcattcatct

SEQ ID NO: 561598 - DNA, 19 bp, Mus musculus
  siRNA target sequence for Pofut1 (NM_080463.2,815-833).
ctgcagggtcacacttcat

SEQ ID NO: 561599 - DNA, 19 bp, Mus musculus
  siRNA target sequence for Pofut1 (NM_080463.2,1058-1076).
cccagatcgacctgtacat

SEQ ID NO: 561600 - DNA, 19 bp, Mus musculus
  siRNA target sequence for Pofut1 (NM_080463.2,1088-1106).
ctgaccacttcattggaaa

SEQ ID NO: 561601 - DNA, 19 bp, Mus musculus
  siRNA target sequence for Pofut1 (NM_080463.2,1195-1213).
cagcttcgggatgaatttt

SEQ ID NO: 561602 - DNA, 19 bp, Mus musculus
  siRNA target sequence for Ppm1a (NM_008910.2,100-118).
caggggaatgggttacgat

SEQ ID NO: 561603 - DNA, 19 bp, Mus musculus
  siRNA target sequence for Ppm1a (NM_008910.2,135-153).
gcaaggttggcgagttgaa

SEQ ID NO: 561604 - DNA, 19 bp, Mus musculus
  siRNA target sequence for Ppm1a (NM_008910.2,140-158).
gttggcgagttgaaatgga

SEQ ID NO: 561605 - DNA, 19 bp, Mus musculus
  siRNA target sequence for Ppm1a (NM_008910.2,263-281).
gtgagcacttgttagatca

SEQ ID NO: 561606 - DNA, 19 bp, Mus musculus
  siRNA target sequence for Ppm1a (NM_008910.2,322-340).
ccttctgtggagaacgtaa

SEQ ID NO: 561607 - DNA, 19 bp, Mus musculus
  siRNA target sequence for Ppm1a (NM_008910.2,323-341).
cttctgtggagaacgtaaa

SEQ ID NO: 561608 - DNA, 19 bp, Mus musculus
  siRNA target sequence for Ppm1a (NM_008910.2,336-354).
cgtaaagaatggaatcaga

SEQ ID NO: 561609 - DNA, 19 bp, Mus musculus
  siRNA target sequence for Ppm1a (NM_008910.2,373-391).
gatgaacacatgagagtta

SEQ ID NO: 561610 - DNA, 19 bp, Mus musculus
  siRNA target sequence for Ppm1a (NM_008910.2,431-449).
cagctgtgggcgtcttaat

SEQ ID NO: 561611 - DNA, 19 bp, Mus musculus
  siRNA target sequence for Ppm1a (NM_008910.2,450-468).
ctctccccaacatacttat

SEQ ID NO: 561612 - DNA, 19 bp, Mus musculus
  siRNA target sequence for Ppm1a (NM_008910.2,482-500).
gagactcgagaggtttact

SEQ ID NO: 561613 - DNA, 19 bp, Mus musculus
  siRNA target sequence for Ppm1a (NM_008910.2,484-502).
gactcgagaggtttacttt

SEQ ID NO: 561614 - DNA, 19 bp, Mus musculus
  siRNA target sequence for Ppm1a (NM_008910.2,486-504).
ctcgagaggtttactttgt

SEQ ID NO: 561615 - DNA, 19 bp, Mus musculus
  siRNA target sequence for Ppm1a (NM_008910.2,503-521).
gtaggaatagaaaagttca

SEQ ID NO: 561616 - DNA, 19 bp, Mus musculus
  siRNA target sequence for Ppm1a (NM_008910.2,506-524).
ggaatagaaaagttcactt

SEQ ID NO: 561617 - DNA, 19 bp, Mus musculus
  siRNA target sequence for Ppm1a (NM_008910.2,525-543).
cttcacacaagaccataaa

SEQ ID NO: 561618 - DNA, 19 bp, Mus musculus
  siRNA target sequence for Ppm1a (NM_008910.2,545-563).
caagtaacccgctggaaaa

SEQ ID NO: 561619 - DNA, 19 bp, Mus musculus
  siRNA target sequence for Ppm1a (NM_008910.2,548-566).
gtaacccgctggaaaaaga

SEQ ID NO: 561620 - DNA, 19 bp, Mus musculus
  siRNA target sequence for Ppm1a (NM_008910.2,584-602).
ggggctcggtgatgattca

SEQ ID NO: 561621 - DNA, 19 bp, Mus musculus
  siRNA target sequence for Ppm1a (NM_008910.2,594-612).
gatgattcagcgtgtcaat

SEQ ID NO: 561622 - DNA, 19 bp, Mus musculus
  siRNA target sequence for Ppm1a (NM_008910.2,635-653).
cccttggggatttcgatta

SEQ ID NO: 561623 - DNA, 19 bp, Mus musculus
  siRNA target sequence for Ppm1a (NM_008910.2,700-718).
gagcccgaagtccatgata

SEQ ID NO: 561624 - DNA, 19 bp, Mus musculus
  siRNA target sequence for Ppm1a (NM_008910.2,704-722).
ccgaagtccatgatattga

SEQ ID NO: 561625 - DNA, 19 bp, Mus musculus
  siRNA target sequence for Ppm1a (NM_008910.2,733-751).
gaagatgaccagttcatca

SEQ ID NO: 561626 - DNA, 19 bp, Mus musculus
  siRNA target sequence for Ppm1a (NM_008910.2,843-861).
gaaagtttgcaatgaagta

SEQ ID NO: 561627 - DNA, 19 bp, Mus musculus
  siRNA target sequence for Ppm1a (NM_008910.2,862-880).
gtcgacacctgcttgtata

SEQ ID NO: 561628 - DNA, 19 bp, Mus musculus
  siRNA target sequence for Ppm1a (NM_008910.2,1055-1073).
cgttagccagtgagaacat

SEQ ID NO: 561629 - DNA, 19 bp, Mus musculus
  siRNA target sequence for Ppm1a (NM_008910.2,1101-1119).
ggcaagcaagcggaatgta

SEQ ID NO: 561630 - DNA, 19 bp, Mus musculus
  siRNA target sequence for Ppm1a (NM_008910.2,1106-1124).
gcaagcggaatgtaattga

SEQ ID NO: 561631 - DNA, 19 bp, Mus musculus
  siRNA target sequence for Ppm1a (NM_008910.2,1107-1125).
caagcggaatgtaattgaa

SEQ ID NO: 561632 - DNA, 19 bp, Mus musculus
  siRNA target sequence for Ppm1a (NM_008910.2,1117-1135).
gtaattgaagccgtttaca

SEQ ID NO: 561633 - DNA, 19 bp, Mus musculus
  siRNA target sequence for Ppm1a (NM_008910.2,1172-1190).
ctgcgtcaaccgatgatat

SEQ ID NO: 561634 - DNA, 19 bp, Mus musculus
  siRNA target sequence for Ppm1a (NM_008910.2,1174-1192).
gcgtcaaccgatgatatgt

SEQ ID NO: 561635 - DNA, 19 bp, Mus musculus
  siRNA target sequence for Ppm1d (NM_016910.2,390-408).
cgtcgggccatcggaaaaa

SEQ ID NO: 561636 - DNA, 19 bp, Mus musculus
  siRNA target sequence for Ppm1d (NM_016910.2,921-939).
gaaccgagtagtttggaaa

SEQ ID NO: 561637 - DNA, 19 bp, Mus musculus
  siRNA target sequence for Ppm1d (NM_016910.2,971-989).
gaaggagcacagtcattga

SEQ ID NO: 561638 - DNA, 19 bp, Mus musculus
  siRNA target sequence for Ppm1d (NM_016910.2,984-1002).
cattgaccagattcctttt

SEQ ID NO: 561639 - DNA, 19 bp, Mus musculus
  siRNA target sequence for Ppm1d (NM_016910.2,1027-1045).
gacttgtggagctatgatt

SEQ ID NO: 561640 - DNA, 19 bp, Mus musculus
  siRNA target sequence for Ppm1d (NM_016910.2,1107-1125).
ccggaagcacaagtatatt

SEQ ID NO: 561641 - DNA, 19 bp, Mus musculus
  siRNA target sequence for Ppm1d (NM_016910.2,1108-1126).
cggaagcacaagtatatta

SEQ ID NO: 561642 - DNA, 19 bp, Mus musculus
  siRNA target sequence for Ppm1d (NM_016910.2,1136-1154).
gtgatggactttggaatat

SEQ ID NO: 561643 - DNA, 19 bp, Mus musculus
  siRNA target sequence for Ppm1d (NM_016910.2,1230-1248).
gtcctgtgccaaaatgctt

SEQ ID NO: 561644 - DNA, 19 bp, Mus musculus
  siRNA target sequence for Ppm1d (NM_016910.2,1280-1298).
gtatgcttcgggcagataa

SEQ ID NO: 561645 - DNA, 19 bp, Mus musculus
  siRNA target sequence for Ppm1d (NM_016910.2,1284-1302).
gcttcgggcagataacaca

SEQ ID NO: 561646 - DNA, 19 bp, Mus musculus
  siRNA target sequence for Ppm1d (NM_016910.2,1285-1303).
cttcgggcagataacacaa

SEQ ID NO: 561647 - DNA, 19 bp, Mus musculus
  siRNA target sequence for Ppm1d (NM_016910.2,1319-1337).
gcatctctccagaagtaga

SEQ ID NO: 561648 - DNA, 19 bp, Mus musculus
  siRNA target sequence for Ppm1d (NM_016910.2,1387-1405).
gatagccctacttacaaca

SEQ ID NO: 561649 - DNA, 19 bp, Mus musculus
  siRNA target sequence for Ppm1d (NM_016910.2,1488-1506).
gagctctaaggaccatata

SEQ ID NO: 561650 - DNA, 19 bp, Mus musculus
  siRNA target sequence for Ppm1d (NM_016910.2,1491-1509).
ctctaaggaccatatacct

SEQ ID NO: 561651 - DNA, 19 bp, Mus musculus
  siRNA target sequence for Ppm1d (NM_016910.2,1641-1659).
cctgactttaaggattcat

SEQ ID NO: 561652 - DNA, 19 bp, Mus musculus
  siRNA target sequence for Ppm1d (NM_016910.2,1644-1662).
gactttaaggattcatgat

SEQ ID NO: 561653 - DNA, 19 bp, Mus musculus
  siRNA target sequence for Ppm1d (NM_016910.2,1652-1670).
ggattcatgattctttgaa

SEQ ID NO: 561654 - DNA, 19 bp, Mus musculus
  siRNA target sequence for Ppm1d (NM_016910.2,1653-1671).
gattcatgattctttgaat

SEQ ID NO: 561655 - DNA, 19 bp, Mus musculus
  siRNA target sequence for Ppm1d (NM_016910.2,1657-1675).
catgattctttgaataata

SEQ ID NO: 561656 - DNA, 19 bp, Mus musculus
  siRNA target sequence for Ppm1d (NM_016910.2,1687-1705).
ggcctcattccaaccaatt

SEQ ID NO: 561657 - DNA, 19 bp, Mus musculus
  siRNA target sequence for Ppm1d (NM_016910.2,1689-1707).
cctcattccaaccaattca

SEQ ID NO: 561658 - DNA, 19 bp, Mus musculus
  siRNA target sequence for Ppm1d (NM_016910.2,1692-1710).
cattccaaccaattcaaca

SEQ ID NO: 561659 - DNA, 19 bp, Mus musculus
  siRNA target sequence for Ppm1d (NM_016910.2,1715-1733).
ctatcatggaccaaaaaaa

SEQ ID NO: 561660 - DNA, 19 bp, Mus musculus
  siRNA target sequence for Ppm1d (NM_016910.2,1784-1802).
cccctccagccaattttaa

SEQ ID NO: 561661 - DNA, 19 bp, Mus musculus
  siRNA target sequence for Ppm1d (NM_016910.2,1785-1803).
ccctccagccaattttaaa

SEQ ID NO: 561662 - DNA, 19 bp, Mus musculus
  siRNA target sequence for Ppm1d (NM_016910.2,1805-1823).
ggacattagaagaatccaa

SEQ ID NO: 561663 - DNA, 19 bp, Mus musculus
  siRNA target sequence for Ppm1d (NM_016910.2,1839-1857).
gaagaagcaccgacgaaat

SEQ ID NO: 561664 - DNA, 19 bp, Mus musculus
  siRNA target sequence for Ppm1d (NM_016910.2,1848-1866).
ccgacgaaatggcttaagt

SEQ ID NO: 561665 - DNA, 19 bp, Mus musculus
  siRNA target sequence for Ppm1d (NM_016910.2,1911-1929).
gcgcaggcactctgtcaaa

SEQ ID NO: 561666 - DNA, 19 bp, Mus musculus
  siRNA target sequence for Ppm1d (NM_016910.2,1913-1931).
gcaggcactctgtcaaact

SEQ ID NO: 561667 - DNA, 19 bp, Mus musculus
  siRNA target sequence for Ppm1g (NM_008014.2,316-334).
gaagaggttgccttgtact

SEQ ID NO: 561668 - DNA, 19 bp, Mus musculus
  siRNA target sequence for Ppm1g (NM_008014.2,498-516).
ggatgataaagacaaagta

SEQ ID NO: 561669 - DNA, 19 bp, Mus musculus
  siRNA target sequence for Ppm1g (NM_008014.2,878-896).
ctaagtccaagttctttga

SEQ ID NO: 561670 - DNA, 19 bp, Mus musculus
  siRNA target sequence for Ppm1g (NM_008014.2,1175-1193).
ccgaggctggcaaagcttt

SEQ ID NO: 561671 - DNA, 19 bp, Mus musculus
  siRNA target sequence for Ppm1g (NM_008014.2,1179-1197).
ggctggcaaagctttagat

SEQ ID NO: 561672 - DNA, 19 bp, Mus musculus
  siRNA target sequence for Ppm1g (NM_008014.2,1180-1198).
gctggcaaagctttagata

SEQ ID NO: 561673 - DNA, 19 bp, Mus musculus
  siRNA target sequence for Ppm1g (NM_008014.2,1181-1199).
ctggcaaagctttagatat

SEQ ID NO: 561674 - DNA, 19 bp, Mus musculus
  siRNA target sequence for Ppm1g (NM_008014.2,1183-1201).
ggcaaagctttagatatgt

SEQ ID NO: 561675 - DNA, 19 bp, Mus musculus
  siRNA target sequence for Ppm1g (NM_008014.2,1269-1287).
catggatggacgagtcaat

SEQ ID NO: 561676 - DNA, 19 bp, Mus musculus
  siRNA target sequence for Ppm1g (NM_008014.2,1315-1333).
ggagaccacttctacaaga

SEQ ID NO: 561677 - DNA, 19 bp, Mus musculus
  siRNA target sequence for Ppm1g (NM_008014.2,1318-1336).
gaccacttctacaagagaa

SEQ ID NO: 561678 - DNA, 19 bp, Mus musculus
  siRNA target sequence for Ppm1g (NM_008014.2,1351-1369).
ccccaggaacagatgattt

SEQ ID NO: 561679 - DNA, 19 bp, Mus musculus
  siRNA target sequence for Ppm1g (NM_008014.2,1399-1417).
ctcactgatgaccatgaat

SEQ ID NO: 561680 - DNA, 19 bp, Mus musculus
  siRNA target sequence for Ppm1g (NM_008014.2,1414-1432).
gaattcatggtcattgctt

SEQ ID NO: 561681 - DNA, 19 bp, Mus musculus
  siRNA target sequence for Ppm1g (NM_008014.2,1467-1485).
ggttgtagactttattcaa

SEQ ID NO: 561682 - DNA, 19 bp, Mus musculus
  siRNA target sequence for Ppm1g (NM_008014.2,1491-1509).
gatcagtcaacgtgatgaa

SEQ ID NO: 561683 - DNA, 19 bp, Mus musculus
  siRNA target sequence for Ppm1g (NM_008014.2,1515-1533).
ggagcttcggttattgtca

SEQ ID NO: 561684 - DNA, 19 bp, Mus musculus
  siRNA target sequence for Ppm1g (NM_008014.2,1516-1534).
gagcttcggttattgtcat

SEQ ID NO: 561685 - DNA, 19 bp, Mus musculus
  siRNA target sequence for Ppm1g (NM_008014.2,1605-1623).
catgacgtgcatcatcatt

SEQ ID NO: 561686 - DNA, 19 bp, Mus musculus
  siRNA target sequence for Ppm1g (NM_008014.2,1626-1644).
cttcaagccccgaaacaca

SEQ ID NO: 561687 - DNA, 19 bp, Mus musculus
  siRNA target sequence for Ppm1g (NM_008014.2,1713-1731).
caccggcaacagtgacaaa

SEQ ID NO: 561688 - DNA, 19 bp, Mus musculus
  siRNA target sequence for Ppm1g (NM_008014.2,1715-1733).
ccggcaacagtgacaaaaa

SEQ ID NO: 561689 - DNA, 19 bp, Mus musculus
  siRNA target sequence for Ppp1ca (NM_031868.1,150-168).
cgtggtctgtgcctcaaat

SEQ ID NO: 561690 - DNA, 19 bp, Mus musculus
  siRNA target sequence for Ppp1ca (NM_031868.1,182-200).
cctgagccagcccattctt

SEQ ID NO: 561691 - DNA, 19 bp, Mus musculus
  siRNA target sequence for Ppp1ca (NM_031868.1,258-276).
cttctacggctgtttgagt

SEQ ID NO: 561692 - DNA, 19 bp, Mus musculus
  siRNA target sequence for Ppp1ca (NM_031868.1,311-329).
cttgggggattatgtagat

SEQ ID NO: 561693 - DNA, 19 bp, Mus musculus
  siRNA target sequence for Ppp1ca (NM_031868.1,366-384).
ctggcctataagatcagat

SEQ ID NO: 561694 - DNA, 19 bp, Mus musculus
  siRNA target sequence for Ppp1ca (NM_031868.1,437-455).
ccgcatttatggcttctat

SEQ ID NO: 561695 - DNA, 19 bp, Mus musculus
  siRNA target sequence for Ppp1ca (NM_031868.1,668-686).
ccctgacaaggatgttcaa

SEQ ID NO: 561696 - DNA, 19 bp, Mus musculus
  siRNA target sequence for Ppp1ca (NM_031868.1,705-723).
cgtggtgtctcctttacct

SEQ ID NO: 561697 - DNA, 19 bp, Mus musculus
  siRNA target sequence for Ppp1ca (NM_031868.1,930-948).
ctcaagcccgctgataaga

SEQ ID NO: 561698 - DNA, 19 bp, Mus musculus
  siRNA target sequence for Ppp1ca (NM_031868.1,932-950).
caagcccgctgataagaat

SEQ ID NO: 561699 - DNA, 19 bp, Mus musculus
  siRNA target sequence for Ppp1cb (NM_172707.1,156-174).
gatgtcgtccaggaaagat

SEQ ID NO: 561700 - DNA, 19 bp, Mus musculus
  siRNA target sequence for Ppp1cb (NM_172707.1,162-180).
gtccaggaaagattgtaca

SEQ ID NO: 561701 - DNA, 19 bp, Mus musculus
  siRNA target sequence for Ppp1cb (NM_172707.1,197-215).
gtccgagggttgtgtatca

SEQ ID NO: 561702 - DNA, 19 bp, Mus musculus
  siRNA target sequence for Ppp1cb (NM_172707.1,200-218).
cgagggttgtgtatcaagt

SEQ ID NO: 561703 - DNA, 19 bp, Mus musculus
  siRNA target sequence for Ppp1cb (NM_172707.1,210-228).
gtatcaagtctcgtgaaat

SEQ ID NO: 561704 - DNA, 19 bp, Mus musculus
  siRNA target sequence for Ppp1cb (NM_172707.1,284-302).
gacattcatggacaatata

SEQ ID NO: 561705 - DNA, 19 bp, Mus musculus
  siRNA target sequence for Ppp1cb (NM_172707.1,294-312).
gacaatatacagacttact

SEQ ID NO: 561706 - DNA, 19 bp, Mus musculus
  siRNA target sequence for Ppp1cb (NM_172707.1,296-314).
caatatacagacttactaa

SEQ ID NO: 561707 - DNA, 19 bp, Mus musculus
  siRNA target sequence for Ppp1cb (NM_172707.1,303-321).
cagacttactaagattatt

SEQ ID NO: 561708 - DNA, 19 bp, Mus musculus
  siRNA target sequence for Ppp1cb (NM_172707.1,397-415).
ggaaaccatctgtttgcta

SEQ ID NO: 561709 - DNA, 19 bp, Mus musculus
  siRNA target sequence for Ppp1cb (NM_172707.1,408-426).
gtttgctattggcttacaa

SEQ ID NO: 561710 - DNA, 19 bp, Mus musculus
  siRNA target sequence for Ppp1cb (NM_172707.1,413-431).
ctattggcttacaaaatca

SEQ ID NO: 561711 - DNA, 19 bp, Mus musculus
  siRNA target sequence for Ppp1cb (NM_172707.1,502-520).
ctacgatgagtgtaaacga

SEQ ID NO: 561712 - DNA, 19 bp, Mus musculus
  siRNA target sequence for Ppp1cb (NM_172707.1,544-562).
gacattcactgattgtttt

SEQ ID NO: 561713 - DNA, 19 bp, Mus musculus
  siRNA target sequence for Ppp1cb (NM_172707.1,573-591).
ctatagctgctattgttga

SEQ ID NO: 561714 - DNA, 19 bp, Mus musculus
  siRNA target sequence for Ppp1cb (NM_172707.1,581-599).
gctattgttgatgagaaaa

SEQ ID NO: 561715 - DNA, 19 bp, Mus musculus
  siRNA target sequence for Ppp1cb (NM_172707.1,620-638).
ctgtcaccagacctacaat

SEQ ID NO: 561716 - DNA, 19 bp, Mus musculus
  siRNA target sequence for Ppp1cb (NM_172707.1,622-640).
gtcaccagacctacaatct

SEQ ID NO: 561717 - DNA, 19 bp, Mus musculus
  siRNA target sequence for Ppp1cb (NM_172707.1,670-688).
cactgacgtacctgataca

SEQ ID NO: 561718 - DNA, 19 bp, Mus musculus
  siRNA target sequence for Ppp1cb (NM_172707.1,690-708).
gtttgctttgtgacttact

SEQ ID NO: 561719 - DNA, 19 bp, Mus musculus
  siRNA target sequence for Ppp1cb (NM_172707.1,711-729).
ggtccgacccagataagga

SEQ ID NO: 561720 - DNA, 19 bp, Mus musculus
  siRNA target sequence for Ppp1cb (NM_172707.1,712-730).
gtccgacccagataaggat

SEQ ID NO: 561721 - DNA, 19 bp, Mus musculus
  siRNA target sequence for Ppp1cb (NM_172707.1,755-773).
cgtggtgtttcttttactt

SEQ ID NO: 561722 - DNA, 19 bp, Mus musculus
  siRNA target sequence for Ppp1cb (NM_172707.1,777-795).
gagctgatgtagtcagtaa

SEQ ID NO: 561723 - DNA, 19 bp, Mus musculus
  siRNA target sequence for Ppp1cb (NM_172707.1,807-825).
gtcatgatttagacttgat

SEQ ID NO: 561724 - DNA, 19 bp, Mus musculus
  siRNA target sequence for Ppp1cb (NM_172707.1,853-871).
cggatatgaattttttgct

SEQ ID NO: 561725 - DNA, 19 bp, Mus musculus
  siRNA target sequence for Ppp1cb (NM_172707.1,854-872).
ggatatgaattttttgcta

SEQ ID NO: 561726 - DNA, 19 bp, Mus musculus
  siRNA target sequence for Ppp1cb (NM_172707.1,875-893).
cgacagttggtaaccttat

SEQ ID NO: 561727 - DNA, 19 bp, Mus musculus
  siRNA target sequence for Ppp1cb (NM_172707.1,876-894).
gacagttggtaaccttatt

SEQ ID NO: 561728 - DNA, 19 bp, Mus musculus
  siRNA target sequence for Ppp1cb (NM_172707.1,945-963).
gtgtggatgagactttgat

SEQ ID NO: 561729 - DNA, 19 bp, Mus musculus
  siRNA target sequence for Ppp1cb (NM_172707.1,950-968).
gatgagactttgatgtgtt

SEQ ID NO: 561730 - DNA, 19 bp, Mus musculus
  siRNA target sequence for Ppp1cb (NM_172707.1,1012-1030).
gtatggtgggctgaattct

SEQ ID NO: 561731 - DNA, 19 bp, Mus musculus
  siRNA target sequence for Ppp1cb (NM_172707.1,1048-1066).
gcctcgaacagctaatcca

SEQ ID NO: 561732 - DNA, 19 bp, Mus musculus
  siRNA target sequence for Ppp2ca (NM_019411.2,416-434).
gatctcatggaactcttta

SEQ ID NO: 561733 - DNA, 19 bp, Mus musculus
  siRNA target sequence for Ppp2ca (NM_019411.2,421-439).
catggaactctttagaatt

SEQ ID NO: 561734 - DNA, 19 bp, Mus musculus
  siRNA target sequence for Ppp2ca (NM_019411.2,466-484).
cctgtttatgggagactat

SEQ ID NO: 561735 - DNA, 19 bp, Mus musculus
  siRNA target sequence for Ppp2ca (NM_019411.2,519-537).
cactgcttgtagctcttaa

SEQ ID NO: 561736 - DNA, 19 bp, Mus musculus
  siRNA target sequence for Ppp2ca (NM_019411.2,609-627).
ggttctacgacgagtgttt

SEQ ID NO: 561737 - DNA, 19 bp, Mus musculus
  siRNA target sequence for Ppp2ca (NM_019411.2,610-628).
gttctacgacgagtgttta

SEQ ID NO: 561738 - DNA, 19 bp, Mus musculus
  siRNA target sequence for Ppp2ca (NM_019411.2,630-648).
ggaaatacggaaatgcaaa

SEQ ID NO: 561739 - DNA, 19 bp, Mus musculus
  siRNA target sequence for Ppp2ca (NM_019411.2,868-886).
gggagctggttataccttt

SEQ ID NO: 561740 - DNA, 19 bp, Mus musculus
  siRNA target sequence for Ppp2ca (NM_019411.2,953-971).
ctggtgatggagggatata

SEQ ID NO: 561741 - DNA, 19 bp, Mus musculus
  siRNA target sequence for Ppp2ca (NM_019411.2,980-998).
catgaccggaacgtagtaa

SEQ ID NO: 561742 - DNA, 19 bp, Mus musculus
  siRNA target sequence for Ppp2ca (NM_019411.2,983-1001).
gaccggaacgtagtaacaa

SEQ ID NO: 561743 - DNA, 19 bp, Mus musculus
  siRNA target sequence for Ppp2ca (NM_019411.2,985-1003).
ccggaacgtagtaacaatt

SEQ ID NO: 561744 - DNA, 19 bp, Mus musculus
  siRNA target sequence for Ppp2ca (NM_019411.2,986-1004).
cggaacgtagtaacaattt

SEQ ID NO: 561745 - DNA, 19 bp, Mus musculus
  siRNA target sequence for Ppp2ca (NM_019411.2,987-1005).
ggaacgtagtaacaatttt

SEQ ID NO: 561746 - DNA, 19 bp, Mus musculus
  siRNA target sequence for Ppp2ca (NM_019411.2,991-1009).
cgtagtaacaattttcagt

SEQ ID NO: 561747 - DNA, 19 bp, Mus musculus
  siRNA target sequence for Ppp2ca (NM_019411.2,1008-1026).
gtgctccaaactattgcta

SEQ ID NO: 561748 - DNA, 19 bp, Mus musculus
  siRNA target sequence for Ppp2ca (NM_019411.2,1013-1031).
ccaaactattgctatcgtt

SEQ ID NO: 561749 - DNA, 19 bp, Mus musculus
  siRNA target sequence for Ppp2ca (NM_019411.2,1024-1042).
ctatcgttgtggtaaccaa

SEQ ID NO: 561750 - DNA, 19 bp, Mus musculus
  siRNA target sequence for Ppp2ca (NM_019411.2,1044-1062).
ctgcaatcatggaacttga

SEQ ID NO: 561751 - DNA, 19 bp, Mus musculus
  siRNA target sequence for Ppp2ca (NM_019411.2,1058-1076).
cttgacgacactcttaagt

SEQ ID NO: 561752 - DNA, 19 bp, Mus musculus
  siRNA target sequence for Ppp2ca (NM_019411.2,1061-1079).
gacgacactcttaagtatt

SEQ ID NO: 561753 - DNA, 19 bp, Mus musculus
  siRNA target sequence for Ppp2ca (NM_019411.2,1063-1081).
cgacactcttaagtattct

SEQ ID NO: 561754 - DNA, 19 bp, Mus musculus
  siRNA target sequence for Ppp2cb (NM_017374.2,395-413).
gctaaggaaattttaacga

SEQ ID NO: 561755 - DNA, 19 bp, Mus musculus
  siRNA target sequence for Ppp2cb (NM_017374.2,471-489).
gccaattccatgaccttat

SEQ ID NO: 561756 - DNA, 19 bp, Mus musculus
  siRNA target sequence for Ppp2cb (NM_017374.2,518-536).
ccagatacgaactacctat

SEQ ID NO: 561757 - DNA, 19 bp, Mus musculus
  siRNA target sequence for Ppp2cb (NM_017374.2,519-537).
cagatacgaactacctatt

SEQ ID NO: 561758 - DNA, 19 bp, Mus musculus
  siRNA target sequence for Ppp2cb (NM_017374.2,521-539).
gatacgaactacctattca

SEQ ID NO: 561759 - DNA, 19 bp, Mus musculus
  siRNA target sequence for Ppp2cb (NM_017374.2,585-603).
ctcttcttgtagcgttaaa

SEQ ID NO: 561760 - DNA, 19 bp, Mus musculus
  siRNA target sequence for Ppp2cb (NM_017374.2,614-632).
ccagagcgcatcacaatat

SEQ ID NO: 561761 - DNA, 19 bp, Mus musculus
  siRNA target sequence for Ppp2cb (NM_017374.2,615-633).
cagagcgcatcacaatatt

SEQ ID NO: 561762 - DNA, 19 bp, Mus musculus
  siRNA target sequence for Ppp2cb (NM_017374.2,627-645).
caatattgcgaggaaatca

SEQ ID NO: 561763 - DNA, 19 bp, Mus musculus
  siRNA target sequence for Ppp2cb (NM_017374.2,655-673).
gcagatcacacaagtgtat

SEQ ID NO: 561764 - DNA, 19 bp, Mus musculus
  siRNA target sequence for Ppp2cb (NM_017374.2,690-708).
gcctacggaagtatggaaa

SEQ ID NO: 561765 - DNA, 19 bp, Mus musculus
  siRNA target sequence for Ppp2cb (NM_017374.2,691-709).
cctacggaagtatggaaat

SEQ ID NO: 561766 - DNA, 19 bp, Mus musculus
  siRNA target sequence for Ppp2cb (NM_017374.2,710-728).
gccaacgtgtggaaatact

SEQ ID NO: 561767 - DNA, 19 bp, Mus musculus
  siRNA target sequence for Ppp2cb (NM_017374.2,815-833).
gatacactggaccacataa

SEQ ID NO: 561768 - DNA, 19 bp, Mus musculus
  siRNA target sequence for Ppp4c (NM_019674.2,159-177).
gcgctgcgagctgatcaaa

SEQ ID NO: 561769 - DNA, 19 bp, Mus musculus
  siRNA target sequence for Ppp4c (NM_019674.2,250-268).
gactcgccagtcacagtat

SEQ ID NO: 561770 - DNA, 19 bp, Mus musculus
  siRNA target sequence for Ppp4c (NM_019674.2,364-382).
gtggaccgtggtttctaca

SEQ ID NO: 561771 - DNA, 19 bp, Mus musculus
  siRNA target sequence for Ppp4c (NM_019674.2,501-519).
gtgcttacggaaatatggt

SEQ ID NO: 561772 - DNA, 19 bp, Mus musculus
  siRNA target sequence for Ppp4c (NM_019674.2,536-554).
gctactgtactgagatctt

SEQ ID NO: 561773 - DNA, 19 bp, Mus musculus
  siRNA target sequence for Ppp4c (NM_019674.2,537-555).
ctactgtactgagatcttt

SEQ ID NO: 561774 - DNA, 19 bp, Mus musculus
  siRNA target sequence for Ppp4c (NM_019674.2,542-560).
gtactgagatctttgacta

SEQ ID NO: 561775 - DNA, 19 bp, Mus musculus
  siRNA target sequence for Ppp4c (NM_019674.2,636-654).
ggaccagatccggacaatt

SEQ ID NO: 561776 - DNA, 19 bp, Mus musculus
  siRNA target sequence for Ppp4c (NM_019674.2,774-792).
cgtggtcgcccagttcaat

SEQ ID NO: 561777 - DNA, 19 bp, Mus musculus
  siRNA target sequence for Ppp4c (NM_019674.2,794-812).
cagccaacgacattgatat

SEQ ID NO: 561778 - DNA, 19 bp, Mus musculus
  siRNA target sequence for Ppp4c (NM_019674.2,796-814).
gccaacgacattgatatga

SEQ ID NO: 561779 - DNA, 19 bp, Mus musculus
  siRNA target sequence for Ppp4c (NM_019674.2,816-834).
ctgccgtgcccaccaatta

SEQ ID NO: 561780 - DNA, 19 bp, Mus musculus
  siRNA target sequence for Ppp4c (NM_019674.2,818-836).
gccgtgcccaccaattagt

SEQ ID NO: 561781 - DNA, 19 bp, Mus musculus
  siRNA target sequence for Ppp4c (NM_019674.2,820-838).
cgtgcccaccaattagtga

SEQ ID NO: 561782 - DNA, 19 bp, Mus musculus
  siRNA target sequence for Ppp4c (NM_019674.2,880-898).
gtgtggtcagcgcctaatt

SEQ ID NO: 561783 - DNA, 19 bp, Mus musculus
  siRNA target sequence for Ppp4c (NM_019674.2,946-964).
cacctccagaaagatttca

SEQ ID NO: 561784 - DNA, 19 bp, Mus musculus
  siRNA target sequence for Ppp4c (NM_019674.2,994-1012).
cgtggcatcccctccaaaa

SEQ ID NO: 561785 - DNA, 19 bp, Mus musculus
  siRNA target sequence for Ppp4c (NM_019674.2,1016-1034).
cagtggccgactatttcct

SEQ ID NO: 561786 - DNA, 19 bp, Mus musculus
  siRNA target sequence for Ppp5c (NM_011155.1,159-177).
ggccaacgactacttcaaa

SEQ ID NO: 561787 - DNA, 19 bp, Mus musculus
  siRNA target sequence for Ppp5c (NM_011155.1,190-208).
gagaacgcgatcaagttct

SEQ ID NO: 561788 - DNA, 19 bp, Mus musculus
  siRNA target sequence for Ppp5c (NM_011155.1,212-230).
gtcaggccatcgagttgaa

SEQ ID NO: 561789 - DNA, 19 bp, Mus musculus
  siRNA target sequence for Ppp5c (NM_011155.1,234-252).
cggcaatgccatctactat

SEQ ID NO: 561790 - DNA, 19 bp, Mus musculus
  siRNA target sequence for Ppp5c (NM_011155.1,317-335).
gggccatcgagcttgacaa

SEQ ID NO: 561791 - DNA, 19 bp, Mus musculus
  siRNA target sequence for Ppp5c (NM_011155.1,320-338).
ccatcgagcttgacaagaa

SEQ ID NO: 561792 - DNA, 19 bp, Mus musculus
  siRNA target sequence for Ppp5c (NM_011155.1,469-487).
gagtgcagcaagattgtga

SEQ ID NO: 561793 - DNA, 19 bp, Mus musculus
  siRNA target sequence for Ppp5c (NM_011155.1,543-561).
ggactctctggacattgaa

SEQ ID NO: 561794 - DNA, 19 bp, Mus musculus
  siRNA target sequence for Ppp5c (NM_011155.1,548-566).
ctctggacattgaaagcat

SEQ ID NO: 561795 - DNA, 19 bp, Mus musculus
  siRNA target sequence for Ppp5c (NM_011155.1,617-635).
caatcaccttcatgaaaga

SEQ ID NO: 561796 - DNA, 19 bp, Mus musculus
  siRNA target sequence for Ppp5c (NM_011155.1,683-701).
cctaccagatcctagtaca

SEQ ID NO: 561797 - DNA, 19 bp, Mus musculus
  siRNA target sequence for Ppp5c (NM_011155.1,693-711).
cctagtacaggtgaaagaa

SEQ ID NO: 561798 - DNA, 19 bp, Mus musculus
  siRNA target sequence for Ppp5c (NM_011155.1,798-816).
ctacgacctcctcaacata

SEQ ID NO: 561799 - DNA, 19 bp, Mus musculus
  siRNA target sequence for Ppp5c (NM_011155.1,801-819).
cgacctcctcaacatattt

SEQ ID NO: 561800 - DNA, 19 bp, Mus musculus
  siRNA target sequence for Ppp5c (NM_011155.1,839-857).
cagagaccaacccctatat

SEQ ID NO: 561801 - DNA, 19 bp, Mus musculus
  siRNA target sequence for Ppp5c (NM_011155.1,841-859).
gagaccaacccctatatat

SEQ ID NO: 561802 - DNA, 19 bp, Mus musculus
  siRNA target sequence for Ppp5c (NM_011155.1,843-861).
gaccaacccctatatattt

SEQ ID NO: 561803 - DNA, 19 bp, Mus musculus
  siRNA target sequence for Ppp5c (NM_011155.1,884-902).
gttccttctccgttgaagt

SEQ ID NO: 561804 - DNA, 19 bp, Mus musculus
  siRNA target sequence for Ppp5c (NM_011155.1,887-905).
ccttctccgttgaagtgat

SEQ ID NO: 561805 - DNA, 19 bp, Mus musculus
  siRNA target sequence for Ppp5c (NM_011155.1,927-945).
gctcctgtatccagatcat

SEQ ID NO: 561806 - DNA, 19 bp, Mus musculus
  siRNA target sequence for Ppp5c (NM_011155.1,938-956).
cagatcatttccatctact

SEQ ID NO: 561807 - DNA, 19 bp, Mus musculus
  siRNA target sequence for Ppp5c (NM_011155.1,1023-1041).
gtacacagcccagatgtat

SEQ ID NO: 561808 - DNA, 19 bp, Mus musculus
  siRNA target sequence for Ppp5c (NM_011155.1,1072-1090).
ccgctggcgcagtgtatca

SEQ ID NO: 561809 - DNA, 19 bp, Mus musculus
  siRNA target sequence for Ppp5c (NM_011155.1,1073-1091).
cgctggcgcagtgtatcaa

SEQ ID NO: 561810 - DNA, 19 bp, Mus musculus
  siRNA target sequence for Ppp5c (NM_011155.1,1074-1092).
gctggcgcagtgtatcaat

SEQ ID NO: 561811 - DNA, 19 bp, Mus musculus
  siRNA target sequence for Ppp5c (NM_011155.1,1146-1164).
ggatgacatccgaaagatt

SEQ ID NO: 561812 - DNA, 19 bp, Mus musculus
  siRNA target sequence for Ppp5c (NM_011155.1,1306-1324).
gagaatcaactggactata

SEQ ID NO: 561813 - DNA, 19 bp, Mus musculus
  siRNA target sequence for Ppp5c (NM_011155.1,1397-1415).
ctgcccccaactattgtga

SEQ ID NO: 561814 - DNA, 19 bp, Mus musculus
  siRNA target sequence for Ppp6c (NM_024209.1,130-148).
cgctggatctggacaagta

SEQ ID NO: 561815 - DNA, 19 bp, Mus musculus
  siRNA target sequence for Ppp6c (NM_024209.1,200-218).
gctatgtgactatgtttgt

SEQ ID NO: 561816 - DNA, 19 bp, Mus musculus
  siRNA target sequence for Ppp6c (NM_024209.1,227-245).
cttggaagagtcgaatgtt

SEQ ID NO: 561817 - DNA, 19 bp, Mus musculus
  siRNA target sequence for Ppp6c (NM_024209.1,279-297).
gacatacacggacagtttt

SEQ ID NO: 561818 - DNA, 19 bp, Mus musculus
  siRNA target sequence for Ppp6c (NM_024209.1,281-299).
catacacggacagttttat

SEQ ID NO: 561819 - DNA, 19 bp, Mus musculus
  siRNA target sequence for Ppp6c (NM_024209.1,287-305).
cggacagttttatgatctt

SEQ ID NO: 561820 - DNA, 19 bp, Mus musculus
  siRNA target sequence for Ppp6c (NM_024209.1,337-355).
ctgacacaaactacatatt

SEQ ID NO: 561821 - DNA, 19 bp, Mus musculus
  siRNA target sequence for Ppp6c (NM_024209.1,369-387).
gtagacagaggttactata

SEQ ID NO: 561822 - DNA, 19 bp, Mus musculus
  siRNA target sequence for Ppp6c (NM_024209.1,372-390).
gacagaggttactatagtt

SEQ ID NO: 561823 - DNA, 19 bp, Mus musculus
  siRNA target sequence for Ppp6c (NM_024209.1,388-406).
gtttggagaccttcactta

SEQ ID NO: 561824 - DNA, 19 bp, Mus musculus
  siRNA target sequence for Ppp6c (NM_024209.1,428-446).
gtggcctgaccgtattaca

SEQ ID NO: 561825 - DNA, 19 bp, Mus musculus
  siRNA target sequence for Ppp6c (NM_024209.1,431-449).
gcctgaccgtattacactt

SEQ ID NO: 561826 - DNA, 19 bp, Mus musculus
  siRNA target sequence for Ppp6c (NM_024209.1,432-450).
cctgaccgtattacacttt

SEQ ID NO: 561827 - DNA, 19 bp, Mus musculus
  siRNA target sequence for Ppp6c (NM_024209.1,433-451).
ctgaccgtattacactttt

SEQ ID NO: 561828 - DNA, 19 bp, Mus musculus
  siRNA target sequence for Ppp6c (NM_024209.1,528-546).
gctaatgcctggagatact

SEQ ID NO: 561829 - DNA, 19 bp, Mus musculus
  siRNA target sequence for Ppp6c (NM_024209.1,536-554).
ctggagatactgtaccaaa

SEQ ID NO: 561830 - DNA, 19 bp, Mus musculus
  siRNA target sequence for Ppp6c (NM_024209.1,545-563).
ctgtaccaaagtttttgat

SEQ ID NO: 561831 - DNA, 19 bp, Mus musculus
  siRNA target sequence for Ppp6c (NM_024209.1,566-584).
gctcacagtagcagcttta

SEQ ID NO: 561832 - DNA, 19 bp, Mus musculus
  siRNA target sequence for Ppp6c (NM_024209.1,567-585).
ctcacagtagcagctttaa

SEQ ID NO: 561833 - DNA, 19 bp, Mus musculus
  siRNA target sequence for Ppp6c (NM_024209.1,571-589).
cagtagcagctttaataga

SEQ ID NO: 561834 - DNA, 19 bp, Mus musculus
  siRNA target sequence for Ppp6c (NM_024209.1,593-611).
gcagattttgtgtgttcat

SEQ ID NO: 561835 - DNA, 19 bp, Mus musculus
  siRNA target sequence for Ppp6c (NM_024209.1,613-631).
gcggtttatctcctgatat

SEQ ID NO: 561836 - DNA, 19 bp, Mus musculus
  siRNA target sequence for Ppp6c (NM_024209.1,615-633).
ggtttatctcctgatatca

SEQ ID NO: 561837 - DNA, 19 bp, Mus musculus
  siRNA target sequence for Ppp6c (NM_024209.1,641-659).
ggatcaaattcgaactatt

SEQ ID NO: 561838 - DNA, 19 bp, Mus musculus
  siRNA target sequence for Ppp6c (NM_024209.1,728-746).
ggacacttgggcaatcagt

SEQ ID NO: 561839 - DNA, 19 bp, Mus musculus
  siRNA target sequence for Ppp6c (NM_024209.1,782-800).
cacaaatgagtttgttcat

SEQ ID NO: 561840 - DNA, 19 bp, Mus musculus
  siRNA target sequence for Ppp6c (NM_024209.1,784-802).
caaatgagtttgttcatat

SEQ ID NO: 561841 - DNA, 19 bp, Mus musculus
  siRNA target sequence for Ppp6c (NM_024209.1,842-860).
gcacgaaggctataagttt

SEQ ID NO: 561842 - DNA, 19 bp, Mus musculus
  siRNA target sequence for Ppp6c (NM_024209.1,843-861).
cacgaaggctataagttta

SEQ ID NO: 561843 - DNA, 19 bp, Mus musculus
  siRNA target sequence for Ppp6c (NM_024209.1,846-864).
gaaggctataagtttatgt

SEQ ID NO: 561844 - DNA, 19 bp, Mus musculus
  siRNA target sequence for Ppp6c (NM_024209.1,850-868).
gctataagtttatgtttga

SEQ ID NO: 561845 - DNA, 19 bp, Mus musculus
  siRNA target sequence for Ppp6c (NM_024209.1,908-926).
ctatcgctgtggaaacatt

SEQ ID NO: 561846 - DNA, 19 bp, Mus musculus
  siRNA target sequence for Ppp6c (NM_024209.1,1015-1033).
gaaccacgacgccgtattt

SEQ ID NO: 561847 - DNA, 19 bp, Mus musculus
  siRNA target sequence for Ppp6c (NM_024209.1,1018-1036).
ccacgacgccgtatttcct

SEQ ID NO: 561848 - DNA, 19 bp, Mus musculus
  siRNA target sequence for Ppp6c (NM_024209.1,1019-1037).
cacgacgccgtatttcctt

SEQ ID NO: 561849 - DNA, 19 bp, Mus musculus
  siRNA target sequence for Sod2 (NM_013671.2,177-195).
gcgctggagccacacatta

SEQ ID NO: 561850 - DNA, 19 bp, Mus musculus
  siRNA target sequence for Sod2 (NM_013671.2,178-196).
cgctggagccacacattaa

SEQ ID NO: 561851 - DNA, 19 bp, Mus musculus
  siRNA target sequence for Sod2 (NM_013671.2,237-255).
gcctacgtgaacaatctca

SEQ ID NO: 561852 - DNA, 19 bp, Mus musculus
  siRNA target sequence for Sod2 (NM_013671.2,238-256).
cctacgtgaacaatctcaa

SEQ ID NO: 561853 - DNA, 19 bp, Mus musculus
  siRNA target sequence for Sod2 (NM_013671.2,285-303).
ctggccaagggagatgtta

SEQ ID NO: 561854 - DNA, 19 bp, Mus musculus
  siRNA target sequence for Sod2 (NM_013671.2,288-306).
gccaagggagatgttacaa

SEQ ID NO: 561855 - DNA, 19 bp, Mus musculus
  siRNA target sequence for Sod2 (NM_013671.2,338-356).
caatggtgggggacatatt

SEQ ID NO: 561856 - DNA, 19 bp, Mus musculus
  siRNA target sequence for Sod2 (NM_013671.2,425-443).
ggctatcaagcgtgacttt

SEQ ID NO: 561857 - DNA, 19 bp, Mus musculus
  siRNA target sequence for Sod2 (NM_013671.2,434-452).
gcgtgactttgggtctttt

SEQ ID NO: 561858 - DNA, 19 bp, Mus musculus
  siRNA target sequence for Sod2 (NM_013671.2,509-527).
gggctggcttggcttcaat

SEQ ID NO: 561859 - DNA, 19 bp, Mus musculus
  siRNA target sequence for Sod2 (NM_013671.2,510-528).
ggctggcttggcttcaata

SEQ ID NO: 561860 - DNA, 19 bp, Mus musculus
  siRNA target sequence for Sod2 (NM_013671.2,511-529).
gctggcttggcttcaataa

SEQ ID NO: 561861 - DNA, 19 bp, Mus musculus
  siRNA target sequence for Sod2 (NM_013671.2,531-549).
gagcaaggtcgcttacaga

SEQ ID NO: 561862 - DNA, 19 bp, Mus musculus
  siRNA target sequence for Sod2 (NM_013671.2,533-551).
gcaaggtcgcttacagatt

SEQ ID NO: 561863 - DNA, 19 bp, Mus musculus
  siRNA target sequence for Sod2 (NM_013671.2,548-566).
gattgctgcctgctctaat

SEQ ID NO: 561864 - DNA, 19 bp, Mus musculus
  siRNA target sequence for Sod2 (NM_013671.2,572-590).
cccattgcaaggaacaaca

SEQ ID NO: 561865 - DNA, 19 bp, Mus musculus
  siRNA target sequence for Sod2 (NM_013671.2,629-647).
cgcttactaccttcagtat

SEQ ID NO: 561866 - DNA, 19 bp, Mus musculus
  siRNA target sequence for Sod2 (NM_013671.2,630-648).
gcttactaccttcagtata

SEQ ID NO: 561867 - DNA, 19 bp, Mus musculus
  siRNA target sequence for Sod2 (NM_013671.2,631-649).
cttactaccttcagtataa

SEQ ID NO: 561868 - DNA, 19 bp, Mus musculus
  siRNA target sequence for Sod2 (NM_013671.2,654-672).
gtcagacctgactatctga

SEQ ID NO: 561869 - DNA, 19 bp, Mus musculus
  siRNA target sequence for Sod2 (NM_013671.2,661-679).
ctgactatctgaaagctat

SEQ ID NO: 561870 - DNA, 19 bp, Mus musculus
  siRNA target sequence for Sod2 (NM_013671.2,663-681).
gactatctgaaagctattt

SEQ ID NO: 561871 - DNA, 19 bp, Mus musculus
  siRNA target sequence for Sod2 (NM_013671.2,695-713).
ctgggagaatgttactgaa

SEQ ID NO: 561872 - DNA, 19 bp, Mus musculus
  siRNA target sequence for 1300017J02Rik (NM_027918.1,85-103).
ctcatctgcgcccttctat

SEQ ID NO: 561873 - DNA, 19 bp, Mus musculus
  siRNA target sequence for 1300017J02Rik (NM_027918.1,136-154).
cctgagaagaccatacgat

SEQ ID NO: 561874 - DNA, 19 bp, Mus musculus
  siRNA target sequence for 1300017J02Rik (NM_027918.1,175-193).
gaggccactaagtgttcta

SEQ ID NO: 561875 - DNA, 19 bp, Mus musculus
  siRNA target sequence for 1300017J02Rik (NM_027918.1,177-195).
ggccactaagtgttctagt

SEQ ID NO: 561876 - DNA, 19 bp, Mus musculus
  siRNA target sequence for 1300017J02Rik (NM_027918.1,191-209).
ctagtttccgtgacaatat

SEQ ID NO: 561877 - DNA, 19 bp, Mus musculus
  siRNA target sequence for 1300017J02Rik (NM_027918.1,194-212).
gtttccgtgacaatatgaa

SEQ ID NO: 561878 - DNA, 19 bp, Mus musculus
  siRNA target sequence for 1300017J02Rik (NM_027918.1,198-216).
ccgtgacaatatgaagaaa

SEQ ID NO: 561879 - DNA, 19 bp, Mus musculus
  siRNA target sequence for 1300017J02Rik (NM_027918.1,235-253).
ccagctgttacctgtgtaa

SEQ ID NO: 561880 - DNA, 19 bp, Mus musculus
  siRNA target sequence for 1300017J02Rik (NM_027918.1,285-303).
catctcggccaataaagta

SEQ ID NO: 561881 - DNA, 19 bp, Mus musculus
  siRNA target sequence for 1300017J02Rik (NM_027918.1,288-306).
ctcggccaataaagtagat

SEQ ID NO: 561882 - DNA, 19 bp, Mus musculus
  siRNA target sequence for 1300017J02Rik (NM_027918.1,389-407).
gatcaaaagatgatccaaa

SEQ ID NO: 561883 - DNA, 19 bp, Mus musculus
  siRNA target sequence for 1300017J02Rik (NM_027918.1,400-418).
gatccaaaaacccattatt

SEQ ID NO: 561884 - DNA, 19 bp, Mus musculus
  siRNA target sequence for 1300017J02Rik (NM_027918.1,404-422).
caaaaacccattattatgt

SEQ ID NO: 561885 - DNA, 19 bp, Mus musculus
  siRNA target sequence for 1300017J02Rik (NM_027918.1,562-580).
gcggcagccacgttcttct

SEQ ID NO: 561886 - DNA, 19 bp, Mus musculus
  siRNA target sequence for 1300017J02Rik (NM_027918.1,599-617).
gtgcggatggaaagatgtt

SEQ ID NO: 561887 - DNA, 19 bp, Mus musculus
  siRNA target sequence for 1300017J02Rik (NM_027918.1,698-716).
ggggagccttaaaatgtct

SEQ ID NO: 561888 - DNA, 19 bp, Mus musculus
  siRNA target sequence for 1300017J02Rik (NM_027918.1,935-953).
gagtggcccaggaacattt

SEQ ID NO: 561889 - DNA, 19 bp, Mus musculus
  siRNA target sequence for 1300017J02Rik (NM_027918.1,1005-1023).
ggacctgctgtttactgat

SEQ ID NO: 561890 - DNA, 19 bp, Mus musculus
  siRNA target sequence for 1300017J02Rik (NM_027918.1,1043-1061).
gggtccctcgaaagataga

SEQ ID NO: 561891 - DNA, 19 bp, Mus musculus
  siRNA target sequence for 1300017J02Rik (NM_027918.1,1045-1063).
gtccctcgaaagatagaca

SEQ ID NO: 561892 - DNA, 19 bp, Mus musculus
  siRNA target sequence for 1300017J02Rik (NM_027918.1,1069-1087).
ctgtacttgggatatgagt

SEQ ID NO: 561893 - DNA, 19 bp, Mus musculus
  siRNA target sequence for 1300017J02Rik (NM_027918.1,1071-1089).
gtacttgggatatgagttt

SEQ ID NO: 561894 - DNA, 19 bp, Mus musculus
  siRNA target sequence for 1300017J02Rik (NM_027918.1,1074-1092).
cttgggatatgagtttctt

SEQ ID NO: 561895 - DNA, 19 bp, Mus musculus
  siRNA target sequence for 1300017J02Rik (NM_027918.1,1096-1114).
gcctttcggaatcttaaaa

SEQ ID NO: 561896 - DNA, 19 bp, Mus musculus
  siRNA target sequence for 1300017J02Rik (NM_027918.1,1098-1116).
ctttcggaatcttaaaaga

SEQ ID NO: 561897 - DNA, 19 bp, Mus musculus
  siRNA target sequence for 1300017J02Rik (NM_027918.1,1245-1263).
catcgctgccaccatgaaa

SEQ ID NO: 561898 - DNA, 19 bp, Mus musculus
  siRNA target sequence for 1300017J02Rik (NM_027918.1,1339-1357).
gcagagaactacttgtcta

SEQ ID NO: 561899 - DNA, 19 bp, Mus musculus
  siRNA target sequence for 1300017J02Rik (NM_027918.1,1369-1387).
gggaggctggggtctaagt

SEQ ID NO: 561900 - DNA, 19 bp, Mus musculus
  siRNA target sequence for 1300017J02Rik (NM_027918.1,1371-1389).
gaggctggggtctaagtgt

SEQ ID NO: 561901 - DNA, 19 bp, Mus musculus
  siRNA target sequence for 1300017J02Rik (NM_027918.1,1395-1413).
cgcacctttggaaggttat

SEQ ID NO: 561902 - DNA, 19 bp, Mus musculus
  siRNA target sequence for 1300017J02Rik (NM_027918.1,1542-1560).
ccaaactgggtcttgcaaa

SEQ ID NO: 561903 - DNA, 19 bp, Mus musculus
  siRNA target sequence for 1300017J02Rik (NM_027918.1,1737-1755).
catgaagcaccctacagtt

SEQ ID NO: 561904 - DNA, 19 bp, Mus musculus
  siRNA target sequence for 1300017J02Rik (NM_027918.1,1740-1758).
gaagcaccctacagttcta

SEQ ID NO: 561905 - DNA, 19 bp, Mus musculus
  siRNA target sequence for 1300017J02Rik (NM_027918.1,1799-1817).
gtctgaaacacgaagactt

SEQ ID NO: 561906 - DNA, 19 bp, Mus musculus
  siRNA target sequence for 1300017J02Rik (NM_027918.1,1922-1940).
ctgactttgttcgaagaat

SEQ ID NO: 561907 - DNA, 19 bp, Mus musculus
  siRNA target sequence for 1300017J02Rik (NM_027918.1,2014-2032).
gctaaggacctgcttttca

SEQ ID NO: 561908 - DNA, 19 bp, Mus musculus
  siRNA target sequence for 1300017J02Rik (NM_027918.1,2088-2106).
cctaggaccacagtatctt

SEQ ID NO: 561909 - DNA, 19 bp, Mus musculus
  siRNA target sequence for 4930447C24Rik (NM_026286.1,130-148).
gtccctgccccgtgtgtta

SEQ ID NO: 561910 - DNA, 19 bp, Mus musculus
  siRNA target sequence for 4930447C24Rik (NM_026286.1,138-156).
cccgtgtgttacacagatt

SEQ ID NO: 561911 - DNA, 19 bp, Mus musculus
  siRNA target sequence for 4930447C24Rik (NM_026286.1,175-193).
ggcctccaggtatccttta

SEQ ID NO: 561912 - DNA, 19 bp, Mus musculus
  siRNA target sequence for 4930447C24Rik (NM_026286.1,264-282).
ccagggtccgccagaactt

SEQ ID NO: 561913 - DNA, 19 bp, Mus musculus
  siRNA target sequence for 4930447C24Rik (NM_026286.1,265-283).
cagggtccgccagaacttt

SEQ ID NO: 561914 - DNA, 19 bp, Mus musculus
  siRNA target sequence for 4930447C24Rik (NM_026286.1,267-285).
gggtccgccagaactttca

SEQ ID NO: 561915 - DNA, 19 bp, Mus musculus
  siRNA target sequence for 4930447C24Rik (NM_026286.1,380-398).
gatgtggccttgtataact

SEQ ID NO: 561916 - DNA, 19 bp, Mus musculus
  siRNA target sequence for 4930447C24Rik (NM_026286.1,383-401).
gtggccttgtataacttct

SEQ ID NO: 561917 - DNA, 19 bp, Mus musculus
  siRNA target sequence for 4930447C24Rik (NM_026286.1,586-604).
gctgctggacttacatact

SEQ ID NO: 561918 - DNA, 19 bp, Mus musculus
  siRNA target sequence for 4930447C24Rik (NM_026286.1,599-617).
catactctggcctcagaaa

SEQ ID NO: 561919 - DNA, 19 bp, Mus musculus
  siRNA target sequence for 4930447C24Rik (NM_026286.1,698-716).
cacgtgcacaacttagtca

SEQ ID NO: 561920 - DNA, 19 bp, Mus musculus
  siRNA target sequence for 4930447C24Rik (NM_026286.1,736-754).
gggcttagcggaatatctt

SEQ ID NO: 561921 - DNA, 19 bp, Mus musculus
  siRNA target sequence for 4930447C24Rik (NM_026286.1,737-755).
ggcttagcggaatatcttt

SEQ ID NO: 561922 - DNA, 19 bp, Mus musculus
  siRNA target sequence for Fth (NM_010239.1,187-205).
cgcaagtgcgccagaacta

SEQ ID NO: 561923 - DNA, 19 bp, Mus musculus
  siRNA target sequence for Fth (NM_010239.1,239-257).
gatcaacctggagttgtat

SEQ ID NO: 561924 - DNA, 19 bp, Mus musculus
  siRNA target sequence for Fth (NM_010239.1,262-280).
cctacgtctatctgtctat

SEQ ID NO: 561925 - DNA, 19 bp, Mus musculus
  siRNA target sequence for Fth (NM_010239.1,275-293).
gtctatgtcttgttatttt

SEQ ID NO: 561926 - DNA, 19 bp, Mus musculus
  siRNA target sequence for Fth (NM_010239.1,358-376).
gggagcatgccgagaaact

SEQ ID NO: 561927 - DNA, 19 bp, Mus musculus
  siRNA target sequence for Fth (NM_010239.1,406-424).
gaatcttcctgcaggatat

SEQ ID NO: 561928 - DNA, 19 bp, Mus musculus
  siRNA target sequence for Ltf (NM_008522.2,187-205).
cgctcagttgtgtcaagaa

SEQ ID NO: 561929 - DNA, 19 bp, Mus musculus
  siRNA target sequence for Ltf (NM_008522.2,189-207).
ctcagttgtgtcaagaaat

SEQ ID NO: 561930 - DNA, 19 bp, Mus musculus
  siRNA target sequence for Ltf (NM_008522.2,228-246).
caggccattgtgacaaaca

SEQ ID NO: 561931 - DNA, 19 bp, Mus musculus
  siRNA target sequence for Ltf (NM_008522.2,230-248).
ggccattgtgacaaacaga

SEQ ID NO: 561932 - DNA, 19 bp, Mus musculus
  siRNA target sequence for Ltf (NM_008522.2,264-282).
cttgatggtggcactatgt

SEQ ID NO: 561933 - DNA, 19 bp, Mus musculus
  siRNA target sequence for Ltf (NM_008522.2,316-334).
ctgtggcagctgaagtcta

SEQ ID NO: 561934 - DNA, 19 bp, Mus musculus
  siRNA target sequence for Ltf (NM_008522.2,370-388).
cggtagcagtcgtgaagaa

SEQ ID NO: 561935 - DNA, 19 bp, Mus musculus
  siRNA target sequence for Ltf (NM_008522.2,372-390).
gtagcagtcgtgaagaaca

SEQ ID NO: 561936 - DNA, 19 bp, Mus musculus
  siRNA target sequence for Ltf (NM_008522.2,391-409).
gcagtaactttcatctgaa

SEQ ID NO: 561937 - DNA, 19 bp, Mus musculus
  siRNA target sequence for Ltf (NM_008522.2,483-501).
cttcgtccatacctgaatt

SEQ ID NO: 561938 - DNA, 19 bp, Mus musculus
  siRNA target sequence for Ltf (NM_008522.2,486-504).
cgtccatacctgaattgga

SEQ ID NO: 561939 - DNA, 19 bp, Mus musculus
  siRNA target sequence for Ltf (NM_008522.2,487-505).
gtccatacctgaattggaa

SEQ ID NO: 561940 - DNA, 19 bp, Mus musculus
  siRNA target sequence for Ltf (NM_008522.2,531-549).
gcggtatccaagttcttct

SEQ ID NO: 561941 - DNA, 19 bp, Mus musculus
  siRNA target sequence for Ltf (NM_008522.2,612-630).
gggacaggagccaacaaat

SEQ ID NO: 561942 - DNA, 19 bp, Mus musculus
  siRNA target sequence for Ltf (NM_008522.2,641-659).
ccccgaggagccatactca

SEQ ID NO: 561943 - DNA, 19 bp, Mus musculus
  siRNA target sequence for Ltf (NM_008522.2,650-668).
gccatactcaggttatgct

SEQ ID NO: 561944 - DNA, 19 bp, Mus musculus
  siRNA target sequence for Ltf (NM_008522.2,716-734).
cagaggaagcacggtattt

SEQ ID NO: 561945 - DNA, 19 bp, Mus musculus
  siRNA target sequence for Ltf (NM_008522.2,754-772).
ccgaaagggaccagtacaa

SEQ ID NO: 561946 - DNA, 19 bp, Mus musculus
  siRNA target sequence for Ltf (NM_008522.2,796-814).
ggaagccggtgacagaata

SEQ ID NO: 561947 - DNA, 19 bp, Mus musculus
  siRNA target sequence for Ltf (NM_008522.2,830-848).
ggcccaagtcccttcacat

SEQ ID NO: 561948 - DNA, 19 bp, Mus musculus
  siRNA target sequence for Ltf (NM_008522.2,859-877).
cccgaagcacgaatgacaa

SEQ ID NO: 561949 - DNA, 19 bp, Mus musculus
  siRNA target sequence for Ltf (NM_008522.2,860-878).
ccgaagcacgaatgacaaa

SEQ ID NO: 561950 - DNA, 19 bp, Mus musculus
  siRNA target sequence for Ltf (NM_008522.2,862-880).
gaagcacgaatgacaaaga

SEQ ID NO: 561951 - DNA, 19 bp, Mus musculus
  siRNA target sequence for Ltf (NM_008522.2,865-883).
gcacgaatgacaaagaaga

SEQ ID NO: 561952 - DNA, 19 bp, Mus musculus
  siRNA target sequence for Ltf (NM_008522.2,905-923).
ccagtcacaggagaagttt

SEQ ID NO: 561953 - DNA, 19 bp, Mus musculus
  siRNA target sequence for Ltf (NM_008522.2,1228-1246).
gcattgtcgcaatcatgaa

SEQ ID NO: 561954 - DNA, 19 bp, Mus musculus
  siRNA target sequence for Ltf (NM_008522.2,1267-1285).
gcctggatggaggctatat

SEQ ID NO: 561955 - DNA, 19 bp, Mus musculus
  siRNA target sequence for Ltf (NM_008522.2,1269-1287).
ctggatggaggctatatct

SEQ ID NO: 561956 - DNA, 19 bp, Mus musculus
  siRNA target sequence for Ltf (NM_008522.2,1272-1290).
gatggaggctatatctaca

SEQ ID NO: 561957 - DNA, 19 bp, Mus musculus
  siRNA target sequence for Ltf (NM_008522.2,1294-1312).
cgggcaagtgcggtttagt

SEQ ID NO: 561958 - DNA, 19 bp, Mus musculus
  siRNA target sequence for Ltf (NM_008522.2,1295-1313).
gggcaagtgcggtttagtt

SEQ ID NO: 561959 - DNA, 19 bp, Mus musculus
  siRNA target sequence for Ltf (NM_008522.2,1323-1341).
gcagagaaccagaaatcct

SEQ ID NO: 561960 - DNA, 19 bp, Mus musculus
  siRNA target sequence for Ltf (NM_008522.2,1523-1541).
cagatcctgcaaatttaat

SEQ ID NO: 561961 - DNA, 19 bp, Mus musculus
  siRNA target sequence for Ltf (NM_008522.2,1569-1587).
ggtgctgaccccaaatcca

SEQ ID NO: 561962 - DNA, 19 bp, Mus musculus
  siRNA target sequence for Ltf (NM_008522.2,1662-1680).
ggctacactggggctttaa

SEQ ID NO: 561963 - DNA, 19 bp, Mus musculus
  siRNA target sequence for Ltf (NM_008522.2,1702-1720).
gaaatgttgcatttttgaa

SEQ ID NO: 561964 - DNA, 19 bp, Mus musculus
  siRNA target sequence for Ltf (NM_008522.2,1727-1745).
cactgtcttgcagaatact

SEQ ID NO: 561965 - DNA, 19 bp, Mus musculus
  siRNA target sequence for Ltf (NM_008522.2,1768-1786).
gggctaggaacttaaagct

SEQ ID NO: 561966 - DNA, 19 bp, Mus musculus
  siRNA target sequence for Ltf (NM_008522.2,1980-1998).
ctgttccagtctaaaacca

SEQ ID NO: 561967 - DNA, 19 bp, Mus musculus
  siRNA target sequence for Ltf (NM_008522.2,1997-2015).
caaaaaccttctgttcaat

SEQ ID NO: 561968 - DNA, 19 bp, Mus musculus
  siRNA target sequence for Ltf (NM_008522.2,2132-2150).
ggaagcctgcgcttttctt

SEQ ID NO: 561969 - DNA, 19 bp, Mus musculus
  siRNA target sequence for Mfi2 (NM_013900.1,123-141).
gctcctgagcgtgactttt

SEQ ID NO: 561970 - DNA, 19 bp, Mus musculus
  siRNA target sequence for Mfi2 (NM_013900.1,124-142).
ctcctgagcgtgacttttt

SEQ ID NO: 561971 - DNA, 19 bp, Mus musculus
  siRNA target sequence for Mfi2 (NM_013900.1,312-330).
gctcatcaaggaacaaaaa

SEQ ID NO: 561972 - DNA, 19 bp, Mus musculus
  siRNA target sequence for Mfi2 (NM_013900.1,395-413).
cagtggtgggggaagtcta

SEQ ID NO: 561973 - DNA, 19 bp, Mus musculus
  siRNA target sequence for Mfi2 (NM_013900.1,423-441).
cattgggacttcctattat

SEQ ID NO: 561974 - DNA, 19 bp, Mus musculus
  siRNA target sequence for Mfi2 (NM_013900.1,461-479).
ggaattccaatgttaccat

SEQ ID NO: 561975 - DNA, 19 bp, Mus musculus
  siRNA target sequence for Mfi2 (NM_013900.1,606-624).
cgttggtgattattttgga

SEQ ID NO: 561976 - DNA, 19 bp, Mus musculus
  siRNA target sequence for Mfi2 (NM_013900.1,722-740).
gtcccctagagagatacta

SEQ ID NO: 561977 - DNA, 19 bp, Mus musculus
  siRNA target sequence for Mfi2 (NM_013900.1,1066-1084).
gcctacagccagaagaact

SEQ ID NO: 561978 - DNA, 19 bp, Mus musculus
  siRNA target sequence for Mfi2 (NM_013900.1,1667-1685).
gctgcgtgcctgtcaacaa

SEQ ID NO: 561979 - DNA, 19 bp, Mus musculus
  siRNA target sequence for Mfi2 (NM_013900.1,1964-1982).
cttgcaacctggcacaaat

SEQ ID NO: 561980 - DNA, 19 bp, Mus musculus
  siRNA target sequence for Mfi2 (NM_013900.1,2016-2034).
caacatcttcactgtgtat

SEQ ID NO: 561981 - DNA, 19 bp, Mus musculus
  siRNA target sequence for Mfi2 (NM_013900.1,2086-2104).
ggtttccaaatgtttgact

SEQ ID NO: 561982 - DNA, 19 bp, Mus musculus
  siRNA target sequence for Mfi2 (NM_013900.1,2101-2119).
gactcctccaaatatcaca

SEQ ID NO: 561983 - DNA, 19 bp, Mus musculus
  siRNA target sequence for Mfi2 (NM_013900.1,2161-2179).
ccagtccgggagaaaacca

SEQ ID NO: 561984 - DNA, 19 bp, Mus musculus
  siRNA target sequence for Rshl1 (NM_031255.1,116-134).
gggcacggagtcaagagta

SEQ ID NO: 561985 - DNA, 19 bp, Mus musculus
  siRNA target sequence for Rshl1 (NM_031255.1,264-282).
cctggtcccagatgttcaa

SEQ ID NO: 561986 - DNA, 19 bp, Mus musculus
  siRNA target sequence for Rshl1 (NM_031255.1,358-376).
cagggttacctggatgata

SEQ ID NO: 561987 - DNA, 19 bp, Mus musculus
  siRNA target sequence for Rshl1 (NM_031255.1,462-480).
gggccagctcaacttgtat

SEQ ID NO: 561988 - DNA, 19 bp, Mus musculus
  siRNA target sequence for Rshl1 (NM_031255.1,466-484).
cagctcaacttgtatccaa

SEQ ID NO: 561989 - DNA, 19 bp, Mus musculus
  siRNA target sequence for Rshl1 (NM_031255.1,481-499).
ccaagagaggatgagatat

SEQ ID NO: 561990 - DNA, 19 bp, Mus musculus
  siRNA target sequence for Rshl1 (NM_031255.1,570-588).
gggcttcatgcccattgtt

SEQ ID NO: 561991 - DNA, 19 bp, Mus musculus
  siRNA target sequence for Rshl1 (NM_031255.1,611-629).
ctcgtgagctggcaataca

SEQ ID NO: 561992 - DNA, 19 bp, Mus musculus
  siRNA target sequence for Rshl1 (NM_031255.1,614-632).
gtgagctggcaatacagaa

SEQ ID NO: 561993 - DNA, 19 bp, Mus musculus
  siRNA target sequence for Rshl1 (NM_031255.1,837-855).
cgagatggccgaaaagcaa

SEQ ID NO: 561994 - DNA, 19 bp, Mus musculus
  siRNA target sequence for Rshl1 (NM_031255.1,838-856).
gagatggccgaaaagcaaa

SEQ ID NO: 561995 - DNA, 19 bp, Mus musculus
  siRNA target sequence for Rshl1 (NM_031255.1,920-938).
gcccggtgcccaacatcat

SEQ ID NO: 561996 - DNA, 19 bp, Mus musculus
  siRNA target sequence for Rshl1 (NM_031255.1,1283-1301).
gcagtggcaccaacaaata

SEQ ID NO: 561997 - DNA, 19 bp, Mus musculus
  siRNA target sequence for Rshl1 (NM_031255.1,1286-1304).
gtggcaccaacaaatacct

SEQ ID NO: 561998 - DNA, 19 bp, Mus musculus
  siRNA target sequence for Rshl1 (NM_031255.1,1381-1399).
cgcaagatcaaaaagttct

SEQ ID NO: 561999 - DNA, 19 bp, Mus musculus
  siRNA target sequence for Rshl1 (NM_031255.1,1693-1711).
gtgaacccactgcagaaaa

SEQ ID NO: 562000 - DNA, 19 bp, Mus musculus
  siRNA target sequence for Rshl1 (NM_031255.1,2012-2030).
ctctgattcagcaagagta

SEQ ID NO: 562001 - DNA, 19 bp, Mus musculus
  siRNA target sequence for Trf (NM_133977.1,134-152).
gacaaaacggtcaaatggt

SEQ ID NO: 562002 - DNA, 19 bp, Mus musculus
  siRNA target sequence for Trf (NM_133977.1,277-295).
ggccatttctgcaagtgaa

SEQ ID NO: 562003 - DNA, 19 bp, Mus musculus
  siRNA target sequence for Trf (NM_133977.1,458-476).
cagctcgaaggcaagaagt

SEQ ID NO: 562004 - DNA, 19 bp, Mus musculus
  siRNA target sequence for Trf (NM_133977.1,687-705).
gctacgtaggcgcattcaa

SEQ ID NO: 562005 - DNA, 19 bp, Mus musculus
  siRNA target sequence for Trf (NM_133977.1,697-715).
cgcattcaagtgtctgaaa

SEQ ID NO: 562006 - DNA, 19 bp, Mus musculus
  siRNA target sequence for Trf (NM_133977.1,740-758).
gtcaagcacacaaccatat

SEQ ID NO: 562007 - DNA, 19 bp, Mus musculus
  siRNA target sequence for Trf (NM_133977.1,800-818).
ctgctctgccttgacaata

SEQ ID NO: 562008 - DNA, 19 bp, Mus musculus
  siRNA target sequence for Trf (NM_133977.1,875-893).
gctgttgtggctcgaaaaa

SEQ ID NO: 562009 - DNA, 19 bp, Mus musculus
  siRNA target sequence for Trf (NM_133977.1,878-896).
gttgtggctcgaaaaaaca

SEQ ID NO: 562010 - DNA, 19 bp, Mus musculus
  siRNA target sequence for Trf (NM_133977.1,913-931).
gatctgggagattctcaaa

SEQ ID NO: 562011 - DNA, 19 bp, Mus musculus
  siRNA target sequence for Trf (NM_133977.1,1001-1019).
gacctgctgtttaaagatt

SEQ ID NO: 562012 - DNA, 19 bp, Mus musculus
  siRNA target sequence for Trf (NM_133977.1,1070-1088).
cttggccataactatgtca

SEQ ID NO: 562013 - DNA, 19 bp, Mus musculus
  siRNA target sequence for Trf (NM_133977.1,1190-1208).
gacgagtggagcatcatca

SEQ ID NO: 562014 - DNA, 19 bp, Mus musculus
  siRNA target sequence for Trf (NM_133977.1,1204-1222).
catcagtgagggaaagata

SEQ ID NO: 562015 - DNA, 19 bp, Mus musculus
  siRNA target sequence for Trf (NM_133977.1,1249-1267).
ggactgcattgaaaagatt

SEQ ID NO: 562016 - DNA, 19 bp, Mus musculus
  siRNA target sequence for Trf (NM_133977.1,1282-1300).
ggacgccatgactttggat

SEQ ID NO: 562017 - DNA, 19 bp, Mus musculus
  siRNA target sequence for Trf (NM_133977.1,1354-1372).
gtactacgagagctctaat

SEQ ID NO: 562018 - DNA, 19 bp, Mus musculus
  siRNA target sequence for Trf (NM_133977.1,1357-1375).
ctacgagagctctaattgt

SEQ ID NO: 562019 - DNA, 19 bp, Mus musculus
  siRNA target sequence for Trf (NM_133977.1,1545-1563).
ggatcaaccactgcaaatt

SEQ ID NO: 562020 - DNA, 19 bp, Mus musculus
  siRNA target sequence for Trf (NM_133977.1,1553-1571).
cactgcaaattcgatgaat

SEQ ID NO: 562021 - DNA, 19 bp, Mus musculus
  siRNA target sequence for Trf (NM_133977.1,1555-1573).
ctgcaaattcgatgaattt

SEQ ID NO: 562022 - DNA, 19 bp, Mus musculus
  siRNA target sequence for Trf (NM_133977.1,1587-1605).
gcgctcccgggtatgagaa

SEQ ID NO: 562023 - DNA, 19 bp, Mus musculus
  siRNA target sequence for Trf (NM_133977.1,1592-1610).
cccgggtatgagaagaatt

SEQ ID NO: 562024 - DNA, 19 bp, Mus musculus
  siRNA target sequence for Trf (NM_133977.1,1627-1645).
gtgtattggcccactcaaa

SEQ ID NO: 562025 - DNA, 19 bp, Mus musculus
  siRNA target sequence for Trf (NM_133977.1,1831-1849).
caggaagcctgtgaaagat

SEQ ID NO: 562026 - DNA, 19 bp, Mus musculus
  siRNA target sequence for Trf (NM_133977.1,1889-1907).
gtggtctcacgaaaagaga

SEQ ID NO: 562027 - DNA, 19 bp, Mus musculus
  siRNA target sequence for Trf (NM_133977.1,1933-1951).
gactagccaggagacttta

SEQ ID NO: 562028 - DNA, 19 bp, Mus musculus
  siRNA target sequence for Trf (NM_133977.1,1962-1980).
gtgactgcaccggcaattt

SEQ ID NO: 562029 - DNA, 19 bp, Mus musculus
  siRNA target sequence for Trf (NM_133977.1,1968-1986).
gcaccggcaatttctgttt

SEQ ID NO: 562030 - DNA, 19 bp, Mus musculus
  siRNA target sequence for Trf (NM_133977.1,1971-1989).
ccggcaatttctgtttgtt

SEQ ID NO: 562031 - DNA, 19 bp, Mus musculus
  siRNA target sequence for Trf (NM_133977.1,1974-1992).
gcaatttctgtttgttcaa

SEQ ID NO: 562032 - DNA, 19 bp, Mus musculus
  siRNA target sequence for Trf (NM_133977.1,2024-2042).
gacaccaaatgtttcgtta

SEQ ID NO: 562033 - DNA, 19 bp, Mus musculus
  siRNA target sequence for Trf (NM_133977.1,2026-2044).
caccaaatgtttcgttaaa

SEQ ID NO: 562034 - DNA, 19 bp, Mus musculus
  siRNA target sequence for Trf (NM_133977.1,2028-2046).
ccaaatgtttcgttaaact

SEQ ID NO: 562035 - DNA, 19 bp, Mus musculus
  siRNA target sequence for Trf (NM_133977.1,2029-2047).
caaatgtttcgttaaactt

SEQ ID NO: 562036 - DNA, 19 bp, Mus musculus
  siRNA target sequence for Trf (NM_133977.1,2053-2071).
gggtaccacacctgaaaaa

SEQ ID NO: 562037 - DNA, 19 bp, Mus musculus
  siRNA target sequence for Trf (NM_133977.1,2054-2072).
ggtaccacacctgaaaaat

SEQ ID NO: 562038 - DNA, 19 bp, Mus musculus
  siRNA target sequence for Trf (NM_133977.1,2055-2073).
gtaccacacctgaaaaata

SEQ ID NO: 562039 - DNA, 19 bp, Mus musculus
  siRNA target sequence for Trf (NM_133977.1,2078-2096).
ggagcggagtacatgcaat

SEQ ID NO: 562040 - DNA, 19 bp, Mus musculus
  siRNA target sequence for Trf (NM_133977.1,2093-2111).
caatctgtcggtaacatga

SEQ ID NO: 562041 - DNA, 19 bp, Mus musculus
  siRNA target sequence for Adhfe1 (NM_175236.2,77-95).
ccagtgcccaactcattct

SEQ ID NO: 562042 - DNA, 19 bp, Mus musculus
  siRNA target sequence for Adhfe1 (NM_175236.2,80-98).
gtgcccaactcattctcat

SEQ ID NO: 562043 - DNA, 19 bp, Mus musculus
  siRNA target sequence for Adhfe1 (NM_175236.2,124-142).
cgggaaaaacagcagatta

SEQ ID NO: 562044 - DNA, 19 bp, Mus musculus
  siRNA target sequence for Adhfe1 (NM_175236.2,135-153).
gcagattacgcctttgaga

SEQ ID NO: 562045 - DNA, 19 bp, Mus musculus
  siRNA target sequence for Adhfe1 (NM_175236.2,150-168).
gagatggctgtctcaaata

SEQ ID NO: 562046 - DNA, 19 bp, Mus musculus
  siRNA target sequence for Adhfe1 (NM_175236.2,155-173).
ggctgtctcaaatattaga

SEQ ID NO: 562047 - DNA, 19 bp, Mus musculus
  siRNA target sequence for Adhfe1 (NM_175236.2,156-174).
gctgtctcaaatattagat

SEQ ID NO: 562048 - DNA, 19 bp, Mus musculus
  siRNA target sequence for Adhfe1 (NM_175236.2,157-175).
ctgtctcaaatattagata

SEQ ID NO: 562049 - DNA, 19 bp, Mus musculus
  siRNA target sequence for Adhfe1 (NM_175236.2,201-219).
ggcatggatctacagaata

SEQ ID NO: 562050 - DNA, 19 bp, Mus musculus
  siRNA target sequence for Adhfe1 (NM_175236.2,270-288).
cctcctgtacaaatagtta

SEQ ID NO: 562051 - DNA, 19 bp, Mus musculus
  siRNA target sequence for Adhfe1 (NM_175236.2,274-292).
ctgtacaaatagttatgga

SEQ ID NO: 562052 - DNA, 19 bp, Mus musculus
  siRNA target sequence for Adhfe1 (NM_175236.2,276-294).
gtacaaatagttatggatt

SEQ ID NO: 562053 - DNA, 19 bp, Mus musculus
  siRNA target sequence for Adhfe1 (NM_175236.2,290-308).
ggattccctatcgaagaat

SEQ ID NO: 562054 - DNA, 19 bp, Mus musculus
  siRNA target sequence for Adhfe1 (NM_175236.2,321-339).
caggtttatgatgatgtaa

SEQ ID NO: 562055 - DNA, 19 bp, Mus musculus
  siRNA target sequence for Adhfe1 (NM_175236.2,365-383).
catggatgcaattgaattt

SEQ ID NO: 562056 - DNA, 19 bp, Mus musculus
  siRNA target sequence for Adhfe1 (NM_175236.2,450-468).
gccgccaatctgtatgcat

SEQ ID NO: 562057 - DNA, 19 bp, Mus musculus
  siRNA target sequence for Adhfe1 (NM_175236.2,485-503).
gttccttgattatgtcaat

SEQ ID NO: 562058 - DNA, 19 bp, Mus musculus
  siRNA target sequence for Adhfe1 (NM_175236.2,536-554).
gcctcttaaacctctgatt

SEQ ID NO: 562059 - DNA, 19 bp, Mus musculus
  siRNA target sequence for Adhfe1 (NM_175236.2,589-607).
ctaccggggttgccatttt

SEQ ID NO: 562060 - DNA, 19 bp, Mus musculus
  siRNA target sequence for Adhfe1 (NM_175236.2,592-610).
ccggggttgccatttttga

SEQ ID NO: 562061 - DNA, 19 bp, Mus musculus
  siRNA target sequence for Adhfe1 (NM_175236.2,595-613).
gggttgccatttttgacta

SEQ ID NO: 562062 - DNA, 19 bp, Mus musculus
  siRNA target sequence for Adhfe1 (NM_175236.2,611-629).
ctatgagcatttgaaagta

SEQ ID NO: 562063 - DNA, 19 bp, Mus musculus
  siRNA target sequence for Adhfe1 (NM_175236.2,869-887).
gcagattgttgccaaatat

SEQ ID NO: 562064 - DNA, 19 bp, Mus musculus
  siRNA target sequence for Adhfe1 (NM_175236.2,962-980).
cattggcttcggaaatgct

SEQ ID NO: 562065 - DNA, 19 bp, Mus musculus
  siRNA target sequence for Adhfe1 (NM_175236.2,971-989).
cggaaatgctggtgttcat

SEQ ID NO: 562066 - DNA, 19 bp, Mus musculus
  siRNA target sequence for Adhfe1 (NM_175236.2,999-1017).
ggcatgtcttacccaattt

SEQ ID NO: 562067 - DNA, 19 bp, Mus musculus
  siRNA target sequence for Adhfe1 (NM_175236.2,1001-1019).
catgtcttacccaatttca

SEQ ID NO: 562068 - DNA, 19 bp, Mus musculus
  siRNA target sequence for Adhfe1 (NM_175236.2,1012-1030).
caatttcaggtttagtgaa

SEQ ID NO: 562069 - DNA, 19 bp, Mus musculus
  siRNA target sequence for Adhfe1 (NM_175236.2,1018-1036).
caggtttagtgaagacata

SEQ ID NO: 562070 - DNA, 19 bp, Mus musculus
  siRNA target sequence for Adhfe1 (NM_175236.2,1148-1166).
cctggagacggcaggaata

SEQ ID NO: 562071 - DNA, 19 bp, Mus musculus
  siRNA target sequence for Adhfe1 (NM_175236.2,1149-1167).
ctggagacggcaggaatat

SEQ ID NO: 562072 - DNA, 19 bp, Mus musculus
  siRNA target sequence for Adhfe1 (NM_175236.2,1151-1169).
ggagacggcaggaatatta

SEQ ID NO: 562073 - DNA, 19 bp, Mus musculus
  siRNA target sequence for Adhfe1 (NM_175236.2,1154-1172).
gacggcaggaatattagga

SEQ ID NO: 562074 - DNA, 19 bp, Mus musculus
  siRNA target sequence for Adhfe1 (NM_175236.2,1218-1236).
gcagatgccctccgaaaat

SEQ ID NO: 562075 - DNA, 19 bp, Mus musculus
  siRNA target sequence for Adhfe1 (NM_175236.2,1219-1237).
cagatgccctccgaaaatt

SEQ ID NO: 562076 - DNA, 19 bp, Mus musculus
  siRNA target sequence for Adhfe1 (NM_175236.2,1225-1243).
ccctccgaaaattcctatt

SEQ ID NO: 562077 - DNA, 19 bp, Mus musculus
  siRNA target sequence for Adhfe1 (NM_175236.2,1226-1244).
cctccgaaaattcctattt

SEQ ID NO: 562078 - DNA, 19 bp, Mus musculus
  siRNA target sequence for Adhfe1 (NM_175236.2,1389-1407).
gaagcatccatgaaactgt

SEQ ID NO: 562079 - DNA, 19 bp, Mus musculus
  siRNA target sequence for Alox12 (NM_007440.2,445-463).
gaagtatcgagaaaaggaa

SEQ ID NO: 562080 - DNA, 19 bp, Mus musculus
  siRNA target sequence for Alox12 (NM_007440.2,522-540).
caatagcagcggactgtaa

SEQ ID NO: 562081 - DNA, 19 bp, Mus musculus
  siRNA target sequence for Alox12 (NM_007440.2,541-559).
ggatgaccttcctccaaat

SEQ ID NO: 562082 - DNA, 19 bp, Mus musculus
  siRNA target sequence for Alox12 (NM_007440.2,542-560).
gatgaccttcctccaaata

SEQ ID NO: 562083 - DNA, 19 bp, Mus musculus
  siRNA target sequence for Alox12 (NM_007440.2,548-566).
cttcctccaaatatgagat

SEQ ID NO: 562084 - DNA, 19 bp, Mus musculus
  siRNA target sequence for Alox12 (NM_007440.2,625-643).
gggcctcaaacgtgtttat

SEQ ID NO: 562085 - DNA, 19 bp, Mus musculus
  siRNA target sequence for Alox12 (NM_007440.2,626-644).
ggcctcaaacgtgtttata

SEQ ID NO: 562086 - DNA, 19 bp, Mus musculus
  siRNA target sequence for Alox12 (NM_007440.2,660-678).
ggaaccatctggaagactt

SEQ ID NO: 562087 - DNA, 19 bp, Mus musculus
  siRNA target sequence for Alox12 (NM_007440.2,773-791).
ggcgccaaccccatgcttt

SEQ ID NO: 562088 - DNA, 19 bp, Mus musculus
  siRNA target sequence for Alox12 (NM_007440.2,774-792).
gcgccaaccccatgctttt

SEQ ID NO: 562089 - DNA, 19 bp, Mus musculus
  siRNA target sequence for Alox12 (NM_007440.2,776-794).
gccaaccccatgcttttga

SEQ ID NO: 562090 - DNA, 19 bp, Mus musculus
  siRNA target sequence for Alox12 (NM_007440.2,877-895).
gaatggatccctgtttgaa

SEQ ID NO: 562091 - DNA, 19 bp, Mus musculus
  siRNA target sequence for Alox12 (NM_007440.2,913-931).
ggatggaattccagctaat

SEQ ID NO: 562092 - DNA, 19 bp, Mus musculus
  siRNA target sequence for Alox12 (NM_007440.2,917-935).
ggaattccagctaatgtga

SEQ ID NO: 562093 - DNA, 19 bp, Mus musculus
  siRNA target sequence for Alox12 (NM_007440.2,918-936).
gaattccagctaatgtgat

SEQ ID NO: 562094 - DNA, 19 bp, Mus musculus
  siRNA target sequence for Alox12 (NM_007440.2,1102-1120).
gatctgggtccgaaattca

SEQ ID NO: 562095 - DNA, 19 bp, Mus musculus
  siRNA target sequence for Alox12 (NM_007440.2,1132-1150).
gcaggagctccaattccat

SEQ ID NO: 562096 - DNA, 19 bp, Mus musculus
  siRNA target sequence for Alox12 (NM_007440.2,1133-1151).
caggagctccaattccatt

SEQ ID NO: 562097 - DNA, 19 bp, Mus musculus
  siRNA target sequence for Alox12 (NM_007440.2,1211-1229).
ggactgcaccctatcttca

SEQ ID NO: 562098 - DNA, 19 bp, Mus musculus
  siRNA target sequence for Alox12 (NM_007440.2,1212-1230).
gactgcaccctatcttcaa

SEQ ID NO: 562099 - DNA, 19 bp, Mus musculus
  siRNA target sequence for Alox12 (NM_007440.2,1241-1259).
ccacacatccgttacacta

SEQ ID NO: 562100 - DNA, 19 bp, Mus musculus
  siRNA target sequence for Alox12 (NM_007440.2,1246-1264).
catccgttacactatggaa

SEQ ID NO: 562101 - DNA, 19 bp, Mus musculus
  siRNA target sequence for Alox12 (NM_007440.2,1249-1267).
ccgttacactatggaaatt

SEQ ID NO: 562102 - DNA, 19 bp, Mus musculus
  siRNA target sequence for Alox12 (NM_007440.2,1250-1268).
cgttacactatggaaatta

SEQ ID NO: 562103 - DNA, 19 bp, Mus musculus
  siRNA target sequence for Alox12 (NM_007440.2,1447-1465).
ctatgctcgggatgcttta

SEQ ID NO: 562104 - DNA, 19 bp, Mus musculus
  siRNA target sequence for Alox12 (NM_007440.2,1478-1496).
gtcactgccaggtatgtga

SEQ ID NO: 562105 - DNA, 19 bp, Mus musculus
  siRNA target sequence for Alox12 (NM_007440.2,1513-1531).
cttctaccagagtgatgat

SEQ ID NO: 562106 - DNA, 19 bp, Mus musculus
  siRNA target sequence for Alox12 (NM_007440.2,1520-1538).
cagagtgatgatattgtga

SEQ ID NO: 562107 - DNA, 19 bp, Mus musculus
  siRNA target sequence for Alox12 (NM_007440.2,1944-1962).
gccaatttcaagcagattt

SEQ ID NO: 562108 - DNA, 19 bp, Mus musculus
  siRNA target sequence for Alox12 (NM_007440.2,2034-2052).
gccgcatagagaacagtat

SEQ ID NO: 562109 - DNA, 19 bp, Mus musculus
  siRNA target sequence for Alox12 (NM_007440.2,2036-2054).
cgcatagagaacagtatca

SEQ ID NO: 562110 - DNA, 19 bp, Mus musculus
  siRNA target sequence for Alox12b (NM_009659.1,222-240).
cggggacgctggattcaat

SEQ ID NO: 562111 - DNA, 19 bp, Mus musculus
  siRNA target sequence for Alox12b (NM_009659.1,223-241).
ggggacgctggattcaatt

SEQ ID NO: 562112 - DNA, 19 bp, Mus musculus
  siRNA target sequence for Alox12b (NM_009659.1,228-246).
cgctggattcaatttcact

SEQ ID NO: 562113 - DNA, 19 bp, Mus musculus
  siRNA target sequence for Alox12b (NM_009659.1,292-310).
ccactttgggagagacttt

SEQ ID NO: 562114 - DNA, 19 bp, Mus musculus
  siRNA target sequence for Alox12b (NM_009659.1,415-433).
cccctggtactgcaactat

SEQ ID NO: 562115 - DNA, 19 bp, Mus musculus
  siRNA target sequence for Alox12b (NM_009659.1,544-562).
cgacacactccctatcctt

SEQ ID NO: 562116 - DNA, 19 bp, Mus musculus
  siRNA target sequence for Alox12b (NM_009659.1,549-567).
cactccctatccttttgga

SEQ ID NO: 562117 - DNA, 19 bp, Mus musculus
  siRNA target sequence for Alox12b (NM_009659.1,607-625).
ccactggagggtctttgtt

SEQ ID NO: 562118 - DNA, 19 bp, Mus musculus
  siRNA target sequence for Alox12b (NM_009659.1,696-714).
ggcctgagtgggatggtta

SEQ ID NO: 562119 - DNA, 19 bp, Mus musculus
  siRNA target sequence for Alox12b (NM_009659.1,697-715).
gcctgagtgggatggttat

SEQ ID NO: 562120 - DNA, 19 bp, Mus musculus
  siRNA target sequence for Alox12b (NM_009659.1,719-737).
cccggattcccaattctca

SEQ ID NO: 562121 - DNA, 19 bp, Mus musculus
  siRNA target sequence for Alox12b (NM_009659.1,720-738).
ccggattcccaattctcat

SEQ ID NO: 562122 - DNA, 19 bp, Mus musculus
  siRNA target sequence for Alox12b (NM_009659.1,723-741).
gattcccaattctcatcaa

SEQ ID NO: 562123 - DNA, 19 bp, Mus musculus
  siRNA target sequence for Alox12b (NM_009659.1,846-864).
gtggcctggtggatcgaaa

SEQ ID NO: 562124 - DNA, 19 bp, Mus musculus
  siRNA target sequence for Alox12b (NM_009659.1,973-991).
ccagtaccttaatggtatt

SEQ ID NO: 562125 - DNA, 19 bp, Mus musculus
  siRNA target sequence for Alox12b (NM_009659.1,974-992).
cagtaccttaatggtatta

SEQ ID NO: 562126 - DNA, 19 bp, Mus musculus
  siRNA target sequence for Alox12b (NM_009659.1,998-1016).
ggcctgatccgaagatgta

SEQ ID NO: 562127 - DNA, 19 bp, Mus musculus
  siRNA target sequence for Alox12b (NM_009659.1,1000-1018).
cctgatccgaagatgtaca

SEQ ID NO: 562128 - DNA, 19 bp, Mus musculus
  siRNA target sequence for Alox12b (NM_009659.1,1017-1035).
cacagatcccagacaaatt

SEQ ID NO: 562129 - DNA, 19 bp, Mus musculus
  siRNA target sequence for Alox12b (NM_009659.1,1096-1114).
gctggagagggggaatatt

SEQ ID NO: 562130 - DNA, 19 bp, Mus musculus
  siRNA target sequence for Alox12b (NM_009659.1,1212-1230).
gtcctgatggcaacatgat

SEQ ID NO: 562131 - DNA, 19 bp, Mus musculus
  siRNA target sequence for Alox12b (NM_009659.1,1255-1273).
gactcctgggcctgattgt

SEQ ID NO: 562132 - DNA, 19 bp, Mus musculus
  siRNA target sequence for Alox12b (NM_009659.1,1279-1297).
cttcctgccgaatgattct

SEQ ID NO: 562133 - DNA, 19 bp, Mus musculus
  siRNA target sequence for Alox12b (NM_009659.1,1331-1349).
cgctacgcggagttctaca

SEQ ID NO: 562134 - DNA, 19 bp, Mus musculus
  siRNA target sequence for Alox12b (NM_009659.1,1470-1488).
ggtacaacgtccagatcaa

SEQ ID NO: 562135 - DNA, 19 bp, Mus musculus
  siRNA target sequence for Alox12b (NM_009659.1,1477-1495).
cgtccagatcaatagcatt

SEQ ID NO: 562136 - DNA, 19 bp, Mus musculus
  siRNA target sequence for Alox12b (NM_009659.1,1707-1725).
ggtacgtgacagagatcat

SEQ ID NO: 562137 - DNA, 19 bp, Mus musculus
  siRNA target sequence for Alox12b (NM_009659.1,1712-1730).
gtgacagagatcatcactt

SEQ ID NO: 562138 - DNA, 19 bp, Mus musculus
  siRNA target sequence for Alox12b (NM_009659.1,1782-1800).
gggtacaggagatattcaa

SEQ ID NO: 562139 - DNA, 19 bp, Mus musculus
  siRNA target sequence for Alox12b (NM_009659.1,1836-1854).
ccacctgcttgcgaactat

SEQ ID NO: 562140 - DNA, 19 bp, Mus musculus
  siRNA target sequence for Alox12b (NM_009659.1,1837-1855).
cacctgcttgcgaactata

SEQ ID NO: 562141 - DNA, 19 bp, Mus musculus
  siRNA target sequence for Alox12b (NM_009659.1,1840-1858).
ctgcttgcgaactatacct

SEQ ID NO: 562142 - DNA, 19 bp, Mus musculus
  siRNA target sequence for Alox12b (NM_009659.1,1857-1875).
ctgagctgatcgaatacgt

SEQ ID NO: 562143 - DNA, 19 bp, Mus musculus
  siRNA target sequence for Alox12b (NM_009659.1,1990-2008).
gaccaaggggctaactact

SEQ ID NO: 562144 - DNA, 19 bp, Mus musculus
  siRNA target sequence for Alox12b (NM_009659.1,2038-2056).
cgtgaagaccacatgcatt

SEQ ID NO: 562145 - DNA, 19 bp, Mus musculus
  siRNA target sequence for Alox12b (NM_009659.1,2143-2161).
gggtcctcggaggagtatt

SEQ ID NO: 562146 - DNA, 19 bp, Mus musculus
  siRNA target sequence for Alox12b (NM_009659.1,2155-2173).
gagtattgaggcttttcgt

SEQ ID NO: 562147 - DNA, 19 bp, Mus musculus
  siRNA target sequence for Alox12b (NM_009659.1,2246-2264).
gacccagtgctgattgaga

SEQ ID NO: 562148 - DNA, 19 bp, Mus musculus
  siRNA target sequence for Alox12b (NM_009659.1,2254-2272).
gctgattgagaacagtatt

SEQ ID NO: 562149 - DNA, 19 bp, Mus musculus
  siRNA target sequence for Alox12e (NM_145684.1,363-381).
cagggcaaggagactatct

SEQ ID NO: 562150 - DNA, 19 bp, Mus musculus
  siRNA target sequence for Alox12e (NM_145684.1,417-435).
gacactcagaacctgttta

SEQ ID NO: 562151 - DNA, 19 bp, Mus musculus
  siRNA target sequence for Alox12e (NM_145684.1,493-511).
ggaaggagggattaatcct

SEQ ID NO: 562152 - DNA, 19 bp, Mus musculus
  siRNA target sequence for Alox12e (NM_145684.1,546-564).
cggaaccagagattcatga

SEQ ID NO: 562153 - DNA, 19 bp, Mus musculus
  siRNA target sequence for Alox12e (NM_145684.1,566-584).
ggataaggatttagatttt

SEQ ID NO: 562154 - DNA, 19 bp, Mus musculus
  siRNA target sequence for Alox12e (NM_145684.1,605-623).
gttgaagaactttgctatt

SEQ ID NO: 562155 - DNA, 19 bp, Mus musculus
  siRNA target sequence for Alox12e (NM_145684.1,629-647).
gactctagattttgtaagt

SEQ ID NO: 562156 - DNA, 19 bp, Mus musculus
  siRNA target sequence for Alox12e (NM_145684.1,651-669).
gtacaaaagctggaagatt

SEQ ID NO: 562157 - DNA, 19 bp, Mus musculus
  siRNA target sequence for Alox12e (NM_145684.1,678-696).
gtattcccacatacaaaga

SEQ ID NO: 562158 - DNA, 19 bp, Mus musculus
  siRNA target sequence for Alox12e (NM_145684.1,874-892).
gatctctgttcgaagttga

SEQ ID NO: 562159 - DNA, 19 bp, Mus musculus
  siRNA target sequence for Alox12e (NM_145684.1,914-932).
caaacctaacatcatcatt

SEQ ID NO: 562160 - DNA, 19 bp, Mus musculus
  siRNA target sequence for Alox12e (NM_145684.1,1157-1175).
cctcatggccgaggttatt

SEQ ID NO: 562161 - DNA, 19 bp, Mus musculus
  siRNA target sequence for Alox12e (NM_145684.1,1160-1178).
catggccgaggttatttct

SEQ ID NO: 562162 - DNA, 19 bp, Mus musculus
  siRNA target sequence for Alox12e (NM_145684.1,1262-1280).
caccctggcacggaataat

SEQ ID NO: 562163 - DNA, 19 bp, Mus musculus
  siRNA target sequence for Alox12e (NM_145684.1,1264-1282).
ccctggcacggaataatct

SEQ ID NO: 562164 - DNA, 19 bp, Mus musculus
  siRNA target sequence for Alox12e (NM_145684.1,1265-1283).
cctggcacggaataatctt

SEQ ID NO: 562165 - DNA, 19 bp, Mus musculus
  siRNA target sequence for Alox12e (NM_145684.1,1284-1302).
gtctccgaatggggaattt

SEQ ID NO: 562166 - DNA, 19 bp, Mus musculus
  siRNA target sequence for Alox12e (NM_145684.1,1286-1304).
ctccgaatggggaattttt

SEQ ID NO: 562167 - DNA, 19 bp, Mus musculus
  siRNA target sequence for Alox12e (NM_145684.1,1288-1306).
ccgaatggggaatttttga

SEQ ID NO: 562168 - DNA, 19 bp, Mus musculus
  siRNA target sequence for Alox12e (NM_145684.1,1413-1431).
ggactcgtgggggtgaaat

SEQ ID NO: 562169 - DNA, 19 bp, Mus musculus
  siRNA target sequence for Alox12e (NM_145684.1,1416-1434).
ctcgtgggggtgaaatctt

SEQ ID NO: 562170 - DNA, 19 bp, Mus musculus
  siRNA target sequence for Alox12e (NM_145684.1,1418-1436).
cgtgggggtgaaatcttct

SEQ ID NO: 562171 - DNA, 19 bp, Mus musculus
  siRNA target sequence for Alox12e (NM_145684.1,1477-1495).
gtcggtatgtggaaaggat

SEQ ID NO: 562172 - DNA, 19 bp, Mus musculus
  siRNA target sequence for Alox12e (NM_145684.1,1647-1665).
gtcgctatgtgcatcttca

SEQ ID NO: 562173 - DNA, 19 bp, Mus musculus
  siRNA target sequence for Alox12e (NM_145684.1,1817-1835).
ggcacggatgcagataaca

SEQ ID NO: 562174 - DNA, 19 bp, Mus musculus
  siRNA target sequence for Alox12e (NM_145684.1,1884-1902).
cagcataaagaggagtatt

SEQ ID NO: 562175 - DNA, 19 bp, Mus musculus
  siRNA target sequence for Alox12e (NM_145684.1,1887-1905).
cataaagaggagtatttct

SEQ ID NO: 562176 - DNA, 19 bp, Mus musculus
  siRNA target sequence for Alox12e (NM_145684.1,1920-1938).
cgggatgtgctgaagcaat

SEQ ID NO: 562177 - DNA, 19 bp, Mus musculus
  siRNA target sequence for Alox15 (NM_009660.2,138-156).
ggaactcggaggcagaatt

SEQ ID NO: 562178 - DNA, 19 bp, Mus musculus
  siRNA target sequence for Alox15 (NM_009660.2,163-181).
ggatgtgtcagaatacctt

SEQ ID NO: 562179 - DNA, 19 bp, Mus musculus
  siRNA target sequence for Alox15 (NM_009660.2,206-224).
cagaaatggcattatctca

SEQ ID NO: 562180 - DNA, 19 bp, Mus musculus
  siRNA target sequence for Alox15 (NM_009660.2,515-533).
gaggacaaaagacttgaat

SEQ ID NO: 562181 - DNA, 19 bp, Mus musculus
  siRNA target sequence for Alox15 (NM_009660.2,517-535).
ggacaaaagacttgaattt

SEQ ID NO: 562182 - DNA, 19 bp, Mus musculus
  siRNA target sequence for Alox15 (NM_009660.2,556-574).
gacaatggacaccgttatt

SEQ ID NO: 562183 - DNA, 19 bp, Mus musculus
  siRNA target sequence for Alox15 (NM_009660.2,569-587).
gttattaacttccctaaaa

SEQ ID NO: 562184 - DNA, 19 bp, Mus musculus
  siRNA target sequence for Alox15 (NM_009660.2,609-627).
gcctagatgacttcaacta

SEQ ID NO: 562185 - DNA, 19 bp, Mus musculus
  siRNA target sequence for Alox15 (NM_009660.2,610-628).
cctagatgacttcaactat

SEQ ID NO: 562186 - DNA, 19 bp, Mus musculus
  siRNA target sequence for Alox15 (NM_009660.2,614-632).
gatgacttcaactatgttt

SEQ ID NO: 562187 - DNA, 19 bp, Mus musculus
  siRNA target sequence for Alox15 (NM_009660.2,731-749).
gtgctgaagcggtctactt

SEQ ID NO: 562188 - DNA, 19 bp, Mus musculus
  siRNA target sequence for Alox15 (NM_009660.2,733-751).
gctgaagcggtctacttgt

SEQ ID NO: 562189 - DNA, 19 bp, Mus musculus
  siRNA target sequence for Alox15 (NM_009660.2,830-848).
ctgtttgaagcggatttct

SEQ ID NO: 562190 - DNA, 19 bp, Mus musculus
  siRNA target sequence for Alox15 (NM_009660.2,860-878).
gggatcaaggccaatgtca

SEQ ID NO: 562191 - DNA, 19 bp, Mus musculus
  siRNA target sequence for Alox15 (NM_009660.2,861-879).
ggatcaaggccaatgtcat

SEQ ID NO: 562192 - DNA, 19 bp, Mus musculus
  siRNA target sequence for Alox15 (NM_009660.2,869-887).
gccaatgtcatcctttgta

SEQ ID NO: 562193 - DNA, 19 bp, Mus musculus
  siRNA target sequence for Alox15 (NM_009660.2,871-889).
caatgtcatcctttgtagt

SEQ ID NO: 562194 - DNA, 19 bp, Mus musculus
  siRNA target sequence for Alox15 (NM_009660.2,964-982).
gctcgaactgcccaaaact

SEQ ID NO: 562195 - DNA, 19 bp, Mus musculus
  siRNA target sequence for Alox15 (NM_009660.2,987-1005).
ctaccccaccgccgatttt

SEQ ID NO: 562196 - DNA, 19 bp, Mus musculus
  siRNA target sequence for Alox15 (NM_009660.2,1155-1173).
ccgtgcaccctgtttttaa

SEQ ID NO: 562197 - DNA, 19 bp, Mus musculus
  siRNA target sequence for Alox15 (NM_009660.2,1360-1378).
gcgaggactcctggatatt

SEQ ID NO: 562198 - DNA, 19 bp, Mus musculus
  siRNA target sequence for Alox15 (NM_009660.2,1362-1380).
gaggactcctggatattga

SEQ ID NO: 562199 - DNA, 19 bp, Mus musculus
  siRNA target sequence for Alox15 (NM_009660.2,1379-1397).
gacacttgcttctatgcta

SEQ ID NO: 562200 - DNA, 19 bp, Mus musculus
  siRNA target sequence for Alox15 (NM_009660.2,1381-1399).
cacttgcttctatgctaaa

SEQ ID NO: 562201 - DNA, 19 bp, Mus musculus
  siRNA target sequence for Alox15 (NM_009660.2,1411-1429).
gctctggcaagtcatgaat

SEQ ID NO: 562202 - DNA, 19 bp, Mus musculus
  siRNA target sequence for Alox15 (NM_009660.2,1443-1461).
gaatgttcgatctctacta

SEQ ID NO: 562203 - DNA, 19 bp, Mus musculus
  siRNA target sequence for Alox15 (NM_009660.2,1476-1494).
ctgttcaggatgactatga

SEQ ID NO: 562204 - DNA, 19 bp, Mus musculus
  siRNA target sequence for Alox15 (NM_009660.2,1652-1670).
cagctggattggttctact

SEQ ID NO: 562205 - DNA, 19 bp, Mus musculus
  siRNA target sequence for Alox15 (NM_009660.2,1662-1680).
ggttctactgggttcctaa

SEQ ID NO: 562206 - DNA, 19 bp, Mus musculus
  siRNA target sequence for Alox15 (NM_009660.2,1663-1681).
gttctactgggttcctaat

SEQ ID NO: 562207 - DNA, 19 bp, Mus musculus
  siRNA target sequence for Alox15 (NM_009660.2,1666-1684).
ctactgggttcctaatgca

SEQ ID NO: 562208 - DNA, 19 bp, Mus musculus
  siRNA target sequence for Alox15 (NM_009660.2,1696-1714).
gcggctgccaccacctaaa

SEQ ID NO: 562209 - DNA, 19 bp, Mus musculus
  siRNA target sequence for Alox15 (NM_009660.2,1745-1763).
gcgacgctgcccaatccta

SEQ ID NO: 562210 - DNA, 19 bp, Mus musculus
  siRNA target sequence for Alox15 (NM_009660.2,1746-1764).
cgacgctgcccaatcctaa

SEQ ID NO: 562211 - DNA, 19 bp, Mus musculus
  siRNA target sequence for Alox15 (NM_009660.2,1747-1765).
gacgctgcccaatcctaat

SEQ ID NO: 562212 - DNA, 19 bp, Mus musculus
  siRNA target sequence for Alox15 (NM_009660.2,1749-1767).
cgctgcccaatcctaatca

SEQ ID NO: 562213 - DNA, 19 bp, Mus musculus
  siRNA target sequence for Alox15 (NM_009660.2,1751-1769).
ctgcccaatcctaatcagt

SEQ ID NO: 562214 - DNA, 19 bp, Mus musculus
  siRNA target sequence for Alox15 (NM_009660.2,1766-1784).
cagtctactctccagataa

SEQ ID NO: 562215 - DNA, 19 bp, Mus musculus
  siRNA target sequence for Alox15 (NM_009660.2,1768-1786).
gtctactctccagataaat

SEQ ID NO: 562216 - DNA, 19 bp, Mus musculus
  siRNA target sequence for Alox15 (NM_009660.2,1941-1959).
gcttggacataccttatga

SEQ ID NO: 562217 - DNA, 19 bp, Mus musculus
  siRNA target sequence for Alox15b (NM_009661.2,120-138).
cggagagagccccttagta

SEQ ID NO: 562218 - DNA, 19 bp, Mus musculus
  siRNA target sequence for Alox15b (NM_009661.2,256-274).
gtgtccctcccgcttatgt

SEQ ID NO: 562219 - DNA, 19 bp, Mus musculus
  siRNA target sequence for Alox15b (NM_009661.2,544-562).
gacctcaacatcaagtact

SEQ ID NO: 562220 - DNA, 19 bp, Mus musculus
  siRNA target sequence for Alox15b (NM_009661.2,558-576).
gtactctgcgatgaagaat

SEQ ID NO: 562221 - DNA, 19 bp, Mus musculus
  siRNA target sequence for Alox15b (NM_009661.2,573-591).
gaatgccaaactcttcttt

SEQ ID NO: 562222 - DNA, 19 bp, Mus musculus
  siRNA target sequence for Alox15b (NM_009661.2,605-623).
cgtatacggagctgaaagt

SEQ ID NO: 562223 - DNA, 19 bp, Mus musculus
  siRNA target sequence for Alox15b (NM_009661.2,813-831).
cttcccggtcactgatgaa

SEQ ID NO: 562224 - DNA, 19 bp, Mus musculus
  siRNA target sequence for Alox15b (NM_009661.2,900-918).
ggtggatcatggcattctt

SEQ ID NO: 562225 - DNA, 19 bp, Mus musculus
  siRNA target sequence for Alox15b (NM_009661.2,901-919).
gtggatcatggcattcttt

SEQ ID NO: 562226 - DNA, 19 bp, Mus musculus
  siRNA target sequence for Alox15b (NM_009661.2,903-921).
ggatcatggcattctttct

SEQ ID NO: 562227 - DNA, 19 bp, Mus musculus
  siRNA target sequence for Alox15b (NM_009661.2,968-986).
ccccgatgaccctgttaca

SEQ ID NO: 562228 - DNA, 19 bp, Mus musculus
  siRNA target sequence for Alox15b (NM_009661.2,1106-1124).
cctgggttcgcaattctga

SEQ ID NO: 562229 - DNA, 19 bp, Mus musculus
  siRNA target sequence for Alox15b (NM_009661.2,1182-1200).
ctttgccttggccacatta

SEQ ID NO: 562230 - DNA, 19 bp, Mus musculus
  siRNA target sequence for Alox15b (NM_009661.2,1214-1232).
ggtgtcaccctctcttcaa

SEQ ID NO: 562231 - DNA, 19 bp, Mus musculus
  siRNA target sequence for Alox15b (NM_009661.2,1294-1312).
gttgcccctgggaagttga

SEQ ID NO: 562232 - DNA, 19 bp, Mus musculus
  siRNA target sequence for Alox15b (NM_009661.2,1418-1436).
cccgaggtgtggaagacat

SEQ ID NO: 562233 - DNA, 19 bp, Mus musculus
  siRNA target sequence for Alox15b (NM_009661.2,1432-1450).
gacatcccaggctactatt

SEQ ID NO: 562234 - DNA, 19 bp, Mus musculus
  siRNA target sequence for Alox15b (NM_009661.2,1443-1461).
ctactattaccgagatgat

SEQ ID NO: 562235 - DNA, 19 bp, Mus musculus
  siRNA target sequence for Alox15b (NM_009661.2,1507-1525).
gtcagcatctactatccaa

SEQ ID NO: 562236 - DNA, 19 bp, Mus musculus
  siRNA target sequence for Alox15b (NM_009661.2,1639-1657).
gaagccctggtccagtata

SEQ ID NO: 562237 - DNA, 19 bp, Mus musculus
  siRNA target sequence for Alox15b (NM_009661.2,1642-1660).
gccctggtccagtatatca

SEQ ID NO: 562238 - DNA, 19 bp, Mus musculus
  siRNA target sequence for Alox15b (NM_009661.2,1711-1729).
cagttcgactcttgtgttt

SEQ ID NO: 562239 - DNA, 19 bp, Mus musculus
  siRNA target sequence for Alox15b (NM_009661.2,1808-1826).
ccacgctcccagcagttaa

SEQ ID NO: 562240 - DNA, 19 bp, Mus musculus
  siRNA target sequence for Alox15b (NM_009661.2,1809-1827).
cacgctcccagcagttaat

SEQ ID NO: 562241 - DNA, 19 bp, Mus musculus
  siRNA target sequence for Alox15b (NM_009661.2,1813-1831).
ctcccagcagttaattcgt

SEQ ID NO: 562242 - DNA, 19 bp, Mus musculus
  siRNA target sequence for Alox15b (NM_009661.2,1819-1837).
gcagttaattcgtcaagtt

SEQ ID NO: 562243 - DNA, 19 bp, Mus musculus
  siRNA target sequence for Alox15b (NM_009661.2,1820-1838).
cagttaattcgtcaagtta

SEQ ID NO: 562244 - DNA, 19 bp, Mus musculus
  siRNA target sequence for Alox15b (NM_009661.2,1893-1911).
gggccactatccagatgaa

SEQ ID NO: 562245 - DNA, 19 bp, Mus musculus
  siRNA target sequence for Aloxe3 (NM_011786.1,72-90).
gctggcacattggataaca

SEQ ID NO: 562246 - DNA, 19 bp, Mus musculus
  siRNA target sequence for Aloxe3 (NM_011786.1,73-91).
ctggcacattggataacat

SEQ ID NO: 562247 - DNA, 19 bp, Mus musculus
  siRNA target sequence for Aloxe3 (NM_011786.1,76-94).
gcacattggataacatcta

SEQ ID NO: 562248 - DNA, 19 bp, Mus musculus
  siRNA target sequence for Aloxe3 (NM_011786.1,77-95).
cacattggataacatctat

SEQ ID NO: 562249 - DNA, 19 bp, Mus musculus
  siRNA target sequence for Aloxe3 (NM_011786.1,386-404).
catctgtcaggattctctt

SEQ ID NO: 562250 - DNA, 19 bp, Mus musculus
  siRNA target sequence for Aloxe3 (NM_011786.1,604-622).
gctttcctatgaagattga

SEQ ID NO: 562251 - DNA, 19 bp, Mus musculus
  siRNA target sequence for Aloxe3 (NM_011786.1,705-723).
gcatcctttggcatgaaga

SEQ ID NO: 562252 - DNA, 19 bp, Mus musculus
  siRNA target sequence for Aloxe3 (NM_011786.1,768-786).
gacatccggaacatcttct

SEQ ID NO: 562253 - DNA, 19 bp, Mus musculus
  siRNA target sequence for Aloxe3 (NM_011786.1,958-976).
gcacctgcctacaaacaga

SEQ ID NO: 562254 - DNA, 19 bp, Mus musculus
  siRNA target sequence for Aloxe3 (NM_011786.1,1235-1253).
cgagaacaacacgcatttt

SEQ ID NO: 562255 - DNA, 19 bp, Mus musculus
  siRNA target sequence for Aloxe3 (NM_011786.1,1254-1272).
ctgtgcacgcatttgctat

SEQ ID NO: 562256 - DNA, 19 bp, Mus musculus
  siRNA target sequence for Aloxe3 (NM_011786.1,1351-1369).
gctacacgctgcaagtgaa

SEQ ID NO: 562257 - DNA, 19 bp, Mus musculus
  siRNA target sequence for Aloxe3 (NM_011786.1,1432-1450).
gtaggcagggcctcatcta

SEQ ID NO: 562258 - DNA, 19 bp, Mus musculus
  siRNA target sequence for Aloxe3 (NM_011786.1,1493-1511).
ctgcctaccggatagcata

SEQ ID NO: 562259 - DNA, 19 bp, Mus musculus
  siRNA target sequence for Aloxe3 (NM_011786.1,1599-1617).
gagattgtgagttactatt

SEQ ID NO: 562260 - DNA, 19 bp, Mus musculus
  siRNA target sequence for Aloxe3 (NM_011786.1,1601-1619).
gattgtgagttactattat

SEQ ID NO: 562261 - DNA, 19 bp, Mus musculus
  siRNA target sequence for Aloxe3 (NM_011786.1,1691-1709).
cctcggacgggaaagttca

SEQ ID NO: 562262 - DNA, 19 bp, Mus musculus
  siRNA target sequence for Aloxe3 (NM_011786.1,1738-1756).
gagagctcgtgaagtatct

SEQ ID NO: 562263 - DNA, 19 bp, Mus musculus
  siRNA target sequence for Aloxe3 (NM_011786.1,1755-1773).
ctcaccgcaatcatcttta

SEQ ID NO: 562264 - DNA, 19 bp, Mus musculus
  siRNA target sequence for Aloxe3 (NM_011786.1,1761-1779).
gcaatcatctttaattgct

SEQ ID NO: 562265 - DNA, 19 bp, Mus musculus
  siRNA target sequence for Aloxe3 (NM_011786.1,1878-1896).
ggcgacacgacaatgaaga

SEQ ID NO: 562266 - DNA, 19 bp, Mus musculus
  siRNA target sequence for Pah (NM_008777.1,531-549).
gctgacattgcctacaact

SEQ ID NO: 562267 - DNA, 19 bp, Mus musculus
  siRNA target sequence for Pah (NM_008777.1,565-583).
ccattcctcgggtggaata

SEQ ID NO: 562268 - DNA, 19 bp, Mus musculus
  siRNA target sequence for Pah (NM_008777.1,625-643).
ctctgaaggccttgtataa

SEQ ID NO: 562269 - DNA, 19 bp, Mus musculus
  siRNA target sequence for Pah (NM_008777.1,632-650).
ggccttgtataaaacacat

SEQ ID NO: 562270 - DNA, 19 bp, Mus musculus
  siRNA target sequence for Pah (NM_008777.1,697-715).
gcggtttccgtgaagacaa

SEQ ID NO: 562271 - DNA, 19 bp, Mus musculus
  siRNA target sequence for Pah (NM_008777.1,792-810).
ctgtcgtctcgagatttct

SEQ ID NO: 562272 - DNA, 19 bp, Mus musculus
  siRNA target sequence for Pah (NM_008777.1,982-1000).
gggcacctgatgagtacat

SEQ ID NO: 562273 - DNA, 19 bp, Mus musculus
  siRNA target sequence for Pah (NM_008777.1,983-1001).
ggcacctgatgagtacatt

SEQ ID NO: 562274 - DNA, 19 bp, Mus musculus
  siRNA target sequence for Pah (NM_008777.1,1011-1029).
gccacaatttactggttta

SEQ ID NO: 562275 - DNA, 19 bp, Mus musculus
  siRNA target sequence for Pah (NM_008777.1,1013-1031).
cacaatttactggtttact

SEQ ID NO: 562276 - DNA, 19 bp, Mus musculus
  siRNA target sequence for Pah (NM_008777.1,1093-1111).
catcctttggagaattaca

SEQ ID NO: 562277 - DNA, 19 bp, Mus musculus
  siRNA target sequence for Pah (NM_008777.1,1096-1114).
cctttggagaattacagta

SEQ ID NO: 562278 - DNA, 19 bp, Mus musculus
  siRNA target sequence for Pah (NM_008777.1,1101-1119).
ggagaattacagtactgtt

SEQ ID NO: 562279 - DNA, 19 bp, Mus musculus
  siRNA target sequence for Pah (NM_008777.1,1211-1229).
ggccgagagtttcaatgat

SEQ ID NO: 562280 - DNA, 19 bp, Mus musculus
  siRNA target sequence for Pah (NM_008777.1,1238-1256).
gaaagtgaggacttttgct

SEQ ID NO: 562281 - DNA, 19 bp, Mus musculus
  siRNA target sequence for Pah (NM_008777.1,1381-1399).
gccatgccctgcagaaaat

SEQ ID NO: 562282 - DNA, 19 bp, Mus musculus
  siRNA target sequence for Pah (NM_008777.1,1382-1400).
ccatgccctgcagaaaata

SEQ ID NO: 562283 - DNA, 19 bp, Mus musculus
  siRNA target sequence for Pah (NM_008777.1,1386-1404).
gccctgcagaaaataaagt

SEQ ID NO: 562284 - DNA, 19 bp, Mus musculus
  siRNA target sequence for Scd1 (NM_009127.2,431-449).
cctgcctcttcgggatttt

SEQ ID NO: 562285 - DNA, 19 bp, Mus musculus
  siRNA target sequence for Scd1 (NM_009127.2,434-452).
gcctcttcgggattttcta

SEQ ID NO: 562286 - DNA, 19 bp, Mus musculus
  siRNA target sequence for Scd1 (NM_009127.2,957-975).
ctacgacaagaacattcaa

SEQ ID NO: 562287 - DNA, 19 bp, Mus musculus
  siRNA target sequence for Scd2 (NM_009128.1,324-342).
gatctctggcgcttactca

SEQ ID NO: 562288 - DNA, 19 bp, Mus musculus
  siRNA target sequence for Scd2 (NM_009128.1,389-407).
gaggcgagaagtttgaaaa

SEQ ID NO: 562289 - DNA, 19 bp, Mus musculus
  siRNA target sequence for Scd2 (NM_009128.1,391-409).
ggcgagaagtttgaaaaga

SEQ ID NO: 562290 - DNA, 19 bp, Mus musculus
  siRNA target sequence for Scd2 (NM_009128.1,394-412).
gagaagtttgaaaagagtt

SEQ ID NO: 562291 - DNA, 19 bp, Mus musculus
  siRNA target sequence for Scd2 (NM_009128.1,430-448).
gatgttcgccctgaactaa

SEQ ID NO: 562292 - DNA, 19 bp, Mus musculus
  siRNA target sequence for Scd2 (NM_009128.1,596-614).
cctgtctcttcgcgtattt

SEQ ID NO: 562293 - DNA, 19 bp, Mus musculus
  siRNA target sequence for Scd2 (NM_009128.1,599-617).
gtctcttcgcgtatttgta

SEQ ID NO: 562294 - DNA, 19 bp, Mus musculus
  siRNA target sequence for Scd2 (NM_009128.1,603-621).
cttcgcgtatttgtactat

SEQ ID NO: 562295 - DNA, 19 bp, Mus musculus
  siRNA target sequence for Scd2 (NM_009128.1,606-624).
cgcgtatttgtactatgta

SEQ ID NO: 562296 - DNA, 19 bp, Mus musculus
  siRNA target sequence for Scd2 (NM_009128.1,608-626).
cgtatttgtactatgtaat

SEQ ID NO: 562297 - DNA, 19 bp, Mus musculus
  siRNA target sequence for Scd3 (NM_024450.1,524-542).
gcctcttcgcgtttgtcta

SEQ ID NO: 562298 - DNA, 19 bp, Mus musculus
  siRNA target sequence for Scd3 (NM_024450.1,528-546).
cttcgcgtttgtctactat

SEQ ID NO: 562299 - DNA, 19 bp, Mus musculus
  siRNA target sequence for Scd3 (NM_024450.1,532-550).
gcgtttgtctactatgtga

SEQ ID NO: 562300 - DNA, 19 bp, Mus musculus
  siRNA target sequence for Scd3 (NM_024450.1,538-556).
gtctactatgtgatcagta

SEQ ID NO: 562301 - DNA, 19 bp, Mus musculus
  siRNA target sequence for Th (NM_009377.1,33-51).
cagcccaagggcttcagaa

SEQ ID NO: 562302 - DNA, 19 bp, Mus musculus
  siRNA target sequence for Th (NM_009377.1,292-310).
cactgtctcgggctttgaa

SEQ ID NO: 562303 - DNA, 19 bp, Mus musculus
  siRNA target sequence for Th (NM_009377.1,298-316).
ctcgggctttgaaagtgtt

SEQ ID NO: 562304 - DNA, 19 bp, Mus musculus
  siRNA target sequence for Th (NM_009377.1,518-536).
gtcagagttggataagtgt

SEQ ID NO: 562305 - DNA, 19 bp, Mus musculus
  siRNA target sequence for Th (NM_009377.1,539-557).
ccacctggtcaccaagttt

SEQ ID NO: 562306 - DNA, 19 bp, Mus musculus
  siRNA target sequence for Th (NM_009377.1,661-679).
caattccccacgtggaata

SEQ ID NO: 562307 - DNA, 19 bp, Mus musculus
  siRNA target sequence for Th (NM_009377.1,666-684).
ccccacgtggaatacacaa

SEQ ID NO: 562308 - DNA, 19 bp, Mus musculus
  siRNA target sequence for Th (NM_009377.1,723-741).
ctgaagggcctctatgcta

SEQ ID NO: 562309 - DNA, 19 bp, Mus musculus
  siRNA target sequence for Th (NM_009377.1,1022-1040).
gttggctgaccgcacattt

SEQ ID NO: 562310 - DNA, 19 bp, Mus musculus
  siRNA target sequence for Th (NM_009377.1,1265-1283).
gcagccctaccaagatcaa

SEQ ID NO: 562311 - DNA, 19 bp, Mus musculus
  siRNA target sequence for Th (NM_009377.1,1270-1288).
cctaccaagatcaaaccta

SEQ ID NO: 562312 - DNA, 19 bp, Mus musculus
  siRNA target sequence for Th (NM_009377.1,1285-1303).
cctaccagccggtgtactt

SEQ ID NO: 562313 - DNA, 19 bp, Mus musculus
  siRNA target sequence for Th (NM_009377.1,1391-1409).
gtacaccctggccattgat

SEQ ID NO: 562314 - DNA, 19 bp, Mus musculus
  siRNA target sequence for Tph1 (NM_009414.1,243-261).
catcgagtcccggaaatca

SEQ ID NO: 562315 - DNA, 19 bp, Mus musculus
  siRNA target sequence for Tph1 (NM_009414.1,306-324).
cagccgagaacagttgaat

SEQ ID NO: 562316 - DNA, 19 bp, Mus musculus
  siRNA target sequence for Tph1 (NM_009414.1,459-477).
caacagagtgctgttgtat

SEQ ID NO: 562317 - DNA, 19 bp, Mus musculus
  siRNA target sequence for Tph1 (NM_009414.1,501-519).
ccctggcttcaaagacaat

SEQ ID NO: 562318 - DNA, 19 bp, Mus musculus
  siRNA target sequence for Tph1 (NM_009414.1,503-521).
ctggcttcaaagacaatgt

SEQ ID NO: 562319 - DNA, 19 bp, Mus musculus
  siRNA target sequence for Tph1 (NM_009414.1,505-523).
ggcttcaaagacaatgtct

SEQ ID NO: 562320 - DNA, 19 bp, Mus musculus
  siRNA target sequence for Tph1 (NM_009414.1,516-534).
caatgtctatcgtagaaga

SEQ ID NO: 562321 - DNA, 19 bp, Mus musculus
  siRNA target sequence for Tph1 (NM_009414.1,526-544).
cgtagaagacgaaagtatt

SEQ ID NO: 562322 - DNA, 19 bp, Mus musculus
  siRNA target sequence for Tph1 (NM_009414.1,550-568).
gagttggctatgaactaca

SEQ ID NO: 562323 - DNA, 19 bp, Mus musculus
  siRNA target sequence for Tph1 (NM_009414.1,552-570).
gttggctatgaactacaaa

SEQ ID NO: 562324 - DNA, 19 bp, Mus musculus
  siRNA target sequence for Tph1 (NM_009414.1,555-573).
ggctatgaactacaaacat

SEQ ID NO: 562325 - DNA, 19 bp, Mus musculus
  siRNA target sequence for Tph1 (NM_009414.1,576-594).
ggaccccattcccaagatt

SEQ ID NO: 562326 - DNA, 19 bp, Mus musculus
  siRNA target sequence for Tph1 (NM_009414.1,638-656).
gagagctaaacaaactcta

SEQ ID NO: 562327 - DNA, 19 bp, Mus musculus
  siRNA target sequence for Tph1 (NM_009414.1,671-689).
gcagggagtacctcagaaa

SEQ ID NO: 562328 - DNA, 19 bp, Mus musculus
  siRNA target sequence for Tph1 (NM_009414.1,690-708).
cctccctttgctctcaaaa

SEQ ID NO: 562329 - DNA, 19 bp, Mus musculus
  siRNA target sequence for Tph1 (NM_009414.1,744-762).
ggaggatgtctccaacttt

SEQ ID NO: 562330 - DNA, 19 bp, Mus musculus
  siRNA target sequence for Tph1 (NM_009414.1,745-763).
gaggatgtctccaactttt

SEQ ID NO: 562331 - DNA, 19 bp, Mus musculus
  siRNA target sequence for Tph1 (NM_009414.1,747-765).
ggatgtctccaacttttta

SEQ ID NO: 562332 - DNA, 19 bp, Mus musculus
  siRNA target sequence for Tph1 (NM_009414.1,834-852).
gttagcctttcgagtcttt

SEQ ID NO: 562333 - DNA, 19 bp, Mus musculus
  siRNA target sequence for Tph1 (NM_009414.1,942-960).
cttggctgaacccagtttt

SEQ ID NO: 562334 - DNA, 19 bp, Mus musculus
  siRNA target sequence for Tph1 (NM_009414.1,945-963).
ggctgaacccagttttgct

SEQ ID NO: 562335 - DNA, 19 bp, Mus musculus
  siRNA target sequence for Tph1 (NM_009414.1,961-979).
gctcaattctcccaagaaa

SEQ ID NO: 562336 - DNA, 19 bp, Mus musculus
  siRNA target sequence for Tph1 (NM_009414.1,1024-1042).
ctggcaacgtgctactttt

SEQ ID NO: 562337 - DNA, 19 bp, Mus musculus
  siRNA target sequence for Tph1 (NM_009414.1,1027-1045).
gcaacgtgctactttttca

SEQ ID NO: 562338 - DNA, 19 bp, Mus musculus
  siRNA target sequence for Tph1 (NM_009414.1,1178-1196).
cctgtaaacaggaatgtct

SEQ ID NO: 562339 - DNA, 19 bp, Mus musculus
  siRNA target sequence for Tph1 (NM_009414.1,1209-1227).
ccaggatgtctactttgta

SEQ ID NO: 562340 - DNA, 19 bp, Mus musculus
  siRNA target sequence for Tph1 (NM_009414.1,1210-1228).
caggatgtctactttgtat

SEQ ID NO: 562341 - DNA, 19 bp, Mus musculus
  siRNA target sequence for Tph1 (NM_009414.1,1355-1373).
ctagtgccatgaatgagtt

SEQ ID NO: 562342 - DNA, 19 bp, Mus musculus
  siRNA target sequence for Tph1 (NM_009414.1,1376-1394).
ggtatgaccttgatgtcat

SEQ ID NO: 562343 - DNA, 19 bp, Mus musculus
  siRNA target sequence for Tph2 (NM_173391.1,220-238).
gctacttggcagcttaaca

SEQ ID NO: 562344 - DNA, 19 bp, Mus musculus
  siRNA target sequence for Tph2 (NM_173391.1,227-245).
ggcagcttaacacaaaata

SEQ ID NO: 562345 - DNA, 19 bp, Mus musculus
  siRNA target sequence for Tph2 (NM_173391.1,228-246).
gcagcttaacacaaaataa

SEQ ID NO: 562346 - DNA, 19 bp, Mus musculus
  siRNA target sequence for Tph2 (NM_173391.1,359-377).
gtgaaagcacttagactat

SEQ ID NO: 562347 - DNA, 19 bp, Mus musculus
  siRNA target sequence for Tph2 (NM_173391.1,394-412).
caacatgcttcatatcgaa

SEQ ID NO: 562348 - DNA, 19 bp, Mus musculus
  siRNA target sequence for Tph2 (NM_173391.1,435-453).
gttctgaagtcgaaatctt

SEQ ID NO: 562349 - DNA, 19 bp, Mus musculus
  siRNA target sequence for Tph2 (NM_173391.1,491-509).
ctcatccagttgctgaaat

SEQ ID NO: 562350 - DNA, 19 bp, Mus musculus
  siRNA target sequence for Tph2 (NM_173391.1,497-515).
cagttgctgaaatttcaga

SEQ ID NO: 562351 - DNA, 19 bp, Mus musculus
  siRNA target sequence for Tph2 (NM_173391.1,536-554).
ccgcctgagagcatttgga

SEQ ID NO: 562352 - DNA, 19 bp, Mus musculus
  siRNA target sequence for Tph2 (NM_173391.1,656-674).
gccgaccatccaggattta

SEQ ID NO: 562353 - DNA, 19 bp, Mus musculus
  siRNA target sequence for Tph2 (NM_173391.1,657-675).
ccgaccatccaggatttaa

SEQ ID NO: 562354 - DNA, 19 bp, Mus musculus
  siRNA target sequence for Tph2 (NM_173391.1,689-707).
cgacagaggaggaagtatt

SEQ ID NO: 562355 - DNA, 19 bp, Mus musculus
  siRNA target sequence for Tph2 (NM_173391.1,716-734).
gtggccatgggctataaat

SEQ ID NO: 562356 - DNA, 19 bp, Mus musculus
  siRNA target sequence for Tph2 (NM_173391.1,718-736).
ggccatgggctataaatat

SEQ ID NO: 562357 - DNA, 19 bp, Mus musculus
  siRNA target sequence for Tph2 (NM_173391.1,1303-1321).
cgacaaggcgtgtgtgaaa

SEQ ID NO: 562358 - DNA, 19 bp, Mus musculus
  siRNA target sequence for Tph2 (NM_173391.1,1368-1386).
cctttcaggacgcttactt

SEQ ID NO: 562359 - DNA, 19 bp, Mus musculus
  siRNA target sequence for Tph2 (NM_173391.1,1373-1391).
caggacgcttactttgttt

SEQ ID NO: 562360 - DNA, 19 bp, Mus musculus
  siRNA target sequence for Tph2 (NM_173391.1,1423-1441).
gagggactttgcaaagtca

SEQ ID NO: 562361 - DNA, 19 bp, Mus musculus
  siRNA target sequence for Tph2 (NM_173391.1,1425-1443).
gggactttgcaaagtcaat

SEQ ID NO: 562362 - DNA, 19 bp, Mus musculus
  siRNA target sequence for Tph2 (NM_173391.1,1448-1466).
cgtcccttctcggtatact

SEQ ID NO: 562363 - DNA, 19 bp, Mus musculus
  siRNA target sequence for Tph2 (NM_173391.1,1449-1467).
gtcccttctcggtatactt

SEQ ID NO: 562364 - DNA, 19 bp, Mus musculus
  siRNA target sequence for Tph2 (NM_173391.1,1451-1469).
cccttctcggtatacttca

SEQ ID NO: 562365 - DNA, 19 bp, Mus musculus
  siRNA target sequence for Tph2 (NM_173391.1,1452-1470).
ccttctcggtatacttcaa

SEQ ID NO: 562366 - DNA, 19 bp, Mus musculus
  siRNA target sequence for Tph2 (NM_173391.1,1477-1495).
cacgcagagcattgaaatt

SEQ ID NO: 562367 - DNA, 19 bp, Mus musculus
  siRNA target sequence for Tph2 (NM_173391.1,1479-1497).
cgcagagcattgaaattct

SEQ ID NO: 562368 - DNA, 19 bp, Mus musculus
  siRNA target sequence for Tph2 (NM_173391.1,1483-1501).
gagcattgaaattctgaaa

SEQ ID NO: 562369 - DNA, 19 bp, Mus musculus
  siRNA target sequence for Tph2 (NM_173391.1,1498-1516).
gaaagacaccagaagtatt

SEQ ID NO: 562370 - DNA, 19 bp, Mus musculus
  siRNA target sequence for Tph2 (NM_173391.1,1506-1524).
ccagaagtattgagaatgt

SEQ ID NO: 562371 - DNA, 19 bp, Mus musculus
  siRNA target sequence for Tph2 (NM_173391.1,1529-1547).
caggacctgcgcagtgatt

SEQ ID NO: 562372 - DNA, 19 bp, Mus musculus
  siRNA target sequence for Tph2 (NM_173391.1,1532-1550).
gacctgcgcagtgatttga

SEQ ID NO: 562373 - DNA, 19 bp, Mus musculus
  siRNA target sequence for Tph2 (NM_173391.1,1535-1553).
ctgcgcagtgatttgaaca

SEQ ID NO: 562374 - DNA, 19 bp, Mus musculus
  siRNA target sequence for Tph2 (NM_173391.1,1570-1588).
gaataaaatgaaccaatat

SEQ ID NO: 562375 - DNA, 19 bp, Mus musculus
  siRNA target sequence for 1200011D03Rik (NM_023617.1,214-232).
ggagtcagatgagcttatt

SEQ ID NO: 562376 - DNA, 19 bp, Mus musculus
  siRNA target sequence for 1200011D03Rik (NM_023617.1,215-233).
gagtcagatgagcttattt

SEQ ID NO: 562377 - DNA, 19 bp, Mus musculus
  siRNA target sequence for 1200011D03Rik (NM_023617.1,272-290).
gaccctgaggttaatttat

SEQ ID NO: 562378 - DNA, 19 bp, Mus musculus
  siRNA target sequence for 1200011D03Rik (NM_023617.1,278-296).
gaggttaatttattgttct

SEQ ID NO: 562379 - DNA, 19 bp, Mus musculus
  siRNA target sequence for 1200011D03Rik (NM_023617.1,683-701).
gagagtgcgaaaagtttct

SEQ ID NO: 562380 - DNA, 19 bp, Mus musculus
  siRNA target sequence for 1200011D03Rik (NM_023617.1,727-745).
gaatggggaagggaaatgt

SEQ ID NO: 562381 - DNA, 19 bp, Mus musculus
  siRNA target sequence for 1200011D03Rik (NM_023617.1,786-804).
gtgtttgcaccaagttgta

SEQ ID NO: 562382 - DNA, 19 bp, Mus musculus
  siRNA target sequence for 1200011D03Rik (NM_023617.1,833-851).
ccaactcaggagcttatat

SEQ ID NO: 562383 - DNA, 19 bp, Mus musculus
  siRNA target sequence for 1200011D03Rik (NM_023617.1,834-852).
caactcaggagcttatatt

SEQ ID NO: 562384 - DNA, 19 bp, Mus musculus
  siRNA target sequence for 1200011D03Rik (NM_023617.1,874-892).
ggccgaggagtcccaaaat

SEQ ID NO: 562385 - DNA, 19 bp, Mus musculus
  siRNA target sequence for 1200011D03Rik (NM_023617.1,875-893).
gccgaggagtcccaaaata

SEQ ID NO: 562386 - DNA, 19 bp, Mus musculus
  siRNA target sequence for 1200011D03Rik (NM_023617.1,933-951).
ccccaggaaccctaaatga

SEQ ID NO: 562387 - DNA, 19 bp, Mus musculus
  siRNA target sequence for 1200011D03Rik (NM_023617.1,1005-1023).
cctatctggggcttcatat

SEQ ID NO: 562388 - DNA, 19 bp, Mus musculus
  siRNA target sequence for 1200011D03Rik (NM_023617.1,1010-1028).
ctggggcttcatatgaagt

SEQ ID NO: 562389 - DNA, 19 bp, Mus musculus
  siRNA target sequence for 1200011D03Rik (NM_023617.1,1027-1045).
gttcacagacgtatcttat

SEQ ID NO: 562390 - DNA, 19 bp, Mus musculus
  siRNA target sequence for 1200011D03Rik (NM_023617.1,1030-1048).
cacagacgtatcttatcca

SEQ ID NO: 562391 - DNA, 19 bp, Mus musculus
  siRNA target sequence for 1200011D03Rik (NM_023617.1,1032-1050).
cagacgtatcttatccaat

SEQ ID NO: 562392 - DNA, 19 bp, Mus musculus
  siRNA target sequence for 1200011D03Rik (NM_023617.1,1034-1052).
gacgtatcttatccaatta

SEQ ID NO: 562393 - DNA, 19 bp, Mus musculus
  siRNA target sequence for 1200011D03Rik (NM_023617.1,1059-1077).
ctcctgcaaggatcttaga

SEQ ID NO: 562394 - DNA, 19 bp, Mus musculus
  siRNA target sequence for 1200011D03Rik (NM_023617.1,1065-1083).
caaggatcttagaattatt

SEQ ID NO: 562395 - DNA, 19 bp, Mus musculus
  siRNA target sequence for 1200011D03Rik (NM_023617.1,1257-1275).
cctccttaggtggtcatat

SEQ ID NO: 562396 - DNA, 19 bp, Mus musculus
  siRNA target sequence for 1200011D03Rik (NM_023617.1,1258-1276).
ctccttaggtggtcatatt

SEQ ID NO: 562397 - DNA, 19 bp, Mus musculus
  siRNA target sequence for 1200011D03Rik (NM_023617.1,1260-1278).
ccttaggtggtcatattat

SEQ ID NO: 562398 - DNA, 19 bp, Mus musculus
  siRNA target sequence for 1200011D03Rik (NM_023617.1,1265-1283).
ggtggtcatattatcagta

SEQ ID NO: 562399 - DNA, 19 bp, Mus musculus
  siRNA target sequence for 1200011D03Rik (NM_023617.1,1499-1517).
cagcaaaacgcgtttgcaa

SEQ ID NO: 562400 - DNA, 19 bp, Mus musculus
  siRNA target sequence for 1200011D03Rik (NM_023617.1,1507-1525).
cgcgtttgcaacagtgaat

SEQ ID NO: 562401 - DNA, 19 bp, Mus musculus
  siRNA target sequence for 1200011D03Rik (NM_023617.1,1550-1568).
gaggacacaaacaccatta

SEQ ID NO: 562402 - DNA, 19 bp, Mus musculus
  siRNA target sequence for 1200011D03Rik (NM_023617.1,1569-1587).
cagacttggggatcttata

SEQ ID NO: 562403 - DNA, 19 bp, Mus musculus
  siRNA target sequence for 1200011D03Rik (NM_023617.1,1605-1623).
ccgtaatcagcgcagataa

SEQ ID NO: 562404 - DNA, 19 bp, Mus musculus
  siRNA target sequence for 1200011D03Rik (NM_023617.1,1607-1625).
gtaatcagcgcagataagt

SEQ ID NO: 562405 - DNA, 19 bp, Mus musculus
  siRNA target sequence for 1200011D03Rik (NM_023617.1,1722-1740).
ctggagggatggaggaata

SEQ ID NO: 562406 - DNA, 19 bp, Mus musculus
  siRNA target sequence for 1200011D03Rik (NM_023617.1,1732-1750).
ggaggaataccgaaagact

SEQ ID NO: 562407 - DNA, 19 bp, Mus musculus
  siRNA target sequence for 1200011D03Rik (NM_023617.1,1896-1914).
catttcaggatgtagactt

SEQ ID NO: 562408 - DNA, 19 bp, Mus musculus
  siRNA target sequence for 1200011D03Rik (NM_023617.1,1954-1972).
gcatcagtctggcattaaa

SEQ ID NO: 562409 - DNA, 19 bp, Mus musculus
  siRNA target sequence for 1200011D03Rik (NM_023617.1,1978-1996).
cacaggagaggcagtattt

SEQ ID NO: 562410 - DNA, 19 bp, Mus musculus
  siRNA target sequence for 1200011D03Rik (NM_023617.1,1991-2009).
gtattttgtgatgatatgt

SEQ ID NO: 562411 - DNA, 19 bp, Mus musculus
  siRNA target sequence for 1200011D03Rik (NM_023617.1,2049-2067).
gcagcaagtcacatgctaa

SEQ ID NO: 562412 - DNA, 19 bp, Mus musculus
  siRNA target sequence for 1200011D03Rik (NM_023617.1,2050-2068).
cagcaagtcacatgctaaa

SEQ ID NO: 562413 - DNA, 19 bp, Mus musculus
  siRNA target sequence for 1200011D03Rik (NM_023617.1,2191-2209).
gatctgcgtgggtcaaatt

SEQ ID NO: 562414 - DNA, 19 bp, Mus musculus
  siRNA target sequence for 1200011D03Rik (NM_023617.1,2217-2235).
ctgtggccgctgactctta

SEQ ID NO: 562415 - DNA, 19 bp, Mus musculus
  siRNA target sequence for 1200011D03Rik (NM_023617.1,2221-2239).
ggccgctgactcttatgct

SEQ ID NO: 562416 - DNA, 19 bp, Mus musculus
  siRNA target sequence for 1200011D03Rik (NM_023617.1,2249-2267).
caggccgcaaaaaaagtga

SEQ ID NO: 562417 - DNA, 19 bp, Mus musculus
  siRNA target sequence for 1200011D03Rik (NM_023617.1,2308-2326).
gcaggatgcactgcaatat

SEQ ID NO: 562418 - DNA, 19 bp, Mus musculus
  siRNA target sequence for 1200011D03Rik (NM_023617.1,2315-2333).
gcactgcaatatgaatcat

SEQ ID NO: 562419 - DNA, 19 bp, Mus musculus
  siRNA target sequence for 1200011D03Rik (NM_023617.1,2320-2338).
gcaatatgaatcattcatt

SEQ ID NO: 562420 - DNA, 19 bp, Mus musculus
  siRNA target sequence for 1200011D03Rik (NM_023617.1,2340-2358).
gacctgaaagaaaactaga

SEQ ID NO: 562421 - DNA, 19 bp, Mus musculus
  siRNA target sequence for 1200011D03Rik (NM_023617.1,2349-2367).
gaaaactagaacaaggaaa

SEQ ID NO: 562422 - DNA, 19 bp, Mus musculus
  siRNA target sequence for 1200011D03Rik (NM_023617.1,2551-2569).
cttgggcatcccaaagaat

SEQ ID NO: 562423 - DNA, 19 bp, Mus musculus
  siRNA target sequence for 1200011D03Rik (NM_023617.1,2561-2579).
ccaaagaataggatcaact

SEQ ID NO: 562424 - DNA, 19 bp, Mus musculus
  siRNA target sequence for 1200011D03Rik (NM_023617.1,2676-2694).
gcccaatacgtttcattct

SEQ ID NO: 562425 - DNA, 19 bp, Mus musculus
  siRNA target sequence for 1200011D03Rik (NM_023617.1,2677-2695).
cccaatacgtttcattcta

SEQ ID NO: 562426 - DNA, 19 bp, Mus musculus
  siRNA target sequence for 1200011D03Rik (NM_023617.1,2679-2697).
caatacgtttcattctaga

SEQ ID NO: 562427 - DNA, 19 bp, Mus musculus
  siRNA target sequence for 1200011D03Rik (NM_023617.1,2700-2718).
gtagggatgacatgttgat

SEQ ID NO: 562428 - DNA, 19 bp, Mus musculus
  siRNA target sequence for 1200011D03Rik (NM_023617.1,2704-2722).
ggatgacatgttgataact

SEQ ID NO: 562429 - DNA, 19 bp, Mus musculus
  siRNA target sequence for 1200011D03Rik (NM_023617.1,2735-2753).
ccactactcgggaaataca

SEQ ID NO: 562430 - DNA, 19 bp, Mus musculus
  siRNA target sequence for 1200011D03Rik (NM_023617.1,2736-2754).
cactactcgggaaatacaa

SEQ ID NO: 562431 - DNA, 19 bp, Mus musculus
  siRNA target sequence for 1200011D03Rik (NM_023617.1,2738-2756).
ctactcgggaaatacaaga

SEQ ID NO: 562432 - DNA, 19 bp, Mus musculus
  siRNA target sequence for 1200011D03Rik (NM_023617.1,2787-2805).
cggcagacatccagcttta

SEQ ID NO: 562433 - DNA, 19 bp, Mus musculus
  siRNA target sequence for 1200011D03Rik (NM_023617.1,2789-2807).
gcagacatccagctttata

SEQ ID NO: 562434 - DNA, 19 bp, Mus musculus
  siRNA target sequence for 1200011D03Rik (NM_023617.1,2790-2808).
cagacatccagctttatat

SEQ ID NO: 562435 - DNA, 19 bp, Mus musculus
  siRNA target sequence for 1200011D03Rik (NM_023617.1,2794-2812).
catccagctttatatcaat

SEQ ID NO: 562436 - DNA, 19 bp, Mus musculus
  siRNA target sequence for 1200011D03Rik (NM_023617.1,2816-2834).
ggctgcaccccagatgatt

SEQ ID NO: 562437 - DNA, 19 bp, Mus musculus
  siRNA target sequence for 1200011D03Rik (NM_023617.1,2903-2921).
cgaggtcgagtctgtaaga

SEQ ID NO: 562438 - DNA, 19 bp, Mus musculus
  siRNA target sequence for 1200011D03Rik (NM_023617.1,3041-3059).
gagctaaacatgtacagaa

SEQ ID NO: 562439 - DNA, 19 bp, Mus musculus
  siRNA target sequence for 1200011D03Rik (NM_023617.1,3049-3067).
catgtacagaacaatcgat

SEQ ID NO: 562440 - DNA, 19 bp, Mus musculus
  siRNA target sequence for 1200011D03Rik (NM_023617.1,3060-3078).
caatcgataggacaattca

SEQ ID NO: 562441 - DNA, 19 bp, Mus musculus
  siRNA target sequence for 1200011D03Rik (NM_023617.1,3119-3137).
gaggcatgtgtggaaaatt

SEQ ID NO: 562442 - DNA, 19 bp, Mus musculus
  siRNA target sequence for 1200011D03Rik (NM_023617.1,3122-3140).
gcatgtgtggaaaattctt

SEQ ID NO: 562443 - DNA, 19 bp, Mus musculus
  siRNA target sequence for 1200011D03Rik (NM_023617.1,3145-3163).
ctataacaggaaaaaagct

SEQ ID NO: 562444 - DNA, 19 bp, Mus musculus
  siRNA target sequence for 1200011D03Rik (NM_023617.1,3236-3254).
ggatttccaaagacatttt

SEQ ID NO: 562445 - DNA, 19 bp, Mus musculus
  siRNA target sequence for 1200011D03Rik (NM_023617.1,3243-3261).
caaagacattttattatca

SEQ ID NO: 562446 - DNA, 19 bp, Mus musculus
  siRNA target sequence for 1200011D03Rik (NM_023617.1,3267-3285).
ccgctttggtccagatcta

SEQ ID NO: 562447 - DNA, 19 bp, Mus musculus
  siRNA target sequence for 1200011D03Rik (NM_023617.1,3286-3304).
cacagatgggtctgtacta

SEQ ID NO: 562448 - DNA, 19 bp, Mus musculus
  siRNA target sequence for 1200011D03Rik (NM_023617.1,3323-3341).
gaactgggacaaggtatta

SEQ ID NO: 562449 - DNA, 19 bp, Mus musculus
  siRNA target sequence for 1200011D03Rik (NM_023617.1,3335-3353).
ggtattaacaccaaaatga

SEQ ID NO: 562450 - DNA, 19 bp, Mus musculus
  siRNA target sequence for 1200011D03Rik (NM_023617.1,3336-3354).
gtattaacaccaaaatgat

SEQ ID NO: 562451 - DNA, 19 bp, Mus musculus
  siRNA target sequence for 1200011D03Rik (NM_023617.1,3362-3380).
gccagccgtgaattaaaga

SEQ ID NO: 562452 - DNA, 19 bp, Mus musculus
  siRNA target sequence for 1200011D03Rik (NM_023617.1,3363-3381).
ccagccgtgaattaaagat

SEQ ID NO: 562453 - DNA, 19 bp, Mus musculus
  siRNA target sequence for 1200011D03Rik (NM_023617.1,3368-3386).
cgtgaattaaagataccta

SEQ ID NO: 562454 - DNA, 19 bp, Mus musculus
  siRNA target sequence for 1200011D03Rik (NM_023617.1,3379-3397).
gatacctatgtcttatata

SEQ ID NO: 562455 - DNA, 19 bp, Mus musculus
  siRNA target sequence for 1200011D03Rik (NM_023617.1,3453-3471).
ccaccggtgccgatgtcaa

SEQ ID NO: 562456 - DNA, 19 bp, Mus musculus
  siRNA target sequence for 1200011D03Rik (NM_023617.1,3472-3490).
cgggagagctgttcagaat

SEQ ID NO: 562457 - DNA, 19 bp, Mus musculus
  siRNA target sequence for 1200011D03Rik (NM_023617.1,3693-3711).
gttctgaggttgaaattga

SEQ ID NO: 562458 - DNA, 19 bp, Mus musculus
  siRNA target sequence for 1200011D03Rik (NM_023617.1,3736-3754).
cattagaaccgacattgtt

SEQ ID NO: 562459 - DNA, 19 bp, Mus musculus
  siRNA target sequence for 1200011D03Rik (NM_023617.1,3741-3759).
gaaccgacattgttatgga

SEQ ID NO: 562460 - DNA, 19 bp, Mus musculus
  siRNA target sequence for 1200011D03Rik (NM_023617.1,3757-3775).
ggatggatcattcagtata

SEQ ID NO: 562461 - DNA, 19 bp, Mus musculus
  siRNA target sequence for 1200011D03Rik (NM_023617.1,3799-3817).
gattgaaggggcatttgtt

SEQ ID NO: 562462 - DNA, 19 bp, Mus musculus
  siRNA target sequence for 1200011D03Rik (NM_023617.1,3818-3836).
caaggtcttggactgtata

SEQ ID NO: 562463 - DNA, 19 bp, Mus musculus
  siRNA target sequence for 1200011D03Rik (NM_023617.1,3858-3876).
cacctgaaggagtcctata

SEQ ID NO: 562464 - DNA, 19 bp, Mus musculus
  siRNA target sequence for 1200011D03Rik (NM_023617.1,3860-3878).
cctgaaggagtcctataca

SEQ ID NO: 562465 - DNA, 19 bp, Mus musculus
  siRNA target sequence for 1200011D03Rik (NM_023617.1,3884-3902).
ggtccacaccagtacaaaa

SEQ ID NO: 562466 - DNA, 19 bp, Mus musculus
  siRNA target sequence for 1200011D03Rik (NM_023617.1,3885-3903).
gtccacaccagtacaaaat

SEQ ID NO: 562467 - DNA, 19 bp, Mus musculus
  siRNA target sequence for 1200011D03Rik (NM_023617.1,3890-3908).
caccagtacaaaatagcat

SEQ ID NO: 562468 - DNA, 19 bp, Mus musculus
  siRNA target sequence for 1200011D03Rik (NM_023617.1,4080-4098).
ccccaatttgggccataaa

SEQ ID NO: 562469 - DNA, 19 bp, Mus musculus
  siRNA target sequence for 1200011D03Rik (NM_023617.1,4157-4175).
gttccacaaacggattcta

SEQ ID NO: 562470 - DNA, 19 bp, Mus musculus
  siRNA target sequence for 1200011D03Rik (NM_023617.1,4160-4178).
ccacaaacggattctaaat

SEQ ID NO: 562471 - DNA, 19 bp, Mus musculus
  siRNA target sequence for 1200011D03Rik (NM_023617.1,4163-4181).
caaacggattctaaatgct

SEQ ID NO: 562472 - DNA, 19 bp, Mus musculus
  siRNA target sequence for Aox1 (NM_009676.1,208-226).
caggcatcatcctgtcaat

SEQ ID NO: 562473 - DNA, 19 bp, Mus musculus
  siRNA target sequence for Aox1 (NM_009676.1,297-315).
ggaccaggcttcatcctat

SEQ ID NO: 562474 - DNA, 19 bp, Mus musculus
  siRNA target sequence for Aox1 (NM_009676.1,298-316).
gaccaggcttcatcctatt

SEQ ID NO: 562475 - DNA, 19 bp, Mus musculus
  siRNA target sequence for Aox1 (NM_009676.1,300-318).
ccaggcttcatcctattca

SEQ ID NO: 562476 - DNA, 19 bp, Mus musculus
  siRNA target sequence for Aox1 (NM_009676.1,413-431).
cccactctagatcagttaa

SEQ ID NO: 562477 - DNA, 19 bp, Mus musculus
  siRNA target sequence for Aox1 (NM_009676.1,415-433).
cactctagatcagttaact

SEQ ID NO: 562478 - DNA, 19 bp, Mus musculus
  siRNA target sequence for Aox1 (NM_009676.1,437-455).
gcccttggtgggaatctgt

SEQ ID NO: 562479 - DNA, 19 bp, Mus musculus
  siRNA target sequence for Aox1 (NM_009676.1,465-483).
ctggatataggcccataat

SEQ ID NO: 562480 - DNA, 19 bp, Mus musculus
  siRNA target sequence for Aox1 (NM_009676.1,468-486).
gatataggcccataattga

SEQ ID NO: 562481 - DNA, 19 bp, Mus musculus
  siRNA target sequence for Aox1 (NM_009676.1,547-565).
ctgtttggatcaagaaata

SEQ ID NO: 562482 - DNA, 19 bp, Mus musculus
  siRNA target sequence for Aox1 (NM_009676.1,649-667).
ccaagagctgatatttcct

SEQ ID NO: 562483 - DNA, 19 bp, Mus musculus
  siRNA target sequence for Aox1 (NM_009676.1,665-683).
cctcccgagctaatgagaa

SEQ ID NO: 562484 - DNA, 19 bp, Mus musculus
  siRNA target sequence for Aox1 (NM_009676.1,666-684).
ctcccgagctaatgagaat

SEQ ID NO: 562485 - DNA, 19 bp, Mus musculus
  siRNA target sequence for Aox1 (NM_009676.1,670-688).
cgagctaatgagaatagct

SEQ ID NO: 562486 - DNA, 19 bp, Mus musculus
  siRNA target sequence for Aox1 (NM_009676.1,761-779).
gaacttgtggaagctaaat

SEQ ID NO: 562487 - DNA, 19 bp, Mus musculus
  siRNA target sequence for Aox1 (NM_009676.1,767-785).
gtggaagctaaattcaagt

SEQ ID NO: 562488 - DNA, 19 bp, Mus musculus
  siRNA target sequence for Aox1 (NM_009676.1,769-787).
ggaagctaaattcaagtat

SEQ ID NO: 562489 - DNA, 19 bp, Mus musculus
  siRNA target sequence for Aox1 (NM_009676.1,788-806).
ccccaggcccctattgtca

SEQ ID NO: 562490 - DNA, 19 bp, Mus musculus
  siRNA target sequence for Aox1 (NM_009676.1,789-807).
cccaggcccctattgtcat

SEQ ID NO: 562491 - DNA, 19 bp, Mus musculus
  siRNA target sequence for Aox1 (NM_009676.1,821-839).
gtgggacctgaagtaaagt

SEQ ID NO: 562492 - DNA, 19 bp, Mus musculus
  siRNA target sequence for Aox1 (NM_009676.1,823-841).
gggacctgaagtaaagttt

SEQ ID NO: 562493 - DNA, 19 bp, Mus musculus
  siRNA target sequence for Aox1 (NM_009676.1,958-976).
ggacattctggctgatata

SEQ ID NO: 562494 - DNA, 19 bp, Mus musculus
  siRNA target sequence for Aox1 (NM_009676.1,1134-1152).
gtaactgtaccctcaactt

SEQ ID NO: 562495 - DNA, 19 bp, Mus musculus
  siRNA target sequence for Aox1 (NM_009676.1,1169-1187).
gaacggcggatccctttaa

SEQ ID NO: 562496 - DNA, 19 bp, Mus musculus
  siRNA target sequence for Aox1 (NM_009676.1,1173-1191).
ggcggatccctttaagtga

SEQ ID NO: 562497 - DNA, 19 bp, Mus musculus
  siRNA target sequence for Aox1 (NM_009676.1,1174-1192).
gcggatccctttaagtgaa

SEQ ID NO: 562498 - DNA, 19 bp, Mus musculus
  siRNA target sequence for Aox1 (NM_009676.1,1338-1356).
ccggaatgagagtcctttt

SEQ ID NO: 562499 - DNA, 19 bp, Mus musculus
  siRNA target sequence for Aox1 (NM_009676.1,1339-1357).
cggaatgagagtccttttt

SEQ ID NO: 562500 - DNA, 19 bp, Mus musculus
  siRNA target sequence for Aox1 (NM_009676.1,1340-1358).
ggaatgagagtccttttta

SEQ ID NO: 562501 - DNA, 19 bp, Mus musculus
  siRNA target sequence for Aox1 (NM_009676.1,1365-1383).
gaggtggcgtcattgaaga

SEQ ID NO: 562502 - DNA, 19 bp, Mus musculus
  siRNA target sequence for Aox1 (NM_009676.1,1373-1391).
gtcattgaagagttatcca

SEQ ID NO: 562503 - DNA, 19 bp, Mus musculus
  siRNA target sequence for Aox1 (NM_009676.1,1400-1418).
ggaggtgtcggttcaacta

SEQ ID NO: 562504 - DNA, 19 bp, Mus musculus
  siRNA target sequence for Aox1 (NM_009676.1,1403-1421).
ggtgtcggttcaactatca

SEQ ID NO: 562505 - DNA, 19 bp, Mus musculus
  siRNA target sequence for Aox1 (NM_009676.1,1404-1422).
gtgtcggttcaactatcat

SEQ ID NO: 562506 - DNA, 19 bp, Mus musculus
  siRNA target sequence for Aox1 (NM_009676.1,1406-1424).
gtcggttcaactatcatca

SEQ ID NO: 562507 - DNA, 19 bp, Mus musculus
  siRNA target sequence for Aox1 (NM_009676.1,1701-1719).
cattaacccaccagaatgt

SEQ ID NO: 562508 - DNA, 19 bp, Mus musculus
  siRNA target sequence for Aox1 (NM_009676.1,1768-1786).
cctttctgggattaaacat

SEQ ID NO: 562509 - DNA, 19 bp, Mus musculus
  siRNA target sequence for Aox1 (NM_009676.1,1824-1842).
cagtagaccgggagctttt

SEQ ID NO: 562510 - DNA, 19 bp, Mus musculus
  siRNA target sequence for Aox1 (NM_009676.1,1833-1851).
gggagcttttcctcacttt

SEQ ID NO: 562511 - DNA, 19 bp, Mus musculus
  siRNA target sequence for Aox1 (NM_009676.1,1843-1861).
cctcacttttgtaacaagt

SEQ ID NO: 562512 - DNA, 19 bp, Mus musculus
  siRNA target sequence for Aox1 (NM_009676.1,1846-1864).
cacttttgtaacaagttca

SEQ ID NO: 562513 - DNA, 19 bp, Mus musculus
  siRNA target sequence for Aox1 (NM_009676.1,1933-1951).
cattactgcagatcatctt

SEQ ID NO: 562514 - DNA, 19 bp, Mus musculus
  siRNA target sequence for Aox1 (NM_009676.1,1966-1984).
cttcggcacagagacattt

SEQ ID NO: 562515 - DNA, 19 bp, Mus musculus
  siRNA target sequence for Aox1 (NM_009676.1,2100-2118).
cgcctctgatcctaacgat

SEQ ID NO: 562516 - DNA, 19 bp, Mus musculus
  siRNA target sequence for Aox1 (NM_009676.1,2101-2119).
gcctctgatcctaacgatt

SEQ ID NO: 562517 - DNA, 19 bp, Mus musculus
  siRNA target sequence for Aox1 (NM_009676.1,2180-2198).
gttgacgaagcatttaaaa

SEQ ID NO: 562518 - DNA, 19 bp, Mus musculus
  siRNA target sequence for Aox1 (NM_009676.1,2298-2316).
gagagattgacatctatgt

SEQ ID NO: 562519 - DNA, 19 bp, Mus musculus
  siRNA target sequence for Aox1 (NM_009676.1,2331-2349).
ccaaatatatacaggatat

SEQ ID NO: 562520 - DNA, 19 bp, Mus musculus
  siRNA target sequence for Aox1 (NM_009676.1,2541-2559).
gccatccttaccttggaaa

SEQ ID NO: 562521 - DNA, 19 bp, Mus musculus
  siRNA target sequence for Aox1 (NM_009676.1,2546-2564).
ccttaccttggaaagtata

SEQ ID NO: 562522 - DNA, 19 bp, Mus musculus
  siRNA target sequence for Aox1 (NM_009676.1,2551-2569).
ccttggaaagtataaagct

SEQ ID NO: 562523 - DNA, 19 bp, Mus musculus
  siRNA target sequence for Aox1 (NM_009676.1,2644-2662).
gtcactatgggtgatagaa

SEQ ID NO: 562524 - DNA, 19 bp, Mus musculus
  siRNA target sequence for Aox1 (NM_009676.1,2646-2664).
cactatgggtgatagaaat

SEQ ID NO: 562525 - DNA, 19 bp, Mus musculus
  siRNA target sequence for Aox1 (NM_009676.1,2806-2824).
cacagaagtggcaatcaaa

SEQ ID NO: 562526 - DNA, 19 bp, Mus musculus
  siRNA target sequence for Aox1 (NM_009676.1,2840-2858).
gagcaggttcgaaccataa

SEQ ID NO: 562527 - DNA, 19 bp, Mus musculus
  siRNA target sequence for Aox1 (NM_009676.1,2842-2860).
gcaggttcgaaccataaat

SEQ ID NO: 562528 - DNA, 19 bp, Mus musculus
  siRNA target sequence for Aox1 (NM_009676.1,2843-2861).
caggttcgaaccataaata

SEQ ID NO: 562529 - DNA, 19 bp, Mus musculus
  siRNA target sequence for Aox1 (NM_009676.1,2846-2864).
gttcgaaccataaatatgt

SEQ ID NO: 562530 - DNA, 19 bp, Mus musculus
  siRNA target sequence for Aox1 (NM_009676.1,2873-2891).
gttgatactacccattaca

SEQ ID NO: 562531 - DNA, 19 bp, Mus musculus
  siRNA target sequence for Aox1 (NM_009676.1,2883-2901).
cccattacaagcaagagtt

SEQ ID NO: 562532 - DNA, 19 bp, Mus musculus
  siRNA target sequence for Aox1 (NM_009676.1,3037-3055).
gtttcctgtgggtattgga

SEQ ID NO: 562533 - DNA, 19 bp, Mus musculus
  siRNA target sequence for Aox1 (NM_009676.1,3074-3092).
gcagctgccttggttcata

SEQ ID NO: 562534 - DNA, 19 bp, Mus musculus
  siRNA target sequence for Aox1 (NM_009676.1,3141-3159).
ggcagggtgtgcacactaa

SEQ ID NO: 562535 - DNA, 19 bp, Mus musculus
  siRNA target sequence for Aox1 (NM_009676.1,3142-3160).
gcagggtgtgcacactaaa

SEQ ID NO: 562536 - DNA, 19 bp, Mus musculus
  siRNA target sequence for Aox1 (NM_009676.1,3143-3161).
cagggtgtgcacactaaaa

SEQ ID NO: 562537 - DNA, 19 bp, Mus musculus
  siRNA target sequence for Aox1 (NM_009676.1,3146-3164).
ggtgtgcacactaaaatga

SEQ ID NO: 562538 - DNA, 19 bp, Mus musculus
  siRNA target sequence for Aox1 (NM_009676.1,3147-3165).
gtgtgcacactaaaatgat

SEQ ID NO: 562539 - DNA, 19 bp, Mus musculus
  siRNA target sequence for Aox1 (NM_009676.1,3170-3188).
gtggtcagccgggaactaa

SEQ ID NO: 562540 - DNA, 19 bp, Mus musculus
  siRNA target sequence for Aox1 (NM_009676.1,3215-3233).
cgtgggacaagcacagaaa

SEQ ID NO: 562541 - DNA, 19 bp, Mus musculus
  siRNA target sequence for Aox1 (NM_009676.1,3230-3248).
gaaaccgtccccaacacaa

SEQ ID NO: 562542 - DNA, 19 bp, Mus musculus
  siRNA target sequence for Aox1 (NM_009676.1,3304-3322).
ctgtcagacccttctaaaa

SEQ ID NO: 562543 - DNA, 19 bp, Mus musculus
  siRNA target sequence for Aox1 (NM_009676.1,3381-3399).
ctgcttttgaccaaagcat

SEQ ID NO: 562544 - DNA, 19 bp, Mus musculus
  siRNA target sequence for Aox1 (NM_009676.1,3402-3420).
gtctctcggctgttggata

SEQ ID NO: 562545 - DNA, 19 bp, Mus musculus
  siRNA target sequence for Aox1 (NM_009676.1,3404-3422).
ctctcggctgttggatatt

SEQ ID NO: 562546 - DNA, 19 bp, Mus musculus
  siRNA target sequence for Aox1 (NM_009676.1,3417-3435).
gatatttcaggggttatga

SEQ ID NO: 562547 - DNA, 19 bp, Mus musculus
  siRNA target sequence for Aox1 (NM_009676.1,3426-3444).
ggggttatgagtcgaatat

SEQ ID NO: 562548 - DNA, 19 bp, Mus musculus
  siRNA target sequence for Aox1 (NM_009676.1,3429-3447).
gttatgagtcgaatataga

SEQ ID NO: 562549 - DNA, 19 bp, Mus musculus
  siRNA target sequence for Aox1 (NM_009676.1,3461-3479).
gaaggtcatcccttcgaat

SEQ ID NO: 562550 - DNA, 19 bp, Mus musculus
  siRNA target sequence for Aox1 (NM_009676.1,3464-3482).
ggtcatcccttcgaatact

SEQ ID NO: 562551 - DNA, 19 bp, Mus musculus
  siRNA target sequence for Aox1 (NM_009676.1,3465-3483).
gtcatcccttcgaatactt

SEQ ID NO: 562552 - DNA, 19 bp, Mus musculus
  siRNA target sequence for Aox1 (NM_009676.1,3522-3540).
gcctgactggggaccataa

SEQ ID NO: 562553 - DNA, 19 bp, Mus musculus
  siRNA target sequence for Aox1 (NM_009676.1,3566-3584).
gatgttggccacagcataa

SEQ ID NO: 562554 - DNA, 19 bp, Mus musculus
  siRNA target sequence for Aox1 (NM_009676.1,3607-3625).
ggttgaaggtgcatttatt

SEQ ID NO: 562555 - DNA, 19 bp, Mus musculus
  siRNA target sequence for Aox1 (NM_009676.1,3629-3647).
ggaatgggactttacacaa

SEQ ID NO: 562556 - DNA, 19 bp, Mus musculus
  siRNA target sequence for Aox1 (NM_009676.1,3668-3686).
cctcagggcactctataca

SEQ ID NO: 562557 - DNA, 19 bp, Mus musculus
  siRNA target sequence for Aox1 (NM_009676.1,3687-3705).
gtcgtggtccaaaccaata

SEQ ID NO: 562558 - DNA, 19 bp, Mus musculus
  siRNA target sequence for Aox1 (NM_009676.1,3692-3710).
ggtccaaaccaatacaaga

SEQ ID NO: 562559 - DNA, 19 bp, Mus musculus
  siRNA target sequence for Aox1 (NM_009676.1,3693-3711).
gtccaaaccaatacaagat

SEQ ID NO: 562560 - DNA, 19 bp, Mus musculus
  siRNA target sequence for Aox1 (NM_009676.1,3733-3751).
cacggaaatgcacatttct

SEQ ID NO: 562561 - DNA, 19 bp, Mus musculus
  siRNA target sequence for Aox1 (NM_009676.1,3759-3777).
ccccatctgaacactcaaa

SEQ ID NO: 562562 - DNA, 19 bp, Mus musculus
  siRNA target sequence for Aox1 (NM_009676.1,3761-3779).
ccatctgaacactcaaaca

SEQ ID NO: 562563 - DNA, 19 bp, Mus musculus
  siRNA target sequence for Aox1 (NM_009676.1,3770-3788).
cactcaaacaccctgtatt

SEQ ID NO: 562564 - DNA, 19 bp, Mus musculus
  siRNA target sequence for Aox1 (NM_009676.1,3823-3841).
gggatgttcggtatttttt

SEQ ID NO: 562565 - DNA, 19 bp, Mus musculus
  siRNA target sequence for Aox1 (NM_009676.1,3958-3976).
caaaatgatcccaagagat

SEQ ID NO: 562566 - DNA, 19 bp, Mus musculus
  siRNA target sequence for Suox (NM_173733.2,274-292).
gagtcaccacggatgtact

SEQ ID NO: 562567 - DNA, 19 bp, Mus musculus
  siRNA target sequence for Suox (NM_173733.2,278-296).
caccacggatgtactctaa

SEQ ID NO: 562568 - DNA, 19 bp, Mus musculus
  siRNA target sequence for Suox (NM_173733.2,281-299).
cacggatgtactctaaaga

SEQ ID NO: 562569 - DNA, 19 bp, Mus musculus
  siRNA target sequence for Suox (NM_173733.2,357-375).
ggtcttcgatgtcacaaaa

SEQ ID NO: 562570 - DNA, 19 bp, Mus musculus
  siRNA target sequence for Suox (NM_173733.2,358-376).
gtcttcgatgtcacaaaat

SEQ ID NO: 562571 - DNA, 19 bp, Mus musculus
  siRNA target sequence for Suox (NM_173733.2,392-410).
caggaggaccatcaaaact

SEQ ID NO: 562572 - DNA, 19 bp, Mus musculus
  siRNA target sequence for Suox (NM_173733.2,395-413).
gaggaccatcaaaactgat

SEQ ID NO: 562573 - DNA, 19 bp, Mus musculus
  siRNA target sequence for Suox (NM_173733.2,471-489).
gccccatgtacgtgagtta

SEQ ID NO: 562574 - DNA, 19 bp, Mus musculus
  siRNA target sequence for Suox (NM_173733.2,484-502).
gagttactggccgagtata

SEQ ID NO: 562575 - DNA, 19 bp, Mus musculus
  siRNA target sequence for Suox (NM_173733.2,560-578).
cttatgctgatgatcctat

SEQ ID NO: 562576 - DNA, 19 bp, Mus musculus
  siRNA target sequence for Suox (NM_173733.2,586-604).
ccagccctgaggattaata

SEQ ID NO: 562577 - DNA, 19 bp, Mus musculus
  siRNA target sequence for Suox (NM_173733.2,632-650).
ctcctgaactgctaactga

SEQ ID NO: 562578 - DNA, 19 bp, Mus musculus
  siRNA target sequence for Suox (NM_173733.2,643-661).
ctaactgaaggctacatca

SEQ ID NO: 562579 - DNA, 19 bp, Mus musculus
  siRNA target sequence for Suox (NM_173733.2,654-672).
ctacatcacaccaaatcct

SEQ ID NO: 562580 - DNA, 19 bp, Mus musculus
  siRNA target sequence for Suox (NM_173733.2,720-738).
cacctatcgcttacatgta

SEQ ID NO: 562581 - DNA, 19 bp, Mus musculus
  siRNA target sequence for Suox (NM_173733.2,723-741).
ctatcgcttacatgtagta

SEQ ID NO: 562582 - DNA, 19 bp, Mus musculus
  siRNA target sequence for Suox (NM_173733.2,771-789).
gtccttggatgatttgcat

SEQ ID NO: 562583 - DNA, 19 bp, Mus musculus
  siRNA target sequence for Suox (NM_173733.2,786-804).
gcataagtttcccaaacat

SEQ ID NO: 562584 - DNA, 19 bp, Mus musculus
  siRNA target sequence for Suox (NM_173733.2,854-872).
gtaaggtcaaggaagtgaa

SEQ ID NO: 562585 - DNA, 19 bp, Mus musculus
  siRNA target sequence for Suox (NM_173733.2,1071-1089).
ggtcctcctggcttatgaa

SEQ ID NO: 562586 - DNA, 19 bp, Mus musculus
  siRNA target sequence for Suox (NM_173733.2,1072-1090).
gtcctcctggcttatgaaa

SEQ ID NO: 562587 - DNA, 19 bp, Mus musculus
  siRNA target sequence for Suox (NM_173733.2,1156-1174).
ggtgcccgtcatgtcaaat

SEQ ID NO: 562588 - DNA, 19 bp, Mus musculus
  siRNA target sequence for Suox (NM_173733.2,1194-1212).
ggaatcagaggagagttat

SEQ ID NO: 562589 - DNA, 19 bp, Mus musculus
  siRNA target sequence for Suox (NM_173733.2,1195-1213).
gaatcagaggagagttata

SEQ ID NO: 562590 - DNA, 19 bp, Mus musculus
  siRNA target sequence for Suox (NM_173733.2,1220-1238).
ggcagaggcgggattacaa

SEQ ID NO: 562591 - DNA, 19 bp, Mus musculus
  siRNA target sequence for Suox (NM_173733.2,1221-1239).
gcagaggcgggattacaaa

SEQ ID NO: 562592 - DNA, 19 bp, Mus musculus
  siRNA target sequence for Suox (NM_173733.2,1258-1276).
gactgggacacggtaaact

SEQ ID NO: 562593 - DNA, 19 bp, Mus musculus
  siRNA target sequence for Suox (NM_173733.2,1262-1280).
gggacacggtaaactttga

SEQ ID NO: 562594 - DNA, 19 bp, Mus musculus
  siRNA target sequence for Suox (NM_173733.2,1292-1310).
caattcaggaactacctat

SEQ ID NO: 562595 - DNA, 19 bp, Mus musculus
  siRNA target sequence for Suox (NM_173733.2,1499-1517).
ggcgaatatggcagttgaa

SEQ ID NO: 562596 - DNA, 19 bp, Mus musculus
  siRNA target sequence for Suox (NM_173733.2,1500-1518).
gcgaatatggcagttgaaa

SEQ ID NO: 562597 - DNA, 19 bp, Mus musculus
  siRNA target sequence for Suox (NM_173733.2,1527-1545).
gccggctgagcaaaaggaa

SEQ ID NO: 562598 - DNA, 19 bp, Mus musculus
  siRNA target sequence for Suox (NM_173733.2,1528-1546).
ccggctgagcaaaaggaat

SEQ ID NO: 562599 - DNA, 19 bp, Mus musculus
  siRNA target sequence for Suox (NM_173733.2,1529-1547).
cggctgagcaaaaggaatt

SEQ ID NO: 562600 - DNA, 19 bp, Mus musculus
  siRNA target sequence for Suox (NM_173733.2,1531-1549).
gctgagcaaaaggaattga

SEQ ID NO: 562601 - DNA, 19 bp, Mus musculus
  siRNA target sequence for Xdh (NM_011723.1,30-48).
cgaggacaacggtagatga

SEQ ID NO: 562602 - DNA, 19 bp, Mus musculus
  siRNA target sequence for Xdh (NM_011723.1,33-51).
ggacaacggtagatgagtt

SEQ ID NO: 562603 - DNA, 19 bp, Mus musculus
  siRNA target sequence for Xdh (NM_011723.1,113-131).
ctggtctaccttagaagaa

SEQ ID NO: 562604 - DNA, 19 bp, Mus musculus
  siRNA target sequence for Xdh (NM_011723.1,116-134).
gtctaccttagaagaaagt

SEQ ID NO: 562605 - DNA, 19 bp, Mus musculus
  siRNA target sequence for Xdh (NM_011723.1,218-236).
cagaacaagatcgttcatt

SEQ ID NO: 562606 - DNA, 19 bp, Mus musculus
  siRNA target sequence for Xdh (NM_011723.1,265-283).
ctgctccttgcatcatgtt

SEQ ID NO: 562607 - DNA, 19 bp, Mus musculus
  siRNA target sequence for Xdh (NM_011723.1,378-396).
gtacccctggtattgtcat

SEQ ID NO: 562608 - DNA, 19 bp, Mus musculus
  siRNA target sequence for Xdh (NM_011723.1,383-401).
cctggtattgtcatgagta

SEQ ID NO: 562609 - DNA, 19 bp, Mus musculus
  siRNA target sequence for Xdh (NM_011723.1,386-404).
ggtattgtcatgagtatgt

SEQ ID NO: 562610 - DNA, 19 bp, Mus musculus
  siRNA target sequence for Xdh (NM_011723.1,595-613).
gattgctccctcatcttct

SEQ ID NO: 562611 - DNA, 19 bp, Mus musculus
  siRNA target sequence for Xdh (NM_011723.1,619-637).
caacccggaggatttcaaa

SEQ ID NO: 562612 - DNA, 19 bp, Mus musculus
  siRNA target sequence for Xdh (NM_011723.1,623-641).
ccggaggatttcaaacctt

SEQ ID NO: 562613 - DNA, 19 bp, Mus musculus
  siRNA target sequence for Xdh (NM_011723.1,702-720).
ggaagacgttgcgttttga

SEQ ID NO: 562614 - DNA, 19 bp, Mus musculus
  siRNA target sequence for Xdh (NM_011723.1,818-836).
gagataggcattgaaatga

SEQ ID NO: 562615 - DNA, 19 bp, Mus musculus
  siRNA target sequence for Xdh (NM_011723.1,933-951).
ccgcttgcccccttagctt

SEQ ID NO: 562616 - DNA, 19 bp, Mus musculus
  siRNA target sequence for Xdh (NM_011723.1,965-983).
ctggcggacgcgattgcta

SEQ ID NO: 562617 - DNA, 19 bp, Mus musculus
  siRNA target sequence for Xdh (NM_011723.1,970-988).
ggacgcgattgctacactt

SEQ ID NO: 562618 - DNA, 19 bp, Mus musculus
  siRNA target sequence for Xdh (NM_011723.1,1144-1162).
gctgaccctcgcatctaga

SEQ ID NO: 562619 - DNA, 19 bp, Mus musculus
  siRNA target sequence for Xdh (NM_011723.1,1227-1245).
gtccagaggagatattggt

SEQ ID NO: 562620 - DNA, 19 bp, Mus musculus
  siRNA target sequence for Xdh (NM_011723.1,1264-1282).
cagcaggaagggtgagttt

SEQ ID NO: 562621 - DNA, 19 bp, Mus musculus
  siRNA target sequence for Xdh (NM_011723.1,1695-1713).
cagctaacgtccagctttt

SEQ ID NO: 562622 - DNA, 19 bp, Mus musculus
  siRNA target sequence for Xdh (NM_011723.1,1698-1716).
ctaacgtccagcttttcca

SEQ ID NO: 562623 - DNA, 19 bp, Mus musculus
  siRNA target sequence for Xdh (NM_011723.1,1817-1835).
gacattccccgctatgaga

SEQ ID NO: 562624 - DNA, 19 bp, Mus musculus
  siRNA target sequence for Xdh (NM_011723.1,1949-1967).
gatgtccctggtagtaaca

SEQ ID NO: 562625 - DNA, 19 bp, Mus musculus
  siRNA target sequence for Xdh (NM_011723.1,1954-1972).
ccctggtagtaacataact

SEQ ID NO: 562626 - DNA, 19 bp, Mus musculus
  siRNA target sequence for Xdh (NM_011723.1,2000-2018).
gcgaaggatgaggttactt

SEQ ID NO: 562627 - DNA, 19 bp, Mus musculus
  siRNA target sequence for Xdh (NM_011723.1,2078-2096).
gctagaggggtgaaaatca

SEQ ID NO: 562628 - DNA, 19 bp, Mus musculus
  siRNA target sequence for Xdh (NM_011723.1,2086-2104).
ggtgaaaatcacctatgaa

SEQ ID NO: 562629 - DNA, 19 bp, Mus musculus
  siRNA target sequence for Xdh (NM_011723.1,2107-2125).
ccttccagccattatcaca

SEQ ID NO: 562630 - DNA, 19 bp, Mus musculus
  siRNA target sequence for Xdh (NM_011723.1,2122-2140).
cacaatccaggatgctata

SEQ ID NO: 562631 - DNA, 19 bp, Mus musculus
  siRNA target sequence for Xdh (NM_011723.1,2222-2240).
gtctcaggagaattatata

SEQ ID NO: 562632 - DNA, 19 bp, Mus musculus
  siRNA target sequence for Xdh (NM_011723.1,2224-2242).
ctcaggagaattatatatt

SEQ ID NO: 562633 - DNA, 19 bp, Mus musculus
  siRNA target sequence for Xdh (NM_011723.1,2396-2414).
gtagtccgagtgaaaagaa

SEQ ID NO: 562634 - DNA, 19 bp, Mus musculus
  siRNA target sequence for Xdh (NM_011723.1,2440-2458).
gacccggagcactctgata

SEQ ID NO: 562635 - DNA, 19 bp, Mus musculus
  siRNA target sequence for Xdh (NM_011723.1,2524-2542).
cgaggacatgctcataact

SEQ ID NO: 562636 - DNA, 19 bp, Mus musculus
  siRNA target sequence for Xdh (NM_011723.1,2647-2665).
ggatctctctcggagtata

SEQ ID NO: 562637 - DNA, 19 bp, Mus musculus
  siRNA target sequence for Xdh (NM_011723.1,2648-2666).
gatctctctcggagtataa

SEQ ID NO: 562638 - DNA, 19 bp, Mus musculus
  siRNA target sequence for Xdh (NM_011723.1,2653-2671).
ctctcggagtataatggaa

SEQ ID NO: 562639 - DNA, 19 bp, Mus musculus
  siRNA target sequence for Xdh (NM_011723.1,2698-2716).
ctataagatccccaacatt

SEQ ID NO: 562640 - DNA, 19 bp, Mus musculus
  siRNA target sequence for Xdh (NM_011723.1,2717-2735).
cgcggcaccgggaggattt

SEQ ID NO: 562641 - DNA, 19 bp, Mus musculus
  siRNA target sequence for Xdh (NM_011723.1,2719-2737).
cggcaccgggaggatttgt

SEQ ID NO: 562642 - DNA, 19 bp, Mus musculus
  siRNA target sequence for Xdh (NM_011723.1,2721-2739).
gcaccgggaggatttgtaa

SEQ ID NO: 562643 - DNA, 19 bp, Mus musculus
  siRNA target sequence for Xdh (NM_011723.1,2725-2743).
cgggaggatttgtaagact

SEQ ID NO: 562644 - DNA, 19 bp, Mus musculus
  siRNA target sequence for Xdh (NM_011723.1,2726-2744).
gggaggatttgtaagacta

SEQ ID NO: 562645 - DNA, 19 bp, Mus musculus
  siRNA target sequence for Xdh (NM_011723.1,2727-2745).
ggaggatttgtaagactaa

SEQ ID NO: 562646 - DNA, 19 bp, Mus musculus
  siRNA target sequence for Xdh (NM_011723.1,2728-2746).
gaggatttgtaagactaat

SEQ ID NO: 562647 - DNA, 19 bp, Mus musculus
  siRNA target sequence for Xdh (NM_011723.1,2780-2798).
ggtcctcaggggatgctaa

SEQ ID NO: 562648 - DNA, 19 bp, Mus musculus
  siRNA target sequence for Xdh (NM_011723.1,2781-2799).
gtcctcaggggatgctaat

SEQ ID NO: 562649 - DNA, 19 bp, Mus musculus
  siRNA target sequence for Xdh (NM_011723.1,2790-2808).
ggatgctaatcgcagaata

SEQ ID NO: 562650 - DNA, 19 bp, Mus musculus
  siRNA target sequence for Xdh (NM_011723.1,2855-2873).
gtacggaggaaaaacatgt

SEQ ID NO: 562651 - DNA, 19 bp, Mus musculus
  siRNA target sequence for Xdh (NM_011723.1,2858-2876).
cggaggaaaaacatgtaca

SEQ ID NO: 562652 - DNA, 19 bp, Mus musculus
  siRNA target sequence for Xdh (NM_011723.1,2883-2901).
gggacctgactcacttcaa

SEQ ID NO: 562653 - DNA, 19 bp, Mus musculus
  siRNA target sequence for Xdh (NM_011723.1,3030-3048).
gtataatcccgactaagtt

SEQ ID NO: 562654 - DNA, 19 bp, Mus musculus
  siRNA target sequence for Xdh (NM_011723.1,3037-3055).
cccgactaagtttggaata

SEQ ID NO: 562655 - DNA, 19 bp, Mus musculus
  siRNA target sequence for Xdh (NM_011723.1,3038-3056).
ccgactaagtttggaataa

SEQ ID NO: 562656 - DNA, 19 bp, Mus musculus
  siRNA target sequence for Xdh (NM_011723.1,3183-3201).
ccagcagagctctgaaaat

SEQ ID NO: 562657 - DNA, 19 bp, Mus musculus
  siRNA target sequence for Xdh (NM_011723.1,3289-3307).
caatggccaggccatttat

SEQ ID NO: 562658 - DNA, 19 bp, Mus musculus
  siRNA target sequence for Xdh (NM_011723.1,3312-3330).
cctgtcagaccatactgaa

SEQ ID NO: 562659 - DNA, 19 bp, Mus musculus
  siRNA target sequence for Xdh (NM_011723.1,3313-3331).
ctgtcagaccatactgaaa

SEQ ID NO: 562660 - DNA, 19 bp, Mus musculus
  siRNA target sequence for Xdh (NM_011723.1,3518-3536).
gtagaaattgactgcttaa

SEQ ID NO: 562661 - DNA, 19 bp, Mus musculus
  siRNA target sequence for Xdh (NM_011723.1,3731-3749).
ggcagcatccccattgagt

SEQ ID NO: 562662 - DNA, 19 bp, Mus musculus
  siRNA target sequence for Xdh (NM_011723.1,3740-3758).
cccattgagttcagagtat

SEQ ID NO: 562663 - DNA, 19 bp, Mus musculus
  siRNA target sequence for Xdh (NM_011723.1,3767-3785).
cgcgactgccccaacaaga

SEQ ID NO: 562664 - DNA, 19 bp, Mus musculus
  siRNA target sequence for 1600020H07Rik (NM_019975.2,128-146).
gcaggtgtctggtgctaaa

SEQ ID NO: 562665 - DNA, 19 bp, Mus musculus
  siRNA target sequence for 1600020H07Rik (NM_019975.2,149-167).
catcgcccaggctctaaaa

SEQ ID NO: 562666 - DNA, 19 bp, Mus musculus
  siRNA target sequence for 1600020H07Rik (NM_019975.2,152-170).
cgcccaggctctaaaaact

SEQ ID NO: 562667 - DNA, 19 bp, Mus musculus
  siRNA target sequence for 1600020H07Rik (NM_019975.2,158-176).
ggctctaaaaactcaagat

SEQ ID NO: 562668 - DNA, 19 bp, Mus musculus
  siRNA target sequence for 1600020H07Rik (NM_019975.2,169-187).
ctcaagatgtggagtacat

SEQ ID NO: 562669 - DNA, 19 bp, Mus musculus
  siRNA target sequence for 1600020H07Rik (NM_019975.2,272-290).
gcaagcggcttgttatgct

SEQ ID NO: 562670 - DNA, 19 bp, Mus musculus
  siRNA target sequence for 1600020H07Rik (NM_019975.2,392-410).
gaactgttggcccttgatt

SEQ ID NO: 562671 - DNA, 19 bp, Mus musculus
  siRNA target sequence for 1600020H07Rik (NM_019975.2,397-415).
gttggcccttgattgtgat

SEQ ID NO: 562672 - DNA, 19 bp, Mus musculus
  siRNA target sequence for 1600020H07Rik (NM_019975.2,413-431).
gattggtggttcttctgaa

SEQ ID NO: 562673 - DNA, 19 bp, Mus musculus
  siRNA target sequence for 1600020H07Rik (NM_019975.2,474-492).
gttgaagcttgcagattgt

SEQ ID NO: 562674 - DNA, 19 bp, Mus musculus
  siRNA target sequence for 1600020H07Rik (NM_019975.2,477-495).
gaagcttgcagattgtata

SEQ ID NO: 562675 - DNA, 19 bp, Mus musculus
  siRNA target sequence for 1600020H07Rik (NM_019975.2,480-498).
gcttgcagattgtatacca

SEQ ID NO: 562676 - DNA, 19 bp, Mus musculus
  siRNA target sequence for 1600020H07Rik (NM_019975.2,481-499).
cttgcagattgtataccaa

SEQ ID NO: 562677 - DNA, 19 bp, Mus musculus
  siRNA target sequence for 1600020H07Rik (NM_019975.2,580-598).
cgggagcttgttacattga

SEQ ID NO: 562678 - DNA, 19 bp, Mus musculus
  siRNA target sequence for 1600020H07Rik (NM_019975.2,624-642).
caggcgaacgtgacttcta

SEQ ID NO: 562679 - DNA, 19 bp, Mus musculus
  siRNA target sequence for 1600020H07Rik (NM_019975.2,730-748).
ccaagcaacccctgcttat

SEQ ID NO: 562680 - DNA, 19 bp, Mus musculus
  siRNA target sequence for 1600020H07Rik (NM_019975.2,845-863).
gggggttgtccctgacaat

SEQ ID NO: 562681 - DNA, 19 bp, Mus musculus
  siRNA target sequence for 1600020H07Rik (NM_019975.2,907-925).
ccgctgacgtgattgtgtt

SEQ ID NO: 562682 - DNA, 19 bp, Mus musculus
  siRNA target sequence for 1600020H07Rik (NM_019975.2,908-926).
cgctgacgtgattgtgtta

SEQ ID NO: 562683 - DNA, 19 bp, Mus musculus
  siRNA target sequence for 1600020H07Rik (NM_019975.2,909-927).
gctgacgtgattgtgttat

SEQ ID NO: 562684 - DNA, 19 bp, Mus musculus
  siRNA target sequence for 1600020H07Rik (NM_019975.2,910-928).
ctgacgtgattgtgttatt

SEQ ID NO: 562685 - DNA, 19 bp, Mus musculus
  siRNA target sequence for 1600020H07Rik (NM_019975.2,914-932).
cgtgattgtgttatttggt

SEQ ID NO: 562686 - DNA, 19 bp, Mus musculus
  siRNA target sequence for 1600020H07Rik (NM_019975.2,944-962).
ctggatcttacattttgga

SEQ ID NO: 562687 - DNA, 19 bp, Mus musculus
  siRNA target sequence for 1600020H07Rik (NM_019975.2,977-995).
ccaggcagacgtgaagttt

SEQ ID NO: 562688 - DNA, 19 bp, Mus musculus
  siRNA target sequence for 1600020H07Rik (NM_019975.2,978-996).
caggcagacgtgaagttta

SEQ ID NO: 562689 - DNA, 19 bp, Mus musculus
  siRNA target sequence for 1600020H07Rik (NM_019975.2,980-998).
ggcagacgtgaagtttatt

SEQ ID NO: 562690 - DNA, 19 bp, Mus musculus
  siRNA target sequence for 1600020H07Rik (NM_019975.2,982-1000).
cagacgtgaagtttattca

SEQ ID NO: 562691 - DNA, 19 bp, Mus musculus
  siRNA target sequence for 1600020H07Rik (NM_019975.2,986-1004).
cgtgaagtttattcagatt

SEQ ID NO: 562692 - DNA, 19 bp, Mus musculus
  siRNA target sequence for 1600020H07Rik (NM_019975.2,1040-1058).
gccttctgtgattttgcta

SEQ ID NO: 562693 - DNA, 19 bp, Mus musculus
  siRNA target sequence for 1600020H07Rik (NM_019975.2,1205-1223).
gtccctccctatgaattat

SEQ ID NO: 562694 - DNA, 19 bp, Mus musculus
  siRNA target sequence for 1600020H07Rik (NM_019975.2,1207-1225).
ccctccctatgaattatta

SEQ ID NO: 562695 - DNA, 19 bp, Mus musculus
  siRNA target sequence for 1600020H07Rik (NM_019975.2,1232-1250).
gttctaccacgttcaagaa

SEQ ID NO: 562696 - DNA, 19 bp, Mus musculus
  siRNA target sequence for 1600020H07Rik (NM_019975.2,1258-1276).
cccgagactctttcatagt

SEQ ID NO: 562697 - DNA, 19 bp, Mus musculus
  siRNA target sequence for 1600020H07Rik (NM_019975.2,1343-1361).
gcttgatgcaggttctttt

SEQ ID NO: 562698 - DNA, 19 bp, Mus musculus
  siRNA target sequence for 1600020H07Rik (NM_019975.2,1347-1365).
gatgcaggttcttttggaa

SEQ ID NO: 562699 - DNA, 19 bp, Mus musculus
  siRNA target sequence for 1600020H07Rik (NM_019975.2,1399-1417).
ccgctctagtggctaaaga

SEQ ID NO: 562700 - DNA, 19 bp, Mus musculus
  siRNA target sequence for 1600020H07Rik (NM_019975.2,1455-1473).
gacagtgccttcggatttt

SEQ ID NO: 562701 - DNA, 19 bp, Mus musculus
  siRNA target sequence for 1600020H07Rik (NM_019975.2,1457-1475).
cagtgccttcggattttct

SEQ ID NO: 562702 - DNA, 19 bp, Mus musculus
  siRNA target sequence for 1600020H07Rik (NM_019975.2,1501-1519).
ggtacaacttgccaatcat

SEQ ID NO: 562703 - DNA, 19 bp, Mus musculus
  siRNA target sequence for 1600020H07Rik (NM_019975.2,1502-1520).
gtacaacttgccaatcata

SEQ ID NO: 562704 - DNA, 19 bp, Mus musculus
  siRNA target sequence for 1600020H07Rik (NM_019975.2,1521-1539).
ctcttggtagtaaacaata

SEQ ID NO: 562705 - DNA, 19 bp, Mus musculus
  siRNA target sequence for 1600020H07Rik (NM_019975.2,1526-1544).
ggtagtaaacaataatgga

SEQ ID NO: 562706 - DNA, 19 bp, Mus musculus
  siRNA target sequence for 1600020H07Rik (NM_019975.2,1527-1545).
gtagtaaacaataatggaa

SEQ ID NO: 562707 - DNA, 19 bp, Mus musculus
  siRNA target sequence for 1600020H07Rik (NM_019975.2,1535-1553).
caataatggaatttaccaa

SEQ ID NO: 562708 - DNA, 19 bp, Mus musculus
  siRNA target sequence for 1600020H07Rik (NM_019975.2,1562-1580).
cgctgacacctgggaaaaa

SEQ ID NO: 562709 - DNA, 19 bp, Mus musculus
  siRNA target sequence for 1600020H07Rik (NM_019975.2,1628-1646).
cttgccaaactcgcattat

SEQ ID NO: 562710 - DNA, 19 bp, Mus musculus
  siRNA target sequence for 1600020H07Rik (NM_019975.2,1726-1744).
ctctgcaagacacaagtaa

SEQ ID NO: 562711 - DNA, 19 bp, Mus musculus
  siRNA target sequence for 1600020H07Rik (NM_019975.2,1783-1801).
cgcgcaaggcccaggattt

SEQ ID NO: 562712 - DNA, 19 bp, Mus musculus
  siRNA target sequence for 1600020H07Rik (NM_019975.2,1784-1802).
gcgcaaggcccaggatttt

SEQ ID NO: 562713 - DNA, 19 bp, Mus musculus
  siRNA target sequence for 1600020H07Rik (NM_019975.2,1786-1804).
gcaaggcccaggattttca

SEQ ID NO: 562714 - DNA, 19 bp, Mus musculus
  siRNA target sequence for 1600020H07Rik (NM_019975.2,1807-1825).
ggctcacccgttctaacat

SEQ ID NO: 562715 - DNA, 19 bp, Mus musculus
  siRNA target sequence for 1600020H07Rik (NM_019975.2,1809-1827).
ctcacccgttctaacatgt

SEQ ID NO: 562716 - DNA, 19 bp, Mus musculus
  siRNA target sequence for Adcy4 (NM_080435.1,144-162).
ccagcgaagatctcttcta

SEQ ID NO: 562717 - DNA, 19 bp, Mus musculus
  siRNA target sequence for Adcy4 (NM_080435.1,149-167).
gaagatctcttctacgaaa

SEQ ID NO: 562718 - DNA, 19 bp, Mus musculus
  siRNA target sequence for Adcy4 (NM_080435.1,152-170).
gatctcttctacgaaactt

SEQ ID NO: 562719 - DNA, 19 bp, Mus musculus
  siRNA target sequence for Adcy4 (NM_080435.1,383-401).
cctctttctggtctcatat

SEQ ID NO: 562720 - DNA, 19 bp, Mus musculus
  siRNA target sequence for Adcy4 (NM_080435.1,393-411).
gtctcatatgggttgcatt

SEQ ID NO: 562721 - DNA, 19 bp, Mus musculus
  siRNA target sequence for Adcy4 (NM_080435.1,539-557).
gctgcgggagtcatctcat

SEQ ID NO: 562722 - DNA, 19 bp, Mus musculus
  siRNA target sequence for Adcy4 (NM_080435.1,635-653).
gcagcaaacgcggtattgt

SEQ ID NO: 562723 - DNA, 19 bp, Mus musculus
  siRNA target sequence for Adcy4 (NM_080435.1,636-654).
cagcaaacgcggtattgtt

SEQ ID NO: 562724 - DNA, 19 bp, Mus musculus
  siRNA target sequence for Adcy4 (NM_080435.1,1114-1132).
gcctgaccacgctatcaat

SEQ ID NO: 562725 - DNA, 19 bp, Mus musculus
  siRNA target sequence for Adcy4 (NM_080435.1,1115-1133).
cctgaccacgctatcaatt

SEQ ID NO: 562726 - DNA, 19 bp, Mus musculus
  siRNA target sequence for Adcy4 (NM_080435.1,1278-1296).
ggtcccatgatgtcacatt

SEQ ID NO: 562727 - DNA, 19 bp, Mus musculus
  siRNA target sequence for Adcy4 (NM_080435.1,1289-1307).
gtcacattggccaaccata

SEQ ID NO: 562728 - DNA, 19 bp, Mus musculus
  siRNA target sequence for Adcy4 (NM_080435.1,1360-1378).
cctgctagcaggagcttat

SEQ ID NO: 562729 - DNA, 19 bp, Mus musculus
  siRNA target sequence for Adcy4 (NM_080435.1,1437-1455).
ctacatacctggtcattga

SEQ ID NO: 562730 - DNA, 19 bp, Mus musculus
  siRNA target sequence for Adcy4 (NM_080435.1,1480-1498).
gaagggcaccgcaaaagga

SEQ ID NO: 562731 - DNA, 19 bp, Mus musculus
  siRNA target sequence for Adcy4 (NM_080435.1,2374-2392).
ggcatcttgttccctattt

SEQ ID NO: 562732 - DNA, 19 bp, Mus musculus
  siRNA target sequence for Adcy4 (NM_080435.1,2457-2475).
ccagaccaggggtactgaa

SEQ ID NO: 562733 - DNA, 19 bp, Mus musculus
  siRNA target sequence for Adcy4 (NM_080435.1,2486-2504).
ctgatgggagcgatctact

SEQ ID NO: 562734 - DNA, 19 bp, Mus musculus
  siRNA target sequence for Adcy4 (NM_080435.1,2492-2510).
ggagcgatctacttcttca

SEQ ID NO: 562735 - DNA, 19 bp, Mus musculus
  siRNA target sequence for Adcy4 (NM_080435.1,2537-2555).
gctcggcagaatgagtatt

SEQ ID NO: 562736 - DNA, 19 bp, Mus musculus
  siRNA target sequence for Adcy4 (NM_080435.1,2538-2556).
ctcggcagaatgagtatta

SEQ ID NO: 562737 - DNA, 19 bp, Mus musculus
  siRNA target sequence for Adcy4 (NM_080435.1,2540-2558).
cggcagaatgagtattact

SEQ ID NO: 562738 - DNA, 19 bp, Mus musculus
  siRNA target sequence for Adcy4 (NM_080435.1,2721-2739).
cgtacgaatgcgtttgtgt

SEQ ID NO: 562739 - DNA, 19 bp, Mus musculus
  siRNA target sequence for Adcy4 (NM_080435.1,2746-2764).
cgcgtcggtcccagacttt

SEQ ID NO: 562740 - DNA, 19 bp, Mus musculus
  siRNA target sequence for Adcy4 (NM_080435.1,2747-2765).
gcgtcggtcccagacttta

SEQ ID NO: 562741 - DNA, 19 bp, Mus musculus
  siRNA target sequence for Adcy4 (NM_080435.1,2748-2766).
cgtcggtcccagactttaa

SEQ ID NO: 562742 - DNA, 19 bp, Mus musculus
  siRNA target sequence for Adcy4 (NM_080435.1,2751-2769).
cggtcccagactttaagga

SEQ ID NO: 562743 - DNA, 19 bp, Mus musculus
  siRNA target sequence for Adcy4 (NM_080435.1,2876-2894).
ggagtagagaagatcaaaa

SEQ ID NO: 562744 - DNA, 19 bp, Mus musculus
  siRNA target sequence for Adcy4 (NM_080435.1,3037-3055).
caacaagcactcgttcaat

SEQ ID NO: 562745 - DNA, 19 bp, Mus musculus
  siRNA target sequence for Adcy4 (NM_080435.1,3233-3251).
ctgggttacacgtgctata

SEQ ID NO: 562746 - DNA, 19 bp, Mus musculus
  siRNA target sequence for Adcy4 (NM_080435.1,3236-3254).
ggttacacgtgctatagca

SEQ ID NO: 562747 - DNA, 19 bp, Mus musculus
  siRNA target sequence for Adcy6 (NM_007405.1,814-832).
ccgtgttcttcgtctacat

SEQ ID NO: 562748 - DNA, 19 bp, Mus musculus
  siRNA target sequence for Adcy6 (NM_007405.1,830-848).
catcacctacactcttctt

SEQ ID NO: 562749 - DNA, 19 bp, Mus musculus
  siRNA target sequence for Adcy6 (NM_007405.1,931-949).
gcgaccccttcctttggaa

SEQ ID NO: 562750 - DNA, 19 bp, Mus musculus
  siRNA target sequence for Adcy6 (NM_007405.1,1858-1876).
cccggaccaaggactctaa

SEQ ID NO: 562751 - DNA, 19 bp, Mus musculus
  siRNA target sequence for Adcy6 (NM_007405.1,1883-1901).
ccgccagatgggcattgat

SEQ ID NO: 562752 - DNA, 19 bp, Mus musculus
  siRNA target sequence for Adcy6 (NM_007405.1,1887-1905).
cagatgggcattgatgatt

SEQ ID NO: 562753 - DNA, 19 bp, Mus musculus
  siRNA target sequence for Adcy6 (NM_007405.1,1889-1907).
gatgggcattgatgattct

SEQ ID NO: 562754 - DNA, 19 bp, Mus musculus
  siRNA target sequence for Adcy6 (NM_007405.1,1895-1913).
cattgatgattctagcaaa

SEQ ID NO: 562755 - DNA, 19 bp, Mus musculus
  siRNA target sequence for Adcy6 (NM_007405.1,2051-2069).
ggatcttgagaagaagtat

SEQ ID NO: 562756 - DNA, 19 bp, Mus musculus
  siRNA target sequence for Adcy6 (NM_007405.1,2063-2081).
gaagtattcacggaaagta

SEQ ID NO: 562757 - DNA, 19 bp, Mus musculus
  siRNA target sequence for Adcy6 (NM_007405.1,2066-2084).
gtattcacggaaagtagat

SEQ ID NO: 562758 - DNA, 19 bp, Mus musculus
  siRNA target sequence for Adcy6 (NM_007405.1,2118-2136).
ctggttttttgcttcatct

SEQ ID NO: 562759 - DNA, 19 bp, Mus musculus
  siRNA target sequence for Adcy6 (NM_007405.1,2275-2293).
gcctgtcccgcaatattgt

SEQ ID NO: 562760 - DNA, 19 bp, Mus musculus
  siRNA target sequence for Adcy6 (NM_007405.1,2311-2329).
gcaccgcggttggaatctt

SEQ ID NO: 562761 - DNA, 19 bp, Mus musculus
  siRNA target sequence for Adcy6 (NM_007405.1,2332-2350).
cggttctgcttgtgttcat

SEQ ID NO: 562762 - DNA, 19 bp, Mus musculus
  siRNA target sequence for Adcy6 (NM_007405.1,2363-2381).
caacatgtttacctgtaat

SEQ ID NO: 562763 - DNA, 19 bp, Mus musculus
  siRNA target sequence for Adcy6 (NM_007405.1,2448-2466).
cacctacaacagctcaatt

SEQ ID NO: 562764 - DNA, 19 bp, Mus musculus
  siRNA target sequence for Adcy6 (NM_007405.1,2451-2469).
ctacaacagctcaattact

SEQ ID NO: 562765 - DNA, 19 bp, Mus musculus
  siRNA target sequence for Adcy6 (NM_007405.1,2629-2647).
cctacttggtgctgctttt

SEQ ID NO: 562766 - DNA, 19 bp, Mus musculus
  siRNA target sequence for Adcy6 (NM_007405.1,2669-2687).
ctttgacaactatgatcta

SEQ ID NO: 562767 - DNA, 19 bp, Mus musculus
  siRNA target sequence for Adcy6 (NM_007405.1,2754-2772).
gggagggtagcgctcaaat

SEQ ID NO: 562768 - DNA, 19 bp, Mus musculus
  siRNA target sequence for Adcy6 (NM_007405.1,2755-2773).
ggagggtagcgctcaaata

SEQ ID NO: 562769 - DNA, 19 bp, Mus musculus
  siRNA target sequence for Adcy6 (NM_007405.1,2756-2774).
gagggtagcgctcaaatat

SEQ ID NO: 562770 - DNA, 19 bp, Mus musculus
  siRNA target sequence for Adcy6 (NM_007405.1,2758-2776).
gggtagcgctcaaatatat

SEQ ID NO: 562771 - DNA, 19 bp, Mus musculus
  siRNA target sequence for Adcy6 (NM_007405.1,2760-2778).
gtagcgctcaaatatatga

SEQ ID NO: 562772 - DNA, 19 bp, Mus musculus
  siRNA target sequence for Adcy6 (NM_007405.1,2921-2939).
gaggttgctgcataacatt

SEQ ID NO: 562773 - DNA, 19 bp, Mus musculus
  siRNA target sequence for Adcy6 (NM_007405.1,2999-3017).
ctaccagtcgtgtgaatgt

SEQ ID NO: 562774 - DNA, 19 bp, Mus musculus
  siRNA target sequence for Adcy6 (NM_007405.1,3254-3272).
cacggcgctggctgactat

SEQ ID NO: 562775 - DNA, 19 bp, Mus musculus
  siRNA target sequence for Adcy6 (NM_007405.1,3309-3327).
gaacactctttcaacaatt

SEQ ID NO: 562776 - DNA, 19 bp, Mus musculus
  siRNA target sequence for Adcy6 (NM_007405.1,3382-3400).
cccgaaagccacagtatga

SEQ ID NO: 562777 - DNA, 19 bp, Mus musculus
  siRNA target sequence for Adcy6 (NM_007405.1,3407-3425).
gggaaataccgtgaatgtt

SEQ ID NO: 562778 - DNA, 19 bp, Mus musculus
  siRNA target sequence for Adcy6 (NM_007405.1,3448-3466).
gagttcctgaccgaataca

SEQ ID NO: 562779 - DNA, 19 bp, Mus musculus
  siRNA target sequence for Adcy7 (NM_007406.1,1293-1311).
cgcgtccagggatctcttt

SEQ ID NO: 562780 - DNA, 19 bp, Mus musculus
  siRNA target sequence for Adcy7 (NM_007406.1,1294-1312).
gcgtccagggatctcttta

SEQ ID NO: 562781 - DNA, 19 bp, Mus musculus
  siRNA target sequence for Adcy7 (NM_007406.1,1295-1313).
cgtccagggatctctttat

SEQ ID NO: 562782 - DNA, 19 bp, Mus musculus
  siRNA target sequence for Adcy7 (NM_007406.1,1451-1469).
gtggtgaccgacactacat

SEQ ID NO: 562783 - DNA, 19 bp, Mus musculus
  siRNA target sequence for Adcy7 (NM_007406.1,1467-1485).
catgcccgacaacaacttt

SEQ ID NO: 562784 - DNA, 19 bp, Mus musculus
  siRNA target sequence for Adcy7 (NM_007406.1,1471-1489).
cccgacaacaactttcaca

SEQ ID NO: 562785 - DNA, 19 bp, Mus musculus
  siRNA target sequence for Adcy7 (NM_007406.1,1934-1952).
cagaggcaacattgaatca

SEQ ID NO: 562786 - DNA, 19 bp, Mus musculus
  siRNA target sequence for Adcy7 (NM_007406.1,1993-2011).
cagcgagacccctatctga

SEQ ID NO: 562787 - DNA, 19 bp, Mus musculus
  siRNA target sequence for Adcy7 (NM_007406.1,1995-2013).
gcgagacccctatctgaaa

SEQ ID NO: 562788 - DNA, 19 bp, Mus musculus
  siRNA target sequence for Adcy7 (NM_007406.1,1997-2015).
gagacccctatctgaaaga

SEQ ID NO: 562789 - DNA, 19 bp, Mus musculus
  siRNA target sequence for Adcy7 (NM_007406.1,2393-2411).
cctttggtcccatcttctt

SEQ ID NO: 562790 - DNA, 19 bp, Mus musculus
  siRNA target sequence for Adcy7 (NM_007406.1,2723-2741).
ctgtcgccatcattaacat

SEQ ID NO: 562791 - DNA, 19 bp, Mus musculus
  siRNA target sequence for Adcy7 (NM_007406.1,3115-3133).
gacctgaagatcatggtta

SEQ ID NO: 562792 - DNA, 19 bp, Mus musculus
  siRNA target sequence for Adcy7 (NM_007406.1,3168-3186).
cttgctgtctagacagatt

SEQ ID NO: 562793 - DNA, 19 bp, Mus musculus
  siRNA target sequence for Adcy7 (NM_007406.1,3176-3194).
ctagacagattgactacta

SEQ ID NO: 562794 - DNA, 19 bp, Mus musculus
  siRNA target sequence for Adcy7 (NM_007406.1,3339-3357).
ggattggtaccatcaatct

SEQ ID NO: 562795 - DNA, 19 bp, Mus musculus
  siRNA target sequence for Adcy7 (NM_007406.1,3344-3362).
ggtaccatcaatcttatga

SEQ ID NO: 562796 - DNA, 19 bp, Mus musculus
  siRNA target sequence for Adcy7 (NM_007406.1,3386-3404).
ccgttccggacttcaaagt

SEQ ID NO: 562797 - DNA, 19 bp, Mus musculus
  siRNA target sequence for Adcy7 (NM_007406.1,3388-3406).
gttccggacttcaaagtgt

SEQ ID NO: 562798 - DNA, 19 bp, Mus musculus
  siRNA target sequence for Adcy7 (NM_007406.1,3392-3410).
cggacttcaaagtgttcta

SEQ ID NO: 562799 - DNA, 19 bp, Mus musculus
  siRNA target sequence for Adcy7 (NM_007406.1,3446-3464).
gccttcgactgctgaatga

SEQ ID NO: 562800 - DNA, 19 bp, Mus musculus
  siRNA target sequence for Adcy7 (NM_007406.1,3451-3469).
cgactgctgaatgagataa

SEQ ID NO: 562801 - DNA, 19 bp, Mus musculus
  siRNA target sequence for Adcy7 (NM_007406.1,3452-3470).
gactgctgaatgagataat

SEQ ID NO: 562802 - DNA, 19 bp, Mus musculus
  siRNA target sequence for Adcy7 (NM_007406.1,3569-3587).
ccccctcaggacatgagaa

SEQ ID NO: 562803 - DNA, 19 bp, Mus musculus
  siRNA target sequence for Adcy7 (NM_007406.1,3618-3636).
cggagtcttggtagaattt

SEQ ID NO: 562804 - DNA, 19 bp, Mus musculus
  siRNA target sequence for Adcy7 (NM_007406.1,3695-3713).
gcctccgagtcggcataaa

SEQ ID NO: 562805 - DNA, 19 bp, Mus musculus
  siRNA target sequence for Adcy7 (NM_007406.1,3856-3874).
ctccagggactcggatatt

SEQ ID NO: 562806 - DNA, 19 bp, Mus musculus
  siRNA target sequence for Adcy7 (NM_007406.1,3859-3877).
cagggactcggatattcgt

SEQ ID NO: 562807 - DNA, 19 bp, Mus musculus
  siRNA target sequence for Adcy7 (NM_007406.1,3865-3883).
ctcggatattcgtgtgaat

SEQ ID NO: 562808 - DNA, 19 bp, Mus musculus
  siRNA target sequence for Adcy7 (NM_007406.1,3913-3931).
ggggaactgcggacttact

SEQ ID NO: 562809 - DNA, 19 bp, Mus musculus
  siRNA target sequence for Adcy7 (NM_007406.1,3914-3932).
gggaactgcggacttactt

SEQ ID NO: 562810 - DNA, 19 bp, Mus musculus
  siRNA target sequence for Adcy7 (NM_007406.1,3915-3933).
ggaactgcggacttacttt

SEQ ID NO: 562811 - DNA, 19 bp, Mus musculus
  siRNA target sequence for Adcy7 (NM_007406.1,3921-3939).
gcggacttactttgtatgt

SEQ ID NO: 562812 - DNA, 19 bp, Mus musculus
  siRNA target sequence for Adcy8 (NM_009623.1,1080-1098).
gtggcagcgaggaactcta

SEQ ID NO: 562813 - DNA, 19 bp, Mus musculus
  siRNA target sequence for Adcy8 (NM_009623.1,1353-1371).
ccggtggcaccaaagtctt

SEQ ID NO: 562814 - DNA, 19 bp, Mus musculus
  siRNA target sequence for Adcy8 (NM_009623.1,1354-1372).
cggtggcaccaaagtcttt

SEQ ID NO: 562815 - DNA, 19 bp, Mus musculus
  siRNA target sequence for Adcy8 (NM_009623.1,1442-1460).
gactgtgccccaagtaact

SEQ ID NO: 562816 - DNA, 19 bp, Mus musculus
  siRNA target sequence for Adcy8 (NM_009623.1,1452-1470).
caagtaactcggatttctt

SEQ ID NO: 562817 - DNA, 19 bp, Mus musculus
  siRNA target sequence for Adcy8 (NM_009623.1,1492-1510).
ccgaggggtcatttttcca

SEQ ID NO: 562818 - DNA, 19 bp, Mus musculus
  siRNA target sequence for Adcy8 (NM_009623.1,1493-1511).
cgaggggtcatttttccaa

SEQ ID NO: 562819 - DNA, 19 bp, Mus musculus
  siRNA target sequence for Adcy8 (NM_009623.1,1548-1566).
gcctctaccaacgctattt

SEQ ID NO: 562820 - DNA, 19 bp, Mus musculus
  siRNA target sequence for Adcy8 (NM_009623.1,1581-1599).
gcaaatcggaggtagtgat

SEQ ID NO: 562821 - DNA, 19 bp, Mus musculus
  siRNA target sequence for Adcy8 (NM_009623.1,1600-1618).
gaacgtgttggatgtacta

SEQ ID NO: 562822 - DNA, 19 bp, Mus musculus
  siRNA target sequence for Adcy8 (NM_009623.1,1606-1624).
gttggatgtactaaccaaa

SEQ ID NO: 562823 - DNA, 19 bp, Mus musculus
  siRNA target sequence for Adcy8 (NM_009623.1,1758-1776).
cccacacttacctgcaata

SEQ ID NO: 562824 - DNA, 19 bp, Mus musculus
  siRNA target sequence for Adcy8 (NM_009623.1,1860-1878).
gctacgtgctttttacact

SEQ ID NO: 562825 - DNA, 19 bp, Mus musculus
  siRNA target sequence for Adcy8 (NM_009623.1,1980-1998).
ggctagcggtcttttccat

SEQ ID NO: 562826 - DNA, 19 bp, Mus musculus
  siRNA target sequence for Adcy8 (NM_009623.1,2013-2031).
cccaggtggtgctattcat

SEQ ID NO: 562827 - DNA, 19 bp, Mus musculus
  siRNA target sequence for Adcy8 (NM_009623.1,2015-2033).
caggtggtgctattcatgt

SEQ ID NO: 562828 - DNA, 19 bp, Mus musculus
  siRNA target sequence for Adcy8 (NM_009623.1,2018-2036).
gtggtgctattcatgtgta

SEQ ID NO: 562829 - DNA, 19 bp, Mus musculus
  siRNA target sequence for Adcy8 (NM_009623.1,2045-2063).
gcaggaatcttcatcagtt

SEQ ID NO: 562830 - DNA, 19 bp, Mus musculus
  siRNA target sequence for Adcy8 (NM_009623.1,2046-2064).
caggaatcttcatcagtta

SEQ ID NO: 562831 - DNA, 19 bp, Mus musculus
  siRNA target sequence for Adcy8 (NM_009623.1,2184-2202).
ggtttgtcgtcctggaaat

SEQ ID NO: 562832 - DNA, 19 bp, Mus musculus
  siRNA target sequence for Adcy8 (NM_009623.1,2271-2289).
gctatgagaacgtcagtat

SEQ ID NO: 562833 - DNA, 19 bp, Mus musculus
  siRNA target sequence for Adcy8 (NM_009623.1,2272-2290).
ctatgagaacgtcagtatt

SEQ ID NO: 562834 - DNA, 19 bp, Mus musculus
  siRNA target sequence for Adcy8 (NM_009623.1,2356-2374).
gatgctcaacgaactcttt

SEQ ID NO: 562835 - DNA, 19 bp, Mus musculus
  siRNA target sequence for Adcy8 (NM_009623.1,2405-2423).
cactgtcttcgcattaaaa

SEQ ID NO: 562836 - DNA, 19 bp, Mus musculus
  siRNA target sequence for Adcy8 (NM_009623.1,2409-2427).
gtcttcgcattaaaatcct

SEQ ID NO: 562837 - DNA, 19 bp, Mus musculus
  siRNA target sequence for Adcy8 (NM_009623.1,2500-2518).
gggcctcagcatgatcaaa

SEQ ID NO: 562838 - DNA, 19 bp, Mus musculus
  siRNA target sequence for Adcy8 (NM_009623.1,2504-2522).
ctcagcatgatcaaaacta

SEQ ID NO: 562839 - DNA, 19 bp, Mus musculus
  siRNA target sequence for Adcy8 (NM_009623.1,2541-2559).
gaacgaagcacgatgttga

SEQ ID NO: 562840 - DNA, 19 bp, Mus musculus
  siRNA target sequence for Adcy8 (NM_009623.1,2544-2562).
cgaagcacgatgttgacat

SEQ ID NO: 562841 - DNA, 19 bp, Mus musculus
  siRNA target sequence for Adcy8 (NM_009623.1,2555-2573).
gttgacatgcgaattggaa

SEQ ID NO: 562842 - DNA, 19 bp, Mus musculus
  siRNA target sequence for Adcy8 (NM_009623.1,2560-2578).
catgcgaattggaatccat

SEQ ID NO: 562843 - DNA, 19 bp, Mus musculus
  siRNA target sequence for Adcy8 (NM_009623.1,2600-2618).
gtgttgggcctgaggaaat

SEQ ID NO: 562844 - DNA, 19 bp, Mus musculus
  siRNA target sequence for Adcy8 (NM_009623.1,2680-2698).
ccctgggaggattcacatt

SEQ ID NO: 562845 - DNA, 19 bp, Mus musculus
  siRNA target sequence for Adcy8 (NM_009623.1,2681-2699).
cctgggaggattcacattt

SEQ ID NO: 562846 - DNA, 19 bp, Mus musculus
  siRNA target sequence for Adcy8 (NM_009623.1,2684-2702).
gggaggattcacatttcta

SEQ ID NO: 562847 - DNA, 19 bp, Mus musculus
  siRNA target sequence for Adcy8 (NM_009623.1,2718-2736).
gcctcaatggtgactataa

SEQ ID NO: 562848 - DNA, 19 bp, Mus musculus
  siRNA target sequence for Adcy8 (NM_009623.1,2753-2771).
gggaaagagaggaacgaat

SEQ ID NO: 562849 - DNA, 19 bp, Mus musculus
  siRNA target sequence for Adcy8 (NM_009623.1,2754-2772).
ggaaagagaggaacgaatt

SEQ ID NO: 562850 - DNA, 19 bp, Mus musculus
  siRNA target sequence for Adcy8 (NM_009623.1,2759-2777).
gagaggaacgaattcttga

SEQ ID NO: 562851 - DNA, 19 bp, Mus musculus
  siRNA target sequence for Adcy8 (NM_009623.1,2788-2806).
catagagacctatttgatt

SEQ ID NO: 562852 - DNA, 19 bp, Mus musculus
  siRNA target sequence for Adcy8 (NM_009623.1,2880-2898).
gaaacagtggagcaacatt

SEQ ID NO: 562853 - DNA, 19 bp, Mus musculus
  siRNA target sequence for Adcy8 (NM_009623.1,2938-2956).
catcgtgggcaaacagaat

SEQ ID NO: 562854 - DNA, 19 bp, Mus musculus
  siRNA target sequence for Adcy8 (NM_009623.1,2941-2959).
cgtgggcaaacagaatact

SEQ ID NO: 562855 - DNA, 19 bp, Mus musculus
  siRNA target sequence for Adcy8 (NM_009623.1,2962-2980).
ggctgccctaacaagaaat

SEQ ID NO: 562856 - DNA, 19 bp, Mus musculus
  siRNA target sequence for Adcy8 (NM_009623.1,2963-2981).
gctgccctaacaagaaatt

SEQ ID NO: 562857 - DNA, 19 bp, Mus musculus
  siRNA target sequence for Adcy8 (NM_009623.1,2967-2985).
ccctaacaagaaattcaat

SEQ ID NO: 562858 - DNA, 19 bp, Mus musculus
  siRNA target sequence for Adcy8 (NM_009623.1,2968-2986).
cctaacaagaaattcaata

SEQ ID NO: 562859 - DNA, 19 bp, Mus musculus
  siRNA target sequence for Adcy8 (NM_009623.1,3032-3050).
gggcctgaggaaattaaca

SEQ ID NO: 562860 - DNA, 19 bp, Mus musculus
  siRNA target sequence for Adcy8 (NM_009623.1,3033-3051).
ggcctgaggaaattaacaa

SEQ ID NO: 562861 - DNA, 19 bp, Mus musculus
  siRNA target sequence for Adcy8 (NM_009623.1,3040-3058).
ggaaattaacaagagaata

SEQ ID NO: 562862 - DNA, 19 bp, Mus musculus
  siRNA target sequence for Adcy8 (NM_009623.1,3077-3095).
cggagtggcgataagttga

SEQ ID NO: 562863 - DNA, 19 bp, Mus musculus
  siRNA target sequence for Adcy8 (NM_009623.1,3103-3121).
gcatatcaagccattctca

SEQ ID NO: 562864 - DNA, 19 bp, Mus musculus
  siRNA target sequence for Adcy8 (NM_009623.1,3145-3163).
ggagcacaagtattctcaa

SEQ ID NO: 562865 - DNA, 19 bp, Mus musculus
  siRNA target sequence for Adcy8 (NM_009623.1,3149-3167).
cacaagtattctcaaatga

SEQ ID NO: 562866 - DNA, 19 bp, Mus musculus
  siRNA target sequence for Adcy8 (NM_009623.1,3161-3179).
caaatgagggatgaagtat

SEQ ID NO: 562867 - DNA, 19 bp, Mus musculus
  siRNA target sequence for Adcy8 (NM_009623.1,3193-3211).
ggtctgtgcatttatcgtt

SEQ ID NO: 562868 - DNA, 19 bp, Mus musculus
  siRNA target sequence for Adcy8 (NM_009623.1,3198-3216).
gtgcatttatcgttcttct

SEQ ID NO: 562869 - DNA, 19 bp, Mus musculus
  siRNA target sequence for Adcy8 (NM_009623.1,3201-3219).
catttatcgttcttctgtt

SEQ ID NO: 562870 - DNA, 19 bp, Mus musculus
  siRNA target sequence for Adcy8 (NM_009623.1,3347-3365).
cccctcatcctccgaaaaa

SEQ ID NO: 562871 - DNA, 19 bp, Mus musculus
  siRNA target sequence for Adcy8 (NM_009623.1,3366-3384).
cctgctgttggattaatga

SEQ ID NO: 562872 - DNA, 19 bp, Mus musculus
  siRNA target sequence for Adcy8 (NM_009623.1,3412-3430).
cttcgcttccatcttaatt

SEQ ID NO: 562873 - DNA, 19 bp, Mus musculus
  siRNA target sequence for Adcy8 (NM_009623.1,3416-3434).
gcttccatcttaattaact

SEQ ID NO: 562874 - DNA, 19 bp, Mus musculus
  siRNA target sequence for Adcy8 (NM_009623.1,3436-3454).
cctgggagctgtcctaaat

SEQ ID NO: 562875 - DNA, 19 bp, Mus musculus
  siRNA target sequence for Adcy8 (NM_009623.1,3439-3457).
gggagctgtcctaaatatt

SEQ ID NO: 562876 - DNA, 19 bp, Mus musculus
  siRNA target sequence for Adcy8 (NM_009623.1,3441-3459).
gagctgtcctaaatattct

SEQ ID NO: 562877 - DNA, 19 bp, Mus musculus
  siRNA target sequence for Adcy8 (NM_009623.1,3443-3461).
gctgtcctaaatattctgt

SEQ ID NO: 562878 - DNA, 19 bp, Mus musculus
  siRNA target sequence for Adcy8 (NM_009623.1,3510-3528).
cctcagctgtgtttacaga

SEQ ID NO: 562879 - DNA, 19 bp, Mus musculus
  siRNA target sequence for Adcy8 (NM_009623.1,3511-3529).
ctcagctgtgtttacagat

SEQ ID NO: 562880 - DNA, 19 bp, Mus musculus
  siRNA target sequence for Adcy8 (NM_009623.1,3534-3552).
gctcctacccagagtactt

SEQ ID NO: 562881 - DNA, 19 bp, Mus musculus
  siRNA target sequence for Adcy8 (NM_009623.1,3535-3553).
ctcctacccagagtacttt

SEQ ID NO: 562882 - DNA, 19 bp, Mus musculus
  siRNA target sequence for Adcy8 (NM_009623.1,3590-3608).
gtgtttgtacggcttaact

SEQ ID NO: 562883 - DNA, 19 bp, Mus musculus
  siRNA target sequence for Adcy8 (NM_009623.1,3592-3610).
gtttgtacggcttaactct

SEQ ID NO: 562884 - DNA, 19 bp, Mus musculus
  siRNA target sequence for Adcy8 (NM_009623.1,3624-3642).
cagtgctactcatcatgat

SEQ ID NO: 562885 - DNA, 19 bp, Mus musculus
  siRNA target sequence for Adcy8 (NM_009623.1,3678-3696).
caggtctctttctgagtta

SEQ ID NO: 562886 - DNA, 19 bp, Mus musculus
  siRNA target sequence for Adcy8 (NM_009623.1,3683-3701).
ctctttctgagttatgaca

SEQ ID NO: 562887 - DNA, 19 bp, Mus musculus
  siRNA target sequence for Adcy8 (NM_009623.1,3892-3910).
catgctgcgcaatatctta

SEQ ID NO: 562888 - DNA, 19 bp, Mus musculus
  siRNA target sequence for Adcy8 (NM_009623.1,4011-4029).
ctgggttcgcagacttcta

SEQ ID NO: 562889 - DNA, 19 bp, Mus musculus
  siRNA target sequence for Adcy8 (NM_009623.1,4045-4063).
gaacaaccagggagtagaa

SEQ ID NO: 562890 - DNA, 19 bp, Mus musculus
  siRNA target sequence for Adcy8 (NM_009623.1,4065-4083).
gtctgcgcttgctgaatga

SEQ ID NO: 562891 - DNA, 19 bp, Mus musculus
  siRNA target sequence for Adcy8 (NM_009623.1,4196-4214).
cagcaatgtgaagataaat

SEQ ID NO: 562892 - DNA, 19 bp, Mus musculus
  siRNA target sequence for Adcy8 (NM_009623.1,4257-4275).
ctgaaagcatacaagagat

SEQ ID NO: 562893 - DNA, 19 bp, Mus musculus
  siRNA target sequence for Adcy8 (NM_009623.1,4341-4359).
gtgtaattggagctaagaa

SEQ ID NO: 562894 - DNA, 19 bp, Mus musculus
  siRNA target sequence for Adcy8 (NM_009623.1,4353-4371).
ctaagaaaccacagtatga

SEQ ID NO: 562895 - DNA, 19 bp, Mus musculus
  siRNA target sequence for Adcy8 (NM_009623.1,4377-4395).
gggggaaaactgtgaactt

SEQ ID NO: 562896 - DNA, 19 bp, Mus musculus
  siRNA target sequence for Adcy8 (NM_009623.1,4443-4461).
ctgaggagacctaccttat

SEQ ID NO: 562897 - DNA, 19 bp, Mus musculus
  siRNA target sequence for Adcy8 (NM_009623.1,4489-4507).
ctaccgtggggagatatat

SEQ ID NO: 562898 - DNA, 19 bp, Mus musculus
  siRNA target sequence for Adcy8 (NM_009623.1,4493-4511).
cgtggggagatatatgtga

SEQ ID NO: 562899 - DNA, 19 bp, Mus musculus
  siRNA target sequence for Adcy8 (NM_009623.1,4494-4512).
gtggggagatatatgtgaa

SEQ ID NO: 562900 - DNA, 19 bp, Mus musculus
  siRNA target sequence for Adcy8 (NM_009623.1,4513-4531).
gggcatcagtgaacaagaa

SEQ ID NO: 562901 - DNA, 19 bp, Mus musculus
  siRNA target sequence for Adcy8 (NM_009623.1,4692-4710).
gcaattcgggcatcatcaa

SEQ ID NO: 562902 - DNA, 19 bp, Mus musculus
  siRNA target sequence for Adcy9 (NM_009624.1,122-140).
gcgtgagggtcaagatcaa

SEQ ID NO: 562903 - DNA, 19 bp, Mus musculus
  siRNA target sequence for Adcy9 (NM_009624.1,169-187).
ccgaagcactgcaagtaca

SEQ ID NO: 562904 - DNA, 19 bp, Mus musculus
  siRNA target sequence for Adcy9 (NM_009624.1,311-329).
ggtgggaccccaaattcga

SEQ ID NO: 562905 - DNA, 19 bp, Mus musculus
  siRNA target sequence for Adcy9 (NM_009624.1,390-408).
ccggtacgcactcttttat

SEQ ID NO: 562906 - DNA, 19 bp, Mus musculus
  siRNA target sequence for Adcy9 (NM_009624.1,392-410).
ggtacgcactcttttatgt

SEQ ID NO: 562907 - DNA, 19 bp, Mus musculus
  siRNA target sequence for Adcy9 (NM_009624.1,445-463).
gctgtccacatgaaatcca

SEQ ID NO: 562908 - DNA, 19 bp, Mus musculus
  siRNA target sequence for Adcy9 (NM_009624.1,453-471).
catgaaatccaaagtgatt

SEQ ID NO: 562909 - DNA, 19 bp, Mus musculus
  siRNA target sequence for Adcy9 (NM_009624.1,683-701).
cggacacttgcttatctca

SEQ ID NO: 562910 - DNA, 19 bp, Mus musculus
  siRNA target sequence for Adcy9 (NM_009624.1,707-725).
gaagcttctccatatgcat

SEQ ID NO: 562911 - DNA, 19 bp, Mus musculus
  siRNA target sequence for Adcy9 (NM_009624.1,722-740).
gcatcgaagtgctcctttt

SEQ ID NO: 562912 - DNA, 19 bp, Mus musculus
  siRNA target sequence for Adcy9 (NM_009624.1,822-840).
ctaccacttccgaaacgaa

SEQ ID NO: 562913 - DNA, 19 bp, Mus musculus
  siRNA target sequence for Adcy9 (NM_009624.1,920-938).
ctatcgggatccatctgtt

SEQ ID NO: 562914 - DNA, 19 bp, Mus musculus
  siRNA target sequence for Adcy9 (NM_009624.1,925-943).
gggatccatctgtttgtca

SEQ ID NO: 562915 - DNA, 19 bp, Mus musculus
  siRNA target sequence for Adcy9 (NM_009624.1,975-993).
caaggtgggacaatccatt

SEQ ID NO: 562916 - DNA, 19 bp, Mus musculus
  siRNA target sequence for Adcy9 (NM_009624.1,990-1008).
cattatgcacggcaaagat

SEQ ID NO: 562917 - DNA, 19 bp, Mus musculus
  siRNA target sequence for Adcy9 (NM_009624.1,1001-1019).
gcaaagatctggaagtaga

SEQ ID NO: 562918 - DNA, 19 bp, Mus musculus
  siRNA target sequence for Adcy9 (NM_009624.1,1049-1067).
cagtgatgccaagaatcat

SEQ ID NO: 562919 - DNA, 19 bp, Mus musculus
  siRNA target sequence for Adcy9 (NM_009624.1,1070-1088).
ccgacgacttaatgaaaca

SEQ ID NO: 562920 - DNA, 19 bp, Mus musculus
  siRNA target sequence for Adcy9 (NM_009624.1,1071-1089).
cgacgacttaatgaaacaa

SEQ ID NO: 562921 - DNA, 19 bp, Mus musculus
  siRNA target sequence for Adcy9 (NM_009624.1,1168-1186).
cagaaggcaccgatagcat

SEQ ID NO: 562922 - DNA, 19 bp, Mus musculus
  siRNA target sequence for Adcy9 (NM_009624.1,1257-1275).
gatgagcgccaacaaatct

SEQ ID NO: 562923 - DNA, 19 bp, Mus musculus
  siRNA target sequence for Adcy9 (NM_009624.1,1283-1301).
ccttggtaggcctactcaa

SEQ ID NO: 562924 - DNA, 19 bp, Mus musculus
  siRNA target sequence for Adcy9 (NM_009624.1,1284-1302).
cttggtaggcctactcaat

SEQ ID NO: 562925 - DNA, 19 bp, Mus musculus
  siRNA target sequence for Adcy9 (NM_009624.1,1358-1376).
gcactctgggggactgtta

SEQ ID NO: 562926 - DNA, 19 bp, Mus musculus
  siRNA target sequence for Adcy9 (NM_009624.1,1359-1377).
cactctgggggactgttat

SEQ ID NO: 562927 - DNA, 19 bp, Mus musculus
  siRNA target sequence for Adcy9 (NM_009624.1,1418-1436).
cctactgctgcattgaaat

SEQ ID NO: 562928 - DNA, 19 bp, Mus musculus
  siRNA target sequence for Adcy9 (NM_009624.1,1571-1589).
ggtccaacgatgtgaactt

SEQ ID NO: 562929 - DNA, 19 bp, Mus musculus
  siRNA target sequence for Adcy9 (NM_009624.1,1582-1600).
gtgaacttggctaatctca

SEQ ID NO: 562930 - DNA, 19 bp, Mus musculus
  siRNA target sequence for Adcy9 (NM_009624.1,1611-1629).
gggagtggctggcaaagtt

SEQ ID NO: 562931 - DNA, 19 bp, Mus musculus
  siRNA target sequence for Adcy9 (NM_009624.1,1617-1635).
ggctggcaaagttcacata

SEQ ID NO: 562932 - DNA, 19 bp, Mus musculus
  siRNA target sequence for Adcy9 (NM_009624.1,1618-1636).
gctggcaaagttcacatat

SEQ ID NO: 562933 - DNA, 19 bp, Mus musculus
  siRNA target sequence for Adcy9 (NM_009624.1,1622-1640).
gcaaagttcacatatctga

SEQ ID NO: 562934 - DNA, 19 bp, Mus musculus
  siRNA target sequence for Adcy9 (NM_009624.1,1637-1655).
ctgaggccactgcaaaata

SEQ ID NO: 562935 - DNA, 19 bp, Mus musculus
  siRNA target sequence for Adcy9 (NM_009624.1,1639-1657).
gaggccactgcaaaatact

SEQ ID NO: 562936 - DNA, 19 bp, Mus musculus
  siRNA target sequence for Adcy9 (NM_009624.1,1641-1659).
ggccactgcaaaatactta

SEQ ID NO: 562937 - DNA, 19 bp, Mus musculus
  siRNA target sequence for Adcy9 (NM_009624.1,1643-1661).
ccactgcaaaatacttaga

SEQ ID NO: 562938 - DNA, 19 bp, Mus musculus
  siRNA target sequence for Adcy9 (NM_009624.1,1656-1674).
cttagacgacaggtatgaa

SEQ ID NO: 562939 - DNA, 19 bp, Mus musculus
  siRNA target sequence for Adcy9 (NM_009624.1,1720-1738).
gctgaccagttgaaaggtt

SEQ ID NO: 562940 - DNA, 19 bp, Mus musculus
  siRNA target sequence for Adcy9 (NM_009624.1,1894-1912).
gcgcagactgtcaaaacct

SEQ ID NO: 562941 - DNA, 19 bp, Mus musculus
  siRNA target sequence for Adcy9 (NM_009624.1,1895-1913).
cgcagactgtcaaaacctt

SEQ ID NO: 562942 - DNA, 19 bp, Mus musculus
  siRNA target sequence for Adcy9 (NM_009624.1,1905-1923).
caaaacctttgataacctt

SEQ ID NO: 562943 - DNA, 19 bp, Mus musculus
  siRNA target sequence for Adcy9 (NM_009624.1,1933-1951).
ccttcttgtggaatcacat

SEQ ID NO: 562944 - DNA, 19 bp, Mus musculus
  siRNA target sequence for Adcy9 (NM_009624.1,2213-2231).
ctgatgcccactttgttga

SEQ ID NO: 562945 - DNA, 19 bp, Mus musculus
  siRNA target sequence for Adcy9 (NM_009624.1,2313-2331).
ggagctggagcgatcatat

SEQ ID NO: 562946 - DNA, 19 bp, Mus musculus
  siRNA target sequence for Adcy9 (NM_009624.1,2314-2332).
gagctggagcgatcatata

SEQ ID NO: 562947 - DNA, 19 bp, Mus musculus
  siRNA target sequence for Adcy9 (NM_009624.1,2316-2334).
gctggagcgatcatataga

SEQ ID NO: 562948 - DNA, 19 bp, Mus musculus
  siRNA target sequence for Adcy9 (NM_009624.1,2317-2335).
ctggagcgatcatatagaa

SEQ ID NO: 562949 - DNA, 19 bp, Mus musculus
  siRNA target sequence for Adcy9 (NM_009624.1,2555-2573).
ccatcagaatggtgttttt

SEQ ID NO: 562950 - DNA, 19 bp, Mus musculus
  siRNA target sequence for Adcy9 (NM_009624.1,2575-2593).
ctagaggatgtcatgacat

SEQ ID NO: 562951 - DNA, 19 bp, Mus musculus
  siRNA target sequence for Adcy9 (NM_009624.1,2584-2602).
gtcatgacatgcacaaagt

SEQ ID NO: 562952 - DNA, 19 bp, Mus musculus
  siRNA target sequence for Adcy9 (NM_009624.1,2672-2690).
ccctggctgtctattcaca

SEQ ID NO: 562953 - DNA, 19 bp, Mus musculus
  siRNA target sequence for Adcy9 (NM_009624.1,2755-2773).
gccgttgtgcactactgta

SEQ ID NO: 562954 - DNA, 19 bp, Mus musculus
  siRNA target sequence for Adcy9 (NM_009624.1,2756-2774).
ccgttgtgcactactgtaa

SEQ ID NO: 562955 - DNA, 19 bp, Mus musculus
  siRNA target sequence for Adcy9 (NM_009624.1,2758-2776).
gttgtgcactactgtaact

SEQ ID NO: 562956 - DNA, 19 bp, Mus musculus
  siRNA target sequence for Adcy9 (NM_009624.1,2761-2779).
gtgcactactgtaacttct

SEQ ID NO: 562957 - DNA, 19 bp, Mus musculus
  siRNA target sequence for Adcy9 (NM_009624.1,2859-2877).
gtgtcaggacagttccatt

SEQ ID NO: 562958 - DNA, 19 bp, Mus musculus
  siRNA target sequence for Adcy9 (NM_009624.1,3330-3348).
gagcaagccggactataat

SEQ ID NO: 562959 - DNA, 19 bp, Mus musculus
  siRNA target sequence for Adcy9 (NM_009624.1,3578-3596).
ccaccaagctgctgtatga

SEQ ID NO: 562960 - DNA, 19 bp, Mus musculus
  siRNA target sequence for Adcy9 (NM_009624.1,3857-3875).
ggtctcccacagatgagat

SEQ ID NO: 562961 - DNA, 19 bp, Mus musculus
  siRNA target sequence for Adprh (NM_007414.2,410-428).
gatttgcctcggctgtatt

SEQ ID NO: 562962 - DNA, 19 bp, Mus musculus
  siRNA target sequence for Adprh (NM_007414.2,429-447).
ccctactagccaaacatta

SEQ ID NO: 562963 - DNA, 19 bp, Mus musculus
  siRNA target sequence for Adprh (NM_007414.2,528-546).
gggccgacggctataggat

SEQ ID NO: 562964 - DNA, 19 bp, Mus musculus
  siRNA target sequence for Adprh (NM_007414.2,529-547).
ggccgacggctataggatt

SEQ ID NO: 562965 - DNA, 19 bp, Mus musculus
  siRNA target sequence for Adprh (NM_007414.2,703-721).
ccttgcgtccgctcttttt

SEQ ID NO: 562966 - DNA, 19 bp, Mus musculus
  siRNA target sequence for Adprh (NM_007414.2,704-722).
cttgcgtccgctcttttta

SEQ ID NO: 562967 - DNA, 19 bp, Mus musculus
  siRNA target sequence for Adprh (NM_007414.2,805-823).
cactcagtcaggctacttt

SEQ ID NO: 562968 - DNA, 19 bp, Mus musculus
  siRNA target sequence for Adprh (NM_007414.2,877-895).
cctggagcttagaggaatt

SEQ ID NO: 562969 - DNA, 19 bp, Mus musculus
  siRNA target sequence for Adprh (NM_007414.2,1119-1137).
gctgctggtggggagttat

SEQ ID NO: 562970 - DNA, 19 bp, Mus musculus
  siRNA target sequence for Adprh (NM_007414.2,1131-1149).
gagttatgtacggctttaa

SEQ ID NO: 562971 - DNA, 19 bp, Mus musculus
  siRNA target sequence for Adprh (NM_007414.2,1141-1159).
cggctttaaaggcgtaaat

SEQ ID NO: 562972 - DNA, 19 bp, Mus musculus
  siRNA target sequence for Adprh (NM_007414.2,1204-1222).
ggccggaagagctttgtat

SEQ ID NO: 562973 - DNA, 19 bp, Mus musculus
  siRNA target sequence for Adprh (NM_007414.2,1219-1237).
gtattctctcgggtcaaaa

SEQ ID NO: 562974 - DNA, 19 bp, Mus musculus
  siRNA target sequence for Akp2 (NM_007431.1,185-203).
gatctcaccatttttagta

SEQ ID NO: 562975 - DNA, 19 bp, Mus musculus
  siRNA target sequence for Akp2 (NM_007431.1,217-235).
cctgccttaccaactcttt

SEQ ID NO: 562976 - DNA, 19 bp, Mus musculus
  siRNA target sequence for Akp2 (NM_007431.1,218-236).
ctgccttaccaactctttt

SEQ ID NO: 562977 - DNA, 19 bp, Mus musculus
  siRNA target sequence for Akp2 (NM_007431.1,220-238).
gccttaccaactcttttgt

SEQ ID NO: 562978 - DNA, 19 bp, Mus musculus
  siRNA target sequence for Akp2 (NM_007431.1,301-319).
ccctgaaactccaaaagct

SEQ ID NO: 562979 - DNA, 19 bp, Mus musculus
  siRNA target sequence for Akp2 (NM_007431.1,325-343).
ccaatgtagccaagaatgt

SEQ ID NO: 562980 - DNA, 19 bp, Mus musculus
  siRNA target sequence for Akp2 (NM_007431.1,385-403).
ccgctgcccgaatccttaa

SEQ ID NO: 562981 - DNA, 19 bp, Mus musculus
  siRNA target sequence for Akp2 (NM_007431.1,467-485).
ggccctctccaagacatat

SEQ ID NO: 562982 - DNA, 19 bp, Mus musculus
  siRNA target sequence for Akp2 (NM_007431.1,801-819).
cagctaatgcacaatatca

SEQ ID NO: 562983 - DNA, 19 bp, Mus musculus
  siRNA target sequence for Akp2 (NM_007431.1,927-945).
ggcctggatctcatcagta

SEQ ID NO: 562984 - DNA, 19 bp, Mus musculus
  siRNA target sequence for Akp2 (NM_007431.1,928-946).
gcctggatctcatcagtat

SEQ ID NO: 562985 - DNA, 19 bp, Mus musculus
  siRNA target sequence for Akp2 (NM_007431.1,1034-1052).
ctacctcttaggtctcttt

SEQ ID NO: 562986 - DNA, 19 bp, Mus musculus
  siRNA target sequence for Akp2 (NM_007431.1,1059-1077).
ggggacatgcagtatgaat

SEQ ID NO: 562987 - DNA, 19 bp, Mus musculus
  siRNA target sequence for Akp2 (NM_007431.1,1060-1078).
gggacatgcagtatgaatt

SEQ ID NO: 562988 - DNA, 19 bp, Mus musculus
  siRNA target sequence for Akp2 (NM_007431.1,1062-1080).
gacatgcagtatgaattga

SEQ ID NO: 562989 - DNA, 19 bp, Mus musculus
  siRNA target sequence for Akp2 (NM_007431.1,1064-1082).
catgcagtatgaattgaat

SEQ ID NO: 562990 - DNA, 19 bp, Mus musculus
  siRNA target sequence for Akp2 (NM_007431.1,1131-1149).
ctccggatcctgaccaaaa

SEQ ID NO: 562991 - DNA, 19 bp, Mus musculus
  siRNA target sequence for Akp2 (NM_007431.1,1312-1330).
ctgatcattcccacgtttt

SEQ ID NO: 562992 - DNA, 19 bp, Mus musculus
  siRNA target sequence for Akp2 (NM_007431.1,1314-1332).
gatcattcccacgttttca

SEQ ID NO: 562993 - DNA, 19 bp, Mus musculus
  siRNA target sequence for Akp2 (NM_007431.1,1317-1335).
cattcccacgttttcacat

SEQ ID NO: 562994 - DNA, 19 bp, Mus musculus
  siRNA target sequence for Akp2 (NM_007431.1,1408-1426).
ccttcacggccatcctata

SEQ ID NO: 562995 - DNA, 19 bp, Mus musculus
  siRNA target sequence for Akp2 (NM_007431.1,1414-1432).
cggccatcctatatggtaa

SEQ ID NO: 562996 - DNA, 19 bp, Mus musculus
  siRNA target sequence for Akp2 (NM_007431.1,1454-1472).
ggacggtgaacgggaaaat

SEQ ID NO: 562997 - DNA, 19 bp, Mus musculus
  siRNA target sequence for Akp2 (NM_007431.1,1458-1476).
ggtgaacgggaaaatgtct

SEQ ID NO: 562998 - DNA, 19 bp, Mus musculus
  siRNA target sequence for Akp2 (NM_007431.1,1600-1618).
gcgtccatgagcagaacta

SEQ ID NO: 562999 - DNA, 19 bp, Mus musculus
  siRNA target sequence for Cldn16 (NM_053241.2,436-454).
ctggaggtgagcactaaat

SEQ ID NO: 563000 - DNA, 19 bp, Mus musculus
  siRNA target sequence for Cldn16 (NM_053241.2,439-457).
gaggtgagcactaaatgca

SEQ ID NO: 563001 - DNA, 19 bp, Mus musculus
  siRNA target sequence for Cldn16 (NM_053241.2,465-483).
gtggtgggagtgtgtaaca

SEQ ID NO: 563002 - DNA, 19 bp, Mus musculus
  siRNA target sequence for Cldn16 (NM_053241.2,467-485).
ggtgggagtgtgtaacaaa

SEQ ID NO: 563003 - DNA, 19 bp, Mus musculus
  siRNA target sequence for Cldn16 (NM_053241.2,476-494).
gtgtaacaaacgcttttga

SEQ ID NO: 563004 - DNA, 19 bp, Mus musculus
  siRNA target sequence for Cldn16 (NM_053241.2,511-529).
gatgagtacgactccatat

SEQ ID NO: 563005 - DNA, 19 bp, Mus musculus
  siRNA target sequence for Cldn16 (NM_053241.2,516-534).
gtacgactccatatatgca

SEQ ID NO: 563006 - DNA, 19 bp, Mus musculus
  siRNA target sequence for Cldn16 (NM_053241.2,646-664).
cctgatgacccacaaatta

SEQ ID NO: 563007 - DNA, 19 bp, Mus musculus
  siRNA target sequence for Cldn16 (NM_053241.2,685-703).
gcagggaccacattactca

SEQ ID NO: 563008 - DNA, 19 bp, Mus musculus
  siRNA target sequence for Cldn16 (NM_053241.2,686-704).
cagggaccacattactcat

SEQ ID NO: 563009 - DNA, 19 bp, Mus musculus
  siRNA target sequence for Cldn16 (NM_053241.2,798-816).
gatccaatataaatttggt

SEQ ID NO: 563010 - DNA, 19 bp, Mus musculus
  siRNA target sequence for Cldn16 (NM_053241.2,881-899).
gctgtttgtacctcttcaa

SEQ ID NO: 563011 - DNA, 19 bp, Mus musculus
  siRNA target sequence for Cldn16 (NM_053241.2,936-954).
gaggaagccctattcaact

SEQ ID NO: 563012 - DNA, 19 bp, Mus musculus
  siRNA target sequence for Comt (NM_007744.1,241-259).
ggtggctattggttggttt

SEQ ID NO: 563013 - DNA, 19 bp, Mus musculus
  siRNA target sequence for Comt (NM_007744.1,422-440).
gacgcaaaaggccaaatca

SEQ ID NO: 563014 - DNA, 19 bp, Mus musculus
  siRNA target sequence for Comt (NM_007744.1,611-629).
ggcctacaggacaaagttt

SEQ ID NO: 563015 - DNA, 19 bp, Mus musculus
  siRNA target sequence for Comt (NM_007744.1,784-802).
ggtgctcctagctgacaat

SEQ ID NO: 563016 - DNA, 19 bp, Mus musculus
  siRNA target sequence for Eno2 (NM_013509.2,145-163).
cgtggaggtggatctctat

SEQ ID NO: 563017 - DNA, 19 bp, Mus musculus
  siRNA target sequence for Eno2 (NM_013509.2,146-164).
gtggaggtggatctctata

SEQ ID NO: 563018 - DNA, 19 bp, Mus musculus
  siRNA target sequence for Eno2 (NM_013509.2,243-261).
gggacaaacagcgttactt

SEQ ID NO: 563019 - DNA, 19 bp, Mus musculus
  siRNA target sequence for Eno2 (NM_013509.2,720-738).
gcggctttgcccccaatat

SEQ ID NO: 563020 - DNA, 19 bp, Mus musculus
  siRNA target sequence for Eno2 (NM_013509.2,789-807).
ctggctacacggaaaagat

SEQ ID NO: 563021 - DNA, 19 bp, Mus musculus
  siRNA target sequence for Eno2 (NM_013509.2,851-869).
ggcaaatacgacttggatt

SEQ ID NO: 563022 - DNA, 19 bp, Mus musculus
  siRNA target sequence for Eno2 (NM_013509.2,882-900).
ctgatccttcccgatacat

SEQ ID NO: 563023 - DNA, 19 bp, Mus musculus
  siRNA target sequence for Eno2 (NM_013509.2,1088-1106).
gagaaggcctgcaactgtt

SEQ ID NO: 563024 - DNA, 19 bp, Mus musculus
  siRNA target sequence for Eno2 (NM_013509.2,1222-1240).
cacgttcattgctgatctt

SEQ ID NO: 563025 - DNA, 19 bp, Mus musculus
  siRNA target sequence for Eno2 (NM_013509.2,1224-1242).
cgttcattgctgatcttgt

SEQ ID NO: 563026 - DNA, 19 bp, Mus musculus
  siRNA target sequence for Eno2 (NM_013509.2,1350-1368).
ctcgcttcgcgggacataa

SEQ ID NO: 563027 - DNA, 19 bp, Mus musculus
  siRNA target sequence for Eno2 (NM_013509.2,1352-1370).
cgcttcgcgggacataatt

SEQ ID NO: 563028 - DNA, 19 bp, Mus musculus
  siRNA target sequence for Eno2 (NM_013509.2,1353-1371).
gcttcgcgggacataattt

SEQ ID NO: 563029 - DNA, 19 bp, Mus musculus
  siRNA target sequence for Eno3 (NM_007933.2,191-209).
gagcttccacgggtatcta

SEQ ID NO: 563030 - DNA, 19 bp, Mus musculus
  siRNA target sequence for Eno3 (NM_007933.2,370-388).
gacgggaccgagaataagt

SEQ ID NO: 563031 - DNA, 19 bp, Mus musculus
  siRNA target sequence for Eno3 (NM_007933.2,471-489).
ccgacacatcgcagatctt

SEQ ID NO: 563032 - DNA, 19 bp, Mus musculus
  siRNA target sequence for Eno3 (NM_007933.2,811-829).
gatgtagctgcgtctgaat

SEQ ID NO: 563033 - DNA, 19 bp, Mus musculus
  siRNA target sequence for Eno3 (NM_007933.2,814-832).
gtagctgcgtctgaattct

SEQ ID NO: 563034 - DNA, 19 bp, Mus musculus
  siRNA target sequence for Eno3 (NM_007933.2,831-849).
ctaccgcaacggcaagtat

SEQ ID NO: 563035 - DNA, 19 bp, Mus musculus
  siRNA target sequence for Eno3 (NM_007933.2,834-852).
ccgcaacggcaagtatgat

SEQ ID NO: 563036 - DNA, 19 bp, Mus musculus
  siRNA target sequence for Eno3 (NM_007933.2,836-854).
gcaacggcaagtatgatct

SEQ ID NO: 563037 - DNA, 19 bp, Mus musculus
  siRNA target sequence for Eno3 (NM_007933.2,908-926).
gggagctgtacaagaactt

SEQ ID NO: 563038 - DNA, 19 bp, Mus musculus
  siRNA target sequence for Eno3 (NM_007933.2,1007-1025).
gggtggacatccagattgt

SEQ ID NO: 563039 - DNA, 19 bp, Mus musculus
  siRNA target sequence for Eno3 (NM_007933.2,1137-1155).
catccaggcctgtaaactt

SEQ ID NO: 563040 - DNA, 19 bp, Mus musculus
  siRNA target sequence for Eno3 (NM_007933.2,1282-1300).
gagcgtctggcaaaataca

SEQ ID NO: 563041 - DNA, 19 bp, Mus musculus
  siRNA target sequence for Eno3 (NM_007933.2,1355-1373).
gaaagttccgtaatccaaa

SEQ ID NO: 563042 - DNA, 19 bp, Mus musculus
  siRNA target sequence for Entpd1 (NM_009848.2,221-239).
gccagaaaatgttaagtat

SEQ ID NO: 563043 - DNA, 19 bp, Mus musculus
  siRNA target sequence for Entpd1 (NM_009848.2,265-283).
ctcacaccaacctgtacat

SEQ ID NO: 563044 - DNA, 19 bp, Mus musculus
  siRNA target sequence for Entpd1 (NM_009848.2,354-372).
ggtcctggaatctcaaaat

SEQ ID NO: 563045 - DNA, 19 bp, Mus musculus
  siRNA target sequence for Entpd1 (NM_009848.2,355-373).
gtcctggaatctcaaaata

SEQ ID NO: 563046 - DNA, 19 bp, Mus musculus
  siRNA target sequence for Entpd1 (NM_009848.2,400-418).
cgtacctggccgaatgcat

SEQ ID NO: 563047 - DNA, 19 bp, Mus musculus
  siRNA target sequence for Entpd1 (NM_009848.2,486-504).
gcaggcatgcgcttgctta

SEQ ID NO: 563048 - DNA, 19 bp, Mus musculus
  siRNA target sequence for Entpd1 (NM_009848.2,489-507).
ggcatgcgcttgcttagaa

SEQ ID NO: 563049 - DNA, 19 bp, Mus musculus
  siRNA target sequence for Entpd1 (NM_009848.2,490-508).
gcatgcgcttgcttagaat

SEQ ID NO: 563050 - DNA, 19 bp, Mus musculus
  siRNA target sequence for Entpd1 (NM_009848.2,494-512).
gcgcttgcttagaatggaa

SEQ ID NO: 563051 - DNA, 19 bp, Mus musculus
  siRNA target sequence for Entpd1 (NM_009848.2,495-513).
cgcttgcttagaatggaaa

SEQ ID NO: 563052 - DNA, 19 bp, Mus musculus
  siRNA target sequence for Entpd1 (NM_009848.2,546-564).
gtgtcaacaagccttaaga

SEQ ID NO: 563053 - DNA, 19 bp, Mus musculus
  siRNA target sequence for Entpd1 (NM_009848.2,615-633).
ggtgcctatgggtggatta

SEQ ID NO: 563054 - DNA, 19 bp, Mus musculus
  siRNA target sequence for Entpd1 (NM_009848.2,618-636).
gcctatgggtggattacta

SEQ ID NO: 563055 - DNA, 19 bp, Mus musculus
  siRNA target sequence for Entpd1 (NM_009848.2,619-637).
cctatgggtggattactat

SEQ ID NO: 563056 - DNA, 19 bp, Mus musculus
  siRNA target sequence for Entpd1 (NM_009848.2,620-638).
ctatgggtggattactatt

SEQ ID NO: 563057 - DNA, 19 bp, Mus musculus
  siRNA target sequence for Entpd1 (NM_009848.2,624-642).
gggtggattactattaact

SEQ ID NO: 563058 - DNA, 19 bp, Mus musculus
  siRNA target sequence for Entpd1 (NM_009848.2,628-646).
ggattactattaactatct

SEQ ID NO: 563059 - DNA, 19 bp, Mus musculus
  siRNA target sequence for Entpd1 (NM_009848.2,761-779).
gccccaaaacagcactata

SEQ ID NO: 563060 - DNA, 19 bp, Mus musculus
  siRNA target sequence for Entpd1 (NM_009848.2,763-781).
cccaaaacagcactataga

SEQ ID NO: 563061 - DNA, 19 bp, Mus musculus
  siRNA target sequence for Entpd1 (NM_009848.2,810-828).
ctctatggcgaggactata

SEQ ID NO: 563062 - DNA, 19 bp, Mus musculus
  siRNA target sequence for Entpd1 (NM_009848.2,946-964).
gatacgagaaggttgtgaa

SEQ ID NO: 563063 - DNA, 19 bp, Mus musculus
  siRNA target sequence for Entpd1 (NM_009848.2,981-999).
ggcactccctgcaccaaaa

SEQ ID NO: 563064 - DNA, 19 bp, Mus musculus
  siRNA target sequence for Entpd1 (NM_009848.2,1013-1031).
gctaccatttgatcagttt

SEQ ID NO: 563065 - DNA, 19 bp, Mus musculus
  siRNA target sequence for Entpd1 (NM_009848.2,1017-1035).
ccatttgatcagtttcgaa

SEQ ID NO: 563066 - DNA, 19 bp, Mus musculus
  siRNA target sequence for Entpd1 (NM_009848.2,1072-1090).
gcatccttgagctcttcaa

SEQ ID NO: 563067 - DNA, 19 bp, Mus musculus
  siRNA target sequence for Entpd1 (NM_009848.2,1162-1180).
gggcgttttctgctttcta

SEQ ID NO: 563068 - DNA, 19 bp, Mus musculus
  siRNA target sequence for Entpd1 (NM_009848.2,1178-1196).
ctactttgtgatggatttt

SEQ ID NO: 563069 - DNA, 19 bp, Mus musculus
  siRNA target sequence for Entpd1 (NM_009848.2,1202-1220).
gaaggtagcgaaaaacagt

SEQ ID NO: 563070 - DNA, 19 bp, Mus musculus
  siRNA target sequence for Entpd1 (NM_009848.2,1243-1261).
ccgagataacaaaaaattt

SEQ ID NO: 563071 - DNA, 19 bp, Mus musculus
  siRNA target sequence for Entpd1 (NM_009848.2,1294-1312).
cttatccttcagtaaagga

SEQ ID NO: 563072 - DNA, 19 bp, Mus musculus
  siRNA target sequence for Entpd1 (NM_009848.2,1359-1377).
ctcctgcaaggctataact

SEQ ID NO: 563073 - DNA, 19 bp, Mus musculus
  siRNA target sequence for Entpd1 (NM_009848.2,1362-1380).
ctgcaaggctataacttca

SEQ ID NO: 563074 - DNA, 19 bp, Mus musculus
  siRNA target sequence for Entpd1 (NM_009848.2,1385-1403).
cagctcctgggaacagatt

SEQ ID NO: 563075 - DNA, 19 bp, Mus musculus
  siRNA target sequence for Entpd1 (NM_009848.2,1387-1405).
gctcctgggaacagattca

SEQ ID NO: 563076 - DNA, 19 bp, Mus musculus
  siRNA target sequence for Entpd2 (NM_009849.1,302-320).
ccagagtctggttgaatgt

SEQ ID NO: 563077 - DNA, 19 bp, Mus musculus
  siRNA target sequence for Entpd2 (NM_009849.1,336-354).
cgggatgtgcccaaagaca

SEQ ID NO: 563078 - DNA, 19 bp, Mus musculus
  siRNA target sequence for Entpd2 (NM_009849.1,391-409).
caggcatgcgcctactcaa

SEQ ID NO: 563079 - DNA, 19 bp, Mus musculus
  siRNA target sequence for Entpd2 (NM_009849.1,466-484).
cacggtacccctttgactt

SEQ ID NO: 563080 - DNA, 19 bp, Mus musculus
  siRNA target sequence for Entpd2 (NM_009849.1,888-906).
cgtccccagaccttcaaca

SEQ ID NO: 563081 - DNA, 19 bp, Mus musculus
  siRNA target sequence for Entpd2 (NM_009849.1,962-980).
cgtctctgggctcttcaat

SEQ ID NO: 563082 - DNA, 19 bp, Mus musculus
  siRNA target sequence for Entpd2 (NM_009849.1,1009-1027).
ccttcaatggggttttcca

SEQ ID NO: 563083 - DNA, 19 bp, Mus musculus
  siRNA target sequence for Entpd2 (NM_009849.1,1032-1050).
cccgtggctgggaacttca

SEQ ID NO: 563084 - DNA, 19 bp, Mus musculus
  siRNA target sequence for Entpd2 (NM_009849.1,1033-1051).
ccgtggctgggaacttcat

SEQ ID NO: 563085 - DNA, 19 bp, Mus musculus
  siRNA target sequence for Entpd2 (NM_009849.1,1060-1078).
ctgctttctactatactgt

SEQ ID NO: 563086 - DNA, 19 bp, Mus musculus
  siRNA target sequence for Entpd2 (NM_009849.1,1284-1302).
cgtggagtggtcttcgaaa

SEQ ID NO: 563087 - DNA, 19 bp, Mus musculus
  siRNA target sequence for Entpd2 (NM_009849.1,1285-1303).
gtggagtggtcttcgaaaa

SEQ ID NO: 563088 - DNA, 19 bp, Mus musculus
  siRNA target sequence for Entpd5 (NM_007647.1,292-310).
gaaggtgtcttcttgtctt

SEQ ID NO: 563089 - DNA, 19 bp, Mus musculus
  siRNA target sequence for Entpd5 (NM_007647.1,328-346).
gtcagtgccggcacctttt

SEQ ID NO: 563090 - DNA, 19 bp, Mus musculus
  siRNA target sequence for Entpd5 (NM_007647.1,334-352).
gccggcaccttttatggaa

SEQ ID NO: 563091 - DNA, 19 bp, Mus musculus
  siRNA target sequence for Entpd5 (NM_007647.1,337-355).
ggcaccttttatggaatta

SEQ ID NO: 563092 - DNA, 19 bp, Mus musculus
  siRNA target sequence for Entpd5 (NM_007647.1,372-390).
cactggaactcggattcat

SEQ ID NO: 563093 - DNA, 19 bp, Mus musculus
  siRNA target sequence for Entpd5 (NM_007647.1,376-394).
ggaactcggattcatgttt

SEQ ID NO: 563094 - DNA, 19 bp, Mus musculus
  siRNA target sequence for Entpd5 (NM_007647.1,377-395).
gaactcggattcatgttta

SEQ ID NO: 563095 - DNA, 19 bp, Mus musculus
  siRNA target sequence for Entpd5 (NM_007647.1,464-482).
cgggactttctgcttttgt

SEQ ID NO: 563096 - DNA, 19 bp, Mus musculus
  siRNA target sequence for Entpd5 (NM_007647.1,699-717).
catggatgggtcctatgaa

SEQ ID NO: 563097 - DNA, 19 bp, Mus musculus
  siRNA target sequence for Entpd5 (NM_007647.1,729-747).
ctgggttaccgtgaacttt

SEQ ID NO: 563098 - DNA, 19 bp, Mus musculus
  siRNA target sequence for Entpd5 (NM_007647.1,731-749).
gggttaccgtgaactttct

SEQ ID NO: 563099 - DNA, 19 bp, Mus musculus
  siRNA target sequence for Entpd5 (NM_007647.1,732-750).
ggttaccgtgaactttcta

SEQ ID NO: 563100 - DNA, 19 bp, Mus musculus
  siRNA target sequence for Entpd5 (NM_007647.1,733-751).
gttaccgtgaactttctaa

SEQ ID NO: 563101 - DNA, 19 bp, Mus musculus
  siRNA target sequence for Entpd5 (NM_007647.1,829-847).
ctaccccagtttgagaaaa

SEQ ID NO: 563102 - DNA, 19 bp, Mus musculus
  siRNA target sequence for Entpd5 (NM_007647.1,902-920).
cttttaagctctatacaca

SEQ ID NO: 563103 - DNA, 19 bp, Mus musculus
  siRNA target sequence for Entpd5 (NM_007647.1,910-928).
ctctatacacatagttact

SEQ ID NO: 563104 - DNA, 19 bp, Mus musculus
  siRNA target sequence for Entpd5 (NM_007647.1,991-1009).
gatggacatacgtttcgaa

SEQ ID NO: 563105 - DNA, 19 bp, Mus musculus
  siRNA target sequence for Entpd5 (NM_007647.1,1032-1050).
ggaagcagagtggatcttt

SEQ ID NO: 563106 - DNA, 19 bp, Mus musculus
  siRNA target sequence for Entpd5 (NM_007647.1,1128-1146).
ggtagtacaggggaaactt

SEQ ID NO: 563107 - DNA, 19 bp, Mus musculus
  siRNA target sequence for Entpd5 (NM_007647.1,1215-1233).
cacacacttgatcgattat

SEQ ID NO: 563108 - DNA, 19 bp, Mus musculus
  siRNA target sequence for Entpd5 (NM_007647.1,1217-1235).
cacacttgatcgattatga

SEQ ID NO: 563109 - DNA, 19 bp, Mus musculus
  siRNA target sequence for Entpd5 (NM_007647.1,1219-1237).
cacttgatcgattatgaaa

SEQ ID NO: 563110 - DNA, 19 bp, Mus musculus
  siRNA target sequence for Entpd5 (NM_007647.1,1331-1349).
gcatggacctcacttacat

SEQ ID NO: 563111 - DNA, 19 bp, Mus musculus
  siRNA target sequence for Entpd5 (NM_007647.1,1394-1412).
ctcttacagctcacaaaga

SEQ ID NO: 563112 - DNA, 19 bp, Mus musculus
  siRNA target sequence for Entpd5 (NM_007647.1,1396-1414).
cttacagctcacaaagaaa

SEQ ID NO: 563113 - DNA, 19 bp, Mus musculus
  siRNA target sequence for Facl2 (NM_007981.2,175-193).
ggggtttggggcttttgca

SEQ ID NO: 563114 - DNA, 19 bp, Mus musculus
  siRNA target sequence for Facl2 (NM_007981.2,276-294).
cgggtaccactgatggtat

SEQ ID NO: 563115 - DNA, 19 bp, Mus musculus
  siRNA target sequence for Facl2 (NM_007981.2,277-295).
gggtaccactgatggtatt

SEQ ID NO: 563116 - DNA, 19 bp, Mus musculus
  siRNA target sequence for Facl2 (NM_007981.2,300-318).
gatcagcagtccttgaaga

SEQ ID NO: 563117 - DNA, 19 bp, Mus musculus
  siRNA target sequence for Facl2 (NM_007981.2,379-397).
ggggattcaggtgtcaaat

SEQ ID NO: 563118 - DNA, 19 bp, Mus musculus
  siRNA target sequence for Facl2 (NM_007981.2,380-398).
gggattcaggtgtcaaata

SEQ ID NO: 563119 - DNA, 19 bp, Mus musculus
  siRNA target sequence for Facl2 (NM_007981.2,381-399).
ggattcaggtgtcaaataa

SEQ ID NO: 563120 - DNA, 19 bp, Mus musculus
  siRNA target sequence for Facl2 (NM_007981.2,382-400).
gattcaggtgtcaaataat

SEQ ID NO: 563121 - DNA, 19 bp, Mus musculus
  siRNA target sequence for Facl2 (NM_007981.2,393-411).
caaataatggtccttgttt

SEQ ID NO: 563122 - DNA, 19 bp, Mus musculus
  siRNA target sequence for Facl2 (NM_007981.2,435-453).
cctatgagtggatttccta

SEQ ID NO: 563123 - DNA, 19 bp, Mus musculus
  siRNA target sequence for Facl2 (NM_007981.2,605-623).
gtcgtcccgctctatgaca

SEQ ID NO: 563124 - DNA, 19 bp, Mus musculus
  siRNA target sequence for Facl2 (NM_007981.2,741-759).
catgccttaaaatcatagt

SEQ ID NO: 563125 - DNA, 19 bp, Mus musculus
  siRNA target sequence for Facl2 (NM_007981.2,744-762).
gccttaaaatcatagtcat

SEQ ID NO: 563126 - DNA, 19 bp, Mus musculus
  siRNA target sequence for Facl2 (NM_007981.2,885-903).
ccgaagatcttgcgataat

SEQ ID NO: 563127 - DNA, 19 bp, Mus musculus
  siRNA target sequence for Facl2 (NM_007981.2,886-904).
cgaagatcttgcgataatt

SEQ ID NO: 563128 - DNA, 19 bp, Mus musculus
  siRNA target sequence for Facl2 (NM_007981.2,887-905).
gaagatcttgcgataattt

SEQ ID NO: 563129 - DNA, 19 bp, Mus musculus
  siRNA target sequence for Facl2 (NM_007981.2,890-908).
gatcttgcgataatttgtt

SEQ ID NO: 563130 - DNA, 19 bp, Mus musculus
  siRNA target sequence for Facl2 (NM_007981.2,893-911).
cttgcgataatttgtttca

SEQ ID NO: 563131 - DNA, 19 bp, Mus musculus
  siRNA target sequence for Facl2 (NM_007981.2,896-914).
gcgataatttgtttcacaa

SEQ ID NO: 563132 - DNA, 19 bp, Mus musculus
  siRNA target sequence for Facl2 (NM_007981.2,1009-1027).
catcgcttccacagatgat

SEQ ID NO: 563133 - DNA, 19 bp, Mus musculus
  siRNA target sequence for Facl2 (NM_007981.2,1047-1065).
ctctcgcccatatgtttga

SEQ ID NO: 563134 - DNA, 19 bp, Mus musculus
  siRNA target sequence for Facl2 (NM_007981.2,1068-1086).
ccgttgtagagtgtgtaat

SEQ ID NO: 563135 - DNA, 19 bp, Mus musculus
  siRNA target sequence for Facl2 (NM_007981.2,1090-1108).
gtgtcatggagctaagata

SEQ ID NO: 563136 - DNA, 19 bp, Mus musculus
  siRNA target sequence for Facl2 (NM_007981.2,1198-1216).
ccggatgttcgacagaatt

SEQ ID NO: 563137 - DNA, 19 bp, Mus musculus
  siRNA target sequence for Facl2 (NM_007981.2,1199-1217).
cggatgttcgacagaattt

SEQ ID NO: 563138 - DNA, 19 bp, Mus musculus
  siRNA target sequence for Facl2 (NM_007981.2,1200-1218).
ggatgttcgacagaatttt

SEQ ID NO: 563139 - DNA, 19 bp, Mus musculus
  siRNA target sequence for Facl2 (NM_007981.2,1204-1222).
gttcgacagaatttttgga

SEQ ID NO: 563140 - DNA, 19 bp, Mus musculus
  siRNA target sequence for Facl2 (NM_007981.2,1290-1308).
gcagtggcatcgtcagaaa

SEQ ID NO: 563141 - DNA, 19 bp, Mus musculus
  siRNA target sequence for Facl2 (NM_007981.2,1293-1311).
gtggcatcgtcagaaacaa

SEQ ID NO: 563142 - DNA, 19 bp, Mus musculus
  siRNA target sequence for Facl2 (NM_007981.2,1431-1449).
cgctcggctgccagttcta

SEQ ID NO: 563143 - DNA, 19 bp, Mus musculus
  siRNA target sequence for Facl2 (NM_007981.2,1432-1450).
gctcggctgccagttctat

SEQ ID NO: 563144 - DNA, 19 bp, Mus musculus
  siRNA target sequence for Facl2 (NM_007981.2,1435-1453).
cggctgccagttctatgaa

SEQ ID NO: 563145 - DNA, 19 bp, Mus musculus
  siRNA target sequence for Facl2 (NM_007981.2,1530-1548).
cccccatgccttgcaatta

SEQ ID NO: 563146 - DNA, 19 bp, Mus musculus
  siRNA target sequence for Facl2 (NM_007981.2,1531-1549).
ccccatgccttgcaattat

SEQ ID NO: 563147 - DNA, 19 bp, Mus musculus
  siRNA target sequence for Facl2 (NM_007981.2,1533-1551).
ccatgccttgcaattatgt

SEQ ID NO: 563148 - DNA, 19 bp, Mus musculus
  siRNA target sequence for Facl2 (NM_007981.2,1722-1740).
caaatggcaccttgaagat

SEQ ID NO: 563149 - DNA, 19 bp, Mus musculus
  siRNA target sequence for Facl2 (NM_007981.2,1728-1746).
gcaccttgaagattatcga

SEQ ID NO: 563150 - DNA, 19 bp, Mus musculus
  siRNA target sequence for Facl2 (NM_007981.2,1983-2001).
ctatcctggacgacttgtt

SEQ ID NO: 563151 - DNA, 19 bp, Mus musculus
  siRNA target sequence for Facl2 (NM_007981.2,1987-2005).
cctggacgacttgttgaaa

SEQ ID NO: 563152 - DNA, 19 bp, Mus musculus
  siRNA target sequence for Facl2 (NM_007981.2,1990-2008).
ggacgacttgttgaaactt

SEQ ID NO: 563153 - DNA, 19 bp, Mus musculus
  siRNA target sequence for Facl2 (NM_007981.2,2054-2072).
gctgtgcacccggaattat

SEQ ID NO: 563154 - DNA, 19 bp, Mus musculus
  siRNA target sequence for Facl2 (NM_007981.2,2055-2073).
ctgtgcacccggaattatt

SEQ ID NO: 563155 - DNA, 19 bp, Mus musculus
  siRNA target sequence for Facl2 (NM_007981.2,2057-2075).
gtgcacccggaattatttt

SEQ ID NO: 563156 - DNA, 19 bp, Mus musculus
  siRNA target sequence for Facl2 (NM_007981.2,2060-2078).
cacccggaattattttcta

SEQ ID NO: 563157 - DNA, 19 bp, Mus musculus
  siRNA target sequence for Facl2 (NM_007981.2,2119-2137).
gccagagctacggaactat

SEQ ID NO: 563158 - DNA, 19 bp, Mus musculus
  siRNA target sequence for Facl2 (NM_007981.2,2120-2138).
ccagagctacggaactatt

SEQ ID NO: 563159 - DNA, 19 bp, Mus musculus
  siRNA target sequence for Facl2 (NM_007981.2,2121-2139).
cagagctacggaactattt

SEQ ID NO: 563160 - DNA, 19 bp, Mus musculus
  siRNA target sequence for Facl2 (NM_007981.2,2123-2141).
gagctacggaactatttca

SEQ ID NO: 563161 - DNA, 19 bp, Mus musculus
  siRNA target sequence for Facl2 (NM_007981.2,2140-2158).
caggtcgcagatagatgaa

SEQ ID NO: 563162 - DNA, 19 bp, Mus musculus
  siRNA target sequence for Facl2 (NM_007981.2,2142-2160).
ggtcgcagatagatgaact

SEQ ID NO: 563163 - DNA, 19 bp, Mus musculus
  siRNA target sequence for Facl2 (NM_007981.2,2145-2163).
cgcagatagatgaactgta

SEQ ID NO: 563164 - DNA, 19 bp, Mus musculus
  siRNA target sequence for Facl4 (NM_019477.2,335-353).
cgactcactagctgtcata

SEQ ID NO: 563165 - DNA, 19 bp, Mus musculus
  siRNA target sequence for Facl4 (NM_019477.2,340-358).
cactagctgtcatagacat

SEQ ID NO: 563166 - DNA, 19 bp, Mus musculus
  siRNA target sequence for Facl4 (NM_019477.2,366-384).
gcagatactctggataaat

SEQ ID NO: 563167 - DNA, 19 bp, Mus musculus
  siRNA target sequence for Facl4 (NM_019477.2,491-509).
gttaattcttgggaattat

SEQ ID NO: 563168 - DNA, 19 bp, Mus musculus
  siRNA target sequence for Facl4 (NM_019477.2,514-532).
ggataaactatcttgaagt

SEQ ID NO: 563169 - DNA, 19 bp, Mus musculus
  siRNA target sequence for Facl4 (NM_019477.2,531-549).
gtgaactgcagagtgaata

SEQ ID NO: 563170 - DNA, 19 bp, Mus musculus
  siRNA target sequence for Facl4 (NM_019477.2,694-712).
gcagagaagctgtagttca

SEQ ID NO: 563171 - DNA, 19 bp, Mus musculus
  siRNA target sequence for Facl4 (NM_019477.2,731-749).
ggcttcctatctgattact

SEQ ID NO: 563172 - DNA, 19 bp, Mus musculus
  siRNA target sequence for Facl4 (NM_019477.2,732-750).
gcttcctatctgattacta

SEQ ID NO: 563173 - DNA, 19 bp, Mus musculus
  siRNA target sequence for Facl4 (NM_019477.2,737-755).
ctatctgattactagtgtt

SEQ ID NO: 563174 - DNA, 19 bp, Mus musculus
  siRNA target sequence for Facl4 (NM_019477.2,782-800).
ggccttagtagatatcaat

SEQ ID NO: 563175 - DNA, 19 bp, Mus musculus
  siRNA target sequence for Facl4 (NM_019477.2,783-801).
gccttagtagatatcaatt

SEQ ID NO: 563176 - DNA, 19 bp, Mus musculus
  siRNA target sequence for Facl4 (NM_019477.2,802-820).
gtgttaaacatatcattta

SEQ ID NO: 563177 - DNA, 19 bp, Mus musculus
  siRNA target sequence for Facl4 (NM_019477.2,825-843).
gataataagactatcaata

SEQ ID NO: 563178 - DNA, 19 bp, Mus musculus
  siRNA target sequence for Facl4 (NM_019477.2,856-874).
ctgaggggcttgaaattca

SEQ ID NO: 563179 - DNA, 19 bp, Mus musculus
  siRNA target sequence for Facl4 (NM_019477.2,858-876).
gaggggcttgaaattcaca

SEQ ID NO: 563180 - DNA, 19 bp, Mus musculus
  siRNA target sequence for Facl4 (NM_019477.2,920-938).
gagcgttcctccaagtaga

SEQ ID NO: 563181 - DNA, 19 bp, Mus musculus
  siRNA target sequence for Facl4 (NM_019477.2,1004-1022).
gatgatgcatcatagcaat

SEQ ID NO: 563182 - DNA, 19 bp, Mus musculus
  siRNA target sequence for Facl4 (NM_019477.2,1010-1028).
gcatcatagcaatttgatt

SEQ ID NO: 563183 - DNA, 19 bp, Mus musculus
  siRNA target sequence for Facl4 (NM_019477.2,1039-1057).
caggccagtgtgaacgtat

SEQ ID NO: 563184 - DNA, 19 bp, Mus musculus
  siRNA target sequence for Facl4 (NM_019477.2,1068-1086).
ggaccgaaggacacatata

SEQ ID NO: 563185 - DNA, 19 bp, Mus musculus
  siRNA target sequence for Facl4 (NM_019477.2,1069-1087).
gaccgaaggacacatatat

SEQ ID NO: 563186 - DNA, 19 bp, Mus musculus
  siRNA target sequence for Facl4 (NM_019477.2,1079-1097).
cacatatattggctactta

SEQ ID NO: 563187 - DNA, 19 bp, Mus musculus
  siRNA target sequence for Facl4 (NM_019477.2,1116-1134).
gaactgacagcagagatat

SEQ ID NO: 563188 - DNA, 19 bp, Mus musculus
  siRNA target sequence for Facl4 (NM_019477.2,1125-1143).
gcagagatatcatgcttta

SEQ ID NO: 563189 - DNA, 19 bp, Mus musculus
  siRNA target sequence for Facl4 (NM_019477.2,1128-1146).
gagatatcatgctttacct

SEQ ID NO: 563190 - DNA, 19 bp, Mus musculus
  siRNA target sequence for Facl4 (NM_019477.2,1151-1169).
ctgtaggattggatactct

SEQ ID NO: 563191 - DNA, 19 bp, Mus musculus
  siRNA target sequence for Facl4 (NM_019477.2,1186-1204).
ctgaccagtccagcaaaat

SEQ ID NO: 563192 - DNA, 19 bp, Mus musculus
  siRNA target sequence for Facl4 (NM_019477.2,1191-1209).
cagtccagcaaaatcaaga

SEQ ID NO: 563193 - DNA, 19 bp, Mus musculus
  siRNA target sequence for Facl4 (NM_019477.2,1222-1240).
gtgattgtactgtactgaa

SEQ ID NO: 563194 - DNA, 19 bp, Mus musculus
  siRNA target sequence for Facl4 (NM_019477.2,1233-1251).
gtactgaaacccacactta

SEQ ID NO: 563195 - DNA, 19 bp, Mus musculus
  siRNA target sequence for Facl4 (NM_019477.2,1274-1292).
ggatagaatttataagaat

SEQ ID NO: 563196 - DNA, 19 bp, Mus musculus
  siRNA target sequence for Facl4 (NM_019477.2,1346-1364).
cgggtatgattacaaatta

SEQ ID NO: 563197 - DNA, 19 bp, Mus musculus
  siRNA target sequence for Facl4 (NM_019477.2,1348-1366).
ggtatgattacaaattaga

SEQ ID NO: 563198 - DNA, 19 bp, Mus musculus
  siRNA target sequence for Facl4 (NM_019477.2,1382-1400).
ctatgacgcccctctttgt

SEQ ID NO: 563199 - DNA, 19 bp, Mus musculus
  siRNA target sequence for Facl4 (NM_019477.2,1389-1407).
gcccctctttgtaatctga

SEQ ID NO: 563200 - DNA, 19 bp, Mus musculus
  siRNA target sequence for Facl4 (NM_019477.2,1391-1409).
ccctctttgtaatctgata

SEQ ID NO: 563201 - DNA, 19 bp, Mus musculus
  siRNA target sequence for Facl4 (NM_019477.2,1399-1417).
gtaatctgatactgtttaa

SEQ ID NO: 563202 - DNA, 19 bp, Mus musculus
  siRNA target sequence for Facl4 (NM_019477.2,1483-1501).
ctcagacacaccgattcat

SEQ ID NO: 563203 - DNA, 19 bp, Mus musculus
  siRNA target sequence for Facl4 (NM_019477.2,1485-1503).
cagacacaccgattcatga

SEQ ID NO: 563204 - DNA, 19 bp, Mus musculus
  siRNA target sequence for Facl4 (NM_019477.2,1487-1505).
gacacaccgattcatgaat

SEQ ID NO: 563205 - DNA, 19 bp, Mus musculus
  siRNA target sequence for Facl4 (NM_019477.2,1489-1507).
cacaccgattcatgaatgt

SEQ ID NO: 563206 - DNA, 19 bp, Mus musculus
  siRNA target sequence for Facl4 (NM_019477.2,1533-1551).
ggatatgggctgacagaat

SEQ ID NO: 563207 - DNA, 19 bp, Mus musculus
  siRNA target sequence for Facl4 (NM_019477.2,1575-1593).
gaagttactgactacacta

SEQ ID NO: 563208 - DNA, 19 bp, Mus musculus
  siRNA target sequence for Facl4 (NM_019477.2,1600-1618).
gagttggagctcctcttat

SEQ ID NO: 563209 - DNA, 19 bp, Mus musculus
  siRNA target sequence for Facl4 (NM_019477.2,1602-1620).
gttggagctcctcttattt

SEQ ID NO: 563210 - DNA, 19 bp, Mus musculus
  siRNA target sequence for Facl4 (NM_019477.2,1646-1664).
gcaggaaggtggttataca

SEQ ID NO: 563211 - DNA, 19 bp, Mus musculus
  siRNA target sequence for Facl4 (NM_019477.2,1649-1667).
ggaaggtggttatacagtt

SEQ ID NO: 563212 - DNA, 19 bp, Mus musculus
  siRNA target sequence for Facl4 (NM_019477.2,1656-1674).
ggttatacagttcatgata

SEQ ID NO: 563213 - DNA, 19 bp, Mus musculus
  siRNA target sequence for Facl4 (NM_019477.2,1657-1675).
gttatacagttcatgataa

SEQ ID NO: 563214 - DNA, 19 bp, Mus musculus
  siRNA target sequence for Facl4 (NM_019477.2,1750-1768).
cagcagaagattattgtgt

SEQ ID NO: 563215 - DNA, 19 bp, Mus musculus
  siRNA target sequence for Facl4 (NM_019477.2,1779-1797).
ggacaaaggtggttttgca

SEQ ID NO: 563216 - DNA, 19 bp, Mus musculus
  siRNA target sequence for Facl4 (NM_019477.2,1821-1839).
cctgatggatgcttacaga

SEQ ID NO: 563217 - DNA, 19 bp, Mus musculus
  siRNA target sequence for Facl4 (NM_019477.2,1822-1840).
ctgatggatgcttacagat

SEQ ID NO: 563218 - DNA, 19 bp, Mus musculus
  siRNA target sequence for Facl4 (NM_019477.2,1838-1856).
gattatagatcgtaagaaa

SEQ ID NO: 563219 - DNA, 19 bp, Mus musculus
  siRNA target sequence for Facl4 (NM_019477.2,1872-1890).
caagcaggagaatatgtat

SEQ ID NO: 563220 - DNA, 19 bp, Mus musculus
  siRNA target sequence for Facl4 (NM_019477.2,1924-1942).
gtccactgatcgacaacat

SEQ ID NO: 563221 - DNA, 19 bp, Mus musculus
  siRNA target sequence for Facl4 (NM_019477.2,1926-1944).
ccactgatcgacaacatct

SEQ ID NO: 563222 - DNA, 19 bp, Mus musculus
  siRNA target sequence for Facl4 (NM_019477.2,1934-1952).
cgacaacatctgtgctttt

SEQ ID NO: 563223 - DNA, 19 bp, Mus musculus
  siRNA target sequence for Facl4 (NM_019477.2,1945-1963).
gtgcttttgccaaaagtga

SEQ ID NO: 563224 - DNA, 19 bp, Mus musculus
  siRNA target sequence for Facl4 (NM_019477.2,1965-1983).
cagtcctatgtgatcagtt

SEQ ID NO: 563225 - DNA, 19 bp, Mus musculus
  siRNA target sequence for Facl4 (NM_019477.2,1986-2004).
gtggttcctaaccagaaaa

SEQ ID NO: 563226 - DNA, 19 bp, Mus musculus
  siRNA target sequence for Facl4 (NM_019477.2,1998-2016).
cagaaaaagttgactcttt

SEQ ID NO: 563227 - DNA, 19 bp, Mus musculus
  siRNA target sequence for Facl4 (NM_019477.2,2037-2055).
gaaggatcttgggttgata

SEQ ID NO: 563228 - DNA, 19 bp, Mus musculus
  siRNA target sequence for Facl4 (NM_019477.2,2040-2058).
ggatcttgggttgatattt

SEQ ID NO: 563229 - DNA, 19 bp, Mus musculus
  siRNA target sequence for Facl4 (NM_019477.2,2047-2065).
gggttgatatttgcaataa

SEQ ID NO: 563230 - DNA, 19 bp, Mus musculus
  siRNA target sequence for Facl4 (NM_019477.2,2071-2089).
ccatggaagctgaaatact

SEQ ID NO: 563231 - DNA, 19 bp, Mus musculus
  siRNA target sequence for Facl4 (NM_019477.2,2079-2097).
gctgaaatactgaaagaaa

SEQ ID NO: 563232 - DNA, 19 bp, Mus musculus
  siRNA target sequence for Facl4 (NM_019477.2,2120-2138).
gaaattggagcgatttgaa

SEQ ID NO: 563233 - DNA, 19 bp, Mus musculus
  siRNA target sequence for Facl4 (NM_019477.2,2177-2195).
ccccgagactggtttggta

SEQ ID NO: 563234 - DNA, 19 bp, Mus musculus
  siRNA target sequence for Facl4 (NM_019477.2,2178-2196).
cccgagactggtttggtaa

SEQ ID NO: 563235 - DNA, 19 bp, Mus musculus
  siRNA target sequence for Facl4 (NM_019477.2,2183-2201).
gactggtttggtaacagat

SEQ ID NO: 563236 - DNA, 19 bp, Mus musculus
  siRNA target sequence for Facl4 (NM_019477.2,2202-2220).
gccttcaagctgaaaagga

SEQ ID NO: 563237 - DNA, 19 bp, Mus musculus
  siRNA target sequence for Fdft1 (NM_010191.2,41-59).
cggaggagttctataacct

SEQ ID NO: 563238 - DNA, 19 bp, Mus musculus
  siRNA target sequence for Fdft1 (NM_010191.2,137-155).
cctgctacaagtatctcaa

SEQ ID NO: 563239 - DNA, 19 bp, Mus musculus
  siRNA target sequence for Fdft1 (NM_010191.2,138-156).
ctgctacaagtatctcaat

SEQ ID NO: 563240 - DNA, 19 bp, Mus musculus
  siRNA target sequence for Fdft1 (NM_010191.2,140-158).
gctacaagtatctcaatca

SEQ ID NO: 563241 - DNA, 19 bp, Mus musculus
  siRNA target sequence for Fdft1 (NM_010191.2,204-222).
catacggcacgccatatgt

SEQ ID NO: 563242 - DNA, 19 bp, Mus musculus
  siRNA target sequence for Fdft1 (NM_010191.2,393-411).
gatctccctggagtttaga

SEQ ID NO: 563243 - DNA, 19 bp, Mus musculus
  siRNA target sequence for Fdft1 (NM_010191.2,556-574).
ggcctttctcgtctattct

SEQ ID NO: 563244 - DNA, 19 bp, Mus musculus
  siRNA target sequence for Fdft1 (NM_010191.2,573-591).
ctctgcctcagagtttgaa

SEQ ID NO: 563245 - DNA, 19 bp, Mus musculus
  siRNA target sequence for Fdft1 (NM_010191.2,653-671).
caaatatcattcgtgatta

SEQ ID NO: 563246 - DNA, 19 bp, Mus musculus
  siRNA target sequence for Fdft1 (NM_010191.2,774-792).
ggccgtgcagtgcttgaat

SEQ ID NO: 563247 - DNA, 19 bp, Mus musculus
  siRNA target sequence for Fdft1 (NM_010191.2,852-870).
ccggaaccagagtgtgttt

SEQ ID NO: 563248 - DNA, 19 bp, Mus musculus
  siRNA target sequence for Fdft1 (NM_010191.2,853-871).
cggaaccagagtgtgttta

SEQ ID NO: 563249 - DNA, 19 bp, Mus musculus
  siRNA target sequence for Fdft1 (NM_010191.2,854-872).
ggaaccagagtgtgtttaa

SEQ ID NO: 563250 - DNA, 19 bp, Mus musculus
  siRNA target sequence for Fdft1 (NM_010191.2,859-877).
cagagtgtgtttaacttct

SEQ ID NO: 563251 - DNA, 19 bp, Mus musculus
  siRNA target sequence for Fdft1 (NM_010191.2,878-896).
gtgctattccacaggtaat

SEQ ID NO: 563252 - DNA, 19 bp, Mus musculus
  siRNA target sequence for Fdft1 (NM_010191.2,910-928).
ctggctgcctgttacaata

SEQ ID NO: 563253 - DNA, 19 bp, Mus musculus
  siRNA target sequence for Fdft1 (NM_010191.2,1007-1025).
ctgccgtcaaagctatcat

SEQ ID NO: 563254 - DNA, 19 bp, Mus musculus
  siRNA target sequence for Fdft1 (NM_010191.2,1009-1027).
gccgtcaaagctatcatat

SEQ ID NO: 563255 - DNA, 19 bp, Mus musculus
  siRNA target sequence for Fdft1 (NM_010191.2,1010-1028).
ccgtcaaagctatcatata

SEQ ID NO: 563256 - DNA, 19 bp, Mus musculus
  siRNA target sequence for Fdft1 (NM_010191.2,1019-1037).
ctatcatataccagtacat

SEQ ID NO: 563257 - DNA, 19 bp, Mus musculus
  siRNA target sequence for Fdft1 (NM_010191.2,1151-1169).
gccactactcccccattta

SEQ ID NO: 563258 - DNA, 19 bp, Mus musculus
  siRNA target sequence for Grin1 (NM_008169.1,155-173).
cctgcgaccccaagattgt

SEQ ID NO: 563259 - DNA, 19 bp, Mus musculus
  siRNA target sequence for Grin1 (NM_008169.1,158-176).
gcgaccccaagattgtcaa

SEQ ID NO: 563260 - DNA, 19 bp, Mus musculus
  siRNA target sequence for Grin1 (NM_008169.1,200-218).
gcaagcacgagcagatgtt

SEQ ID NO: 563261 - DNA, 19 bp, Mus musculus
  siRNA target sequence for Grin1 (NM_008169.1,348-366).
ccaggtctacgctatccta

SEQ ID NO: 563262 - DNA, 19 bp, Mus musculus
  siRNA target sequence for Grin1 (NM_008169.1,352-370).
gtctacgctatcctagtta

SEQ ID NO: 563263 - DNA, 19 bp, Mus musculus
  siRNA target sequence for Grin1 (NM_008169.1,354-372).
ctacgctatcctagttagt

SEQ ID NO: 563264 - DNA, 19 bp, Mus musculus
  siRNA target sequence for Grin1 (NM_008169.1,794-812).
cagccgcgatgctgaacat

SEQ ID NO: 563265 - DNA, 19 bp, Mus musculus
  siRNA target sequence for Grin1 (NM_008169.1,1119-1137).
ggatggggaccggaagttt

SEQ ID NO: 563266 - DNA, 19 bp, Mus musculus
  siRNA target sequence for Grin1 (NM_008169.1,1183-1201).
gtgggcatctacaatggta

SEQ ID NO: 563267 - DNA, 19 bp, Mus musculus
  siRNA target sequence for Grin1 (NM_008169.1,1309-1327).
gaacccttcgtgtatgtca

SEQ ID NO: 563268 - DNA, 19 bp, Mus musculus
  siRNA target sequence for Grin1 (NM_008169.1,1384-1402).
gtcaagaaggtgatctgta

SEQ ID NO: 563269 - DNA, 19 bp, Mus musculus
  siRNA target sequence for Grin1 (NM_008169.1,1488-1506).
gctggcacggaccatgaat

SEQ ID NO: 563270 - DNA, 19 bp, Mus musculus
  siRNA target sequence for Grin1 (NM_008169.1,1489-1507).
ctggcacggaccatgaatt

SEQ ID NO: 563271 - DNA, 19 bp, Mus musculus
  siRNA target sequence for Grin1 (NM_008169.1,1491-1509).
ggcacggaccatgaatttt

SEQ ID NO: 563272 - DNA, 19 bp, Mus musculus
  siRNA target sequence for Grin1 (NM_008169.1,1495-1513).
cggaccatgaattttacct

SEQ ID NO: 563273 - DNA, 19 bp, Mus musculus
  siRNA target sequence for Grin1 (NM_008169.1,1496-1514).
ggaccatgaattttaccta

SEQ ID NO: 563274 - DNA, 19 bp, Mus musculus
  siRNA target sequence for Grin1 (NM_008169.1,1660-1678).
cgtgcgcagtacatagagt

SEQ ID NO: 563275 - DNA, 19 bp, Mus musculus
  siRNA target sequence for Grin1 (NM_008169.1,1661-1679).
gtgcgcagtacatagagtt

SEQ ID NO: 563276 - DNA, 19 bp, Mus musculus
  siRNA target sequence for Grin1 (NM_008169.1,1788-1806).
ggtggggctgtcagttcat

SEQ ID NO: 563277 - DNA, 19 bp, Mus musculus
  siRNA target sequence for Grin1 (NM_008169.1,1844-1862).
gtccctttggccgatttaa

SEQ ID NO: 563278 - DNA, 19 bp, Mus musculus
  siRNA target sequence for Grin1 (NM_008169.1,1847-1865).
cctttggccgatttaaggt

SEQ ID NO: 563279 - DNA, 19 bp, Mus musculus
  siRNA target sequence for Grin1 (NM_008169.1,2122-2140).
gacaagttcatctatgcaa

SEQ ID NO: 563280 - DNA, 19 bp, Mus musculus
  siRNA target sequence for Grin1 (NM_008169.1,2127-2145).
gttcatctatgcaactgta

SEQ ID NO: 563281 - DNA, 19 bp, Mus musculus
  siRNA target sequence for Grin1 (NM_008169.1,2130-2148).
catctatgcaactgtaaaa

SEQ ID NO: 563282 - DNA, 19 bp, Mus musculus
  siRNA target sequence for Grin1 (NM_008169.1,2153-2171).
gctctgtggatatctactt

SEQ ID NO: 563283 - DNA, 19 bp, Mus musculus
  siRNA target sequence for Grin1 (NM_008169.1,2206-2224).
cacatggagaagcacaatt

SEQ ID NO: 563284 - DNA, 19 bp, Mus musculus
  siRNA target sequence for Grin1 (NM_008169.1,2208-2226).
catggagaagcacaattat

SEQ ID NO: 563285 - DNA, 19 bp, Mus musculus
  siRNA target sequence for Grin1 (NM_008169.1,2336-2354).
ccacgggtgagctgttctt

SEQ ID NO: 563286 - DNA, 19 bp, Mus musculus
  siRNA target sequence for Grin1 (NM_008169.1,2390-2408).
gcccctggaagcaaaatgt

SEQ ID NO: 563287 - DNA, 19 bp, Mus musculus
  siRNA target sequence for Grin1 (NM_008169.1,2463-2481).
gacatgggttcggtatcaa

SEQ ID NO: 563288 - DNA, 19 bp, Mus musculus
  siRNA target sequence for Grin1 (NM_008169.1,2465-2483).
catgggttcggtatcaaga

SEQ ID NO: 563289 - DNA, 19 bp, Mus musculus
  siRNA target sequence for Grin1 (NM_008169.1,2469-2487).
ggttcggtatcaagaatgt

SEQ ID NO: 563290 - DNA, 19 bp, Mus musculus
  siRNA target sequence for Grin1 (NM_008169.1,2509-2527).
gccaccctcacttttgaga

SEQ ID NO: 563291 - DNA, 19 bp, Mus musculus
  siRNA target sequence for Grin1 (NM_008169.1,2569-2587).
gctgggatcttcctcattt

SEQ ID NO: 563292 - DNA, 19 bp, Mus musculus
  siRNA target sequence for Grin1 (NM_008169.1,2701-2719).
gcagagcccgaccctaaaa

SEQ ID NO: 563293 - DNA, 19 bp, Mus musculus
  siRNA target sequence for Grin1 (NM_008169.1,2704-2722).
gagcccgaccctaaaaaga

SEQ ID NO: 563294 - DNA, 19 bp, Mus musculus
  siRNA target sequence for Grin1 (NM_008169.1,2706-2724).
gcccgaccctaaaaagaaa

SEQ ID NO: 563295 - DNA, 19 bp, Mus musculus
  siRNA target sequence for Grin1 (NM_008169.1,2773-2791).
cgtaggtcctccaaagaca

SEQ ID NO: 563296 - DNA, 19 bp, Mus musculus
  siRNA target sequence for Grin1 (NM_008169.1,2845-2863).
ccgcgacgcgctattgaga

SEQ ID NO: 563297 - DNA, 19 bp, Mus musculus
  siRNA target sequence for Grin2a (NM_008170.1,89-107).
gtactccagcgctgaacat

SEQ ID NO: 563298 - DNA, 19 bp, Mus musculus
  siRNA target sequence for Grin2a (NM_008170.1,140-158).
cagaacgcgaacttcgaaa

SEQ ID NO: 563299 - DNA, 19 bp, Mus musculus
  siRNA target sequence for Grin2a (NM_008170.1,145-163).
cgcgaacttcgaaatctgt

SEQ ID NO: 563300 - DNA, 19 bp, Mus musculus
  siRNA target sequence for Grin2a (NM_008170.1,385-403).
gggggtgcatctatgatca

SEQ ID NO: 563301 - DNA, 19 bp, Mus musculus
  siRNA target sequence for Grin2a (NM_008170.1,386-404).
ggggtgcatctatgatcat

SEQ ID NO: 563302 - DNA, 19 bp, Mus musculus
  siRNA target sequence for Grin2a (NM_008170.1,612-630).
cacactggacacctctttt

SEQ ID NO: 563303 - DNA, 19 bp, Mus musculus
  siRNA target sequence for Grin2a (NM_008170.1,739-757).
ggcctcaccggctacgatt

SEQ ID NO: 563304 - DNA, 19 bp, Mus musculus
  siRNA target sequence for Grin2a (NM_008170.1,740-758).
gcctcaccggctacgattt

SEQ ID NO: 563305 - DNA, 19 bp, Mus musculus
  siRNA target sequence for Grin2a (NM_008170.1,818-836).
catcgggtctcatttcagt

SEQ ID NO: 563306 - DNA, 19 bp, Mus musculus
  siRNA target sequence for Grin2a (NM_008170.1,880-898).
gacggtcttgggatcttaa

SEQ ID NO: 563307 - DNA, 19 bp, Mus musculus
  siRNA target sequence for Grin2a (NM_008170.1,883-901).
ggtcttgggatcttaacca

SEQ ID NO: 563308 - DNA, 19 bp, Mus musculus
  siRNA target sequence for Grin2a (NM_008170.1,998-1016).
ctctgcaccaatttatggt

SEQ ID NO: 563309 - DNA, 19 bp, Mus musculus
  siRNA target sequence for Grin2a (NM_008170.1,1084-1102).
gtggtgatcgtgctgaata

SEQ ID NO: 563310 - DNA, 19 bp, Mus musculus
  siRNA target sequence for Grin2a (NM_008170.1,1126-1144).
ggcaagtgggagaatcaga

SEQ ID NO: 563311 - DNA, 19 bp, Mus musculus
  siRNA target sequence for Grin2a (NM_008170.1,1171-1189).
ccaaggtataagtcctttt

SEQ ID NO: 563312 - DNA, 19 bp, Mus musculus
  siRNA target sequence for Grin2a (NM_008170.1,1248-1266).
cgtcatcgtagaagacata

SEQ ID NO: 563313 - DNA, 19 bp, Mus musculus
  siRNA target sequence for Grin2a (NM_008170.1,1299-1317).
ggtaccctgtcggaagttt

SEQ ID NO: 563314 - DNA, 19 bp, Mus musculus
  siRNA target sequence for Grin2a (NM_008170.1,1304-1322).
cctgtcggaagtttgtcaa

SEQ ID NO: 563315 - DNA, 19 bp, Mus musculus
  siRNA target sequence for Grin2a (NM_008170.1,1314-1332).
gtttgtcaagatcaacaat

SEQ ID NO: 563316 - DNA, 19 bp, Mus musculus
  siRNA target sequence for Grin2a (NM_008170.1,1449-1467).
gaagcatgggaaaaaggtt

SEQ ID NO: 563317 - DNA, 19 bp, Mus musculus
  siRNA target sequence for Grin2a (NM_008170.1,1453-1471).
catgggaaaaaggttaaca

SEQ ID NO: 563318 - DNA, 19 bp, Mus musculus
  siRNA target sequence for Grin2a (NM_008170.1,1780-1798).
ccccatgggccttctttta

SEQ ID NO: 563319 - DNA, 19 bp, Mus musculus
  siRNA target sequence for Grin2a (NM_008170.1,1828-1846).
ggcctggtcttcaacaatt

SEQ ID NO: 563320 - DNA, 19 bp, Mus musculus
  siRNA target sequence for Grin2a (NM_008170.1,1849-1867).
gtgcccgtccagaatccta

SEQ ID NO: 563321 - DNA, 19 bp, Mus musculus
  siRNA target sequence for Grin2a (NM_008170.1,1851-1869).
gcccgtccagaatcctaaa

SEQ ID NO: 563322 - DNA, 19 bp, Mus musculus
  siRNA target sequence for Grin2a (NM_008170.1,2010-2028).
ccagagacctcatgactat

SEQ ID NO: 563323 - DNA, 19 bp, Mus musculus
  siRNA target sequence for Grin2a (NM_008170.1,2047-2065).
gggacagtacccaatggaa

SEQ ID NO: 563324 - DNA, 19 bp, Mus musculus
  siRNA target sequence for Grin2a (NM_008170.1,2084-2102).
gtaacaactacccctatat

SEQ ID NO: 563325 - DNA, 19 bp, Mus musculus
  siRNA target sequence for Grin2a (NM_008170.1,2104-2122).
caccagtacatgaccaaat

SEQ ID NO: 563326 - DNA, 19 bp, Mus musculus
  siRNA target sequence for Grin2a (NM_008170.1,2331-2349).
cgctctgctccagtttgtt

SEQ ID NO: 563327 - DNA, 19 bp, Mus musculus
  siRNA target sequence for Grin2a (NM_008170.1,2613-2631).
ccatggagtgcacattgaa

SEQ ID NO: 563328 - DNA, 19 bp, Mus musculus
  siRNA target sequence for Grin2a (NM_008170.1,2617-2635).
ggagtgcacattgaagaaa

SEQ ID NO: 563329 - DNA, 19 bp, Mus musculus
  siRNA target sequence for Grin2a (NM_008170.1,2618-2636).
gagtgcacattgaagaaaa

SEQ ID NO: 563330 - DNA, 19 bp, Mus musculus
  siRNA target sequence for Grin2a (NM_008170.1,2620-2638).
gtgcacattgaagaaaaga

SEQ ID NO: 563331 - DNA, 19 bp, Mus musculus
  siRNA target sequence for Grin2a (NM_008170.1,2688-2706).
gcttctccgctcagctaaa

SEQ ID NO: 563332 - DNA, 19 bp, Mus musculus
  siRNA target sequence for Grin2a (NM_008170.1,2689-2707).
cttctccgctcagctaaaa

SEQ ID NO: 563333 - DNA, 19 bp, Mus musculus
  siRNA target sequence for Grin2a (NM_008170.1,2692-2710).
ctccgctcagctaaaaaca

SEQ ID NO: 563334 - DNA, 19 bp, Mus musculus
  siRNA target sequence for Grin2a (NM_008170.1,2775-2793).
ccaaagaggctcacttatt

SEQ ID NO: 563335 - DNA, 19 bp, Mus musculus
  siRNA target sequence for Grin2a (NM_008170.1,2848-2866).
caagggaaggacagtatat

SEQ ID NO: 563336 - DNA, 19 bp, Mus musculus
  siRNA target sequence for Grin2a (NM_008170.1,2853-2871).
gaaggacagtatatttgga

SEQ ID NO: 563337 - DNA, 19 bp, Mus musculus
  siRNA target sequence for Grin2a (NM_008170.1,2902-2920).
gccaacaggcacaaggata

SEQ ID NO: 563338 - DNA, 19 bp, Mus musculus
  siRNA target sequence for Grin2a (NM_008170.1,2949-2967).
gcatcctctcactctcaat

SEQ ID NO: 563339 - DNA, 19 bp, Mus musculus
  siRNA target sequence for Grin2a (NM_008170.1,2996-3014).
ctgtcagcactgaatccaa

SEQ ID NO: 563340 - DNA, 19 bp, Mus musculus
  siRNA target sequence for Grin2a (NM_008170.1,3059-3077).
ctctacgccaggattctct

SEQ ID NO: 563341 - DNA, 19 bp, Mus musculus
  siRNA target sequence for Grin2a (NM_008170.1,3135-3153).
cctaaagagtcctaggtat

SEQ ID NO: 563342 - DNA, 19 bp, Mus musculus
  siRNA target sequence for Grin2a (NM_008170.1,3165-3183).
ggtagcccattctgacatt

SEQ ID NO: 563343 - DNA, 19 bp, Mus musculus
  siRNA target sequence for Grin2a (NM_008170.1,3171-3189).
ccattctgacatttctgaa

SEQ ID NO: 563344 - DNA, 19 bp, Mus musculus
  siRNA target sequence for Grin2a (NM_008170.1,3213-3231).
cagggagccagataataat

SEQ ID NO: 563345 - DNA, 19 bp, Mus musculus
  siRNA target sequence for Grin2a (NM_008170.1,3215-3233).
gggagccagataataataa

SEQ ID NO: 563346 - DNA, 19 bp, Mus musculus
  siRNA target sequence for Grin2a (NM_008170.1,3263-3281).
ggtcaatggcctctaaata

SEQ ID NO: 563347 - DNA, 19 bp, Mus musculus
  siRNA target sequence for Grin2a (NM_008170.1,3304-3322).
gaacgtacctacgtgaaaa

SEQ ID NO: 563348 - DNA, 19 bp, Mus musculus
  siRNA target sequence for Grin2a (NM_008170.1,3307-3325).
cgtacctacgtgaaaacca

SEQ ID NO: 563349 - DNA, 19 bp, Mus musculus
  siRNA target sequence for Grin2a (NM_008170.1,3308-3326).
gtacctacgtgaaaaccaa

SEQ ID NO: 563350 - DNA, 19 bp, Mus musculus
  siRNA target sequence for Grin2a (NM_008170.1,3337-3355).
cccagggataagatctaca

SEQ ID NO: 563351 - DNA, 19 bp, Mus musculus
  siRNA target sequence for Grin2a (NM_008170.1,3449-3467).
cctaccaagatcacaatga

SEQ ID NO: 563352 - DNA, 19 bp, Mus musculus
  siRNA target sequence for Grin2a (NM_008170.1,3506-3524).
ggaacccactacacaatga

SEQ ID NO: 563353 - DNA, 19 bp, Mus musculus
  siRNA target sequence for Grin2a (NM_008170.1,3507-3525).
gaacccactacacaatgaa

SEQ ID NO: 563354 - DNA, 19 bp, Mus musculus
  siRNA target sequence for Grin2a (NM_008170.1,3510-3528).
cccactacacaatgaagat

SEQ ID NO: 563355 - DNA, 19 bp, Mus musculus
  siRNA target sequence for Grin2a (NM_008170.1,3535-3553).
cccaacaatgaccagtata

SEQ ID NO: 563356 - DNA, 19 bp, Mus musculus
  siRNA target sequence for Grin2a (NM_008170.1,3585-3603).
caagggttccccacatagt

SEQ ID NO: 563357 - DNA, 19 bp, Mus musculus
  siRNA target sequence for Grin2a (NM_008170.1,3602-3620).
gtgagggcagtgatcgata

SEQ ID NO: 563358 - DNA, 19 bp, Mus musculus
  siRNA target sequence for Grin2a (NM_008170.1,3641-3659).
gcagaagctgcctctcaaa

SEQ ID NO: 563359 - DNA, 19 bp, Mus musculus
  siRNA target sequence for Grin2a (NM_008170.1,3676-3694).
ggccactttaccatgagat

SEQ ID NO: 563360 - DNA, 19 bp, Mus musculus
  siRNA target sequence for Grin2a (NM_008170.1,3862-3880).
cgacagcactcctatgata

SEQ ID NO: 563361 - DNA, 19 bp, Mus musculus
  siRNA target sequence for Grin2a (NM_008170.1,3863-3881).
gacagcactcctatgataa

SEQ ID NO: 563362 - DNA, 19 bp, Mus musculus
  siRNA target sequence for Grin2a (NM_008170.1,3867-3885).
gcactcctatgataacatt

SEQ ID NO: 563363 - DNA, 19 bp, Mus musculus
  siRNA target sequence for Grin2a (NM_008170.1,3915-3933).
caggccctctcgtagcata

SEQ ID NO: 563364 - DNA, 19 bp, Mus musculus
  siRNA target sequence for Grin2a (NM_008170.1,3954-3972).
gctactggagggcaactta

SEQ ID NO: 563365 - DNA, 19 bp, Mus musculus
  siRNA target sequence for Grin2a (NM_008170.1,3955-3973).
ctactggagggcaacttat

SEQ ID NO: 563366 - DNA, 19 bp, Mus musculus
  siRNA target sequence for Grin2a (NM_008170.1,4006-4024).
ctcttggggaacaaaagct

SEQ ID NO: 563367 - DNA, 19 bp, Mus musculus
  siRNA target sequence for Grin2a (NM_008170.1,4048-4066).
gacagcaagaggagcaaat

SEQ ID NO: 563368 - DNA, 19 bp, Mus musculus
  siRNA target sequence for Grin2a (NM_008170.1,4075-4093).
ccagaccatacctctgata

SEQ ID NO: 563369 - DNA, 19 bp, Mus musculus
  siRNA target sequence for Grin2a (NM_008170.1,4080-4098).
ccatacctctgataatcct

SEQ ID NO: 563370 - DNA, 19 bp, Mus musculus
  siRNA target sequence for Grin2a (NM_008170.1,4081-4099).
catacctctgataatcctt

SEQ ID NO: 563371 - DNA, 19 bp, Mus musculus
  siRNA target sequence for Grin2a (NM_008170.1,4116-4134).
ggatgaccaacgcttagtt

SEQ ID NO: 563372 - DNA, 19 bp, Mus musculus
  siRNA target sequence for Grin2a (NM_008170.1,4117-4135).
gatgaccaacgcttagtta

SEQ ID NO: 563373 - DNA, 19 bp, Mus musculus
  siRNA target sequence for Grin2a (NM_008170.1,4145-4163).
gtccctcggacccttacaa

SEQ ID NO: 563374 - DNA, 19 bp, Mus musculus
  siRNA target sequence for Grin2a (NM_008170.1,4148-4166).
cctcggacccttacaaaca

SEQ ID NO: 563375 - DNA, 19 bp, Mus musculus
  siRNA target sequence for Grin2a (NM_008170.1,4294-4312).
gctgcaaataagaataaca

SEQ ID NO: 563376 - DNA, 19 bp, Mus musculus
  siRNA target sequence for Grin2a (NM_008170.1,4346-4364).
gcaatagacgtgtgtacaa

SEQ ID NO: 563377 - DNA, 19 bp, Mus musculus
  siRNA target sequence for Grin2a (NM_008170.1,4362-4380).
caagaaaatgcctagtatt

SEQ ID NO: 563378 - DNA, 19 bp, Mus musculus
  siRNA target sequence for Grin2a (NM_008170.1,4371-4389).
gcctagtattgaatctgat

SEQ ID NO: 563379 - DNA, 19 bp, Mus musculus
  siRNA target sequence for Grin2b (NM_008171.1,134-152).
ccgacgaagtggccataaa

SEQ ID NO: 563380 - DNA, 19 bp, Mus musculus
  siRNA target sequence for Grin2b (NM_008171.1,135-153).
cgacgaagtggccataaaa

SEQ ID NO: 563381 - DNA, 19 bp, Mus musculus
  siRNA target sequence for Grin2b (NM_008171.1,177-195).
ccatcatctctcagtagtt

SEQ ID NO: 563382 - DNA, 19 bp, Mus musculus
  siRNA target sequence for Grin2b (NM_008171.1,227-245).
ctgacccaaagagcataat

SEQ ID NO: 563383 - DNA, 19 bp, Mus musculus
  siRNA target sequence for Grin2b (NM_008171.1,229-247).
gacccaaagagcataatca

SEQ ID NO: 563384 - DNA, 19 bp, Mus musculus
  siRNA target sequence for Grin2b (NM_008171.1,248-266).
cccgcatctgcgatcttat

SEQ ID NO: 563385 - DNA, 19 bp, Mus musculus
  siRNA target sequence for Grin2b (NM_008171.1,250-268).
cgcatctgcgatcttatgt

SEQ ID NO: 563386 - DNA, 19 bp, Mus musculus
  siRNA target sequence for Grin2b (NM_008171.1,252-270).
catctgcgatcttatgtct

SEQ ID NO: 563387 - DNA, 19 bp, Mus musculus
  siRNA target sequence for Grin2b (NM_008171.1,326-344).
cccagatcctcgatttcat

SEQ ID NO: 563388 - DNA, 19 bp, Mus musculus
  siRNA target sequence for Grin2b (NM_008171.1,327-345).
ccagatcctcgatttcatt

SEQ ID NO: 563389 - DNA, 19 bp, Mus musculus
  siRNA target sequence for Grin2b (NM_008171.1,328-346).
cagatcctcgatttcattt

SEQ ID NO: 563390 - DNA, 19 bp, Mus musculus
  siRNA target sequence for Grin2b (NM_008171.1,330-348).
gatcctcgatttcatttct

SEQ ID NO: 563391 - DNA, 19 bp, Mus musculus
  siRNA target sequence for Grin2b (NM_008171.1,432-450).
ccagtttggcccatccatt

SEQ ID NO: 563392 - DNA, 19 bp, Mus musculus
  siRNA target sequence for Grin2b (NM_008171.1,435-453).
gtttggcccatccattgaa

SEQ ID NO: 563393 - DNA, 19 bp, Mus musculus
  siRNA target sequence for Grin2b (NM_008171.1,461-479).
cttctgtcatgctcaacat

SEQ ID NO: 563394 - DNA, 19 bp, Mus musculus
  siRNA target sequence for Grin2b (NM_008171.1,487-505).
gaatacgactggtacatct

SEQ ID NO: 563395 - DNA, 19 bp, Mus musculus
  siRNA target sequence for Grin2b (NM_008171.1,552-570).
caagatccgcagcactatt

SEQ ID NO: 563396 - DNA, 19 bp, Mus musculus
  siRNA target sequence for Grin2b (NM_008171.1,666-684).
gctgcagagccccatcatt

SEQ ID NO: 563397 - DNA, 19 bp, Mus musculus
  siRNA target sequence for Grin2b (NM_008171.1,720-738).
cttcgaagtagctaactca

SEQ ID NO: 563398 - DNA, 19 bp, Mus musculus
  siRNA target sequence for Grin2b (NM_008171.1,828-846).
gctcatctctgtgtcatat

SEQ ID NO: 563399 - DNA, 19 bp, Mus musculus
  siRNA target sequence for Grin2b (NM_008171.1,983-1001).
ggatctaccagtctaacat

SEQ ID NO: 563400 - DNA, 19 bp, Mus musculus
  siRNA target sequence for Grin2b (NM_008171.1,991-1009).
cagtctaacatgctgaata

SEQ ID NO: 563401 - DNA, 19 bp, Mus musculus
  siRNA target sequence for Grin2b (NM_008171.1,1017-1035).
gatcaacgtcacttttgaa

SEQ ID NO: 563402 - DNA, 19 bp, Mus musculus
  siRNA target sequence for Grin2b (NM_008171.1,1075-1093).
catccgaagctggtgataa

SEQ ID NO: 563403 - DNA, 19 bp, Mus musculus
  siRNA target sequence for Grin2b (NM_008171.1,1079-1097).
cgaagctggtgataatcct

SEQ ID NO: 563404 - DNA, 19 bp, Mus musculus
  siRNA target sequence for Grin2b (NM_008171.1,1148-1166).
ccctgcagatgaaatacta

SEQ ID NO: 563405 - DNA, 19 bp, Mus musculus
  siRNA target sequence for Grin2b (NM_008171.1,1234-1252).
gaggaggcaccgtttgtca

SEQ ID NO: 563406 - DNA, 19 bp, Mus musculus
  siRNA target sequence for Grin2b (NM_008171.1,1236-1254).
ggaggcaccgtttgtcatt

SEQ ID NO: 563407 - DNA, 19 bp, Mus musculus
  siRNA target sequence for Grin2b (NM_008171.1,1281-1299).
gacctgcatgcggaataca

SEQ ID NO: 563408 - DNA, 19 bp, Mus musculus
  siRNA target sequence for Grin2b (NM_008171.1,1344-1362).
ggaaccaggctacatcaaa

SEQ ID NO: 563409 - DNA, 19 bp, Mus musculus
  siRNA target sequence for Grin2b (NM_008171.1,1345-1363).
gaaccaggctacatcaaaa

SEQ ID NO: 563410 - DNA, 19 bp, Mus musculus
  siRNA target sequence for Grin2b (NM_008171.1,1348-1366).
ccaggctacatcaaaaaat

SEQ ID NO: 563411 - DNA, 19 bp, Mus musculus
  siRNA target sequence for Grin2b (NM_008171.1,1371-1389).
caaggggttttgtattgat

SEQ ID NO: 563412 - DNA, 19 bp, Mus musculus
  siRNA target sequence for Grin2b (NM_008171.1,1376-1394).
ggttttgtattgatatcct

SEQ ID NO: 563413 - DNA, 19 bp, Mus musculus
  siRNA target sequence for Grin2b (NM_008171.1,1476-1494).
gacctggaacggcatgatt

SEQ ID NO: 563414 - DNA, 19 bp, Mus musculus
  siRNA target sequence for Grin2b (NM_008171.1,1525-1543).
gcagtgggatcactaacta

SEQ ID NO: 563415 - DNA, 19 bp, Mus musculus
  siRNA target sequence for Grin2b (NM_008171.1,1530-1548).
gggatcactaactatcaat

SEQ ID NO: 563416 - DNA, 19 bp, Mus musculus
  siRNA target sequence for Grin2b (NM_008171.1,1532-1550).
gatcactaactatcaatga

SEQ ID NO: 563417 - DNA, 19 bp, Mus musculus
  siRNA target sequence for Grin2b (NM_008171.1,1556-1574).
ggtcagaggtggttgactt

SEQ ID NO: 563418 - DNA, 19 bp, Mus musculus
  siRNA target sequence for Grin2b (NM_008171.1,2079-2097).
gaatatccgtaataactat

SEQ ID NO: 563419 - DNA, 19 bp, Mus musculus
  siRNA target sequence for Grin2b (NM_008171.1,2110-2128).
gcctacatgggaaagttca

SEQ ID NO: 563420 - DNA, 19 bp, Mus musculus
  siRNA target sequence for Grin2b (NM_008171.1,2171-2189).
ggaaacttgatgcattcat

SEQ ID NO: 563421 - DNA, 19 bp, Mus musculus
  siRNA target sequence for Grin2b (NM_008171.1,2283-2301).
ctatggcattgctatccaa

SEQ ID NO: 563422 - DNA, 19 bp, Mus musculus
  siRNA target sequence for Grin2b (NM_008171.1,2321-2339).
gccaggtggaccttgctat

SEQ ID NO: 563423 - DNA, 19 bp, Mus musculus
  siRNA target sequence for Grin2b (NM_008171.1,2502-2520).
caccttcatctgtgaacat

SEQ ID NO: 563424 - DNA, 19 bp, Mus musculus
  siRNA target sequence for Grin2b (NM_008171.1,2612-2630).
gtatccacggagtagctat

SEQ ID NO: 563425 - DNA, 19 bp, Mus musculus
  siRNA target sequence for Grin2b (NM_008171.1,2638-2656).
cgccaatccgtgatgaact

SEQ ID NO: 563426 - DNA, 19 bp, Mus musculus
  siRNA target sequence for Grin2b (NM_008171.1,2679-2697).
cacacactccaatatccta

SEQ ID NO: 563427 - DNA, 19 bp, Mus musculus
  siRNA target sequence for Grin2b (NM_008171.1,2704-2722).
ctccgaacggccaaaaaca

SEQ ID NO: 563428 - DNA, 19 bp, Mus musculus
  siRNA target sequence for Grin2b (NM_008171.1,2778-2796).
ccgtgagtcctctgtctat

SEQ ID NO: 563429 - DNA, 19 bp, Mus musculus
  siRNA target sequence for Grin2b (NM_008171.1,2780-2798).
gtgagtcctctgtctatga

SEQ ID NO: 563430 - DNA, 19 bp, Mus musculus
  siRNA target sequence for Grin2b (NM_008171.1,2816-2834).
gcagcttcacgcattcaga

SEQ ID NO: 563431 - DNA, 19 bp, Mus musculus
  siRNA target sequence for Grin2b (NM_008171.1,2871-2889).
cctgttcagtgactacatt

SEQ ID NO: 563432 - DNA, 19 bp, Mus musculus
  siRNA target sequence for Grin2b (NM_008171.1,2874-2892).
gttcagtgactacattagt

SEQ ID NO: 563433 - DNA, 19 bp, Mus musculus
  siRNA target sequence for Grin2b (NM_008171.1,2996-3014).
ccattgatgggctctatga

SEQ ID NO: 563434 - DNA, 19 bp, Mus musculus
  siRNA target sequence for Grin2b (NM_008171.1,3019-3037).
gacaacccaccctttacca

SEQ ID NO: 563435 - DNA, 19 bp, Mus musculus
  siRNA target sequence for Grin2b (NM_008171.1,3109-3127).
gacctgtacggcaagttct

SEQ ID NO: 563436 - DNA, 19 bp, Mus musculus
  siRNA target sequence for Grin2b (NM_008171.1,3118-3136).
ggcaagttctctttcaaga

SEQ ID NO: 563437 - DNA, 19 bp, Mus musculus
  siRNA target sequence for Grin2b (NM_008171.1,3149-3167).
gtggccatgatgacttgat

SEQ ID NO: 563438 - DNA, 19 bp, Mus musculus
  siRNA target sequence for Grin2b (NM_008171.1,3154-3172).
catgatgacttgattcgat

SEQ ID NO: 563439 - DNA, 19 bp, Mus musculus
  siRNA target sequence for Grin2b (NM_008171.1,3277-3295).
ccagcctcggccaaatcta

SEQ ID NO: 563440 - DNA, 19 bp, Mus musculus
  siRNA target sequence for Grin2b (NM_008171.1,3299-3317).
gggagtttgatgaaatcga

SEQ ID NO: 563441 - DNA, 19 bp, Mus musculus
  siRNA target sequence for Grin2b (NM_008171.1,3352-3370).
gaccacaagcgctacttca

SEQ ID NO: 563442 - DNA, 19 bp, Mus musculus
  siRNA target sequence for Grin2b (NM_008171.1,3363-3381).
ctacttcagggacaaagaa

SEQ ID NO: 563443 - DNA, 19 bp, Mus musculus
  siRNA target sequence for Grin2b (NM_008171.1,3521-3539).
ccaacaggtctcaccttaa

SEQ ID NO: 563444 - DNA, 19 bp, Mus musculus
  siRNA target sequence for Grin2b (NM_008171.1,3522-3540).
caacaggtctcaccttaaa

SEQ ID NO: 563445 - DNA, 19 bp, Mus musculus
  siRNA target sequence for Grin2b (NM_008171.1,3742-3760).
gctggcaacctgtatgaca

SEQ ID NO: 563446 - DNA, 19 bp, Mus musculus
  siRNA target sequence for Grin2b (NM_008171.1,3844-3862).
cctcaaagcccgactaatt

SEQ ID NO: 563447 - DNA, 19 bp, Mus musculus
  siRNA target sequence for Grin2b (NM_008171.1,3847-3865).
caaagcccgactaattcca

SEQ ID NO: 563448 - DNA, 19 bp, Mus musculus
  siRNA target sequence for Grin2b (NM_008171.1,4001-4019).
gcccctacgcccatatgtt

SEQ ID NO: 563449 - DNA, 19 bp, Mus musculus
  siRNA target sequence for Grin2b (NM_008171.1,4070-4088).
ctgccggacaccatcacaa

SEQ ID NO: 563450 - DNA, 19 bp, Mus musculus
  siRNA target sequence for Grin2b (NM_008171.1,4073-4091).
ccggacaccatcacaacaa

SEQ ID NO: 563451 - DNA, 19 bp, Mus musculus
  siRNA target sequence for Grin2b (NM_008171.1,4074-4092).
cggacaccatcacaacaat

SEQ ID NO: 563452 - DNA, 19 bp, Mus musculus
  siRNA target sequence for Grin2b (NM_008171.1,4192-4210).
gcagcaaatcctacttctt

SEQ ID NO: 563453 - DNA, 19 bp, Mus musculus
  siRNA target sequence for Grin2b (NM_008171.1,4224-4242).
gtggcaggggcgtcgaaaa

SEQ ID NO: 563454 - DNA, 19 bp, Mus musculus
  siRNA target sequence for Grin2b (NM_008171.1,4226-4244).
ggcaggggcgtcgaaaaca

SEQ ID NO: 563455 - DNA, 19 bp, Mus musculus
  siRNA target sequence for Grin2b (NM_008171.1,4227-4245).
gcaggggcgtcgaaaacaa

SEQ ID NO: 563456 - DNA, 19 bp, Mus musculus
  siRNA target sequence for Grin2b (NM_008171.1,4315-4333).
cgtttccagaaggacattt

SEQ ID NO: 563457 - DNA, 19 bp, Mus musculus
  siRNA target sequence for Grin2b (NM_008171.1,4356-4374).
ctgtgtgcctaacaacaaa

SEQ ID NO: 563458 - DNA, 19 bp, Mus musculus
  siRNA target sequence for Grin2b (NM_008171.1,4400-4418).
gcaatggacatgtttatga

SEQ ID NO: 563459 - DNA, 19 bp, Mus musculus
  siRNA target sequence for Grin2c (NM_010350.1,967-985).
caccatcggggtcaacaat

SEQ ID NO: 563460 - DNA, 19 bp, Mus musculus
  siRNA target sequence for Grin2c (NM_010350.1,1000-1018).
catcctcacccaaatctgt

SEQ ID NO: 563461 - DNA, 19 bp, Mus musculus
  siRNA target sequence for Grin2c (NM_010350.1,1516-1534).
cggtcacgtgtggttagta

SEQ ID NO: 563462 - DNA, 19 bp, Mus musculus
  siRNA target sequence for Grin2c (NM_010350.1,1522-1540).
cgtgtggttagtacctaat

SEQ ID NO: 563463 - DNA, 19 bp, Mus musculus
  siRNA target sequence for Grin2c (NM_010350.1,1904-1922).
ggggtcctgtacatgaagt

SEQ ID NO: 563464 - DNA, 19 bp, Mus musculus
  siRNA target sequence for Grin2c (NM_010350.1,2168-2186).
gccaaggtggtcaagttct

SEQ ID NO: 563465 - DNA, 19 bp, Mus musculus
  siRNA target sequence for Grin2c (NM_010350.1,2250-2268).
gtatgatcggtgaggtata

SEQ ID NO: 563466 - DNA, 19 bp, Mus musculus
  siRNA target sequence for Grin2c (NM_010350.1,2312-2330).
gaagagcgctcagagatta

SEQ ID NO: 563467 - DNA, 19 bp, Mus musculus
  siRNA target sequence for Grin2c (NM_010350.1,2318-2336).
cgctcagagattatagact

SEQ ID NO: 563468 - DNA, 19 bp, Mus musculus
  siRNA target sequence for Grin2c (NM_010350.1,2748-2766).
ctgtgtcgggccttagtga

SEQ ID NO: 563469 - DNA, 19 bp, Mus musculus
  siRNA target sequence for Grin2c (NM_010350.1,2808-2826).
gttttggcacggtacctaa

SEQ ID NO: 563470 - DNA, 19 bp, Mus musculus
  siRNA target sequence for Grin2c (NM_010350.1,2842-2860).
gaacattcgtagcaactat

SEQ ID NO: 563471 - DNA, 19 bp, Mus musculus
  siRNA target sequence for Grin2c (NM_010350.1,2913-2931).
ctctcacaagcctgaagat

SEQ ID NO: 563472 - DNA, 19 bp, Mus musculus
  siRNA target sequence for Grin2c (NM_010350.1,3283-3301).
cctggtctactggaaactt

SEQ ID NO: 563473 - DNA, 19 bp, Mus musculus
  siRNA target sequence for Grin2c (NM_010350.1,3845-3863).
gcgcactgccactacagtt

SEQ ID NO: 563474 - DNA, 19 bp, Mus musculus
  siRNA target sequence for Grin2c (NM_010350.1,4129-4147).
ccggcacgtggctcaaaca

SEQ ID NO: 563475 - DNA, 19 bp, Mus musculus
  siRNA target sequence for Grin2c (NM_010350.1,4427-4445).
gggacacaagggtttccaa

SEQ ID NO: 563476 - DNA, 19 bp, Mus musculus
  siRNA target sequence for Grin2d (NM_008172.1,577-595).
ggccatcgagccttcttgt

SEQ ID NO: 563477 - DNA, 19 bp, Mus musculus
  siRNA target sequence for Grin2d (NM_008172.1,1063-1081).
gagagtctgcacaggtatt

SEQ ID NO: 563478 - DNA, 19 bp, Mus musculus
  siRNA target sequence for Grin2d (NM_008172.1,1067-1085).
gtctgcacaggtatttcat

SEQ ID NO: 563479 - DNA, 19 bp, Mus musculus
  siRNA target sequence for Grin2d (NM_008172.1,1106-1124).
gagactactccttcaatga

SEQ ID NO: 563480 - DNA, 19 bp, Mus musculus
  siRNA target sequence for Grin2d (NM_008172.1,1299-1317).
gctggaggagagacctttt

SEQ ID NO: 563481 - DNA, 19 bp, Mus musculus
  siRNA target sequence for Grin2d (NM_008172.1,1563-1581).
gattggtgaggtgttctat

SEQ ID NO: 563482 - DNA, 19 bp, Mus musculus
  siRNA target sequence for Grin2d (NM_008172.1,1777-1795).
gtggtcgccgtcacagttt

SEQ ID NO: 563483 - DNA, 19 bp, Mus musculus
  siRNA target sequence for Grin2d (NM_008172.1,1780-1798).
gtcgccgtcacagttttca

SEQ ID NO: 563484 - DNA, 19 bp, Mus musculus
  siRNA target sequence for Grin2d (NM_008172.1,1785-1803).
cgtcacagttttcatcttt

SEQ ID NO: 563485 - DNA, 19 bp, Mus musculus
  siRNA target sequence for Grin2d (NM_008172.1,1790-1808).
cagttttcatctttgagta

SEQ ID NO: 563486 - DNA, 19 bp, Mus musculus
  siRNA target sequence for Grin2d (NM_008172.1,1995-2013).
ctttcttgccagctataca

SEQ ID NO: 563487 - DNA, 19 bp, Mus musculus
  siRNA target sequence for Grin2d (NM_008172.1,2107-2125).
ccacccctgaagtttggaa

SEQ ID NO: 563488 - DNA, 19 bp, Mus musculus
  siRNA target sequence for Grin2d (NM_008172.1,2183-2201).
gctacatggtgcgatacaa

SEQ ID NO: 563489 - DNA, 19 bp, Mus musculus
  siRNA target sequence for Grin2d (NM_008172.1,2283-2301).
ctacatggcccgaaaggat

SEQ ID NO: 563490 - DNA, 19 bp, Mus musculus
  siRNA target sequence for Grin2d (NM_008172.1,2626-2644).
cccacccaccgcatggatt

SEQ ID NO: 563491 - DNA, 19 bp, Mus musculus
  siRNA target sequence for Grin2d (NM_008172.1,2627-2645).
ccacccaccgcatggattt

SEQ ID NO: 563492 - DNA, 19 bp, Mus musculus
  siRNA target sequence for Grin2d (NM_008172.1,2630-2648).
cccaccgcatggatttcct

SEQ ID NO: 563493 - DNA, 19 bp, Mus musculus
  siRNA target sequence for Grin2d (NM_008172.1,2631-2649).
ccaccgcatggatttccta

SEQ ID NO: 563494 - DNA, 19 bp, Mus musculus
  siRNA target sequence for Grin2d (NM_008172.1,2654-2672).
ccttctccaggggtatgta

SEQ ID NO: 563495 - DNA, 19 bp, Mus musculus
  siRNA target sequence for Hprt (NM_013556.1,611-629).
ggccagactttgttggatt

SEQ ID NO: 563496 - DNA, 19 bp, Mus musculus
  siRNA target sequence for Hprt (NM_013556.1,642-660).
caagtttgttgttggatat

SEQ ID NO: 563497 - DNA, 19 bp, Mus musculus
  siRNA target sequence for Hprt (NM_013556.1,693-711).
gaatcacgtttgtgtcatt

SEQ ID NO: 563498 - DNA, 19 bp, Mus musculus
  siRNA target sequence for Hprt (NM_013556.1,699-717).
cgtttgtgtcattagtgaa

SEQ ID NO: 563499 - DNA, 19 bp, Mus musculus
  siRNA target sequence for Impa1 (NM_018864.3,143-161).
gagatggatgtcatgatta

SEQ ID NO: 563500 - DNA, 19 bp, Mus musculus
  siRNA target sequence for Impa1 (NM_018864.3,186-204).
cagttactgaccaaaaagt

SEQ ID NO: 563501 - DNA, 19 bp, Mus musculus
  siRNA target sequence for Impa1 (NM_018864.3,352-370).
gcatcggtttccctttgta

SEQ ID NO: 563502 - DNA, 19 bp, Mus musculus
  siRNA target sequence for Impa1 (NM_018864.3,363-381).
cctttgtagctgtttcaat

SEQ ID NO: 563503 - DNA, 19 bp, Mus musculus
  siRNA target sequence for Impa1 (NM_018864.3,426-444).
gctgtgtggaagataagat

SEQ ID NO: 563504 - DNA, 19 bp, Mus musculus
  siRNA target sequence for Impa1 (NM_018864.3,429-447).
gtgtggaagataagatgta

SEQ ID NO: 563505 - DNA, 19 bp, Mus musculus
  siRNA target sequence for Impa1 (NM_018864.3,606-624).
ccatccccatccatggaat

SEQ ID NO: 563506 - DNA, 19 bp, Mus musculus
  siRNA target sequence for Impa1 (NM_018864.3,635-653).
ggaacagctgctgttaata

SEQ ID NO: 563507 - DNA, 19 bp, Mus musculus
  siRNA target sequence for Impa1 (NM_018864.3,672-690).
gaggagcagatgcctatta

SEQ ID NO: 563508 - DNA, 19 bp, Mus musculus
  siRNA target sequence for Impa1 (NM_018864.3,675-693).
gagcagatgcctattatga

SEQ ID NO: 563509 - DNA, 19 bp, Mus musculus
  siRNA target sequence for Impa1 (NM_018864.3,677-695).
gcagatgcctattatgaga

SEQ ID NO: 563510 - DNA, 19 bp, Mus musculus
  siRNA target sequence for Impa1 (NM_018864.3,678-696).
cagatgcctattatgagat

SEQ ID NO: 563511 - DNA, 19 bp, Mus musculus
  siRNA target sequence for Impa1 (NM_018864.3,720-738).
cgggagctggcatcattgt

SEQ ID NO: 563512 - DNA, 19 bp, Mus musculus
  siRNA target sequence for Impa1 (NM_018864.3,774-792).
gtggaccgttcgatctgat

SEQ ID NO: 563513 - DNA, 19 bp, Mus musculus
  siRNA target sequence for Impa1 (NM_018864.3,788-806).
ctgatgtctcggagaataa

SEQ ID NO: 563514 - DNA, 19 bp, Mus musculus
  siRNA target sequence for Impa1 (NM_018864.3,809-827).
gccgcaaatagtataacat

SEQ ID NO: 563515 - DNA, 19 bp, Mus musculus
  siRNA target sequence for Impa1 (NM_018864.3,811-829).
cgcaaatagtataacatta

SEQ ID NO: 563516 - DNA, 19 bp, Mus musculus
  siRNA target sequence for Impa1 (NM_018864.3,854-872).
gagataatacctttgcaaa

SEQ ID NO: 563517 - DNA, 19 bp, Mus musculus
  siRNA target sequence for Itga2 (NM_008396.1,178-196).
gaattgtctggcgtataat

SEQ ID NO: 563518 - DNA, 19 bp, Mus musculus
  siRNA target sequence for Itga2 (NM_008396.1,202-220).
cctcccaggagcgaaaata

SEQ ID NO: 563519 - DNA, 19 bp, Mus musculus
  siRNA target sequence for Itga2 (NM_008396.1,203-221).
ctcccaggagcgaaaatat

SEQ ID NO: 563520 - DNA, 19 bp, Mus musculus
  siRNA target sequence for Itga2 (NM_008396.1,205-223).
cccaggagcgaaaatattt

SEQ ID NO: 563521 - DNA, 19 bp, Mus musculus
  siRNA target sequence for Itga2 (NM_008396.1,206-224).
ccaggagcgaaaatatttt

SEQ ID NO: 563522 - DNA, 19 bp, Mus musculus
  siRNA target sequence for Itga2 (NM_008396.1,228-246).
ggccttcaagtgaacagtt

SEQ ID NO: 563523 - DNA, 19 bp, Mus musculus
  siRNA target sequence for Itga2 (NM_008396.1,229-247).
gccttcaagtgaacagttt

SEQ ID NO: 563524 - DNA, 19 bp, Mus musculus
  siRNA target sequence for Itga2 (NM_008396.1,385-403).
gctgaatctgcaaaattca

SEQ ID NO: 563525 - DNA, 19 bp, Mus musculus
  siRNA target sequence for Itga2 (NM_008396.1,404-422).
gcaagcatctcaaatgtta

SEQ ID NO: 563526 - DNA, 19 bp, Mus musculus
  siRNA target sequence for Itga2 (NM_008396.1,425-443).
gagataaagaccaacatga

SEQ ID NO: 563527 - DNA, 19 bp, Mus musculus
  siRNA target sequence for Itga2 (NM_008396.1,472-490).
ggggaccggaggctttcta

SEQ ID NO: 563528 - DNA, 19 bp, Mus musculus
  siRNA target sequence for Itga2 (NM_008396.1,473-491).
gggaccggaggctttctaa

SEQ ID NO: 563529 - DNA, 19 bp, Mus musculus
  siRNA target sequence for Itga2 (NM_008396.1,521-539).
ggaaatcagtattatgcaa

SEQ ID NO: 563530 - DNA, 19 bp, Mus musculus
  siRNA target sequence for Itga2 (NM_008396.1,544-562).
gatctgttctgatgttagt

SEQ ID NO: 563531 - DNA, 19 bp, Mus musculus
  siRNA target sequence for Itga2 (NM_008396.1,563-581).
ccagactttcagttcttga

SEQ ID NO: 563532 - DNA, 19 bp, Mus musculus
  siRNA target sequence for Itga2 (NM_008396.1,612-630).
cttccctcgtggatgttgt

SEQ ID NO: 563533 - DNA, 19 bp, Mus musculus
  siRNA target sequence for Itga2 (NM_008396.1,615-633).
ccctcgtggatgttgtagt

SEQ ID NO: 563534 - DNA, 19 bp, Mus musculus
  siRNA target sequence for Itga2 (NM_008396.1,616-634).
cctcgtggatgttgtagtt

SEQ ID NO: 563535 - DNA, 19 bp, Mus musculus
  siRNA target sequence for Itga2 (NM_008396.1,619-637).
cgtggatgttgtagttgta

SEQ ID NO: 563536 - DNA, 19 bp, Mus musculus
  siRNA target sequence for Itga2 (NM_008396.1,620-638).
gtggatgttgtagttgtat

SEQ ID NO: 563537 - DNA, 19 bp, Mus musculus
  siRNA target sequence for Itga2 (NM_008396.1,629-647).
gtagttgtatgtgatgaat

SEQ ID NO: 563538 - DNA, 19 bp, Mus musculus
  siRNA target sequence for Itga2 (NM_008396.1,641-659).
gatgaatcaaacagtattt

SEQ ID NO: 563539 - DNA, 19 bp, Mus musculus
  siRNA target sequence for Itga2 (NM_008396.1,668-686).
gaagcagtaaagaactttt

SEQ ID NO: 563540 - DNA, 19 bp, Mus musculus
  siRNA target sequence for Itga2 (NM_008396.1,710-728).
gatataggacctaaaaaga

SEQ ID NO: 563541 - DNA, 19 bp, Mus musculus
  siRNA target sequence for Itga2 (NM_008396.1,727-745).
gacacaggtggcgttaatt

SEQ ID NO: 563542 - DNA, 19 bp, Mus musculus
  siRNA target sequence for Itga2 (NM_008396.1,729-747).
cacaggtggcgttaattca

SEQ ID NO: 563543 - DNA, 19 bp, Mus musculus
  siRNA target sequence for Itga2 (NM_008396.1,731-749).
caggtggcgttaattcaat

SEQ ID NO: 563544 - DNA, 19 bp, Mus musculus
  siRNA target sequence for Itga2 (NM_008396.1,752-770).
gccaatgagccgagaatta

SEQ ID NO: 563545 - DNA, 19 bp, Mus musculus
  siRNA target sequence for Itga2 (NM_008396.1,753-771).
ccaatgagccgagaattat

SEQ ID NO: 563546 - DNA, 19 bp, Mus musculus
  siRNA target sequence for Itga2 (NM_008396.1,754-772).
caatgagccgagaattata

SEQ ID NO: 563547 - DNA, 19 bp, Mus musculus
  siRNA target sequence for Itga2 (NM_008396.1,758-776).
gagccgagaattatattta

SEQ ID NO: 563548 - DNA, 19 bp, Mus musculus
  siRNA target sequence for Itga2 (NM_008396.1,781-799).
gaacgatttcgaaaccaaa

SEQ ID NO: 563549 - DNA, 19 bp, Mus musculus
  siRNA target sequence for Itga2 (NM_008396.1,856-874).
caccttcagagctatcgaa

SEQ ID NO: 563550 - DNA, 19 bp, Mus musculus
  siRNA target sequence for Itga2 (NM_008396.1,858-876).
ccttcagagctatcgaatt

SEQ ID NO: 563551 - DNA, 19 bp, Mus musculus
  siRNA target sequence for Itga2 (NM_008396.1,882-900).
gagactacgcttattcaca

SEQ ID NO: 563552 - DNA, 19 bp, Mus musculus
  siRNA target sequence for Itga2 (NM_008396.1,999-1017).
gcaatgatgacgagatact

SEQ ID NO: 563553 - DNA, 19 bp, Mus musculus
  siRNA target sequence for Itga2 (NM_008396.1,1021-1039).
gttcggcatagcagttctt

SEQ ID NO: 563554 - DNA, 19 bp, Mus musculus
  siRNA target sequence for Itga2 (NM_008396.1,1032-1050).
cagttcttgggtatttaaa

SEQ ID NO: 563555 - DNA, 19 bp, Mus musculus
  siRNA target sequence for Itga2 (NM_008396.1,1058-1076).
gctcttgatactaaaaatt

SEQ ID NO: 563556 - DNA, 19 bp, Mus musculus
  siRNA target sequence for Itga2 (NM_008396.1,1104-1122).
gtactccaaccgagagata

SEQ ID NO: 563557 - DNA, 19 bp, Mus musculus
  siRNA target sequence for Itga2 (NM_008396.1,1113-1131).
ccgagagatactttttcaa

SEQ ID NO: 563558 - DNA, 19 bp, Mus musculus
  siRNA target sequence for Itga2 (NM_008396.1,1114-1132).
cgagagatactttttcaat

SEQ ID NO: 563559 - DNA, 19 bp, Mus musculus
  siRNA target sequence for Itga2 (NM_008396.1,1156-1174).
ggagaaggctggaactcta

SEQ ID NO: 563560 - DNA, 19 bp, Mus musculus
  siRNA target sequence for Itga2 (NM_008396.1,1172-1190).
ctaggggagcaaatattca

SEQ ID NO: 563561 - DNA, 19 bp, Mus musculus
  siRNA target sequence for Itga2 (NM_008396.1,1228-1246).
gatggaaatggcacaagtt

SEQ ID NO: 563562 - DNA, 19 bp, Mus musculus
  siRNA target sequence for Itga2 (NM_008396.1,1264-1282).
cgctcctcaaaatgatatt

SEQ ID NO: 563563 - DNA, 19 bp, Mus musculus
  siRNA target sequence for Itga2 (NM_008396.1,1266-1284).
ctcctcaaaatgatattct

SEQ ID NO: 563564 - DNA, 19 bp, Mus musculus
  siRNA target sequence for Itga2 (NM_008396.1,1348-1366).
gcccgtgatctttcctaaa

SEQ ID NO: 563565 - DNA, 19 bp, Mus musculus
  siRNA target sequence for Itga2 (NM_008396.1,1350-1368).
ccgtgatctttcctaaaca

SEQ ID NO: 563566 - DNA, 19 bp, Mus musculus
  siRNA target sequence for Itga2 (NM_008396.1,1351-1369).
cgtgatctttcctaaacaa

SEQ ID NO: 563567 - DNA, 19 bp, Mus musculus
  siRNA target sequence for Itga2 (NM_008396.1,1399-1417).
ccacagttcgtttttaggt

SEQ ID NO: 563568 - DNA, 19 bp, Mus musculus
  siRNA target sequence for Itga2 (NM_008396.1,1400-1418).
cacagttcgtttttaggtt

SEQ ID NO: 563569 - DNA, 19 bp, Mus musculus
  siRNA target sequence for Itga2 (NM_008396.1,1440-1458).
ctgaagacggtgtccattt

SEQ ID NO: 563570 - DNA, 19 bp, Mus musculus
  siRNA target sequence for Itga2 (NM_008396.1,1466-1484).
ggtgctcctcgagcaaatt

SEQ ID NO: 563571 - DNA, 19 bp, Mus musculus
  siRNA target sequence for Itga2 (NM_008396.1,1467-1485).
gtgctcctcgagcaaatta

SEQ ID NO: 563572 - DNA, 19 bp, Mus musculus
  siRNA target sequence for Itga2 (NM_008396.1,1488-1506).
ctggccagatagtgttgta

SEQ ID NO: 563573 - DNA, 19 bp, Mus musculus
  siRNA target sequence for Itga2 (NM_008396.1,1490-1508).
ggccagatagtgttgtaca

SEQ ID NO: 563574 - DNA, 19 bp, Mus musculus
  siRNA target sequence for Itga2 (NM_008396.1,1499-1517).
gtgttgtacagcgttaaca

SEQ ID NO: 563575 - DNA, 19 bp, Mus musculus
  siRNA target sequence for Itga2 (NM_008396.1,1524-1542).
gcaatgtgaccgtgattca

SEQ ID NO: 563576 - DNA, 19 bp, Mus musculus
  siRNA target sequence for Itga2 (NM_008396.1,1556-1574).
gaccagattggctcctatt

SEQ ID NO: 563577 - DNA, 19 bp, Mus musculus
  siRNA target sequence for Itga2 (NM_008396.1,1595-1613).
gttgatgtagataaagaca

SEQ ID NO: 563578 - DNA, 19 bp, Mus musculus
  siRNA target sequence for Itga2 (NM_008396.1,1699-1717).
cacaaagggcatcttgaat

SEQ ID NO: 563579 - DNA, 19 bp, Mus musculus
  siRNA target sequence for Itga2 (NM_008396.1,1701-1719).
caaagggcatcttgaatca

SEQ ID NO: 563580 - DNA, 19 bp, Mus musculus
  siRNA target sequence for Itga2 (NM_008396.1,1825-1843).
cggttcacctgtagagaat

SEQ ID NO: 563581 - DNA, 19 bp, Mus musculus
  siRNA target sequence for Itga2 (NM_008396.1,1896-1914).
ccaagtactcccagaaaat

SEQ ID NO: 563582 - DNA, 19 bp, Mus musculus
  siRNA target sequence for Itga2 (NM_008396.1,2019-2037).
gtgctttggggcaagtgat

SEQ ID NO: 563583 - DNA, 19 bp, Mus musculus
  siRNA target sequence for Itga2 (NM_008396.1,2143-2161).
cttcagagcagagtttaga

SEQ ID NO: 563584 - DNA, 19 bp, Mus musculus
  siRNA target sequence for Itga2 (NM_008396.1,2210-2228).
gatgcggacggacattcat

SEQ ID NO: 563585 - DNA, 19 bp, Mus musculus
  siRNA target sequence for Itga2 (NM_008396.1,2316-2334).
ctgagcaccacattagcat

SEQ ID NO: 563586 - DNA, 19 bp, Mus musculus
  siRNA target sequence for Itga2 (NM_008396.1,2412-2430).
ccctcgaagcctattctga

SEQ ID NO: 563587 - DNA, 19 bp, Mus musculus
  siRNA target sequence for Itga2 (NM_008396.1,2416-2434).
cgaagcctattctgaaact

SEQ ID NO: 563588 - DNA, 19 bp, Mus musculus
  siRNA target sequence for Itga2 (NM_008396.1,2448-2466).
gtatccctttctataagga

SEQ ID NO: 563589 - DNA, 19 bp, Mus musculus
  siRNA target sequence for Itga2 (NM_008396.1,2542-2560).
ctttattgtcagtaaccaa

SEQ ID NO: 563590 - DNA, 19 bp, Mus musculus
  siRNA target sequence for Itga2 (NM_008396.1,2563-2581).
caagaggttaacattttca

SEQ ID NO: 563591 - DNA, 19 bp, Mus musculus
  siRNA target sequence for Itga2 (NM_008396.1,2600-2618).
ggggaaagtgcatacaaca

SEQ ID NO: 563592 - DNA, 19 bp, Mus musculus
  siRNA target sequence for Itga2 (NM_008396.1,2621-2639).
gtggtcctggccgagtttt

SEQ ID NO: 563593 - DNA, 19 bp, Mus musculus
  siRNA target sequence for Itga2 (NM_008396.1,2671-2689).
gccggtcgatggaacagaa

SEQ ID NO: 563594 - DNA, 19 bp, Mus musculus
  siRNA target sequence for Itga2 (NM_008396.1,2674-2692).
ggtcgatggaacagaagta

SEQ ID NO: 563595 - DNA, 19 bp, Mus musculus
  siRNA target sequence for Itga2 (NM_008396.1,2675-2693).
gtcgatggaacagaagtaa

SEQ ID NO: 563596 - DNA, 19 bp, Mus musculus
  siRNA target sequence for Itga2 (NM_008396.1,2702-2720).
gttggttcatcgcagaaat

SEQ ID NO: 563597 - DNA, 19 bp, Mus musculus
  siRNA target sequence for Itga2 (NM_008396.1,2706-2724).
gttcatcgcagaaatctgt

SEQ ID NO: 563598 - DNA, 19 bp, Mus musculus
  siRNA target sequence for Itga2 (NM_008396.1,2765-2783).
caggtgacttttaccatta

SEQ ID NO: 563599 - DNA, 19 bp, Mus musculus
  siRNA target sequence for Itga2 (NM_008396.1,2768-2786).
gtgacttttaccattaact

SEQ ID NO: 563600 - DNA, 19 bp, Mus musculus
  siRNA target sequence for Itga2 (NM_008396.1,2785-2803).
cttcgactttaatcttcaa

SEQ ID NO: 563601 - DNA, 19 bp, Mus musculus
  siRNA target sequence for Itga2 (NM_008396.1,2889-2907).
cgattcctctcctgtatga

SEQ ID NO: 563602 - DNA, 19 bp, Mus musculus
  siRNA target sequence for Itga2 (NM_008396.1,2890-2908).
gattcctctcctgtatgat

SEQ ID NO: 563603 - DNA, 19 bp, Mus musculus
  siRNA target sequence for Itga2 (NM_008396.1,2925-2943).
cccgatccaccaacatcaa

SEQ ID NO: 563604 - DNA, 19 bp, Mus musculus
  siRNA target sequence for Itga2 (NM_008396.1,2927-2945).
cgatccaccaacatcaact

SEQ ID NO: 563605 - DNA, 19 bp, Mus musculus
  siRNA target sequence for Itga2 (NM_008396.1,2995-3013).
cgaagatattggtcctaaa

SEQ ID NO: 563606 - DNA, 19 bp, Mus musculus
  siRNA target sequence for Itga2 (NM_008396.1,2999-3017).
gatattggtcctaaattca

SEQ ID NO: 563607 - DNA, 19 bp, Mus musculus
  siRNA target sequence for Itga2 (NM_008396.1,3115-3133).
gtatctgactgggatacaa

SEQ ID NO: 563608 - DNA, 19 bp, Mus musculus
  siRNA target sequence for Itga2 (NM_008396.1,3200-3218).
ccttctgtatctttcaaga

SEQ ID NO: 563609 - DNA, 19 bp, Mus musculus
  siRNA target sequence for Itga2 (NM_008396.1,3226-3244).
cttccggcatacgaaagaa

SEQ ID NO: 563610 - DNA, 19 bp, Mus musculus
  siRNA target sequence for Itga2 (NM_008396.1,3389-3407).
gcagcggcagagatcgata

SEQ ID NO: 563611 - DNA, 19 bp, Mus musculus
  siRNA target sequence for Itga2 (NM_008396.1,3393-3411).
cggcagagatcgatacaca

SEQ ID NO: 563612 - DNA, 19 bp, Mus musculus
  siRNA target sequence for Itga2 (NM_008396.1,3394-3412).
ggcagagatcgatacacat

SEQ ID NO: 563613 - DNA, 19 bp, Mus musculus
  siRNA target sequence for Itga2 (NM_008396.1,3395-3413).
gcagagatcgatacacata

SEQ ID NO: 563614 - DNA, 19 bp, Mus musculus
  siRNA target sequence for Itga2 (NM_008396.1,3417-3435).
ctcagctcttcgtgattga

SEQ ID NO: 563615 - DNA, 19 bp, Mus musculus
  siRNA target sequence for Itga2 (NM_008396.1,3448-3466).
cacgattcccctcatgata

SEQ ID NO: 563616 - DNA, 19 bp, Mus musculus
  siRNA target sequence for Itga2 (NM_008396.1,3491-3509).
gtaccgacaggggttatca

SEQ ID NO: 563617 - DNA, 19 bp, Mus musculus
  siRNA target sequence for Itga2 (NM_008396.1,3503-3521).
gttatcataggcagcataa

SEQ ID NO: 563618 - DNA, 19 bp, Mus musculus
  siRNA target sequence for Itga2 (NM_008396.1,3517-3535).
cataattgcgggaatcctt

SEQ ID NO: 563619 - DNA, 19 bp, Mus musculus
  siRNA target sequence for Itga2 (NM_008396.1,3571-3589).
cggcttcttcaaaagacaa

SEQ ID NO: 563620 - DNA, 19 bp, Mus musculus
  siRNA target sequence for Itga2 (NM_008396.1,3603-3621).
gccaaaatccagatgagat

SEQ ID NO: 563621 - DNA, 19 bp, Mus musculus
  siRNA target sequence for Itgae (NM_008399.1,252-270).
ctgtatcgatgcgctatat

SEQ ID NO: 563622 - DNA, 19 bp, Mus musculus
  siRNA target sequence for Itgae (NM_008399.1,439-457).
gcctactcacccccaattt

SEQ ID NO: 563623 - DNA, 19 bp, Mus musculus
  siRNA target sequence for Itgae (NM_008399.1,625-643).
gcactgagatcgctattgt

SEQ ID NO: 563624 - DNA, 19 bp, Mus musculus
  siRNA target sequence for Itgae (NM_008399.1,681-699).
cagaaggccaaaaatttca

SEQ ID NO: 563625 - DNA, 19 bp, Mus musculus
  siRNA target sequence for Itgae (NM_008399.1,687-705).
gccaaaaatttcatctcta

SEQ ID NO: 563626 - DNA, 19 bp, Mus musculus
  siRNA target sequence for Itgae (NM_008399.1,706-724).
ccatgatgaggaacttcta

SEQ ID NO: 563627 - DNA, 19 bp, Mus musculus
  siRNA target sequence for Itgae (NM_008399.1,707-725).
catgatgaggaacttctat

SEQ ID NO: 563628 - DNA, 19 bp, Mus musculus
  siRNA target sequence for Itgae (NM_008399.1,770-788).
cgtgatccagactgagttt

SEQ ID NO: 563629 - DNA, 19 bp, Mus musculus
  siRNA target sequence for Itgae (NM_008399.1,795-813).
caagagagccgggacatta

SEQ ID NO: 563630 - DNA, 19 bp, Mus musculus
  siRNA target sequence for Itgae (NM_008399.1,882-900).
cagcatgtcctagacaata

SEQ ID NO: 563631 - DNA, 19 bp, Mus musculus
  siRNA target sequence for Itgae (NM_008399.1,885-903).
catgtcctagacaatatct

SEQ ID NO: 563632 - DNA, 19 bp, Mus musculus
  siRNA target sequence for Itgae (NM_008399.1,944-962).
catggtggtacttactgat

SEQ ID NO: 563633 - DNA, 19 bp, Mus musculus
  siRNA target sequence for Itgae (NM_008399.1,954-972).
cttactgatggtgacatat

SEQ ID NO: 563634 - DNA, 19 bp, Mus musculus
  siRNA target sequence for Itgae (NM_008399.1,990-1008).
cttacgactgtcatcaact

SEQ ID NO: 563635 - DNA, 19 bp, Mus musculus
  siRNA target sequence for Itgae (NM_008399.1,1203-1221).
gttggagatgcccttcaat

SEQ ID NO: 563636 - DNA, 19 bp, Mus musculus
  siRNA target sequence for Itgae (NM_008399.1,1319-1337).
gctctacagcacacagaat

SEQ ID NO: 563637 - DNA, 19 bp, Mus musculus
  siRNA target sequence for Itgae (NM_008399.1,1411-1429).
cccttgcggtgctacacaa

SEQ ID NO: 563638 - DNA, 19 bp, Mus musculus
  siRNA target sequence for Itgae (NM_008399.1,1603-1621).
ggaccacagattttctact

SEQ ID NO: 563639 - DNA, 19 bp, Mus musculus
  siRNA target sequence for Itgae (NM_008399.1,1777-1795).
gggatatcaaccaagacaa

SEQ ID NO: 563640 - DNA, 19 bp, Mus musculus
  siRNA target sequence for Itgae (NM_008399.1,1860-1878).
ggcagcgtgtacatctaca

SEQ ID NO: 563641 - DNA, 19 bp, Mus musculus
  siRNA target sequence for Itgae (NM_008399.1,1968-1986).
gtgtccggtgggttagatt

SEQ ID NO: 563642 - DNA, 19 bp, Mus musculus
  siRNA target sequence for Itgae (NM_008399.1,1995-2013).
gatggccttgccgatatca

SEQ ID NO: 563643 - DNA, 19 bp, Mus musculus
  siRNA target sequence for Itgae (NM_008399.1,2064-2082).
gacctgaccgtatctatga

SEQ ID NO: 563644 - DNA, 19 bp, Mus musculus
  siRNA target sequence for Itgae (NM_008399.1,2299-2317).
cctttctgtgtgaacactt

SEQ ID NO: 563645 - DNA, 19 bp, Mus musculus
  siRNA target sequence for Itgae (NM_008399.1,2607-2625).
gaggattcctacatgacaa

SEQ ID NO: 563646 - DNA, 19 bp, Mus musculus
  siRNA target sequence for Itgae (NM_008399.1,2623-2641).
caaacatggctctcaatta

SEQ ID NO: 563647 - DNA, 19 bp, Mus musculus
  siRNA target sequence for Itgae (NM_008399.1,2634-2652).
ctcaattatcccagaaact

SEQ ID NO: 563648 - DNA, 19 bp, Mus musculus
  siRNA target sequence for Itgae (NM_008399.1,2751-2769).
caccccatactcaagagat

SEQ ID NO: 563649 - DNA, 19 bp, Mus musculus
  siRNA target sequence for Itgae (NM_008399.1,2775-2793).
gtgaatgtctcagtaactt

SEQ ID NO: 563650 - DNA, 19 bp, Mus musculus
  siRNA target sequence for Itgae (NM_008399.1,2818-2836).
caaataggacagcagatat

SEQ ID NO: 563651 - DNA, 19 bp, Mus musculus
  siRNA target sequence for Itgae (NM_008399.1,2841-2859).
gtgaccatctccaattcca

SEQ ID NO: 563652 - DNA, 19 bp, Mus musculus
  siRNA target sequence for Itgae (NM_008399.1,2880-2898).
gagacacgcagccttcaat

SEQ ID NO: 563653 - DNA, 19 bp, Mus musculus
  siRNA target sequence for Itgae (NM_008399.1,2962-2980).
gcccttctgaccacaaaga

SEQ ID NO: 563654 - DNA, 19 bp, Mus musculus
  siRNA target sequence for Itgae (NM_008399.1,2964-2982).
ccttctgaccacaaagaat

SEQ ID NO: 563655 - DNA, 19 bp, Mus musculus
  siRNA target sequence for Itgae (NM_008399.1,2970-2988).
gaccacaaagaattcttct

SEQ ID NO: 563656 - DNA, 19 bp, Mus musculus
  siRNA target sequence for Itgae (NM_008399.1,2994-3012).
gtgcatggggagaatcttt

SEQ ID NO: 563657 - DNA, 19 bp, Mus musculus
  siRNA target sequence for Itgae (NM_008399.1,3021-3039).
gtattccagttgcaaattt

SEQ ID NO: 563658 - DNA, 19 bp, Mus musculus
  siRNA target sequence for Itgae (NM_008399.1,3044-3062).
ccccatcaaattacaagat

SEQ ID NO: 563659 - DNA, 19 bp, Mus musculus
  siRNA target sequence for Itgae (NM_008399.1,3147-3165).
gatcctgtgcagcatgtaa

SEQ ID NO: 563660 - DNA, 19 bp, Mus musculus
  siRNA target sequence for Itgae (NM_008399.1,3185-3203).
ctgtgctatcacatctaat

SEQ ID NO: 563661 - DNA, 19 bp, Mus musculus
  siRNA target sequence for Itgae (NM_008399.1,3190-3208).
ctatcacatctaataaaga

SEQ ID NO: 563662 - DNA, 19 bp, Mus musculus
  siRNA target sequence for Itgae (NM_008399.1,3241-3259).
gccacactaagcagttact

SEQ ID NO: 563663 - DNA, 19 bp, Mus musculus
  siRNA target sequence for Itgae (NM_008399.1,3243-3261).
cacactaagcagttactaa

SEQ ID NO: 563664 - DNA, 19 bp, Mus musculus
  siRNA target sequence for Itgae (NM_008399.1,3251-3269).
gcagttactaagagatgta

SEQ ID NO: 563665 - DNA, 19 bp, Mus musculus
  siRNA target sequence for Itgae (NM_008399.1,3278-3296).
gccgatccttggtgaaata

SEQ ID NO: 563666 - DNA, 19 bp, Mus musculus
  siRNA target sequence for Itgae (NM_008399.1,3279-3297).
ccgatccttggtgaaatat

SEQ ID NO: 563667 - DNA, 19 bp, Mus musculus
  siRNA target sequence for Itgae (NM_008399.1,3281-3299).
gatccttggtgaaatatct

SEQ ID NO: 563668 - DNA, 19 bp, Mus musculus
  siRNA target sequence for Itgae (NM_008399.1,3285-3303).
cttggtgaaatatctttca

SEQ ID NO: 563669 - DNA, 19 bp, Mus musculus
  siRNA target sequence for Itgae (NM_172944.1,952-970).
ggggaccctctcaatctta

SEQ ID NO: 563670 - DNA, 19 bp, Mus musculus
  siRNA target sequence for Itgae (NM_172944.1,1024-1042).
gtgggtgatgcattcaaga

SEQ ID NO: 563671 - DNA, 19 bp, Mus musculus
  siRNA target sequence for Itgae (NM_172944.1,1026-1044).
gggtgatgcattcaagaat

SEQ ID NO: 563672 - DNA, 19 bp, Mus musculus
  siRNA target sequence for Itgae (NM_172944.1,1027-1045).
ggtgatgcattcaagaata

SEQ ID NO: 563673 - DNA, 19 bp, Mus musculus
  siRNA target sequence for Itgae (NM_172944.1,1028-1046).
gtgatgcattcaagaataa

SEQ ID NO: 563674 - DNA, 19 bp, Mus musculus
  siRNA target sequence for Itgae (NM_172944.1,2906-2924).
gaccctcagtgatgtacat

SEQ ID NO: 563675 - DNA, 19 bp, Mus musculus
  siRNA target sequence for Itgae (NM_172944.1,3099-3117).
gattgcatcgctttccaaa

SEQ ID NO: 563676 - DNA, 19 bp, Mus musculus
  siRNA target sequence for Itgae (NM_172944.1,3103-3121).
gcatcgctttccaaagact

SEQ ID NO: 563677 - DNA, 19 bp, Mus musculus
  siRNA target sequence for Itgae (NM_172944.1,3104-3122).
catcgctttccaaagacta

SEQ ID NO: 563678 - DNA, 19 bp, Mus musculus
  siRNA target sequence for Itgal (NM_008400.1,191-209).
ccaggtcttgcagattgaa

SEQ ID NO: 563679 - DNA, 19 bp, Mus musculus
  siRNA target sequence for Itgal (NM_008400.1,302-320).
cctacatggttctaaccat

SEQ ID NO: 563680 - DNA, 19 bp, Mus musculus
  siRNA target sequence for Itgal (NM_008400.1,397-415).
ctcggacatgcgatcagaa

SEQ ID NO: 563681 - DNA, 19 bp, Mus musculus
  siRNA target sequence for Itgal (NM_008400.1,458-476).
ggagggacctatgttacaa

SEQ ID NO: 563682 - DNA, 19 bp, Mus musculus
  siRNA target sequence for Itgal (NM_008400.1,459-477).
gagggacctatgttacaaa

SEQ ID NO: 563683 - DNA, 19 bp, Mus musculus
  siRNA target sequence for Itgal (NM_008400.1,461-479).
gggacctatgttacaaaat

SEQ ID NO: 563684 - DNA, 19 bp, Mus musculus
  siRNA target sequence for Itgal (NM_008400.1,483-501).
cccgcctatcaggaatgta

SEQ ID NO: 563685 - DNA, 19 bp, Mus musculus
  siRNA target sequence for Itgal (NM_008400.1,721-739).
gcgtgcagcccatgttctt

SEQ ID NO: 563686 - DNA, 19 bp, Mus musculus
  siRNA target sequence for Itgal (NM_008400.1,752-770).
ctttcgtgccatcaactat

SEQ ID NO: 563687 - DNA, 19 bp, Mus musculus
  siRNA target sequence for Itgal (NM_008400.1,773-791).
ggtggcacacgtgttcaaa

SEQ ID NO: 563688 - DNA, 19 bp, Mus musculus
  siRNA target sequence for Itgal (NM_008400.1,824-842).
ggtgcttgtcatcattaca

SEQ ID NO: 563689 - DNA, 19 bp, Mus musculus
  siRNA target sequence for Itgal (NM_008400.1,843-861).
gacggggaggcaagtgata

SEQ ID NO: 563690 - DNA, 19 bp, Mus musculus
  siRNA target sequence for Itgal (NM_008400.1,845-863).
cggggaggcaagtgataaa

SEQ ID NO: 563691 - DNA, 19 bp, Mus musculus
  siRNA target sequence for Itgal (NM_008400.1,885-903).
gacataacccgctacatca

SEQ ID NO: 563692 - DNA, 19 bp, Mus musculus
  siRNA target sequence for Itgal (NM_008400.1,905-923).
cgggattggcaagcatttt

SEQ ID NO: 563693 - DNA, 19 bp, Mus musculus
  siRNA target sequence for Itgal (NM_008400.1,907-925).
ggattggcaagcattttgt

SEQ ID NO: 563694 - DNA, 19 bp, Mus musculus
  siRNA target sequence for Itgal (NM_008400.1,918-936).
cattttgtgagcgtacaaa

SEQ ID NO: 563695 - DNA, 19 bp, Mus musculus
  siRNA target sequence for Itgal (NM_008400.1,924-942).
gtgagcgtacaaaagcaaa

SEQ ID NO: 563696 - DNA, 19 bp, Mus musculus
  siRNA target sequence for Itgal (NM_008400.1,939-957).
caaaagacgctccacatat

SEQ ID NO: 563697 - DNA, 19 bp, Mus musculus
  siRNA target sequence for Itgal (NM_008400.1,1034-1052).
gcagaggaggatttatgct

SEQ ID NO: 563698 - DNA, 19 bp, Mus musculus
  siRNA target sequence for Itgal (NM_008400.1,1035-1053).
cagaggaggatttatgcta

SEQ ID NO: 563699 - DNA, 19 bp, Mus musculus
  siRNA target sequence for Itgal (NM_008400.1,1050-1068).
gctattgagggcacaaaca

SEQ ID NO: 563700 - DNA, 19 bp, Mus musculus
  siRNA target sequence for Itgal (NM_008400.1,1071-1089).
caggacctgacatccttta

SEQ ID NO: 563701 - DNA, 19 bp, Mus musculus
  siRNA target sequence for Itgal (NM_008400.1,1074-1092).
gacctgacatcctttaaca

SEQ ID NO: 563702 - DNA, 19 bp, Mus musculus
  siRNA target sequence for Itgal (NM_008400.1,1152-1170).
gctgttggggctaaggatt

SEQ ID NO: 563703 - DNA, 19 bp, Mus musculus
  siRNA target sequence for Itgal (NM_008400.1,1411-1429).
ggactcagatcggatctta

SEQ ID NO: 563704 - DNA, 19 bp, Mus musculus
  siRNA target sequence for Itgal (NM_008400.1,1414-1432).
ctcagatcggatcttactt

SEQ ID NO: 563705 - DNA, 19 bp, Mus musculus
  siRNA target sequence for Itgal (NM_008400.1,1430-1448).
ctttggtggggaactatgt

SEQ ID NO: 563706 - DNA, 19 bp, Mus musculus
  siRNA target sequence for Itgal (NM_008400.1,1524-1542).
ggaggccgagtgttcactt

SEQ ID NO: 563707 - DNA, 19 bp, Mus musculus
  siRNA target sequence for Itgal (NM_008400.1,1552-1570).
gacagtcgctgtttgaaat

SEQ ID NO: 563708 - DNA, 19 bp, Mus musculus
  siRNA target sequence for Itgal (NM_008400.1,1745-1763).
gccaagccagcgtatacaa

SEQ ID NO: 563709 - DNA, 19 bp, Mus musculus
  siRNA target sequence for Itgal (NM_008400.1,2026-2044).
ccctcacgccacagtttca

SEQ ID NO: 563710 - DNA, 19 bp, Mus musculus
  siRNA target sequence for Itgal (NM_008400.1,2027-2045).
cctcacgccacagtttcaa

SEQ ID NO: 563711 - DNA, 19 bp, Mus musculus
  siRNA target sequence for Itgal (NM_008400.1,2149-2167).
cctccatcaccccagataa

SEQ ID NO: 563712 - DNA, 19 bp, Mus musculus
  siRNA target sequence for Itgal (NM_008400.1,2150-2168).
ctccatcaccccagataaa

SEQ ID NO: 563713 - DNA, 19 bp, Mus musculus
  siRNA target sequence for Itgal (NM_008400.1,2192-2210).
cttcccgatctgcattcaa

SEQ ID NO: 563714 - DNA, 19 bp, Mus musculus
  siRNA target sequence for Itgal (NM_008400.1,2213-2231).
cctcatctcccctatcaat

SEQ ID NO: 563715 - DNA, 19 bp, Mus musculus
  siRNA target sequence for Itgal (NM_008400.1,2485-2503).
cctactgggtgcgattaga

SEQ ID NO: 563716 - DNA, 19 bp, Mus musculus
  siRNA target sequence for Itgal (NM_008400.1,2596-2614).
ggtcaagtctcctgactaa

SEQ ID NO: 563717 - DNA, 19 bp, Mus musculus
  siRNA target sequence for Itgal (NM_008400.1,2670-2688).
ctccaggtgatgtttaaca

SEQ ID NO: 563718 - DNA, 19 bp, Mus musculus
  siRNA target sequence for Itgal (NM_008400.1,2732-2750).
cactgtgcactgtgagaat

SEQ ID NO: 563719 - DNA, 19 bp, Mus musculus
  siRNA target sequence for Itgal (NM_008400.1,2808-2826).
cctgtcaacatccttacta

SEQ ID NO: 563720 - DNA, 19 bp, Mus musculus
  siRNA target sequence for Itgal (NM_008400.1,2855-2873).
cagtttcacccctaaaggt

SEQ ID NO: 563721 - DNA, 19 bp, Mus musculus
  siRNA target sequence for Itgal (NM_008400.1,2872-2890).
gtcccaagacccaacaagt

SEQ ID NO: 563722 - DNA, 19 bp, Mus musculus
  siRNA target sequence for Itgal (NM_008400.1,3098-3116).
ccagttccgctgtccaatt

SEQ ID NO: 563723 - DNA, 19 bp, Mus musculus
  siRNA target sequence for Itgal (NM_008400.1,3427-3445).
ctgatggaggtgttccaaa

SEQ ID NO: 563724 - DNA, 19 bp, Mus musculus
  siRNA target sequence for Lysal1 (NM_026174.1,240-258).
gcctcttggcattttagca

SEQ ID NO: 563725 - DNA, 19 bp, Mus musculus
  siRNA target sequence for Lysal1 (NM_026174.1,241-259).
cctcttggcattttagcat

SEQ ID NO: 563726 - DNA, 19 bp, Mus musculus
  siRNA target sequence for Lysal1 (NM_026174.1,279-297).
cgaattctgaacaccaatt

SEQ ID NO: 563727 - DNA, 19 bp, Mus musculus
  siRNA target sequence for Lysal1 (NM_026174.1,292-310).
ccaatttacgacaaatcgt

SEQ ID NO: 563728 - DNA, 19 bp, Mus musculus
  siRNA target sequence for Lysal1 (NM_026174.1,293-311).
caatttacgacaaatcgtt

SEQ ID NO: 563729 - DNA, 19 bp, Mus musculus
  siRNA target sequence for Lysal1 (NM_026174.1,300-318).
cgacaaatcgttgtcatta

SEQ ID NO: 563730 - DNA, 19 bp, Mus musculus
  siRNA target sequence for Lysal1 (NM_026174.1,303-321).
caaatcgttgtcattagca

SEQ ID NO: 563731 - DNA, 19 bp, Mus musculus
  siRNA target sequence for Lysal1 (NM_026174.1,362-380).
cataatccgcagcaagtat

SEQ ID NO: 563732 - DNA, 19 bp, Mus musculus
  siRNA target sequence for Lysal1 (NM_026174.1,496-514).
gcagtgggtctcggatatt

SEQ ID NO: 563733 - DNA, 19 bp, Mus musculus
  siRNA target sequence for Lysal1 (NM_026174.1,499-517).
gtgggtctcggatatttgt

SEQ ID NO: 563734 - DNA, 19 bp, Mus musculus
  siRNA target sequence for Lysal1 (NM_026174.1,501-519).
gggtctcggatatttgtct

SEQ ID NO: 563735 - DNA, 19 bp, Mus musculus
  siRNA target sequence for Lysal1 (NM_026174.1,502-520).
ggtctcggatatttgtcta

SEQ ID NO: 563736 - DNA, 19 bp, Mus musculus
  siRNA target sequence for Lysal1 (NM_026174.1,696-714).
gtgcctcgggcaaaacaca

SEQ ID NO: 563737 - DNA, 19 bp, Mus musculus
  siRNA target sequence for Lysal1 (NM_026174.1,698-716).
gcctcgggcaaaacacaaa

SEQ ID NO: 563738 - DNA, 19 bp, Mus musculus
  siRNA target sequence for Lysal1 (NM_026174.1,816-834).
cactatgatttcctgtttt

SEQ ID NO: 563739 - DNA, 19 bp, Mus musculus
  siRNA target sequence for Lysal1 (NM_026174.1,848-866).
cgaagtcatctcaggaaaa

SEQ ID NO: 563740 - DNA, 19 bp, Mus musculus
  siRNA target sequence for Lysal1 (NM_026174.1,882-900).
gcttggatcggcattaatt

SEQ ID NO: 563741 - DNA, 19 bp, Mus musculus
  siRNA target sequence for Lysal1 (NM_026174.1,883-901).
cttggatcggcattaattt

SEQ ID NO: 563742 - DNA, 19 bp, Mus musculus
  siRNA target sequence for Lysal1 (NM_026174.1,886-904).
ggatcggcattaattttgt

SEQ ID NO: 563743 - DNA, 19 bp, Mus musculus
  siRNA target sequence for Lysal1 (NM_026174.1,944-962).
ggttgtggaagtcaacatt

SEQ ID NO: 563744 - DNA, 19 bp, Mus musculus
  siRNA target sequence for Lysal1 (NM_026174.1,1049-1067).
cgaagtcccccaaactgta

SEQ ID NO: 563745 - DNA, 19 bp, Mus musculus
  siRNA target sequence for Lysal1 (NM_026174.1,1050-1068).
gaagtcccccaaactgtaa

SEQ ID NO: 563746 - DNA, 19 bp, Mus musculus
  siRNA target sequence for Lysal1 (NM_026174.1,1078-1096).
cctcgcagcaggaagaagt

SEQ ID NO: 563747 - DNA, 19 bp, Mus musculus
  siRNA target sequence for Lysal1 (NM_026174.1,1166-1184).
ctacgtggccacgtttctt

SEQ ID NO: 563748 - DNA, 19 bp, Mus musculus
  siRNA target sequence for Lysal1 (NM_026174.1,1213-1231).
gatatgaagaccgactatt

SEQ ID NO: 563749 - DNA, 19 bp, Mus musculus
  siRNA target sequence for Lysal1 (NM_026174.1,1309-1327).
gcttgcctctggacattaa

SEQ ID NO: 563750 - DNA, 19 bp, Mus musculus
  siRNA target sequence for Lysal1 (NM_026174.1,1310-1328).
cttgcctctggacattaaa

SEQ ID NO: 563751 - DNA, 19 bp, Mus musculus
  siRNA target sequence for Lysal1 (NM_026174.1,1404-1422).
cagcctttcatgaacaaaa

SEQ ID NO: 563752 - DNA, 19 bp, Mus musculus
  siRNA target sequence for Lysal1 (NM_026174.1,1470-1488).
cacttccagaacagtgaat

SEQ ID NO: 563753 - DNA, 19 bp, Mus musculus
  siRNA target sequence for Lysal1 (NM_026174.1,1581-1599).
gattactgtgcaacaaagt

SEQ ID NO: 563754 - DNA, 19 bp, Mus musculus
  siRNA target sequence for Lysal1 (NM_026174.1,1619-1637).
ctttgaccgaggactctat

SEQ ID NO: 563755 - DNA, 19 bp, Mus musculus
  siRNA target sequence for Lysal1 (NM_026174.1,1726-1744).
ctgtcacctacaaaaacct

SEQ ID NO: 563756 - DNA, 19 bp, Mus musculus
  siRNA target sequence for Lysal1 (NM_026174.1,1876-1894).
gcgtgtccttcgtctacaa

SEQ ID NO: 563757 - DNA, 19 bp, Mus musculus
  siRNA target sequence for Mthfd2 (NM_008638.1,176-194).
gaaatgaagccgttgtcat

SEQ ID NO: 563758 - DNA, 19 bp, Mus musculus
  siRNA target sequence for Mthfd2 (NM_008638.1,278-296).
cacacctcagtgtcattct

SEQ ID NO: 563759 - DNA, 19 bp, Mus musculus
  siRNA target sequence for Mthfd2 (NM_008638.1,291-309).
cattctggttggtgacaat

SEQ ID NO: 563760 - DNA, 19 bp, Mus musculus
  siRNA target sequence for Mthfd2 (NM_008638.1,312-330).
cgccagtcactcctatgtt

SEQ ID NO: 563761 - DNA, 19 bp, Mus musculus
  siRNA target sequence for Mthfd2 (NM_008638.1,317-335).
gtcactcctatgttctcaa

SEQ ID NO: 563762 - DNA, 19 bp, Mus musculus
  siRNA target sequence for Mthfd2 (NM_008638.1,321-339).
ctcctatgttctcaacaaa

SEQ ID NO: 563763 - DNA, 19 bp, Mus musculus
  siRNA target sequence for Mthfd2 (NM_008638.1,382-400).
gtgaaaccagcctcagttt

SEQ ID NO: 563764 - DNA, 19 bp, Mus musculus
  siRNA target sequence for Mthfd2 (NM_008638.1,531-549).
ggatgttgatggctttcat

SEQ ID NO: 563765 - DNA, 19 bp, Mus musculus
  siRNA target sequence for Mthfd2 (NM_008638.1,542-560).
gctttcatgtcattaacgt

SEQ ID NO: 563766 - DNA, 19 bp, Mus musculus
  siRNA target sequence for Mthfd2 (NM_008638.1,608-626).
ggggcgtgtgggagataat

SEQ ID NO: 563767 - DNA, 19 bp, Mus musculus
  siRNA target sequence for Mthfd2 (NM_008638.1,609-627).
gggcgtgtgggagataatt

SEQ ID NO: 563768 - DNA, 19 bp, Mus musculus
  siRNA target sequence for Mthfd2 (NM_008638.1,610-628).
ggcgtgtgggagataatta

SEQ ID NO: 563769 - DNA, 19 bp, Mus musculus
  siRNA target sequence for Mthfd2 (NM_008638.1,611-629).
gcgtgtgggagataattaa

SEQ ID NO: 563770 - DNA, 19 bp, Mus musculus
  siRNA target sequence for Mthfd2 (NM_008638.1,644-662).
caaccttagggaagaatgt

SEQ ID NO: 563771 - DNA, 19 bp, Mus musculus
  siRNA target sequence for Mthfd2 (NM_008638.1,667-685).
gtggctggcaggtcaaaaa

SEQ ID NO: 563772 - DNA, 19 bp, Mus musculus
  siRNA target sequence for Mthfd2 (NM_008638.1,677-695).
ggtcaaaaaacgttggaat

SEQ ID NO: 563773 - DNA, 19 bp, Mus musculus
  siRNA target sequence for Mthfd2 (NM_008638.1,688-706).
gttggaatgccgattgcaa

SEQ ID NO: 563774 - DNA, 19 bp, Mus musculus
  siRNA target sequence for Mthfd2 (NM_008638.1,692-710).
gaatgccgattgcaatgtt

SEQ ID NO: 563775 - DNA, 19 bp, Mus musculus
  siRNA target sequence for Mthfd2 (NM_008638.1,753-771).
cacagtcacaatatctcat

SEQ ID NO: 563776 - DNA, 19 bp, Mus musculus
  siRNA target sequence for Mthfd2 (NM_008638.1,835-853).
gctggcattccaaatctga

SEQ ID NO: 563777 - DNA, 19 bp, Mus musculus
  siRNA target sequence for Mthfd2 (NM_008638.1,836-854).
ctggcattccaaatctgat

SEQ ID NO: 563778 - DNA, 19 bp, Mus musculus
  siRNA target sequence for Mthfd2 (NM_008638.1,886-904).
gtcatcgatgtgggaataa

SEQ ID NO: 563779 - DNA, 19 bp, Mus musculus
  siRNA target sequence for Mthfd2 (NM_008638.1,891-909).
cgatgtgggaataaacaga

SEQ ID NO: 563780 - DNA, 19 bp, Mus musculus
  siRNA target sequence for Mthfd2 (NM_008638.1,899-917).
gaataaacagagttcaaga

SEQ ID NO: 563781 - DNA, 19 bp, Mus musculus
  siRNA target sequence for Mthfd2 (NM_008638.1,975-993).
gaaagctggttatatcact

SEQ ID NO: 563782 - DNA, 19 bp, Mus musculus
  siRNA target sequence for Mthfd2 (NM_008638.1,1033-1051).
ctcatgaagaacaccatta

SEQ ID NO: 563783 - DNA, 19 bp, Mus musculus
  siRNA target sequence for Mthfd2 (NM_008638.1,1046-1064).
ccattattgccgcaaagaa

SEQ ID NO: 563784 - DNA, 19 bp, Mus musculus
  siRNA target sequence for Mthfd2 (NM_008638.1,1047-1065).
cattattgccgcaaagaaa

SEQ ID NO: 563785 - DNA, 19 bp, Mus musculus
  siRNA target sequence for Pfkl (NM_008826.2,139-157).
gcggtgatgcgcaaggtat

SEQ ID NO: 563786 - DNA, 19 bp, Mus musculus
  siRNA target sequence for Pfkl (NM_008826.2,179-197).
gacccgtatgggcatatat

SEQ ID NO: 563787 - DNA, 19 bp, Mus musculus
  siRNA target sequence for Pfkl (NM_008826.2,181-199).
cccgtatgggcatatatgt

SEQ ID NO: 563788 - DNA, 19 bp, Mus musculus
  siRNA target sequence for Pfkl (NM_008826.2,275-293).
ctggctcagcgtttccaat

SEQ ID NO: 563789 - DNA, 19 bp, Mus musculus
  siRNA target sequence for Pfkl (NM_008826.2,279-297).
ctcagcgtttccaatatca

SEQ ID NO: 563790 - DNA, 19 bp, Mus musculus
  siRNA target sequence for Pfkl (NM_008826.2,330-348).
cgctgtaaggccttcacta

SEQ ID NO: 563791 - DNA, 19 bp, Mus musculus
  siRNA target sequence for Pfkl (NM_008826.2,549-567).
ctggtgggctccatcgata

SEQ ID NO: 563792 - DNA, 19 bp, Mus musculus
  siRNA target sequence for Pfkl (NM_008826.2,630-648).
gtcattgacgccatcacta

SEQ ID NO: 563793 - DNA, 19 bp, Mus musculus
  siRNA target sequence for Pfkl (NM_008826.2,834-852).
cggctgaacatcatcatca

SEQ ID NO: 563794 - DNA, 19 bp, Mus musculus
  siRNA target sequence for Pfkl (NM_008826.2,865-883).
ccattgaccggcatggaaa

SEQ ID NO: 563795 - DNA, 19 bp, Mus musculus
  siRNA target sequence for Pfkl (NM_008826.2,876-894).
catggaaagcctatctcat

SEQ ID NO: 563796 - DNA, 19 bp, Mus musculus
  siRNA target sequence for Pfkl (NM_008826.2,921-939).
cagaggctgggcttcgata

SEQ ID NO: 563797 - DNA, 19 bp, Mus musculus
  siRNA target sequence for Pfkl (NM_008826.2,1188-1206).
cgtggcaggagctttgaga

SEQ ID NO: 563798 - DNA, 19 bp, Mus musculus
  siRNA target sequence for Pfkl (NM_008826.2,1234-1252).
cccaccagaaggtgtctaa

SEQ ID NO: 563799 - DNA, 19 bp, Mus musculus
  siRNA target sequence for Pfkl (NM_008826.2,1350-1368).
gagggacacacggtataca

SEQ ID NO: 563800 - DNA, 19 bp, Mus musculus
  siRNA target sequence for Pfkl (NM_008826.2,1753-1771).
caaagcggcgtgtgttcat

SEQ ID NO: 563801 - DNA, 19 bp, Mus musculus
  siRNA target sequence for Pfkl (NM_008826.2,1757-1775).
gcggcgtgtgttcattgta

SEQ ID NO: 563802 - DNA, 19 bp, Mus musculus
  siRNA target sequence for Pfkl (NM_008826.2,1759-1777).
ggcgtgtgttcattgtaga

SEQ ID NO: 563803 - DNA, 19 bp, Mus musculus
  siRNA target sequence for Pfkl (NM_008826.2,1886-1904).
caatgtggagcatatgaca

SEQ ID NO: 563804 - DNA, 19 bp, Mus musculus
  siRNA target sequence for Pfkl (NM_008826.2,1972-1990).
ccacagagttcctatacaa

SEQ ID NO: 563805 - DNA, 19 bp, Mus musculus
  siRNA target sequence for Pfkl (NM_008826.2,2007-2025).
ggcaggggcgtgtttgact

SEQ ID NO: 563806 - DNA, 19 bp, Mus musculus
  siRNA target sequence for Pfkl (NM_008826.2,2072-2090).
ccctttcgaccggaactat

SEQ ID NO: 563807 - DNA, 19 bp, Mus musculus
  siRNA target sequence for Pfkl (NM_008826.2,2227-2245).
gtccggtcacagaactcaa

SEQ ID NO: 563808 - DNA, 19 bp, Mus musculus
  siRNA target sequence for Pfkl (NM_008826.2,2243-2261).
caagaaagagactgatttt

SEQ ID NO: 563809 - DNA, 19 bp, Mus musculus
  siRNA target sequence for Pfkl (NM_008826.2,2382-2400).
cgcaccttgagcatagaca

SEQ ID NO: 563810 - DNA, 19 bp, Mus musculus
  siRNA target sequence for Pfkm (NM_021514.2,137-155).
gtggagatgcccaaggtat

SEQ ID NO: 563811 - DNA, 19 bp, Mus musculus
  siRNA target sequence for Pfkm (NM_021514.2,173-191).
ctgtggtccgagttggtat

SEQ ID NO: 563812 - DNA, 19 bp, Mus musculus
  siRNA target sequence for Pfkm (NM_021514.2,178-196).
gtccgagttggtatcttca

SEQ ID NO: 563813 - DNA, 19 bp, Mus musculus
  siRNA target sequence for Pfkm (NM_021514.2,300-318).
gctgggtggcacagtgatt

SEQ ID NO: 563814 - DNA, 19 bp, Mus musculus
  siRNA target sequence for Pfkm (NM_021514.2,304-322).
ggtggcacagtgattggaa

SEQ ID NO: 563815 - DNA, 19 bp, Mus musculus
  siRNA target sequence for Pfkm (NM_021514.2,461-479).
ggagcgacttgctgaatga

SEQ ID NO: 563816 - DNA, 19 bp, Mus musculus
  siRNA target sequence for Pfkm (NM_021514.2,462-480).
gagcgacttgctgaatgat

SEQ ID NO: 563817 - DNA, 19 bp, Mus musculus
  siRNA target sequence for Pfkm (NM_021514.2,484-502).
cagaaagacgggaagatca

SEQ ID NO: 563818 - DNA, 19 bp, Mus musculus
  siRNA target sequence for Pfkm (NM_021514.2,505-523).
gccgaggaggctacaaagt

SEQ ID NO: 563819 - DNA, 19 bp, Mus musculus
  siRNA target sequence for Pfkm (NM_021514.2,668-686).
ggacgtttgtgttagaagt

SEQ ID NO: 563820 - DNA, 19 bp, Mus musculus
  siRNA target sequence for Pfkm (NM_021514.2,915-933).
ggtgaagcgccttggatat

SEQ ID NO: 563821 - DNA, 19 bp, Mus musculus
  siRNA target sequence for Pfkm (NM_021514.2,945-963).
cactgttctgggacatgta

SEQ ID NO: 563822 - DNA, 19 bp, Mus musculus
  siRNA target sequence for Pfkm (NM_021514.2,1025-1043).
cagtgatggcacttttgga

SEQ ID NO: 563823 - DNA, 19 bp, Mus musculus
  siRNA target sequence for Pfkm (NM_021514.2,1137-1155).
cgtgaccaaggctatggat

SEQ ID NO: 563824 - DNA, 19 bp, Mus musculus
  siRNA target sequence for Pfkm (NM_021514.2,1147-1165).
gctatggatgagaagagat

SEQ ID NO: 563825 - DNA, 19 bp, Mus musculus
  siRNA target sequence for Pfkm (NM_021514.2,1148-1166).
ctatggatgagaagagatt

SEQ ID NO: 563826 - DNA, 19 bp, Mus musculus
  siRNA target sequence for Pfkm (NM_021514.2,1269-1287).
cacagtggccgtgatgaat

SEQ ID NO: 563827 - DNA, 19 bp, Mus musculus
  siRNA target sequence for Pfkm (NM_021514.2,1271-1289).
cagtggccgtgatgaatgt

SEQ ID NO: 563828 - DNA, 19 bp, Mus musculus
  siRNA target sequence for Pfkm (NM_021514.2,1361-1379).
gggtgctggtcgtacatga

SEQ ID NO: 563829 - DNA, 19 bp, Mus musculus
  siRNA target sequence for Pfkm (NM_021514.2,1362-1380).
ggtgctggtcgtacatgat

SEQ ID NO: 563830 - DNA, 19 bp, Mus musculus
  siRNA target sequence for Pfkm (NM_021514.2,1457-1475).
gttccaaacttggtactaa

SEQ ID NO: 563831 - DNA, 19 bp, Mus musculus
  siRNA target sequence for Pfkm (NM_021514.2,1478-1496).
ggactctccccaagaagaa

SEQ ID NO: 563832 - DNA, 19 bp, Mus musculus
  siRNA target sequence for Pfkm (NM_021514.2,1504-1522).
cagatcagtgccaacataa

SEQ ID NO: 563833 - DNA, 19 bp, Mus musculus
  siRNA target sequence for Pfkm (NM_021514.2,1513-1531).
gccaacataaccaagttta

SEQ ID NO: 563834 - DNA, 19 bp, Mus musculus
  siRNA target sequence for Pfkm (NM_021514.2,1642-1660).
ccggccacggtttccaata

SEQ ID NO: 563835 - DNA, 19 bp, Mus musculus
  siRNA target sequence for Pfkm (NM_021514.2,1643-1661).
cggccacggtttccaataa

SEQ ID NO: 563836 - DNA, 19 bp, Mus musculus
  siRNA target sequence for Pfkm (NM_021514.2,1646-1664).
ccacggtttccaataacgt

SEQ ID NO: 563837 - DNA, 19 bp, Mus musculus
  siRNA target sequence for Pfkm (NM_021514.2,1718-1736).
cgacttgtgaccgaatcaa

SEQ ID NO: 563838 - DNA, 19 bp, Mus musculus
  siRNA target sequence for Pfkm (NM_021514.2,1754-1772).
ccaaacgtcgggtgtttat

SEQ ID NO: 563839 - DNA, 19 bp, Mus musculus
  siRNA target sequence for Pfkm (NM_021514.2,1875-1893).
cgatctccaggtgaatgtt

SEQ ID NO: 563840 - DNA, 19 bp, Mus musculus
  siRNA target sequence for Pfkm (NM_021514.2,1936-1954).
ctggtgctgaggaatgaga

SEQ ID NO: 563841 - DNA, 19 bp, Mus musculus
  siRNA target sequence for Pfkm (NM_021514.2,2004-2022).
ggaggggaagggcatcttt

SEQ ID NO: 563842 - DNA, 19 bp, Mus musculus
  siRNA target sequence for Pfkm (NM_021514.2,2008-2026).
gggaagggcatctttgaca

SEQ ID NO: 563843 - DNA, 19 bp, Mus musculus
  siRNA target sequence for Pfkm (NM_021514.2,2084-2102).
ggaattttgccactaagat

SEQ ID NO: 563844 - DNA, 19 bp, Mus musculus
  siRNA target sequence for Pfkm (NM_021514.2,2142-2160).
ggagagttaccgtaatgga

SEQ ID NO: 563845 - DNA, 19 bp, Mus musculus
  siRNA target sequence for Pfkm (NM_021514.2,2151-2169).
ccgtaatggacggatcttt

SEQ ID NO: 563846 - DNA, 19 bp, Mus musculus
  siRNA target sequence for Pfkm (NM_021514.2,2244-2262).
gaaggaccagacagacttt

SEQ ID NO: 563847 - DNA, 19 bp, Mus musculus
  siRNA target sequence for Pfkm (NM_021514.2,2247-2265).
ggaccagacagactttgaa

SEQ ID NO: 563848 - DNA, 19 bp, Mus musculus
  siRNA target sequence for Pfkm (NM_021514.2,2361-2379).
ccacctggagcacatttca

SEQ ID NO: 563849 - DNA, 19 bp, Mus musculus
  siRNA target sequence for Pfkm (NM_021514.2,2362-2380).
cacctggagcacatttcaa

SEQ ID NO: 563850 - DNA, 19 bp, Mus musculus
  siRNA target sequence for Pfkm (NM_021514.2,2367-2385).
ggagcacatttcaaggaaa

SEQ ID NO: 563851 - DNA, 19 bp, Mus musculus
  siRNA target sequence for Pfkp (NM_019703.2,105-123).
ctggggatggcaaagctat

SEQ ID NO: 563852 - DNA, 19 bp, Mus musculus
  siRNA target sequence for Pfkp (NM_019703.2,182-200).
gtgcgcatgggaatctaca

SEQ ID NO: 563853 - DNA, 19 bp, Mus musculus
  siRNA target sequence for Pfkp (NM_019703.2,205-223).
ggccaaagtgtactttata

SEQ ID NO: 563854 - DNA, 19 bp, Mus musculus
  siRNA target sequence for Pfkp (NM_019703.2,206-224).
gccaaagtgtactttatat

SEQ ID NO: 563855 - DNA, 19 bp, Mus musculus
  siRNA target sequence for Pfkp (NM_019703.2,247-265).
ggatggaggctccaatatt

SEQ ID NO: 563856 - DNA, 19 bp, Mus musculus
  siRNA target sequence for Pfkp (NM_019703.2,388-406).
gcgcttgggcataaccaat

SEQ ID NO: 563857 - DNA, 19 bp, Mus musculus
  siRNA target sequence for Pfkp (NM_019703.2,489-507).
ctcggaatggtgatatcga

SEQ ID NO: 563858 - DNA, 19 bp, Mus musculus
  siRNA target sequence for Pfkp (NM_019703.2,491-509).
cggaatggtgatatcgata

SEQ ID NO: 563859 - DNA, 19 bp, Mus musculus
  siRNA target sequence for Pfkp (NM_019703.2,492-510).
ggaatggtgatatcgataa

SEQ ID NO: 563860 - DNA, 19 bp, Mus musculus
  siRNA target sequence for Pfkp (NM_019703.2,511-529).
cgacacagtgcagaagtat

SEQ ID NO: 563861 - DNA, 19 bp, Mus musculus
  siRNA target sequence for Pfkp (NM_019703.2,613-631).
cctgcaccgaattattgaa

SEQ ID NO: 563862 - DNA, 19 bp, Mus musculus
  siRNA target sequence for Pfkp (NM_019703.2,616-634).
gcaccgaattattgaagtt

SEQ ID NO: 563863 - DNA, 19 bp, Mus musculus
  siRNA target sequence for Pfkp (NM_019703.2,619-637).
ccgaattattgaagttgtt

SEQ ID NO: 563864 - DNA, 19 bp, Mus musculus
  siRNA target sequence for Pfkp (NM_019703.2,782-800).
gattgggaggaaaatatgt

SEQ ID NO: 563865 - DNA, 19 bp, Mus musculus
  siRNA target sequence for Pfkp (NM_019703.2,815-833).
gagaaccgagcccgaaaaa

SEQ ID NO: 563866 - DNA, 19 bp, Mus musculus
  siRNA target sequence for Pfkp (NM_019703.2,863-881).
ggagcaatcgacatgcaaa

SEQ ID NO: 563867 - DNA, 19 bp, Mus musculus
  siRNA target sequence for Pfkp (NM_019703.2,864-882).
gagcaatcgacatgcaaaa

SEQ ID NO: 563868 - DNA, 19 bp, Mus musculus
  siRNA target sequence for Pfkp (NM_019703.2,866-884).
gcaatcgacatgcaaaata

SEQ ID NO: 563869 - DNA, 19 bp, Mus musculus
  siRNA target sequence for Pfkp (NM_019703.2,867-885).
caatcgacatgcaaaataa

SEQ ID NO: 563870 - DNA, 19 bp, Mus musculus
  siRNA target sequence for Pfkp (NM_019703.2,987-1005).
ctgcatttgacaggatttt

SEQ ID NO: 563871 - DNA, 19 bp, Mus musculus
  siRNA target sequence for Pfkp (NM_019703.2,1078-1096).
gtcactaagaggaaaccaa

SEQ ID NO: 563872 - DNA, 19 bp, Mus musculus
  siRNA target sequence for Pfkp (NM_019703.2,1275-1293).
gcaatgtagccgtcatcaa

SEQ ID NO: 563873 - DNA, 19 bp, Mus musculus
  siRNA target sequence for Pfkp (NM_019703.2,1276-1294).
caatgtagccgtcatcaat

SEQ ID NO: 563874 - DNA, 19 bp, Mus musculus
  siRNA target sequence for Pfkp (NM_019703.2,1302-1320).
cacctgctgccggaatgaa

SEQ ID NO: 563875 - DNA, 19 bp, Mus musculus
  siRNA target sequence for Pfkp (NM_019703.2,1361-1379).
ggccacaagatgtttgcaa

SEQ ID NO: 563876 - DNA, 19 bp, Mus musculus
  siRNA target sequence for Pfkp (NM_019703.2,1366-1384).
caagatgtttgcaatctat

SEQ ID NO: 563877 - DNA, 19 bp, Mus musculus
  siRNA target sequence for Pfkp (NM_019703.2,1523-1541).
cagatgcattcccatagta

SEQ ID NO: 563878 - DNA, 19 bp, Mus musculus
  siRNA target sequence for Pfkp (NM_019703.2,1528-1546).
gcattcccatagtatcaat

SEQ ID NO: 563879 - DNA, 19 bp, Mus musculus
  siRNA target sequence for Pfkp (NM_019703.2,1539-1557).
gtatcaatgcccttctgat

SEQ ID NO: 563880 - DNA, 19 bp, Mus musculus
  siRNA target sequence for Pfkp (NM_019703.2,1543-1561).
caatgcccttctgatcatt

SEQ ID NO: 563881 - DNA, 19 bp, Mus musculus
  siRNA target sequence for Pfkp (NM_019703.2,1670-1688).
gtgccgggttccgatttca

SEQ ID NO: 563882 - DNA, 19 bp, Mus musculus
  siRNA target sequence for Pfkp (NM_019703.2,1726-1744).
cacgtgcgaccgcattaaa

SEQ ID NO: 563883 - DNA, 19 bp, Mus musculus
  siRNA target sequence for Pfkp (NM_019703.2,1728-1746).
cgtgcgaccgcattaaaca

SEQ ID NO: 563884 - DNA, 19 bp, Mus musculus
  siRNA target sequence for Pfkp (NM_019703.2,1869-1887).
catttgatatcggagattt

SEQ ID NO: 563885 - DNA, 19 bp, Mus musculus
  siRNA target sequence for Pfkp (NM_019703.2,1900-1918).
cgtgcacttgacagagaaa

SEQ ID NO: 563886 - DNA, 19 bp, Mus musculus
  siRNA target sequence for Pfkp (NM_019703.2,1942-1960).
cctcgtactcagaaacgaa

SEQ ID NO: 563887 - DNA, 19 bp, Mus musculus
  siRNA target sequence for Pfkp (NM_019703.2,1943-1961).
ctcgtactcagaaacgaaa

SEQ ID NO: 563888 - DNA, 19 bp, Mus musculus
  siRNA target sequence for Pfkp (NM_019703.2,1957-1975).
cgaaagctgcagtgtaaat

SEQ ID NO: 563889 - DNA, 19 bp, Mus musculus
  siRNA target sequence for Pfkp (NM_019703.2,1958-1976).
gaaagctgcagtgtaaatt

SEQ ID NO: 563890 - DNA, 19 bp, Mus musculus
  siRNA target sequence for Pfkp (NM_019703.2,2072-2090).
gcaccgtctccattcgata

SEQ ID NO: 563891 - DNA, 19 bp, Mus musculus
  siRNA target sequence for Pfkp (NM_019703.2,2076-2094).
cgtctccattcgataggaa

SEQ ID NO: 563892 - DNA, 19 bp, Mus musculus
  siRNA target sequence for Pfkp (NM_019703.2,2092-2110).
gaactttggaaccaagatt

SEQ ID NO: 563893 - DNA, 19 bp, Mus musculus
  siRNA target sequence for Pfkp (NM_019703.2,2095-2113).
ctttggaaccaagatttct

SEQ ID NO: 563894 - DNA, 19 bp, Mus musculus
  siRNA target sequence for Pfkp (NM_019703.2,2130-2148).
ggatctcggccaaactgaa

SEQ ID NO: 563895 - DNA, 19 bp, Mus musculus
  siRNA target sequence for Pfkp (NM_019703.2,2177-2195).
gttagcgatgattccattt

SEQ ID NO: 563896 - DNA, 19 bp, Mus musculus
  siRNA target sequence for Pfkp (NM_019703.2,2181-2199).
gcgatgattccatttgtgt

SEQ ID NO: 563897 - DNA, 19 bp, Mus musculus
  siRNA target sequence for Pfkp (NM_019703.2,2317-2335).
gaagatcttggccaagtat

SEQ ID NO: 563898 - DNA, 19 bp, Mus musculus
  siRNA target sequence for Pfkp (NM_019703.2,2344-2362).
ctatgacatgtctgattca

SEQ ID NO: 563899 - DNA, 19 bp, Mus musculus
  siRNA target sequence for Pgm2 (NM_028132.2,127-145).
ggaagcgagtgaaggtttt

SEQ ID NO: 563900 - DNA, 19 bp, Mus musculus
  siRNA target sequence for Pgm2 (NM_028132.2,358-376).
cttgcatcatccgaaaaat

SEQ ID NO: 563901 - DNA, 19 bp, Mus musculus
  siRNA target sequence for Pgm2 (NM_028132.2,362-380).
catcatccgaaaaatcaaa

SEQ ID NO: 563902 - DNA, 19 bp, Mus musculus
  siRNA target sequence for Pgm2 (NM_028132.2,511-529).
gcaagacaatcgaagaata

SEQ ID NO: 563903 - DNA, 19 bp, Mus musculus
  siRNA target sequence for Pgm2 (NM_028132.2,512-530).
caagacaatcgaagaatat

SEQ ID NO: 563904 - DNA, 19 bp, Mus musculus
  siRNA target sequence for Pgm2 (NM_028132.2,649-667).
caatgctgagaaacatctt

SEQ ID NO: 563905 - DNA, 19 bp, Mus musculus
  siRNA target sequence for Pgm2 (NM_028132.2,654-672).
ctgagaaacatcttcgatt

SEQ ID NO: 563906 - DNA, 19 bp, Mus musculus
  siRNA target sequence for Pgm2 (NM_028132.2,840-858).
catcccgaccccaatctca

SEQ ID NO: 563907 - DNA, 19 bp, Mus musculus
  siRNA target sequence for Pgm2 (NM_028132.2,1125-1143).
ccaactggctggaagtttt

SEQ ID NO: 563908 - DNA, 19 bp, Mus musculus
  siRNA target sequence for Pgm2 (NM_028132.2,1126-1144).
caactggctggaagttttt

SEQ ID NO: 563909 - DNA, 19 bp, Mus musculus
  siRNA target sequence for Pgm2 (NM_028132.2,1198-1216).
ggaccggttcggaccatat

SEQ ID NO: 563910 - DNA, 19 bp, Mus musculus
  siRNA target sequence for Pgm2 (NM_028132.2,1208-1226).
ggaccatatccgagagaaa

SEQ ID NO: 563911 - DNA, 19 bp, Mus musculus
  siRNA target sequence for Pgm2 (NM_028132.2,1211-1229).
ccatatccgagagaaagat

SEQ ID NO: 563912 - DNA, 19 bp, Mus musculus
  siRNA target sequence for Pgm2 (NM_028132.2,1543-1561).
cagatggttctcgtatcat

SEQ ID NO: 563913 - DNA, 19 bp, Mus musculus
  siRNA target sequence for Pgm2 (NM_028132.2,1545-1563).
gatggttctcgtatcatct

SEQ ID NO: 563914 - DNA, 19 bp, Mus musculus
  siRNA target sequence for Pgm2 (NM_028132.2,1548-1566).
ggttctcgtatcatcttca

SEQ ID NO: 563915 - DNA, 19 bp, Mus musculus
  siRNA target sequence for Pgm2 (NM_028132.2,1593-1611).
gctaccatccggctgtata

SEQ ID NO: 563916 - DNA, 19 bp, Mus musculus
  siRNA target sequence for Pgm2 (NM_028132.2,1594-1612).
ctaccatccggctgtatat

SEQ ID NO: 563917 - DNA, 19 bp, Mus musculus
  siRNA target sequence for Pgm2 (NM_028132.2,1597-1615).
ccatccggctgtatattga

SEQ ID NO: 563918 - DNA, 19 bp, Mus musculus
  siRNA target sequence for Pklr (NM_013631.1,86-104).
gatctttaagtcccaaaaa

SEQ ID NO: 563919 - DNA, 19 bp, Mus musculus
  siRNA target sequence for Pklr (NM_013631.1,97-115).
cccaaaaagacttagcaaa

SEQ ID NO: 563920 - DNA, 19 bp, Mus musculus
  siRNA target sequence for Pklr (NM_013631.1,559-577).
cggaggtggaaattgtgaa

SEQ ID NO: 563921 - DNA, 19 bp, Mus musculus
  siRNA target sequence for Pklr (NM_013631.1,616-634).
ggacaaggggcgatgcaaa

SEQ ID NO: 563922 - DNA, 19 bp, Mus musculus
  siRNA target sequence for Pklr (NM_013631.1,643-661).
gggtggactaccacaatat

SEQ ID NO: 563923 - DNA, 19 bp, Mus musculus
  siRNA target sequence for Pklr (NM_013631.1,645-663).
gtggactaccacaatatca

SEQ ID NO: 563924 - DNA, 19 bp, Mus musculus
  siRNA target sequence for Pklr (NM_013631.1,715-733).
ccttagtggtgcggaaaat

SEQ ID NO: 563925 - DNA, 19 bp, Mus musculus
  siRNA target sequence for Pklr (NM_013631.1,716-734).
cttagtggtgcggaaaatt

SEQ ID NO: 563926 - DNA, 19 bp, Mus musculus
  siRNA target sequence for Pklr (NM_013631.1,829-847).
ggctatcagagcaagatct

SEQ ID NO: 563927 - DNA, 19 bp, Mus musculus
  siRNA target sequence for Pklr (NM_013631.1,835-853).
cagagcaagatcttttgga

SEQ ID NO: 563928 - DNA, 19 bp, Mus musculus
  siRNA target sequence for Pklr (NM_013631.1,954-972).
ggacggggcatcaaaatta

SEQ ID NO: 563929 - DNA, 19 bp, Mus musculus
  siRNA target sequence for Pklr (NM_013631.1,955-973).
gacggggcatcaaaattat

SEQ ID NO: 563930 - DNA, 19 bp, Mus musculus
  siRNA target sequence for Pklr (NM_013631.1,957-975).
cggggcatcaaaattatca

SEQ ID NO: 563931 - DNA, 19 bp, Mus musculus
  siRNA target sequence for Pklr (NM_013631.1,997-1015).
gcgtgaagaagtttgatga

SEQ ID NO: 563932 - DNA, 19 bp, Mus musculus
  siRNA target sequence for Pklr (NM_013631.1,1439-1457).
ctgtgccgcagccatcatt

SEQ ID NO: 563933 - DNA, 19 bp, Mus musculus
  siRNA target sequence for Pklr (NM_013631.1,1441-1459).
gtgccgcagccatcattgt

SEQ ID NO: 563934 - DNA, 19 bp, Mus musculus
  siRNA target sequence for Pklr (NM_013631.1,1609-1627).
ctgtctgggcagatgatgt

SEQ ID NO: 563935 - DNA, 19 bp, Mus musculus
  siRNA target sequence for Pklr (NM_013631.1,1649-1667).
catcgaaagtggaaagctt

SEQ ID NO: 563936 - DNA, 19 bp, Mus musculus
  siRNA target sequence for Pklr (NM_013631.1,1746-1764).
cgggtgctgaccatatcct

SEQ ID NO: 563937 - DNA, 19 bp, Mus musculus
  siRNA target sequence for Smpd2 (NM_009213.1,326-344).
ctctacggctgagagtttt

SEQ ID NO: 563938 - DNA, 19 bp, Mus musculus
  siRNA target sequence for Smpd2 (NM_009213.1,328-346).
ctacggctgagagttttca

SEQ ID NO: 563939 - DNA, 19 bp, Mus musculus
  siRNA target sequence for Smpd2 (NM_009213.1,366-384).
cccctacctgagcaaacat

SEQ ID NO: 563940 - DNA, 19 bp, Mus musculus
  siRNA target sequence for Smpd2 (NM_009213.1,367-385).
ccctacctgagcaaacata

SEQ ID NO: 563941 - DNA, 19 bp, Mus musculus
  siRNA target sequence for Smpd2 (NM_009213.1,399-417).
gaagcgcttgggagacttt

SEQ ID NO: 563942 - DNA, 19 bp, Mus musculus
  siRNA target sequence for Smpd2 (NM_009213.1,403-421).
cgcttgggagactttctga

SEQ ID NO: 563943 - DNA, 19 bp, Mus musculus
  siRNA target sequence for Smpd2 (NM_009213.1,404-422).
gcttgggagactttctgaa

SEQ ID NO: 563944 - DNA, 19 bp, Mus musculus
  siRNA target sequence for Smpd2 (NM_009213.1,511-529).
ccagatgcacactacttca

SEQ ID NO: 563945 - DNA, 19 bp, Mus musculus
  siRNA target sequence for Smpd2 (NM_009213.1,525-543).
cttcagaagcgggatgata

SEQ ID NO: 563946 - DNA, 19 bp, Mus musculus
  siRNA target sequence for Smpd2 (NM_009213.1,598-616).
gtctacagtctgaatggtt

SEQ ID NO: 563947 - DNA, 19 bp, Mus musculus
  siRNA target sequence for Smpd2 (NM_009213.1,669-687).
gctggtgctccgtctaagt

SEQ ID NO: 563948 - DNA, 19 bp, Mus musculus
  siRNA target sequence for Smpd2 (NM_009213.1,704-722).
cctacgtgactcatctaca

SEQ ID NO: 563949 - DNA, 19 bp, Mus musculus
  siRNA target sequence for Smpd2 (NM_009213.1,705-723).
ctacgtgactcatctacat

SEQ ID NO: 563950 - DNA, 19 bp, Mus musculus
  siRNA target sequence for Smpd2 (NM_009213.1,1005-1023).
gtctggtatccggattgat

SEQ ID NO: 563951 - DNA, 19 bp, Mus musculus
  siRNA target sequence for Smpd2 (NM_009213.1,1007-1025).
ctggtatccggattgatta

SEQ ID NO: 563952 - DNA, 19 bp, Mus musculus
  siRNA target sequence for Smpd2 (NM_009213.1,1010-1028).
gtatccggattgattacgt

SEQ ID NO: 563953 - DNA, 19 bp, Mus musculus
  siRNA target sequence for Smpd2 (NM_009213.1,1016-1034).
ggattgattacgtgcttta

SEQ ID NO: 563954 - DNA, 19 bp, Mus musculus
  siRNA target sequence for Smpd2 (NM_009213.1,1059-1077).
ctgctgtgagactctgaaa

SEQ ID NO: 563955 - DNA, 19 bp, Mus musculus
  siRNA target sequence for Smpd2 (NM_009213.1,1130-1148).
ccctcatggctactttgta

SEQ ID NO: 563956 - DNA, 19 bp, Mus musculus
  siRNA target sequence for Smpd2 (NM_009213.1,1131-1149).
cctcatggctactttgtat

SEQ ID NO: 563957 - DNA, 19 bp, Mus musculus
  siRNA target sequence for Smpd2 (NM_009213.1,1201-1219).
gaaaggtccgatttgatca

SEQ ID NO: 563958 - DNA, 19 bp, Mus musculus
  siRNA target sequence for Smpd2 (NM_009213.1,1246-1264).
ctggggctaggcatagcta

SEQ ID NO: 563959 - DNA, 19 bp, Mus musculus
  siRNA target sequence for Smpd2 (NM_009213.1,1248-1266).
ggggctaggcatagctaaa

SEQ ID NO: 563960 - DNA, 19 bp, Mus musculus
  siRNA target sequence for Smpd2 (NM_009213.1,1251-1269).
gctaggcatagctaaagct

SEQ ID NO: 563961 - DNA, 19 bp, Mus musculus
  siRNA target sequence for Sphk1 (NM_011451.1,228-246).
ggaggcagagataaccttt

SEQ ID NO: 563962 - DNA, 19 bp, Mus musculus
  siRNA target sequence for Sphk1 (NM_011451.1,473-491).
ggtacgagcaggtgactaa

SEQ ID NO: 563963 - DNA, 19 bp, Mus musculus
  siRNA target sequence for Sphk1 (NM_011451.1,474-492).
gtacgagcaggtgactaat

SEQ ID NO: 563964 - DNA, 19 bp, Mus musculus
  siRNA target sequence for Sphk1 (NM_011451.1,477-495).
cgagcaggtgactaatgaa

SEQ ID NO: 563965 - DNA, 19 bp, Mus musculus
  siRNA target sequence for Sphk1 (NM_011451.1,493-511).
gaagacctgctcatcaact

SEQ ID NO: 563966 - DNA, 19 bp, Mus musculus
  siRNA target sequence for Sphk1 (NM_011451.1,578-596).
ggctgcggctctattctgt

SEQ ID NO: 563967 - DNA, 19 bp, Mus musculus
  siRNA target sequence for Sphk1 (NM_011451.1,634-652).
ctcgagagtgagaagtaca

SEQ ID NO: 563968 - DNA, 19 bp, Mus musculus
  siRNA target sequence for Sphk1 (NM_011451.1,655-673).
cgcttgggggagattcgtt

SEQ ID NO: 563969 - DNA, 19 bp, Mus musculus
  siRNA target sequence for Sphk1 (NM_011451.1,656-674).
gcttgggggagattcgttt

SEQ ID NO: 563970 - DNA, 19 bp, Mus musculus
  siRNA target sequence for Sphk1 (NM_011451.1,660-678).
gggggagattcgtttcaca

SEQ ID NO: 563971 - DNA, 19 bp, Mus musculus
  siRNA target sequence for Sphk1 (NM_011451.1,941-959).
ctggtgttatgcatctgtt

SEQ ID NO: 563972 - DNA, 19 bp, Mus musculus
  siRNA target sequence for Sphk1 (NM_011451.1,1017-1035).
gaagggcaagcatatggaa

SEQ ID NO: 563973 - DNA, 19 bp, Mus musculus
  siRNA target sequence for Sphk1 (NM_011451.1,1156-1174).
gtgcacccaaactaccttt

SEQ ID NO: 563974 - DNA, 19 bp, Mus musculus
  siRNA target sequence for Sphk1 (NM_025367.3,1076-1094).
gtgaggctggtgttatgca

SEQ ID NO: 563975 - DNA, 19 bp, Mus musculus
  siRNA target sequence for 4921528E07Rik (NM_176845.2,415-433).
ctacagtgacgcaacaaca

SEQ ID NO: 563976 - DNA, 19 bp, Mus musculus
  siRNA target sequence for 4921528E07Rik (NM_176845.2,422-440).
gacgcaacaacatccaaaa

SEQ ID NO: 563977 - DNA, 19 bp, Mus musculus
  siRNA target sequence for 4921528E07Rik (NM_176845.2,424-442).
cgcaacaacatccaaaatt

SEQ ID NO: 563978 - DNA, 19 bp, Mus musculus
  siRNA target sequence for 4921528E07Rik (NM_176845.2,445-463).
gagaaccgttacccaaaaa

SEQ ID NO: 563979 - DNA, 19 bp, Mus musculus
  siRNA target sequence for 4921528E07Rik (NM_176845.2,541-559).
gccgtcgcagacttctcat

SEQ ID NO: 563980 - DNA, 19 bp, Mus musculus
  siRNA target sequence for 4921528E07Rik (NM_176845.2,542-560).
ccgtcgcagacttctcata

SEQ ID NO: 563981 - DNA, 19 bp, Mus musculus
  siRNA target sequence for 4921528E07Rik (NM_176845.2,543-561).
cgtcgcagacttctcatat

SEQ ID NO: 563982 - DNA, 19 bp, Mus musculus
  siRNA target sequence for 4921528E07Rik (NM_176845.2,555-573).
ctcatatcgtgtttgttgt

SEQ ID NO: 563983 - DNA, 19 bp, Mus musculus
  siRNA target sequence for 4921528E07Rik (NM_176845.2,689-707).
gaatttctgcctgttgaat

SEQ ID NO: 563984 - DNA, 19 bp, Mus musculus
  siRNA target sequence for 4921528E07Rik (NM_176845.2,699-717).
ctgttgaatggcgatcaaa

SEQ ID NO: 563985 - DNA, 19 bp, Mus musculus
  siRNA target sequence for 4921528E07Rik (NM_176845.2,708-726).
ggcgatcaaagcttactct

SEQ ID NO: 563986 - DNA, 19 bp, Mus musculus
  siRNA target sequence for 4921528E07Rik (NM_176845.2,709-727).
gcgatcaaagcttactctt

SEQ ID NO: 563987 - DNA, 19 bp, Mus musculus
  siRNA target sequence for 4921528E07Rik (NM_176845.2,732-750).
gagacacagttgattccat

SEQ ID NO: 563988 - DNA, 19 bp, Mus musculus
  siRNA target sequence for 4921528E07Rik (NM_176845.2,832-850).
cagggatgagctagttaaa

SEQ ID NO: 563989 - DNA, 19 bp, Mus musculus
  siRNA target sequence for 4921528E07Rik (NM_176845.2,857-875).
cagcaagagctgaatcgat

SEQ ID NO: 563990 - DNA, 19 bp, Mus musculus
  siRNA target sequence for 4921528E07Rik (NM_176845.2,859-877).
gcaagagctgaatcgatta

SEQ ID NO: 563991 - DNA, 19 bp, Mus musculus
  siRNA target sequence for 4921528E07Rik (NM_176845.2,860-878).
caagagctgaatcgattat

SEQ ID NO: 563992 - DNA, 19 bp, Mus musculus
  siRNA target sequence for 4921528E07Rik (NM_176845.2,863-881).
gagctgaatcgattatatt

SEQ ID NO: 563993 - DNA, 19 bp, Mus musculus
  siRNA target sequence for 4921528E07Rik (NM_176845.2,872-890).
cgattatattcccttttct

SEQ ID NO: 563994 - DNA, 19 bp, Mus musculus
  siRNA target sequence for 4921528E07Rik (NM_176845.2,894-912).
cccggaatccagactttga

SEQ ID NO: 563995 - DNA, 19 bp, Mus musculus
  siRNA target sequence for 4921528E07Rik (NM_176845.2,895-913).
ccggaatccagactttgaa

SEQ ID NO: 563996 - DNA, 19 bp, Mus musculus
  siRNA target sequence for 4921528E07Rik (NM_176845.2,921-939).
ggggtaaagtctcaatagt

SEQ ID NO: 563997 - DNA, 19 bp, Mus musculus
  siRNA target sequence for 4921528E07Rik (NM_176845.2,923-941).
ggtaaagtctcaatagtgt

SEQ ID NO: 563998 - DNA, 19 bp, Mus musculus
  siRNA target sequence for 4921528E07Rik (NM_176845.2,933-951).
caatagtgtcccattcctt

SEQ ID NO: 563999 - DNA, 19 bp, Mus musculus
  siRNA target sequence for 4921528E07Rik (NM_176845.2,944-962).
cattccttggggtgtgtaa

SEQ ID NO: 564000 - DNA, 19 bp, Mus musculus
  siRNA target sequence for 4921528E07Rik (NM_176845.2,949-967).
cttggggtgtgtaatcact

SEQ ID NO: 564001 - DNA, 19 bp, Mus musculus
  siRNA target sequence for 4921528E07Rik (NM_176845.2,988-1006).
gaatccaggtggactctat

SEQ ID NO: 564002 - DNA, 19 bp, Mus musculus
  siRNA target sequence for 4921528E07Rik (NM_176845.2,1045-1063).
gcggtggatgagctatgaa

SEQ ID NO: 564003 - DNA, 19 bp, Mus musculus
  siRNA target sequence for 4921528E07Rik (NM_176845.2,1073-1091).
cttcttgacgagctctata

SEQ ID NO: 564004 - DNA, 19 bp, Mus musculus
  siRNA target sequence for 4921528E07Rik (NM_176845.2,1076-1094).
cttgacgagctctatataa

SEQ ID NO: 564005 - DNA, 19 bp, Mus musculus
  siRNA target sequence for 4921528E07Rik (NM_176845.2,1079-1097).
gacgagctctatataacaa

SEQ ID NO: 564006 - DNA, 19 bp, Mus musculus
  siRNA target sequence for 4921528E07Rik (NM_176845.2,1099-1117).
gcgacggctgagggaaata

SEQ ID NO: 564007 - DNA, 19 bp, Mus musculus
  siRNA target sequence for 4921528E07Rik (NM_176845.2,1141-1159).
ggcgccatccatatcacaa

SEQ ID NO: 564008 - DNA, 19 bp, Mus musculus
  siRNA target sequence for 4921528E07Rik (NM_176845.2,1142-1160).
gcgccatccatatcacaaa

SEQ ID NO: 564009 - DNA, 19 bp, Mus musculus
  siRNA target sequence for 4921528E07Rik (NM_176845.2,1144-1162).
gccatccatatcacaaaca

SEQ ID NO: 564010 - DNA, 19 bp, Mus musculus
  siRNA target sequence for 4921528E07Rik (NM_176845.2,1157-1175).
caaacacctgccttaaaat

SEQ ID NO: 564011 - DNA, 19 bp, Mus musculus
  siRNA target sequence for 4921528E07Rik (NM_176845.2,1203-1221).
gatctccgctagcagtttt

SEQ ID NO: 564012 - DNA, 19 bp, Mus musculus
  siRNA target sequence for 4921528E07Rik (NM_176845.2,1234-1252).
cggcatccgaccaggaaat

SEQ ID NO: 564013 - DNA, 19 bp, Mus musculus
  siRNA target sequence for 4921528E07Rik (NM_176845.2,1235-1253).
ggcatccgaccaggaaatt

SEQ ID NO: 564014 - DNA, 19 bp, Mus musculus
  siRNA target sequence for 4921528E07Rik (NM_176845.2,1237-1255).
catccgaccaggaaattct

SEQ ID NO: 564015 - DNA, 19 bp, Mus musculus
  siRNA target sequence for 4921528E07Rik (NM_176845.2,1288-1306).
ctgtaaccgcttactaaat

SEQ ID NO: 564016 - DNA, 19 bp, Mus musculus
  siRNA target sequence for 4921528E07Rik (NM_176845.2,1290-1308).
gtaaccgcttactaaatat

SEQ ID NO: 564017 - DNA, 19 bp, Mus musculus
  siRNA target sequence for 4921528E07Rik (NM_176845.2,1336-1354).
cagattagaaccgttgatt

SEQ ID NO: 564018 - DNA, 19 bp, Mus musculus
  siRNA target sequence for 4921528E07Rik (NM_176845.2,1338-1356).
gattagaaccgttgatttt

SEQ ID NO: 564019 - DNA, 19 bp, Mus musculus
  siRNA target sequence for 4921528E07Rik (NM_176845.2,1347-1365).
cgttgattttgaaacacta

SEQ ID NO: 564020 - DNA, 19 bp, Mus musculus
  siRNA target sequence for 4921528E07Rik (NM_176845.2,1407-1425).
caaaccctctaccttatga

SEQ ID NO: 564021 - DNA, 19 bp, Mus musculus
  siRNA target sequence for 4921528E07Rik (NM_176845.2,1415-1433).
ctaccttatgagcatatga

SEQ ID NO: 564022 - DNA, 19 bp, Mus musculus
  siRNA target sequence for 4921528E07Rik (NM_176845.2,1424-1442).
gagcatatgaagccaaatt

SEQ ID NO: 564023 - DNA, 19 bp, Mus musculus
  siRNA target sequence for 4921528E07Rik (NM_176845.2,1511-1529).
gtgacctcccccgtcttat

SEQ ID NO: 564024 - DNA, 19 bp, Mus musculus
  siRNA target sequence for 4921528E07Rik (NM_176845.2,1513-1531).
gacctcccccgtcttatct

SEQ ID NO: 564025 - DNA, 19 bp, Mus musculus
  siRNA target sequence for 4921528E07Rik (NM_176845.2,1535-1553).
cgccactatggagaatcta

SEQ ID NO: 564026 - DNA, 19 bp, Mus musculus
  siRNA target sequence for 4921528E07Rik (NM_176845.2,1538-1556).
cactatggagaatctataa

SEQ ID NO: 564027 - DNA, 19 bp, Mus musculus
  siRNA target sequence for 4921528E07Rik (NM_176845.2,1540-1558).
ctatggagaatctataact

SEQ ID NO: 564028 - DNA, 19 bp, Mus musculus
  siRNA target sequence for 4921528E07Rik (NM_176845.2,1583-1601).
ggggctgctagcattggaa

SEQ ID NO: 564029 - DNA, 19 bp, Mus musculus
  siRNA target sequence for 4921528E07Rik (NM_176845.2,1613-1631).
ggaatgttgttctcaagat

SEQ ID NO: 564030 - DNA, 19 bp, Mus musculus
  siRNA target sequence for 4921528E07Rik (NM_176845.2,1654-1672).
gccgtctgagccatctaaa

SEQ ID NO: 564031 - DNA, 19 bp, Mus musculus
  siRNA target sequence for 4921528E07Rik (NM_176845.2,1763-1781).
ctcgactccgcatatttca

SEQ ID NO: 564032 - DNA, 19 bp, Mus musculus
  siRNA target sequence for 4921528E07Rik (NM_176845.2,1765-1783).
cgactccgcatatttcaga

SEQ ID NO: 564033 - DNA, 19 bp, Mus musculus
  siRNA target sequence for 4921528E07Rik (NM_176845.2,1904-1922).
gtggagagccgctattggt

SEQ ID NO: 564034 - DNA, 19 bp, Mus musculus
  siRNA target sequence for Atox1 (NM_009720.2,128-146).
gagtggagttcaacattga

SEQ ID NO: 564035 - DNA, 19 bp, Mus musculus
  siRNA target sequence for Bsn (NM_007567.1,533-551).
cccccagccagccaaactt

SEQ ID NO: 564036 - DNA, 19 bp, Mus musculus
  siRNA target sequence for Bsn (NM_007567.1,1072-1090).
caggcgagcacccttatgt

SEQ ID NO: 564037 - DNA, 19 bp, Mus musculus
  siRNA target sequence for Bsn (NM_007567.1,1074-1092).
ggcgagcacccttatgtct

SEQ ID NO: 564038 - DNA, 19 bp, Mus musculus
  siRNA target sequence for Bsn (NM_007567.1,1475-1493).
gcaacctgtgtggctttaa

SEQ ID NO: 564039 - DNA, 19 bp, Mus musculus
  siRNA target sequence for Bsn (NM_007567.1,1532-1550).
gtctgaactgccaaactaa

SEQ ID NO: 564040 - DNA, 19 bp, Mus musculus
  siRNA target sequence for Bsn (NM_007567.1,1847-1865).
gcagcgcccaggaaaagaa

SEQ ID NO: 564041 - DNA, 19 bp, Mus musculus
  siRNA target sequence for Bsn (NM_007567.1,2029-2047).
ccagtccccaagccttatt

SEQ ID NO: 564042 - DNA, 19 bp, Mus musculus
  siRNA target sequence for Bsn (NM_007567.1,2124-2142).
cgagatcacaggtgttgta

SEQ ID NO: 564043 - DNA, 19 bp, Mus musculus
  siRNA target sequence for Bsn (NM_007567.1,2201-2219).
cctcggagctccacaaagt

SEQ ID NO: 564044 - DNA, 19 bp, Mus musculus
  siRNA target sequence for Bsn (NM_007567.1,2373-2391).
ggaactgggggacattcta

SEQ ID NO: 564045 - DNA, 19 bp, Mus musculus
  siRNA target sequence for Bsn (NM_007567.1,2572-2590).
cggcgacagatcctagaaa

SEQ ID NO: 564046 - DNA, 19 bp, Mus musculus
  siRNA target sequence for Bsn (NM_007567.1,2573-2591).
ggcgacagatcctagaaat

SEQ ID NO: 564047 - DNA, 19 bp, Mus musculus
  siRNA target sequence for Bsn (NM_007567.1,2641-2659).
cgaggcctggccaaacaca

SEQ ID NO: 564048 - DNA, 19 bp, Mus musculus
  siRNA target sequence for Bsn (NM_007567.1,2712-2730).
gaggcgccttccccataat

SEQ ID NO: 564049 - DNA, 19 bp, Mus musculus
  siRNA target sequence for Bsn (NM_007567.1,2807-2825).
gaggtctccgacgttttaa

SEQ ID NO: 564050 - DNA, 19 bp, Mus musculus
  siRNA target sequence for Bsn (NM_007567.1,2809-2827).
ggtctccgacgttttaaaa

SEQ ID NO: 564051 - DNA, 19 bp, Mus musculus
  siRNA target sequence for Bsn (NM_007567.1,2812-2830).
ctccgacgttttaaaacca

SEQ ID NO: 564052 - DNA, 19 bp, Mus musculus
  siRNA target sequence for Bsn (NM_007567.1,2838-2856).
caacagcacgggtagctat

SEQ ID NO: 564053 - DNA, 19 bp, Mus musculus
  siRNA target sequence for Bsn (NM_007567.1,2982-3000).
ggcctccacacctagctat

SEQ ID NO: 564054 - DNA, 19 bp, Mus musculus
  siRNA target sequence for Bsn (NM_007567.1,3216-3234).
ggaacagcagcgaattcga

SEQ ID NO: 564055 - DNA, 19 bp, Mus musculus
  siRNA target sequence for Bsn (NM_007567.1,3217-3235).
gaacagcagcgaattcgaa

SEQ ID NO: 564056 - DNA, 19 bp, Mus musculus
  siRNA target sequence for Bsn (NM_007567.1,3318-3336).
cctgtcacccattgaagat

SEQ ID NO: 564057 - DNA, 19 bp, Mus musculus
  siRNA target sequence for Bsn (NM_007567.1,3723-3741).
cacccaagaccatgactat

SEQ ID NO: 564058 - DNA, 19 bp, Mus musculus
  siRNA target sequence for Bsn (NM_007567.1,3920-3938).
catacatggacccaatgaa

SEQ ID NO: 564059 - DNA, 19 bp, Mus musculus
  siRNA target sequence for Bsn (NM_007567.1,3930-3948).
cccaatgaagcaaaatggt

SEQ ID NO: 564060 - DNA, 19 bp, Mus musculus
  siRNA target sequence for Bsn (NM_007567.1,4025-4043).
gcagcggtggccgagttat

SEQ ID NO: 564061 - DNA, 19 bp, Mus musculus
  siRNA target sequence for Bsn (NM_007567.1,4053-4071).
ccgagtcactcagcatttt

SEQ ID NO: 564062 - DNA, 19 bp, Mus musculus
  siRNA target sequence for Bsn (NM_007567.1,4061-4079).
ctcagcattttgcaaaaga

SEQ ID NO: 564063 - DNA, 19 bp, Mus musculus
  siRNA target sequence for Bsn (NM_007567.1,4190-4208).
gtccgacacgagggtatat

SEQ ID NO: 564064 - DNA, 19 bp, Mus musculus
  siRNA target sequence for Bsn (NM_007567.1,4192-4210).
ccgacacgagggtatatga

SEQ ID NO: 564065 - DNA, 19 bp, Mus musculus
  siRNA target sequence for Bsn (NM_007567.1,4194-4212).
gacacgagggtatatgact

SEQ ID NO: 564066 - DNA, 19 bp, Mus musculus
  siRNA target sequence for Bsn (NM_007567.1,4291-4309).
gctaactatgggtctcaaa

SEQ ID NO: 564067 - DNA, 19 bp, Mus musculus
  siRNA target sequence for Bsn (NM_007567.1,4408-4426).
cagccttctcggggatatt

SEQ ID NO: 564068 - DNA, 19 bp, Mus musculus
  siRNA target sequence for Bsn (NM_007567.1,4410-4428).
gccttctcggggatattct

SEQ ID NO: 564069 - DNA, 19 bp, Mus musculus
  siRNA target sequence for Bsn (NM_007567.1,4411-4429).
ccttctcggggatattctt

SEQ ID NO: 564070 - DNA, 19 bp, Mus musculus
  siRNA target sequence for Bsn (NM_007567.1,4412-4430).
cttctcggggatattctta

SEQ ID NO: 564071 - DNA, 19 bp, Mus musculus
  siRNA target sequence for Bsn (NM_007567.1,4415-4433).
ctcggggatattcttactt

SEQ ID NO: 564072 - DNA, 19 bp, Mus musculus
  siRNA target sequence for Bsn (NM_007567.1,4417-4435).
cggggatattcttacttta

SEQ ID NO: 564073 - DNA, 19 bp, Mus musculus
  siRNA target sequence for Bsn (NM_007567.1,4661-4679).
cccaggaggcccctattat

SEQ ID NO: 564074 - DNA, 19 bp, Mus musculus
  siRNA target sequence for Bsn (NM_007567.1,4909-4927).
gccctccctgctgaaaaca

SEQ ID NO: 564075 - DNA, 19 bp, Mus musculus
  siRNA target sequence for Bsn (NM_007567.1,4912-4930).
ctccctgctgaaaacatct

SEQ ID NO: 564076 - DNA, 19 bp, Mus musculus
  siRNA target sequence for Bsn (NM_007567.1,5330-5348).
cgcaggtcaagcaagtaga

SEQ ID NO: 564077 - DNA, 19 bp, Mus musculus
  siRNA target sequence for Bsn (NM_007567.1,5404-5422).
gctaagtttgccaggtata

SEQ ID NO: 564078 - DNA, 19 bp, Mus musculus
  siRNA target sequence for Bsn (NM_007567.1,5405-5423).
ctaagtttgccaggtataa

SEQ ID NO: 564079 - DNA, 19 bp, Mus musculus
  siRNA target sequence for Bsn (NM_007567.1,5450-5468).
ccagaagggacattctgat

SEQ ID NO: 564080 - DNA, 19 bp, Mus musculus
  siRNA target sequence for Bsn (NM_007567.1,6152-6170).
gtcaccccacagacctttt

SEQ ID NO: 564081 - DNA, 19 bp, Mus musculus
  siRNA target sequence for Bsn (NM_007567.1,6580-6598).
gcagccgatggcatgatct

SEQ ID NO: 564082 - DNA, 19 bp, Mus musculus
  siRNA target sequence for Bsn (NM_007567.1,6581-6599).
cagccgatggcatgatcta

SEQ ID NO: 564083 - DNA, 19 bp, Mus musculus
  siRNA target sequence for Bsn (NM_007567.1,6683-6701).
gcatgtacaggccttatgt

SEQ ID NO: 564084 - DNA, 19 bp, Mus musculus
  siRNA target sequence for Bsn (NM_007567.1,6684-6702).
catgtacaggccttatgta

SEQ ID NO: 564085 - DNA, 19 bp, Mus musculus
  siRNA target sequence for Bsn (NM_007567.1,6738-6756).
gacccgtgtgcccatgatt

SEQ ID NO: 564086 - DNA, 19 bp, Mus musculus
  siRNA target sequence for Bsn (NM_007567.1,6931-6949).
cgtgaagaacccttttcca

SEQ ID NO: 564087 - DNA, 19 bp, Mus musculus
  siRNA target sequence for Bsn (NM_007567.1,7156-7174).
gaacgggtagagttggaaa

SEQ ID NO: 564088 - DNA, 19 bp, Mus musculus
  siRNA target sequence for Bsn (NM_007567.1,7669-7687).
ggccgtagtggcatcaaga

SEQ ID NO: 564089 - DNA, 19 bp, Mus musculus
  siRNA target sequence for Bsn (NM_007567.1,7670-7688).
gccgtagtggcatcaagaa

SEQ ID NO: 564090 - DNA, 19 bp, Mus musculus
  siRNA target sequence for Bsn (NM_007567.1,7671-7689).
ccgtagtggcatcaagaaa

SEQ ID NO: 564091 - DNA, 19 bp, Mus musculus
  siRNA target sequence for Bsn (NM_007567.1,8113-8131).
ccaaaggtggagattgtca

SEQ ID NO: 564092 - DNA, 19 bp, Mus musculus
  siRNA target sequence for Bsn (NM_007567.1,8121-8139).
ggagattgtcaggtacata

SEQ ID NO: 564093 - DNA, 19 bp, Mus musculus
  siRNA target sequence for Bsn (NM_007567.1,8288-8306).
ccctgggcagatttgagaa

SEQ ID NO: 564094 - DNA, 19 bp, Mus musculus
  siRNA target sequence for Bsn (NM_007567.1,8491-8509).
gtgagtccccagaagcaat

SEQ ID NO: 564095 - DNA, 19 bp, Mus musculus
  siRNA target sequence for Bsn (NM_007567.1,9015-9033).
ccgtgactacccaccttta

SEQ ID NO: 564096 - DNA, 19 bp, Mus musculus
  siRNA target sequence for Bsn (NM_007567.1,9107-9125).
cacccgctggccagtatgt

SEQ ID NO: 564097 - DNA, 19 bp, Mus musculus
  siRNA target sequence for Bsn (NM_007567.1,9227-9245).
gtagtggaccaactcaaaa

SEQ ID NO: 564098 - DNA, 19 bp, Mus musculus
  siRNA target sequence for Bsn (NM_007567.1,9233-9251).
gaccaactcaaaatggatt

SEQ ID NO: 564099 - DNA, 19 bp, Mus musculus
  siRNA target sequence for Bsn (NM_007567.1,9490-9508).
cagaaagttcccaccaatt

SEQ ID NO: 564100 - DNA, 19 bp, Mus musculus
  siRNA target sequence for Bsn (NM_007567.1,9702-9720).
gaatgttcctcgaaactat

SEQ ID NO: 564101 - DNA, 19 bp, Mus musculus
  siRNA target sequence for Bsn (NM_007567.1,9706-9724).
gttcctcgaaactatgtga

SEQ ID NO: 564102 - DNA, 19 bp, Mus musculus
  siRNA target sequence for Bsn (NM_007567.1,9968-9986).
ggccaagcacccactatta

SEQ ID NO: 564103 - DNA, 19 bp, Mus musculus
  siRNA target sequence for Bsn (NM_007567.1,10117-10135).
ggcatggagcaaaagatct

SEQ ID NO: 564104 - DNA, 19 bp, Mus musculus
  siRNA target sequence for Bsn (NM_007567.1,10253-10271).
cctatgggctcaagaagaa

SEQ ID NO: 564105 - DNA, 19 bp, Mus musculus
  siRNA target sequence for Bsn (NM_007567.1,10691-10709).
gtgaggagggctacatgtt

SEQ ID NO: 564106 - DNA, 19 bp, Mus musculus
  siRNA target sequence for Bsn (NM_007567.1,10765-10783).
gagacagactggtttgata

SEQ ID NO: 564107 - DNA, 19 bp, Mus musculus
  siRNA target sequence for Bsn (NM_007567.1,10865-10883).
ggcacagctaccatgacta

SEQ ID NO: 564108 - DNA, 19 bp, Mus musculus
  siRNA target sequence for Bsn (NM_007567.1,10904-10922).
gcctatggcctcatgatga

SEQ ID NO: 564109 - DNA, 19 bp, Mus musculus
  siRNA target sequence for Bsn (NM_007567.1,11129-11147).
gctctgctgattattcaca

SEQ ID NO: 564110 - DNA, 19 bp, Mus musculus
  siRNA target sequence for Bsn (NM_007567.1,11723-11741).
gagagagtgtattctctaa

SEQ ID NO: 564111 - DNA, 19 bp, Mus musculus
  siRNA target sequence for Dld (NM_007861.2,104-122).
ccatttcaatcggatatct

SEQ ID NO: 564112 - DNA, 19 bp, Mus musculus
  siRNA target sequence for Dld (NM_007861.2,160-178).
cttatgcagatcaaccaat

SEQ ID NO: 564113 - DNA, 19 bp, Mus musculus
  siRNA target sequence for Dld (NM_007861.2,182-200).
ggctgacgtgacagtgata

SEQ ID NO: 564114 - DNA, 19 bp, Mus musculus
  siRNA target sequence for Dld (NM_007861.2,186-204).
gacgtgacagtgataggtt

SEQ ID NO: 564115 - DNA, 19 bp, Mus musculus
  siRNA target sequence for Dld (NM_007861.2,240-258).
gcccagttaggctttaaga

SEQ ID NO: 564116 - DNA, 19 bp, Mus musculus
  siRNA target sequence for Dld (NM_007861.2,242-260).
ccagttaggctttaagaca

SEQ ID NO: 564117 - DNA, 19 bp, Mus musculus
  siRNA target sequence for Dld (NM_007861.2,298-316).
gcttgaacgttggttgtat

SEQ ID NO: 564118 - DNA, 19 bp, Mus musculus
  siRNA target sequence for Dld (NM_007861.2,299-317).
cttgaacgttggttgtatt

SEQ ID NO: 564119 - DNA, 19 bp, Mus musculus
  siRNA target sequence for Dld (NM_007861.2,302-320).
gaacgttggttgtattcct

SEQ ID NO: 564120 - DNA, 19 bp, Mus musculus
  siRNA target sequence for Dld (NM_007861.2,379-397).
catctaggggaattgaaat

SEQ ID NO: 564121 - DNA, 19 bp, Mus musculus
  siRNA target sequence for Dld (NM_007861.2,405-423).
gttcgcttgaatttagaga

SEQ ID NO: 564122 - DNA, 19 bp, Mus musculus
  siRNA target sequence for Dld (NM_007861.2,440-458).
gcattctgcagtaaaagca

SEQ ID NO: 564123 - DNA, 19 bp, Mus musculus
  siRNA target sequence for Dld (NM_007861.2,465-483).
gggggaattgctcacttat

SEQ ID NO: 564124 - DNA, 19 bp, Mus musculus
  siRNA target sequence for Dld (NM_007861.2,466-484).
ggggaattgctcacttatt

SEQ ID NO: 564125 - DNA, 19 bp, Mus musculus
  siRNA target sequence for Dld (NM_007861.2,468-486).
ggaattgctcacttattca

SEQ ID NO: 564126 - DNA, 19 bp, Mus musculus
  siRNA target sequence for Dld (NM_007861.2,469-487).
gaattgctcacttattcaa

SEQ ID NO: 564127 - DNA, 19 bp, Mus musculus
  siRNA target sequence for Dld (NM_007861.2,498-516).
gttgttcacgtcaatggat

SEQ ID NO: 564128 - DNA, 19 bp, Mus musculus
  siRNA target sequence for Dld (NM_007861.2,504-522).
cacgtcaatggatttggaa

SEQ ID NO: 564129 - DNA, 19 bp, Mus musculus
  siRNA target sequence for Dld (NM_007861.2,524-542).
gataaccggcaagaatcaa

SEQ ID NO: 564130 - DNA, 19 bp, Mus musculus
  siRNA target sequence for Dld (NM_007861.2,530-548).
cggcaagaatcaagttaca

SEQ ID NO: 564131 - DNA, 19 bp, Mus musculus
  siRNA target sequence for Dld (NM_007861.2,603-621).
gctacgggctcagaagtta

SEQ ID NO: 564132 - DNA, 19 bp, Mus musculus
  siRNA target sequence for Dld (NM_007861.2,634-652).
gaatcacgatcgatgaaga

SEQ ID NO: 564133 - DNA, 19 bp, Mus musculus
  siRNA target sequence for Dld (NM_007861.2,638-656).
cacgatcgatgaagatact

SEQ ID NO: 564134 - DNA, 19 bp, Mus musculus
  siRNA target sequence for Dld (NM_007861.2,640-658).
cgatcgatgaagatactat

SEQ ID NO: 564135 - DNA, 19 bp, Mus musculus
  siRNA target sequence for Dld (NM_007861.2,641-659).
gatcgatgaagatactata

SEQ ID NO: 564136 - DNA, 19 bp, Mus musculus
  siRNA target sequence for Dld (NM_007861.2,645-663).
gatgaagatactatagtgt

SEQ ID NO: 564137 - DNA, 19 bp, Mus musculus
  siRNA target sequence for Dld (NM_007861.2,667-685).
ctacaggagctttatcctt

SEQ ID NO: 564138 - DNA, 19 bp, Mus musculus
  siRNA target sequence for Dld (NM_007861.2,670-688).
caggagctttatccttaaa

SEQ ID NO: 564139 - DNA, 19 bp, Mus musculus
  siRNA target sequence for Dld (NM_007861.2,771-789).
gatgtgacagcagttgaat

SEQ ID NO: 564140 - DNA, 19 bp, Mus musculus
  siRNA target sequence for Dld (NM_007861.2,798-816).
catgtgggtggaattggaa

SEQ ID NO: 564141 - DNA, 19 bp, Mus musculus
  siRNA target sequence for Dld (NM_007861.2,855-873).
cagaggcaaggatttaagt

SEQ ID NO: 564142 - DNA, 19 bp, Mus musculus
  siRNA target sequence for Dld (NM_007861.2,864-882).
ggatttaagtttaaactga

SEQ ID NO: 564143 - DNA, 19 bp, Mus musculus
  siRNA target sequence for Dld (NM_007861.2,952-970).
gtggtaaagctgaagttat

SEQ ID NO: 564144 - DNA, 19 bp, Mus musculus
  siRNA target sequence for Dld (NM_007861.2,1047-1065).
gaactagatcccaaaggta

SEQ ID NO: 564145 - DNA, 19 bp, Mus musculus
  siRNA target sequence for Dld (NM_007861.2,1062-1080).
ggtagaattccagtcaata

SEQ ID NO: 564146 - DNA, 19 bp, Mus musculus
  siRNA target sequence for Dld (NM_007861.2,1267-1285).
gcaaatcggaagaacagtt

SEQ ID NO: 564147 - DNA, 19 bp, Mus musculus
  siRNA target sequence for Dld (NM_007861.2,1293-1311).
gagggtattgagttcaaaa

SEQ ID NO: 564148 - DNA, 19 bp, Mus musculus
  siRNA target sequence for Dld (NM_007861.2,1332-1350).
gcaaacagcagagctaaaa

SEQ ID NO: 564149 - DNA, 19 bp, Mus musculus
  siRNA target sequence for Dld (NM_007861.2,1409-1427).
gctgggagcacatattcta

SEQ ID NO: 564150 - DNA, 19 bp, Mus musculus
  siRNA target sequence for Dld (NM_007861.2,1512-1530).
catgcgcatccgaccttat

SEQ ID NO: 564151 - DNA, 19 bp, Mus musculus
  siRNA target sequence for Dld (NM_007861.2,1516-1534).
cgcatccgaccttatcaga

SEQ ID NO: 564152 - DNA, 19 bp, Mus musculus
  siRNA target sequence for Dld (NM_007861.2,1561-1579).
cagcttttggaaaaccaat

SEQ ID NO: 564153 - DNA, 19 bp, Mus musculus
  siRNA target sequence for Gsr (NM_010344.3,542-560).
cgtgaatgttggatgtgta

SEQ ID NO: 564154 - DNA, 19 bp, Mus musculus
  siRNA target sequence for Gsr (NM_010344.3,553-571).
gatgtgtacccaaaaaggt

SEQ ID NO: 564155 - DNA, 19 bp, Mus musculus
  siRNA target sequence for Gsr (NM_010344.3,585-603).
gcagtgcactcggaattca

SEQ ID NO: 564156 - DNA, 19 bp, Mus musculus
  siRNA target sequence for Gsr (NM_010344.3,614-632).
cgtggattacggctttcaa

SEQ ID NO: 564157 - DNA, 19 bp, Mus musculus
  siRNA target sequence for Gsr (NM_010344.3,615-633).
gtggattacggctttcaaa

SEQ ID NO: 564158 - DNA, 19 bp, Mus musculus
  siRNA target sequence for Gsr (NM_010344.3,635-653).
ctgtgagggtaaattcagt

SEQ ID NO: 564159 - DNA, 19 bp, Mus musculus
  siRNA target sequence for Gsr (NM_010344.3,692-710).
ccgcctgaacaccatctat

SEQ ID NO: 564160 - DNA, 19 bp, Mus musculus
  siRNA target sequence for Gsr (NM_010344.3,695-713).
cctgaacaccatctatcaa

SEQ ID NO: 564161 - DNA, 19 bp, Mus musculus
  siRNA target sequence for Gsr (NM_010344.3,724-742).
ccaagtctcacatagaaat

SEQ ID NO: 564162 - DNA, 19 bp, Mus musculus
  siRNA target sequence for Gsr (NM_010344.3,725-743).
caagtctcacatagaaatt

SEQ ID NO: 564163 - DNA, 19 bp, Mus musculus
  siRNA target sequence for Gsr (NM_010344.3,778-796).
ggcccacggtggaagtcaa

SEQ ID NO: 564164 - DNA, 19 bp, Mus musculus
  siRNA target sequence for Gsr (NM_010344.3,779-797).
gcccacggtggaagtcaat

SEQ ID NO: 564165 - DNA, 19 bp, Mus musculus
  siRNA target sequence for Gsr (NM_010344.3,789-807).
gaagtcaatgggaaaaagt

SEQ ID NO: 564166 - DNA, 19 bp, Mus musculus
  siRNA target sequence for Gsr (NM_010344.3,996-1014).
ggctccaagacatctctta

SEQ ID NO: 564167 - DNA, 19 bp, Mus musculus
  siRNA target sequence for Gsr (NM_010344.3,997-1015).
gctccaagacatctcttat

SEQ ID NO: 564168 - DNA, 19 bp, Mus musculus
  siRNA target sequence for Gsr (NM_010344.3,1011-1029).
cttatgatcaggcatgata

SEQ ID NO: 564169 - DNA, 19 bp, Mus musculus
  siRNA target sequence for Gsr (NM_010344.3,1016-1034).
gatcaggcatgataaggta

SEQ ID NO: 564170 - DNA, 19 bp, Mus musculus
  siRNA target sequence for Gsr (NM_010344.3,1026-1044).
gataaggtactgagaaatt

SEQ ID NO: 564171 - DNA, 19 bp, Mus musculus
  siRNA target sequence for Gsr (NM_010344.3,1031-1049).
ggtactgagaaattttgat

SEQ ID NO: 564172 - DNA, 19 bp, Mus musculus
  siRNA target sequence for Gsr (NM_010344.3,1187-1205).
gcccaccacgaccatgatt

SEQ ID NO: 564173 - DNA, 19 bp, Mus musculus
  siRNA target sequence for Gsr (NM_010344.3,1237-1255).
gacgggacccaaattctaa

SEQ ID NO: 564174 - DNA, 19 bp, Mus musculus
  siRNA target sequence for Gsr (NM_010344.3,1256-1274).
gggcctgaatctgaataaa

SEQ ID NO: 564175 - DNA, 19 bp, Mus musculus
  siRNA target sequence for Gsr (NM_010344.3,1258-1276).
gcctgaatctgaataaagt

SEQ ID NO: 564176 - DNA, 19 bp, Mus musculus
  siRNA target sequence for Gsr (NM_010344.3,1311-1329).
gtagacgaattccagaata

SEQ ID NO: 564177 - DNA, 19 bp, Mus musculus
  siRNA target sequence for Gsr (NM_010344.3,1314-1332).
gacgaattccagaatacca

SEQ ID NO: 564178 - DNA, 19 bp, Mus musculus
  siRNA target sequence for Gsr (NM_010344.3,1322-1340).
ccagaataccaatgtcaaa

SEQ ID NO: 564179 - DNA, 19 bp, Mus musculus
  siRNA target sequence for Gsr (NM_010344.3,1523-1541).
cgaagctgttcataagtat

SEQ ID NO: 564180 - DNA, 19 bp, Mus musculus
  siRNA target sequence for Mt2 (NM_008630.1,111-129).
gctggcgcctgcaaatgca

SEQ ID NO: 564181 - DNA, 19 bp, Mus musculus
  siRNA target sequence for Mt2 (NM_008630.1,116-134).
cgcctgcaaatgcaaacaa

SEQ ID NO: 564182 - DNA, 19 bp, Mus musculus
  siRNA target sequence for Mt2 (NM_008630.1,117-135).
gcctgcaaatgcaaacaat

SEQ ID NO: 564183 - DNA, 19 bp, Mus musculus
  siRNA target sequence for Mt2 (NM_008630.1,128-146).
caaacaatgcaaatgtact

SEQ ID NO: 564184 - DNA, 19 bp, Mus musculus
  siRNA target sequence for Mt4 (NM_008631.1,39-57).
ctgcatctgcggagataat

SEQ ID NO: 564185 - DNA, 19 bp, Mus musculus
  siRNA target sequence for Mt4 (NM_008631.1,45-63).
ctgcggagataattgcaaa

SEQ ID NO: 564186 - DNA, 19 bp, Mus musculus
  siRNA target sequence for Pitpnm (NM_008851.1,600-618).
gagcctggacgagtatcaa

SEQ ID NO: 564187 - DNA, 19 bp, Mus musculus
  siRNA target sequence for Pitpnm (NM_008851.1,602-620).
gcctggacgagtatcaagt

SEQ ID NO: 564188 - DNA, 19 bp, Mus musculus
  siRNA target sequence for Pitpnm (NM_008851.1,721-739).
ggaggcaacgggcagtata

SEQ ID NO: 564189 - DNA, 19 bp, Mus musculus
  siRNA target sequence for Pitpnm (NM_008851.1,725-743).
gcaacgggcagtatacaca

SEQ ID NO: 564190 - DNA, 19 bp, Mus musculus
  siRNA target sequence for Pitpnm (NM_008851.1,1006-1024).
gtggccccaggagaataca

SEQ ID NO: 564191 - DNA, 19 bp, Mus musculus
  siRNA target sequence for Pitpnm (NM_008851.1,1118-1136).
ctctcatgtgtgcctataa

SEQ ID NO: 564192 - DNA, 19 bp, Mus musculus
  siRNA target sequence for Pitpnm (NM_008851.1,1251-1269).
gcaagatgagtggatagaa

SEQ ID NO: 564193 - DNA, 19 bp, Mus musculus
  siRNA target sequence for Pitpnm (NM_008851.1,1560-1578).
gtggcgcatgcagaacatt

SEQ ID NO: 564194 - DNA, 19 bp, Mus musculus
  siRNA target sequence for Pitpnm (NM_008851.1,1598-1616).
gctccgaggaagaattctt

SEQ ID NO: 564195 - DNA, 19 bp, Mus musculus
  siRNA target sequence for Pitpnm (NM_008851.1,1949-1967).
ccgtcacccgagtccattt

SEQ ID NO: 564196 - DNA, 19 bp, Mus musculus
  siRNA target sequence for Pitpnm (NM_008851.1,2334-2352).
ccgtgggagcatgaacaat

SEQ ID NO: 564197 - DNA, 19 bp, Mus musculus
  siRNA target sequence for Pitpnm (NM_008851.1,2336-2354).
gtgggagcatgaacaatga

SEQ ID NO: 564198 - DNA, 19 bp, Mus musculus
  siRNA target sequence for Pitpnm (NM_008851.1,2355-2373).
gatgctctcccctgaagtt

SEQ ID NO: 564199 - DNA, 19 bp, Mus musculus
  siRNA target sequence for Pitpnm (NM_008851.1,2609-2627).
ctgctcgcctggacttcaa

SEQ ID NO: 564200 - DNA, 19 bp, Mus musculus
  siRNA target sequence for Pitpnm (NM_008851.1,2723-2741).
cagcctgcgagcagatcta

SEQ ID NO: 564201 - DNA, 19 bp, Mus musculus
  siRNA target sequence for Pitpnm (NM_008851.1,2726-2744).
cctgcgagcagatctacaa

SEQ ID NO: 564202 - DNA, 19 bp, Mus musculus
  siRNA target sequence for Pitpnm (NM_008851.1,3023-3041).
ccaccagcgaggttgttaa

SEQ ID NO: 564203 - DNA, 19 bp, Mus musculus
  siRNA target sequence for Pitpnm (NM_008851.1,3066-3084).
caagcggatcgactattca

SEQ ID NO: 564204 - DNA, 19 bp, Mus musculus
  siRNA target sequence for Pitpnm (NM_008851.1,3155-3173).
gggaatcagcggatgtagt

SEQ ID NO: 564205 - DNA, 19 bp, Mus musculus
  siRNA target sequence for Pitpnm (NM_008851.1,3165-3183).
ggatgtagtggccttcatt

SEQ ID NO: 564206 - DNA, 19 bp, Mus musculus
  siRNA target sequence for Pitpnm (NM_008851.1,3329-3347).
gtgacaccgtggtatgtga

SEQ ID NO: 564207 - DNA, 19 bp, Mus musculus
  siRNA target sequence for Pitpnm (NM_008851.1,3364-3382).
ctgaatgggcgcttcatgt

SEQ ID NO: 564208 - DNA, 19 bp, Mus musculus
  siRNA target sequence for Pitpnm (NM_008851.1,3472-3490).
ggcacagaggtcactaaca

SEQ ID NO: 564209 - DNA, 19 bp, Mus musculus
  siRNA target sequence for Pitpnm (NM_008851.1,3727-3745).
caggactctggctacttga

SEQ ID NO: 564210 - DNA, 19 bp, Mus musculus
  siRNA target sequence for Pitpnm (NM_008851.1,3734-3752).
ctggctacttgattgtgta

SEQ ID NO: 564211 - DNA, 19 bp, Mus musculus
  siRNA target sequence for Pitpnm (NM_008851.1,3738-3756).
ctacttgattgtgtatgta

SEQ ID NO: 564212 - DNA, 19 bp, Mus musculus
  siRNA target sequence for Pitpnm (NM_008851.1,4114-4132).
gccgctctggccaagagta

SEQ ID NO: 564213 - DNA, 19 bp, Mus musculus
  siRNA target sequence for Rdgb2 (NM_011256.1,358-376).
ggcggctccgggcaataca

SEQ ID NO: 564214 - DNA, 19 bp, Mus musculus
  siRNA target sequence for Rdgb2 (NM_011256.1,377-395).
cccacaaggtgtatcatgt

SEQ ID NO: 564215 - DNA, 19 bp, Mus musculus
  siRNA target sequence for Rdgb2 (NM_011256.1,529-547).
gacattgaaaccttttata

SEQ ID NO: 564216 - DNA, 19 bp, Mus musculus
  siRNA target sequence for Rdgb2 (NM_011256.1,648-666).
ccccagtgagtataagaca

SEQ ID NO: 564217 - DNA, 19 bp, Mus musculus
  siRNA target sequence for Rdgb2 (NM_011256.1,728-746).
ggattcaggagtacaagaa

SEQ ID NO: 564218 - DNA, 19 bp, Mus musculus
  siRNA target sequence for Rdgb2 (NM_011256.1,964-982).
cgcaaaatggcccagtttt

SEQ ID NO: 564219 - DNA, 19 bp, Mus musculus
  siRNA target sequence for Rdgb2 (NM_011256.1,987-1005).
ggaaggcccctcagaacta

SEQ ID NO: 564220 - DNA, 19 bp, Mus musculus
  siRNA target sequence for Rdgb2 (NM_011256.1,992-1010).
gcccctcagaactaagcaa

SEQ ID NO: 564221 - DNA, 19 bp, Mus musculus
  siRNA target sequence for Rdgb2 (NM_011256.1,1148-1166).
gcccctcccgacatagcat

SEQ ID NO: 564222 - DNA, 19 bp, Mus musculus
  siRNA target sequence for Rdgb2 (NM_011256.1,1336-1354).
gaatcacaagatgaaatct

SEQ ID NO: 564223 - DNA, 19 bp, Mus musculus
  siRNA target sequence for Rdgb2 (NM_011256.1,1528-1546).
cagggggacaccaatacta

SEQ ID NO: 564224 - DNA, 19 bp, Mus musculus
  siRNA target sequence for Rdgb2 (NM_011256.1,1770-1788).
ggcagttgctacagtgatt

SEQ ID NO: 564225 - DNA, 19 bp, Mus musculus
  siRNA target sequence for Rdgb2 (NM_011256.1,1830-1848).
ggaaggtgtgaccttcaat

SEQ ID NO: 564226 - DNA, 19 bp, Mus musculus
  siRNA target sequence for Rdgb2 (NM_011256.1,1881-1899).
gggcatcctggcatttgat

SEQ ID NO: 564227 - DNA, 19 bp, Mus musculus
  siRNA target sequence for Rdgb2 (NM_011256.1,1892-1910).
catttgatgccttatgcta

SEQ ID NO: 564228 - DNA, 19 bp, Mus musculus
  siRNA target sequence for Rdgb2 (NM_011256.1,2079-2097).
cctgagccgcagcaacatt

SEQ ID NO: 564229 - DNA, 19 bp, Mus musculus
  siRNA target sequence for Rdgb2 (NM_011256.1,2411-2429).
cgtgtcagcaagtgtacaa

SEQ ID NO: 564230 - DNA, 19 bp, Mus musculus
  siRNA target sequence for Rdgb2 (NM_011256.1,2746-2764).
ggacagaagcggattgact

SEQ ID NO: 564231 - DNA, 19 bp, Mus musculus
  siRNA target sequence for Rdgb2 (NM_011256.1,2747-2765).
gacagaagcggattgacta

SEQ ID NO: 564232 - DNA, 19 bp, Mus musculus
  siRNA target sequence for Rdgb2 (NM_011256.1,3005-3023).
ccaaccaccggatcaatga

SEQ ID NO: 564233 - DNA, 19 bp, Mus musculus
  siRNA target sequence for Rdgb2 (NM_011256.1,3233-3251).
gcgtctaccccatcaagat

SEQ ID NO: 564234 - DNA, 19 bp, Mus musculus
  siRNA target sequence for Rdgb2 (NM_011256.1,3488-3506).
ggctggctcagcacaattt

SEQ ID NO: 564235 - DNA, 19 bp, Mus musculus
  siRNA target sequence for Rdgb2 (NM_011256.1,3630-3648).
gaaggatgtcgcagtctat

SEQ ID NO: 564236 - DNA, 19 bp, Mus musculus
  siRNA target sequence for Rdgb2 (NM_011256.1,3634-3652).
gatgtcgcagtctataact

SEQ ID NO: 564237 - DNA, 19 bp, Mus musculus
  siRNA target sequence for Sod3 (NM_011435.2,863-881).
ggacgacctgggtaaaggt

SEQ ID NO: 564238 - DNA, 19 bp, Mus musculus
  siRNA target sequence for Txnrd1 (NM_015762.1,177-195).
ccccctgggtcctatgact

SEQ ID NO: 564239 - DNA, 19 bp, Mus musculus
  siRNA target sequence for Txnrd1 (NM_015762.1,192-210).
gacttcgacctgatcatca

SEQ ID NO: 564240 - DNA, 19 bp, Mus musculus
  siRNA target sequence for Txnrd1 (NM_015762.1,323-341).
cggaggaacgtgtgtgaat

SEQ ID NO: 564241 - DNA, 19 bp, Mus musculus
  siRNA target sequence for Txnrd1 (NM_015762.1,398-416).
gaaagactcgcgcaactat

SEQ ID NO: 564242 - DNA, 19 bp, Mus musculus
  siRNA target sequence for Txnrd1 (NM_015762.1,510-528).
gtagctctccgggagaaaa

SEQ ID NO: 564243 - DNA, 19 bp, Mus musculus
  siRNA target sequence for Txnrd1 (NM_015762.1,574-592).
ggattgtggcgacaaataa

SEQ ID NO: 564244 - DNA, 19 bp, Mus musculus
  siRNA target sequence for Txnrd1 (NM_015762.1,597-615).
ggtaaagaaaaaatctatt

SEQ ID NO: 564245 - DNA, 19 bp, Mus musculus
  siRNA target sequence for Txnrd1 (NM_015762.1,688-706).
gcatcagcagtgatgatct

SEQ ID NO: 564246 - DNA, 19 bp, Mus musculus
  siRNA target sequence for Txnrd1 (NM_015762.1,689-707).
catcagcagtgatgatctt

SEQ ID NO: 564247 - DNA, 19 bp, Mus musculus
  siRNA target sequence for Txnrd1 (NM_015762.1,795-813).
ggcttagacgtcactgtaa

SEQ ID NO: 564248 - DNA, 19 bp, Mus musculus
  siRNA target sequence for Txnrd1 (NM_015762.1,796-814).
gcttagacgtcactgtaat

SEQ ID NO: 564249 - DNA, 19 bp, Mus musculus
  siRNA target sequence for Txnrd1 (NM_015762.1,879-897).
gaagaacatggtatcaagt

SEQ ID NO: 564250 - DNA, 19 bp, Mus musculus
  siRNA target sequence for Txnrd1 (NM_015762.1,882-900).
gaacatggtatcaagttta

SEQ ID NO: 564251 - DNA, 19 bp, Mus musculus
  siRNA target sequence for Txnrd1 (NM_015762.1,905-923).
gcagttcgtcccaacgaaa

SEQ ID NO: 564252 - DNA, 19 bp, Mus musculus
  siRNA target sequence for Txnrd1 (NM_015762.1,906-924).
cagttcgtcccaacgaaaa

SEQ ID NO: 564253 - DNA, 19 bp, Mus musculus
  siRNA target sequence for Txnrd1 (NM_015762.1,911-929).
cgtcccaacgaaaattgaa

SEQ ID NO: 564254 - DNA, 19 bp, Mus musculus
  siRNA target sequence for Txnrd1 (NM_015762.1,916-934).
caacgaaaattgaacagat

SEQ ID NO: 564255 - DNA, 19 bp, Mus musculus
  siRNA target sequence for Txnrd1 (NM_015762.1,992-1010).
gaccatagagggcgaattt

SEQ ID NO: 564256 - DNA, 19 bp, Mus musculus
  siRNA target sequence for Txnrd1 (NM_015762.1,994-1012).
ccatagagggcgaatttaa

SEQ ID NO: 564257 - DNA, 19 bp, Mus musculus
  siRNA target sequence for Txnrd1 (NM_015762.1,1022-1040).
gctggcggtaggaagagat

SEQ ID NO: 564258 - DNA, 19 bp, Mus musculus
  siRNA target sequence for Txnrd1 (NM_015762.1,1025-1043).
ggcggtaggaagagattct

SEQ ID NO: 564259 - DNA, 19 bp, Mus musculus
  siRNA target sequence for Txnrd1 (NM_015762.1,1038-1056).
gattcttgtacgagaacta

SEQ ID NO: 564260 - DNA, 19 bp, Mus musculus
  siRNA target sequence for Txnrd1 (NM_015762.1,1067-1085).
gaccgtgggcgtgaagata

SEQ ID NO: 564261 - DNA, 19 bp, Mus musculus
  siRNA target sequence for Txnrd1 (NM_015762.1,1069-1087).
ccgtgggcgtgaagataaa

SEQ ID NO: 564262 - DNA, 19 bp, Mus musculus
  siRNA target sequence for Txnrd1 (NM_015762.1,1073-1091).
gggcgtgaagataaacgaa

SEQ ID NO: 564263 - DNA, 19 bp, Mus musculus
  siRNA target sequence for Txnrd1 (NM_015762.1,1074-1092).
ggcgtgaagataaacgaaa

SEQ ID NO: 564264 - DNA, 19 bp, Mus musculus
  siRNA target sequence for Txnrd1 (NM_015762.1,1075-1093).
gcgtgaagataaacgaaaa

SEQ ID NO: 564265 - DNA, 19 bp, Mus musculus
  siRNA target sequence for Txnrd1 (NM_015762.1,1076-1094).
cgtgaagataaacgaaaaa

SEQ ID NO: 564266 - DNA, 19 bp, Mus musculus
  siRNA target sequence for Txnrd1 (NM_015762.1,1077-1095).
gtgaagataaacgaaaaaa

SEQ ID NO: 564267 - DNA, 19 bp, Mus musculus
  siRNA target sequence for Txnrd1 (NM_015762.1,1088-1106).
cgaaaaaaccggaaagata

SEQ ID NO: 564268 - DNA, 19 bp, Mus musculus
  siRNA target sequence for Txnrd1 (NM_015762.1,1237-1255).
gctccaatgtcaaatgtga

SEQ ID NO: 564269 - DNA, 19 bp, Mus musculus
  siRNA target sequence for Txnrd1 (NM_015762.1,1247-1265).
caaatgtgactatgacaat

SEQ ID NO: 564270 - DNA, 19 bp, Mus musculus
  siRNA target sequence for Txnrd1 (NM_015762.1,1266-1284).
gtcccaacgactgtattta

SEQ ID NO: 564271 - DNA, 19 bp, Mus musculus
  siRNA target sequence for Txnrd1 (NM_015762.1,1268-1286).
cccaacgactgtatttact

SEQ ID NO: 564272 - DNA, 19 bp, Mus musculus
  siRNA target sequence for Txnrd1 (NM_015762.1,1320-1338).
gaaaaagccgtagagaaat

SEQ ID NO: 564273 - DNA, 19 bp, Mus musculus
  siRNA target sequence for Txnrd1 (NM_015762.1,1359-1377).
gtttaccatagtttctttt

SEQ ID NO: 564274 - DNA, 19 bp, Mus musculus
  siRNA target sequence for Txnrd1 (NM_015762.1,1403-1421).
ccgggataacaacaaatgt

SEQ ID NO: 564275 - DNA, 19 bp, Mus musculus
  siRNA target sequence for Txnrd1 (NM_015762.1,1574-1592).
cccggtctgtgcagagata

SEQ ID NO: 564276 - DNA, 19 bp, Mus musculus
  siRNA target sequence for Txnrd1 (NM_015762.1,1575-1593).
ccggtctgtgcagagatat

SEQ ID NO: 564277 - DNA, 19 bp, Mus musculus
  siRNA target sequence for Txnrd1 (NM_015762.1,1576-1594).
cggtctgtgcagagatatt

SEQ ID NO: 564278 - DNA, 19 bp, Mus musculus
  siRNA target sequence for Txnrd1 (NM_015762.1,1580-1598).
ctgtgcagagatattcaca

SEQ ID NO: 564279 - DNA, 19 bp, Mus musculus
  siRNA target sequence for Txnrd2 (NM_013711.1,426-444).
cagaagccgtgcaaaacca

SEQ ID NO: 564280 - DNA, 19 bp, Mus musculus
  siRNA target sequence for Txnrd2 (NM_013711.1,432-450).
ccgtgcaaaaccatgtgaa

SEQ ID NO: 564281 - DNA, 19 bp, Mus musculus
  siRNA target sequence for Txnrd2 (NM_013711.1,433-451).
cgtgcaaaaccatgtgaaa

SEQ ID NO: 564282 - DNA, 19 bp, Mus musculus
  siRNA target sequence for Txnrd2 (NM_013711.1,489-507).
ggaaagtcaagtactttaa

SEQ ID NO: 564283 - DNA, 19 bp, Mus musculus
  siRNA target sequence for Txnrd2 (NM_013711.1,494-512).
gtcaagtactttaacatca

SEQ ID NO: 564284 - DNA, 19 bp, Mus musculus
  siRNA target sequence for Txnrd2 (NM_013711.1,618-636).
ggtaccccacacaagtcaa

SEQ ID NO: 564285 - DNA, 19 bp, Mus musculus
  siRNA target sequence for Txnrd2 (NM_013711.1,639-657).
gagccctggaatatggaat

SEQ ID NO: 564286 - DNA, 19 bp, Mus musculus
  siRNA target sequence for Txnrd2 (NM_013711.1,644-662).
ctggaatatggaatcacaa

SEQ ID NO: 564287 - DNA, 19 bp, Mus musculus
  siRNA target sequence for Txnrd2 (NM_013711.1,686-704).
gagtcccctgggaaaacgt

SEQ ID NO: 564288 - DNA, 19 bp, Mus musculus
  siRNA target sequence for Txnrd2 (NM_013711.1,809-827).
gaccagcaaatgtcatctt

SEQ ID NO: 564289 - DNA, 19 bp, Mus musculus
  siRNA target sequence for Txnrd2 (NM_013711.1,876-894).
gtgtcccctcccacatcaa

SEQ ID NO: 564290 - DNA, 19 bp, Mus musculus
  siRNA target sequence for Txnrd2 (NM_013711.1,878-896).
gtcccctcccacatcaaaa

SEQ ID NO: 564291 - DNA, 19 bp, Mus musculus
  siRNA target sequence for Txnrd2 (NM_013711.1,880-898).
cccctcccacatcaaaaaa

SEQ ID NO: 564292 - DNA, 19 bp, Mus musculus
  siRNA target sequence for Txnrd2 (NM_013711.1,998-1016).
ccagaaaccaggactttga

SEQ ID NO: 564293 - DNA, 19 bp, Mus musculus
  siRNA target sequence for Txnrd2 (NM_013711.1,1036-1054).
cagtaccaaccctaagaat

SEQ ID NO: 564294 - DNA, 19 bp, Mus musculus
  siRNA target sequence for Txnrd2 (NM_013711.1,1087-1105).
ctctgttccccacatctat

SEQ ID NO: 564295 - DNA, 19 bp, Mus musculus
  siRNA target sequence for Txnrd2 (NM_013711.1,1181-1199).
cggctctttgggaaatcct

SEQ ID NO: 564296 - DNA, 19 bp, Mus musculus
  siRNA target sequence for Txnrd2 (NM_013711.1,1190-1208).
gggaaatcctcaaccttaa

SEQ ID NO: 564297 - DNA, 19 bp, Mus musculus
  siRNA target sequence for Txnrd2 (NM_013711.1,1197-1215).
cctcaaccttaatggatta

SEQ ID NO: 564298 - DNA, 19 bp, Mus musculus
  siRNA target sequence for Txnrd2 (NM_013711.1,1306-1324).
gcatgtagaggtttaccat

SEQ ID NO: 564299 - DNA, 19 bp, Mus musculus
  siRNA target sequence for Txnrd2 (NM_013711.1,1313-1331).
gaggtttaccatgcatatt

SEQ ID NO: 564300 - DNA, 19 bp, Mus musculus
  siRNA target sequence for Txnrd2 (NM_013711.1,1315-1333).
ggtttaccatgcatattat

SEQ ID NO: 564301 - DNA, 19 bp, Mus musculus
  siRNA target sequence for Txnrd2 (NM_013711.1,1316-1334).
gtttaccatgcatattata

SEQ ID NO: 564302 - DNA, 19 bp, Mus musculus
  siRNA target sequence for Txnrd2 (NM_013711.1,1367-1385).
gcatcacagtgctacataa

SEQ ID NO: 564303 - DNA, 19 bp, Mus musculus
  siRNA target sequence for Txnrd2 (NM_013711.1,1368-1386).
catcacagtgctacataaa

SEQ ID NO: 564304 - DNA, 19 bp, Mus musculus
  siRNA target sequence for Txnrd2 (NM_013711.1,1371-1389).
cacagtgctacataaagat

SEQ ID NO: 564305 - DNA, 19 bp, Mus musculus
  siRNA target sequence for Txnrd2 (NM_013711.1,1486-1504).
gtgtggggcttcatatgca

SEQ ID NO: 564306 - DNA, 19 bp, Mus musculus
  siRNA target sequence for Txnrd3 (NM_153162.2,397-415).
cagcacgcgggttaaggaa

SEQ ID NO: 564307 - DNA, 19 bp, Mus musculus
  siRNA target sequence for Txnrd3 (NM_153162.2,407-425).
gttaaggaactcttttcgt

SEQ ID NO: 564308 - DNA, 19 bp, Mus musculus
  siRNA target sequence for Txnrd3 (NM_153162.2,426-444).
ccttgggagtggtctataa

SEQ ID NO: 564309 - DNA, 19 bp, Mus musculus
  siRNA target sequence for Txnrd3 (NM_153162.2,488-506).
gaagtgctgacagaaatca

SEQ ID NO: 564310 - DNA, 19 bp, Mus musculus
  siRNA target sequence for Txnrd3 (NM_153162.2,491-509).
gtgctgacagaaatcagta

SEQ ID NO: 564311 - DNA, 19 bp, Mus musculus
  siRNA target sequence for Txnrd3 (NM_153162.2,519-537).
cggtgcccaatatttttgt

SEQ ID NO: 564312 - DNA, 19 bp, Mus musculus
  siRNA target sequence for Txnrd3 (NM_153162.2,555-573).
gtggatgtgaccgaacttt

SEQ ID NO: 564313 - DNA, 19 bp, Mus musculus
  siRNA target sequence for Txnrd3 (NM_153162.2,577-595).
ggcacatcagaatggttta

SEQ ID NO: 564314 - DNA, 19 bp, Mus musculus
  siRNA target sequence for Txnrd3 (NM_153162.2,614-632).
gatgactcggctcatgatt

SEQ ID NO: 564315 - DNA, 19 bp, Mus musculus
  siRNA target sequence for Txnrd3 (NM_153162.2,629-647).
gattacgacctcatcatca

SEQ ID NO: 564316 - DNA, 19 bp, Mus musculus
  siRNA target sequence for Txnrd3 (NM_153162.2,775-793).
gaacgtaggctgtattcca

SEQ ID NO: 564317 - DNA, 19 bp, Mus musculus
  siRNA target sequence for Txnrd3 (NM_153162.2,820-838).
cctggggcatgctttgcaa

SEQ ID NO: 564318 - DNA, 19 bp, Mus musculus
  siRNA target sequence for Txnrd3 (NM_153162.2,998-1016).
gtggacctgcataaaataa

SEQ ID NO: 564319 - DNA, 19 bp, Mus musculus
  siRNA target sequence for Txnrd3 (NM_153162.2,1034-1052).
gggcaggaaacgttttaca

SEQ ID NO: 564320 - DNA, 19 bp, Mus musculus
  siRNA target sequence for Txnrd3 (NM_153162.2,1053-1071).
cggcttcgaagtttgtcat

SEQ ID NO: 564321 - DNA, 19 bp, Mus musculus
  siRNA target sequence for Txnrd3 (NM_153162.2,1054-1072).
ggcttcgaagtttgtcata

SEQ ID NO: 564322 - DNA, 19 bp, Mus musculus
  siRNA target sequence for Txnrd3 (NM_153162.2,1112-1130).
gataaagagtactgtatta

SEQ ID NO: 564323 - DNA, 19 bp, Mus musculus
  siRNA target sequence for Txnrd3 (NM_153162.2,1180-1198).
cgtaggcgcttcttatgtt

SEQ ID NO: 564324 - DNA, 19 bp, Mus musculus
  siRNA target sequence for Txnrd3 (NM_153162.2,1222-1240).
ggctggtttggggttagat

SEQ ID NO: 564325 - DNA, 19 bp, Mus musculus
  siRNA target sequence for Txnrd3 (NM_153162.2,1224-1242).
ctggtttggggttagatgt

SEQ ID NO: 564326 - DNA, 19 bp, Mus musculus
  siRNA target sequence for Txnrd3 (NM_153162.2,1264-1282).
ccttcttcgtggctttgat

SEQ ID NO: 564327 - DNA, 19 bp, Mus musculus
  siRNA target sequence for Txnrd3 (NM_153162.2,1271-1289).
cgtggctttgatcaagaaa

SEQ ID NO: 564328 - DNA, 19 bp, Mus musculus
  siRNA target sequence for Txnrd3 (NM_153162.2,1305-1323).
gatcctacctggaacaaca

SEQ ID NO: 564329 - DNA, 19 bp, Mus musculus
  siRNA target sequence for Txnrd3 (NM_153162.2,1350-1368).
cccccattttggttcaaca

SEQ ID NO: 564330 - DNA, 19 bp, Mus musculus
  siRNA target sequence for Txnrd3 (NM_153162.2,1353-1371).
ccattttggttcaacagtt

SEQ ID NO: 564331 - DNA, 19 bp, Mus musculus
  siRNA target sequence for Txnrd3 (NM_153162.2,1416-1434).
ccgaaggaccggaaacagt

SEQ ID NO: 564332 - DNA, 19 bp, Mus musculus
  siRNA target sequence for Txnrd3 (NM_153162.2,1417-1435).
cgaaggaccggaaacagta

SEQ ID NO: 564333 - DNA, 19 bp, Mus musculus
  siRNA target sequence for Txnrd3 (NM_153162.2,1431-1449).
cagtagaagggatatacaa

SEQ ID NO: 564334 - DNA, 19 bp, Mus musculus
  siRNA target sequence for Txnrd3 (NM_153162.2,1433-1451).
gtagaagggatatacaaca

SEQ ID NO: 564335 - DNA, 19 bp, Mus musculus
  siRNA target sequence for Txnrd3 (NM_153162.2,1450-1468).
cacggttttgttagcaatt

SEQ ID NO: 564336 - DNA, 19 bp, Mus musculus
  siRNA target sequence for Txnrd3 (NM_153162.2,1453-1471).
ggttttgttagcaattggt

SEQ ID NO: 564337 - DNA, 19 bp, Mus musculus
  siRNA target sequence for Txnrd3 (NM_153162.2,1475-1493).
gactcctgtacaaggaaaa

SEQ ID NO: 564338 - DNA, 19 bp, Mus musculus
  siRNA target sequence for Txnrd3 (NM_153162.2,1477-1495).
ctcctgtacaaggaaaata

SEQ ID NO: 564339 - DNA, 19 bp, Mus musculus
  siRNA target sequence for Txnrd3 (NM_153162.2,1502-1520).
gagaagatcggggtcaaaa

SEQ ID NO: 564340 - DNA, 19 bp, Mus musculus
  siRNA target sequence for Txnrd3 (NM_153162.2,1507-1525).
gatcggggtcaaaatcaat

SEQ ID NO: 564341 - DNA, 19 bp, Mus musculus
  siRNA target sequence for Txnrd3 (NM_153162.2,1512-1530).
gggtcaaaatcaatgagaa

SEQ ID NO: 564342 - DNA, 19 bp, Mus musculus
  siRNA target sequence for Txnrd3 (NM_153162.2,1528-1546).
gaagaatggcaaaatacca

SEQ ID NO: 564343 - DNA, 19 bp, Mus musculus
  siRNA target sequence for Txnrd3 (NM_153162.2,1536-1554).
gcaaaataccagtaaacga

SEQ ID NO: 564344 - DNA, 19 bp, Mus musculus
  siRNA target sequence for Txnrd3 (NM_153162.2,1537-1555).
caaaataccagtaaacgat

SEQ ID NO: 564345 - DNA, 19 bp, Mus musculus
  siRNA target sequence for Txnrd3 (NM_153162.2,1564-1582).
gaccaacgtgcctcatgtt

SEQ ID NO: 564346 - DNA, 19 bp, Mus musculus
  siRNA target sequence for Txnrd3 (NM_153162.2,1566-1584).
ccaacgtgcctcatgttta

SEQ ID NO: 564347 - DNA, 19 bp, Mus musculus
  siRNA target sequence for Txnrd3 (NM_153162.2,1567-1585).
caacgtgcctcatgtttat

SEQ ID NO: 564348 - DNA, 19 bp, Mus musculus
  siRNA target sequence for Txnrd3 (NM_153162.2,1570-1588).
cgtgcctcatgtttatgct

SEQ ID NO: 564349 - DNA, 19 bp, Mus musculus
  siRNA target sequence for Txnrd3 (NM_153162.2,1651-1669).
gctagctcgaagactcttt

SEQ ID NO: 564350 - DNA, 19 bp, Mus musculus
  siRNA target sequence for Txnrd3 (NM_153162.2,1743-1761).
gtggactgtcggaagagaa

SEQ ID NO: 564351 - DNA, 19 bp, Mus musculus
  siRNA target sequence for Txnrd3 (NM_153162.2,1763-1781).
gccatcgaaatgtataaaa

SEQ ID NO: 564352 - DNA, 19 bp, Mus musculus
  siRNA target sequence for Txnrd3 (NM_153162.2,1854-1872).
cctgttatgcaaagataat

SEQ ID NO: 564353 - DNA, 19 bp, Mus musculus
  siRNA target sequence for Txnrd3 (NM_153162.2,1912-1930).
ccttctggggccaaatgct

SEQ ID NO: 564354 - DNA, 19 bp, Mus musculus
  siRNA target sequence for Txnrd3 (NM_153162.2,1920-1938).
ggccaaatgctggtgaaat

SEQ ID NO: 564355 - DNA, 19 bp, Mus musculus
  siRNA target sequence for Txnrd3 (NM_153162.2,1984-2002).
gctactggatgataccatt

SEQ ID NO: 564356 - DNA, 19 bp, Mus musculus
  siRNA target sequence for Txnrd3 (NM_153162.2,2021-2039).
ggtgaggtattcacaacat

SEQ ID NO: 564357 - DNA, 19 bp, Mus musculus
  siRNA target sequence for Txnrd3 (NM_153162.2,2026-2044).
ggtattcacaacattggaa

SEQ ID NO: 564358 - DNA, 19 bp, Mus musculus
  siRNA target sequence for Txnrd3 (NM_153162.2,2034-2052).
caacattggaaatcacaaa

SEQ ID NO: 564359 - DNA, 19 bp, Mus musculus
  siRNA target sequence for Ccl11 (NM_011330.1,55-73).
gctccacagcgcttctatt

SEQ ID NO: 564360 - DNA, 19 bp, Mus musculus
  siRNA target sequence for Ccl11 (NM_011330.1,58-76).
ccacagcgcttctattcct

SEQ ID NO: 564361 - DNA, 19 bp, Mus musculus
  siRNA target sequence for Ccl11 (NM_011330.1,136-154).
cttcctgctgctttatcat

SEQ ID NO: 564362 - DNA, 19 bp, Mus musculus
  siRNA target sequence for Ccl12 (NM_011331.1,66-84).
ccatcagtcctcaggtatt

SEQ ID NO: 564363 - DNA, 19 bp, Mus musculus
  siRNA target sequence for Ccl12 (NM_011331.1,115-133).
cacgtgctgttataatgtt

SEQ ID NO: 564364 - DNA, 19 bp, Mus musculus
  siRNA target sequence for Ccl12 (NM_011331.1,117-135).
cgtgctgttataatgttgt

SEQ ID NO: 564365 - DNA, 19 bp, Mus musculus
  siRNA target sequence for Ccl12 (NM_011331.1,262-280).
gtgggttaagaattccata

SEQ ID NO: 564366 - DNA, 19 bp, Mus musculus
  siRNA target sequence for Ccl12 (NM_011331.1,264-282).
gggttaagaattccataaa

SEQ ID NO: 564367 - DNA, 19 bp, Mus musculus
  siRNA target sequence for Ccl12 (NM_011331.1,276-294).
ccataaaccacttggataa

SEQ ID NO: 564368 - DNA, 19 bp, Mus musculus
  siRNA target sequence for Ccl22 (NM_009137.1,165-183).
cttgctgtggcaattcaga

SEQ ID NO: 564369 - DNA, 19 bp, Mus musculus
  siRNA target sequence for Ccl22 (NM_009137.1,251-269).
ccctctgccatcacgttta

SEQ ID NO: 564370 - DNA, 19 bp, Mus musculus
  siRNA target sequence for Ccl22 (NM_009137.1,309-327).
cctggcgttgttttgataa

SEQ ID NO: 564371 - DNA, 19 bp, Mus musculus
  siRNA target sequence for Ccl22 (NM_009137.1,328-346).
ccgtcaagaaccgagatat

SEQ ID NO: 564372 - DNA, 19 bp, Mus musculus
  siRNA target sequence for Ccl22 (NM_009137.1,361-379).
ggcaggtctgggtgaagaa

SEQ ID NO: 564373 - DNA, 19 bp, Mus musculus
  siRNA target sequence for Ccl24 (NM_019577.2,297-315).
gttcagaggcacatacaaa

SEQ ID NO: 564374 - DNA, 19 bp, Mus musculus
  siRNA target sequence for Ccl28 (NM_020279.2,154-172).
gaggtgtctcatcatgttt

SEQ ID NO: 564375 - DNA, 19 bp, Mus musculus
  siRNA target sequence for Ccl28 (NM_020279.2,242-260).
ctgtcatccttcatgttaa

SEQ ID NO: 564376 - DNA, 19 bp, Mus musculus
  siRNA target sequence for Ccl28 (NM_020279.2,253-271).
catgttaaacgtagaagaa

SEQ ID NO: 564377 - DNA, 19 bp, Mus musculus
  siRNA target sequence for Ccl28 (NM_020279.2,283-301).
ccgcacaatcgtactttga

SEQ ID NO: 564378 - DNA, 19 bp, Mus musculus
  siRNA target sequence for Ccl28 (NM_020279.2,333-351).
gaatggcagagaaaacgta

SEQ ID NO: 564379 - DNA, 19 bp, Mus musculus
  siRNA target sequence for Ccl28 (NM_020279.2,337-355).
ggcagagaaaacgtatgtt

SEQ ID NO: 564380 - DNA, 19 bp, Mus musculus
  siRNA target sequence for Ccl28 (NM_020279.2,339-357).
cagagaaaacgtatgttct

SEQ ID NO: 564381 - DNA, 19 bp, Mus musculus
  siRNA target sequence for Ccl28 (NM_020279.2,348-366).
cgtatgttctgggaaaaaa

SEQ ID NO: 564382 - DNA, 19 bp, Mus musculus
  siRNA target sequence for Ccl3 (NM_011337.1,143-161).
cttctcagcgccatatgga

SEQ ID NO: 564383 - DNA, 19 bp, Mus musculus
  siRNA target sequence for Ccl3 (NM_011337.1,188-206).
ctcctacagccggaagatt

SEQ ID NO: 564384 - DNA, 19 bp, Mus musculus
  siRNA target sequence for Ccl3 (NM_011337.1,211-229).
gccaattcatcgttgacta

SEQ ID NO: 564385 - DNA, 19 bp, Mus musculus
  siRNA target sequence for Ccl3 (NM_011337.1,212-230).
ccaattcatcgttgactat

SEQ ID NO: 564386 - DNA, 19 bp, Mus musculus
  siRNA target sequence for Ccl3 (NM_011337.1,213-231).
caattcatcgttgactatt

SEQ ID NO: 564387 - DNA, 19 bp, Mus musculus
  siRNA target sequence for Ccl3 (NM_011337.1,262-280).
gtgtcattttcctgactaa

SEQ ID NO: 564388 - DNA, 19 bp, Mus musculus
  siRNA target sequence for Ccl3 (NM_011337.1,266-284).
cattttcctgactaagaga

SEQ ID NO: 564389 - DNA, 19 bp, Mus musculus
  siRNA target sequence for Ccl3 (NM_011337.1,312-330).
gagacctgggtccaagaat

SEQ ID NO: 564390 - DNA, 19 bp, Mus musculus
  siRNA target sequence for Ccl4 (NM_013652.1,200-218).
gcagcttcacagaagcttt

SEQ ID NO: 564391 - DNA, 19 bp, Mus musculus
  siRNA target sequence for Ccl4 (NM_013652.1,211-229).
gaagctttgtgatggatta

SEQ ID NO: 564392 - DNA, 19 bp, Mus musculus
  siRNA target sequence for Ccl4 (NM_013652.1,219-237).
gtgatggattactatgaga

SEQ ID NO: 564393 - DNA, 19 bp, Mus musculus
  siRNA target sequence for Ccl5 (NM_013653.1,175-193).
cacgtcaaggagtatttct

SEQ ID NO: 564394 - DNA, 19 bp, Mus musculus
  siRNA target sequence for Ccl5 (NM_013653.1,280-298).
gttcaagaatacatcaact

SEQ ID NO: 564395 - DNA, 19 bp, Mus musculus
  siRNA target sequence for Ccl5 (NM_013653.1,283-301).
caagaatacatcaactatt

SEQ ID NO: 564396 - DNA, 19 bp, Mus musculus
  siRNA target sequence for Ccl6 (NM_009139.1,60-78).
ccaagactgccatttcatt

SEQ ID NO: 564397 - DNA, 19 bp, Mus musculus
  siRNA target sequence for Ccl6 (NM_009139.1,115-133).
cctcatacaagaaatggaa

SEQ ID NO: 564398 - DNA, 19 bp, Mus musculus
  siRNA target sequence for Ccl6 (NM_009139.1,146-164).
cgctataaccctccaataa

SEQ ID NO: 564399 - DNA, 19 bp, Mus musculus
  siRNA target sequence for Ccl6 (NM_009139.1,147-165).
gctataaccctccaataat

SEQ ID NO: 564400 - DNA, 19 bp, Mus musculus
  siRNA target sequence for Ccl6 (NM_009139.1,154-172).
ccctccaataattcatcaa

SEQ ID NO: 564401 - DNA, 19 bp, Mus musculus
  siRNA target sequence for Ccl6 (NM_009139.1,214-232).
cacacagatcccatgtaaa

SEQ ID NO: 564402 - DNA, 19 bp, Mus musculus
  siRNA target sequence for Ccl6 (NM_009139.1,361-379).
gaagcaaggcccaagatct

SEQ ID NO: 564403 - DNA, 19 bp, Mus musculus
  siRNA target sequence for Ccl7 (NM_013654.1,125-143).
ccagatgggcccaatgcat

SEQ ID NO: 564404 - DNA, 19 bp, Mus musculus
  siRNA target sequence for Ccl7 (NM_013654.1,150-168).
gctgctatgtcaagaaaca

SEQ ID NO: 564405 - DNA, 19 bp, Mus musculus
  siRNA target sequence for Ccl7 (NM_013654.1,236-254).
gttatcttcaagacaaaga

SEQ ID NO: 564406 - DNA, 19 bp, Mus musculus
  siRNA target sequence for Ccl7 (NM_013654.1,292-310).
ggtcgaggaggctatagca

SEQ ID NO: 564407 - DNA, 19 bp, Mus musculus
  siRNA target sequence for Ccl7 (NM_013654.1,293-311).
gtcgaggaggctatagcat

SEQ ID NO: 564408 - DNA, 19 bp, Mus musculus
  siRNA target sequence for Ccl7 (NM_013654.1,302-320).
gctatagcatacttagaca

SEQ ID NO: 564409 - DNA, 19 bp, Mus musculus
  siRNA target sequence for Ccl8 (NM_021443.1,158-176).
gctttcatgtactaaagct

SEQ ID NO: 564410 - DNA, 19 bp, Mus musculus
  siRNA target sequence for Ccl8 (NM_021443.1,184-202).
ccccttcgggtgctgaaaa

SEQ ID NO: 564411 - DNA, 19 bp, Mus musculus
  siRNA target sequence for Ccl8 (NM_021443.1,187-205).
cttcgggtgctgaaaagct

SEQ ID NO: 564412 - DNA, 19 bp, Mus musculus
  siRNA target sequence for Ccl8 (NM_021443.1,204-222).
ctacgagagaatcaacaat

SEQ ID NO: 564413 - DNA, 19 bp, Mus musculus
  siRNA target sequence for Ccl9 (NM_011338.1,291-309).
gtttcacatgggctttcaa

SEQ ID NO: 564414 - DNA, 19 bp, Mus musculus
  siRNA target sequence for Ccl9 (NM_011338.1,319-337).
gattgctgcctgtcctata

SEQ ID NO: 564415 - DNA, 19 bp, Mus musculus
  siRNA target sequence for Ccl9 (NM_011338.1,502-520).
ccacggacctacaaacaat

SEQ ID NO: 564416 - DNA, 19 bp, Mus musculus
  siRNA target sequence for Cxcl10 (NM_021274.1,47-65).
ccaagtgctgccgtcattt

SEQ ID NO: 564417 - DNA, 19 bp, Mus musculus
  siRNA target sequence for Cxcl10 (NM_021274.1,48-66).
caagtgctgccgtcatttt

SEQ ID NO: 564418 - DNA, 19 bp, Mus musculus
  siRNA target sequence for Cxcl10 (NM_021274.1,125-143).
cgctgcaactgcatccata

SEQ ID NO: 564419 - DNA, 19 bp, Mus musculus
  siRNA target sequence for Cxcl10 (NM_021274.1,149-167).
gacgggccagtgagaatga

SEQ ID NO: 564420 - DNA, 19 bp, Mus musculus
  siRNA target sequence for Cxcl10 (NM_021274.1,171-189).
ccatagggaagcttgaaat

SEQ ID NO: 564421 - DNA, 19 bp, Mus musculus
  siRNA target sequence for Cxcl10 (NM_021274.1,210-228).
gcccacgtgttgagatcat

SEQ ID NO: 564422 - DNA, 19 bp, Mus musculus
  siRNA target sequence for Cxcl10 (NM_021274.1,211-229).
cccacgtgttgagatcatt

SEQ ID NO: 564423 - DNA, 19 bp, Mus musculus
  siRNA target sequence for Cxcl10 (NM_021274.1,223-241).
gatcattgccacgatgaaa

SEQ ID NO: 564424 - DNA, 19 bp, Mus musculus
  siRNA target sequence for Cxcl10 (NM_021274.1,231-249).
ccacgatgaaaaagaatga

SEQ ID NO: 564425 - DNA, 19 bp, Mus musculus
  siRNA target sequence for Cxcl10 (NM_021274.1,261-279).
gtctgaatccggaatctaa

SEQ ID NO: 564426 - DNA, 19 bp, Mus musculus
  siRNA target sequence for Cxcl10 (NM_021274.1,263-281).
ctgaatccggaatctaaga

SEQ ID NO: 564427 - DNA, 19 bp, Mus musculus
  siRNA target sequence for Cxcl10 (NM_021274.1,272-290).
gaatctaagaccatcaaga

SEQ ID NO: 564428 - DNA, 19 bp, Mus musculus
  siRNA target sequence for Cxcl10 (NM_021274.1,302-320).
gcgtttagccaaaaaaggt

SEQ ID NO: 564429 - DNA, 19 bp, Mus musculus
  siRNA target sequence for Cxcl11 (NM_019494.1,116-134).
ctgctcaaggcttccttat

SEQ ID NO: 564430 - DNA, 19 bp, Mus musculus
  siRNA target sequence for Cxcl11 (NM_019494.1,169-187).
gggatgaaagccgtcaaaa

SEQ ID NO: 564431 - DNA, 19 bp, Mus musculus
  siRNA target sequence for Cxcl11 (NM_019494.1,198-216).
cgagaaagcttctgtaatt

SEQ ID NO: 564432 - DNA, 19 bp, Mus musculus
  siRNA target sequence for Cxcl11 (NM_019494.1,199-217).
gagaaagcttctgtaattt

SEQ ID NO: 564433 - DNA, 19 bp, Mus musculus
  siRNA target sequence for Cxcl11 (NM_019494.1,224-242).
gtaacggctgcgacaaagt

SEQ ID NO: 564434 - DNA, 19 bp, Mus musculus
  siRNA target sequence for Cxcl11 (NM_019494.1,228-246).
cggctgcgacaaagttgaa

SEQ ID NO: 564435 - DNA, 19 bp, Mus musculus
  siRNA target sequence for Cxcl11 (NM_019494.1,230-248).
gctgcgacaaagttgaagt

SEQ ID NO: 564436 - DNA, 19 bp, Mus musculus
  siRNA target sequence for Cxcl11 (NM_019494.1,233-251).
gcgacaaagttgaagtgat

SEQ ID NO: 564437 - DNA, 19 bp, Mus musculus
  siRNA target sequence for Cxcl11 (NM_019494.1,234-252).
cgacaaagttgaagtgatt

SEQ ID NO: 564438 - DNA, 19 bp, Mus musculus
  siRNA target sequence for Cxcl11 (NM_019494.1,244-262).
gaagtgattgttactatga

SEQ ID NO: 564439 - DNA, 19 bp, Mus musculus
  siRNA target sequence for Cxcl11 (NM_019494.1,315-333).
cataatgcaggcaatagaa

SEQ ID NO: 564440 - DNA, 19 bp, Mus musculus
  siRNA target sequence for Cxcl12 (NM_013655.2,207-225).
caacgtcaagcatctgaaa

SEQ ID NO: 564441 - DNA, 19 bp, Mus musculus
  siRNA target sequence for Cxcl12 (NM_013655.2,291-309).
gtgcattgacccgaaatta

SEQ ID NO: 564442 - DNA, 19 bp, Mus musculus
  siRNA target sequence for Cxcl13 (NM_018866.1,107-125).
ccattacacaaacttaaaa

SEQ ID NO: 564443 - DNA, 19 bp, Mus musculus
  siRNA target sequence for Cxcl13 (NM_018866.1,148-166).
caactgttgtcggtctaaa

SEQ ID NO: 564444 - DNA, 19 bp, Mus musculus
  siRNA target sequence for Cxcl13 (NM_018866.1,151-169).
ctgttgtcggtctaaacat

SEQ ID NO: 564445 - DNA, 19 bp, Mus musculus
  siRNA target sequence for Cxcl13 (NM_018866.1,153-171).
gttgtcggtctaaacatca

SEQ ID NO: 564446 - DNA, 19 bp, Mus musculus
  siRNA target sequence for Cxcl13 (NM_018866.1,158-176).
cggtctaaacatcatagat

SEQ ID NO: 564447 - DNA, 19 bp, Mus musculus
  siRNA target sequence for Cxcl13 (NM_018866.1,167-185).
catcatagatcggattcaa

SEQ ID NO: 564448 - DNA, 19 bp, Mus musculus
  siRNA target sequence for Cxcl13 (NM_018866.1,170-188).
catagatcggattcaagtt

SEQ ID NO: 564449 - DNA, 19 bp, Mus musculus
  siRNA target sequence for Cxcl13 (NM_018866.1,211-229).
ccaaaactgaagttgtgat

SEQ ID NO: 564450 - DNA, 19 bp, Mus musculus
  siRNA target sequence for Cxcl13 (NM_018866.1,245-263).
gaaagttatatgtgtgaat

SEQ ID NO: 564451 - DNA, 19 bp, Mus musculus
  siRNA target sequence for Cxcl13 (NM_018866.1,267-285).
cgtgccaaatggttacaaa

SEQ ID NO: 564452 - DNA, 19 bp, Mus musculus
  siRNA target sequence for Cxcl13 (NM_018866.1,271-289).
ccaaatggttacaaagatt

SEQ ID NO: 564453 - DNA, 19 bp, Mus musculus
  siRNA target sequence for Cxcl13 (NM_018866.1,330-348).
caagctccagtgagtaaga

SEQ ID NO: 564454 - DNA, 19 bp, Mus musculus
  siRNA target sequence for Cxcl14 (NM_019568.1,480-498).
gctacagcgacgtgaagaa

SEQ ID NO: 564455 - DNA, 19 bp, Mus musculus
  siRNA target sequence for Cxcl15 (NM_011339.1,81-99).
gctacgatgtctgtgtatt

SEQ ID NO: 564456 - DNA, 19 bp, Mus musculus
  siRNA target sequence for Cxcl15 (NM_011339.1,100-118).
caggaacactctgaattca

SEQ ID NO: 564457 - DNA, 19 bp, Mus musculus
  siRNA target sequence for Cxcl15 (NM_011339.1,117-135).
cattcctctcaaactcatt

SEQ ID NO: 564458 - DNA, 19 bp, Mus musculus
  siRNA target sequence for Cxcl15 (NM_011339.1,184-202).
gtgatagcagtcccaaaaa

SEQ ID NO: 564459 - DNA, 19 bp, Mus musculus
  siRNA target sequence for Cxcl15 (NM_011339.1,196-214).
ccaaaaaatgggagtatga

SEQ ID NO: 564460 - DNA, 19 bp, Mus musculus
  siRNA target sequence for Cxcl15 (NM_011339.1,197-215).
caaaaaatgggagtatgat

SEQ ID NO: 564461 - DNA, 19 bp, Mus musculus
  siRNA target sequence for Cxcl15 (NM_011339.1,207-225).
gagtatgatttgtttggat

SEQ ID NO: 564462 - DNA, 19 bp, Mus musculus
  siRNA target sequence for Cxcl15 (NM_011339.1,247-265).
gctactgttggcccaatta

SEQ ID NO: 564463 - DNA, 19 bp, Mus musculus
  siRNA target sequence for Cxcl15 (NM_011339.1,251-269).
ctgttggcccaattactaa

SEQ ID NO: 564464 - DNA, 19 bp, Mus musculus
  siRNA target sequence for Cxcl15 (NM_011339.1,253-271).
gttggcccaattactaaca

SEQ ID NO: 564465 - DNA, 19 bp, Mus musculus
  siRNA target sequence for Cxcl15 (NM_011339.1,281-299).
ctgaggacctcaaacaaaa

SEQ ID NO: 564466 - DNA, 19 bp, Mus musculus
  siRNA target sequence for Cxcl15 (NM_011339.1,311-329).
cggcaatgaagcttctgta

SEQ ID NO: 564467 - DNA, 19 bp, Mus musculus
  siRNA target sequence for Cxcl15 (NM_011339.1,318-336).
gaagcttctgtatagtgtt

SEQ ID NO: 564468 - DNA, 19 bp, Mus musculus
  siRNA target sequence for Cxcl15 (NM_011339.1,339-357).
gcatgaaaagcctctatat

SEQ ID NO: 564469 - DNA, 19 bp, Mus musculus
  siRNA target sequence for Cxcl15 (NM_011339.1,343-361).
gaaaagcctctatatcttt

SEQ ID NO: 564470 - DNA, 19 bp, Mus musculus
  siRNA target sequence for Cxcl16 (NM_023158.3,173-191).
cagtgtcgctggaagttgt

SEQ ID NO: 564471 - DNA, 19 bp, Mus musculus
  siRNA target sequence for Cxcl16 (NM_023158.3,252-270).
cgaaaatacctgaaagcat

SEQ ID NO: 564472 - DNA, 19 bp, Mus musculus
  siRNA target sequence for Cxcl16 (NM_023158.3,273-291).
catcgttgtccattcttta

SEQ ID NO: 564473 - DNA, 19 bp, Mus musculus
  siRNA target sequence for Cxcl16 (NM_023158.3,338-356).
ccagtgggtccgtgaacta

SEQ ID NO: 564474 - DNA, 19 bp, Mus musculus
  siRNA target sequence for Cxcl16 (NM_023158.3,479-497).
gagcacccctgcacatagt

SEQ ID NO: 564475 - DNA, 19 bp, Mus musculus
  siRNA target sequence for Cxcl16 (NM_023158.3,797-815).
ctggtacactcctgttgaa

SEQ ID NO: 564476 - DNA, 19 bp, Mus musculus
  siRNA target sequence for Cxcl2 (NM_009140.1,255-273).
ctctcaagggcggtcaaaa

SEQ ID NO: 564477 - DNA, 19 bp, Mus musculus
  siRNA target sequence for Cxcl2 (NM_009140.1,259-277).
caagggcggtcaaaaagtt

SEQ ID NO: 564478 - DNA, 19 bp, Mus musculus
  siRNA target sequence for Cxcl2 (NM_009140.1,316-334).
ccaaaagatactgaacaaa

SEQ ID NO: 564479 - DNA, 19 bp, Mus musculus
  siRNA target sequence for Cxcl4 (NM_019932.1,191-209).
gaaagcgatggagatctta

SEQ ID NO: 564480 - DNA, 19 bp, Mus musculus
  siRNA target sequence for Cxcl4 (NM_019932.1,234-252).
cctctgggatccatcttaa

SEQ ID NO: 564481 - DNA, 19 bp, Mus musculus
  siRNA target sequence for Cxcl4 (NM_019932.1,349-367).
ccggcaagcacccctatat

SEQ ID NO: 564482 - DNA, 19 bp, Mus musculus
  siRNA target sequence for Cxcl4 (NM_019932.1,350-368).
cggcaagcacccctatata

SEQ ID NO: 564483 - DNA, 19 bp, Mus musculus
  siRNA target sequence for Cxcl4 (NM_019932.1,351-369).
ggcaagcacccctatataa

SEQ ID NO: 564484 - DNA, 19 bp, Mus musculus
  siRNA target sequence for Cxcl4 (NM_019932.1,353-371).
caagcacccctatataaga

SEQ ID NO: 564485 - DNA, 19 bp, Mus musculus
  siRNA target sequence for Cxcl4 (NM_019932.1,360-378).
ccctatataagaaagtaat

SEQ ID NO: 564486 - DNA, 19 bp, Mus musculus
  siRNA target sequence for Cxcl4 (NM_019932.1,362-380).
ctatataagaaagtaatca

SEQ ID NO: 564487 - DNA, 19 bp, Mus musculus
  siRNA target sequence for Cxcl5 (NM_009141.1,235-253).
ccgtaactccaaaaattaa

SEQ ID NO: 564488 - DNA, 19 bp, Mus musculus
  siRNA target sequence for Cxcl5 (NM_009141.1,236-254).
cgtaactccaaaaattaat

SEQ ID NO: 564489 - DNA, 19 bp, Mus musculus
  siRNA target sequence for Cxcl5 (NM_009141.1,256-274).
ccaaattgatcgctaattt

SEQ ID NO: 564490 - DNA, 19 bp, Mus musculus
  siRNA target sequence for Cxcl5 (NM_009141.1,301-319).
gccctacggtggaagtcat

SEQ ID NO: 564491 - DNA, 19 bp, Mus musculus
  siRNA target sequence for Cxcl5 (NM_009141.1,302-320).
ccctacggtggaagtcata

SEQ ID NO: 564492 - DNA, 19 bp, Mus musculus
  siRNA target sequence for Cxcl5 (NM_009141.1,307-325).
cggtggaagtcatagctaa

SEQ ID NO: 564493 - DNA, 19 bp, Mus musculus
  siRNA target sequence for Cxcl5 (NM_009141.1,360-378).
gaagctcctgtgataaaga

SEQ ID NO: 564494 - DNA, 19 bp, Mus musculus
  siRNA target sequence for Cxcl7 (NM_023785.1,121-139).
cagggcctgcccacttcat

SEQ ID NO: 564495 - DNA, 19 bp, Mus musculus
  siRNA target sequence for Cxcl7 (NM_023785.1,123-141).
gggcctgcccacttcataa

SEQ ID NO: 564496 - DNA, 19 bp, Mus musculus
  siRNA target sequence for Cxcl7 (NM_023785.1,188-206).
ccccttacagctggaaaat

SEQ ID NO: 564497 - DNA, 19 bp, Mus musculus
  siRNA target sequence for Cxcl7 (NM_023785.1,213-231).
gcatggacccatatatcga

SEQ ID NO: 564498 - DNA, 19 bp, Mus musculus
  siRNA target sequence for Cxcl7 (NM_023785.1,214-232).
catggacccatatatcgaa

SEQ ID NO: 564499 - DNA, 19 bp, Mus musculus
  siRNA target sequence for Cxcl7 (NM_023785.1,235-253).
gcgctgcagatgtacgaat

SEQ ID NO: 564500 - DNA, 19 bp, Mus musculus
  siRNA target sequence for Cxcl7 (NM_023785.1,236-254).
cgctgcagatgtacgaata

SEQ ID NO: 564501 - DNA, 19 bp, Mus musculus
  siRNA target sequence for Cxcl7 (NM_023785.1,240-258).
gcagatgtacgaataccat

SEQ ID NO: 564502 - DNA, 19 bp, Mus musculus
  siRNA target sequence for Cxcl7 (NM_023785.1,263-281).
ggaatcccattcaattcta

SEQ ID NO: 564503 - DNA, 19 bp, Mus musculus
  siRNA target sequence for Cxcl7 (NM_023785.1,264-282).
gaatcccattcaattctat

SEQ ID NO: 564504 - DNA, 19 bp, Mus musculus
  siRNA target sequence for Cxcl7 (NM_023785.1,279-297).
ctatctcccttgtgaatgt

SEQ ID NO: 564505 - DNA, 19 bp, Mus musculus
  siRNA target sequence for Cxcl7 (NM_023785.1,380-398).
gcccctggcgtcaagagaa

SEQ ID NO: 564506 - DNA, 19 bp, Mus musculus
  siRNA target sequence for Cxcl7 (NM_023785.1,381-399).
cccctggcgtcaagagaat

SEQ ID NO: 564507 - DNA, 19 bp, Mus musculus
  siRNA target sequence for Cxcl9 (NM_008599.1,152-170).
cgaggaaccctagtgataa

SEQ ID NO: 564508 - DNA, 19 bp, Mus musculus
  siRNA target sequence for Cxcl9 (NM_008599.1,206-224).
ggcacgatccactacaaat

SEQ ID NO: 564509 - DNA, 19 bp, Mus musculus
  siRNA target sequence for Cxcl9 (NM_008599.1,248-266).
gccccaagccccaattgca

SEQ ID NO: 564510 - DNA, 19 bp, Mus musculus
  siRNA target sequence for Cxcl9 (NM_008599.1,258-276).
ccaattgcaacaaaactga

SEQ ID NO: 564511 - DNA, 19 bp, Mus musculus
  siRNA target sequence for Cxcl9 (NM_008599.1,259-277).
caattgcaacaaaactgaa

SEQ ID NO: 564512 - DNA, 19 bp, Mus musculus
  siRNA target sequence for Cxcl9 (NM_008599.1,320-338).
ccggactcggcaaatgtga

SEQ ID NO: 564513 - DNA, 19 bp, Mus musculus
  siRNA target sequence for Cxcl9 (NM_008599.1,321-339).
cggactcggcaaatgtgaa

SEQ ID NO: 564514 - DNA, 19 bp, Mus musculus
  siRNA target sequence for Cxcl9 (NM_008599.1,452-470).
cgtcgttcaaggaagacta

SEQ ID NO: 564515 - DNA, 19 bp, Mus musculus
  siRNA target sequence for Cxcl9 (NM_008599.1,455-473).
cgttcaaggaagactacat

SEQ ID NO: 564516 - DNA, 19 bp, Mus musculus
  siRNA target sequence for Xcl1 (NM_008510.1,107-125).
gagtagctgtgtgaactta

SEQ ID NO: 564517 - DNA, 19 bp, Mus musculus
  siRNA target sequence for Xcl1 (NM_008510.1,109-127).
gtagctgtgtgaacttaca

SEQ ID NO: 564518 - DNA, 19 bp, Mus musculus
  siRNA target sequence for Xcl1 (NM_008510.1,132-150).
cagcggctgccagttcaaa

SEQ ID NO: 564519 - DNA, 19 bp, Mus musculus
  siRNA target sequence for Xcl1 (NM_008510.1,134-152).
gcggctgccagttcaaaaa

SEQ ID NO: 564520 - DNA, 19 bp, Mus musculus
  siRNA target sequence for Xcl1 (NM_008510.1,135-153).
cggctgccagttcaaaaaa

SEQ ID NO: 564521 - DNA, 19 bp, Mus musculus
  siRNA target sequence for Xcl1 (NM_008510.1,138-156).
ctgccagttcaaaaaatca

SEQ ID NO: 564522 - DNA, 19 bp, Mus musculus
  siRNA target sequence for Xcl1 (NM_008510.1,249-267).
gtgaaagcagcgatcaaga

SEQ ID NO: 564523 - DNA, 19 bp, Mus musculus
  siRNA target sequence for Xcl1 (NM_008510.1,282-300).
gccagtaccagaaagaaca

SEQ ID NO: 564524 - DNA, 19 bp, Mus musculus
  siRNA target sequence for Xcl1 (NM_008510.1,296-314).
gaacatggctgaaactgtt

SEQ ID NO: 564525 - DNA, 19 bp, Mus musculus
  siRNA target sequence for Il12a (NM_008351.1,169-187).
cacgctacctcctcttttt

SEQ ID NO: 564526 - DNA, 19 bp, Mus musculus
  siRNA target sequence for Il12a (NM_008351.1,243-261).
ggacctgccaggtgtctta

SEQ ID NO: 564527 - DNA, 19 bp, Mus musculus
  siRNA target sequence for Il12a (NM_008351.1,302-320).
gaagacggccagagaaaaa

SEQ ID NO: 564528 - DNA, 19 bp, Mus musculus
  siRNA target sequence for Il12a (NM_008351.1,378-396).
caaaccagcacattgaaga

SEQ ID NO: 564529 - DNA, 19 bp, Mus musculus
  siRNA target sequence for Il12a (NM_008351.1,386-404).
cacattgaagacctgttta

SEQ ID NO: 564530 - DNA, 19 bp, Mus musculus
  siRNA target sequence for Il12a (NM_008351.1,400-418).
gtttaccactggaactaca

SEQ ID NO: 564531 - DNA, 19 bp, Mus musculus
  siRNA target sequence for Il12a (NM_008351.1,438-456).
gctactagagagacttctt

SEQ ID NO: 564532 - DNA, 19 bp, Mus musculus
  siRNA target sequence for Il12a (NM_008351.1,449-467).
gacttcttccacaacaaga

SEQ ID NO: 564533 - DNA, 19 bp, Mus musculus
  siRNA target sequence for Il12a (NM_008351.1,514-532).
gccttggtagcatctatga

SEQ ID NO: 564534 - DNA, 19 bp, Mus musculus
  siRNA target sequence for Il12a (NM_008351.1,569-587).
caacgcagcacttcagaat

SEQ ID NO: 564535 - DNA, 19 bp, Mus musculus
  siRNA target sequence for Il12a (NM_008351.1,590-608).
caaccatcagcagatcatt

SEQ ID NO: 564536 - DNA, 19 bp, Mus musculus
  siRNA target sequence for Il12a (NM_008351.1,644-662).
gatgcagtctctgaatcat

SEQ ID NO: 564537 - DNA, 19 bp, Mus musculus
  siRNA target sequence for Il12a (NM_008351.1,759-777).
cgcgtcgtgaccatcaaca

SEQ ID NO: 564538 - DNA, 19 bp, Mus musculus
  siRNA target sequence for Il12b (NM_008352.1,167-185).
gtcctcagaagctaaccat

SEQ ID NO: 564539 - DNA, 19 bp, Mus musculus
  siRNA target sequence for Il12b (NM_008352.1,477-495).
caagaaggaaaatggaatt

SEQ ID NO: 564540 - DNA, 19 bp, Mus musculus
  siRNA target sequence for Il12b (NM_008352.1,540-558).
gaagtgtgaagcaccaaat

SEQ ID NO: 564541 - DNA, 19 bp, Mus musculus
  siRNA target sequence for Il12b (NM_008352.1,584-602).
ggctggtgcaaagaaacat

SEQ ID NO: 564542 - DNA, 19 bp, Mus musculus
  siRNA target sequence for Il12b (NM_008352.1,604-622).
gacttgaagttcaacatca

SEQ ID NO: 564543 - DNA, 19 bp, Mus musculus
  siRNA target sequence for Il12b (NM_008352.1,708-726).
ggactatgagaagtattca

SEQ ID NO: 564544 - DNA, 19 bp, Mus musculus
  siRNA target sequence for Il12b (NM_008352.1,797-815).
cacggcagcagaataaata

SEQ ID NO: 564545 - DNA, 19 bp, Mus musculus
  siRNA target sequence for Il12b (NM_008352.1,938-956).
ggagcactccccattccta

SEQ ID NO: 564546 - DNA, 19 bp, Mus musculus
  siRNA target sequence for Il12b (NM_008352.1,980-998).
gaatccagcgcaagaaaga

SEQ ID NO: 564547 - DNA, 19 bp, Mus musculus
  siRNA target sequence for Il12b (NM_008352.1,1037-1055).
gtgcgttcctcgtagagaa

SEQ ID NO: 564548 - DNA, 19 bp, Mus musculus
  siRNA target sequence for Il12b (NM_008352.1,1061-1079).
ctaccgaagtccaatgcaa

SEQ ID NO: 564549 - DNA, 19 bp, Mus musculus
  siRNA target sequence for Il12b (NM_008352.1,1102-1120).
gctcaggatcgctattaca

SEQ ID NO: 564550 - DNA, 19 bp, Mus musculus
  siRNA target sequence for Il12b (NM_008352.1,1103-1121).
ctcaggatcgctattacaa

SEQ ID NO: 564551 - DNA, 19 bp, Mus musculus
  siRNA target sequence for Il12b (NM_008352.1,1105-1123).
caggatcgctattacaatt

SEQ ID NO: 564552 - DNA, 19 bp, Mus musculus
  siRNA target sequence for Il12b (NM_008352.1,1108-1126).
gatcgctattacaattcct

SEQ ID NO: 564553 - DNA, 19 bp, Mus musculus
  siRNA target sequence for Il5 (NM_010558.1,193-211).
gcttcctgtccctactcat

SEQ ID NO: 564554 - DNA, 19 bp, Mus musculus
  siRNA target sequence for Il5 (NM_010558.1,198-216).
ctgtccctactcataaaaa

SEQ ID NO: 564555 - DNA, 19 bp, Mus musculus
  siRNA target sequence for Il5 (NM_010558.1,245-263).
caggggctagacatactga

SEQ ID NO: 564556 - DNA, 19 bp, Mus musculus
  siRNA target sequence for Il5 (NM_010558.1,250-268).
gctagacatactgaagaat

SEQ ID NO: 564557 - DNA, 19 bp, Mus musculus
  siRNA target sequence for Il5 (NM_010558.1,279-297).
gtgggggtactgtggaaat

SEQ ID NO: 564558 - DNA, 19 bp, Mus musculus
  siRNA target sequence for Il5 (NM_010558.1,282-300).
ggggtactgtggaaatgct

SEQ ID NO: 564559 - DNA, 19 bp, Mus musculus
  siRNA target sequence for Il5 (NM_010558.1,283-301).
gggtactgtggaaatgcta

SEQ ID NO: 564560 - DNA, 19 bp, Mus musculus
  siRNA target sequence for Il5 (NM_010558.1,284-302).
ggtactgtggaaatgctat

SEQ ID NO: 564561 - DNA, 19 bp, Mus musculus
  siRNA target sequence for Il5 (NM_010558.1,285-303).
gtactgtggaaatgctatt

SEQ ID NO: 564562 - DNA, 19 bp, Mus musculus
  siRNA target sequence for Il5 (NM_010558.1,375-393).
cgaggcagttcctggatta

SEQ ID NO: 564563 - DNA, 19 bp, Mus musculus
  siRNA target sequence for Lif (NM_008501.1,293-311).
gccacggcaacctcatgaa

SEQ ID NO: 564564 - DNA, 19 bp, Mus musculus
  siRNA target sequence for Lif (NM_008501.1,309-327).
gaaccagatcaagaatcaa

SEQ ID NO: 564565 - DNA, 19 bp, Mus musculus
  siRNA target sequence for Lif (NM_008501.1,347-365).
gcgccaatgctctcttcat

SEQ ID NO: 564566 - DNA, 19 bp, Mus musculus
  siRNA target sequence for Lif (NM_008501.1,360-378).
cttcatttcctattacaca

SEQ ID NO: 564567 - DNA, 19 bp, Mus musculus
  siRNA target sequence for Lif (NM_008501.1,415-433).
ctatgtgcgcctaacatga

SEQ ID NO: 564568 - DNA, 19 bp, Mus musculus
  siRNA target sequence for Lif (NM_008501.1,512-530).
gcgcctccctgaccaatat

SEQ ID NO: 564569 - DNA, 19 bp, Mus musculus
  siRNA target sequence for Lif (NM_008501.1,514-532).
gcctccctgaccaatatca

SEQ ID NO: 564570 - DNA, 19 bp, Mus musculus
  siRNA target sequence for Lif (NM_008501.1,632-650).
gccgtctgtgcaacaagta

SEQ ID NO: 564571 - DNA, 19 bp, Mus musculus
  siRNA target sequence for Lif (NM_008501.1,681-699).
ccccgaccactctgacaaa

SEQ ID NO: 564572 - DNA, 19 bp, Mus musculus
  siRNA target sequence for Lif (NM_008501.1,684-702).
cgaccactctgacaaagaa

SEQ ID NO: 564573 - DNA, 19 bp, Mus musculus
  siRNA target sequence for Lif (NM_008501.1,730-748).
cagcttctggggacataca

SEQ ID NO: 564574 - DNA, 19 bp, Mus musculus
  siRNA target sequence for Il13 (NM_008355.1,164-182).
cccttaaggagcttattga

SEQ ID NO: 564575 - DNA, 19 bp, Mus musculus
  siRNA target sequence for Il13 (NM_008355.1,381-399).
ccccgataccaaaatcgaa

SEQ ID NO: 564576 - DNA, 19 bp, Mus musculus
  siRNA target sequence for Il13 (NM_008355.1,396-414).
cgaagtagcccactttata

SEQ ID NO: 564577 - DNA, 19 bp, Mus musculus
  siRNA target sequence for Il13 (NM_008355.1,397-415).
gaagtagcccactttataa

SEQ ID NO: 564578 - DNA, 19 bp, Mus musculus
  siRNA target sequence for Il13 (NM_008355.1,400-418).
gtagcccactttataacaa

SEQ ID NO: 564579 - DNA, 19 bp, Mus musculus
  siRNA target sequence for Il13 (NM_008355.1,404-422).
cccactttataacaaaact

SEQ ID NO: 564580 - DNA, 19 bp, Mus musculus
  siRNA target sequence for Il10 (NM_010548.1,141-159).
gtacagccgggaagacaat

SEQ ID NO: 564581 - DNA, 19 bp, Mus musculus
  siRNA target sequence for Il10 (NM_010548.1,225-243).
ggtgaagactttctttcaa

SEQ ID NO: 564582 - DNA, 19 bp, Mus musculus
  siRNA target sequence for Il10 (NM_010548.1,226-244).
gtgaagactttctttcaaa

SEQ ID NO: 564583 - DNA, 19 bp, Mus musculus
  siRNA target sequence for Il10 (NM_010548.1,268-286).
ctgctaaccgactccttaa

SEQ ID NO: 564584 - DNA, 19 bp, Mus musculus
  siRNA target sequence for Il10 (NM_010548.1,316-334).
caagccttatcggaaatga

SEQ ID NO: 564585 - DNA, 19 bp, Mus musculus
  siRNA target sequence for Il10 (NM_010548.1,326-344).
cggaaatgatccagtttta

SEQ ID NO: 564586 - DNA, 19 bp, Mus musculus
  siRNA target sequence for Il10 (NM_010548.1,444-462).
gaggcgctgtcatcgattt

SEQ ID NO: 564587 - DNA, 19 bp, Mus musculus
  siRNA target sequence for Il10 (NM_010548.1,457-475).
cgatttctcccctgtgaaa

SEQ ID NO: 564588 - DNA, 19 bp, Mus musculus
  siRNA target sequence for Il10 (NM_010548.1,463-481).
ctcccctgtgaaaataaga

SEQ ID NO: 564589 - DNA, 19 bp, Mus musculus
  siRNA target sequence for Il10 (NM_010548.1,495-513).
gcaggtgaagagtgatttt

SEQ ID NO: 564590 - DNA, 19 bp, Mus musculus
  siRNA target sequence for Il10 (NM_010548.1,496-514).
caggtgaagagtgatttta

SEQ ID NO: 564591 - DNA, 19 bp, Mus musculus
  siRNA target sequence for Il10 (NM_010548.1,584-602).
catacatgatgatcaaaat

SEQ ID NO: 564592 - DNA, 19 bp, Mus musculus
  siRNA target sequence for Il9 (NM_008373.1,91-109).
ggcatcagagacaccaatt

SEQ ID NO: 564593 - DNA, 19 bp, Mus musculus
  siRNA target sequence for Il9 (NM_008373.1,92-110).
gcatcagagacaccaatta

SEQ ID NO: 564594 - DNA, 19 bp, Mus musculus
  siRNA target sequence for Il9 (NM_008373.1,98-116).
gagacaccaattaccttat

SEQ ID NO: 564595 - DNA, 19 bp, Mus musculus
  siRNA target sequence for Il9 (NM_008373.1,102-120).
caccaattaccttattgaa

SEQ ID NO: 564596 - DNA, 19 bp, Mus musculus
  siRNA target sequence for Il9 (NM_008373.1,129-147).
ggatgatccaccgtcaaaa

SEQ ID NO: 564597 - DNA, 19 bp, Mus musculus
  siRNA target sequence for Il9 (NM_008373.1,130-148).
gatgatccaccgtcaaaat

SEQ ID NO: 564598 - DNA, 19 bp, Mus musculus
  siRNA target sequence for Il9 (NM_008373.1,186-204).
ctccgtcccaactgatgat

SEQ ID NO: 564599 - DNA, 19 bp, Mus musculus
  siRNA target sequence for Il9 (NM_008373.1,189-207).
cgtcccaactgatgattgt

SEQ ID NO: 564600 - DNA, 19 bp, Mus musculus
  siRNA target sequence for Il9 (NM_008373.1,219-237).
ctacagggagggactgtta

SEQ ID NO: 564601 - DNA, 19 bp, Mus musculus
  siRNA target sequence for Il9 (NM_008373.1,263-281).
caagactcttgcctgtttt

SEQ ID NO: 564602 - DNA, 19 bp, Mus musculus
  siRNA target sequence for Il7 (NM_008371.2,254-272).
ccatgtttcttttagatat

SEQ ID NO: 564603 - DNA, 19 bp, Mus musculus
  siRNA target sequence for Il7 (NM_008371.2,255-273).
catgtttcttttagatata

SEQ ID NO: 564604 - DNA, 19 bp, Mus musculus
  siRNA target sequence for Il7 (NM_008371.2,319-337).
catctgagtgccacattaa

SEQ ID NO: 564605 - DNA, 19 bp, Mus musculus
  siRNA target sequence for Il7 (NM_008371.2,322-340).
ctgagtgccacattaaaga

SEQ ID NO: 564606 - DNA, 19 bp, Mus musculus
  siRNA target sequence for Il7 (NM_008371.2,324-342).
gagtgccacattaaagaca

SEQ ID NO: 564607 - DNA, 19 bp, Mus musculus
  siRNA target sequence for Il7 (NM_008371.2,339-357).
gacaaagaaggtaaagcat

SEQ ID NO: 564608 - DNA, 19 bp, Mus musculus
  siRNA target sequence for Il7 (NM_008371.2,421-439).
gcccgaataatgaaccaaa

SEQ ID NO: 564609 - DNA, 19 bp, Mus musculus
  siRNA target sequence for Il7 (NM_008371.2,473-491).
ggaagctgcttttctaaat

SEQ ID NO: 564610 - DNA, 19 bp, Mus musculus
  siRNA target sequence for Il7 (NM_008371.2,492-510).
cgtgctgctcgcaagttga

SEQ ID NO: 564611 - DNA, 19 bp, Mus musculus
  siRNA target sequence for Il7 (NM_008371.2,498-516).
gctcgcaagttgaagcaat

SEQ ID NO: 564612 - DNA, 19 bp, Mus musculus
  siRNA target sequence for Il7 (NM_008371.2,499-517).
ctcgcaagttgaagcaatt

SEQ ID NO: 564613 - DNA, 19 bp, Mus musculus
  siRNA target sequence for Il7 (NM_008371.2,545-563).
caatgtccacttactaaca

SEQ ID NO: 564614 - DNA, 19 bp, Mus musculus
  siRNA target sequence for Il7 (NM_008371.2,554-572).
cttactaacagtatcacaa

SEQ ID NO: 564615 - DNA, 19 bp, Mus musculus
  siRNA target sequence for Il7 (NM_008371.2,564-582).
gtatcacaaggcacacaaa

SEQ ID NO: 564616 - DNA, 19 bp, Mus musculus
  siRNA target sequence for Il7 (NM_008371.2,585-603).
ctggtgaactgcacaagta

SEQ ID NO: 564617 - DNA, 19 bp, Mus musculus
  siRNA target sequence for Il6 (NM_031168.1,97-115).
cacggccttccctacttca

SEQ ID NO: 564618 - DNA, 19 bp, Mus musculus
  siRNA target sequence for Il6 (NM_031168.1,100-118).
ggccttccctacttcacaa

SEQ ID NO: 564619 - DNA, 19 bp, Mus musculus
  siRNA target sequence for Il6 (NM_031168.1,184-202).
cggaggcttaattacacat

SEQ ID NO: 564620 - DNA, 19 bp, Mus musculus
  siRNA target sequence for Il6 (NM_031168.1,212-230).
gaaatcgtggaaatgagaa

SEQ ID NO: 564621 - DNA, 19 bp, Mus musculus
  siRNA target sequence for Il6 (NM_031168.1,245-263).
ggcaattctgattgtatga

SEQ ID NO: 564622 - DNA, 19 bp, Mus musculus
  siRNA target sequence for Il6 (NM_031168.1,246-264).
gcaattctgattgtatgaa

SEQ ID NO: 564623 - DNA, 19 bp, Mus musculus
  siRNA target sequence for Il6 (NM_031168.1,278-296).
cttgcagaaaacaatctga

SEQ ID NO: 564624 - DNA, 19 bp, Mus musculus
  siRNA target sequence for Il6 (NM_031168.1,327-345).
gctaccaaactggatataa

SEQ ID NO: 564625 - DNA, 19 bp, Mus musculus
  siRNA target sequence for Il6 (NM_031168.1,328-346).
ctaccaaactggatataat

SEQ ID NO: 564626 - DNA, 19 bp, Mus musculus
  siRNA target sequence for Il6 (NM_031168.1,377-395).
ggtcttctggagtaccata

SEQ ID NO: 564627 - DNA, 19 bp, Mus musculus
  siRNA target sequence for Il6 (NM_031168.1,540-558).
ccaatgctctcctaacaga

SEQ ID NO: 564628 - DNA, 19 bp, Mus musculus
  siRNA target sequence for Il6 (NM_031168.1,541-559).
caatgctctcctaacagat

SEQ ID NO: 564629 - DNA, 19 bp, Mus musculus
  siRNA target sequence for Il6 (NM_031168.1,591-609).
ccaagaccatccaattcat

SEQ ID NO: 564630 - DNA, 19 bp, Mus musculus
  siRNA target sequence for Il6 (NM_031168.1,597-615).
ccatccaattcatcttgaa

SEQ ID NO: 564631 - DNA, 19 bp, Mus musculus
  siRNA target sequence for Il6 (NM_031168.1,601-619).
ccaattcatcttgaaatca

SEQ ID NO: 564632 - DNA, 19 bp, Mus musculus
  siRNA target sequence for Il6 (NM_031168.1,632-650).
ctaaaagtcactttgagat

SEQ ID NO: 564633 - DNA, 19 bp, Mus musculus
  siRNA target sequence for Il4 (NM_021283.1,137-155).
gtaccaggagccatatcca

SEQ ID NO: 564634 - DNA, 19 bp, Mus musculus
  siRNA target sequence for Il4 (NM_021283.1,153-171).
ccacggatgcgacaaaaat

SEQ ID NO: 564635 - DNA, 19 bp, Mus musculus
  siRNA target sequence for Il4 (NM_021283.1,157-175).
ggatgcgacaaaaatcact

SEQ ID NO: 564636 - DNA, 19 bp, Mus musculus
  siRNA target sequence for Il4 (NM_021283.1,179-197).
gagagatcatcggcatttt

SEQ ID NO: 564637 - DNA, 19 bp, Mus musculus
  siRNA target sequence for Il4 (NM_021283.1,181-199).
gagatcatcggcattttga

SEQ ID NO: 564638 - DNA, 19 bp, Mus musculus
  siRNA target sequence for Il4 (NM_021283.1,253-271).
ctcacagcaacgaagaaca

SEQ ID NO: 564639 - DNA, 19 bp, Mus musculus
  siRNA target sequence for Il4 (NM_021283.1,302-320).
ccaaggtgcttcgcatatt

SEQ ID NO: 564640 - DNA, 19 bp, Mus musculus
  siRNA target sequence for Il4 (NM_021283.1,303-321).
caaggtgcttcgcatattt

SEQ ID NO: 564641 - DNA, 19 bp, Mus musculus
  siRNA target sequence for Il4 (NM_021283.1,306-324).
ggtgcttcgcatattttat

SEQ ID NO: 564642 - DNA, 19 bp, Mus musculus
  siRNA target sequence for Il4 (NM_021283.1,307-325).
gtgcttcgcatattttatt

SEQ ID NO: 564643 - DNA, 19 bp, Mus musculus
  siRNA target sequence for Il4 (NM_021283.1,351-369).
gaagaagaactctagtgtt

SEQ ID NO: 564644 - DNA, 19 bp, Mus musculus
  siRNA target sequence for Il4 (NM_021283.1,388-406).
ctctttcgggcttttcgat

SEQ ID NO: 564645 - DNA, 19 bp, Mus musculus
  siRNA target sequence for Il4 (NM_021283.1,409-427).
ctggattcatcgataagct

SEQ ID NO: 564646 - DNA, 19 bp, Mus musculus
  siRNA target sequence for Il4 (NM_021283.1,420-438).
gataagctgcaccatgaat

SEQ ID NO: 564647 - DNA, 19 bp, Mus musculus
  siRNA target sequence for Il4 (NM_021283.1,478-496).
ctaaagagcatcatgcaaa

SEQ ID NO: 564648 - DNA, 19 bp, Mus musculus
  siRNA target sequence for Il4 (NM_021283.1,485-503).
gcatcatgcaaatggatta

SEQ ID NO: 564649 - DNA, 19 bp, Mus musculus
  siRNA target sequence for Il3 (NM_010556.2,121-139).
cgggatacccaccgtttaa

SEQ ID NO: 564650 - DNA, 19 bp, Mus musculus
  siRNA target sequence for Il3 (NM_010556.2,147-165).
gttgaattgcagctctatt

SEQ ID NO: 564651 - DNA, 19 bp, Mus musculus
  siRNA target sequence for Il3 (NM_010556.2,251-269).
gagtaaacctgtccaaatt

SEQ ID NO: 564652 - DNA, 19 bp, Mus musculus
  siRNA target sequence for Il3 (NM_010556.2,295-313).
cctgaggacagatacgtta

SEQ ID NO: 564653 - DNA, 19 bp, Mus musculus
  siRNA target sequence for Il3 (NM_010556.2,296-314).
ctgaggacagatacgttat

SEQ ID NO: 564654 - DNA, 19 bp, Mus musculus
  siRNA target sequence for Il3 (NM_010556.2,301-319).
gacagatacgttatcaagt

SEQ ID NO: 564655 - DNA, 19 bp, Mus musculus
  siRNA target sequence for Il3 (NM_010556.2,309-327).
cgttatcaagtccaatctt

SEQ ID NO: 564656 - DNA, 19 bp, Mus musculus
  siRNA target sequence for Il3 (NM_010556.2,318-336).
gtccaatcttcagaaactt

SEQ ID NO: 564657 - DNA, 19 bp, Mus musculus
  siRNA target sequence for Il3 (NM_010556.2,371-389).
cgctgccaggggtcttcat

SEQ ID NO: 564658 - DNA, 19 bp, Mus musculus
  siRNA target sequence for Il3 (NM_010556.2,429-447).
catggtccaccttaacgat

SEQ ID NO: 564659 - DNA, 19 bp, Mus musculus
  siRNA target sequence for Il3 (NM_010556.2,508-526).
cgtggaaccgtggaatgtt

SEQ ID NO: 564660 - DNA, 19 bp, Mus musculus
  siRNA target sequence for Il2 (NM_008366.2,260-278).
caggatgctcaccttcaaa

SEQ ID NO: 564661 - DNA, 19 bp, Mus musculus
  siRNA target sequence for Il2 (NM_008366.2,262-280).
ggatgctcaccttcaaatt

SEQ ID NO: 564662 - DNA, 19 bp, Mus musculus
  siRNA target sequence for Il2 (NM_008366.2,348-366).
cggcatgttctggatttga

SEQ ID NO: 564663 - DNA, 19 bp, Mus musculus
  siRNA target sequence for Il2 (NM_008366.2,354-372).
gttctggatttgactcaaa

SEQ ID NO: 564664 - DNA, 19 bp, Mus musculus
  siRNA target sequence for Il2 (NM_008366.2,359-377).
ggatttgactcaaagcaaa

SEQ ID NO: 564665 - DNA, 19 bp, Mus musculus
  siRNA target sequence for Il2 (NM_008366.2,360-378).
gatttgactcaaagcaaaa

SEQ ID NO: 564666 - DNA, 19 bp, Mus musculus
  siRNA target sequence for Il2 (NM_008366.2,457-475).
catttgagtgccaattcga

SEQ ID NO: 564667 - DNA, 19 bp, Mus musculus
  siRNA target sequence for Ifng (NM_008337.1,174-192).
gccacggcacagtcattga

SEQ ID NO: 564668 - DNA, 19 bp, Mus musculus
  siRNA target sequence for Ifng (NM_008337.1,175-193).
ccacggcacagtcattgaa

SEQ ID NO: 564669 - DNA, 19 bp, Mus musculus
  siRNA target sequence for Ifng (NM_008337.1,176-194).
cacggcacagtcattgaaa

SEQ ID NO: 564670 - DNA, 19 bp, Mus musculus
  siRNA target sequence for Ifng (NM_008337.1,195-213).
gcctagaaagtctgaataa

SEQ ID NO: 564671 - DNA, 19 bp, Mus musculus
  siRNA target sequence for Ifng (NM_008337.1,197-215).
ctagaaagtctgaataact

SEQ ID NO: 564672 - DNA, 19 bp, Mus musculus
  siRNA target sequence for Ifng (NM_008337.1,200-218).
gaaagtctgaataactatt

SEQ ID NO: 564673 - DNA, 19 bp, Mus musculus
  siRNA target sequence for Ifng (NM_008337.1,204-222).
gtctgaataactattttaa

SEQ ID NO: 564674 - DNA, 19 bp, Mus musculus
  siRNA target sequence for Ifng (NM_008337.1,208-226).
gaataactattttaactca

SEQ ID NO: 564675 - DNA, 19 bp, Mus musculus
  siRNA target sequence for Ifng (NM_008337.1,230-248).
ggcatagatgtggaagaaa

SEQ ID NO: 564676 - DNA, 19 bp, Mus musculus
  siRNA target sequence for Ifng (NM_008337.1,271-289).
gaggaactggcaaaaggat

SEQ ID NO: 564677 - DNA, 19 bp, Mus musculus
  siRNA target sequence for Ifng (NM_008337.1,312-330).
gccagattatctctttcta

SEQ ID NO: 564678 - DNA, 19 bp, Mus musculus
  siRNA target sequence for Ifng (NM_008337.1,364-382).
ggccatcagcaacaacata

SEQ ID NO: 564679 - DNA, 19 bp, Mus musculus
  siRNA target sequence for Ifng (NM_008337.1,376-394).
caacataagcgtcattgaa

SEQ ID NO: 564680 - DNA, 19 bp, Mus musculus
  siRNA target sequence for Ifng (NM_008337.1,379-397).
cataagcgtcattgaatca

SEQ ID NO: 564681 - DNA, 19 bp, Mus musculus
  siRNA target sequence for Ifng (NM_008337.1,401-419).
ctgattactaccttcttca

SEQ ID NO: 564682 - DNA, 19 bp, Mus musculus
  siRNA target sequence for Ifng (NM_008337.1,420-438).
gcaacagcaaggcgaaaaa

SEQ ID NO: 564683 - DNA, 19 bp, Mus musculus
  siRNA target sequence for Csf2 (NM_009969.2,239-257).
gcagacccgcctgaagata

SEQ ID NO: 564684 - DNA, 19 bp, Mus musculus
  siRNA target sequence for Csf2 (NM_009969.2,240-258).
cagacccgcctgaagatat

SEQ ID NO: 564685 - DNA, 19 bp, Mus musculus
  siRNA target sequence for Csf2 (NM_009969.2,244-262).
cccgcctgaagatattcga

SEQ ID NO: 564686 - DNA, 19 bp, Mus musculus
  siRNA target sequence for Csf2 (NM_009969.2,267-285).
ggtctacggggcaatttca

SEQ ID NO: 564687 - DNA, 19 bp, Mus musculus
  siRNA target sequence for Ifnb (NM_010510.1,73-91).
cagccctctccatcaacta

SEQ ID NO: 564688 - DNA, 19 bp, Mus musculus
  siRNA target sequence for Ifnb (NM_010510.1,75-93).
gccctctccatcaactata

SEQ ID NO: 564689 - DNA, 19 bp, Mus musculus
  siRNA target sequence for Ifnb (NM_010510.1,118-136).
cgaacattcggaaatgtca

SEQ ID NO: 564690 - DNA, 19 bp, Mus musculus
  siRNA target sequence for Ifnb (NM_010510.1,175-193).
cctacagggcggacttcaa

SEQ ID NO: 564691 - DNA, 19 bp, Mus musculus
  siRNA target sequence for Ifnb (NM_010510.1,218-236).
gatgcagaagagttacact

SEQ ID NO: 564692 - DNA, 19 bp, Mus musculus
  siRNA target sequence for Ifnb (NM_010510.1,254-272).
gatgctccagaatgtcttt

SEQ ID NO: 564693 - DNA, 19 bp, Mus musculus
  siRNA target sequence for Ifnb (NM_010510.1,304-322).
ggtggaatgagactattgt

SEQ ID NO: 564694 - DNA, 19 bp, Mus musculus
  siRNA target sequence for Ifnb (NM_010510.1,370-388).
cagtactagaggaaaagca

SEQ ID NO: 564695 - DNA, 19 bp, Mus musculus
  siRNA target sequence for Ifnb (NM_010510.1,429-447).
cacttgaagagctattact

SEQ ID NO: 564696 - DNA, 19 bp, Mus musculus
  siRNA target sequence for Ifnb (NM_010510.1,451-469).
gggtgcaaaggtaccttaa

SEQ ID NO: 564697 - DNA, 19 bp, Mus musculus
  siRNA target sequence for Ifnb (NM_010510.1,452-470).
ggtgcaaaggtaccttaaa

SEQ ID NO: 564698 - DNA, 19 bp, Mus musculus
  siRNA target sequence for Ifnb (NM_010510.1,504-522).
gtccgagcagagatcttca

SEQ ID NO: 564699 - DNA, 19 bp, Mus musculus
  siRNA target sequence for Ifnt1 (NM_177348.2,316-334).
catttgggaggaaaaccat

SEQ ID NO: 564700 - DNA, 19 bp, Mus musculus
  siRNA target sequence for Ifnt1 (NM_177348.2,321-339).
gggaggaaaaccatataga

SEQ ID NO: 564701 - DNA, 19 bp, Mus musculus
  siRNA target sequence for Ifnt1 (NM_177348.2,433-451).
gaaccttaggttacagatt

SEQ ID NO: 564702 - DNA, 19 bp, Mus musculus
  siRNA target sequence for Ifnt1 (NM_177348.2,436-454).
ccttaggttacagattaaa

SEQ ID NO: 564703 - DNA, 19 bp, Mus musculus
  siRNA target sequence for Ifnt1 (NM_177348.2,441-459).
ggttacagattaaagcata

SEQ ID NO: 564704 - DNA, 19 bp, Mus musculus
  siRNA target sequence for Ifnt1 (NM_177348.2,446-464).
cagattaaagcatacttca

SEQ ID NO: 564705 - DNA, 19 bp, Mus musculus
  siRNA target sequence for Ifnt1 (NM_177348.2,465-483).
ggaggatccacgattactt

SEQ ID NO: 564706 - DNA, 19 bp, Mus musculus
  siRNA target sequence for Ifnt1 (NM_177348.2,475-493).
cgattacttggaaaaccaa

SEQ ID NO: 564707 - DNA, 19 bp, Mus musculus
  siRNA target sequence for Ifnt1 (NM_177348.2,535-553).
ccaccgctgtatgttcttt

SEQ ID NO: 564708 - DNA, 19 bp, Mus musculus
  siRNA target sequence for Ifnt1 (NM_177348.2,554-572).
gtgttcaggttcacaacat

SEQ ID NO: 564709 - DNA, 19 bp, Mus musculus
  siRNA target sequence for Il15 (NM_008357.1,545-563).
ctgaggctggcattcatgt

SEQ ID NO: 564710 - DNA, 19 bp, Mus musculus
  siRNA target sequence for Il15 (NM_008357.1,551-569).
ctggcattcatgtcttcat

SEQ ID NO: 564711 - DNA, 19 bp, Mus musculus
  siRNA target sequence for Il15 (NM_008357.1,606-624).
ggccaactggatagatgta

SEQ ID NO: 564712 - DNA, 19 bp, Mus musculus
  siRNA target sequence for Il15 (NM_008357.1,612-630).
ctggatagatgtaagatat

SEQ ID NO: 564713 - DNA, 19 bp, Mus musculus
  siRNA target sequence for Il15 (NM_008357.1,626-644).
gatatgacctggagaaaat

SEQ ID NO: 564714 - DNA, 19 bp, Mus musculus
  siRNA target sequence for Il15 (NM_008357.1,658-676).
caatctattcatattgaca

SEQ ID NO: 564715 - DNA, 19 bp, Mus musculus
  siRNA target sequence for Il15 (NM_008357.1,703-721).
catcccagttgcaaagtta

SEQ ID NO: 564716 - DNA, 19 bp, Mus musculus
  siRNA target sequence for Il15 (NM_008357.1,771-789).
cagtaacatgactcttaat

SEQ ID NO: 564717 - DNA, 19 bp, Mus musculus
  siRNA target sequence for Il15 (NM_008357.1,773-791).
gtaacatgactcttaatga

SEQ ID NO: 564718 - DNA, 19 bp, Mus musculus
  siRNA target sequence for Il15 (NM_008357.1,888-906).
gaaaaccttcacagagttt

SEQ ID NO: 564719 - DNA, 19 bp, Mus musculus
  siRNA target sequence for Il15 (NM_008357.1,901-919).
gagtttttgcaaagcttta

SEQ ID NO: 564720 - DNA, 19 bp, Mus musculus
  siRNA target sequence for Il15 (NM_008357.1,922-940).
cgcattgtccaaatgttca

SEQ ID NO: 564721 - DNA, 19 bp, Mus musculus
  siRNA target sequence for Il15 (NM_008357.1,928-946).
gtccaaatgttcatcaaca

SEQ ID NO: 564722 - DNA, 19 bp, Mus musculus
  siRNA target sequence for Eda (NM_010099.1,493-511).
ggggcagccgtcctttcaa

SEQ ID NO: 564723 - DNA, 19 bp, Mus musculus
  siRNA target sequence for Eda (NM_010099.1,495-513).
ggcagccgtcctttcaaca

SEQ ID NO: 564724 - DNA, 19 bp, Mus musculus
  siRNA target sequence for Eda (NM_010099.1,596-614).
cctgatgaaaaggcatatt

SEQ ID NO: 564725 - DNA, 19 bp, Mus musculus
  siRNA target sequence for Eda (NM_010099.1,630-648).
ggcgtgttcgccgcaataa

SEQ ID NO: 564726 - DNA, 19 bp, Mus musculus
  siRNA target sequence for Eda (NM_010099.1,632-650).
cgtgttcgccgcaataaga

SEQ ID NO: 564727 - DNA, 19 bp, Mus musculus
  siRNA target sequence for Eda (NM_010099.1,635-653).
gttcgccgcaataagagaa

SEQ ID NO: 564728 - DNA, 19 bp, Mus musculus
  siRNA target sequence for Eda (NM_010099.1,640-658).
ccgcaataagagaagcaaa

SEQ ID NO: 564729 - DNA, 19 bp, Mus musculus
  siRNA target sequence for Eda (NM_010099.1,669-687).
gagcagatggtcctgttaa

SEQ ID NO: 564730 - DNA, 19 bp, Mus musculus
  siRNA target sequence for Eda (NM_010099.1,796-814).
gattccaggaacaactgtt

SEQ ID NO: 564731 - DNA, 19 bp, Mus musculus
  siRNA target sequence for Eda (NM_010099.1,937-955).
gggccaagggtcagcaatt

SEQ ID NO: 564732 - DNA, 19 bp, Mus musculus
  siRNA target sequence for Eda (NM_010099.1,939-957).
gccaagggtcagcaattca

SEQ ID NO: 564733 - DNA, 19 bp, Mus musculus
  siRNA target sequence for Eda (NM_010099.1,940-958).
ccaagggtcagcaattcaa

SEQ ID NO: 564734 - DNA, 19 bp, Mus musculus
  siRNA target sequence for Eda (NM_010099.1,945-963).
ggtcagcaattcaagtcaa

SEQ ID NO: 564735 - DNA, 19 bp, Mus musculus
  siRNA target sequence for Eda (NM_010099.1,975-993).
caggtggagtgctcaatga

SEQ ID NO: 564736 - DNA, 19 bp, Mus musculus
  siRNA target sequence for Eda (NM_010099.1,992-1010).
gactggtctcgcatcacta

SEQ ID NO: 564737 - DNA, 19 bp, Mus musculus
  siRNA target sequence for Eda (NM_010099.1,1012-1030).
gaaccctaaggtgtttaaa

SEQ ID NO: 564738 - DNA, 19 bp, Mus musculus
  siRNA target sequence for Eda (NM_010099.1,1015-1033).
ccctaaggtgtttaaacta

SEQ ID NO: 564739 - DNA, 19 bp, Mus musculus
  siRNA target sequence for Eda (NM_010099.1,1017-1035).
ctaaggtgtttaaactaca

SEQ ID NO: 564740 - DNA, 19 bp, Mus musculus
  siRNA target sequence for Eda (NM_010099.1,1074-1092).
cctacttcatctatagtca

SEQ ID NO: 564741 - DNA, 19 bp, Mus musculus
  siRNA target sequence for Eda (NM_010099.1,1089-1107).
gtcaggtagaagtctacta

SEQ ID NO: 564742 - DNA, 19 bp, Mus musculus
  siRNA target sequence for Eda (NM_010099.1,1094-1112).
gtagaagtctactacatca

SEQ ID NO: 564743 - DNA, 19 bp, Mus musculus
  siRNA target sequence for Eda (NM_010099.1,1097-1115).
gaagtctactacatcaact

SEQ ID NO: 564744 - DNA, 19 bp, Mus musculus
  siRNA target sequence for Eda (NM_010099.1,1268-1286).
gtgcacgctgacatctcta

SEQ ID NO: 564745 - DNA, 19 bp, Mus musculus
  siRNA target sequence for Eda (NM_010099.1,1271-1289).
cacgctgacatctctatca

SEQ ID NO: 564746 - DNA, 19 bp, Mus musculus
  siRNA target sequence for Lta (NM_010735.1,415-433).
ctccgacatggcttctctt

SEQ ID NO: 564747 - DNA, 19 bp, Mus musculus
  siRNA target sequence for Lta (NM_010735.1,459-477).
caccagtggcctctacttt

SEQ ID NO: 564748 - DNA, 19 bp, Mus musculus
  siRNA target sequence for Lta (NM_010735.1,461-479).
ccagtggcctctactttgt

SEQ ID NO: 564749 - DNA, 19 bp, Mus musculus
  siRNA target sequence for Lta (NM_010735.1,550-568).
cacgaggtccagctctttt

SEQ ID NO: 564750 - DNA, 19 bp, Mus musculus
  siRNA target sequence for Lta (NM_010735.1,637-655).
ccgtgggtgcgctcaatgt

SEQ ID NO: 564751 - DNA, 19 bp, Mus musculus
  siRNA target sequence for Lta (NM_010735.1,638-656).
cgtgggtgcgctcaatgta

SEQ ID NO: 564752 - DNA, 19 bp, Mus musculus
  siRNA target sequence for Lta (NM_010735.1,713-731).
gcatctcccatctacactt

SEQ ID NO: 564753 - DNA, 19 bp, Mus musculus
  siRNA target sequence for Ltb (NM_008518.1,99-117).
gttggcagtgcctatcact

SEQ ID NO: 564754 - DNA, 19 bp, Mus musculus
  siRNA target sequence for Ltb (NM_008518.1,155-173).
gacgtcgggttgagaagat

SEQ ID NO: 564755 - DNA, 19 bp, Mus musculus
  siRNA target sequence for Ltb (NM_008518.1,157-175).
cgtcgggttgagaagatca

SEQ ID NO: 564756 - DNA, 19 bp, Mus musculus
  siRNA target sequence for Ltb (NM_008518.1,158-176).
gtcgggttgagaagatcat

SEQ ID NO: 564757 - DNA, 19 bp, Mus musculus
  siRNA target sequence for Ltb (NM_008518.1,580-598).
ccacaggacggcgtctatt

SEQ ID NO: 564758 - DNA, 19 bp, Mus musculus
  siRNA target sequence for Ltb (NM_008518.1,581-599).
cacaggacggcgtctatta

SEQ ID NO: 564759 - DNA, 19 bp, Mus musculus
  siRNA target sequence for Ltb (NM_008518.1,772-790).
gggtacgggtcgttatggt

SEQ ID NO: 564760 - DNA, 19 bp, Mus musculus
  siRNA target sequence for Ltb (NM_008518.1,773-791).
ggtacgggtcgttatggta

SEQ ID NO: 564761 - DNA, 19 bp, Mus musculus
  siRNA target sequence for Ltb (NM_008518.1,832-850).
ggcgagagggtctacgtta

SEQ ID NO: 564762 - DNA, 19 bp, Mus musculus
  siRNA target sequence for Ltb (NM_008518.1,833-851).
gcgagagggtctacgttaa

SEQ ID NO: 564763 - DNA, 19 bp, Mus musculus
  siRNA target sequence for MOR171-10 (NM_146747.1,420-438).
gtgcctttctctcgtttta

SEQ ID NO: 564764 - DNA, 19 bp, Mus musculus
  siRNA target sequence for MOR171-10 (NM_146747.1,499-517).
gatttctgcaaatctgatt

SEQ ID NO: 564765 - DNA, 19 bp, Mus musculus
  siRNA target sequence for MOR171-10 (NM_146747.1,506-524).
gcaaatctgatttgatcaa

SEQ ID NO: 564766 - DNA, 19 bp, Mus musculus
  siRNA target sequence for MOR171-10 (NM_146747.1,559-577).
ctctcatgctctaatattt

SEQ ID NO: 564767 - DNA, 19 bp, Mus musculus
  siRNA target sequence for MOR171-10 (NM_146747.1,561-579).
ctcatgctctaatattttt

SEQ ID NO: 564768 - DNA, 19 bp, Mus musculus
  siRNA target sequence for MOR171-10 (NM_146747.1,582-600).
gaatgatctcgtaattcta

SEQ ID NO: 564769 - DNA, 19 bp, Mus musculus
  siRNA target sequence for MOR171-10 (NM_146747.1,759-777).
ctctgctggatttacgtat

SEQ ID NO: 564770 - DNA, 19 bp, Mus musculus
  siRNA target sequence for MOR171-11 (NM_146746.1,506-524).
gcagatatgatgtgatcaa

SEQ ID NO: 564771 - DNA, 19 bp, Mus musculus
  siRNA target sequence for MOR171-11 (NM_146746.1,561-579).
ctcgtgctctgatgctttt

SEQ ID NO: 564772 - DNA, 19 bp, Mus musculus
  siRNA target sequence for MOR171-11 (NM_146746.1,563-581).
cgtgctctgatgcttttgt

SEQ ID NO: 564773 - DNA, 19 bp, Mus musculus
  siRNA target sequence for MOR171-11 (NM_146746.1,566-584).
gctctgatgcttttgttaa

SEQ ID NO: 564774 - DNA, 19 bp, Mus musculus
  siRNA target sequence for Tnf (NM_013693.1,506-524).
ccaacggcatggatctcaa

SEQ ID NO: 564775 - DNA, 19 bp, Mus musculus
  siRNA target sequence for Tnf (NM_013693.1,624-642).
caccgtcagccgatttgct

SEQ ID NO: 564776 - DNA, 19 bp, Mus musculus
  siRNA target sequence for Tnf (NM_013693.1,626-644).
ccgtcagccgatttgctat

SEQ ID NO: 564777 - DNA, 19 bp, Mus musculus
  siRNA target sequence for Tnf (NM_013693.1,630-648).
cagccgatttgctatctca

SEQ ID NO: 564778 - DNA, 19 bp, Mus musculus
  siRNA target sequence for Tnf (NM_013693.1,728-746).
cctggtatgagcccatata

SEQ ID NO: 564779 - DNA, 19 bp, Mus musculus
  siRNA target sequence for Tnf (NM_013693.1,731-749).
ggtatgagcccatatacct

SEQ ID NO: 564780 - DNA, 19 bp, Mus musculus
  siRNA target sequence for Tnf (NM_013693.1,798-816).
caatctgcccaagtactta

SEQ ID NO: 564781 - DNA, 19 bp, Mus musculus
  siRNA target sequence for Tnfsf10 (NM_009425.1,152-170).
gctgtgacttacatgtact

SEQ ID NO: 564782 - DNA, 19 bp, Mus musculus
  siRNA target sequence for Tnfsf10 (NM_009425.1,155-173).
gtgacttacatgtacttca

SEQ ID NO: 564783 - DNA, 19 bp, Mus musculus
  siRNA target sequence for Tnfsf10 (NM_009425.1,188-206).
cagctgcaggacaattact

SEQ ID NO: 564784 - DNA, 19 bp, Mus musculus
  siRNA target sequence for Tnfsf10 (NM_009425.1,216-234).
gactagcttgcttctcaaa

SEQ ID NO: 564785 - DNA, 19 bp, Mus musculus
  siRNA target sequence for Tnfsf10 (NM_009425.1,218-236).
ctagcttgcttctcaaaga

SEQ ID NO: 564786 - DNA, 19 bp, Mus musculus
  siRNA target sequence for Tnfsf10 (NM_009425.1,231-249).
caaagacggatgaggattt

SEQ ID NO: 564787 - DNA, 19 bp, Mus musculus
  siRNA target sequence for Tnfsf10 (NM_009425.1,263-281).
gatggagagatcttgaaca

SEQ ID NO: 564788 - DNA, 19 bp, Mus musculus
  siRNA target sequence for Tnfsf10 (NM_009425.1,282-300).
gaccctgcttgcaggttaa

SEQ ID NO: 564789 - DNA, 19 bp, Mus musculus
  siRNA target sequence for Tnfsf10 (NM_009425.1,323-341).
gaagaggtgactttgagaa

SEQ ID NO: 564790 - DNA, 19 bp, Mus musculus
  siRNA target sequence for Tnfsf10 (NM_009425.1,343-361).
ctttcaggacaccatttct

SEQ ID NO: 564791 - DNA, 19 bp, Mus musculus
  siRNA target sequence for Tnfsf10 (NM_009425.1,418-436).
gaaagtggcagctcacatt

SEQ ID NO: 564792 - DNA, 19 bp, Mus musculus
  siRNA target sequence for Tnfsf10 (NM_009425.1,548-566).
ctcaaccacgtgctcttta

SEQ ID NO: 564793 - DNA, 19 bp, Mus musculus
  siRNA target sequence for Tnfsf10 (NM_009425.1,553-571).
ccacgtgctctttaggaat

SEQ ID NO: 564794 - DNA, 19 bp, Mus musculus
  siRNA target sequence for Tnfsf10 (NM_009425.1,587-605).
gagcaggagggcctgtatt

SEQ ID NO: 564795 - DNA, 19 bp, Mus musculus
  siRNA target sequence for Tnfsf10 (NM_009425.1,595-613).
gggcctgtattacatctat

SEQ ID NO: 564796 - DNA, 19 bp, Mus musculus
  siRNA target sequence for Tnfsf10 (NM_009425.1,670-688).
ggacaaggtgagaaccaaa

SEQ ID NO: 564797 - DNA, 19 bp, Mus musculus
  siRNA target sequence for Tnfsf10 (NM_009425.1,695-713).
gtgcagtacatctacaagt

SEQ ID NO: 564798 - DNA, 19 bp, Mus musculus
  siRNA target sequence for Tnfsf10 (NM_009425.1,812-830).
ggattgttcgagctaaaaa

SEQ ID NO: 564799 - DNA, 19 bp, Mus musculus
  siRNA target sequence for Tnfsf10 (NM_009425.1,813-831).
gattgttcgagctaaaaaa

SEQ ID NO: 564800 - DNA, 19 bp, Mus musculus
  siRNA target sequence for Tnfsf10 (NM_009425.1,902-920).
ggagcctttttaattaact

SEQ ID NO: 564801 - DNA, 19 bp, Mus musculus
  siRNA target sequence for Tnfsf11 (NM_011613.2,384-402).
gagcgcagatggatcctaa

SEQ ID NO: 564802 - DNA, 19 bp, Mus musculus
  siRNA target sequence for Tnfsf11 (NM_011613.2,389-407).
cagatggatcctaacagaa

SEQ ID NO: 564803 - DNA, 19 bp, Mus musculus
  siRNA target sequence for Tnfsf11 (NM_011613.2,693-711).
catcgggttcccataaagt

SEQ ID NO: 564804 - DNA, 19 bp, Mus musculus
  siRNA target sequence for Tnfsf11 (NM_011613.2,740-758).
ggctgggccaagatctcta

SEQ ID NO: 564805 - DNA, 19 bp, Mus musculus
  siRNA target sequence for Tnfsf11 (NM_011613.2,741-759).
gctgggccaagatctctaa

SEQ ID NO: 564806 - DNA, 19 bp, Mus musculus
  siRNA target sequence for Tnfsf11 (NM_011613.2,744-762).
gggccaagatctctaacat

SEQ ID NO: 564807 - DNA, 19 bp, Mus musculus
  siRNA target sequence for Tnfsf11 (NM_011613.2,756-774).
ctaacatgacgttaagcaa

SEQ ID NO: 564808 - DNA, 19 bp, Mus musculus
  siRNA target sequence for Tnfsf11 (NM_011613.2,765-783).
cgttaagcaacggaaaact

SEQ ID NO: 564809 - DNA, 19 bp, Mus musculus
  siRNA target sequence for Tnfsf11 (NM_011613.2,766-784).
gttaagcaacggaaaacta

SEQ ID NO: 564810 - DNA, 19 bp, Mus musculus
  siRNA target sequence for Tnfsf11 (NM_011613.2,777-795).
gaaaactaagggttaacca

SEQ ID NO: 564811 - DNA, 19 bp, Mus musculus
  siRNA target sequence for Tnfsf11 (NM_011613.2,814-832).
gtacgccaacatttgcttt

SEQ ID NO: 564812 - DNA, 19 bp, Mus musculus
  siRNA target sequence for Tnfsf11 (NM_011613.2,880-898).
gatggtgtatgtcgttaaa

SEQ ID NO: 564813 - DNA, 19 bp, Mus musculus
  siRNA target sequence for Tnfsf11 (NM_011613.2,884-902).
gtgtatgtcgttaaaacca

SEQ ID NO: 564814 - DNA, 19 bp, Mus musculus
  siRNA target sequence for Tnfsf11 (NM_011613.2,904-922).
catcaaaatcccaagttct

SEQ ID NO: 564815 - DNA, 19 bp, Mus musculus
  siRNA target sequence for Tnfsf11 (NM_011613.2,938-956).
ggagggagcacgaaaaact

SEQ ID NO: 564816 - DNA, 19 bp, Mus musculus
  siRNA target sequence for Tnfsf11 (NM_011613.2,955-973).
ctggtcgggcaattctgaa

SEQ ID NO: 564817 - DNA, 19 bp, Mus musculus
  siRNA target sequence for Tnfsf11 (NM_011613.2,957-975).
ggtcgggcaattctgaatt

SEQ ID NO: 564818 - DNA, 19 bp, Mus musculus
  siRNA target sequence for Tnfsf11 (NM_011613.2,1016-1034).
cgagctggtgaagaaatta

SEQ ID NO: 564819 - DNA, 19 bp, Mus musculus
  siRNA target sequence for Tnfsf11 (NM_011613.2,1020-1038).
ctggtgaagaaattagcat

SEQ ID NO: 564820 - DNA, 19 bp, Mus musculus
  siRNA target sequence for Tnfsf11 (NM_011613.2,1060-1078).
gctggatccggatcaagat

SEQ ID NO: 564821 - DNA, 19 bp, Mus musculus
  siRNA target sequence for Tnfsf11 (NM_011613.2,1083-1101).
cgtactttggggctttcaa

SEQ ID NO: 564822 - DNA, 19 bp, Mus musculus
  siRNA target sequence for Tnfsf12 (NM_011614.1,306-324).
gcctcgccgagctattgca

SEQ ID NO: 564823 - DNA, 19 bp, Mus musculus
  siRNA target sequence for Tnfsf12 (NM_011614.1,441-459).
ccgccagattggggaattt

SEQ ID NO: 564824 - DNA, 19 bp, Mus musculus
  siRNA target sequence for Tnfsf12 (NM_011614.1,492-510).
ctgtcaggtgcactttgat

SEQ ID NO: 564825 - DNA, 19 bp, Mus musculus
  siRNA target sequence for Tnfsf12 (NM_011614.1,494-512).
gtcaggtgcactttgatga

SEQ ID NO: 564826 - DNA, 19 bp, Mus musculus
  siRNA target sequence for Tnfsf12 (NM_011614.1,723-741).
ctactttggactctttcaa

SEQ ID NO: 564827 - DNA, 19 bp, Mus musculus
  siRNA target sequence for Tnfsf13 (NM_023517.1,630-648).
gttgctctttggttgagtt

SEQ ID NO: 564828 - DNA, 19 bp, Mus musculus
  siRNA target sequence for Tnfsf13 (NM_023517.1,827-845).
gaaggatggggcgaaatct

SEQ ID NO: 564829 - DNA, 19 bp, Mus musculus
  siRNA target sequence for Tnfsf13 (NM_023517.1,903-921).
cttgttccagttaacatta

SEQ ID NO: 564830 - DNA, 19 bp, Mus musculus
  siRNA target sequence for Tnfsf13 (NM_023517.1,906-924).
gttccagttaacattacct

SEQ ID NO: 564831 - DNA, 19 bp, Mus musculus
  siRNA target sequence for Tnfsf13 (NM_023517.1,950-968).
gatgtggcaaccagtactt

SEQ ID NO: 564832 - DNA, 19 bp, Mus musculus
  siRNA target sequence for Tnfsf13 (NM_023517.1,989-1007).
ggcccagggagacattgta

SEQ ID NO: 564833 - DNA, 19 bp, Mus musculus
  siRNA target sequence for Tnfsf13 (NM_023517.1,1011-1029).
gtctgggacactggaattt

SEQ ID NO: 564834 - DNA, 19 bp, Mus musculus
  siRNA target sequence for Tnfsf13 (NM_023517.1,1119-1137).
ctattccgatgtatcagaa

SEQ ID NO: 564835 - DNA, 19 bp, Mus musculus
  siRNA target sequence for Tnfsf13 (NM_023517.1,1152-1170).
cctgaccgtgcctacaata

SEQ ID NO: 564836 - DNA, 19 bp, Mus musculus
  siRNA target sequence for Tnfsf13 (NM_023517.1,1155-1173).
gaccgtgcctacaatagct

SEQ ID NO: 564837 - DNA, 19 bp, Mus musculus
  siRNA target sequence for Tnfsf13 (NM_023517.1,1200-1218).
catcaaggggatattatca

SEQ ID NO: 564838 - DNA, 19 bp, Mus musculus
  siRNA target sequence for Tnfsf13 (NM_023517.1,1208-1226).
ggatattatcactgtcaaa

SEQ ID NO: 564839 - DNA, 19 bp, Mus musculus
  siRNA target sequence for Tnfsf13 (NM_023517.1,1209-1227).
gatattatcactgtcaaaa

SEQ ID NO: 564840 - DNA, 19 bp, Mus musculus
  siRNA target sequence for Tnfsf13 (NM_023517.1,1233-1251).
cgggcaaacgcaaaactta

SEQ ID NO: 564841 - DNA, 19 bp, Mus musculus
  siRNA target sequence for Tnfsf13 (NM_023517.1,1274-1292).
cctggggtttgtgaaacta

SEQ ID NO: 564842 - DNA, 19 bp, Mus musculus
  siRNA target sequence for Tnfsf13b (NM_033622.1,668-686).
gccgccattctcaacatga

SEQ ID NO: 564843 - DNA, 19 bp, Mus musculus
  siRNA target sequence for Tnfsf13b (NM_033622.1,669-687).
ccgccattctcaacatgat

SEQ ID NO: 564844 - DNA, 19 bp, Mus musculus
  siRNA target sequence for Tnfsf13b (NM_033622.1,671-689).
gccattctcaacatgatga

SEQ ID NO: 564845 - DNA, 19 bp, Mus musculus
  siRNA target sequence for Tnfsf13b (NM_033622.1,673-691).
cattctcaacatgatgata

SEQ ID NO: 564846 - DNA, 19 bp, Mus musculus
  siRNA target sequence for Tnfsf13b (NM_033622.1,695-713).
gaatgaacctcagaaacat

SEQ ID NO: 564847 - DNA, 19 bp, Mus musculus
  siRNA target sequence for Tnfsf13b (NM_033622.1,744-762).
cagcgacacgccgactata

SEQ ID NO: 564848 - DNA, 19 bp, Mus musculus
  siRNA target sequence for Tnfsf13b (NM_033622.1,747-765).
cgacacgccgactatacga

SEQ ID NO: 564849 - DNA, 19 bp, Mus musculus
  siRNA target sequence for Tnfsf13b (NM_033622.1,748-766).
gacacgccgactatacgaa

SEQ ID NO: 564850 - DNA, 19 bp, Mus musculus
  siRNA target sequence for Tnfsf13b (NM_033622.1,750-768).
cacgccgactatacgaaaa

SEQ ID NO: 564851 - DNA, 19 bp, Mus musculus
  siRNA target sequence for Tnfsf13b (NM_033622.1,753-771).
gccgactatacgaaaagga

SEQ ID NO: 564852 - DNA, 19 bp, Mus musculus
  siRNA target sequence for Tnfsf13b (NM_033622.1,754-772).
ccgactatacgaaaaggaa

SEQ ID NO: 564853 - DNA, 19 bp, Mus musculus
  siRNA target sequence for Tnfsf13b (NM_033622.1,758-776).
ctatacgaaaaggaactta

SEQ ID NO: 564854 - DNA, 19 bp, Mus musculus
  siRNA target sequence for Tnfsf13b (NM_033622.1,763-781).
cgaaaaggaacttacacat

SEQ ID NO: 564855 - DNA, 19 bp, Mus musculus
  siRNA target sequence for Tnfsf13b (NM_033622.1,788-806).
catggcttctcagctttaa

SEQ ID NO: 564856 - DNA, 19 bp, Mus musculus
  siRNA target sequence for Tnfsf13b (NM_033622.1,792-810).
gcttctcagctttaaaaga

SEQ ID NO: 564857 - DNA, 19 bp, Mus musculus
  siRNA target sequence for Tnfsf13b (NM_033622.1,859-877).
ggctatttcttcatctaca

SEQ ID NO: 564858 - DNA, 19 bp, Mus musculus
  siRNA target sequence for Tnfsf13b (NM_033622.1,893-911).
cggaccccatctttgctat

SEQ ID NO: 564859 - DNA, 19 bp, Mus musculus
  siRNA target sequence for Tnfsf13b (NM_033622.1,969-987).
gaccctgttccgatgtatt

SEQ ID NO: 564860 - DNA, 19 bp, Mus musculus
  siRNA target sequence for Tnfsf13b (NM_033622.1,971-989).
ccctgttccgatgtattca

SEQ ID NO: 564861 - DNA, 19 bp, Mus musculus
  siRNA target sequence for Tnfsf13b (NM_033622.1,973-991).
ctgttccgatgtattcaga

SEQ ID NO: 564862 - DNA, 19 bp, Mus musculus
  siRNA target sequence for Tnfsf13b (NM_033622.1,975-993).
gttccgatgtattcagaat

SEQ ID NO: 564863 - DNA, 19 bp, Mus musculus
  siRNA target sequence for Tnfsf13b (NM_033622.1,999-1017).
caaaacactgcccaacaat

SEQ ID NO: 564864 - DNA, 19 bp, Mus musculus
  siRNA target sequence for Tnfsf13b (NM_033622.1,1062-1080).
gattcagcttgcaattcct

SEQ ID NO: 564865 - DNA, 19 bp, Mus musculus
  siRNA target sequence for Tnfsf13b (NM_033622.1,1081-1099).
cgggagaatgcacagattt

SEQ ID NO: 564866 - DNA, 19 bp, Mus musculus
  siRNA target sequence for Tnfsf13b (NM_033622.1,1083-1101).
ggagaatgcacagatttca

SEQ ID NO: 564867 - DNA, 19 bp, Mus musculus
  siRNA target sequence for Tnfsf13b (NM_033622.1,1107-1125).
cggagacgacaccttcttt

SEQ ID NO: 564868 - DNA, 19 bp, Mus musculus
  siRNA target sequence for Tnfsf14 (NM_019418.1,360-378).
gaagctgatacaagatcaa

SEQ ID NO: 564869 - DNA, 19 bp, Mus musculus
  siRNA target sequence for Tnfsf14 (NM_019418.1,393-411).
caacccagcagcacatctt

SEQ ID NO: 564870 - DNA, 19 bp, Mus musculus
  siRNA target sequence for Tnfsf14 (NM_019418.1,396-414).
cccagcagcacatcttaca

SEQ ID NO: 564871 - DNA, 19 bp, Mus musculus
  siRNA target sequence for Tnfsf14 (NM_019418.1,423-441).
cgccagcttgataggtatt

SEQ ID NO: 564872 - DNA, 19 bp, Mus musculus
  siRNA target sequence for Tnfsf14 (NM_019418.1,426-444).
cagcttgataggtattggt

SEQ ID NO: 564873 - DNA, 19 bp, Mus musculus
  siRNA target sequence for Tnfsf14 (NM_019418.1,486-504).
gaggggcttgacgtatcat

SEQ ID NO: 564874 - DNA, 19 bp, Mus musculus
  siRNA target sequence for Tnfsf14 (NM_019418.1,488-506).
ggggcttgacgtatcatga

SEQ ID NO: 564875 - DNA, 19 bp, Mus musculus
  siRNA target sequence for Tnfsf14 (NM_019418.1,489-507).
gggcttgacgtatcatgat

SEQ ID NO: 564876 - DNA, 19 bp, Mus musculus
  siRNA target sequence for Tnfsf14 (NM_019418.1,525-543).
ggagcccggttactactat

SEQ ID NO: 564877 - DNA, 19 bp, Mus musculus
  siRNA target sequence for Tnfsf14 (NM_019418.1,529-547).
cccggttactactatgtgt

SEQ ID NO: 564878 - DNA, 19 bp, Mus musculus
  siRNA target sequence for Tnfsf14 (NM_019418.1,605-623).
ccatcacccatggactata

SEQ ID NO: 564879 - DNA, 19 bp, Mus musculus
  siRNA target sequence for Tnfsf14 (NM_019418.1,638-656).
gctacccgaaggagttaga

SEQ ID NO: 564880 - DNA, 19 bp, Mus musculus
  siRNA target sequence for Tnfsf14 (NM_019418.1,639-657).
ctacccgaaggagttagaa

SEQ ID NO: 564881 - DNA, 19 bp, Mus musculus
  siRNA target sequence for Tnfsf14 (NM_019418.1,818-836).
cctatttcggagctttcat

SEQ ID NO: 564882 - DNA, 19 bp, Mus musculus
  siRNA target sequence for Tnfsf15 (NM_177371.1,161-179).
gacttagcaccctcctaat

SEQ ID NO: 564883 - DNA, 19 bp, Mus musculus
  siRNA target sequence for Tnfsf15 (NM_177371.1,193-211).
cgggtccccggaaaagact

SEQ ID NO: 564884 - DNA, 19 bp, Mus musculus
  siRNA target sequence for Tnfsf15 (NM_177371.1,288-306).
gagagcacacctgacaatt

SEQ ID NO: 564885 - DNA, 19 bp, Mus musculus
  siRNA target sequence for Tnfsf15 (NM_177371.1,290-308).
gagcacacctgacaattaa

SEQ ID NO: 564886 - DNA, 19 bp, Mus musculus
  siRNA target sequence for Tnfsf15 (NM_177371.1,292-310).
gcacacctgacaattaaga

SEQ ID NO: 564887 - DNA, 19 bp, Mus musculus
  siRNA target sequence for Tnfsf15 (NM_177371.1,293-311).
cacacctgacaattaagaa

SEQ ID NO: 564888 - DNA, 19 bp, Mus musculus
  siRNA target sequence for Tnfsf15 (NM_177371.1,427-445).
ccagagtcaggagactatt

SEQ ID NO: 564889 - DNA, 19 bp, Mus musculus
  siRNA target sequence for Tnfsf15 (NM_177371.1,428-446).
cagagtcaggagactattt

SEQ ID NO: 564890 - DNA, 19 bp, Mus musculus
  siRNA target sequence for Tnfsf15 (NM_177371.1,434-452).
caggagactatttcatcta

SEQ ID NO: 564891 - DNA, 19 bp, Mus musculus
  siRNA target sequence for Tnfsf15 (NM_177371.1,436-454).
ggagactatttcatctact

SEQ ID NO: 564892 - DNA, 19 bp, Mus musculus
  siRNA target sequence for Tnfsf15 (NM_177371.1,702-720).
ctccttggtggattacaca

SEQ ID NO: 564893 - DNA, 19 bp, Mus musculus
  siRNA target sequence for Tnfsf15 (NM_177371.1,705-723).
cttggtggattacacaaaa

SEQ ID NO: 564894 - DNA, 19 bp, Mus musculus
  siRNA target sequence for Tnfsf15 (NM_177371.1,734-752).
ctttctttggagctttctt

SEQ ID NO: 564895 - DNA, 19 bp, Mus musculus
  siRNA target sequence for Tnfsf4 (NM_009452.1,193-211).
ggatcaaggccaagattca

SEQ ID NO: 564896 - DNA, 19 bp, Mus musculus
  siRNA target sequence for Tnfsf4 (NM_009452.1,356-374).
gtgaggatgggcaactatt

SEQ ID NO: 564897 - DNA, 19 bp, Mus musculus
  siRNA target sequence for Tnfsf4 (NM_009452.1,370-388).
ctattcatcagctcataca

SEQ ID NO: 564898 - DNA, 19 bp, Mus musculus
  siRNA target sequence for Tnfsf4 (NM_009452.1,380-398).
gctcatacaagaatgagta

SEQ ID NO: 564899 - DNA, 19 bp, Mus musculus
  siRNA target sequence for Tnfsf4 (NM_009452.1,383-401).
catacaagaatgagtatca

SEQ ID NO: 564900 - DNA, 19 bp, Mus musculus
  siRNA target sequence for Tnfsf4 (NM_009452.1,387-405).
caagaatgagtatcaaact

SEQ ID NO: 564901 - DNA, 19 bp, Mus musculus
  siRNA target sequence for Tnfsf4 (NM_009452.1,502-520).
catttccgggaggatcata

SEQ ID NO: 564902 - DNA, 19 bp, Mus musculus
  siRNA target sequence for Tnfsf4 (NM_009452.1,514-532).
gatcataatcccatctcta

SEQ ID NO: 564903 - DNA, 19 bp, Mus musculus
  siRNA target sequence for Tnfsf4 (NM_009452.1,543-561).
gaacgatggtcgaaggatt

SEQ ID NO: 564904 - DNA, 19 bp, Mus musculus
  siRNA target sequence for Tnfsf4 (NM_009452.1,547-565).
gatggtcgaaggattgtct

SEQ ID NO: 564905 - DNA, 19 bp, Mus musculus
  siRNA target sequence for Tnfsf4 (NM_009452.1,635-653).
gcgaacacctccagataaa

SEQ ID NO: 564906 - DNA, 19 bp, Mus musculus
  siRNA target sequence for Tnfsf4 (NM_009452.1,678-696).
gctaacgcctggatactgt

SEQ ID NO: 564907 - DNA, 19 bp, Mus musculus
  siRNA target sequence for Tnfsf5 (NM_011616.2,67-85).
gcgagcatgaagattttta

SEQ ID NO: 564908 - DNA, 19 bp, Mus musculus
  siRNA target sequence for Tnfsf5 (NM_011616.2,68-86).
cgagcatgaagatttttat

SEQ ID NO: 564909 - DNA, 19 bp, Mus musculus
  siRNA target sequence for Tnfsf5 (NM_011616.2,105-123).
ccttatcacccaaatgatt

SEQ ID NO: 564910 - DNA, 19 bp, Mus musculus
  siRNA target sequence for Tnfsf5 (NM_011616.2,148-166).
cttcatagaagattggata

SEQ ID NO: 564911 - DNA, 19 bp, Mus musculus
  siRNA target sequence for Tnfsf5 (NM_011616.2,181-199).
gtaaaccttcatgaagatt

SEQ ID NO: 564912 - DNA, 19 bp, Mus musculus
  siRNA target sequence for Tnfsf5 (NM_011616.2,186-204).
ccttcatgaagattttgta

SEQ ID NO: 564913 - DNA, 19 bp, Mus musculus
  siRNA target sequence for Tnfsf5 (NM_011616.2,190-208).
catgaagattttgtattca

SEQ ID NO: 564914 - DNA, 19 bp, Mus musculus
  siRNA target sequence for Tnfsf5 (NM_011616.2,231-249).
caaaggagaaggatcttta

SEQ ID NO: 564915 - DNA, 19 bp, Mus musculus
  siRNA target sequence for Tnfsf5 (NM_011616.2,292-310).
cttgtcaaggatataacgt

SEQ ID NO: 564916 - DNA, 19 bp, Mus musculus
  siRNA target sequence for Tnfsf5 (NM_011616.2,295-313).
gtcaaggatataacgttaa

SEQ ID NO: 564917 - DNA, 19 bp, Mus musculus
  siRNA target sequence for Tnfsf5 (NM_011616.2,300-318).
ggatataacgttaaacaaa

SEQ ID NO: 564918 - DNA, 19 bp, Mus musculus
  siRNA target sequence for Tnfsf5 (NM_011616.2,356-374).
gtgatgaggatcctcaaat

SEQ ID NO: 564919 - DNA, 19 bp, Mus musculus
  siRNA target sequence for Tnfsf5 (NM_011616.2,393-411).
cgaagccaacagtaatgca

SEQ ID NO: 564920 - DNA, 19 bp, Mus musculus
  siRNA target sequence for Tnfsf5 (NM_011616.2,426-444).
gtgggccaagaaaggatat

SEQ ID NO: 564921 - DNA, 19 bp, Mus musculus
  siRNA target sequence for Tnfsf5 (NM_011616.2,429-447).
ggccaagaaaggatattat

SEQ ID NO: 564922 - DNA, 19 bp, Mus musculus
  siRNA target sequence for Tnfsf5 (NM_011616.2,489-507).
gctgacggttaaaagagaa

SEQ ID NO: 564923 - DNA, 19 bp, Mus musculus
  siRNA target sequence for Tnfsf5 (NM_011616.2,505-523).
gaaggactctattatgtct

SEQ ID NO: 564924 - DNA, 19 bp, Mus musculus
  siRNA target sequence for Tnfsf5 (NM_011616.2,560-578).
cgagtcaacgcccattcat

SEQ ID NO: 564925 - DNA, 19 bp, Mus musculus
  siRNA target sequence for Tnfsf5 (NM_011616.2,608-626).
gatctgagagaatcttact

SEQ ID NO: 564926 - DNA, 19 bp, Mus musculus
  siRNA target sequence for Tnfsf5 (NM_011616.2,611-629).
ctgagagaatcttactcaa

SEQ ID NO: 564927 - DNA, 19 bp, Mus musculus
  siRNA target sequence for Tnfsf5 (NM_011616.2,681-699).
cttgggcggagtgtttgaa

SEQ ID NO: 564928 - DNA, 19 bp, Mus musculus
  siRNA target sequence for Tnfsf5 (NM_011616.2,684-702).
gggcggagtgtttgaatta

SEQ ID NO: 564929 - DNA, 19 bp, Mus musculus
  siRNA target sequence for Tnfsf5 (NM_011616.2,686-704).
gcggagtgtttgaattaca

SEQ ID NO: 564930 - DNA, 19 bp, Mus musculus
  siRNA target sequence for Tnfsf5 (NM_011616.2,758-776).
gagttggcttctcatcttt

SEQ ID NO: 564931 - DNA, 19 bp, Mus musculus
  siRNA target sequence for Tnfsf5 (NM_011616.2,773-791).
cttttggcttactcaaact

SEQ ID NO: 564932 - DNA, 19 bp, Mus musculus
  siRNA target sequence for Tnfsf6 (NM_010177.2,404-422).
cgccactgacccctctaaa

SEQ ID NO: 564933 - DNA, 19 bp, Mus musculus
  siRNA target sequence for Tnfsf6 (NM_010177.2,407-425).
cactgacccctctaaagaa

SEQ ID NO: 564934 - DNA, 19 bp, Mus musculus
  siRNA target sequence for Tnfsf6 (NM_010177.2,447-465).
gtggctaccggtggtattt

SEQ ID NO: 564935 - DNA, 19 bp, Mus musculus
  siRNA target sequence for Tnfsf6 (NM_010177.2,451-469).
ctaccggtggtatttttca

SEQ ID NO: 564936 - DNA, 19 bp, Mus musculus
  siRNA target sequence for Tnfsf6 (NM_010177.2,486-504).
ggttggaatgggattagga

SEQ ID NO: 564937 - DNA, 19 bp, Mus musculus
  siRNA target sequence for Tnfsf6 (NM_010177.2,487-505).
gttggaatgggattaggaa

SEQ ID NO: 564938 - DNA, 19 bp, Mus musculus
  siRNA target sequence for Tnfsf6 (NM_010177.2,547-565).
cgtgagttcaccaaccaaa

SEQ ID NO: 564939 - DNA, 19 bp, Mus musculus
  siRNA target sequence for Tnfsf6 (NM_010177.2,636-654).
gagtgtggcccatttaaca

SEQ ID NO: 564940 - DNA, 19 bp, Mus musculus
  siRNA target sequence for Tnfsf6 (NM_010177.2,684-702).
ggaatgggaagacacatat

SEQ ID NO: 564941 - DNA, 19 bp, Mus musculus
  siRNA target sequence for Tnfsf6 (NM_010177.2,742-760).
ggccttgtgatcaacgaaa

SEQ ID NO: 564942 - DNA, 19 bp, Mus musculus
  siRNA target sequence for Tnfsf6 (NM_010177.2,763-781).
gggttgtacttcgtgtatt

SEQ ID NO: 564943 - DNA, 19 bp, Mus musculus
  siRNA target sequence for Tnfsf6 (NM_010177.2,768-786).
gtacttcgtgtattccaaa

SEQ ID NO: 564944 - DNA, 19 bp, Mus musculus
  siRNA target sequence for Tnfsf6 (NM_010177.2,771-789).
cttcgtgtattccaaagta

SEQ ID NO: 564945 - DNA, 19 bp, Mus musculus
  siRNA target sequence for Tnfsf6 (NM_010177.2,775-793).
gtgtattccaaagtatact

SEQ ID NO: 564946 - DNA, 19 bp, Mus musculus
  siRNA target sequence for Tnfsf6 (NM_010177.2,823-841).
ctaaaccacaaggtctata

SEQ ID NO: 564947 - DNA, 19 bp, Mus musculus
  siRNA target sequence for Tnfsf6 (NM_010177.2,835-853).
gtctatatgaggaactcta

SEQ ID NO: 564948 - DNA, 19 bp, Mus musculus
  siRNA target sequence for Tnfsf6 (NM_010177.2,860-878).
ctgaggatctggtgctaat

SEQ ID NO: 564949 - DNA, 19 bp, Mus musculus
  siRNA target sequence for Tnfsf6 (NM_010177.2,883-901).
gagaagaggttgaactact

SEQ ID NO: 564950 - DNA, 19 bp, Mus musculus
  siRNA target sequence for Tnfsf6 (NM_010177.2,900-918).
ctgcactactggacagata

SEQ ID NO: 564951 - DNA, 19 bp, Mus musculus
  siRNA target sequence for Tnfsf6 (NM_010177.2,932-950).
gctacctgggggcagtatt

SEQ ID NO: 564952 - DNA, 19 bp, Mus musculus
  siRNA target sequence for Tnfsf6 (NM_010177.2,936-954).
cctgggggcagtattcaat

SEQ ID NO: 564953 - DNA, 19 bp, Mus musculus
  siRNA target sequence for Tnfsf6 (NM_010177.2,939-957).
gggggcagtattcaatctt

SEQ ID NO: 564954 - DNA, 19 bp, Mus musculus
  siRNA target sequence for Tnfsf6 (NM_010177.2,940-958).
ggggcagtattcaatctta

SEQ ID NO: 564955 - DNA, 19 bp, Mus musculus
  siRNA target sequence for Tnfsf6 (NM_010177.2,959-977).
ccagtgctgaccatttata

SEQ ID NO: 564956 - DNA, 19 bp, Mus musculus
  siRNA target sequence for Tnfsf6 (NM_010177.2,960-978).
cagtgctgaccatttatat

SEQ ID NO: 564957 - DNA, 19 bp, Mus musculus
  siRNA target sequence for Tnfsf6 (NM_010177.2,964-982).
gctgaccatttatatgtca

SEQ ID NO: 564958 - DNA, 19 bp, Mus musculus
  siRNA target sequence for Tnfsf6 (NM_010177.2,989-1007).
ctcaactctctctgatcaa

SEQ ID NO: 564959 - DNA, 19 bp, Mus musculus
  siRNA target sequence for Tnfsf6 (NM_010177.2,1023-1041).
gacctttttcggcttgtat

SEQ ID NO: 564960 - DNA, 19 bp, Mus musculus
  siRNA target sequence for Tnfsf6 (NM_010177.2,1025-1043).
cctttttcggcttgtataa

SEQ ID NO: 564961 - DNA, 19 bp, Mus musculus
  siRNA target sequence for Tnfsf7 (NM_011617.1,344-362).
gccgcacacagctgagtta

SEQ ID NO: 564962 - DNA, 19 bp, Mus musculus
  siRNA target sequence for Tnfsf7 (NM_011617.1,346-364).
cgcacacagctgagttaca

SEQ ID NO: 564963 - DNA, 19 bp, Mus musculus
  siRNA target sequence for Tnfsf7 (NM_011617.1,355-373).
ctgagttacagctgaatct

SEQ ID NO: 564964 - DNA, 19 bp, Mus musculus
  siRNA target sequence for Tnfsf7 (NM_011617.1,461-479).
gggccatctgcgtatccat

SEQ ID NO: 564965 - DNA, 19 bp, Mus musculus
  siRNA target sequence for Tnfsf7 (NM_011617.1,487-505).
gcctctacaggctgcatat

SEQ ID NO: 564966 - DNA, 19 bp, Mus musculus
  siRNA target sequence for Tnfsf8 (NM_009403.2,345-363).
caagtcgcagctacttcta

SEQ ID NO: 564967 - DNA, 19 bp, Mus musculus
  siRNA target sequence for Tnfsf8 (NM_009403.2,416-434).
gtactggtagtccagaaaa

SEQ ID NO: 564968 - DNA, 19 bp, Mus musculus
  siRNA target sequence for Tnfsf8 (NM_009403.2,437-455).
gactccactccaaatacaa

SEQ ID NO: 564969 - DNA, 19 bp, Mus musculus
  siRNA target sequence for Tnfsf8 (NM_009403.2,439-457).
ctccactccaaatacaact

SEQ ID NO: 564970 - DNA, 19 bp, Mus musculus
  siRNA target sequence for Tnfsf8 (NM_009403.2,559-577).
gcatctcaacaataccaaa

SEQ ID NO: 564971 - DNA, 19 bp, Mus musculus
  siRNA target sequence for Tnfsf8 (NM_009403.2,563-581).
ctcaacaataccaaactgt

SEQ ID NO: 564972 - DNA, 19 bp, Mus musculus
  siRNA target sequence for Tnfsf8 (NM_009403.2,600-618).
ccatccacggactcatata

SEQ ID NO: 564973 - DNA, 19 bp, Mus musculus
  siRNA target sequence for Tnfsf8 (NM_009403.2,641-659).
caattccctggcttgtact

SEQ ID NO: 564974 - DNA, 19 bp, Mus musculus
  siRNA target sequence for Tnfsf8 (NM_009403.2,650-668).
ggcttgtacttcatcgttt

SEQ ID NO: 564975 - DNA, 19 bp, Mus musculus
  siRNA target sequence for Tnfsf8 (NM_009403.2,682-700).
cctcgtgcagtgctcaaat

SEQ ID NO: 564976 - DNA, 19 bp, Mus musculus
  siRNA target sequence for Tnfsf8 (NM_009403.2,686-704).
gtgcagtgctcaaatcatt

SEQ ID NO: 564977 - DNA, 19 bp, Mus musculus
  siRNA target sequence for Tnfsf8 (NM_009403.2,688-706).
gcagtgctcaaatcattct

SEQ ID NO: 564978 - DNA, 19 bp, Mus musculus
  siRNA target sequence for Tnfsf8 (NM_009403.2,717-735).
cattgcagctcctcatcaa

SEQ ID NO: 564979 - DNA, 19 bp, Mus musculus
  siRNA target sequence for Tnfsf8 (NM_009403.2,722-740).
cagctcctcatcaattcca

SEQ ID NO: 564980 - DNA, 19 bp, Mus musculus
  siRNA target sequence for Tnfsf8 (NM_009403.2,779-797).
ggagttcagagtaagaaca

SEQ ID NO: 564981 - DNA, 19 bp, Mus musculus
  siRNA target sequence for Tnfsf8 (NM_009403.2,815-833).
cagtttttgctgcattact

SEQ ID NO: 564982 - DNA, 19 bp, Mus musculus
  siRNA target sequence for Tnfsf8 (NM_009403.2,817-835).
gtttttgctgcattactta

SEQ ID NO: 564983 - DNA, 19 bp, Mus musculus
  siRNA target sequence for Tnfsf8 (NM_009403.2,836-854).
caggtcaactctaccatat

SEQ ID NO: 564984 - DNA, 19 bp, Mus musculus
  siRNA target sequence for Tnfsf8 (NM_009403.2,855-873).
cagtcagggtggataattt

SEQ ID NO: 564985 - DNA, 19 bp, Mus musculus
  siRNA target sequence for Tnfsf8 (NM_009403.2,875-893).
cagtatgtggatacaaaca

SEQ ID NO: 564986 - DNA, 19 bp, Mus musculus
  siRNA target sequence for Tnfsf8 (NM_009403.2,911-929).
gtgctatccgtcttcttat

SEQ ID NO: 564987 - DNA, 19 bp, Mus musculus
  siRNA target sequence for Tnfsf8 (NM_009403.2,913-931).
gctatccgtcttcttatat

SEQ ID NO: 564988 - DNA, 19 bp, Mus musculus
  siRNA target sequence for Tnfsf8 (NM_009403.2,914-932).
ctatccgtcttcttatata

SEQ ID NO: 564989 - DNA, 19 bp, Mus musculus
  siRNA target sequence for Tnfsf9 (NM_009404.1,3-21).
ggaccagcacacacttgat

SEQ ID NO: 564990 - DNA, 19 bp, Mus musculus
  siRNA target sequence for Tnfsf9 (NM_009404.1,112-130).
gctgcgctcctctcagata

SEQ ID NO: 564991 - DNA, 19 bp, Mus musculus
  siRNA target sequence for Tnfsf9 (NM_009404.1,170-188).
cctaccctgcggttaatgt

SEQ ID NO: 564992 - DNA, 19 bp, Mus musculus
  siRNA target sequence for Tnfsf9 (NM_009404.1,171-189).
ctaccctgcggttaatgtt

SEQ ID NO: 564993 - DNA, 19 bp, Mus musculus
  siRNA target sequence for Tnfsf9 (NM_009404.1,320-338).
ctcggccagcgctcacaat

SEQ ID NO: 564994 - DNA, 19 bp, Mus musculus
  siRNA target sequence for Tnfsf9 (NM_009404.1,322-340).
cggccagcgctcacaatca

SEQ ID NO: 564995 - DNA, 19 bp, Mus musculus
  siRNA target sequence for Tnfsf9 (NM_009404.1,354-372).
cctgggtacccgagagaat

SEQ ID NO: 564996 - DNA, 19 bp, Mus musculus
  siRNA target sequence for Tnfsf9 (NM_009404.1,355-373).
ctgggtacccgagagaata

SEQ ID NO: 564997 - DNA, 19 bp, Mus musculus
  siRNA target sequence for Tnfsf9 (NM_009404.1,466-484).
caagcatcgttgtgcaata

SEQ ID NO: 564998 - DNA, 19 bp, Mus musculus
  siRNA target sequence for Tnfsf9 (NM_009404.1,469-487).
gcatcgttgtgcaatacaa

SEQ ID NO: 564999 - DNA, 19 bp, Mus musculus
  siRNA target sequence for Tnfsf9 (NM_009404.1,519-537).
gagctcatacctatctcaa

SEQ ID NO: 565000 - DNA, 19 bp, Mus musculus
  siRNA target sequence for Tnfsf9 (NM_009404.1,586-604).
gggctctactacgtatttt

SEQ ID NO: 565001 - DNA, 19 bp, Mus musculus
  siRNA target sequence for Tnfsf9 (NM_009404.1,615-633).
gctcagtccaacattcaca

SEQ ID NO: 565002 - DNA, 19 bp, Mus musculus
  siRNA target sequence for Tnfsf9 (NM_009404.1,616-634).
ctcagtccaacattcacaa

SEQ ID NO: 565003 - DNA, 19 bp, Mus musculus
  siRNA target sequence for Tnfsf9 (NM_009404.1,684-702).
gcctcaggtagatgacttt

SEQ ID NO: 565004 - DNA, 19 bp, Mus musculus
  siRNA target sequence for Tnfsf9 (NM_009404.1,713-731).
ccctgacagtggaactgtt

SEQ ID NO: 565005 - DNA, 19 bp, Mus musculus
  siRNA target sequence for Il18 (NM_008360.1,183-201).
gactcttgcgtcaacttca

SEQ ID NO: 565006 - DNA, 19 bp, Mus musculus
  siRNA target sequence for Il18 (NM_008360.1,200-218).
caaggaaatgatgtttatt

SEQ ID NO: 565007 - DNA, 19 bp, Mus musculus
  siRNA target sequence for Il18 (NM_008360.1,204-222).
gaaatgatgtttattgaca

SEQ ID NO: 565008 - DNA, 19 bp, Mus musculus
  siRNA target sequence for Il18 (NM_008360.1,276-294).
ggccgacttcactgtacaa

SEQ ID NO: 565009 - DNA, 19 bp, Mus musculus
  siRNA target sequence for Il18 (NM_008360.1,287-305).
ctgtacaaccgcagtaata

SEQ ID NO: 565010 - DNA, 19 bp, Mus musculus
  siRNA target sequence for Il18 (NM_008360.1,295-313).
ccgcagtaatacggaatat

SEQ ID NO: 565011 - DNA, 19 bp, Mus musculus
  siRNA target sequence for Il18 (NM_008360.1,296-314).
cgcagtaatacggaatata

SEQ ID NO: 565012 - DNA, 19 bp, Mus musculus
  siRNA target sequence for Il18 (NM_008360.1,359-377).
ggatatgactgatattgat

SEQ ID NO: 565013 - DNA, 19 bp, Mus musculus
  siRNA target sequence for Il18 (NM_008360.1,400-418).
ccagactgataatatacat

SEQ ID NO: 565014 - DNA, 19 bp, Mus musculus
  siRNA target sequence for Il18 (NM_008360.1,403-421).
gactgataatatacatgta

SEQ ID NO: 565015 - DNA, 19 bp, Mus musculus
  siRNA target sequence for Il18 (NM_008360.1,491-509).
ctgtaagaacaagatcatt

SEQ ID NO: 565016 - DNA, 19 bp, Mus musculus
  siRNA target sequence for Il18 (NM_008360.1,529-547).
cacctgaaaatattgatga

SEQ ID NO: 565017 - DNA, 19 bp, Mus musculus
  siRNA target sequence for Il18 (NM_008360.1,552-570).
caaagtgatctcatattct

SEQ ID NO: 565018 - DNA, 19 bp, Mus musculus
  siRNA target sequence for Il18 (NM_008360.1,558-576).
gatctcatattctttcaga

SEQ ID NO: 565019 - DNA, 19 bp, Mus musculus
  siRNA target sequence for Il18 (NM_008360.1,599-617).
gatggagtttgaatcttca

SEQ ID NO: 565020 - DNA, 19 bp, Mus musculus
  siRNA target sequence for Il18 (NM_008360.1,716-734).
cactctcactaacttacat

SEQ ID NO: 565021 - DNA, 19 bp, Mus musculus
  siRNA target sequence for Il18 (NM_008360.1,718-736).
ctctcactaacttacatca

SEQ ID NO: 565022 - DNA, 19 bp, Mus musculus
  siRNA target sequence for Il18 (NM_008360.1,720-738).
ctcactaacttacatcaaa

SEQ ID NO: 565023 - DNA, 19 bp, Mus musculus
  siRNA target sequence for Il1a (NM_010554.1,59-77).
gtgatttgagatacaaact

SEQ ID NO: 565024 - DNA, 19 bp, Mus musculus
  siRNA target sequence for Il1a (NM_010554.1,61-79).
gatttgagatacaaactga

SEQ ID NO: 565025 - DNA, 19 bp, Mus musculus
  siRNA target sequence for Il1a (NM_010554.1,84-102).
gctcgtcaggcagaagttt

SEQ ID NO: 565026 - DNA, 19 bp, Mus musculus
  siRNA target sequence for Il1a (NM_010554.1,178-196).
gacctgcaacaggaagtaa

SEQ ID NO: 565027 - DNA, 19 bp, Mus musculus
  siRNA target sequence for Il1a (NM_010554.1,221-239).
cgggaggagacgactctaa

SEQ ID NO: 565028 - DNA, 19 bp, Mus musculus
  siRNA target sequence for Il1a (NM_010554.1,222-240).
gggaggagacgactctaaa

SEQ ID NO: 565029 - DNA, 19 bp, Mus musculus
  siRNA target sequence for Il1a (NM_010554.1,223-241).
ggaggagacgactctaaat

SEQ ID NO: 565030 - DNA, 19 bp, Mus musculus
  siRNA target sequence for Il1a (NM_010554.1,224-242).
gaggagacgactctaaata

SEQ ID NO: 565031 - DNA, 19 bp, Mus musculus
  siRNA target sequence for Il1a (NM_010554.1,244-262).
cctgttactctaaaaatct

SEQ ID NO: 565032 - DNA, 19 bp, Mus musculus
  siRNA target sequence for Il1a (NM_010554.1,325-343).
ccagaaacaccaaaactca

SEQ ID NO: 565033 - DNA, 19 bp, Mus musculus
  siRNA target sequence for Il1a (NM_010554.1,326-344).
cagaaacaccaaaactcat

SEQ ID NO: 565034 - DNA, 19 bp, Mus musculus
  siRNA target sequence for Il1a (NM_010554.1,353-371).
gtgagaccgacctcatttt

SEQ ID NO: 565035 - DNA, 19 bp, Mus musculus
  siRNA target sequence for Il1a (NM_010554.1,355-373).
gagaccgacctcattttct

SEQ ID NO: 565036 - DNA, 19 bp, Mus musculus
  siRNA target sequence for Il1a (NM_010554.1,377-395).
ggaaaagtatcaactctaa

SEQ ID NO: 565037 - DNA, 19 bp, Mus musculus
  siRNA target sequence for Il1a (NM_010554.1,402-420).
cttcacatcagctgcttat

SEQ ID NO: 565038 - DNA, 19 bp, Mus musculus
  siRNA target sequence for Il1a (NM_010554.1,469-487).
cggggactgccctctatga

SEQ ID NO: 565039 - DNA, 19 bp, Mus musculus
  siRNA target sequence for Il1a (NM_010554.1,471-489).
gggactgccctctatgaca

SEQ ID NO: 565040 - DNA, 19 bp, Mus musculus
  siRNA target sequence for Il1b (NM_008361.2,96-114).
gaaatgccaccttttgaca

SEQ ID NO: 565041 - DNA, 19 bp, Mus musculus
  siRNA target sequence for Il1b (NM_008361.2,141-159).
gttgacggaccccaaaaga

SEQ ID NO: 565042 - DNA, 19 bp, Mus musculus
  siRNA target sequence for Il1b (NM_008361.2,289-307).
ggcagctacctgtgtcttt

SEQ ID NO: 565043 - DNA, 19 bp, Mus musculus
  siRNA target sequence for Il1b (NM_008361.2,330-348).
gacatgagcaccttctttt

SEQ ID NO: 565044 - DNA, 19 bp, Mus musculus
  siRNA target sequence for Il1b (NM_008361.2,440-458).
ctacaggctccgagatgaa

SEQ ID NO: 565045 - DNA, 19 bp, Mus musculus
  siRNA target sequence for Il1b (NM_008361.2,443-461).
caggctccgagatgaacaa

SEQ ID NO: 565046 - DNA, 19 bp, Mus musculus
  siRNA target sequence for Il1b (NM_008361.2,670-688).
gtgtggatcccaagcaata

SEQ ID NO: 565047 - DNA, 19 bp, Mus musculus
  siRNA target sequence for Il1b (NM_008361.2,679-697).
ccaagcaatacccaaagaa

SEQ ID NO: 565048 - DNA, 19 bp, Mus musculus
  siRNA target sequence for Il1b (NM_008361.2,830-848).
cagtggtcaggacataatt

SEQ ID NO: 565049 - DNA, 19 bp, Mus musculus
  siRNA target sequence for Il1b (NM_008361.2,834-852).
ggtcaggacataattgact

SEQ ID NO: 565050 - DNA, 19 bp, Mus musculus
  siRNA target sequence for Il1f10 (NM_153077.1,41-59).
cccatggcaagatactaca

SEQ ID NO: 565051 - DNA, 19 bp, Mus musculus
  siRNA target sequence for Il1f10 (NM_153077.1,42-60).
ccatggcaagatactacat

SEQ ID NO: 565052 - DNA, 19 bp, Mus musculus
  siRNA target sequence for Il1f10 (NM_153077.1,43-61).
catggcaagatactacata

SEQ ID NO: 565053 - DNA, 19 bp, Mus musculus
  siRNA target sequence for Il1f10 (NM_153077.1,48-66).
caagatactacataatcaa

SEQ ID NO: 565054 - DNA, 19 bp, Mus musculus
  siRNA target sequence for Il1f10 (NM_153077.1,72-90).
cacatcaaaaggctttgta

SEQ ID NO: 565055 - DNA, 19 bp, Mus musculus
  siRNA target sequence for Il1f10 (NM_153077.1,141-159).
gtccagagaaggtctgtat

SEQ ID NO: 565056 - DNA, 19 bp, Mus musculus
  siRNA target sequence for Il1f10 (NM_153077.1,225-243).
gctgcctggcgtgtgtaaa

SEQ ID NO: 565057 - DNA, 19 bp, Mus musculus
  siRNA target sequence for Il1f10 (NM_153077.1,315-333).
ccacccgtttcaccttttt

SEQ ID NO: 565058 - DNA, 19 bp, Mus musculus
  siRNA target sequence for Il1f10 (NM_153077.1,318-336).
cccgtttcacctttttcca

SEQ ID NO: 565059 - DNA, 19 bp, Mus musculus
  siRNA target sequence for Il1f10 (NM_153077.1,422-440).
gtgcagctcaccaaagaga

SEQ ID NO: 565060 - DNA, 19 bp, Mus musculus
  siRNA target sequence for Il1f10 (NM_153077.1,446-464).
ccctccacccatactgaat

SEQ ID NO: 565061 - DNA, 19 bp, Mus musculus
  siRNA target sequence for Il1f10 (NM_153077.1,450-468).
ccacccatactgaattcta

SEQ ID NO: 565062 - DNA, 19 bp, Mus musculus
  siRNA target sequence for Il1f10 (NM_153077.1,453-471).
cccatactgaattctactt

SEQ ID NO: 565063 - DNA, 19 bp, Mus musculus
  siRNA target sequence for Il1f10 (NM_153077.1,454-472).
ccatactgaattctacttt

SEQ ID NO: 565064 - DNA, 19 bp, Mus musculus
  siRNA target sequence for Il1f5 (NM_019451.1,129-147).
cactatgcttccgaatgaa

SEQ ID NO: 565065 - DNA, 19 bp, Mus musculus
  siRNA target sequence for Il1f5 (NM_019451.1,156-174).
ccttgaaggtactgtatct

SEQ ID NO: 565066 - DNA, 19 bp, Mus musculus
  siRNA target sequence for Il1f5 (NM_019451.1,164-182).
gtactgtatctgcacaata

SEQ ID NO: 565067 - DNA, 19 bp, Mus musculus
  siRNA target sequence for Il1f5 (NM_019451.1,208-226).
cgcagagaaggtcattaaa

SEQ ID NO: 565068 - DNA, 19 bp, Mus musculus
  siRNA target sequence for Il1f5 (NM_019451.1,302-320).
ggaagccagtgcctatctt

SEQ ID NO: 565069 - DNA, 19 bp, Mus musculus
  siRNA target sequence for Il1f5 (NM_019451.1,331-349).
gaaagggccaattctgaaa

SEQ ID NO: 565070 - DNA, 19 bp, Mus musculus
  siRNA target sequence for Il1f5 (NM_019451.1,350-368).
cttgagccagtgaacatca

SEQ ID NO: 565071 - DNA, 19 bp, Mus musculus
  siRNA target sequence for Il1f5 (NM_019451.1,431-449).
cttacctccagcttcgaat

SEQ ID NO: 565072 - DNA, 19 bp, Mus musculus
  siRNA target sequence for Il1f5 (NM_019451.1,543-561).
ctcccatcacagacttcta

SEQ ID NO: 565073 - DNA, 19 bp, Mus musculus
  siRNA target sequence for Il1f6 (NM_019450.2,190-208).
catcaccttcgcttagaca

SEQ ID NO: 565074 - DNA, 19 bp, Mus musculus
  siRNA target sequence for Il1f6 (NM_019450.2,430-448).
gggaagggaacataatgga

SEQ ID NO: 565075 - DNA, 19 bp, Mus musculus
  siRNA target sequence for Il1f6 (NM_019450.2,431-449).
ggaagggaacataatggaa

SEQ ID NO: 565076 - DNA, 19 bp, Mus musculus
  siRNA target sequence for Il1f6 (NM_019450.2,435-453).
gggaacataatggaaatgt

SEQ ID NO: 565077 - DNA, 19 bp, Mus musculus
  siRNA target sequence for Il1f6 (NM_019450.2,477-495).
gcctctctcttctatcaca

SEQ ID NO: 565078 - DNA, 19 bp, Mus musculus
  siRNA target sequence for Il1f6 (NM_019450.2,505-523).
gtacaacctctacatttga

SEQ ID NO: 565079 - DNA, 19 bp, Mus musculus
  siRNA target sequence for Il1f6 (NM_019450.2,568-586).
ggagctgcccactcattct

SEQ ID NO: 565080 - DNA, 19 bp, Mus musculus
  siRNA target sequence for Il1f6 (NM_019450.2,591-609).
caagaactgggggaaatct

SEQ ID NO: 565081 - DNA, 19 bp, Mus musculus
  siRNA target sequence for Il1f6 (NM_019450.2,597-615).
ctgggggaaatcttcatca

SEQ ID NO: 565082 - DNA, 19 bp, Mus musculus
  siRNA target sequence for Il1f6 (NM_019450.2,616-634).
ctgacttcgagatgattgt

SEQ ID NO: 565083 - DNA, 19 bp, Mus musculus
  siRNA target sequence for Il1f9 (NM_153511.1,189-207).
caggtgtggatctttcgta

SEQ ID NO: 565084 - DNA, 19 bp, Mus musculus
  siRNA target sequence for Il1f9 (NM_153511.1,191-209).
ggtgtggatctttcgtaat

SEQ ID NO: 565085 - DNA, 19 bp, Mus musculus
  siRNA target sequence for Il1f9 (NM_153511.1,228-246).
ccacgaagccacagagtaa

SEQ ID NO: 565086 - DNA, 19 bp, Mus musculus
  siRNA target sequence for Il1f9 (NM_153511.1,247-265).
ccccagtcagcgtgactat

SEQ ID NO: 565087 - DNA, 19 bp, Mus musculus
  siRNA target sequence for Il1f9 (NM_153511.1,302-320).
caaagggattgccatttat

SEQ ID NO: 565088 - DNA, 19 bp, Mus musculus
  siRNA target sequence for Il1f9 (NM_153511.1,376-394).
ctactttgctgctaaagga

SEQ ID NO: 565089 - DNA, 19 bp, Mus musculus
  siRNA target sequence for Il1f9 (NM_153511.1,468-486).
ggaacatccacctttgaat

SEQ ID NO: 565090 - DNA, 19 bp, Mus musculus
  siRNA target sequence for Il1f9 (NM_153511.1,492-510).
gctttccctggccactata

SEQ ID NO: 565091 - DNA, 19 bp, Mus musculus
  siRNA target sequence for Il1rn (NM_031167.3,235-253).
cattgctgggtacttacaa

SEQ ID NO: 565092 - DNA, 19 bp, Mus musculus
  siRNA target sequence for Il1rn (NM_031167.3,258-276).
caaatatcaaactagaaga

SEQ ID NO: 565093 - DNA, 19 bp, Mus musculus
  siRNA target sequence for Il1rn (NM_031167.3,290-308).
gtgcctattgaccttcata

SEQ ID NO: 565094 - DNA, 19 bp, Mus musculus
  siRNA target sequence for Il1rn (NM_031167.3,292-310).
gcctattgaccttcatagt

SEQ ID NO: 565095 - DNA, 19 bp, Mus musculus
  siRNA target sequence for Il1rn (NM_031167.3,555-573).
cggaagagccccttatagt

SEQ ID NO: 565096 - DNA, 19 bp, Mus musculus
  siRNA target sequence for Tgfb1 (NM_011577.1,1020-1038).
ccagatcctgtccaaacta

SEQ ID NO: 565097 - DNA, 19 bp, Mus musculus
  siRNA target sequence for Tgfb1 (NM_011577.1,1096-1114).
gtgctcgctttgtacaaca

SEQ ID NO: 565098 - DNA, 19 bp, Mus musculus
  siRNA target sequence for Tgfb1 (NM_011577.1,1161-1179).
gcccgaagcggactactat

SEQ ID NO: 565099 - DNA, 19 bp, Mus musculus
  siRNA target sequence for Tgfb1 (NM_011577.1,1169-1187).
cggactactatgctaaaga

SEQ ID NO: 565100 - DNA, 19 bp, Mus musculus
  siRNA target sequence for Tgfb1 (NM_011577.1,1212-1230).
ccgcaacaacgccatctat

SEQ ID NO: 565101 - DNA, 19 bp, Mus musculus
  siRNA target sequence for Tgfb1 (NM_011577.1,1214-1232).
gcaacaacgccatctatga

SEQ ID NO: 565102 - DNA, 19 bp, Mus musculus
  siRNA target sequence for Tgfb1 (NM_011577.1,1218-1236).
caacgccatctatgagaaa

SEQ ID NO: 565103 - DNA, 19 bp, Mus musculus
  siRNA target sequence for Tgfb1 (NM_011577.1,1243-1261).
gacatctcacacagtatat

SEQ ID NO: 565104 - DNA, 19 bp, Mus musculus
  siRNA target sequence for Tgfb1 (NM_011577.1,1269-1287).
cttcaatacgtcagacatt

SEQ ID NO: 565105 - DNA, 19 bp, Mus musculus
  siRNA target sequence for Tgfb1 (NM_011577.1,1329-1347).
gctgcgcttgcagagatta

SEQ ID NO: 565106 - DNA, 19 bp, Mus musculus
  siRNA target sequence for Tgfb1 (NM_011577.1,1330-1348).
ctgcgcttgcagagattaa

SEQ ID NO: 565107 - DNA, 19 bp, Mus musculus
  siRNA target sequence for Tgfb1 (NM_011577.1,1352-1370).
caagtgtggagcaacatgt

SEQ ID NO: 565108 - DNA, 19 bp, Mus musculus
  siRNA target sequence for Tgfb1 (NM_011577.1,1369-1387).
gtggaactctaccagaaat

SEQ ID NO: 565109 - DNA, 19 bp, Mus musculus
  siRNA target sequence for Tgfb1 (NM_011577.1,1371-1389).
ggaactctaccagaaatat

SEQ ID NO: 565110 - DNA, 19 bp, Mus musculus
  siRNA target sequence for Tgfb1 (NM_011577.1,1372-1390).
gaactctaccagaaatata

SEQ ID NO: 565111 - DNA, 19 bp, Mus musculus
  siRNA target sequence for Tgfb1 (NM_011577.1,1381-1399).
cagaaatatagcaacaatt

SEQ ID NO: 565112 - DNA, 19 bp, Mus musculus
  siRNA target sequence for Tgfb1 (NM_011577.1,1395-1413).
caattcctggcgttacctt

SEQ ID NO: 565113 - DNA, 19 bp, Mus musculus
  siRNA target sequence for Tgfb1 (NM_011577.1,1442-1460).
cgcctgagtggctgtcttt

SEQ ID NO: 565114 - DNA, 19 bp, Mus musculus
  siRNA target sequence for Tgfb1 (NM_011577.1,1504-1522).
ggaatacagggctttcgat

SEQ ID NO: 565115 - DNA, 19 bp, Mus musculus
  siRNA target sequence for Tgfb1 (NM_011577.1,1505-1523).
gaatacagggctttcgatt

SEQ ID NO: 565116 - DNA, 19 bp, Mus musculus
  siRNA target sequence for Tgfb1 (NM_011577.1,1697-1715).
ggagagccctggataccaa

SEQ ID NO: 565117 - DNA, 19 bp, Mus musculus
  siRNA target sequence for Tgfb1 (NM_011577.1,1702-1720).
gccctggataccaactatt

SEQ ID NO: 565118 - DNA, 19 bp, Mus musculus
  siRNA target sequence for Tgfb1 (NM_011577.1,1754-1772).
ggcagctgtacattgactt

SEQ ID NO: 565119 - DNA, 19 bp, Mus musculus
  siRNA target sequence for Tgfb1 (NM_011577.1,1755-1773).
gcagctgtacattgacttt

SEQ ID NO: 565120 - DNA, 19 bp, Mus musculus
  siRNA target sequence for Tgfb1 (NM_011577.1,1756-1774).
cagctgtacattgacttta

SEQ ID NO: 565121 - DNA, 19 bp, Mus musculus
  siRNA target sequence for Tgfb1 (NM_011577.1,1836-1854).
gggaccctgcccctatatt

SEQ ID NO: 565122 - DNA, 19 bp, Mus musculus
  siRNA target sequence for Tgfb1 (NM_011577.1,1837-1855).
ggaccctgcccctatattt

SEQ ID NO: 565123 - DNA, 19 bp, Mus musculus
  siRNA target sequence for Tgfb1 (NM_011577.1,1955-1973).
cactgcccatcgtctacta

SEQ ID NO: 565124 - DNA, 19 bp, Mus musculus
  siRNA target sequence for Tgfb1 (NM_011577.1,1998-2016).
gcagttgtccaacatgatt

SEQ ID NO: 565125 - DNA, 19 bp, Mus musculus
  siRNA target sequence for Tgfb2 (NM_009367.1,1296-1314).
ctcgacatggatcagttta

SEQ ID NO: 565126 - DNA, 19 bp, Mus musculus
  siRNA target sequence for Tgfb2 (NM_009367.1,1511-1529).
ctacgccaaggaggtttat

SEQ ID NO: 565127 - DNA, 19 bp, Mus musculus
  siRNA target sequence for Tgfb2 (NM_009367.1,1600-1618).
gaatcgtccgctttgatgt

SEQ ID NO: 565128 - DNA, 19 bp, Mus musculus
  siRNA target sequence for Tgfb2 (NM_009367.1,1608-1626).
cgctttgatgtctcaacaa

SEQ ID NO: 565129 - DNA, 19 bp, Mus musculus
  siRNA target sequence for Tgfb2 (NM_009367.1,1666-1684).
gggtcttccgcttgcaaaa

SEQ ID NO: 565130 - DNA, 19 bp, Mus musculus
  siRNA target sequence for Tgfb2 (NM_009367.1,1702-1720).
ccgagcagcggattgaact

SEQ ID NO: 565131 - DNA, 19 bp, Mus musculus
  siRNA target sequence for Tgfb2 (NM_009367.1,1772-1790).
cgatagcaaggttgtgaaa

SEQ ID NO: 565132 - DNA, 19 bp, Mus musculus
  siRNA target sequence for Tgfb2 (NM_009367.1,1773-1791).
gatagcaaggttgtgaaaa

SEQ ID NO: 565133 - DNA, 19 bp, Mus musculus
  siRNA target sequence for Tgfb2 (NM_009367.1,1906-1924).
ccttcgtgccgtctaataa

SEQ ID NO: 565134 - DNA, 19 bp, Mus musculus
  siRNA target sequence for Tgfb2 (NM_009367.1,1907-1925).
cttcgtgccgtctaataat

SEQ ID NO: 565135 - DNA, 19 bp, Mus musculus
  siRNA target sequence for Tgfb2 (NM_009367.1,1911-1929).
gtgccgtctaataattaca

SEQ ID NO: 565136 - DNA, 19 bp, Mus musculus
  siRNA target sequence for Tgfb2 (NM_009367.1,1914-1932).
ccgtctaataattacatca

SEQ ID NO: 565137 - DNA, 19 bp, Mus musculus
  siRNA target sequence for Tgfb2 (NM_009367.1,1915-1933).
cgtctaataattacatcat

SEQ ID NO: 565138 - DNA, 19 bp, Mus musculus
  siRNA target sequence for Tgfb2 (NM_009367.1,1952-1970).
gctcgaggcgagatttgca

SEQ ID NO: 565139 - DNA, 19 bp, Mus musculus
  siRNA target sequence for Tgfb2 (NM_009367.1,1960-1978).
cgagatttgcaggtattga

SEQ ID NO: 565140 - DNA, 19 bp, Mus musculus
  siRNA target sequence for Tgfb2 (NM_009367.1,2001-2019).
ggtgatcagaaaactataa

SEQ ID NO: 565141 - DNA, 19 bp, Mus musculus
  siRNA target sequence for Tgfb2 (NM_009367.1,2055-2073).
catctcctgctaatgttgt

SEQ ID NO: 565142 - DNA, 19 bp, Mus musculus
  siRNA target sequence for Tgfb2 (NM_009367.1,2114-2132).
gaagaagcgcgctttggat

SEQ ID NO: 565143 - DNA, 19 bp, Mus musculus
  siRNA target sequence for Tgfb2 (NM_009367.1,2170-2188).
gccttcgccctctttacat

SEQ ID NO: 565144 - DNA, 19 bp, Mus musculus
  siRNA target sequence for Tgfb2 (NM_009367.1,2171-2189).
ccttcgccctctttacatt

SEQ ID NO: 565145 - DNA, 19 bp, Mus musculus
  siRNA target sequence for Tgfb2 (NM_009367.1,2175-2193).
cgccctctttacattgatt

SEQ ID NO: 565146 - DNA, 19 bp, Mus musculus
  siRNA target sequence for Tgfb2 (NM_009367.1,2230-2248).
ccaaagggtacaatgctaa

SEQ ID NO: 565147 - DNA, 19 bp, Mus musculus
  siRNA target sequence for Tgfb2 (NM_009367.1,2235-2253).
gggtacaatgctaacttct

SEQ ID NO: 565148 - DNA, 19 bp, Mus musculus
  siRNA target sequence for Tgfb2 (NM_009367.1,2259-2277).
ggggcatgcccatatctat

SEQ ID NO: 565149 - DNA, 19 bp, Mus musculus
  siRNA target sequence for Tgfb2 (NM_009367.1,2376-2394).
ccactgaccattctctatt

SEQ ID NO: 565150 - DNA, 19 bp, Mus musculus
  siRNA target sequence for Tgfb2 (NM_009367.1,2377-2395).
cactgaccattctctatta

SEQ ID NO: 565151 - DNA, 19 bp, Mus musculus
  siRNA target sequence for Tgfb2 (NM_009367.1,2379-2397).
ctgaccattctctattaca

SEQ ID NO: 565152 - DNA, 19 bp, Mus musculus
  siRNA target sequence for Tgfb2 (NM_009367.1,2414-2432).
gatcgaacagctttccaat

SEQ ID NO: 565153 - DNA, 19 bp, Mus musculus
  siRNA target sequence for Tgfb2 (NM_009367.1,2424-2442).
ctttccaatatgattgtca

SEQ ID NO: 565154 - DNA, 19 bp, Mus musculus
  siRNA target sequence for Tgfb3 (NM_009368.1,695-713).
gacttcggccacatcaaga

SEQ ID NO: 565155 - DNA, 19 bp, Mus musculus
  siRNA target sequence for Tgfb3 (NM_009368.1,729-747).
ccattaggggacagatctt

SEQ ID NO: 565156 - DNA, 19 bp, Mus musculus
  siRNA target sequence for Tgfb3 (NM_009368.1,888-906).
cctcggagtctgagtacta

SEQ ID NO: 565157 - DNA, 19 bp, Mus musculus
  siRNA target sequence for Tgfb3 (NM_009368.1,899-917).
gagtactatgccaaagaga

SEQ ID NO: 565158 - DNA, 19 bp, Mus musculus
  siRNA target sequence for Tgfb3 (NM_009368.1,908-926).
gccaaagagatccataaat

SEQ ID NO: 565159 - DNA, 19 bp, Mus musculus
  siRNA target sequence for Tgfb3 (NM_009368.1,909-927).
ccaaagagatccataaatt

SEQ ID NO: 565160 - DNA, 19 bp, Mus musculus
  siRNA target sequence for Tgfb3 (NM_009368.1,942-960).
gactggcggagcacaatga

SEQ ID NO: 565161 - DNA, 19 bp, Mus musculus
  siRNA target sequence for Tgfb3 (NM_009368.1,966-984).
ccgtctgccccaaaggaat

SEQ ID NO: 565162 - DNA, 19 bp, Mus musculus
  siRNA target sequence for Tgfb3 (NM_009368.1,967-985).
cgtctgccccaaaggaatt

SEQ ID NO: 565163 - DNA, 19 bp, Mus musculus
  siRNA target sequence for Tgfb3 (NM_009368.1,995-1013).
gtttttcgtttcaatgtgt

SEQ ID NO: 565164 - DNA, 19 bp, Mus musculus
  siRNA target sequence for Tgfb3 (NM_009368.1,1254-1272).
ccaacttgggtctggaaat

SEQ ID NO: 565165 - DNA, 19 bp, Mus musculus
  siRNA target sequence for Tgfb3 (NM_009368.1,1397-1415).
gggcgtctcaagaagcaaa

SEQ ID NO: 565166 - DNA, 19 bp, Mus musculus
  siRNA target sequence for Tgfb3 (NM_009368.1,1580-1598).
caggatctaggctggaaat

SEQ ID NO: 565167 - DNA, 19 bp, Mus musculus
  siRNA target sequence for Tgfb3 (NM_009368.1,1757-1775).
cccctgaccatcttgtact

SEQ ID NO: 565168 - DNA, 19 bp, Mus musculus
  siRNA target sequence for Tgfb3 (NM_009368.1,1759-1777).
cctgaccatcttgtactat

SEQ ID NO: 565169 - DNA, 19 bp, Mus musculus
  siRNA target sequence for Tgfb3 (NM_009368.1,1817-1835).
gtggtgaagtcgtgtaagt

SEQ ID NO: 565170 - DNA, 19 bp, Mus musculus
  siRNA target sequence for Nrg1 (NM_178591.1,490-508).
ctcccagattgaaagagat

SEQ ID NO: 565171 - DNA, 19 bp, Mus musculus
  siRNA target sequence for Nrg1 (NM_178591.1,540-558).
ctcgtgcttcggtgtgaaa

SEQ ID NO: 565172 - DNA, 19 bp, Mus musculus
  siRNA target sequence for Nrg1 (NM_178591.1,572-590).
ctcctcactcagattcaaa

SEQ ID NO: 565173 - DNA, 19 bp, Mus musculus
  siRNA target sequence for Nrg1 (NM_178591.1,577-595).
cactcagattcaaatggtt

SEQ ID NO: 565174 - DNA, 19 bp, Mus musculus
  siRNA target sequence for Nrg1 (NM_178591.1,583-601).
gattcaaatggttcaagaa

SEQ ID NO: 565175 - DNA, 19 bp, Mus musculus
  siRNA target sequence for Nrg1 (NM_178591.1,611-629).
gctgaaccgtaggaataaa

SEQ ID NO: 565176 - DNA, 19 bp, Mus musculus
  siRNA target sequence for Nrg1 (NM_178591.1,614-632).
gaaccgtaggaataaacca

SEQ ID NO: 565177 - DNA, 19 bp, Mus musculus
  siRNA target sequence for Nrg1 (NM_178591.1,619-637).
gtaggaataaaccacaaaa

SEQ ID NO: 565178 - DNA, 19 bp, Mus musculus
  siRNA target sequence for Nrg1 (NM_178591.1,622-640).
ggaataaaccacaaaacgt

SEQ ID NO: 565179 - DNA, 19 bp, Mus musculus
  siRNA target sequence for Nrg1 (NM_178591.1,661-679).
ggaagtcagagcttcgaat

SEQ ID NO: 565180 - DNA, 19 bp, Mus musculus
  siRNA target sequence for Nrg1 (NM_178591.1,667-685).
cagagcttcgaatcaacaa

SEQ ID NO: 565181 - DNA, 19 bp, Mus musculus
  siRNA target sequence for Nrg1 (NM_178591.1,757-775).
ccaacatcaccattgttga

SEQ ID NO: 565182 - DNA, 19 bp, Mus musculus
  siRNA target sequence for Nrg1 (NM_178591.1,832-850).
cagagtctcccattagaat

SEQ ID NO: 565183 - DNA, 19 bp, Mus musculus
  siRNA target sequence for Nrg1 (NM_178591.1,834-852).
gagtctcccattagaatat

SEQ ID NO: 565184 - DNA, 19 bp, Mus musculus
  siRNA target sequence for Nrg1 (NM_178591.1,838-856).
ctcccattagaatatcagt

SEQ ID NO: 565185 - DNA, 19 bp, Mus musculus
  siRNA target sequence for Nrg1 (NM_178591.1,840-858).
cccattagaatatcagttt

SEQ ID NO: 565186 - DNA, 19 bp, Mus musculus
  siRNA target sequence for Nrg1 (NM_178591.1,907-925).
ggaccagccatctcataaa

SEQ ID NO: 565187 - DNA, 19 bp, Mus musculus
  siRNA target sequence for Nrg1 (NM_178591.1,987-1005).
ctgtcaaacccctcaagat

SEQ ID NO: 565188 - DNA, 19 bp, Mus musculus
  siRNA target sequence for Kitl (NM_013598.1,217-235).
ggattatcacttgcattta

SEQ ID NO: 565189 - DNA, 19 bp, Mus musculus
  siRNA target sequence for Kitl (NM_013598.1,224-242).
cacttgcatttatcttcaa

SEQ ID NO: 565190 - DNA, 19 bp, Mus musculus
  siRNA target sequence for Kitl (NM_013598.1,226-244).
cttgcatttatcttcaact

SEQ ID NO: 565191 - DNA, 19 bp, Mus musculus
  siRNA target sequence for Kitl (NM_013598.1,285-303).
gggaatcctgtgactgata

SEQ ID NO: 565192 - DNA, 19 bp, Mus musculus
  siRNA target sequence for Kitl (NM_013598.1,286-304).
ggaatcctgtgactgataa

SEQ ID NO: 565193 - DNA, 19 bp, Mus musculus
  siRNA target sequence for Kitl (NM_013598.1,287-305).
gaatcctgtgactgataat

SEQ ID NO: 565194 - DNA, 19 bp, Mus musculus
  siRNA target sequence for Kitl (NM_013598.1,291-309).
cctgtgactgataatgtaa

SEQ ID NO: 565195 - DNA, 19 bp, Mus musculus
  siRNA target sequence for Kitl (NM_013598.1,330-348).
gcaaatcttccaaatgact

SEQ ID NO: 565196 - DNA, 19 bp, Mus musculus
  siRNA target sequence for Kitl (NM_013598.1,381-399).
gatgttttgcctagtcatt

SEQ ID NO: 565197 - DNA, 19 bp, Mus musculus
  siRNA target sequence for Kitl (NM_013598.1,384-402).
gttttgcctagtcattgtt

SEQ ID NO: 565198 - DNA, 19 bp, Mus musculus
  siRNA target sequence for Kitl (NM_013598.1,403-421).
ggctacgagatatggtaat

SEQ ID NO: 565199 - DNA, 19 bp, Mus musculus
  siRNA target sequence for Kitl (NM_013598.1,404-422).
gctacgagatatggtaata

SEQ ID NO: 565200 - DNA, 19 bp, Mus musculus
  siRNA target sequence for Kitl (NM_013598.1,408-426).
cgagatatggtaatacaat

SEQ ID NO: 565201 - DNA, 19 bp, Mus musculus
  siRNA target sequence for Kitl (NM_013598.1,409-427).
gagatatggtaatacaatt

SEQ ID NO: 565202 - DNA, 19 bp, Mus musculus
  siRNA target sequence for Kitl (NM_013598.1,411-429).
gatatggtaatacaattat

SEQ ID NO: 565203 - DNA, 19 bp, Mus musculus
  siRNA target sequence for Kitl (NM_013598.1,450-468).
ctggacaagttctcaaata

SEQ ID NO: 565204 - DNA, 19 bp, Mus musculus
  siRNA target sequence for Kitl (NM_013598.1,472-490).
ctgaaggcttgagtaatta

SEQ ID NO: 565205 - DNA, 19 bp, Mus musculus
  siRNA target sequence for Kitl (NM_013598.1,474-492).
gaaggcttgagtaattact

SEQ ID NO: 565206 - DNA, 19 bp, Mus musculus
  siRNA target sequence for Kitl (NM_013598.1,482-500).
gagtaattactccatcata

SEQ ID NO: 565207 - DNA, 19 bp, Mus musculus
  siRNA target sequence for Kitl (NM_013598.1,484-502).
gtaattactccatcataga

SEQ ID NO: 565208 - DNA, 19 bp, Mus musculus
  siRNA target sequence for Kitl (NM_013598.1,491-509).
ctccatcatagacaaactt

SEQ ID NO: 565209 - DNA, 19 bp, Mus musculus
  siRNA target sequence for Kitl (NM_013598.1,519-537).
gtggatgacctcgtgttat

SEQ ID NO: 565210 - DNA, 19 bp, Mus musculus
  siRNA target sequence for Kitl (NM_013598.1,522-540).
gatgacctcgtgttatgca

SEQ ID NO: 565211 - DNA, 19 bp, Mus musculus
  siRNA target sequence for Kitl (NM_013598.1,546-564).
gaaaacgcaccgaagaata

SEQ ID NO: 565212 - DNA, 19 bp, Mus musculus
  siRNA target sequence for Kitl (NM_013598.1,585-603).
ccagaaactagatccttta

SEQ ID NO: 565213 - DNA, 19 bp, Mus musculus
  siRNA target sequence for Kitl (NM_013598.1,685-703).
gtgtgctctcttcaacatt

SEQ ID NO: 565214 - DNA, 19 bp, Mus musculus
  siRNA target sequence for Kitl (NM_013598.1,722-740).
cagagtcagtgtcacaaaa

SEQ ID NO: 565215 - DNA, 19 bp, Mus musculus
  siRNA target sequence for Kitl (NM_013598.1,726-744).
gtcagtgtcacaaaaccat

SEQ ID NO: 565216 - DNA, 19 bp, Mus musculus
  siRNA target sequence for Kitl (NM_013598.1,732-750).
gtcacaaaaccatttatgt

SEQ ID NO: 565217 - DNA, 19 bp, Mus musculus
  siRNA target sequence for Kitl (NM_013598.1,734-752).
cacaaaaccatttatgtta

SEQ ID NO: 565218 - DNA, 19 bp, Mus musculus
  siRNA target sequence for Kitl (NM_013598.1,822-840).
gaagactcgggcctacaat

SEQ ID NO: 565219 - DNA, 19 bp, Mus musculus
  siRNA target sequence for Kitl (NM_013598.1,851-869).
ggcattgccggctctcatt

SEQ ID NO: 565220 - DNA, 19 bp, Mus musculus
  siRNA target sequence for Kitl (NM_013598.1,861-879).
gctctcatttcgcttgtaa

SEQ ID NO: 565221 - DNA, 19 bp, Mus musculus
  siRNA target sequence for Kitl (NM_013598.1,862-880).
ctctcatttcgcttgtaat

SEQ ID NO: 565222 - DNA, 19 bp, Mus musculus
  siRNA target sequence for Kitl (NM_013598.1,914-932).
gaaacagtcaagtcttaca

SEQ ID NO: 565223 - DNA, 19 bp, Mus musculus
  siRNA target sequence for Kitl (NM_013598.1,927-945).
cttacaagggcagttgaaa

SEQ ID NO: 565224 - DNA, 19 bp, Mus musculus
  siRNA target sequence for Kitl (NM_013598.1,936-954).
gcagttgaaaatatacaga

SEQ ID NO: 565225 - DNA, 19 bp, Mus musculus
  siRNA target sequence for Kitl (NM_013598.1,937-955).
cagttgaaaatatacagat

SEQ ID NO: 565226 - DNA, 19 bp, Mus musculus
  siRNA target sequence for Kitl (NM_013598.1,939-957).
gttgaaaatatacagatta

SEQ ID NO: 565227 - DNA, 19 bp, Mus musculus
  siRNA target sequence for Pdgfc (NM_019971.2,1162-1180).
gagagttgtcactatatct

SEQ ID NO: 565228 - DNA, 19 bp, Mus musculus
  siRNA target sequence for Pdgfc (NM_019971.2,1201-1219).
cccgaagtttcctcataca

SEQ ID NO: 565229 - DNA, 19 bp, Mus musculus
  siRNA target sequence for Pdgfc (NM_019971.2,1202-1220).
ccgaagtttcctcatacat

SEQ ID NO: 565230 - DNA, 19 bp, Mus musculus
  siRNA target sequence for Pdgfc (NM_019971.2,1203-1221).
cgaagtttcctcatacata

SEQ ID NO: 565231 - DNA, 19 bp, Mus musculus
  siRNA target sequence for Pdgfc (NM_019971.2,1237-1255).
gctggtgtggagattagtt

SEQ ID NO: 565232 - DNA, 19 bp, Mus musculus
  siRNA target sequence for Pdgfc (NM_019971.2,1246-1264).
gagattagttgcagtagat

SEQ ID NO: 565233 - DNA, 19 bp, Mus musculus
  siRNA target sequence for Pdgfc (NM_019971.2,1248-1266).
gattagttgcagtagatga

SEQ ID NO: 565234 - DNA, 19 bp, Mus musculus
  siRNA target sequence for Pdgfc (NM_019971.2,1313-1331).
gatccagaagacgatatat

SEQ ID NO: 565235 - DNA, 19 bp, Mus musculus
  siRNA target sequence for Pdgfc (NM_019971.2,1316-1334).
ccagaagacgatatatgca

SEQ ID NO: 565236 - DNA, 19 bp, Mus musculus
  siRNA target sequence for Pdgfc (NM_019971.2,1324-1342).
cgatatatgcaagtatgat

SEQ ID NO: 565237 - DNA, 19 bp, Mus musculus
  siRNA target sequence for Pdgfc (NM_019971.2,1332-1350).
gcaagtatgattttgtaga

SEQ ID NO: 565238 - DNA, 19 bp, Mus musculus
  siRNA target sequence for Pdgfc (NM_019971.2,1333-1351).
caagtatgattttgtagaa

SEQ ID NO: 565239 - DNA, 19 bp, Mus musculus
  siRNA target sequence for Pdgfc (NM_019971.2,1410-1428).
caggaaagcagacttctaa

SEQ ID NO: 565240 - DNA, 19 bp, Mus musculus
  siRNA target sequence for Pdgfc (NM_019971.2,1420-1438).
gacttctaaaggaaatcat

SEQ ID NO: 565241 - DNA, 19 bp, Mus musculus
  siRNA target sequence for Pdgfc (NM_019971.2,1444-1462).
gataagatttgtatctgat

SEQ ID NO: 565242 - DNA, 19 bp, Mus musculus
  siRNA target sequence for Pdgfc (NM_019971.2,1449-1467).
gatttgtatctgatgagta

SEQ ID NO: 565243 - DNA, 19 bp, Mus musculus
  siRNA target sequence for Pdgfc (NM_019971.2,1489-1507).
ctgcatccactacagtatt

SEQ ID NO: 565244 - DNA, 19 bp, Mus musculus
  siRNA target sequence for Pdgfc (NM_019971.2,1543-1561).
ggtgttgcccccttcatct

SEQ ID NO: 565245 - DNA, 19 bp, Mus musculus
  siRNA target sequence for Pdgfc (NM_019971.2,1544-1562).
gtgttgcccccttcatctt

SEQ ID NO: 565246 - DNA, 19 bp, Mus musculus
  siRNA target sequence for Pdgfc (NM_019971.2,1794-1812).
ccatacgggaagagctaaa

SEQ ID NO: 565247 - DNA, 19 bp, Mus musculus
  siRNA target sequence for Pdgfc (NM_019971.2,1872-1890).
gtgcctgttgtctccataa

SEQ ID NO: 565248 - DNA, 19 bp, Mus musculus
  siRNA target sequence for Pdgfc (NM_019971.2,1874-1892).
gcctgttgtctccataatt

SEQ ID NO: 565249 - DNA, 19 bp, Mus musculus
  siRNA target sequence for Pdgfc (NM_019971.2,1878-1896).
gttgtctccataattgcaa

SEQ ID NO: 565250 - DNA, 19 bp, Mus musculus
  siRNA target sequence for Pdgfc (NM_019971.2,1906-1924).
gtgtgtcccacgtaaagtt

SEQ ID NO: 565251 - DNA, 19 bp, Mus musculus
  siRNA target sequence for Pdgfc (NM_019971.2,1910-1928).
gtcccacgtaaagttacaa

SEQ ID NO: 565252 - DNA, 19 bp, Mus musculus
  siRNA target sequence for Pdgfc (NM_019971.2,1912-1930).
cccacgtaaagttacaaaa

SEQ ID NO: 565253 - DNA, 19 bp, Mus musculus
  siRNA target sequence for Pdgfc (NM_019971.2,1945-1963).
ccttcagttgagaccaaaa

SEQ ID NO: 565254 - DNA, 19 bp, Mus musculus
  siRNA target sequence for Pdgfc (NM_019971.2,1946-1964).
cttcagttgagaccaaaaa

SEQ ID NO: 565255 - DNA, 19 bp, Mus musculus
  siRNA target sequence for Pdgfc (NM_019971.2,1967-1985).
ggagtcaagggattgcata

SEQ ID NO: 565256 - DNA, 19 bp, Mus musculus
  siRNA target sequence for Pdgfc (NM_019971.2,1970-1988).
gtcaagggattgcataagt

SEQ ID NO: 565257 - DNA, 19 bp, Mus musculus
  siRNA target sequence for 1110021N19Rik (NM_020519.1,89-107).
gaggccttccgatgctata

SEQ ID NO: 565258 - DNA, 19 bp, Mus musculus
  siRNA target sequence for 1110021N19Rik (NM_020519.1,92-110).
gccttccgatgctatacct

SEQ ID NO: 565259 - DNA, 19 bp, Mus musculus
  siRNA target sequence for 1110021N19Rik (NM_020519.1,116-134).
cagcccacggccattaact

SEQ ID NO: 565260 - DNA, 19 bp, Mus musculus
  siRNA target sequence for 1110021N19Rik (NM_020519.1,118-136).
gcccacggccattaactca

SEQ ID NO: 565261 - DNA, 19 bp, Mus musculus
  siRNA target sequence for 1110021N19Rik (NM_020519.1,127-145).
cattaactcatgcaagaat

SEQ ID NO: 565262 - DNA, 19 bp, Mus musculus
  siRNA target sequence for 1700001C14Rik (NM_029295.1,311-329).
gtggacttgacaagataat

SEQ ID NO: 565263 - DNA, 19 bp, Mus musculus
  siRNA target sequence for 1700001C14Rik (NM_029295.1,351-369).
gcttgatgttattaactca

SEQ ID NO: 565264 - DNA, 19 bp, Mus musculus
  siRNA target sequence for 1700001C14Rik (NM_029295.1,366-384).
ctcaatggtaacagcatta

SEQ ID NO: 565265 - DNA, 19 bp, Mus musculus
  siRNA target sequence for 1700001C14Rik (NM_029295.1,399-417).
gtctgtgttggctctaata

SEQ ID NO: 565266 - DNA, 19 bp, Mus musculus
  siRNA target sequence for 1700001C14Rik (NM_029295.1,442-460).
cttggaggggtgtttggtt

SEQ ID NO: 565267 - DNA, 19 bp, Mus musculus
  siRNA target sequence for 1700001C14Rik (NM_029295.1,463-481).
ctgacagtaacatgtacta

SEQ ID NO: 565268 - DNA, 19 bp, Mus musculus
  siRNA target sequence for 1700001C14Rik (NM_029295.1,465-483).
gacagtaacatgtactatt

SEQ ID NO: 565269 - DNA, 19 bp, Mus musculus
  siRNA target sequence for 1700001C14Rik (NM_029295.1,521-539).
gtccacgtcaaccttatca

SEQ ID NO: 565270 - DNA, 19 bp, Mus musculus
  siRNA target sequence for 1700001C14Rik (NM_029295.1,523-541).
ccacgtcaaccttatcaga

SEQ ID NO: 565271 - DNA, 19 bp, Mus musculus
  siRNA target sequence for 1700001C14Rik (NM_029295.1,524-542).
cacgtcaaccttatcagaa

SEQ ID NO: 565272 - DNA, 19 bp, Mus musculus
  siRNA target sequence for 1700001C14Rik (NM_029295.1,526-544).
cgtcaaccttatcagaaaa

SEQ ID NO: 565273 - DNA, 19 bp, Mus musculus
  siRNA target sequence for 1700001C14Rik (NM_029295.1,529-547).
caaccttatcagaaaaagt

SEQ ID NO: 565274 - DNA, 19 bp, Mus musculus
  siRNA target sequence for 1700001C14Rik (NM_029295.1,532-550).
ccttatcagaaaaagtcta

SEQ ID NO: 565275 - DNA, 19 bp, Mus musculus
  siRNA target sequence for 1700001C14Rik (NM_029313.1,299-317).
ggcctttgcttgtaagtga

SEQ ID NO: 565276 - DNA, 19 bp, Mus musculus
  siRNA target sequence for 1700001C14Rik (NM_029313.1,306-324).
gcttgtaagtgatgaactt

SEQ ID NO: 565277 - DNA, 19 bp, Mus musculus
  siRNA target sequence for Areg (NM_009704.2,250-268).
cttaggctcaggccattat

SEQ ID NO: 565278 - DNA, 19 bp, Mus musculus
  siRNA target sequence for Areg (NM_009704.2,427-445).
ctcagaggagtatgataat

SEQ ID NO: 565279 - DNA, 19 bp, Mus musculus
  siRNA target sequence for Areg (NM_009704.2,450-468).
cacaaatatccggctatat

SEQ ID NO: 565280 - DNA, 19 bp, Mus musculus
  siRNA target sequence for Areg (NM_009704.2,452-470).
caaatatccggctatatta

SEQ ID NO: 565281 - DNA, 19 bp, Mus musculus
  siRNA target sequence for Areg (NM_009704.2,459-477).
ccggctatattatagatga

SEQ ID NO: 565282 - DNA, 19 bp, Mus musculus
  siRNA target sequence for Areg (NM_009704.2,460-478).
cggctatattatagatgat

SEQ ID NO: 565283 - DNA, 19 bp, Mus musculus
  siRNA target sequence for Areg (NM_009704.2,461-479).
ggctatattatagatgatt

SEQ ID NO: 565284 - DNA, 19 bp, Mus musculus
  siRNA target sequence for Areg (NM_009704.2,496-514).
ggtgattaagcccaagaaa

SEQ ID NO: 565285 - DNA, 19 bp, Mus musculus
  siRNA target sequence for Areg (NM_009704.2,497-515).
gtgattaagcccaagaaaa

SEQ ID NO: 565286 - DNA, 19 bp, Mus musculus
  siRNA target sequence for Areg (NM_009704.2,625-643).
gtttcagaacttttgcatt

SEQ ID NO: 565287 - DNA, 19 bp, Mus musculus
  siRNA target sequence for Areg (NM_009704.2,644-662).
catggcgaatgcagataca

SEQ ID NO: 565288 - DNA, 19 bp, Mus musculus
  siRNA target sequence for Areg (NM_009704.2,673-691).
ggaggtggtgacatgcaat

SEQ ID NO: 565289 - DNA, 19 bp, Mus musculus
  siRNA target sequence for Areg (NM_009704.2,674-692).
gaggtggtgacatgcaatt

SEQ ID NO: 565290 - DNA, 19 bp, Mus musculus
  siRNA target sequence for Areg (NM_009704.2,676-694).
ggtggtgacatgcaattgt

SEQ ID NO: 565291 - DNA, 19 bp, Mus musculus
  siRNA target sequence for Areg (NM_009704.2,682-700).
gacatgcaattgtcatcaa

SEQ ID NO: 565292 - DNA, 19 bp, Mus musculus
  siRNA target sequence for Areg (NM_009704.2,687-705).
gcaattgtcatcaagatta

SEQ ID NO: 565293 - DNA, 19 bp, Mus musculus
  siRNA target sequence for Areg (NM_009704.2,711-729).
gtgaacggtgtggagaaaa

SEQ ID NO: 565294 - DNA, 19 bp, Mus musculus
  siRNA target sequence for Areg (NM_009704.2,757-775).
caaggacctatccaagatt

SEQ ID NO: 565295 - DNA, 19 bp, Mus musculus
  siRNA target sequence for Areg (NM_009704.2,808-826).
catcatcctcgcagctatt

SEQ ID NO: 565296 - DNA, 19 bp, Mus musculus
  siRNA target sequence for Areg (NM_009704.2,827-845).
ggcatcggcatcgttatca

SEQ ID NO: 565297 - DNA, 19 bp, Mus musculus
  siRNA target sequence for Bmp10 (NM_009756.1,320-338).
gcttcaagaacgaactgtt

SEQ ID NO: 565298 - DNA, 19 bp, Mus musculus
  siRNA target sequence for Bmp10 (NM_009756.1,324-342).
caagaacgaactgttttct

SEQ ID NO: 565299 - DNA, 19 bp, Mus musculus
  siRNA target sequence for Bmp10 (NM_009756.1,327-345).
gaacgaactgttttctcaa

SEQ ID NO: 565300 - DNA, 19 bp, Mus musculus
  siRNA target sequence for Bmp10 (NM_009756.1,455-473).
gagatcgcatgatgtatga

SEQ ID NO: 565301 - DNA, 19 bp, Mus musculus
  siRNA target sequence for Bmp10 (NM_009756.1,472-490).
gatggcgtggaccgtaaaa

SEQ ID NO: 565302 - DNA, 19 bp, Mus musculus
  siRNA target sequence for Bmp10 (NM_009756.1,475-493).
ggcgtggaccgtaaaatta

SEQ ID NO: 565303 - DNA, 19 bp, Mus musculus
  siRNA target sequence for Bmp10 (NM_009756.1,478-496).
gtggaccgtaaaattacca

SEQ ID NO: 565304 - DNA, 19 bp, Mus musculus
  siRNA target sequence for Bmp10 (NM_009756.1,539-557).
ggagcatgctggtcttagt

SEQ ID NO: 565305 - DNA, 19 bp, Mus musculus
  siRNA target sequence for Bmp10 (NM_009756.1,543-561).
catgctggtcttagtatca

SEQ ID NO: 565306 - DNA, 19 bp, Mus musculus
  siRNA target sequence for Bmp10 (NM_009756.1,546-564).
gctggtcttagtatcaaca

SEQ ID NO: 565307 - DNA, 19 bp, Mus musculus
  siRNA target sequence for Bmp10 (NM_009756.1,654-672).
gctggagatccacatagaa

SEQ ID NO: 565308 - DNA, 19 bp, Mus musculus
  siRNA target sequence for Bmp10 (NM_009756.1,655-673).
ctggagatccacatagaaa

SEQ ID NO: 565309 - DNA, 19 bp, Mus musculus
  siRNA target sequence for Bmp10 (NM_009756.1,709-727).
caactggaaatagatatga

SEQ ID NO: 565310 - DNA, 19 bp, Mus musculus
  siRNA target sequence for Bmp10 (NM_009756.1,726-744).
gagtgcccaaaataagcat

SEQ ID NO: 565311 - DNA, 19 bp, Mus musculus
  siRNA target sequence for Bmp10 (NM_009756.1,799-817).
gaagaactgaacgaattga

SEQ ID NO: 565312 - DNA, 19 bp, Mus musculus
  siRNA target sequence for Bmp10 (NM_009756.1,896-914).
ggtcgaacatgattgatga

SEQ ID NO: 565313 - DNA, 19 bp, Mus musculus
  siRNA target sequence for Bmp10 (NM_009756.1,897-915).
gtcgaacatgattgatgat

SEQ ID NO: 565314 - DNA, 19 bp, Mus musculus
  siRNA target sequence for Bmp10 (NM_009756.1,940-958).
gccaaggggaactactgta

SEQ ID NO: 565315 - DNA, 19 bp, Mus musculus
  siRNA target sequence for Bmp10 (NM_009756.1,941-959).
ccaaggggaactactgtaa

SEQ ID NO: 565316 - DNA, 19 bp, Mus musculus
  siRNA target sequence for Bmp10 (NM_009756.1,968-986).
cactatacatcgacttcaa

SEQ ID NO: 565317 - DNA, 19 bp, Mus musculus
  siRNA target sequence for Bmp10 (NM_009756.1,1024-1042).
gggtatgaagcctatgagt

SEQ ID NO: 565318 - DNA, 19 bp, Mus musculus
  siRNA target sequence for Bmp10 (NM_009756.1,1088-1106).
caaaacacgcaattattca

SEQ ID NO: 565319 - DNA, 19 bp, Mus musculus
  siRNA target sequence for Bmp15 (NM_009757.3,363-381).
ccttctcacaattcttaga

SEQ ID NO: 565320 - DNA, 19 bp, Mus musculus
  siRNA target sequence for Bmp15 (NM_009757.3,390-408).
gtggggagtggtgcttttt

SEQ ID NO: 565321 - DNA, 19 bp, Mus musculus
  siRNA target sequence for Bmp15 (NM_009757.3,392-410).
ggggagtggtgctttttat

SEQ ID NO: 565322 - DNA, 19 bp, Mus musculus
  siRNA target sequence for Bmp15 (NM_009757.3,395-413).
gagtggtgctttttatgga

SEQ ID NO: 565323 - DNA, 19 bp, Mus musculus
  siRNA target sequence for Bmp15 (NM_009757.3,471-489).
ccctacattgccctcaatt

SEQ ID NO: 565324 - DNA, 19 bp, Mus musculus
  siRNA target sequence for Bmp15 (NM_009757.3,472-490).
cctacattgccctcaattt

SEQ ID NO: 565325 - DNA, 19 bp, Mus musculus
  siRNA target sequence for Bmp15 (NM_009757.3,614-632).
gcacgattggagcgaaaat

SEQ ID NO: 565326 - DNA, 19 bp, Mus musculus
  siRNA target sequence for Bmp15 (NM_009757.3,617-635).
cgattggagcgaaaatggt

SEQ ID NO: 565327 - DNA, 19 bp, Mus musculus
  siRNA target sequence for Bmp15 (NM_009757.3,649-667).
ccgtcggccaacacagtaa

SEQ ID NO: 565328 - DNA, 19 bp, Mus musculus
  siRNA target sequence for Bmp15 (NM_009757.3,677-695).
gaggttcctggcatgtaca

SEQ ID NO: 565329 - DNA, 19 bp, Mus musculus
  siRNA target sequence for Bmp15 (NM_009757.3,756-774).
ggtttaccgccatcaactt

SEQ ID NO: 565330 - DNA, 19 bp, Mus musculus
  siRNA target sequence for Bmp15 (NM_009757.3,764-782).
gccatcaacttcatctagt

SEQ ID NO: 565331 - DNA, 19 bp, Mus musculus
  siRNA target sequence for Bmp15 (NM_009757.3,765-783).
ccatcaacttcatctagtt

SEQ ID NO: 565332 - DNA, 19 bp, Mus musculus
  siRNA target sequence for Bmp15 (NM_009757.3,829-847).
cggaccaagcacttacctt

SEQ ID NO: 565333 - DNA, 19 bp, Mus musculus
  siRNA target sequence for Bmp15 (NM_009757.3,834-852).
caagcacttaccttcttct

SEQ ID NO: 565334 - DNA, 19 bp, Mus musculus
  siRNA target sequence for Bmp15 (NM_009757.3,837-855).
gcacttaccttcttctaaa

SEQ ID NO: 565335 - DNA, 19 bp, Mus musculus
  siRNA target sequence for Bmp15 (NM_009757.3,838-856).
cacttaccttcttctaaat

SEQ ID NO: 565336 - DNA, 19 bp, Mus musculus
  siRNA target sequence for Bmp15 (NM_009757.3,942-960).
caagggacggagtgttctt

SEQ ID NO: 565337 - DNA, 19 bp, Mus musculus
  siRNA target sequence for Bmp15 (NM_009757.3,1284-1302).
cattgctcctcgtctctat

SEQ ID NO: 565338 - DNA, 19 bp, Mus musculus
  siRNA target sequence for Bmp15 (NM_009757.3,1294-1312).
cgtctctataccccaaatt

SEQ ID NO: 565339 - DNA, 19 bp, Mus musculus
  siRNA target sequence for Bmp15 (NM_009757.3,1295-1313).
gtctctataccccaaatta

SEQ ID NO: 565340 - DNA, 19 bp, Mus musculus
  siRNA target sequence for Bmp15 (NM_009757.3,1297-1315).
ctctataccccaaattact

SEQ ID NO: 565341 - DNA, 19 bp, Mus musculus
  siRNA target sequence for Bmp15 (NM_009757.3,1299-1317).
ctataccccaaattactgt

SEQ ID NO: 565342 - DNA, 19 bp, Mus musculus
  siRNA target sequence for Bmp15 (NM_009757.3,1305-1323).
cccaaattactgtaaagga

SEQ ID NO: 565343 - DNA, 19 bp, Mus musculus
  siRNA target sequence for Bmp15 (NM_009757.3,1374-1392).
cattcagagccttgtcaat

SEQ ID NO: 565344 - DNA, 19 bp, Mus musculus
  siRNA target sequence for Bmp15 (NM_009757.3,1382-1400).
gccttgtcaatgaactagt

SEQ ID NO: 565345 - DNA, 19 bp, Mus musculus
  siRNA target sequence for Bmp15 (NM_009757.3,1424-1442).
cctgtgtcccttataattt

SEQ ID NO: 565346 - DNA, 19 bp, Mus musculus
  siRNA target sequence for Bmp15 (NM_009757.3,1468-1486).
gagaccaacgggagtatct

SEQ ID NO: 565347 - DNA, 19 bp, Mus musculus
  siRNA target sequence for Bmp15 (NM_009757.3,1472-1490).
ccaacgggagtatcttgta

SEQ ID NO: 565348 - DNA, 19 bp, Mus musculus
  siRNA target sequence for Bmp15 (NM_009757.3,1494-1512).
ggagtatgagggtatgatt

SEQ ID NO: 565349 - DNA, 19 bp, Mus musculus
  siRNA target sequence for Bmp2 (NM_007553.1,498-516).
gtcctcagcgaatttgagt

SEQ ID NO: 565350 - DNA, 19 bp, Mus musculus
  siRNA target sequence for Bmp2 (NM_007553.1,518-536).
gaggctgctcagcatgttt

SEQ ID NO: 565351 - DNA, 19 bp, Mus musculus
  siRNA target sequence for Bmp2 (NM_007553.1,583-601).
cctatatgctagatctgta

SEQ ID NO: 565352 - DNA, 19 bp, Mus musculus
  siRNA target sequence for Bmp2 (NM_007553.1,743-761).
gcgcttcttcttcaattta

SEQ ID NO: 565353 - DNA, 19 bp, Mus musculus
  siRNA target sequence for Bmp2 (NM_007553.1,744-762).
cgcttcttcttcaatttaa

SEQ ID NO: 565354 - DNA, 19 bp, Mus musculus
  siRNA target sequence for Bmp2 (NM_007553.1,746-764).
cttcttcttcaatttaagt

SEQ ID NO: 565355 - DNA, 19 bp, Mus musculus
  siRNA target sequence for Bmp2 (NM_007553.1,828-846).
gaagctttgggaaacagta

SEQ ID NO: 565356 - DNA, 19 bp, Mus musculus
  siRNA target sequence for Bmp2 (NM_007553.1,851-869).
ccagcaccgaattaatatt

SEQ ID NO: 565357 - DNA, 19 bp, Mus musculus
  siRNA target sequence for Bmp2 (NM_007553.1,854-872).
gcaccgaattaatatttat

SEQ ID NO: 565358 - DNA, 19 bp, Mus musculus
  siRNA target sequence for Bmp2 (NM_007553.1,857-875).
ccgaattaatatttatgaa

SEQ ID NO: 565359 - DNA, 19 bp, Mus musculus
  siRNA target sequence for Bmp2 (NM_007553.1,885-903).
cctgcagcagccaacttga

SEQ ID NO: 565360 - DNA, 19 bp, Mus musculus
  siRNA target sequence for Bmp2 (NM_007553.1,889-907).
cagcagccaacttgaaatt

SEQ ID NO: 565361 - DNA, 19 bp, Mus musculus
  siRNA target sequence for Bmp2 (NM_007553.1,926-944).
ggacaccaggttagtgaat

SEQ ID NO: 565362 - DNA, 19 bp, Mus musculus
  siRNA target sequence for Bmp2 (NM_007553.1,931-949).
ccaggttagtgaatcagaa

SEQ ID NO: 565363 - DNA, 19 bp, Mus musculus
  siRNA target sequence for Bmp2 (NM_007553.1,1093-1111).
ggtctttgcaccaagatga

SEQ ID NO: 565364 - DNA, 19 bp, Mus musculus
  siRNA target sequence for Bmp2 (NM_007553.1,1113-1131).
cacagctggtcacagataa

SEQ ID NO: 565365 - DNA, 19 bp, Mus musculus
  siRNA target sequence for Bmp2 (NM_007553.1,1174-1192).
cgctccacaaacgagaaaa

SEQ ID NO: 565366 - DNA, 19 bp, Mus musculus
  siRNA target sequence for Bmp2 (NM_007553.1,1237-1255).
gcaagagacaccctttgta

SEQ ID NO: 565367 - DNA, 19 bp, Mus musculus
  siRNA target sequence for Bmp2 (NM_007553.1,1238-1256).
caagagacaccctttgtat

SEQ ID NO: 565368 - DNA, 19 bp, Mus musculus
  siRNA target sequence for Bmp2 (NM_007553.1,1295-1313).
ggcacctccgggctatcat

SEQ ID NO: 565369 - DNA, 19 bp, Mus musculus
  siRNA target sequence for Bmp2 (NM_007553.1,1358-1376).
cctgaactccactaaccat

SEQ ID NO: 565370 - DNA, 19 bp, Mus musculus
  siRNA target sequence for Bmp2 (NM_007553.1,1450-1468).
gcgcaatctccatgttgta

SEQ ID NO: 565371 - DNA, 19 bp, Mus musculus
  siRNA target sequence for Bmp4 (NM_007554.1,53-71).
gaatgctgatggtcgtttt

SEQ ID NO: 565372 - DNA, 19 bp, Mus musculus
  siRNA target sequence for Bmp4 (NM_007554.1,57-75).
gctgatggtcgttttatta

SEQ ID NO: 565373 - DNA, 19 bp, Mus musculus
  siRNA target sequence for Bmp4 (NM_007554.1,95-113).
gcgcgagccatgctagttt

SEQ ID NO: 565374 - DNA, 19 bp, Mus musculus
  siRNA target sequence for Bmp4 (NM_007554.1,212-230).
cgacacttctacagatgtt

SEQ ID NO: 565375 - DNA, 19 bp, Mus musculus
  siRNA target sequence for Bmp4 (NM_007554.1,213-231).
gacacttctacagatgttt

SEQ ID NO: 565376 - DNA, 19 bp, Mus musculus
  siRNA target sequence for Bmp4 (NM_007554.1,265-283).
gccgtcattccggattaca

SEQ ID NO: 565377 - DNA, 19 bp, Mus musculus
  siRNA target sequence for Bmp4 (NM_007554.1,266-284).
ccgtcattccggattacat

SEQ ID NO: 565378 - DNA, 19 bp, Mus musculus
  siRNA target sequence for Bmp4 (NM_007554.1,268-286).
gtcattccggattacatga

SEQ ID NO: 565379 - DNA, 19 bp, Mus musculus
  siRNA target sequence for Bmp4 (NM_007554.1,277-295).
gattacatgagggatcttt

SEQ ID NO: 565380 - DNA, 19 bp, Mus musculus
  siRNA target sequence for Bmp4 (NM_007554.1,559-577).
ggcttccaccgtataaaca

SEQ ID NO: 565381 - DNA, 19 bp, Mus musculus
  siRNA target sequence for Bmp4 (NM_007554.1,560-578).
gcttccaccgtataaacat

SEQ ID NO: 565382 - DNA, 19 bp, Mus musculus
  siRNA target sequence for Bmp4 (NM_007554.1,561-579).
cttccaccgtataaacatt

SEQ ID NO: 565383 - DNA, 19 bp, Mus musculus
  siRNA target sequence for Bmp4 (NM_007554.1,644-662).
ccagactagtccatcacaa

SEQ ID NO: 565384 - DNA, 19 bp, Mus musculus
  siRNA target sequence for Bmp4 (NM_007554.1,645-663).
cagactagtccatcacaat

SEQ ID NO: 565385 - DNA, 19 bp, Mus musculus
  siRNA target sequence for Bmp4 (NM_007554.1,649-667).
ctagtccatcacaatgtga

SEQ ID NO: 565386 - DNA, 19 bp, Mus musculus
  siRNA target sequence for Bmp4 (NM_007554.1,716-734).
gggaaaagcaacccaatta

SEQ ID NO: 565387 - DNA, 19 bp, Mus musculus
  siRNA target sequence for Bmp4 (NM_007554.1,795-813).
cagaatcagccgatcgtta

SEQ ID NO: 565388 - DNA, 19 bp, Mus musculus
  siRNA target sequence for Bmp4 (NM_007554.1,957-975).
ctgccgtcgccattcacta

SEQ ID NO: 565389 - DNA, 19 bp, Mus musculus
  siRNA target sequence for Bmp4 (NM_007554.1,959-977).
gccgtcgccattcactata

SEQ ID NO: 565390 - DNA, 19 bp, Mus musculus
  siRNA target sequence for Bmp4 (NM_007554.1,962-980).
gtcgccattcactatacgt

SEQ ID NO: 565391 - DNA, 19 bp, Mus musculus
  siRNA target sequence for Bmp4 (NM_007554.1,991-1009).
gacgtgggctggaatgatt

SEQ ID NO: 565392 - DNA, 19 bp, Mus musculus
  siRNA target sequence for Bmp4 (NM_007554.1,996-1014).
gggctggaatgattggatt

SEQ ID NO: 565393 - DNA, 19 bp, Mus musculus
  siRNA target sequence for Bmp4 (NM_007554.1,1072-1090).
gctgatcacctcaactcaa

SEQ ID NO: 565394 - DNA, 19 bp, Mus musculus
  siRNA target sequence for Bmp4 (NM_007554.1,1112-1130).
ccctagtcaactctgttaa

SEQ ID NO: 565395 - DNA, 19 bp, Mus musculus
  siRNA target sequence for Bmp4 (NM_007554.1,1113-1131).
cctagtcaactctgttaat

SEQ ID NO: 565396 - DNA, 19 bp, Mus musculus
  siRNA target sequence for Bmp4 (NM_007554.1,1114-1132).
ctagtcaactctgttaatt

SEQ ID NO: 565397 - DNA, 19 bp, Mus musculus
  siRNA target sequence for Bmp4 (NM_007554.1,1117-1135).
gtcaactctgttaattcta

SEQ ID NO: 565398 - DNA, 19 bp, Mus musculus
  siRNA target sequence for Bmp5 (NM_007555.1,47-65).
ggagcggctgggttcaagt

SEQ ID NO: 565399 - DNA, 19 bp, Mus musculus
  siRNA target sequence for Bmp5 (NM_007555.1,97-115).
cacgttcactccagtttta

SEQ ID NO: 565400 - DNA, 19 bp, Mus musculus
  siRNA target sequence for Bmp5 (NM_007555.1,99-117).
cgttcactccagttttatt

SEQ ID NO: 565401 - DNA, 19 bp, Mus musculus
  siRNA target sequence for Bmp5 (NM_007555.1,135-153).
ccatgagagacgggaaata

SEQ ID NO: 565402 - DNA, 19 bp, Mus musculus
  siRNA target sequence for Bmp5 (NM_007555.1,147-165).
ggaaatacagagggaaatt

SEQ ID NO: 565403 - DNA, 19 bp, Mus musculus
  siRNA target sequence for Bmp5 (NM_007555.1,416-434).
ctcttgccagcctacatga

SEQ ID NO: 565404 - DNA, 19 bp, Mus musculus
  siRNA target sequence for Bmp5 (NM_007555.1,422-440).
ccagcctacatgataccaa

SEQ ID NO: 565405 - DNA, 19 bp, Mus musculus
  siRNA target sequence for Bmp5 (NM_007555.1,508-526).
catcagaggaggcattaca

SEQ ID NO: 565406 - DNA, 19 bp, Mus musculus
  siRNA target sequence for Bmp5 (NM_007555.1,515-533).
ggaggcattacaaagagtt

SEQ ID NO: 565407 - DNA, 19 bp, Mus musculus
  siRNA target sequence for Bmp5 (NM_007555.1,525-543).
caaagagtttcggtttgat

SEQ ID NO: 565408 - DNA, 19 bp, Mus musculus
  siRNA target sequence for Bmp5 (NM_007555.1,603-621).
caagggaaaccatcgattt

SEQ ID NO: 565409 - DNA, 19 bp, Mus musculus
  siRNA target sequence for Bmp5 (NM_007555.1,606-624).
gggaaaccatcgatttgaa

SEQ ID NO: 565410 - DNA, 19 bp, Mus musculus
  siRNA target sequence for Bmp5 (NM_007555.1,612-630).
ccatcgatttgaaaatgaa

SEQ ID NO: 565411 - DNA, 19 bp, Mus musculus
  siRNA target sequence for Bmp5 (NM_007555.1,613-631).
catcgatttgaaaatgaaa

SEQ ID NO: 565412 - DNA, 19 bp, Mus musculus
  siRNA target sequence for Bmp5 (NM_007555.1,652-670).
cagatcatcaaggaataca

SEQ ID NO: 565413 - DNA, 19 bp, Mus musculus
  siRNA target sequence for Bmp5 (NM_007555.1,704-722).
cgaggaagacacaagcttt

SEQ ID NO: 565414 - DNA, 19 bp, Mus musculus
  siRNA target sequence for Bmp5 (NM_007555.1,762-780).
caaccactgggtgattaat

SEQ ID NO: 565415 - DNA, 19 bp, Mus musculus
  siRNA target sequence for Bmp5 (NM_007555.1,774-792).
gattaatccacagaacaat

SEQ ID NO: 565416 - DNA, 19 bp, Mus musculus
  siRNA target sequence for Bmp5 (NM_007555.1,826-844).
ggccgcagcatcaatgtaa

SEQ ID NO: 565417 - DNA, 19 bp, Mus musculus
  siRNA target sequence for Bmp5 (NM_007555.1,829-847).
cgcagcatcaatgtaaaat

SEQ ID NO: 565418 - DNA, 19 bp, Mus musculus
  siRNA target sequence for Bmp5 (NM_007555.1,912-930).
ggcaagcgaggtacttctt

SEQ ID NO: 565419 - DNA, 19 bp, Mus musculus
  siRNA target sequence for Bmp5 (NM_007555.1,947-965).
ccagcaaacggaaaaatca

SEQ ID NO: 565420 - DNA, 19 bp, Mus musculus
  siRNA target sequence for Bmp5 (NM_007555.1,964-982).
caaaaccgcaataaatcca

SEQ ID NO: 565421 - DNA, 19 bp, Mus musculus
  siRNA target sequence for Bmp5 (NM_007555.1,1008-1026).
gcccagtgctggagattat

SEQ ID NO: 565422 - DNA, 19 bp, Mus musculus
  siRNA target sequence for Bmp5 (NM_007555.1,1011-1029).
cagtgctggagattataat

SEQ ID NO: 565423 - DNA, 19 bp, Mus musculus
  siRNA target sequence for Bmp5 (NM_007555.1,1015-1033).
gctggagattataatacca

SEQ ID NO: 565424 - DNA, 19 bp, Mus musculus
  siRNA target sequence for Bmp5 (NM_007555.1,1120-1138).
gggtatgctgcattttatt

SEQ ID NO: 565425 - DNA, 19 bp, Mus musculus
  siRNA target sequence for Bmp5 (NM_007555.1,1122-1140).
gtatgctgcattttattgt

SEQ ID NO: 565426 - DNA, 19 bp, Mus musculus
  siRNA target sequence for Bmp5 (NM_007555.1,1139-1157).
gtgacggggaatgttcttt

SEQ ID NO: 565427 - DNA, 19 bp, Mus musculus
  siRNA target sequence for Bmp5 (NM_007555.1,1205-1223).
ccctggtacacctgatgtt

SEQ ID NO: 565428 - DNA, 19 bp, Mus musculus
  siRNA target sequence for Bmp5 (NM_007555.1,1206-1224).
cctggtacacctgatgttt

SEQ ID NO: 565429 - DNA, 19 bp, Mus musculus
  siRNA target sequence for Bmp5 (NM_007555.1,1270-1288).
gccatctcggtcctgtatt

SEQ ID NO: 565430 - DNA, 19 bp, Mus musculus
  siRNA target sequence for Bmp5 (NM_007555.1,1272-1290).
catctcggtcctgtatttt

SEQ ID NO: 565431 - DNA, 19 bp, Mus musculus
  siRNA target sequence for Bmp5 (NM_007555.1,1277-1295).
cggtcctgtattttgatga

SEQ ID NO: 565432 - DNA, 19 bp, Mus musculus
  siRNA target sequence for Bmp6 (NM_007556.1,1062-1080).
cagagactctgacctattt

SEQ ID NO: 565433 - DNA, 19 bp, Mus musculus
  siRNA target sequence for Bmp6 (NM_007556.1,1400-1418).
ccggttcttcagactacaa

SEQ ID NO: 565434 - DNA, 19 bp, Mus musculus
  siRNA target sequence for Bmp6 (NM_007556.1,1413-1431).
ctacaacggcagtgagtta

SEQ ID NO: 565435 - DNA, 19 bp, Mus musculus
  siRNA target sequence for Bmp6 (NM_007556.1,1416-1434).
caacggcagtgagttaaaa

SEQ ID NO: 565436 - DNA, 19 bp, Mus musculus
  siRNA target sequence for Bmp6 (NM_007556.1,1550-1568).
cactcaacgcacacatgaa

SEQ ID NO: 565437 - DNA, 19 bp, Mus musculus
  siRNA target sequence for Bmp6 (NM_007556.1,1618-1636).
gagtacgtccccaaaccat

SEQ ID NO: 565438 - DNA, 19 bp, Mus musculus
  siRNA target sequence for Bmp6 (NM_007556.1,1661-1679).
ccatctcggttctttactt

SEQ ID NO: 565439 - DNA, 19 bp, Mus musculus
  siRNA target sequence for Bmp6 (NM_007556.1,1669-1687).
gttctttacttcgatgata

SEQ ID NO: 565440 - DNA, 19 bp, Mus musculus
  siRNA target sequence for Bmp6 (NM_007556.1,1672-1690).
ctttacttcgatgataact

SEQ ID NO: 565441 - DNA, 19 bp, Mus musculus
  siRNA target sequence for Bmp8b (NM_007559.2,476-494).
gaccgtgctgacctgatta

SEQ ID NO: 565442 - DNA, 19 bp, Mus musculus
  siRNA target sequence for Bmp8b (NM_007559.2,1023-1041).
ccaacaaacacctaggaat

SEQ ID NO: 565443 - DNA, 19 bp, Mus musculus
  siRNA target sequence for Bmp8b (NM_007559.2,1027-1045).
caaacacctaggaatcctt

SEQ ID NO: 565444 - DNA, 19 bp, Mus musculus
  siRNA target sequence for Bmp8b (NM_007559.2,1033-1051).
cctaggaatccttgatgat

SEQ ID NO: 565445 - DNA, 19 bp, Mus musculus
  siRNA target sequence for Bmp8b (NM_007559.2,1307-1325).
ctgctctactatgatagaa

SEQ ID NO: 565446 - DNA, 19 bp, Mus musculus
  siRNA target sequence for Bsf3 (NM_019952.1,112-130).
ggactcgtgggggatgtta

SEQ ID NO: 565447 - DNA, 19 bp, Mus musculus
  siRNA target sequence for Bsf3 (NM_019952.1,397-415).
gcggctgacccagaactat

SEQ ID NO: 565448 - DNA, 19 bp, Mus musculus
  siRNA target sequence for Csf1 (NM_007778.1,234-252).
cctcatgagcaggagtatt

SEQ ID NO: 565449 - DNA, 19 bp, Mus musculus
  siRNA target sequence for Csf1 (NM_007778.1,388-406).
gatcctgtttgctacctaa

SEQ ID NO: 565450 - DNA, 19 bp, Mus musculus
  siRNA target sequence for Csf1 (NM_007778.1,423-441).
ggtacaagacataatagat

SEQ ID NO: 565451 - DNA, 19 bp, Mus musculus
  siRNA target sequence for Csf1 (NM_007778.1,446-464).
ccatgcgctttaaagacaa

SEQ ID NO: 565452 - DNA, 19 bp, Mus musculus
  siRNA target sequence for Csf1 (NM_007778.1,460-478).
gacaacacccccaatgcta

SEQ ID NO: 565453 - DNA, 19 bp, Mus musculus
  siRNA target sequence for Csf1 (NM_007778.1,493-511).
ctccaggaactctccaata

SEQ ID NO: 565454 - DNA, 19 bp, Mus musculus
  siRNA target sequence for Csf1 (NM_007778.1,558-576).
ctgtgtccgaactttccat

SEQ ID NO: 565455 - DNA, 19 bp, Mus musculus
  siRNA target sequence for Csf1 (NM_007778.1,819-837).
cttggcttgggatgattct

SEQ ID NO: 565456 - DNA, 19 bp, Mus musculus
  siRNA target sequence for Csf1 (NM_007778.1,1022-1040).
ctggggtggaagacattct

SEQ ID NO: 565457 - DNA, 19 bp, Mus musculus
  siRNA target sequence for Csf1 (NM_007778.1,1058-1076).
ctaactgggtcctagaaga

SEQ ID NO: 565458 - DNA, 19 bp, Mus musculus
  siRNA target sequence for Csf1 (NM_007778.1,1090-1108).
gctagtgagggatttttga

SEQ ID NO: 565459 - DNA, 19 bp, Mus musculus
  siRNA target sequence for Csf1 (NM_007778.1,1218-1236).
ccaaaagccagtggatata

SEQ ID NO: 565460 - DNA, 19 bp, Mus musculus
  siRNA target sequence for Csf1 (NM_007778.1,1219-1237).
caaaagccagtggatataa

SEQ ID NO: 565461 - DNA, 19 bp, Mus musculus
  siRNA target sequence for Csf1 (NM_007778.1,1279-1297).
ggccagacacagaataata

SEQ ID NO: 565462 - DNA, 19 bp, Mus musculus
  siRNA target sequence for Csf1 (NM_007778.1,1401-1419).
cacccccgttgctcagtta

SEQ ID NO: 565463 - DNA, 19 bp, Mus musculus
  siRNA target sequence for Csf1 (NM_007778.1,1547-1565).
ggcctgtggcccgttttaa

SEQ ID NO: 565464 - DNA, 19 bp, Mus musculus
  siRNA target sequence for Csf1 (NM_007778.1,1552-1570).
gtggcccgttttaattcca

SEQ ID NO: 565465 - DNA, 19 bp, Mus musculus
  siRNA target sequence for Csf1 (NM_007778.1,1554-1572).
ggcccgttttaattccatt

SEQ ID NO: 565466 - DNA, 19 bp, Mus musculus
  siRNA target sequence for Csf1 (NM_007778.1,1558-1576).
cgttttaattccattcctt

SEQ ID NO: 565467 - DNA, 19 bp, Mus musculus
  siRNA target sequence for Csf1 (NM_007778.1,1732-1750).
cctcagacattggattctt

SEQ ID NO: 565468 - DNA, 19 bp, Mus musculus
  siRNA target sequence for Csf3 (NM_009971.1,86-104).
cagaggcgcatgaagctaa

SEQ ID NO: 565469 - DNA, 19 bp, Mus musculus
  siRNA target sequence for Csf3 (NM_009971.1,206-224).
cgaagcttcctgcttaagt

SEQ ID NO: 565470 - DNA, 19 bp, Mus musculus
  siRNA target sequence for Csf3 (NM_009971.1,443-461).
caggctctatcgggtattt

SEQ ID NO: 565471 - DNA, 19 bp, Mus musculus
  siRNA target sequence for Csf3 (NM_009971.1,623-641).
ggtgtcctggccatttcgt

SEQ ID NO: 565472 - DNA, 19 bp, Mus musculus
  siRNA target sequence for Csf3 (NM_009971.1,624-642).
gtgtcctggccatttcgta

SEQ ID NO: 565473 - DNA, 19 bp, Mus musculus
  siRNA target sequence for Ctf1 (NM_007795.1,72-90).
cattcctaccccatttgga

SEQ ID NO: 565474 - DNA, 19 bp, Mus musculus
  siRNA target sequence for Ctf1 (NM_007795.1,130-148).
gaccaaatatgcagaacaa

SEQ ID NO: 565475 - DNA, 19 bp, Mus musculus
  siRNA target sequence for Ctf1 (NM_007795.1,132-150).
ccaaatatgcagaacaact

SEQ ID NO: 565476 - DNA, 19 bp, Mus musculus
  siRNA target sequence for D6Wsu176e (NM_138587.2,401-419).
ccgtggcagtattcttact

SEQ ID NO: 565477 - DNA, 19 bp, Mus musculus
  siRNA target sequence for D6Wsu176e (NM_138587.2,426-444).
ctatgttatttctcaagta

SEQ ID NO: 565478 - DNA, 19 bp, Mus musculus
  siRNA target sequence for D6Wsu176e (NM_138587.2,553-571).
gcgtgcccagagaagcatt

SEQ ID NO: 565479 - DNA, 19 bp, Mus musculus
  siRNA target sequence for D6Wsu176e (NM_138587.2,554-572).
cgtgcccagagaagcattt

SEQ ID NO: 565480 - DNA, 19 bp, Mus musculus
  siRNA target sequence for D6Wsu176e (NM_138587.2,555-573).
gtgcccagagaagcatttt

SEQ ID NO: 565481 - DNA, 19 bp, Mus musculus
  siRNA target sequence for D6Wsu176e (NM_138587.2,625-643).
ctggaggacaatgttttga

SEQ ID NO: 565482 - DNA, 19 bp, Mus musculus
  siRNA target sequence for D6Wsu176e (NM_138587.2,628-646).
gaggacaatgttttgatga

SEQ ID NO: 565483 - DNA, 19 bp, Mus musculus
  siRNA target sequence for D6Wsu176e (NM_138587.2,642-660).
gatgagtggtgtgaagaat

SEQ ID NO: 565484 - DNA, 19 bp, Mus musculus
  siRNA target sequence for D6Wsu176e (NM_138587.2,664-682).
gtcggaagaggaatcaata

SEQ ID NO: 565485 - DNA, 19 bp, Mus musculus
  siRNA target sequence for D6Wsu176e (NM_138587.2,666-684).
cggaagaggaatcaatatt

SEQ ID NO: 565486 - DNA, 19 bp, Mus musculus
  siRNA target sequence for D6Wsu176e (NM_138587.2,699-717).
gaaaacaggggaagtaata

SEQ ID NO: 565487 - DNA, 19 bp, Mus musculus
  siRNA target sequence for D6Wsu176e (NM_138587.2,709-727).
gaagtaatagacaccaaat

SEQ ID NO: 565488 - DNA, 19 bp, Mus musculus
  siRNA target sequence for D6Wsu176e (NM_138587.2,746-764).
gagatgtggcaccattcat

SEQ ID NO: 565489 - DNA, 19 bp, Mus musculus
  siRNA target sequence for D6Wsu176e (NM_138587.2,892-910).
cttggtttccgagataact

SEQ ID NO: 565490 - DNA, 19 bp, Mus musculus
  siRNA target sequence for D6Wsu176e (NM_138587.2,926-944).
ggaagggcattaagacaaa

SEQ ID NO: 565491 - DNA, 19 bp, Mus musculus
  siRNA target sequence for D6Wsu176e (NM_138587.2,930-948).
gggcattaagacaaagagt

SEQ ID NO: 565492 - DNA, 19 bp, Mus musculus
  siRNA target sequence for D6Wsu176e (NM_138587.2,941-959).
caaagagtccctttgaaca

SEQ ID NO: 565493 - DNA, 19 bp, Mus musculus
  siRNA target sequence for D6Wsu176e (NM_138587.2,949-967).
ccctttgaacagcacataa

SEQ ID NO: 565494 - DNA, 19 bp, Mus musculus
  siRNA target sequence for Flt3l (NM_013520.2,402-420).
gactgaccacctgcttaaa

SEQ ID NO: 565495 - DNA, 19 bp, Mus musculus
  siRNA target sequence for Flt3l (NM_013520.2,406-424).
gaccacctgcttaaagatt

SEQ ID NO: 565496 - DNA, 19 bp, Mus musculus
  siRNA target sequence for Flt3l (NM_013520.2,434-452).
ctgtggccgtcaatcttca

SEQ ID NO: 565497 - DNA, 19 bp, Mus musculus
  siRNA target sequence for Flt3l (NM_013520.2,521-539).
ctgtggcagggtctaagat

SEQ ID NO: 565498 - DNA, 19 bp, Mus musculus
  siRNA target sequence for Flt3l (NM_013520.2,558-576).
cgtcaacaccgagatacat

SEQ ID NO: 565499 - DNA, 19 bp, Mus musculus
  siRNA target sequence for Flt3l (NM_013520.2,559-577).
gtcaacaccgagatacatt

SEQ ID NO: 565500 - DNA, 19 bp, Mus musculus
  siRNA target sequence for Flt3l (NM_013520.2,694-712).
gggaaggcctgccagaatt

SEQ ID NO: 565501 - DNA, 19 bp, Mus musculus
  siRNA target sequence for Gdf1 (NM_008107.1,474-492).
gggtcgccggaaacattgt

SEQ ID NO: 565502 - DNA, 19 bp, Mus musculus
  siRNA target sequence for Gdf1 (NM_008107.1,1183-1201).
cgtgccagagcgtctatca

SEQ ID NO: 565503 - DNA, 19 bp, Mus musculus
  siRNA target sequence for Gdf1 (NM_008107.1,1213-1231).
gctcttcttcgacaatagt

SEQ ID NO: 565504 - DNA, 19 bp, Mus musculus
  siRNA target sequence for Gdf10 (NM_145741.2,539-557).
ggctctatgagaagtacaa

SEQ ID NO: 565505 - DNA, 19 bp, Mus musculus
  siRNA target sequence for Gdf10 (NM_145741.2,624-642).
cgaccaaaagcctgtgtat

SEQ ID NO: 565506 - DNA, 19 bp, Mus musculus
  siRNA target sequence for Gdf10 (NM_145741.2,686-704).
cagccgccttccacttcta

SEQ ID NO: 565507 - DNA, 19 bp, Mus musculus
  siRNA target sequence for Gdf10 (NM_145741.2,688-706).
gccgccttccacttctact

SEQ ID NO: 565508 - DNA, 19 bp, Mus musculus
  siRNA target sequence for Gdf10 (NM_145741.2,746-764).
gcaagccccgagctaagaa

SEQ ID NO: 565509 - DNA, 19 bp, Mus musculus
  siRNA target sequence for Gdf10 (NM_145741.2,797-815).
ctgcacgcttgcacctaat

SEQ ID NO: 565510 - DNA, 19 bp, Mus musculus
  siRNA target sequence for Gdf10 (NM_145741.2,799-817).
gcacgcttgcacctaatct

SEQ ID NO: 565511 - DNA, 19 bp, Mus musculus
  siRNA target sequence for Gdf10 (NM_145741.2,800-818).
cacgcttgcacctaatctt

SEQ ID NO: 565512 - DNA, 19 bp, Mus musculus
  siRNA target sequence for Gdf10 (NM_145741.2,811-829).
ctaatcttccgcagtcttt

SEQ ID NO: 565513 - DNA, 19 bp, Mus musculus
  siRNA target sequence for Gdf10 (NM_145741.2,1010-1028).
gttcccacatgccctatat

SEQ ID NO: 565514 - DNA, 19 bp, Mus musculus
  siRNA target sequence for Gdf10 (NM_145741.2,1076-1094).
cagtgtcgctacagagata

SEQ ID NO: 565515 - DNA, 19 bp, Mus musculus
  siRNA target sequence for Gdf10 (NM_145741.2,1089-1107).
gagatacgacccatttcca

SEQ ID NO: 565516 - DNA, 19 bp, Mus musculus
  siRNA target sequence for Gdf10 (NM_145741.2,1440-1458).
gtacctgaaggtggatttt

SEQ ID NO: 565517 - DNA, 19 bp, Mus musculus
  siRNA target sequence for Gdf10 (NM_145741.2,1533-1551).
gttccccatgcccaagatt

SEQ ID NO: 565518 - DNA, 19 bp, Mus musculus
  siRNA target sequence for Gdf10 (NM_145741.2,1628-1646).
gctgtgttccagacaagat

SEQ ID NO: 565519 - DNA, 19 bp, Mus musculus
  siRNA target sequence for Gdf15 (NM_011819.1,634-652).
gccctgagtcccaactcaa

SEQ ID NO: 565520 - DNA, 19 bp, Mus musculus
  siRNA target sequence for Gdf15 (NM_011819.1,747-765).
ccagctgtccggatactca

SEQ ID NO: 565521 - DNA, 19 bp, Mus musculus
  siRNA target sequence for Gdf2 (NM_019506.2,550-568).
ggctgagctccgactctat

SEQ ID NO: 565522 - DNA, 19 bp, Mus musculus
  siRNA target sequence for Gdf2 (NM_019506.2,552-570).
ctgagctccgactctatgt

SEQ ID NO: 565523 - DNA, 19 bp, Mus musculus
  siRNA target sequence for Gdf2 (NM_019506.2,554-572).
gagctccgactctatgtct

SEQ ID NO: 565524 - DNA, 19 bp, Mus musculus
  siRNA target sequence for Gdf2 (NM_019506.2,612-630).
gaagcatggtcgtttatga

SEQ ID NO: 565525 - DNA, 19 bp, Mus musculus
  siRNA target sequence for Gdf2 (NM_019506.2,615-633).
gcatggtcgtttatgatgt

SEQ ID NO: 565526 - DNA, 19 bp, Mus musculus
  siRNA target sequence for Gdf2 (NM_019506.2,706-724).
cgaaggatgggagacttta

SEQ ID NO: 565527 - DNA, 19 bp, Mus musculus
  siRNA target sequence for Gdf2 (NM_019506.2,1015-1033).
gggtctagatggatacaca

SEQ ID NO: 565528 - DNA, 19 bp, Mus musculus
  siRNA target sequence for Gdf2 (NM_019506.2,1037-1055).
gtgggaccacttttagcta

SEQ ID NO: 565529 - DNA, 19 bp, Mus musculus
  siRNA target sequence for Gdf2 (NM_019506.2,1098-1116).
cttctctcagggtgaactt

SEQ ID NO: 565530 - DNA, 19 bp, Mus musculus
  siRNA target sequence for Gdf2 (NM_019506.2,1129-1147).
ctgggacagctggatcatt

SEQ ID NO: 565531 - DNA, 19 bp, Mus musculus
  siRNA target sequence for Gdf2 (NM_019506.2,1144-1162).
cattgcacccaaggaatat

SEQ ID NO: 565532 - DNA, 19 bp, Mus musculus
  siRNA target sequence for Gdf2 (NM_019506.2,1157-1175).
gaatatgacgcctatgagt

SEQ ID NO: 565533 - DNA, 19 bp, Mus musculus
  siRNA target sequence for Gdf2 (NM_019506.2,1338-1356).
gggtgccaaccctcaagta

SEQ ID NO: 565534 - DNA, 19 bp, Mus musculus
  siRNA target sequence for Gdf3 (NM_008108.1,180-198).
gccagacatccgagtttca

SEQ ID NO: 565535 - DNA, 19 bp, Mus musculus
  siRNA target sequence for Gdf3 (NM_008108.1,181-199).
ccagacatccgagtttcaa

SEQ ID NO: 565536 - DNA, 19 bp, Mus musculus
  siRNA target sequence for Gdf3 (NM_008108.1,260-278).
cctgtgcctcgcgtcttaa

SEQ ID NO: 565537 - DNA, 19 bp, Mus musculus
  siRNA target sequence for Gdf3 (NM_008108.1,263-281).
gtgcctcgcgtcttaagga

SEQ ID NO: 565538 - DNA, 19 bp, Mus musculus
  siRNA target sequence for Gdf3 (NM_008108.1,265-283).
gcctcgcgtcttaaggaaa

SEQ ID NO: 565539 - DNA, 19 bp, Mus musculus
  siRNA target sequence for Gdf3 (NM_008108.1,266-284).
cctcgcgtcttaaggaaaa

SEQ ID NO: 565540 - DNA, 19 bp, Mus musculus
  siRNA target sequence for Gdf3 (NM_008108.1,267-285).
ctcgcgtcttaaggaaaat

SEQ ID NO: 565541 - DNA, 19 bp, Mus musculus
  siRNA target sequence for Gdf3 (NM_008108.1,269-287).
cgcgtcttaaggaaaatca

SEQ ID NO: 565542 - DNA, 19 bp, Mus musculus
  siRNA target sequence for Gdf3 (NM_008108.1,270-288).
gcgtcttaaggaaaatcat

SEQ ID NO: 565543 - DNA, 19 bp, Mus musculus
  siRNA target sequence for Gdf3 (NM_008108.1,317-335).
ggggcctcgcaggacttat

SEQ ID NO: 565544 - DNA, 19 bp, Mus musculus
  siRNA target sequence for Gdf3 (NM_008108.1,321-339).
cctcgcaggacttatgcta

SEQ ID NO: 565545 - DNA, 19 bp, Mus musculus
  siRNA target sequence for Gdf3 (NM_008108.1,380-398).
ctcccagaccagggttttt

SEQ ID NO: 565546 - DNA, 19 bp, Mus musculus
  siRNA target sequence for Gdf3 (NM_008108.1,437-455).
ctccagaaggtcctctatt

SEQ ID NO: 565547 - DNA, 19 bp, Mus musculus
  siRNA target sequence for Gdf3 (NM_008108.1,446-464).
gtcctctattttaacttgt

SEQ ID NO: 565548 - DNA, 19 bp, Mus musculus
  siRNA target sequence for Gdf3 (NM_008108.1,522-540).
ccaggtcctactataacct

SEQ ID NO: 565549 - DNA, 19 bp, Mus musculus
  siRNA target sequence for Gdf3 (NM_008108.1,610-628).
ggtgggcagattgcttttt

SEQ ID NO: 565550 - DNA, 19 bp, Mus musculus
  siRNA target sequence for Gdf3 (NM_008108.1,673-691).
gcagggtgcgcttaaggat

SEQ ID NO: 565551 - DNA, 19 bp, Mus musculus
  siRNA target sequence for Gdf3 (NM_008108.1,674-692).
cagggtgcgcttaaggatt

SEQ ID NO: 565552 - DNA, 19 bp, Mus musculus
  siRNA target sequence for Gdf3 (NM_008108.1,696-714).
gcagcaaccgactgaagaa

SEQ ID NO: 565553 - DNA, 19 bp, Mus musculus
  siRNA target sequence for Gdf3 (NM_008108.1,718-736).
ggacttacacttagagatt

SEQ ID NO: 565554 - DNA, 19 bp, Mus musculus
  siRNA target sequence for Gdf3 (NM_008108.1,740-758).
gtcaaagaggacagatact

SEQ ID NO: 565555 - DNA, 19 bp, Mus musculus
  siRNA target sequence for Gdf3 (NM_008108.1,923-941).
cgtcatcagctgttcatca

SEQ ID NO: 565556 - DNA, 19 bp, Mus musculus
  siRNA target sequence for Gdf3 (NM_008108.1,986-1004).
gggttcatggcaaattact

SEQ ID NO: 565557 - DNA, 19 bp, Mus musculus
  siRNA target sequence for Gdf3 (NM_008108.1,1010-1028).
ggagagtgccccttctcaa

SEQ ID NO: 565558 - DNA, 19 bp, Mus musculus
  siRNA target sequence for Gdf3 (NM_008108.1,1011-1029).
gagagtgccccttctcaat

SEQ ID NO: 565559 - DNA, 19 bp, Mus musculus
  siRNA target sequence for Gdf3 (NM_008108.1,1030-1048).
gaccacgtatttaaatagt

SEQ ID NO: 565560 - DNA, 19 bp, Mus musculus
  siRNA target sequence for Gdf3 (NM_008108.1,1047-1065).
gttccaattatgctttcat

SEQ ID NO: 565561 - DNA, 19 bp, Mus musculus
  siRNA target sequence for Gdf3 (NM_008108.1,1144-1162).
gctctatcaggatagtgat

SEQ ID NO: 565562 - DNA, 19 bp, Mus musculus
  siRNA target sequence for Gdf3 (NM_008108.1,1145-1163).
ctctatcaggatagtgata

SEQ ID NO: 565563 - DNA, 19 bp, Mus musculus
  siRNA target sequence for Gdf3 (NM_008108.1,1168-1186).
cgtcattctccgacattat

SEQ ID NO: 565564 - DNA, 19 bp, Mus musculus
  siRNA target sequence for Gdf3 (NM_008108.1,1171-1189).
cattctccgacattatgaa

SEQ ID NO: 565565 - DNA, 19 bp, Mus musculus
  siRNA target sequence for Gdf5 (NM_008109.1,396-414).
gctgggtgcccctgactta

SEQ ID NO: 565566 - DNA, 19 bp, Mus musculus
  siRNA target sequence for Gdf5 (NM_008109.1,498-516).
gccagggggtcatatctat

SEQ ID NO: 565567 - DNA, 19 bp, Mus musculus
  siRNA target sequence for Gdf5 (NM_008109.1,905-923).
ccatcaccagctttattga

SEQ ID NO: 565568 - DNA, 19 bp, Mus musculus
  siRNA target sequence for Gdf5 (NM_008109.1,961-979).
cagaggtacgtgtttgaca

SEQ ID NO: 565569 - DNA, 19 bp, Mus musculus
  siRNA target sequence for Gdf5 (NM_008109.1,1011-1029).
ggctgaactgcggatctta

SEQ ID NO: 565570 - DNA, 19 bp, Mus musculus
  siRNA target sequence for Gdf5 (NM_008109.1,1193-1211).
ggaagctcttccgaaattt

SEQ ID NO: 565571 - DNA, 19 bp, Mus musculus
  siRNA target sequence for Gdf5 (NM_008109.1,1198-1216).
ctcttccgaaattttaaga

SEQ ID NO: 565572 - DNA, 19 bp, Mus musculus
  siRNA target sequence for Gdf5 (NM_008109.1,1335-1353).
gtttggtcgtaccaagaaa

SEQ ID NO: 565573 - DNA, 19 bp, Mus musculus
  siRNA target sequence for Gdf5 (NM_008109.1,1350-1368).
gaaacgggacctgttcttt

SEQ ID NO: 565574 - DNA, 19 bp, Mus musculus
  siRNA target sequence for Gdf5 (NM_008109.1,1514-1532).
ccttgcatgtcaacttcaa

SEQ ID NO: 565575 - DNA, 19 bp, Mus musculus
  siRNA target sequence for Gdf5 (NM_008109.1,1557-1575).
catcgcacctcttgagtat

SEQ ID NO: 565576 - DNA, 19 bp, Mus musculus
  siRNA target sequence for Gdf5 (NM_008109.1,1634-1652).
caaaccacgcagtcattca

SEQ ID NO: 565577 - DNA, 19 bp, Mus musculus
  siRNA target sequence for Gdf5 (NM_008109.1,1683-1701).
cacaccacccacttgttgt

SEQ ID NO: 565578 - DNA, 19 bp, Mus musculus
  siRNA target sequence for Gdf5 (NM_008109.1,1711-1729).
cggctgagtcctattagca

SEQ ID NO: 565579 - DNA, 19 bp, Mus musculus
  siRNA target sequence for Gdf5 (NM_008109.1,1721-1739).
ctattagcatcctcttcat

SEQ ID NO: 565580 - DNA, 19 bp, Mus musculus
  siRNA target sequence for Gdf5 (NM_008109.1,1749-1767).
caacaacgtggtgtataaa

SEQ ID NO: 565581 - DNA, 19 bp, Mus musculus
  siRNA target sequence for Gdf5 (NM_008109.1,1779-1797).
catggtcgtggaatcttgt

SEQ ID NO: 565582 - DNA, 19 bp, Mus musculus
  siRNA target sequence for Gdf8 (NM_010834.1,162-180).
gcccagtggatctaaatga

SEQ ID NO: 565583 - DNA, 19 bp, Mus musculus
  siRNA target sequence for Gdf8 (NM_010834.1,228-246).
catgtgcgtggagacaaaa

SEQ ID NO: 565584 - DNA, 19 bp, Mus musculus
  siRNA target sequence for Gdf8 (NM_010834.1,247-265).
cacgaggtactccagaata

SEQ ID NO: 565585 - DNA, 19 bp, Mus musculus
  siRNA target sequence for Gdf8 (NM_010834.1,420-438).
ctttggaagatgacgatta

SEQ ID NO: 565586 - DNA, 19 bp, Mus musculus
  siRNA target sequence for Gdf8 (NM_010834.1,499-517).
ggatggcaagcccaaatgt

SEQ ID NO: 565587 - DNA, 19 bp, Mus musculus
  siRNA target sequence for Gdf8 (NM_010834.1,505-523).
caagcccaaatgttgcttt

SEQ ID NO: 565588 - DNA, 19 bp, Mus musculus
  siRNA target sequence for Gdf8 (NM_010834.1,547-565).
gtacaacaaagtagtaaaa

SEQ ID NO: 565589 - DNA, 19 bp, Mus musculus
  siRNA target sequence for Gdf8 (NM_010834.1,567-585).
cccaactgtggatatatct

SEQ ID NO: 565590 - DNA, 19 bp, Mus musculus
  siRNA target sequence for Gdf8 (NM_010834.1,569-587).
caactgtggatatatctca

SEQ ID NO: 565591 - DNA, 19 bp, Mus musculus
  siRNA target sequence for Gdf8 (NM_010834.1,592-610).
cgtcaagactcctacaaca

SEQ ID NO: 565592 - DNA, 19 bp, Mus musculus
  siRNA target sequence for Gdf8 (NM_010834.1,598-616).
gactcctacaacagtgttt

SEQ ID NO: 565593 - DNA, 19 bp, Mus musculus
  siRNA target sequence for Gdf8 (NM_010834.1,606-624).
caacagtgtttgtgcaaat

SEQ ID NO: 565594 - DNA, 19 bp, Mus musculus
  siRNA target sequence for Gdf8 (NM_010834.1,646-664).
gaaagacggtacaaggtat

SEQ ID NO: 565595 - DNA, 19 bp, Mus musculus
  siRNA target sequence for Gdf8 (NM_010834.1,714-732).
ggcagagtattgatgtgaa

SEQ ID NO: 565596 - DNA, 19 bp, Mus musculus
  siRNA target sequence for Gdf8 (NM_010834.1,849-867).
ggctgaatccctttttaga

SEQ ID NO: 565597 - DNA, 19 bp, Mus musculus
  siRNA target sequence for Gdf8 (NM_010834.1,850-868).
gctgaatccctttttagaa

SEQ ID NO: 565598 - DNA, 19 bp, Mus musculus
  siRNA target sequence for Gdf8 (NM_010834.1,958-976).
ccccctcacggtcgatttt

SEQ ID NO: 565599 - DNA, 19 bp, Mus musculus
  siRNA target sequence for Gdf8 (NM_010834.1,960-978).
ccctcacggtcgattttga

SEQ ID NO: 565600 - DNA, 19 bp, Mus musculus
  siRNA target sequence for Gdf8 (NM_010834.1,961-979).
cctcacggtcgattttgaa

SEQ ID NO: 565601 - DNA, 19 bp, Mus musculus
  siRNA target sequence for Gdf8 (NM_010834.1,997-1015).
gattatcgcacccaaaaga

SEQ ID NO: 565602 - DNA, 19 bp, Mus musculus
  siRNA target sequence for Gdf8 (NM_010834.1,1032-1050).
gctcaggagagtgtgaatt

SEQ ID NO: 565603 - DNA, 19 bp, Mus musculus
  siRNA target sequence for Gdf8 (NM_010834.1,1122-1140).
gctgcactccgacaaaaat

SEQ ID NO: 565604 - DNA, 19 bp, Mus musculus
  siRNA target sequence for Gdf8 (NM_010834.1,1126-1144).
cactccgacaaaaatgtct

SEQ ID NO: 565605 - DNA, 19 bp, Mus musculus
  siRNA target sequence for Gdf8 (NM_010834.1,1146-1164).
ccattaatatgctatattt

SEQ ID NO: 565606 - DNA, 19 bp, Mus musculus
  siRNA target sequence for Gdf8 (NM_010834.1,1170-1188).
gcaaagaacaaataatata

SEQ ID NO: 565607 - DNA, 19 bp, Mus musculus
  siRNA target sequence for Gdf9 (NM_008110.1,279-297).
gagcactctactacatgaa

SEQ ID NO: 565608 - DNA, 19 bp, Mus musculus
  siRNA target sequence for Gdf9 (NM_008110.1,281-299).
gcactctactacatgaaaa

SEQ ID NO: 565609 - DNA, 19 bp, Mus musculus
  siRNA target sequence for Gdf9 (NM_008110.1,302-320).
ctctataagacgtatgcta

SEQ ID NO: 565610 - DNA, 19 bp, Mus musculus
  siRNA target sequence for Gdf9 (NM_008110.1,345-363).
gcagaagtcacctctacaa

SEQ ID NO: 565611 - DNA, 19 bp, Mus musculus
  siRNA target sequence for Gdf9 (NM_008110.1,488-506).
ctcaaatcggtcttgctat

SEQ ID NO: 565612 - DNA, 19 bp, Mus musculus
  siRNA target sequence for Gdf9 (NM_008110.1,503-521).
ctatacactctgaacaact

SEQ ID NO: 565613 - DNA, 19 bp, Mus musculus
  siRNA target sequence for Gdf9 (NM_008110.1,538-556).
cactgtgacctgtatgtgt

SEQ ID NO: 565614 - DNA, 19 bp, Mus musculus
  siRNA target sequence for Gdf9 (NM_008110.1,555-573).
gtgaccttgtggtaaagga

SEQ ID NO: 565615 - DNA, 19 bp, Mus musculus
  siRNA target sequence for Gdf9 (NM_008110.1,599-617).
ccaagagcaccgtactcat

SEQ ID NO: 565616 - DNA, 19 bp, Mus musculus
  siRNA target sequence for Gdf9 (NM_008110.1,600-618).
caagagcaccgtactcatt

SEQ ID NO: 565617 - DNA, 19 bp, Mus musculus
  siRNA target sequence for Gdf9 (NM_008110.1,634-652).
cagatggattgagattgat

SEQ ID NO: 565618 - DNA, 19 bp, Mus musculus
  siRNA target sequence for Gdf9 (NM_008110.1,636-654).
gatggattgagattgatgt

SEQ ID NO: 565619 - DNA, 19 bp, Mus musculus
  siRNA target sequence for Gdf9 (NM_008110.1,704-722).
ctgtctgtcaattttacat

SEQ ID NO: 565620 - DNA, 19 bp, Mus musculus
  siRNA target sequence for Gdf9 (NM_008110.1,739-757).
gccagaggacggagtgttt

SEQ ID NO: 565621 - DNA, 19 bp, Mus musculus
  siRNA target sequence for Gdf9 (NM_008110.1,740-758).
ccagaggacggagtgttta

SEQ ID NO: 565622 - DNA, 19 bp, Mus musculus
  siRNA target sequence for Gdf9 (NM_008110.1,888-906).
ctgcccgtcccgtgaaaga

SEQ ID NO: 565623 - DNA, 19 bp, Mus musculus
  siRNA target sequence for Gdf9 (NM_008110.1,1060-1078).
cttcagactgagttttagt

SEQ ID NO: 565624 - DNA, 19 bp, Mus musculus
  siRNA target sequence for Gdf9 (NM_008110.1,1120-1138).
caaccctaggtactgtaaa

SEQ ID NO: 565625 - DNA, 19 bp, Mus musculus
  siRNA target sequence for Gdf9 (NM_008110.1,1192-1210).
ggtccagaatataatctat

SEQ ID NO: 565626 - DNA, 19 bp, Mus musculus
  siRNA target sequence for Gdf9 (NM_008110.1,1270-1288).
gagtgtgttgaccattgaa

SEQ ID NO: 565627 - DNA, 19 bp, Mus musculus
  siRNA target sequence for Gdf9 (NM_008110.1,1294-1312).
cggctccatcgcttacaaa

SEQ ID NO: 565628 - DNA, 19 bp, Mus musculus
  siRNA target sequence for Gdf9 (NM_008110.1,1296-1314).
gctccatcgcttacaaaga

SEQ ID NO: 565629 - DNA, 19 bp, Mus musculus
  siRNA target sequence for Gpi1 (NM_008155.1,480-498).
ggtacactggcaaatccat

SEQ ID NO: 565630 - DNA, 19 bp, Mus musculus
  siRNA target sequence for Gpi1 (NM_008155.1,587-605).
ccccgtgtctggtttgtct

SEQ ID NO: 565631 - DNA, 19 bp, Mus musculus
  siRNA target sequence for Gpi1 (NM_008155.1,656-674).
gagacttccctctttataa

SEQ ID NO: 565632 - DNA, 19 bp, Mus musculus
  siRNA target sequence for Il11 (NM_008350.1,220-238).
gcacagatgagagacaaat

SEQ ID NO: 565633 - DNA, 19 bp, Mus musculus
  siRNA target sequence for Il11 (NM_008350.1,332-350).
caaggcttcgagtagactt

SEQ ID NO: 565634 - DNA, 19 bp, Mus musculus
  siRNA target sequence for Il11 (NM_008350.1,335-353).
ggcttcgagtagacttgat

SEQ ID NO: 565635 - DNA, 19 bp, Mus musculus
  siRNA target sequence for Il11 (NM_008350.1,337-355).
cttcgagtagacttgatgt

SEQ ID NO: 565636 - DNA, 19 bp, Mus musculus
  siRNA target sequence for Il11 (NM_008350.1,356-374).
cctacctccggcatgtaca

SEQ ID NO: 565637 - DNA, 19 bp, Mus musculus
  siRNA target sequence for Il11 (NM_008350.1,357-375).
ctacctccggcatgtacaa

SEQ ID NO: 565638 - DNA, 19 bp, Mus musculus
  siRNA target sequence for Il11 (NM_008350.1,391-409).
ggtggtccttccctaaaga

SEQ ID NO: 565639 - DNA, 19 bp, Mus musculus
  siRNA target sequence for Il11 (NM_008350.1,452-470).
ggctactccgccgtttaca

SEQ ID NO: 565640 - DNA, 19 bp, Mus musculus
  siRNA target sequence for Il11 (NM_008350.1,463-481).
cgtttacagctcttgatgt

SEQ ID NO: 565641 - DNA, 19 bp, Mus musculus
  siRNA target sequence for Il17 (NM_010552.2,202-220).
ggtcaacctcaaagtcttt

SEQ ID NO: 565642 - DNA, 19 bp, Mus musculus
  siRNA target sequence for Il17 (NM_010552.2,289-307).
gactctccaccgcaatgaa

SEQ ID NO: 565643 - DNA, 19 bp, Mus musculus
  siRNA target sequence for Il17 (NM_010552.2,291-309).
ctctccaccgcaatgaaga

SEQ ID NO: 565644 - DNA, 19 bp, Mus musculus
  siRNA target sequence for Il17 (NM_010552.2,385-403).
ggaccaccacatgaattct

SEQ ID NO: 565645 - DNA, 19 bp, Mus musculus
  siRNA target sequence for Il17 (NM_010552.2,462-480).
ctttcagggtcgagaagat

SEQ ID NO: 565646 - DNA, 19 bp, Mus musculus
  siRNA target sequence for Il17b (NM_019508.1,211-229).
gccctacgctcgaatggaa

SEQ ID NO: 565647 - DNA, 19 bp, Mus musculus
  siRNA target sequence for Il17b (NM_019508.1,295-313).
gaaatgtgaagtcaatcta

SEQ ID NO: 565648 - DNA, 19 bp, Mus musculus
  siRNA target sequence for Il17b (NM_019508.1,572-590).
ggttgcacctgcatcttct

SEQ ID NO: 565649 - DNA, 19 bp, Mus musculus
  siRNA target sequence for Il17e (NM_080729.1,359-377).
gcaactccgtcccacttta

SEQ ID NO: 565650 - DNA, 19 bp, Mus musculus
  siRNA target sequence for Il20 (NM_021380.1,103-121).
ctccgctgtgggttttctt

SEQ ID NO: 565651 - DNA, 19 bp, Mus musculus
  siRNA target sequence for Il20 (NM_021380.1,180-198).
caaacctacaggcaataca

SEQ ID NO: 565652 - DNA, 19 bp, Mus musculus
  siRNA target sequence for Il20 (NM_021380.1,190-208).
ggcaatacaaaaggaattt

SEQ ID NO: 565653 - DNA, 19 bp, Mus musculus
  siRNA target sequence for Il20 (NM_021380.1,191-209).
gcaatacaaaaggaatttt

SEQ ID NO: 565654 - DNA, 19 bp, Mus musculus
  siRNA target sequence for Il20 (NM_021380.1,227-245).
gtgcaagctgaagatacaa

SEQ ID NO: 565655 - DNA, 19 bp, Mus musculus
  siRNA target sequence for Il20 (NM_021380.1,229-247).
gcaagctgaagatacaaat

SEQ ID NO: 565656 - DNA, 19 bp, Mus musculus
  siRNA target sequence for Il20 (NM_021380.1,234-252).
ctgaagatacaaatattga

SEQ ID NO: 565657 - DNA, 19 bp, Mus musculus
  siRNA target sequence for Il20 (NM_021380.1,236-254).
gaagatacaaatattgaca

SEQ ID NO: 565658 - DNA, 19 bp, Mus musculus
  siRNA target sequence for Il20 (NM_021380.1,267-285).
ggacgactgagtctttgaa

SEQ ID NO: 565659 - DNA, 19 bp, Mus musculus
  siRNA target sequence for Il20 (NM_021380.1,310-328).
ctgcttccttcgtcatcta

SEQ ID NO: 565660 - DNA, 19 bp, Mus musculus
  siRNA target sequence for Il20 (NM_021380.1,312-330).
gcttccttcgtcatctagt

SEQ ID NO: 565661 - DNA, 19 bp, Mus musculus
  siRNA target sequence for Il20 (NM_021380.1,320-338).
cgtcatctagtgagattct

SEQ ID NO: 565662 - DNA, 19 bp, Mus musculus
  siRNA target sequence for Il20 (NM_021380.1,321-339).
gtcatctagtgagattcta

SEQ ID NO: 565663 - DNA, 19 bp, Mus musculus
  siRNA target sequence for Il20 (NM_021380.1,377-395).
caccataccctgagaaaga

SEQ ID NO: 565664 - DNA, 19 bp, Mus musculus
  siRNA target sequence for Il20 (NM_021380.1,506-524).
ctgagtcacttcatagagt

SEQ ID NO: 565665 - DNA, 19 bp, Mus musculus
  siRNA target sequence for Il20 (NM_021380.1,558-576).
gagaactaggcattcttct

SEQ ID NO: 565666 - DNA, 19 bp, Mus musculus
  siRNA target sequence for Il24 (NM_053095.1,288-306).
gagcctaatccttcttctt

SEQ ID NO: 565667 - DNA, 19 bp, Mus musculus
  siRNA target sequence for Il24 (NM_053095.1,440-458).
caagcatccggctgttgaa

SEQ ID NO: 565668 - DNA, 19 bp, Mus musculus
  siRNA target sequence for Il24 (NM_053095.1,463-481).
caggttctgcggaatgtct

SEQ ID NO: 565669 - DNA, 19 bp, Mus musculus
  siRNA target sequence for Il24 (NM_053095.1,512-530).
gcctgctgaagttctactt

SEQ ID NO: 565670 - DNA, 19 bp, Mus musculus
  siRNA target sequence for Il24 (NM_053095.1,638-656).
ccagtaaggacaattccat

SEQ ID NO: 565671 - DNA, 19 bp, Mus musculus
  siRNA target sequence for Il24 (NM_053095.1,653-671).
ccatgcttcccattagtga

SEQ ID NO: 565672 - DNA, 19 bp, Mus musculus
  siRNA target sequence for Il24 (NM_053095.1,674-692).
gtgcacaccagcggttttt

SEQ ID NO: 565673 - DNA, 19 bp, Mus musculus
  siRNA target sequence for Il24 (NM_053095.1,700-718).
cgcagagcattcaaacagt

SEQ ID NO: 565674 - DNA, 19 bp, Mus musculus
  siRNA target sequence for Il24 (NM_053095.1,701-719).
gcagagcattcaaacagtt

SEQ ID NO: 565675 - DNA, 19 bp, Mus musculus
  siRNA target sequence for Nodal (NM_013611.2,509-527).
gcctccaggcgcaagatgt

SEQ ID NO: 565676 - DNA, 19 bp, Mus musculus
  siRNA target sequence for Nodal (NM_013611.2,548-566).
ggactttcacgtttgactt

SEQ ID NO: 565677 - DNA, 19 bp, Mus musculus
  siRNA target sequence for Nodal (NM_013611.2,649-667).
ggcccactcaccattgaca

SEQ ID NO: 565678 - DNA, 19 bp, Mus musculus
  siRNA target sequence for Nodal (NM_013611.2,1049-1067).
ggcaacgccgacatcattt

SEQ ID NO: 565679 - DNA, 19 bp, Mus musculus
  siRNA target sequence for Nodal (NM_013611.2,1237-1255).
cagagcctgctgaaacgat

SEQ ID NO: 565680 - DNA, 19 bp, Mus musculus
  siRNA target sequence for Nodal (NM_013611.2,1242-1260).
cctgctgaaacgataccaa

SEQ ID NO: 565681 - DNA, 19 bp, Mus musculus
  siRNA target sequence for Nodal (NM_013611.2,1305-1323).
gccactgagcatgctttat

SEQ ID NO: 565682 - DNA, 19 bp, Mus musculus
  siRNA target sequence for Nodal (NM_013611.2,1307-1325).
cactgagcatgctttatgt

SEQ ID NO: 565683 - DNA, 19 bp, Mus musculus
  siRNA target sequence for Oit1 (NM_146050.1,278-296).
cgtgttgtggtcttcatct

SEQ ID NO: 565684 - DNA, 19 bp, Mus musculus
  siRNA target sequence for Oit1 (NM_146050.1,281-299).
gttgtggtcttcatcttta

SEQ ID NO: 565685 - DNA, 19 bp, Mus musculus
  siRNA target sequence for Oit1 (NM_146050.1,343-361).
cagcaggaaaacaattcgt

SEQ ID NO: 565686 - DNA, 19 bp, Mus musculus
  siRNA target sequence for Oit1 (NM_146050.1,426-444).
gcaagatctgcccaaacaa

SEQ ID NO: 565687 - DNA, 19 bp, Mus musculus
  siRNA target sequence for Oit1 (NM_146050.1,579-597).
caactggccaggtgatgaa

SEQ ID NO: 565688 - DNA, 19 bp, Mus musculus
  siRNA target sequence for Oit1 (NM_146050.1,582-600).
ctggccaggtgatgaaaaa

SEQ ID NO: 565689 - DNA, 19 bp, Mus musculus
  siRNA target sequence for Oit1 (NM_146050.1,630-648).
cccaactcctgctgaactt

SEQ ID NO: 565690 - DNA, 19 bp, Mus musculus
  siRNA target sequence for Oit1 (NM_146050.1,643-661).
gaacttccttacggaaatt

SEQ ID NO: 565691 - DNA, 19 bp, Mus musculus
  siRNA target sequence for Oit1 (NM_146050.1,646-664).
cttccttacggaaattcca

SEQ ID NO: 565692 - DNA, 19 bp, Mus musculus
  siRNA target sequence for Oit1 (NM_146050.1,679-697).
gctggtagcctcctatgat

SEQ ID NO: 565693 - DNA, 19 bp, Mus musculus
  siRNA target sequence for Oit1 (NM_146050.1,695-713).
gatgacccagggaccaaaa

SEQ ID NO: 565694 - DNA, 19 bp, Mus musculus
  siRNA target sequence for Oit1 (NM_146050.1,790-808).
ggtctttgtaggtgctaaa

SEQ ID NO: 565695 - DNA, 19 bp, Mus musculus
  siRNA target sequence for Oit1 (NM_146050.1,804-822).
ctaaagacctcaagagtaa

SEQ ID NO: 565696 - DNA, 19 bp, Mus musculus
  siRNA target sequence for Oit1 (NM_146050.1,906-924).
gtgtgccacggaaagtaat

SEQ ID NO: 565697 - DNA, 19 bp, Mus musculus
  siRNA target sequence for Oit1 (NM_146050.1,908-926).
gtgccacggaaagtaatgt

SEQ ID NO: 565698 - DNA, 19 bp, Mus musculus
  siRNA target sequence for ORF9 (NM_020622.1,120-138).
cttcaaggcactagtgttt

SEQ ID NO: 565699 - DNA, 19 bp, Mus musculus
  siRNA target sequence for ORF9 (NM_020622.1,150-168).
cctgtgcgcctggtattct

SEQ ID NO: 565700 - DNA, 19 bp, Mus musculus
  siRNA target sequence for ORF9 (NM_020622.1,375-393).
ggatgaagtgctaatagga

SEQ ID NO: 565701 - DNA, 19 bp, Mus musculus
  siRNA target sequence for ORF9 (NM_020622.1,409-427).
gtggcaagagggataaaca

SEQ ID NO: 565702 - DNA, 19 bp, Mus musculus
  siRNA target sequence for ORF9 (NM_020622.1,411-429).
ggcaagagggataaacatt

SEQ ID NO: 565703 - DNA, 19 bp, Mus musculus
  siRNA target sequence for ORF9 (NM_020622.1,426-444).
cattgctgtcgtcaactat

SEQ ID NO: 565704 - DNA, 19 bp, Mus musculus
  siRNA target sequence for ORF9 (NM_020622.1,430-448).
gctgtcgtcaactatgaga

SEQ ID NO: 565705 - DNA, 19 bp, Mus musculus
  siRNA target sequence for ORF9 (NM_020622.1,457-475).
gtgatagcgacaaagtact

SEQ ID NO: 565706 - DNA, 19 bp, Mus musculus
  siRNA target sequence for ORF9 (NM_020622.1,459-477).
gatagcgacaaagtacttt

SEQ ID NO: 565707 - DNA, 19 bp, Mus musculus
  siRNA target sequence for ORF9 (NM_020622.1,463-481).
gcgacaaagtactttgata

SEQ ID NO: 565708 - DNA, 19 bp, Mus musculus
  siRNA target sequence for ORF9 (NM_020622.1,464-482).
cgacaaagtactttgatat

SEQ ID NO: 565709 - DNA, 19 bp, Mus musculus
  siRNA target sequence for ORF9 (NM_020622.1,467-485).
caaagtactttgatatgta

SEQ ID NO: 565710 - DNA, 19 bp, Mus musculus
  siRNA target sequence for ORF9 (NM_020622.1,549-567).
gttcatggtgactcatgat

SEQ ID NO: 565711 - DNA, 19 bp, Mus musculus
  siRNA target sequence for ORF9 (NM_020622.1,623-641).
gcaaagaaatcaagaacat

SEQ ID NO: 565712 - DNA, 19 bp, Mus musculus
  siRNA target sequence for ORF9 (NM_020622.1,727-745).
gatcaatccaggaacagat

SEQ ID NO: 565713 - DNA, 19 bp, Mus musculus
  siRNA target sequence for ORF9 (NM_020622.1,768-786).
ccagatcgaaggatgcata

SEQ ID NO: 565714 - DNA, 19 bp, Mus musculus
  siRNA target sequence for Pglyrp (NM_009402.1,75-93).
gcaacctcctgcagtttca

SEQ ID NO: 565715 - DNA, 19 bp, Mus musculus
  siRNA target sequence for Pglyrp (NM_009402.1,229-247).
gcaatgtgcagcattacca

SEQ ID NO: 565716 - DNA, 19 bp, Mus musculus
  siRNA target sequence for Pglyrp (NM_009402.1,236-254).
gcagcattaccacaagaat

SEQ ID NO: 565717 - DNA, 19 bp, Mus musculus
  siRNA target sequence for Pglyrp (NM_009402.1,268-286).
gcgatgtagcctacaactt

SEQ ID NO: 565718 - DNA, 19 bp, Mus musculus
  siRNA target sequence for Pglyrp (NM_009402.1,273-291).
gtagcctacaacttcctta

SEQ ID NO: 565719 - DNA, 19 bp, Mus musculus
  siRNA target sequence for Pglyrp (NM_009402.1,299-317).
ggacggtcatgtctatgaa

SEQ ID NO: 565720 - DNA, 19 bp, Mus musculus
  siRNA target sequence for Pglyrp (NM_009402.1,431-449).
ccgtgctgccctaaatctt

SEQ ID NO: 565721 - DNA, 19 bp, Mus musculus
  siRNA target sequence for Scgb3a1 (NM_054037.1,57-75).
gcttaccaccacctttcta

SEQ ID NO: 565722 - DNA, 19 bp, Mus musculus
  siRNA target sequence for Scgb3a1 (NM_054037.1,258-276).
cccattggatcctctcata

SEQ ID NO: 565723 - DNA, 19 bp, Mus musculus
  siRNA target sequence for Scgb3a1 (NM_054037.1,260-278).
cattggatcctctcataga

SEQ ID NO: 565724 - DNA, 19 bp, Mus musculus
  siRNA target sequence for Spp1 (NM_009263.1,274-292).
ccggtgaaagtgactgatt

SEQ ID NO: 565725 - DNA, 19 bp, Mus musculus
  siRNA target sequence for Spp1 (NM_009263.1,321-339).
cctgcacccagatcctata

SEQ ID NO: 565726 - DNA, 19 bp, Mus musculus
  siRNA target sequence for Spp1 (NM_009263.1,402-420).
gtcctctgaagaaaaggat

SEQ ID NO: 565727 - DNA, 19 bp, Mus musculus
  siRNA target sequence for Spp1 (NM_009263.1,515-533).
cagagagcgaggattctgt

SEQ ID NO: 565728 - DNA, 19 bp, Mus musculus
  siRNA target sequence for Spp1 (NM_009263.1,582-600).
gaccgtcactgctagtaca

SEQ ID NO: 565729 - DNA, 19 bp, Mus musculus
  siRNA target sequence for Spp1 (NM_009263.1,585-603).
cgtcactgctagtacacaa

SEQ ID NO: 565730 - DNA, 19 bp, Mus musculus
  siRNA target sequence for Spp1 (NM_009263.1,673-691).
ggactgaggtcaaagtcta

SEQ ID NO: 565731 - DNA, 19 bp, Mus musculus
  siRNA target sequence for Spp1 (NM_009263.1,702-720).
ggtttctgatgaacagtat

SEQ ID NO: 565732 - DNA, 19 bp, Mus musculus
  siRNA target sequence for Spp1 (NM_009263.1,742-760).
ctcacctctcacatgaaga

SEQ ID NO: 565733 - DNA, 19 bp, Mus musculus
  siRNA target sequence for Spp1 (NM_009263.1,926-944).
ccgatcagtcggatgtgat

SEQ ID NO: 565734 - DNA, 19 bp, Mus musculus
  siRNA target sequence for Spp1 (NM_009263.1,931-949).
cagtcggatgtgatcgata

SEQ ID NO: 565735 - DNA, 19 bp, Mus musculus
  siRNA target sequence for Spp1 (NM_009263.1,935-953).
cggatgtgatcgatagtca

SEQ ID NO: 565736 - DNA, 19 bp, Mus musculus
  siRNA target sequence for Spp1 (NM_009263.1,1018-1036).
gtcctagaccctaagagta

SEQ ID NO: 565737 - DNA, 19 bp, Mus musculus
  siRNA target sequence for Spp1 (NM_009263.1,1039-1057).
gaagatgataggtatctga

SEQ ID NO: 565738 - DNA, 19 bp, Mus musculus
  siRNA target sequence for Spp1 (NM_009263.1,1056-1074).
gaaattccgaatttctcat

SEQ ID NO: 565739 - DNA, 19 bp, Mus musculus
  siRNA target sequence for Thpo (NM_009379.2,429-447).
cttgcagtggcaagactaa

SEQ ID NO: 565740 - DNA, 19 bp, Mus musculus
  siRNA target sequence for Thpo (NM_009379.2,433-451).
cagtggcaagactaactct

SEQ ID NO: 565741 - DNA, 19 bp, Mus musculus
  siRNA target sequence for Thpo (NM_009379.2,475-493).
gtgaccccagactcctaaa

SEQ ID NO: 565742 - DNA, 19 bp, Mus musculus
  siRNA target sequence for Thpo (NM_009379.2,477-495).
gaccccagactcctaaata

SEQ ID NO: 565743 - DNA, 19 bp, Mus musculus
  siRNA target sequence for Thpo (NM_009379.2,481-499).
ccagactcctaaataaact

SEQ ID NO: 565744 - DNA, 19 bp, Mus musculus
  siRNA target sequence for Thpo (NM_009379.2,545-563).
cgacgtcgaccctttgtct

SEQ ID NO: 565745 - DNA, 19 bp, Mus musculus
  siRNA target sequence for Thpo (NM_009379.2,546-564).
gacgtcgaccctttgtcta

SEQ ID NO: 565746 - DNA, 19 bp, Mus musculus
  siRNA target sequence for Thpo (NM_009379.2,1083-1101).
cctggtcagctaaatcaaa

SEQ ID NO: 565747 - DNA, 19 bp, Mus musculus
  siRNA target sequence for Thpo (NM_009379.2,1109-1127).
gtccccagtccaaatctct

SEQ ID NO: 565748 - DNA, 19 bp, Mus musculus
  siRNA target sequence for Thpo (NM_009379.2,1142-1160).
gacacacggacctgtgaat

SEQ ID NO: 565749 - DNA, 19 bp, Mus musculus
  siRNA target sequence for Thpo (NM_009379.2,1146-1164).
cacggacctgtgaatggaa

SEQ ID NO: 565750 - DNA, 19 bp, Mus musculus
  siRNA target sequence for Thpo (NM_009379.2,1411-1429).
ctcatccagtcacaatgta

SEQ ID NO: 565751 - DNA, 19 bp, Mus musculus
  siRNA target sequence for Tslp (NM_021367.1,38-56).
cttcatcctgcaagtacta

SEQ ID NO: 565752 - DNA, 19 bp, Mus musculus
  siRNA target sequence for Tslp (NM_021367.1,41-59).
catcctgcaagtactagta

SEQ ID NO: 565753 - DNA, 19 bp, Mus musculus
  siRNA target sequence for Tslp (NM_021367.1,60-78).
cggatggggctaacttaca

SEQ ID NO: 565754 - DNA, 19 bp, Mus musculus
  siRNA target sequence for Tslp (NM_021367.1,61-79).
ggatggggctaacttacaa

SEQ ID NO: 565755 - DNA, 19 bp, Mus musculus
  siRNA target sequence for Tslp (NM_021367.1,89-107).
ctgcaacttcacgtcaatt

SEQ ID NO: 565756 - DNA, 19 bp, Mus musculus
  siRNA target sequence for Tslp (NM_021367.1,98-116).
cacgtcaattacgaaaata

SEQ ID NO: 565757 - DNA, 19 bp, Mus musculus
  siRNA target sequence for Tslp (NM_021367.1,100-118).
cgtcaattacgaaaatata

SEQ ID NO: 565758 - DNA, 19 bp, Mus musculus
  siRNA target sequence for Tslp (NM_021367.1,109-127).
cgaaaatatattgtaacat

SEQ ID NO: 565759 - DNA, 19 bp, Mus musculus
  siRNA target sequence for Tslp (NM_021367.1,121-139).
gtaacataatttttcatga

SEQ ID NO: 565760 - DNA, 19 bp, Mus musculus
  siRNA target sequence for Tslp (NM_021367.1,160-178).
gggctaagttcgagcaaat

SEQ ID NO: 565761 - DNA, 19 bp, Mus musculus
  siRNA target sequence for Tslp (NM_021367.1,163-181).
ctaagttcgagcaaatcga

SEQ ID NO: 565762 - DNA, 19 bp, Mus musculus
  siRNA target sequence for Tslp (NM_021367.1,202-220).
cttgtctcctgaaaatcga

SEQ ID NO: 565763 - DNA, 19 bp, Mus musculus
  siRNA target sequence for Tslp (NM_021367.1,256-274).
cactccccgacaaaacatt

SEQ ID NO: 565764 - DNA, 19 bp, Mus musculus
  siRNA target sequence for Tslp (NM_021367.1,360-378).
caagaagtccaaaacatct

SEQ ID NO: 565765 - DNA, 19 bp, Mus musculus
  siRNA target sequence for Tslp (NM_021367.1,383-401).
gaatcaaacctcacaaatt

SEQ ID NO: 565766 - DNA, 19 bp, Mus musculus
  siRNA target sequence for Tslp (NM_021367.1,402-420).
ctaagattgtggtattcct

SEQ ID NO: 565767 - DNA, 19 bp, Mus musculus
  siRNA target sequence for 2610011A08Rik (NM_030566.1,760-778).
gacagtgcctccatctctt

SEQ ID NO: 565768 - DNA, 19 bp, Mus musculus
  siRNA target sequence for 2610011A08Rik (NM_030566.1,1181-1199).
gcctgagccaagaggttaa

SEQ ID NO: 565769 - DNA, 19 bp, Mus musculus
  siRNA target sequence for 2610011A08Rik (NM_030566.1,1182-1200).
cctgagccaagaggttaaa

SEQ ID NO: 565770 - DNA, 19 bp, Mus musculus
  siRNA target sequence for 2610011A08Rik (NM_030566.1,1187-1205).
gccaagaggttaaaagact

SEQ ID NO: 565771 - DNA, 19 bp, Mus musculus
  siRNA target sequence for 2610011A08Rik (NM_030566.1,1304-1322).
ccatacaggagctacatct

SEQ ID NO: 565772 - DNA, 19 bp, Mus musculus
  siRNA target sequence for 2610011A08Rik (NM_030566.1,1384-1402).
gagcgcctgcgcattgaaa

SEQ ID NO: 565773 - DNA, 19 bp, Mus musculus
  siRNA target sequence for 2610011A08Rik (NM_030566.1,1635-1653).
ggtgcagagggactttgta

SEQ ID NO: 565774 - DNA, 19 bp, Mus musculus
  siRNA target sequence for 2610011A08Rik (NM_030566.1,1748-1766).
gggacatcagggacattaa

SEQ ID NO: 565775 - DNA, 19 bp, Mus musculus
  siRNA target sequence for Btc (NM_007568.2,363-381).
cccctagacagaaagtgaa

SEQ ID NO: 565776 - DNA, 19 bp, Mus musculus
  siRNA target sequence for Btc (NM_007568.2,364-382).
ccctagacagaaagtgaaa

SEQ ID NO: 565777 - DNA, 19 bp, Mus musculus
  siRNA target sequence for Btc (NM_007568.2,396-414).
ggtgccccaagcagtacaa

SEQ ID NO: 565778 - DNA, 19 bp, Mus musculus
  siRNA target sequence for Btc (NM_007568.2,402-420).
ccaagcagtacaagcatta

SEQ ID NO: 565779 - DNA, 19 bp, Mus musculus
  siRNA target sequence for Btc (NM_007568.2,550-568).
cctggtggtctgcttgata

SEQ ID NO: 565780 - DNA, 19 bp, Mus musculus
  siRNA target sequence for Btc (NM_007568.2,577-595).
ggtggtgttcatcatttta

SEQ ID NO: 565781 - DNA, 19 bp, Mus musculus
  siRNA target sequence for Btc (NM_007568.2,581-599).
gtgttcatcattttagtca

SEQ ID NO: 565782 - DNA, 19 bp, Mus musculus
  siRNA target sequence for Btc (NM_007568.2,624-642).
ctcttcggaaacatcgtaa

SEQ ID NO: 565783 - DNA, 19 bp, Mus musculus
  siRNA target sequence for Btc (NM_007568.2,687-705).
ctcccataagtgaagatat

SEQ ID NO: 565784 - DNA, 19 bp, Mus musculus
  siRNA target sequence for Btc (NM_007568.2,701-719).
gatattcaagagaccaata

SEQ ID NO: 565785 - DNA, 19 bp, Mus musculus
  siRNA target sequence for Btc (NM_007568.2,707-725).
caagagaccaatattgctt

SEQ ID NO: 565786 - DNA, 19 bp, Mus musculus
  siRNA target sequence for Dtr (NM_010415.1,642-660).
ccgtactccctcttgcaaa

SEQ ID NO: 565787 - DNA, 19 bp, Mus musculus
  siRNA target sequence for Dtr (NM_010415.1,709-727).
gtggagaatcccctataca

SEQ ID NO: 565788 - DNA, 19 bp, Mus musculus
  siRNA target sequence for Dtr (NM_010415.1,712-730).
gagaatcccctatacacat

SEQ ID NO: 565789 - DNA, 19 bp, Mus musculus
  siRNA target sequence for Dtr (NM_010415.1,714-732).
gaatcccctatacacatat

SEQ ID NO: 565790 - DNA, 19 bp, Mus musculus
  siRNA target sequence for Dtr (NM_010415.1,776-794).
ccgtctgtcttcttgtcat

SEQ ID NO: 565791 - DNA, 19 bp, Mus musculus
  siRNA target sequence for Epgn (NM_053087.1,411-429).
gtgtataaatctgaaatca

SEQ ID NO: 565792 - DNA, 19 bp, Mus musculus
  siRNA target sequence for Ereg (NM_007950.1,239-257).
caggagaatccgaggataa

SEQ ID NO: 565793 - DNA, 19 bp, Mus musculus
  siRNA target sequence for Ereg (NM_007950.1,241-259).
ggagaatccgaggataact

SEQ ID NO: 565794 - DNA, 19 bp, Mus musculus
  siRNA target sequence for Ereg (NM_007950.1,295-313).
gtggctcaagtgcagatta

SEQ ID NO: 565795 - DNA, 19 bp, Mus musculus
  siRNA target sequence for Ereg (NM_007950.1,384-402).
gaaattctgcagatgtgaa

SEQ ID NO: 565796 - DNA, 19 bp, Mus musculus
  siRNA target sequence for Ereg (NM_007950.1,420-438).
gcgatgtgagcacttcttt

SEQ ID NO: 565797 - DNA, 19 bp, Mus musculus
  siRNA target sequence for Ereg (NM_007950.1,450-468).
ccaacccttgagcaaagaa

SEQ ID NO: 565798 - DNA, 19 bp, Mus musculus
  siRNA target sequence for Ereg (NM_007950.1,455-473).
ccttgagcaaagaatacgt

SEQ ID NO: 565799 - DNA, 19 bp, Mus musculus
  siRNA target sequence for Ereg (NM_007950.1,456-474).
cttgagcaaagaatacgtt

SEQ ID NO: 565800 - DNA, 19 bp, Mus musculus
  siRNA target sequence for Ereg (NM_007950.1,471-489).
cgttgcgttgacagtgatt

SEQ ID NO: 565801 - DNA, 19 bp, Mus musculus
  siRNA target sequence for Ereg (NM_007950.1,477-495).
gttgacagtgattctcatt

SEQ ID NO: 565802 - DNA, 19 bp, Mus musculus
  siRNA target sequence for Ereg (NM_007950.1,490-508).
ctcattttcctgtttctca

SEQ ID NO: 565803 - DNA, 19 bp, Mus musculus
  siRNA target sequence for Ereg (NM_007950.1,510-528).
cataaccgctggatgcata

SEQ ID NO: 565804 - DNA, 19 bp, Mus musculus
  siRNA target sequence for Ereg (NM_007950.1,515-533).
ccgctggatgcatatacta

SEQ ID NO: 565805 - DNA, 19 bp, Mus musculus
  siRNA target sequence for Ereg (NM_007950.1,516-534).
cgctggatgcatatactat

SEQ ID NO: 565806 - DNA, 19 bp, Mus musculus
  siRNA target sequence for Ereg (NM_007950.1,517-535).
gctggatgcatatactatt

SEQ ID NO: 565807 - DNA, 19 bp, Mus musculus
  siRNA target sequence for Ereg (NM_007950.1,542-560).
gatggtacaaaaatcgaaa

SEQ ID NO: 565808 - DNA, 19 bp, Mus musculus
  siRNA target sequence for Fgf1 (NM_010197.2,409-427).
cggagaccggccagtactt

SEQ ID NO: 565809 - DNA, 19 bp, Mus musculus
  siRNA target sequence for Fgf1 (NM_010197.2,455-473).
cggctcgcagacaccaaat

SEQ ID NO: 565810 - DNA, 19 bp, Mus musculus
  siRNA target sequence for Fgf1 (NM_010197.2,457-475).
gctcgcagacaccaaatga

SEQ ID NO: 565811 - DNA, 19 bp, Mus musculus
  siRNA target sequence for Fgf1 (NM_010197.2,466-484).
caccaaatgaggaatgtct

SEQ ID NO: 565812 - DNA, 19 bp, Mus musculus
  siRNA target sequence for Fgf1 (NM_010197.2,609-627).
ggccagaaagccatcttgt

SEQ ID NO: 565813 - DNA, 19 bp, Mus musculus
  siRNA target sequence for Fgf1 (NM_010197.2,610-628).
gccagaaagccatcttgtt

SEQ ID NO: 565814 - DNA, 19 bp, Mus musculus
  siRNA target sequence for Fgf10 (NM_008002.3,548-566).
gcatgtgcggagctacaat

SEQ ID NO: 565815 - DNA, 19 bp, Mus musculus
  siRNA target sequence for Fgf10 (NM_008002.3,777-795).
ggctcaaaagagtttaaca

SEQ ID NO: 565816 - DNA, 19 bp, Mus musculus
  siRNA target sequence for Fgf10 (NM_008002.3,778-796).
gctcaaaagagtttaacaa

SEQ ID NO: 565817 - DNA, 19 bp, Mus musculus
  siRNA target sequence for Fgf10 (NM_008002.3,831-849).
ggatacaacacctatgcat

SEQ ID NO: 565818 - DNA, 19 bp, Mus musculus
  siRNA target sequence for Fgf11 (NM_010198.1,208-226).
ggcatcgtcaccaaactgt

SEQ ID NO: 565819 - DNA, 19 bp, Mus musculus
  siRNA target sequence for Fgf11 (NM_010198.1,209-227).
gcatcgtcaccaaactgtt

SEQ ID NO: 565820 - DNA, 19 bp, Mus musculus
  siRNA target sequence for Fgf11 (NM_010198.1,385-403).
gctgaggggctattgtaca

SEQ ID NO: 565821 - DNA, 19 bp, Mus musculus
  siRNA target sequence for Fgf11 (NM_010198.1,402-420).
cagctcgccacatttcaca

SEQ ID NO: 565822 - DNA, 19 bp, Mus musculus
  siRNA target sequence for Fgf11 (NM_010198.1,419-437).
cagcagagtgtcgctttaa

SEQ ID NO: 565823 - DNA, 19 bp, Mus musculus
  siRNA target sequence for Fgf11 (NM_010198.1,438-456).
ggagtgcgtctttgagaat

SEQ ID NO: 565824 - DNA, 19 bp, Mus musculus
  siRNA target sequence for Fgf11 (NM_010198.1,439-457).
gagtgcgtctttgagaatt

SEQ ID NO: 565825 - DNA, 19 bp, Mus musculus
  siRNA target sequence for Fgf11 (NM_010198.1,443-461).
gcgtctttgagaattacta

SEQ ID NO: 565826 - DNA, 19 bp, Mus musculus
  siRNA target sequence for Fgf11 (NM_010198.1,444-462).
cgtctttgagaattactat

SEQ ID NO: 565827 - DNA, 19 bp, Mus musculus
  siRNA target sequence for Fgf12 (NM_010199.1,284-302).
gggaccaaggacgaaaaca

SEQ ID NO: 565828 - DNA, 19 bp, Mus musculus
  siRNA target sequence for Fgf12 (NM_010199.1,303-321).
gcgactacaccctcttcaa

SEQ ID NO: 565829 - DNA, 19 bp, Mus musculus
  siRNA target sequence for Fgf12 (NM_010199.1,304-322).
cgactacaccctcttcaat

SEQ ID NO: 565830 - DNA, 19 bp, Mus musculus
  siRNA target sequence for Fgf12 (NM_010199.1,307-325).
ctacaccctcttcaatcta

SEQ ID NO: 565831 - DNA, 19 bp, Mus musculus
  siRNA target sequence for Fgf12 (NM_010199.1,519-537).
ggtttctaggactcaataa

SEQ ID NO: 565832 - DNA, 19 bp, Mus musculus
  siRNA target sequence for Fgf12 (NM_010199.1,520-538).
gtttctaggactcaataaa

SEQ ID NO: 565833 - DNA, 19 bp, Mus musculus
  siRNA target sequence for Fgf12 (NM_010199.1,702-720).
gaggcaaagtcgtgaatca

SEQ ID NO: 565834 - DNA, 19 bp, Mus musculus
  siRNA target sequence for Fgf12 (NM_010199.1,705-723).
gcaaagtcgtgaatcaaga

SEQ ID NO: 565835 - DNA, 19 bp, Mus musculus
  siRNA target sequence for Fgf12 (NM_010199.1,706-724).
caaagtcgtgaatcaagat

SEQ ID NO: 565836 - DNA, 19 bp, Mus musculus
  siRNA target sequence for Fgf12 (NM_010199.1,710-728).
gtcgtgaatcaagattcta

SEQ ID NO: 565837 - DNA, 19 bp, Mus musculus
  siRNA target sequence for Fgf13 (NM_010200.2,422-440).
cgcgagcgcgagaaatcca

SEQ ID NO: 565838 - DNA, 19 bp, Mus musculus
  siRNA target sequence for Fgf13 (NM_010200.2,423-441).
gcgagcgcgagaaatccaa

SEQ ID NO: 565839 - DNA, 19 bp, Mus musculus
  siRNA target sequence for Fgf13 (NM_010200.2,424-442).
cgagcgcgagaaatccaat

SEQ ID NO: 565840 - DNA, 19 bp, Mus musculus
  siRNA target sequence for Fgf13 (NM_010200.2,483-501).
gctgcgacaaaaacaagtt

SEQ ID NO: 565841 - DNA, 19 bp, Mus musculus
  siRNA target sequence for Fgf13 (NM_010200.2,486-504).
gcgacaaaaacaagttaaa

SEQ ID NO: 565842 - DNA, 19 bp, Mus musculus
  siRNA target sequence for Fgf13 (NM_010200.2,566-584).
cagcttaagggtatagtta

SEQ ID NO: 565843 - DNA, 19 bp, Mus musculus
  siRNA target sequence for Fgf13 (NM_010200.2,786-804).
cacctgagtgcaaattcaa

SEQ ID NO: 565844 - DNA, 19 bp, Mus musculus
  siRNA target sequence for Fgf13 (NM_010200.2,879-897).
ggtatctaggtctgaacaa

SEQ ID NO: 565845 - DNA, 19 bp, Mus musculus
  siRNA target sequence for Fgf13 (NM_010200.2,1056-1074).
gcgtctctggtgtactgaa

SEQ ID NO: 565846 - DNA, 19 bp, Mus musculus
  siRNA target sequence for Fgf13 (NM_010200.2,1057-1075).
cgtctctggtgtactgaat

SEQ ID NO: 565847 - DNA, 19 bp, Mus musculus
  siRNA target sequence for Fgf13 (NM_010200.2,1070-1088).
ctgaatggaggcaaatcca

SEQ ID NO: 565848 - DNA, 19 bp, Mus musculus
  siRNA target sequence for Fgf14 (NM_010201.1,21-39).
cggcttgatccgtcagaaa

SEQ ID NO: 565849 - DNA, 19 bp, Mus musculus
  siRNA target sequence for Fgf14 (NM_010201.1,155-173).
gcatcttcggcctcaagaa

SEQ ID NO: 565850 - DNA, 19 bp, Mus musculus
  siRNA target sequence for Fgf14 (NM_010201.1,230-248).
gcaggcaaggctactactt

SEQ ID NO: 565851 - DNA, 19 bp, Mus musculus
  siRNA target sequence for Fgf14 (NM_010201.1,355-373).
gtgaagacagggttgtaca

SEQ ID NO: 565852 - DNA, 19 bp, Mus musculus
  siRNA target sequence for Fgf14 (NM_010201.1,362-380).
cagggttgtacatagcaat

SEQ ID NO: 565853 - DNA, 19 bp, Mus musculus
  siRNA target sequence for Fgf14 (NM_010201.1,366-384).
gttgtacatagcaatgaat

SEQ ID NO: 565854 - DNA, 19 bp, Mus musculus
  siRNA target sequence for Fgf14 (NM_010201.1,396-414).
cctctacccatcagaactt

SEQ ID NO: 565855 - DNA, 19 bp, Mus musculus
  siRNA target sequence for Fgf14 (NM_010201.1,399-417).
ctacccatcagaacttttt

SEQ ID NO: 565856 - DNA, 19 bp, Mus musculus
  siRNA target sequence for Fgf14 (NM_010201.1,512-530).
ggtttttgggattaaataa

SEQ ID NO: 565857 - DNA, 19 bp, Mus musculus
  siRNA target sequence for Fgf14 (NM_010201.1,531-549).
ggaagggcaagttatgaaa

SEQ ID NO: 565858 - DNA, 19 bp, Mus musculus
  siRNA target sequence for Fgf14 (NM_010201.1,666-684).
ggtgacgccaagcaaaagt

SEQ ID NO: 565859 - DNA, 19 bp, Mus musculus
  siRNA target sequence for Fgf14 (NM_010201.1,667-685).
gtgacgccaagcaaaagta

SEQ ID NO: 565860 - DNA, 19 bp, Mus musculus
  siRNA target sequence for Fgf14 (NM_010201.1,672-690).
gccaagcaaaagtacaagt

SEQ ID NO: 565861 - DNA, 19 bp, Mus musculus
  siRNA target sequence for Fgf15 (NM_008003.1,276-294).
ctacggctggggcaagatt

SEQ ID NO: 565862 - DNA, 19 bp, Mus musculus
  siRNA target sequence for Fgf15 (NM_008003.1,385-403).
gaccaaaacgaacgaaatt

SEQ ID NO: 565863 - DNA, 19 bp, Mus musculus
  siRNA target sequence for Fgf15 (NM_008003.1,388-406).
caaaacgaacgaaatttgt

SEQ ID NO: 565864 - DNA, 19 bp, Mus musculus
  siRNA target sequence for Fgf15 (NM_008003.1,477-495).
gagcgcggacggcaagata

SEQ ID NO: 565865 - DNA, 19 bp, Mus musculus
  siRNA target sequence for Fgf15 (NM_008003.1,479-497).
gcgcggacggcaagatata

SEQ ID NO: 565866 - DNA, 19 bp, Mus musculus
  siRNA target sequence for Fgf15 (NM_008003.1,536-554).
gggaggaaatggactgttt

SEQ ID NO: 565867 - DNA, 19 bp, Mus musculus
  siRNA target sequence for Fgf15 (NM_008003.1,634-652).
gaccagaaaccctcaaact

SEQ ID NO: 565868 - DNA, 19 bp, Mus musculus
  siRNA target sequence for Fgf15 (NM_008003.1,637-655).
cagaaaccctcaaacttta

SEQ ID NO: 565869 - DNA, 19 bp, Mus musculus
  siRNA target sequence for Fgf15 (NM_008003.1,690-708).
ggaccagctgaggtctaaa

SEQ ID NO: 565870 - DNA, 19 bp, Mus musculus
  siRNA target sequence for Fgf15 (NM_008003.1,694-712).
cagctgaggtctaaaatgt

SEQ ID NO: 565871 - DNA, 19 bp, Mus musculus
  siRNA target sequence for Fgf16 (NM_030614.1,209-227).
gcttccaccttgagatctt

SEQ ID NO: 565872 - DNA, 19 bp, Mus musculus
  siRNA target sequence for Fgf16 (NM_030614.1,366-384).
gctctatggatcgaagaaa

SEQ ID NO: 565873 - DNA, 19 bp, Mus musculus
  siRNA target sequence for Fgf16 (NM_030614.1,381-399).
gaaactcacacgtgaatgt

SEQ ID NO: 565874 - DNA, 19 bp, Mus musculus
  siRNA target sequence for Fgf16 (NM_030614.1,465-483).
ggactcggagagacagtat

SEQ ID NO: 565875 - DNA, 19 bp, Mus musculus
  siRNA target sequence for Fgf16 (NM_030614.1,468-486).
ctcggagagacagtattat

SEQ ID NO: 565876 - DNA, 19 bp, Mus musculus
  siRNA target sequence for Fgf16 (NM_030614.1,516-534).
ggagggatacaggactaaa

SEQ ID NO: 565877 - DNA, 19 bp, Mus musculus
  siRNA target sequence for Fgf16 (NM_030614.1,566-584).
ggccagtagatccttctaa

SEQ ID NO: 565878 - DNA, 19 bp, Mus musculus
  siRNA target sequence for Fgf16 (NM_030614.1,569-587).
cagtagatccttctaagtt

SEQ ID NO: 565879 - DNA, 19 bp, Mus musculus
  siRNA target sequence for Fgf16 (NM_030614.1,604-622).
gatctcttccgctataggt

SEQ ID NO: 565880 - DNA, 19 bp, Mus musculus
  siRNA target sequence for Fgf17 (NM_008004.2,526-544).
cgcctgctgcctaacctta

SEQ ID NO: 565881 - DNA, 19 bp, Mus musculus
  siRNA target sequence for Fgf17 (NM_008004.2,551-569).
gcttgcagctattgattct

SEQ ID NO: 565882 - DNA, 19 bp, Mus musculus
  siRNA target sequence for Fgf17 (NM_008004.2,591-609).
gaatcacccgtctcctaat

SEQ ID NO: 565883 - DNA, 19 bp, Mus musculus
  siRNA target sequence for Fgf17 (NM_008004.2,595-613).
cacccgtctcctaatttta

SEQ ID NO: 565884 - DNA, 19 bp, Mus musculus
  siRNA target sequence for Fgf17 (NM_008004.2,599-617).
cgtctcctaattttaacca

SEQ ID NO: 565885 - DNA, 19 bp, Mus musculus
  siRNA target sequence for Fgf17 (NM_008004.2,659-677).
ggcggcaaatccgtgaata

SEQ ID NO: 565886 - DNA, 19 bp, Mus musculus
  siRNA target sequence for Fgf17 (NM_008004.2,815-833).
gggcagagagcgagaagta

SEQ ID NO: 565887 - DNA, 19 bp, Mus musculus
  siRNA target sequence for Fgf17 (NM_008004.2,818-836).
cagagagcgagaagtacat

SEQ ID NO: 565888 - DNA, 19 bp, Mus musculus
  siRNA target sequence for Fgf17 (NM_008004.2,1085-1103).
ggcagaagcagttcgaatt

SEQ ID NO: 565889 - DNA, 19 bp, Mus musculus
  siRNA target sequence for Fgf18 (NM_008005.1,320-338).
gtgggaagcacattcaagt

SEQ ID NO: 565890 - DNA, 19 bp, Mus musculus
  siRNA target sequence for Fgf18 (NM_008005.1,366-384).
cgaggacggggacaagtat

SEQ ID NO: 565891 - DNA, 19 bp, Mus musculus
  siRNA target sequence for Fgf18 (NM_008005.1,446-464).
cagaattctacctgtgtat

SEQ ID NO: 565892 - DNA, 19 bp, Mus musculus
  siRNA target sequence for Fgf18 (NM_008005.1,506-524).
gcaaggagtgcgtgttcat

SEQ ID NO: 565893 - DNA, 19 bp, Mus musculus
  siRNA target sequence for Fgf18 (NM_008005.1,507-525).
caaggagtgcgtgttcatt

SEQ ID NO: 565894 - DNA, 19 bp, Mus musculus
  siRNA target sequence for Fgf18 (NM_008005.1,511-529).
gagtgcgtgttcattgaga

SEQ ID NO: 565895 - DNA, 19 bp, Mus musculus
  siRNA target sequence for Fgf18 (NM_008005.1,567-585).
caagtactctggttggtat

SEQ ID NO: 565896 - DNA, 19 bp, Mus musculus
  siRNA target sequence for Fgf18 (NM_008005.1,632-650).
gcgagaaccagcaagatgt

SEQ ID NO: 565897 - DNA, 19 bp, Mus musculus
  siRNA target sequence for Fgf18 (NM_008005.1,643-661).
caagatgtacacttcatga

SEQ ID NO: 565898 - DNA, 19 bp, Mus musculus
  siRNA target sequence for Fgf2 (NM_008006.1,164-182).
gcgacccacacgtcaaact

SEQ ID NO: 565899 - DNA, 19 bp, Mus musculus
  siRNA target sequence for Fgf2 (NM_008006.1,165-183).
cgacccacacgtcaaacta

SEQ ID NO: 565900 - DNA, 19 bp, Mus musculus
  siRNA target sequence for Fgf2 (NM_008006.1,170-188).
cacacgtcaaactacaact

SEQ ID NO: 565901 - DNA, 19 bp, Mus musculus
  siRNA target sequence for Fgf2 (NM_008006.1,203-221).
gaggagttgtgtctatcaa

SEQ ID NO: 565902 - DNA, 19 bp, Mus musculus
  siRNA target sequence for Fgf2 (NM_008006.1,233-251).
ccaaccggtaccttgctat

SEQ ID NO: 565903 - DNA, 19 bp, Mus musculus
  siRNA target sequence for Fgf2 (NM_008006.1,263-281).
gacggctgctggcttctaa

SEQ ID NO: 565904 - DNA, 19 bp, Mus musculus
  siRNA target sequence for Fgf2 (NM_008006.1,273-291).
ggcttctaagtgtgttaca

SEQ ID NO: 565905 - DNA, 19 bp, Mus musculus
  siRNA target sequence for Fgf2 (NM_008006.1,275-293).
cttctaagtgtgttacaga

SEQ ID NO: 565906 - DNA, 19 bp, Mus musculus
  siRNA target sequence for Fgf2 (NM_008006.1,310-328).
gaacgactggaatctaata

SEQ ID NO: 565907 - DNA, 19 bp, Mus musculus
  siRNA target sequence for Fgf2 (NM_008006.1,318-336).
ggaatctaataactacaat

SEQ ID NO: 565908 - DNA, 19 bp, Mus musculus
  siRNA target sequence for Fgf2 (NM_008006.1,319-337).
gaatctaataactacaata

SEQ ID NO: 565909 - DNA, 19 bp, Mus musculus
  siRNA target sequence for Fgf2 (NM_008006.1,323-341).
ctaataactacaatactta

SEQ ID NO: 565910 - DNA, 19 bp, Mus musculus
  siRNA target sequence for Fgf2 (NM_008006.1,338-356).
cttaccggtcacggaaata

SEQ ID NO: 565911 - DNA, 19 bp, Mus musculus
  siRNA target sequence for Fgf2 (NM_008006.1,351-369).
gaaatactccagttggtat

SEQ ID NO: 565912 - DNA, 19 bp, Mus musculus
  siRNA target sequence for Fgf2 (NM_008006.1,383-401).
gaactgggcagtataaact

SEQ ID NO: 565913 - DNA, 19 bp, Mus musculus
  siRNA target sequence for Fgf2 (NM_008006.1,393-411).
gtataaactcggatccaaa

SEQ ID NO: 565914 - DNA, 19 bp, Mus musculus
  siRNA target sequence for Fgf2 (NM_008006.1,426-444).
gaaggccatactgtttctt

SEQ ID NO: 565915 - DNA, 19 bp, Mus musculus
  siRNA target sequence for Fgf20 (NM_030610.1,313-331).
gtgggactggtcagtatca

SEQ ID NO: 565916 - DNA, 19 bp, Mus musculus
  siRNA target sequence for Fgf20 (NM_030610.1,315-333).
gggactggtcagtatcaga

SEQ ID NO: 565917 - DNA, 19 bp, Mus musculus
  siRNA target sequence for Fgf20 (NM_030610.1,354-372).
ccttgggatgaatgacaaa

SEQ ID NO: 565918 - DNA, 19 bp, Mus musculus
  siRNA target sequence for Fgf20 (NM_030610.1,435-453).
gaactggtataatacctat

SEQ ID NO: 565919 - DNA, 19 bp, Mus musculus
  siRNA target sequence for Fgf20 (NM_030610.1,449-467).
cctattcgtccaacatata

SEQ ID NO: 565920 - DNA, 19 bp, Mus musculus
  siRNA target sequence for Fgf20 (NM_030610.1,450-468).
ctattcgtccaacatatat

SEQ ID NO: 565921 - DNA, 19 bp, Mus musculus
  siRNA target sequence for Fgf20 (NM_030610.1,480-498).
cacgggtcgcaggtatttt

SEQ ID NO: 565922 - DNA, 19 bp, Mus musculus
  siRNA target sequence for Fgf20 (NM_030610.1,482-500).
cgggtcgcaggtattttgt

SEQ ID NO: 565923 - DNA, 19 bp, Mus musculus
  siRNA target sequence for Fgf20 (NM_030610.1,483-501).
gggtcgcaggtattttgta

SEQ ID NO: 565924 - DNA, 19 bp, Mus musculus
  siRNA target sequence for Fgf20 (NM_030610.1,513-531).
ggatggaactccaagagat

SEQ ID NO: 565925 - DNA, 19 bp, Mus musculus
  siRNA target sequence for Fgf20 (NM_030610.1,553-571).
caaaagtttacccactttt

SEQ ID NO: 565926 - DNA, 19 bp, Mus musculus
  siRNA target sequence for Fgf20 (NM_030610.1,558-576).
gtttacccactttttacca

SEQ ID NO: 565927 - DNA, 19 bp, Mus musculus
  siRNA target sequence for Fgf20 (NM_030610.1,596-614).
gagttccagaattatacaa

SEQ ID NO: 565928 - DNA, 19 bp, Mus musculus
  siRNA target sequence for Fgf21 (NM_020013.2,502-520).
gccagatggagctctctat

SEQ ID NO: 565929 - DNA, 19 bp, Mus musculus
  siRNA target sequence for Fgf21 (NM_020013.2,517-535).
ctatggatcgcctcacttt

SEQ ID NO: 565930 - DNA, 19 bp, Mus musculus
  siRNA target sequence for Fgf21 (NM_020013.2,568-586).
gctggaggacggttacaat

SEQ ID NO: 565931 - DNA, 19 bp, Mus musculus
  siRNA target sequence for Fgf21 (NM_020013.2,771-789).
gcatggtagagcctttaca

SEQ ID NO: 565932 - DNA, 19 bp, Mus musculus
  siRNA target sequence for Fgf22 (NM_023304.1,173-191).
ggcacggccaggacagtat

SEQ ID NO: 565933 - DNA, 19 bp, Mus musculus
  siRNA target sequence for Fgf22 (NM_023304.1,174-192).
gcacggccaggacagtata

SEQ ID NO: 565934 - DNA, 19 bp, Mus musculus
  siRNA target sequence for Fgf22 (NM_023304.1,334-352).
gagaacggctacaacacat

SEQ ID NO: 565935 - DNA, 19 bp, Mus musculus
  siRNA target sequence for Fgf23 (NM_022657.2,221-239).
ccatagggatggtcatgta

SEQ ID NO: 565936 - DNA, 19 bp, Mus musculus
  siRNA target sequence for Fgf23 (NM_022657.2,296-314).
cggctctgtggtgataaca

SEQ ID NO: 565937 - DNA, 19 bp, Mus musculus
  siRNA target sequence for Fgf23 (NM_022657.2,344-362).
ggatctccacggcaacatt

SEQ ID NO: 565938 - DNA, 19 bp, Mus musculus
  siRNA target sequence for Fgf23 (NM_022657.2,345-363).
gatctccacggcaacattt

SEQ ID NO: 565939 - DNA, 19 bp, Mus musculus
  siRNA target sequence for Fgf23 (NM_022657.2,351-369).
cacggcaacatttttggat

SEQ ID NO: 565940 - DNA, 19 bp, Mus musculus
  siRNA target sequence for Fgf23 (NM_022657.2,375-393).
cacttcagcccagagaatt

SEQ ID NO: 565941 - DNA, 19 bp, Mus musculus
  siRNA target sequence for Fgf23 (NM_022657.2,423-441).
ggctatgacgtctacttgt

SEQ ID NO: 565942 - DNA, 19 bp, Mus musculus
  siRNA target sequence for Fgf3 (NM_008007.1,92-110).
gccgtggtggcgtttacga

SEQ ID NO: 565943 - DNA, 19 bp, Mus musculus
  siRNA target sequence for Fgf3 (NM_008007.1,259-277).
gccatcaaagggctctttt

SEQ ID NO: 565944 - DNA, 19 bp, Mus musculus
  siRNA target sequence for Fgf3 (NM_008007.1,367-385).
gagctgggctacaatacat

SEQ ID NO: 565945 - DNA, 19 bp, Mus musculus
  siRNA target sequence for Fgf3 (NM_008007.1,369-387).
gctgggctacaatacatat

SEQ ID NO: 565946 - DNA, 19 bp, Mus musculus
  siRNA target sequence for Fgf3 (NM_008007.1,372-390).
gggctacaatacatatgct

SEQ ID NO: 565947 - DNA, 19 bp, Mus musculus
  siRNA target sequence for Fgf3 (NM_008007.1,373-391).
ggctacaatacatatgctt

SEQ ID NO: 565948 - DNA, 19 bp, Mus musculus
  siRNA target sequence for Fgf3 (NM_008007.1,487-505).
ccacgcaggggcttcaaga

SEQ ID NO: 565949 - DNA, 19 bp, Mus musculus
  siRNA target sequence for Fgf4 (NM_010202.1,438-456).
ctttaccgacgagtgtaaa

SEQ ID NO: 565950 - DNA, 19 bp, Mus musculus
  siRNA target sequence for Fgf4 (NM_010202.1,443-461).
ccgacgagtgtaaattcaa

SEQ ID NO: 565951 - DNA, 19 bp, Mus musculus
  siRNA target sequence for Fgf4 (NM_010202.1,444-462).
cgacgagtgtaaattcaaa

SEQ ID NO: 565952 - DNA, 19 bp, Mus musculus
  siRNA target sequence for Fgf4 (NM_010202.1,452-470).
gtaaattcaaagaaatact

SEQ ID NO: 565953 - DNA, 19 bp, Mus musculus
  siRNA target sequence for Fgf4 (NM_010202.1,505-523).
gcgtaccccggtatgttca

SEQ ID NO: 565954 - DNA, 19 bp, Mus musculus
  siRNA target sequence for Fgf4 (NM_010202.1,506-524).
cgtaccccggtatgttcat

SEQ ID NO: 565955 - DNA, 19 bp, Mus musculus
  siRNA target sequence for Fgf5 (NM_010203.2,435-453).
ggaagcggctcggaacata

SEQ ID NO: 565956 - DNA, 19 bp, Mus musculus
  siRNA target sequence for Fgf5 (NM_010203.2,536-554).
cccggatggcaaagtcaat

SEQ ID NO: 565957 - DNA, 19 bp, Mus musculus
  siRNA target sequence for Fgf5 (NM_010203.2,563-581).
cgaagccagtgtgttaagt

SEQ ID NO: 565958 - DNA, 19 bp, Mus musculus
  siRNA target sequence for Fgf5 (NM_010203.2,564-582).
gaagccagtgtgttaagta

SEQ ID NO: 565959 - DNA, 19 bp, Mus musculus
  siRNA target sequence for Fgf5 (NM_010203.2,567-585).
gccagtgtgttaagtattt

SEQ ID NO: 565960 - DNA, 19 bp, Mus musculus
  siRNA target sequence for Fgf5 (NM_010203.2,608-626).
ggggattgtaggaatacga

SEQ ID NO: 565961 - DNA, 19 bp, Mus musculus
  siRNA target sequence for Fgf5 (NM_010203.2,618-636).
ggaatacgaggagttttca

SEQ ID NO: 565962 - DNA, 19 bp, Mus musculus
  siRNA target sequence for Fgf5 (NM_010203.2,628-646).
gagttttcagcaacaaatt

SEQ ID NO: 565963 - DNA, 19 bp, Mus musculus
  siRNA target sequence for Fgf5 (NM_010203.2,752-770).
cgcgatccacagaactgaa

SEQ ID NO: 565964 - DNA, 19 bp, Mus musculus
  siRNA target sequence for Fgf5 (NM_010203.2,982-1000).
gtcccagcccagtgaagta

SEQ ID NO: 565965 - DNA, 19 bp, Mus musculus
  siRNA target sequence for Fgf5 (NM_010203.2,984-1002).
cccagcccagtgaagtaca

SEQ ID NO: 565966 - DNA, 19 bp, Mus musculus
  siRNA target sequence for Fgf5 (NM_010203.2,995-1013).
gaagtacagactgaagttt

SEQ ID NO: 565967 - DNA, 19 bp, Mus musculus
  siRNA target sequence for Fgf7 (NM_008008.3,412-430).
ctgtctagtgggcactata

SEQ ID NO: 565968 - DNA, 19 bp, Mus musculus
  siRNA target sequence for Fgf7 (NM_008008.3,467-485).
gctacgagtgtgaactgtt

SEQ ID NO: 565969 - DNA, 19 bp, Mus musculus
  siRNA target sequence for Fgf7 (NM_008008.3,494-512).
gagcgacacaccagaagtt

SEQ ID NO: 565970 - DNA, 19 bp, Mus musculus
  siRNA target sequence for Fgf7 (NM_008008.3,496-514).
gcgacacaccagaagttat

SEQ ID NO: 565971 - DNA, 19 bp, Mus musculus
  siRNA target sequence for Fgf7 (NM_008008.3,498-516).
gacacaccagaagttatga

SEQ ID NO: 565972 - DNA, 19 bp, Mus musculus
  siRNA target sequence for Fgf7 (NM_008008.3,504-522).
ccagaagttatgactacat

SEQ ID NO: 565973 - DNA, 19 bp, Mus musculus
  siRNA target sequence for Fgf7 (NM_008008.3,520-538).
catggaaggaggggatata

SEQ ID NO: 565974 - DNA, 19 bp, Mus musculus
  siRNA target sequence for Fgf7 (NM_008008.3,649-667).
gaccgtggcagttggaatt

SEQ ID NO: 565975 - DNA, 19 bp, Mus musculus
  siRNA target sequence for Fgf7 (NM_008008.3,680-698).
ggggtggaaagtgaatact

SEQ ID NO: 565976 - DNA, 19 bp, Mus musculus
  siRNA target sequence for Fgf7 (NM_008008.3,682-700).
ggtggaaagtgaatactat

SEQ ID NO: 565977 - DNA, 19 bp, Mus musculus
  siRNA target sequence for Fgf7 (NM_008008.3,720-738).
ggaaactctatgcaaagaa

SEQ ID NO: 565978 - DNA, 19 bp, Mus musculus
  siRNA target sequence for Fgf7 (NM_008008.3,793-811).
cacctatgcatcagctaaa

SEQ ID NO: 565979 - DNA, 19 bp, Mus musculus
  siRNA target sequence for Fgf7 (NM_008008.3,818-836).
cacagcggaggggaaatgt

SEQ ID NO: 565980 - DNA, 19 bp, Mus musculus
  siRNA target sequence for Fgf7 (NM_008008.3,835-853).
gttcgttgccttaaatcaa

SEQ ID NO: 565981 - DNA, 19 bp, Mus musculus
  siRNA target sequence for Fgf8 (NM_010205.1,363-381).
gcagggctggaaagaactt

SEQ ID NO: 565982 - DNA, 19 bp, Mus musculus
  siRNA target sequence for Fgf8 (NM_010205.1,603-621).
ccttcgcgaagctcattgt

SEQ ID NO: 565983 - DNA, 19 bp, Mus musculus
  siRNA target sequence for Fgf8 (NM_010205.1,622-640).
ggagaccgatacttttgga

SEQ ID NO: 565984 - DNA, 19 bp, Mus musculus
  siRNA target sequence for Fgf8 (NM_010205.1,623-641).
gagaccgatacttttggaa

SEQ ID NO: 565985 - DNA, 19 bp, Mus musculus
  siRNA target sequence for Fgf8 (NM_010205.1,728-746).
ggcaaggactgcgtattca

SEQ ID NO: 565986 - DNA, 19 bp, Mus musculus
  siRNA target sequence for Fgf8 (NM_010205.1,730-748).
caaggactgcgtattcaca

SEQ ID NO: 565987 - DNA, 19 bp, Mus musculus
  siRNA target sequence for Fgf8 (NM_010205.1,866-884).
cgcgaggtgcacttcatga

SEQ ID NO: 565988 - DNA, 19 bp, Mus musculus
  siRNA target sequence for Fgf8 (NM_010205.1,867-885).
gcgaggtgcacttcatgaa

SEQ ID NO: 565989 - DNA, 19 bp, Mus musculus
  siRNA target sequence for Fgf9 (NM_013518.1,141-159).
ggctcccttaggtgaagtt

SEQ ID NO: 565990 - DNA, 19 bp, Mus musculus
  siRNA target sequence for Fgf9 (NM_013518.1,220-238).
gacagtccggtgttgctaa

SEQ ID NO: 565991 - DNA, 19 bp, Mus musculus
  siRNA target sequence for Fgf9 (NM_013518.1,289-307).
gtcacggacttggatcatt

SEQ ID NO: 565992 - DNA, 19 bp, Mus musculus
  siRNA target sequence for Fgf9 (NM_013518.1,291-309).
cacggacttggatcattta

SEQ ID NO: 565993 - DNA, 19 bp, Mus musculus
  siRNA target sequence for Fgf9 (NM_013518.1,336-354).
gtactgcaggactggattt

SEQ ID NO: 565994 - DNA, 19 bp, Mus musculus
  siRNA target sequence for Fgf9 (NM_013518.1,341-359).
gcaggactggatttcattt

SEQ ID NO: 565995 - DNA, 19 bp, Mus musculus
  siRNA target sequence for Fgf9 (NM_013518.1,350-368).
gatttcatttagagatctt

SEQ ID NO: 565996 - DNA, 19 bp, Mus musculus
  siRNA target sequence for Fgf9 (NM_013518.1,423-441).
ggaatttatcagtatagca

SEQ ID NO: 565997 - DNA, 19 bp, Mus musculus
  siRNA target sequence for Fgf9 (NM_013518.1,510-528).
gtatggatcagaaaaacta

SEQ ID NO: 565998 - DNA, 19 bp, Mus musculus
  siRNA target sequence for Fgf9 (NM_013518.1,582-600).
ctcttccaacctctataaa

SEQ ID NO: 565999 - DNA, 19 bp, Mus musculus
  siRNA target sequence for Fgf9 (NM_013518.1,587-605).
ccaacctctataaacatgt

SEQ ID NO: 566000 - DNA, 19 bp, Mus musculus
  siRNA target sequence for Fgf9 (NM_013518.1,607-625).
gacaccggaaggagatact

SEQ ID NO: 566001 - DNA, 19 bp, Mus musculus
  siRNA target sequence for Fgf9 (NM_013518.1,611-629).
ccggaaggagatactatgt

SEQ ID NO: 566002 - DNA, 19 bp, Mus musculus
  siRNA target sequence for Fgf9 (NM_013518.1,642-660).
ggacgggactccaagagaa

SEQ ID NO: 566003 - DNA, 19 bp, Mus musculus
  siRNA target sequence for Fgf9 (NM_013518.1,730-748).
cctgaactatataaggata

SEQ ID NO: 566004 - DNA, 19 bp, Mus musculus
  siRNA target sequence for Gdnf (NM_010275.1,52-70).
cgggccacttggagttaat

SEQ ID NO: 566005 - DNA, 19 bp, Mus musculus
  siRNA target sequence for Gdnf (NM_010275.1,114-132).
ccggacgggactctaagat

SEQ ID NO: 566006 - DNA, 19 bp, Mus musculus
  siRNA target sequence for Gdnf (NM_010275.1,116-134).
ggacgggactctaagatga

SEQ ID NO: 566007 - DNA, 19 bp, Mus musculus
  siRNA target sequence for Gdnf (NM_010275.1,119-137).
cgggactctaagatgaagt

SEQ ID NO: 566008 - DNA, 19 bp, Mus musculus
  siRNA target sequence for Gdnf (NM_010275.1,120-138).
gggactctaagatgaagtt

SEQ ID NO: 566009 - DNA, 19 bp, Mus musculus
  siRNA target sequence for Gdnf (NM_010275.1,269-287).
ctgaccagtgactccaata

SEQ ID NO: 566010 - DNA, 19 bp, Mus musculus
  siRNA target sequence for Gdnf (NM_010275.1,280-298).
ctccaatatgcctgaagat

SEQ ID NO: 566011 - DNA, 19 bp, Mus musculus
  siRNA target sequence for Gdnf (NM_010275.1,282-300).
ccaatatgcctgaagatta

SEQ ID NO: 566012 - DNA, 19 bp, Mus musculus
  siRNA target sequence for Gdnf (NM_010275.1,314-332).
gatgacgtcatggatttta

SEQ ID NO: 566013 - DNA, 19 bp, Mus musculus
  siRNA target sequence for Gdnf (NM_010275.1,319-337).
cgtcatggattttattcaa

SEQ ID NO: 566014 - DNA, 19 bp, Mus musculus
  siRNA target sequence for Gdnf (NM_010275.1,544-562).
ggaactgatctttcgatat

SEQ ID NO: 566015 - DNA, 19 bp, Mus musculus
  siRNA target sequence for Gdnf (NM_010275.1,545-563).
gaactgatctttcgatatt

SEQ ID NO: 566016 - DNA, 19 bp, Mus musculus
  siRNA target sequence for Gdnf (NM_010275.1,548-566).
ctgatctttcgatattgca

SEQ ID NO: 566017 - DNA, 19 bp, Mus musculus
  siRNA target sequence for Gdnf (NM_010275.1,576-594).
gtgaatcggccgagacaat

SEQ ID NO: 566018 - DNA, 19 bp, Mus musculus
  siRNA target sequence for Gdnf (NM_010275.1,578-596).
gaatcggccgagacaatgt

SEQ ID NO: 566019 - DNA, 19 bp, Mus musculus
  siRNA target sequence for Gdnf (NM_010275.1,582-600).
cggccgagacaatgtatga

SEQ ID NO: 566020 - DNA, 19 bp, Mus musculus
  siRNA target sequence for Gdnf (NM_010275.1,585-603).
ccgagacaatgtatgacaa

SEQ ID NO: 566021 - DNA, 19 bp, Mus musculus
  siRNA target sequence for Gdnf (NM_010275.1,586-604).
cgagacaatgtatgacaaa

SEQ ID NO: 566022 - DNA, 19 bp, Mus musculus
  siRNA target sequence for Gdnf (NM_010275.1,595-613).
gtatgacaaaatactaaaa

SEQ ID NO: 566023 - DNA, 19 bp, Mus musculus
  siRNA target sequence for Gdnf (NM_010275.1,623-641).
cggagtagaaggctaacaa

SEQ ID NO: 566024 - DNA, 19 bp, Mus musculus
  siRNA target sequence for Gdnf (NM_010275.1,625-643).
gagtagaaggctaacaagt

SEQ ID NO: 566025 - DNA, 19 bp, Mus musculus
  siRNA target sequence for Gdnf (NM_010275.1,683-701).
gacgacgacctgtcgtttt

SEQ ID NO: 566026 - DNA, 19 bp, Mus musculus
  siRNA target sequence for Gdnf (NM_010275.1,685-703).
cgacgacctgtcgttttta

SEQ ID NO: 566027 - DNA, 19 bp, Mus musculus
  siRNA target sequence for Gdnf (NM_010275.1,688-706).
cgacctgtcgtttttagat

SEQ ID NO: 566028 - DNA, 19 bp, Mus musculus
  siRNA target sequence for Gdnf (NM_010275.1,707-725).
gacaacctggtttaccata

SEQ ID NO: 566029 - DNA, 19 bp, Mus musculus
  siRNA target sequence for Gdnf (NM_010275.1,712-730).
cctggtttaccatattcta

SEQ ID NO: 566030 - DNA, 19 bp, Mus musculus
  siRNA target sequence for Gdnf (NM_010275.1,715-733).
ggtttaccatattctaaga

SEQ ID NO: 566031 - DNA, 19 bp, Mus musculus
  siRNA target sequence for Gdnf (NM_010275.1,716-734).
gtttaccatattctaagaa

SEQ ID NO: 566032 - DNA, 19 bp, Mus musculus
  siRNA target sequence for Gdnf (NM_010275.1,744-762).
ctaaacggtgtggatgtat

SEQ ID NO: 566033 - DNA, 19 bp, Mus musculus
  siRNA target sequence for Hdgf (NM_008231.2,380-398).
caacagccaacaaatacca

SEQ ID NO: 566034 - DNA, 19 bp, Mus musculus
  siRNA target sequence for Hdgf (NM_008231.2,564-582).
gtcctcccagaaaaagagt

SEQ ID NO: 566035 - DNA, 19 bp, Mus musculus
  siRNA target sequence for Hdgf (NM_008231.2,619-637).
gagggtgacggtgataaga

SEQ ID NO: 566036 - DNA, 19 bp, Mus musculus
  siRNA target sequence for Hdgf (NM_008231.2,747-765).
ggaggactcccctaaacgt

SEQ ID NO: 566037 - DNA, 19 bp, Mus musculus
  siRNA target sequence for Hdgf (NM_008231.2,945-963).
ccagggcgtcagagatcat

SEQ ID NO: 566038 - DNA, 19 bp, Mus musculus
  siRNA target sequence for Igf1 (NM_010512.2,398-416).
ggaaaggaagtacatttga

SEQ ID NO: 566039 - DNA, 19 bp, Mus musculus
  siRNA target sequence for Igf1 (NM_184052.1,1349-1367).
cgcacctgcaataaagata

SEQ ID NO: 566040 - DNA, 19 bp, Mus musculus
  siRNA target sequence for Igf2 (NM_010514.1,958-976).
cgatgttggtgcttctcat

SEQ ID NO: 566041 - DNA, 19 bp, Mus musculus
  siRNA target sequence for Igf2 (NM_010514.1,1033-1051).
gcggaggggagcttgttga

SEQ ID NO: 566042 - DNA, 19 bp, Mus musculus
  siRNA target sequence for Igf2 (NM_010514.1,1265-1283).
gggcaagttcttccaatat

SEQ ID NO: 566043 - DNA, 19 bp, Mus musculus
  siRNA target sequence for Igf2 (NM_010514.1,1267-1285).
gcaagttcttccaatatga

SEQ ID NO: 566044 - DNA, 19 bp, Mus musculus
  siRNA target sequence for Inhba (NM_008380.1,344-362).
gtcaagaagcacatcttaa

SEQ ID NO: 566045 - DNA, 19 bp, Mus musculus
  siRNA target sequence for Inhba (NM_008380.1,494-512).
ggcaggagggccgaaatga

SEQ ID NO: 566046 - DNA, 19 bp, Mus musculus
  siRNA target sequence for Inhba (NM_008380.1,495-513).
gcaggagggccgaaatgaa

SEQ ID NO: 566047 - DNA, 19 bp, Mus musculus
  siRNA target sequence for Inhba (NM_008380.1,498-516).
ggagggccgaaatgaatga

SEQ ID NO: 566048 - DNA, 19 bp, Mus musculus
  siRNA target sequence for Inhba (NM_008380.1,499-517).
gagggccgaaatgaatgaa

SEQ ID NO: 566049 - DNA, 19 bp, Mus musculus
  siRNA target sequence for Inhba (NM_008380.1,501-519).
gggccgaaatgaatgaact

SEQ ID NO: 566050 - DNA, 19 bp, Mus musculus
  siRNA target sequence for Inhba (NM_008380.1,653-671).
gtccccaaggctaacagaa

SEQ ID NO: 566051 - DNA, 19 bp, Mus musculus
  siRNA target sequence for Inhba (NM_008380.1,738-756).
gggatgaggccgaggaaat

SEQ ID NO: 566052 - DNA, 19 bp, Mus musculus
  siRNA target sequence for Inhba (NM_008380.1,747-765).
ccgaggaaatgggcttaaa

SEQ ID NO: 566053 - DNA, 19 bp, Mus musculus
  siRNA target sequence for Inhba (NM_008380.1,817-835).
gagtacctggcacatcttt

SEQ ID NO: 566054 - DNA, 19 bp, Mus musculus
  siRNA target sequence for Inhba (NM_008380.1,1107-1125).
gcgacggcaaggtcaacat

SEQ ID NO: 566055 - DNA, 19 bp, Mus musculus
  siRNA target sequence for Inhba (NM_008380.1,1108-1126).
cgacggcaaggtcaacatt

SEQ ID NO: 566056 - DNA, 19 bp, Mus musculus
  siRNA target sequence for Inhba (NM_008380.1,1109-1127).
gacggcaaggtcaacattt

SEQ ID NO: 566057 - DNA, 19 bp, Mus musculus
  siRNA target sequence for Inhba (NM_008380.1,1194-1212).
ctggctatcacgccaatta

SEQ ID NO: 566058 - DNA, 19 bp, Mus musculus
  siRNA target sequence for Inhba (NM_008380.1,1196-1214).
ggctatcacgccaattatt

SEQ ID NO: 566059 - DNA, 19 bp, Mus musculus
  siRNA target sequence for Inhba (NM_008380.1,1198-1216).
ctatcacgccaattattgt

SEQ ID NO: 566060 - DNA, 19 bp, Mus musculus
  siRNA target sequence for Inhba (NM_008380.1,1311-1329).
gcccctttgccaaccttaa

SEQ ID NO: 566061 - DNA, 19 bp, Mus musculus
  siRNA target sequence for Inhba (NM_008380.1,1359-1377).
ccatgtccatgctgtatta

SEQ ID NO: 566062 - DNA, 19 bp, Mus musculus
  siRNA target sequence for Inhba (NM_008380.1,1363-1381).
gtccatgctgtattacgat

SEQ ID NO: 566063 - DNA, 19 bp, Mus musculus
  siRNA target sequence for Inhba (NM_008380.1,1379-1397).
gatgatggtcaaaacatca

SEQ ID NO: 566064 - DNA, 19 bp, Mus musculus
  siRNA target sequence for Inhba (NM_008380.1,1405-1423).
ggacattcaaaacatgatt

SEQ ID NO: 566065 - DNA, 19 bp, Mus musculus
  siRNA target sequence for Inhbc (NM_010565.2,84-102).
ctccaaccacagtagtgaa

SEQ ID NO: 566066 - DNA, 19 bp, Mus musculus
  siRNA target sequence for Inhbc (NM_010565.2,132-150).
gttggggtgccatctttga

SEQ ID NO: 566067 - DNA, 19 bp, Mus musculus
  siRNA target sequence for Inhbc (NM_010565.2,165-183).
gggagctgcttctcgattt

SEQ ID NO: 566068 - DNA, 19 bp, Mus musculus
  siRNA target sequence for Inhbc (NM_010565.2,176-194).
ctcgatttggccaagaaaa

SEQ ID NO: 566069 - DNA, 19 bp, Mus musculus
  siRNA target sequence for Inhbc (NM_010565.2,434-452).
cggcagacccgcttcatgt

SEQ ID NO: 566070 - DNA, 19 bp, Mus musculus
  siRNA target sequence for Inhbc (NM_010565.2,435-453).
ggcagacccgcttcatgtt

SEQ ID NO: 566071 - DNA, 19 bp, Mus musculus
  siRNA target sequence for Inhbc (NM_010565.2,437-455).
cagacccgcttcatgttct

SEQ ID NO: 566072 - DNA, 19 bp, Mus musculus
  siRNA target sequence for Inhbc (NM_010565.2,805-823).
cgtagacttccgtgagatt

SEQ ID NO: 566073 - DNA, 19 bp, Mus musculus
  siRNA target sequence for Inhbc (NM_010565.2,879-897).
ggcagtgcccactacatgt

SEQ ID NO: 566074 - DNA, 19 bp, Mus musculus
  siRNA target sequence for Inhbc (NM_010565.2,991-1009).
gtgctgcgtgcctacatct

SEQ ID NO: 566075 - DNA, 19 bp, Mus musculus
  siRNA target sequence for Inhbe (NM_008382.1,389-407).
cagccgtcccagaataact

SEQ ID NO: 566076 - DNA, 19 bp, Mus musculus
  siRNA target sequence for Inhbe (NM_008382.1,474-492).
ggcaaccgagagaaagtca

SEQ ID NO: 566077 - DNA, 19 bp, Mus musculus
  siRNA target sequence for Inhbe (NM_008382.1,475-493).
gcaaccgagagaaagtcat

SEQ ID NO: 566078 - DNA, 19 bp, Mus musculus
  siRNA target sequence for Inhbe (NM_008382.1,501-519).
gctaccatcatagacaaat

SEQ ID NO: 566079 - DNA, 19 bp, Mus musculus
  siRNA target sequence for Inhbe (NM_008382.1,861-879).
cgtcccttcttggaactta

SEQ ID NO: 566080 - DNA, 19 bp, Mus musculus
  siRNA target sequence for Inhbe (NM_008382.1,862-880).
gtcccttcttggaacttaa

SEQ ID NO: 566081 - DNA, 19 bp, Mus musculus
  siRNA target sequence for Inhbe (NM_008382.1,938-956).
gcctgagacccccttatgt

SEQ ID NO: 566082 - DNA, 19 bp, Mus musculus
  siRNA target sequence for Inhbe (NM_008382.1,939-957).
cctgagacccccttatgtt

SEQ ID NO: 566083 - DNA, 19 bp, Mus musculus
  siRNA target sequence for Inhbe (NM_008382.1,942-960).
gagacccccttatgttgta

SEQ ID NO: 566084 - DNA, 19 bp, Mus musculus
  siRNA target sequence for Inhbe (NM_008382.1,958-976).
gtaggcgagaccactatgt

SEQ ID NO: 566085 - DNA, 19 bp, Mus musculus
  siRNA target sequence for Inhbe (NM_008382.1,1020-1038).
gagggataccagctgaatt

SEQ ID NO: 566086 - DNA, 19 bp, Mus musculus
  siRNA target sequence for Mdk (NM_010784.2,407-425).
cgtccgcggtggccaaaaa

SEQ ID NO: 566087 - DNA, 19 bp, Mus musculus
  siRNA target sequence for Mdk (NM_010784.2,408-426).
gtccgcggtggccaaaaaa

SEQ ID NO: 566088 - DNA, 19 bp, Mus musculus
  siRNA target sequence for Mdk (NM_010784.2,539-557).
cccagcgcgtccattgcaa

SEQ ID NO: 566089 - DNA, 19 bp, Mus musculus
  siRNA target sequence for Mdk (NM_010784.2,586-604).
ggagccgactgcaaataca

SEQ ID NO: 566090 - DNA, 19 bp, Mus musculus
  siRNA target sequence for Mdk (NM_010784.2,587-605).
gagccgactgcaaatacaa

SEQ ID NO: 566091 - DNA, 19 bp, Mus musculus
  siRNA target sequence for Mdk (NM_010784.2,589-607).
gccgactgcaaatacaagt

SEQ ID NO: 566092 - DNA, 19 bp, Mus musculus
  siRNA target sequence for Ngfb (NM_013609.1,225-243).
cagtgtctgggcccaataa

SEQ ID NO: 566093 - DNA, 19 bp, Mus musculus
  siRNA target sequence for Ngfb (NM_013609.1,229-247).
gtctgggcccaataaaggt

SEQ ID NO: 566094 - DNA, 19 bp, Mus musculus
  siRNA target sequence for Ngfb (NM_013609.1,253-271).
caaggacgcagctttctat

SEQ ID NO: 566095 - DNA, 19 bp, Mus musculus
  siRNA target sequence for Ngfb (NM_013609.1,256-274).
ggacgcagctttctatact

SEQ ID NO: 566096 - DNA, 19 bp, Mus musculus
  siRNA target sequence for Ngfb (NM_013609.1,284-302).
gaggtgcatagcgtaatgt

SEQ ID NO: 566097 - DNA, 19 bp, Mus musculus
  siRNA target sequence for Ngfb (NM_013609.1,294-312).
gcgtaatgtccatgttgtt

SEQ ID NO: 566098 - DNA, 19 bp, Mus musculus
  siRNA target sequence for Ngfb (NM_013609.1,296-314).
gtaatgtccatgttgttct

SEQ ID NO: 566099 - DNA, 19 bp, Mus musculus
  siRNA target sequence for Ngfb (NM_013609.1,350-368).
gcagaaccgtacacagata

SEQ ID NO: 566100 - DNA, 19 bp, Mus musculus
  siRNA target sequence for Ngfb (NM_013609.1,491-509).
gggcagacccgcaacatca

SEQ ID NO: 566101 - DNA, 19 bp, Mus musculus
  siRNA target sequence for Ngfb (NM_013609.1,515-533).
gaccccagactgtttaaga

SEQ ID NO: 566102 - DNA, 19 bp, Mus musculus
  siRNA target sequence for Ngfb (NM_013609.1,717-735).
gtgtgtgggttggagataa

SEQ ID NO: 566103 - DNA, 19 bp, Mus musculus
  siRNA target sequence for Ngfb (NM_013609.1,779-797).
gccgaggtgaacattaaca

SEQ ID NO: 566104 - DNA, 19 bp, Mus musculus
  siRNA target sequence for Ngfb (NM_013609.1,780-798).
ccgaggtgaacattaacaa

SEQ ID NO: 566105 - DNA, 19 bp, Mus musculus
  siRNA target sequence for Ngfb (NM_013609.1,803-821).
gtattcagacagtactttt

SEQ ID NO: 566106 - DNA, 19 bp, Mus musculus
  siRNA target sequence for Ngfb (NM_013609.1,879-897).
ccaaacactggaactcata

SEQ ID NO: 566107 - DNA, 19 bp, Mus musculus
  siRNA target sequence for Ngfb (NM_013609.1,927-945).
cgttgacaacagatgagaa

SEQ ID NO: 566108 - DNA, 19 bp, Mus musculus
  siRNA target sequence for Ogn (NM_008760.2,135-153).
ctgtgcactctacatttct

SEQ ID NO: 566109 - DNA, 19 bp, Mus musculus
  siRNA target sequence for Ogn (NM_008760.2,196-214).
gcagctggactcacatgtt

SEQ ID NO: 566110 - DNA, 19 bp, Mus musculus
  siRNA target sequence for Ogn (NM_008760.2,197-215).
cagctggactcacatgtta

SEQ ID NO: 566111 - DNA, 19 bp, Mus musculus
  siRNA target sequence for Ogn (NM_008760.2,202-220).
ggactcacatgttaactat

SEQ ID NO: 566112 - DNA, 19 bp, Mus musculus
  siRNA target sequence for Ogn (NM_008760.2,207-225).
cacatgttaactatgagta

SEQ ID NO: 566113 - DNA, 19 bp, Mus musculus
  siRNA target sequence for Ogn (NM_008760.2,212-230).
gttaactatgagtatgcaa

SEQ ID NO: 566114 - DNA, 19 bp, Mus musculus
  siRNA target sequence for Ogn (NM_008760.2,223-241).
gtatgcaacaggcaattct

SEQ ID NO: 566115 - DNA, 19 bp, Mus musculus
  siRNA target sequence for Ogn (NM_008760.2,249-267).
ccaaatttagccaggatta

SEQ ID NO: 566116 - DNA, 19 bp, Mus musculus
  siRNA target sequence for Ogn (NM_008760.2,480-498).
caaaggaatcagcttatct

SEQ ID NO: 566117 - DNA, 19 bp, Mus musculus
  siRNA target sequence for Ogn (NM_008760.2,484-502).
ggaatcagcttatctttat

SEQ ID NO: 566118 - DNA, 19 bp, Mus musculus
  siRNA target sequence for Ogn (NM_008760.2,503-521).
gcacgattcaacaaaatta

SEQ ID NO: 566119 - DNA, 19 bp, Mus musculus
  siRNA target sequence for Ogn (NM_008760.2,526-544).
gctgactgccaaggatttt

SEQ ID NO: 566120 - DNA, 19 bp, Mus musculus
  siRNA target sequence for Ogn (NM_008760.2,529-547).
gactgccaaggattttgca

SEQ ID NO: 566121 - DNA, 19 bp, Mus musculus
  siRNA target sequence for Ogn (NM_008760.2,545-563).
gcagacatgccaaacctaa

SEQ ID NO: 566122 - DNA, 19 bp, Mus musculus
  siRNA target sequence for Ogn (NM_008760.2,560-578).
ctaagaagacttgatttta

SEQ ID NO: 566123 - DNA, 19 bp, Mus musculus
  siRNA target sequence for Ogn (NM_008760.2,572-590).
gattttacgggaaatttga

SEQ ID NO: 566124 - DNA, 19 bp, Mus musculus
  siRNA target sequence for Ogn (NM_008760.2,579-597).
cgggaaatttgatagaaga

SEQ ID NO: 566125 - DNA, 19 bp, Mus musculus
  siRNA target sequence for Ogn (NM_008760.2,650-668).
gctgaaaaccaactactaa

SEQ ID NO: 566126 - DNA, 19 bp, Mus musculus
  siRNA target sequence for Ogn (NM_008760.2,825-843).
cagaaagtctacgtgtaat

SEQ ID NO: 566127 - DNA, 19 bp, Mus musculus
  siRNA target sequence for Ogn (NM_008760.2,851-869).
cagtttaacagcatatctt

SEQ ID NO: 566128 - DNA, 19 bp, Mus musculus
  siRNA target sequence for Ogn (NM_008760.2,859-877).
cagcatatcttcacttaca

SEQ ID NO: 566129 - DNA, 19 bp, Mus musculus
  siRNA target sequence for Ogn (NM_008760.2,862-880).
catatcttcacttacagat

SEQ ID NO: 566130 - DNA, 19 bp, Mus musculus
  siRNA target sequence for Ogn (NM_008760.2,872-890).
cttacagatgatacattct

SEQ ID NO: 566131 - DNA, 19 bp, Mus musculus
  siRNA target sequence for Ogn (NM_008760.2,897-915).
ctaatgacactcgttacat

SEQ ID NO: 566132 - DNA, 19 bp, Mus musculus
  siRNA target sequence for Ogn (NM_008760.2,918-936).
gggagcgaattgaagagat

SEQ ID NO: 566133 - DNA, 19 bp, Mus musculus
  siRNA target sequence for Ogn (NM_008760.2,943-961).
ggagggcaatccaattgct

SEQ ID NO: 566134 - DNA, 19 bp, Mus musculus
  siRNA target sequence for Ogn (NM_008760.2,1004-1022).
cccatagggtcatacttct

SEQ ID NO: 566135 - DNA, 19 bp, Mus musculus
  siRNA target sequence for Pdgfa (NM_008808.2,382-400).
ggtcccatgccattaacca

SEQ ID NO: 566136 - DNA, 19 bp, Mus musculus
  siRNA target sequence for Pdgfa (NM_008808.2,564-582).
cgctgcactggctgttgta

SEQ ID NO: 566137 - DNA, 19 bp, Mus musculus
  siRNA target sequence for Pdgfa (NM_008808.2,565-583).
gctgcactggctgttgtaa

SEQ ID NO: 566138 - DNA, 19 bp, Mus musculus
  siRNA target sequence for Pdgfb (NM_011057.2,587-605).
ccatccgctcctttgatga

SEQ ID NO: 566139 - DNA, 19 bp, Mus musculus
  siRNA target sequence for Pdgfb (NM_011057.2,588-606).
catccgctcctttgatgat

SEQ ID NO: 566140 - DNA, 19 bp, Mus musculus
  siRNA target sequence for Pdgfb (NM_011057.2,626-644).
gagactccgtagatgaaga

SEQ ID NO: 566141 - DNA, 19 bp, Mus musculus
  siRNA target sequence for Pdgfb (NM_011057.2,866-884).
gctccggctgctgcaataa

SEQ ID NO: 566142 - DNA, 19 bp, Mus musculus
  siRNA target sequence for Pdgfb (NM_011057.2,931-949).
caggtgagaaagattgaga

SEQ ID NO: 566143 - DNA, 19 bp, Mus musculus
  siRNA target sequence for Pdgfb (NM_011057.2,1103-1121).
ccattcggacggtgagaat

SEQ ID NO: 566144 - DNA, 19 bp, Mus musculus
  siRNA target sequence for Pdgfd (NM_027924.1,189-207).
caacggctcgttttagtct

SEQ ID NO: 566145 - DNA, 19 bp, Mus musculus
  siRNA target sequence for Pdgfd (NM_027924.1,213-231).
ctcctgtgcgcgaacttta

SEQ ID NO: 566146 - DNA, 19 bp, Mus musculus
  siRNA target sequence for Pdgfd (NM_027924.1,216-234).
ctgtgcgcgaactttagct

SEQ ID NO: 566147 - DNA, 19 bp, Mus musculus
  siRNA target sequence for Pdgfd (NM_027924.1,232-250).
gctgctatccggacacttt

SEQ ID NO: 566148 - DNA, 19 bp, Mus musculus
  siRNA target sequence for Pdgfd (NM_027924.1,233-251).
ctgctatccggacactttt

SEQ ID NO: 566149 - DNA, 19 bp, Mus musculus
  siRNA target sequence for Pdgfd (NM_027924.1,462-480).
ctgtcctttgaccatcaat

SEQ ID NO: 566150 - DNA, 19 bp, Mus musculus
  siRNA target sequence for Pdgfd (NM_027924.1,597-615).
ccaaggataacgtcaagaa

SEQ ID NO: 566151 - DNA, 19 bp, Mus musculus
  siRNA target sequence for Pdgfd (NM_027924.1,650-668).
ctactttgtggcaaaacct

SEQ ID NO: 566152 - DNA, 19 bp, Mus musculus
  siRNA target sequence for Pdgfd (NM_027924.1,660-678).
gcaaaacctggattcaaga

SEQ ID NO: 566153 - DNA, 19 bp, Mus musculus
  siRNA target sequence for Pdgfd (NM_027924.1,766-784).
cctatcactctccatcaat

SEQ ID NO: 566154 - DNA, 19 bp, Mus musculus
  siRNA target sequence for Pdgfd (NM_027924.1,767-785).
ctatcactctccatcaata

SEQ ID NO: 566155 - DNA, 19 bp, Mus musculus
  siRNA target sequence for Pdgfd (NM_027924.1,906-924).
ctggacacccctcattata

SEQ ID NO: 566156 - DNA, 19 bp, Mus musculus
  siRNA target sequence for Pdgfd (NM_027924.1,981-999).
gatgtcaagcgttacagtt

SEQ ID NO: 566157 - DNA, 19 bp, Mus musculus
  siRNA target sequence for Pdgfd (NM_027924.1,1153-1171).
cagtgaagaagtatcatga

SEQ ID NO: 566158 - DNA, 19 bp, Mus musculus
  siRNA target sequence for Pdgfd (NM_027924.1,1185-1203).
gagcctggacatttcaaga

SEQ ID NO: 566159 - DNA, 19 bp, Mus musculus
  siRNA target sequence for Pdgfd (NM_027924.1,1207-1225).
ggggcaaagctaagaatat

SEQ ID NO: 566160 - DNA, 19 bp, Mus musculus
  siRNA target sequence for Pdgfd (NM_027924.1,1220-1238).
gaatatggctcttgttgat

SEQ ID NO: 566161 - DNA, 19 bp, Mus musculus
  siRNA target sequence for Pdgfd (NM_027924.1,1257-1275).
gagcgatgtgactgtatct

SEQ ID NO: 566162 - DNA, 19 bp, Mus musculus
  siRNA target sequence for Pgf (NM_008827.2,509-527).
gatgaggtgtctcacatat

SEQ ID NO: 566163 - DNA, 19 bp, Mus musculus
  siRNA target sequence for Pgf (NM_008827.2,512-530).
gaggtgtctcacatattca

SEQ ID NO: 566164 - DNA, 19 bp, Mus musculus
  siRNA target sequence for Pgf (NM_008827.2,514-532).
ggtgtctcacatattcagt

SEQ ID NO: 566165 - DNA, 19 bp, Mus musculus
  siRNA target sequence for Pgf (NM_008827.2,587-605).
cactgtgtgccgataaaga

SEQ ID NO: 566166 - DNA, 19 bp, Mus musculus
  siRNA target sequence for Pgf (NM_008827.2,589-607).
ctgtgtgccgataaagaca

SEQ ID NO: 566167 - DNA, 19 bp, Mus musculus
  siRNA target sequence for Pgf (NM_008827.2,642-660).
ccaatcgggatccacattt

SEQ ID NO: 566168 - DNA, 19 bp, Mus musculus
  siRNA target sequence for Pgf (NM_008827.2,694-712).
ctgtgaatgcagacctatt

SEQ ID NO: 566169 - DNA, 19 bp, Mus musculus
  siRNA target sequence for Pgf (NM_008827.2,696-714).
gtgaatgcagacctattct

SEQ ID NO: 566170 - DNA, 19 bp, Mus musculus
  siRNA target sequence for Pspn (NM_008954.1,143-161).
cgccccatcagggtaacaa

SEQ ID NO: 566171 - DNA, 19 bp, Mus musculus
  siRNA target sequence for Pspn (NM_008954.1,261-279).
ggtcatcttccgatactgt

SEQ ID NO: 566172 - DNA, 19 bp, Mus musculus
  siRNA target sequence for Ptn (NM_008973.1,1488-1506).
gcagcaacgtagaaaattt

SEQ ID NO: 566173 - DNA, 19 bp, Mus musculus
  siRNA target sequence for Ptn (NM_008973.1,1491-1509).
gcaacgtagaaaatttgca

SEQ ID NO: 566174 - DNA, 19 bp, Mus musculus
  siRNA target sequence for Ptn (NM_008973.1,1513-1531).
gccttcctggcattgattt

SEQ ID NO: 566175 - DNA, 19 bp, Mus musculus
  siRNA target sequence for Ptn (NM_008973.1,1519-1537).
ctggcattgattttcatct

SEQ ID NO: 566176 - DNA, 19 bp, Mus musculus
  siRNA target sequence for Ptn (NM_008973.1,1579-1597).
cctgaaaaaaaggtgaaaa

SEQ ID NO: 566177 - DNA, 19 bp, Mus musculus
  siRNA target sequence for Ptn (NM_008973.1,1912-1930).
cctcaagcggagtcaaaga

SEQ ID NO: 566178 - DNA, 19 bp, Mus musculus
  siRNA target sequence for Ptn (NM_008973.1,1913-1931).
ctcaagcggagtcaaagaa

SEQ ID NO: 566179 - DNA, 19 bp, Mus musculus
  siRNA target sequence for Rabep1 (NM_019400.1,73-91).
cccagcctgacgtttctct

SEQ ID NO: 566180 - DNA, 19 bp, Mus musculus
  siRNA target sequence for Rabep1 (NM_019400.1,74-92).
ccagcctgacgtttctctt

SEQ ID NO: 566181 - DNA, 19 bp, Mus musculus
  siRNA target sequence for Rabep1 (NM_019400.1,159-177).
caagaatttaatcaaaaga

SEQ ID NO: 566182 - DNA, 19 bp, Mus musculus
  siRNA target sequence for Rabep1 (NM_019400.1,226-244).
ggcaaaatgcagtattgca

SEQ ID NO: 566183 - DNA, 19 bp, Mus musculus
  siRNA target sequence for Rabep1 (NM_019400.1,332-350).
ctctgagaatactaagcaa

SEQ ID NO: 566184 - DNA, 19 bp, Mus musculus
  siRNA target sequence for Rabep1 (NM_019400.1,393-411).
gcttcacttcaggctataa

SEQ ID NO: 566185 - DNA, 19 bp, Mus musculus
  siRNA target sequence for Rabep1 (NM_019400.1,479-497).
ggcacagtatcgagaatct

SEQ ID NO: 566186 - DNA, 19 bp, Mus musculus
  siRNA target sequence for Rabep1 (NM_019400.1,503-521).
gcgggaaatagctgactta

SEQ ID NO: 566187 - DNA, 19 bp, Mus musculus
  siRNA target sequence for Rabep1 (NM_019400.1,504-522).
cgggaaatagctgacttaa

SEQ ID NO: 566188 - DNA, 19 bp, Mus musculus
  siRNA target sequence for Rabep1 (NM_019400.1,817-835).
ggaaagaactgcatgaagt

SEQ ID NO: 566189 - DNA, 19 bp, Mus musculus
  siRNA target sequence for Rabep1 (NM_019400.1,839-857).
ccatctcttggaacaagaa

SEQ ID NO: 566190 - DNA, 19 bp, Mus musculus
  siRNA target sequence for Rabep1 (NM_019400.1,947-965).
gagaatggagattgtgtta

SEQ ID NO: 566191 - DNA, 19 bp, Mus musculus
  siRNA target sequence for Rabep1 (NM_019400.1,971-989).
ggaacagctccgacaagtt

SEQ ID NO: 566192 - DNA, 19 bp, Mus musculus
  siRNA target sequence for Rabep1 (NM_019400.1,977-995).
gctccgacaagttgaagaa

SEQ ID NO: 566193 - DNA, 19 bp, Mus musculus
  siRNA target sequence for Rabep1 (NM_019400.1,980-998).
ccgacaagttgaagaacta

SEQ ID NO: 566194 - DNA, 19 bp, Mus musculus
  siRNA target sequence for Rabep1 (NM_019400.1,982-1000).
gacaagttgaagaactaaa

SEQ ID NO: 566195 - DNA, 19 bp, Mus musculus
  siRNA target sequence for Rabep1 (NM_019400.1,1029-1047).
caaagggtcaataagagaa

SEQ ID NO: 566196 - DNA, 19 bp, Mus musculus
  siRNA target sequence for Rabep1 (NM_019400.1,1063-1081).
cagataccgaagaagaagt

SEQ ID NO: 566197 - DNA, 19 bp, Mus musculus
  siRNA target sequence for Rabep1 (NM_019400.1,1089-1107).
ccagtagtgtgtgctttaa

SEQ ID NO: 566198 - DNA, 19 bp, Mus musculus
  siRNA target sequence for Rabep1 (NM_019400.1,1101-1119).
gctttaactcaagaagaat

SEQ ID NO: 566199 - DNA, 19 bp, Mus musculus
  siRNA target sequence for Rabep1 (NM_019400.1,1116-1134).
gaatcttcaaccccattat

SEQ ID NO: 566200 - DNA, 19 bp, Mus musculus
  siRNA target sequence for Rabep1 (NM_019400.1,1120-1138).
cttcaaccccattatcaaa

SEQ ID NO: 566201 - DNA, 19 bp, Mus musculus
  siRNA target sequence for Rabep1 (NM_019400.1,1123-1141).
caaccccattatcaaatga

SEQ ID NO: 566202 - DNA, 19 bp, Mus musculus
  siRNA target sequence for Rabep1 (NM_019400.1,1188-1206).
gcagacttgatgttaccat

SEQ ID NO: 566203 - DNA, 19 bp, Mus musculus
  siRNA target sequence for Rabep1 (NM_019400.1,1203-1221).
ccatctggagatccattta

SEQ ID NO: 566204 - DNA, 19 bp, Mus musculus
  siRNA target sequence for Rabep1 (NM_019400.1,1209-1227).
ggagatccatttagtaaat

SEQ ID NO: 566205 - DNA, 19 bp, Mus musculus
  siRNA target sequence for Rabep1 (NM_019400.1,1222-1240).
gtaaatcggacaatgacat

SEQ ID NO: 566206 - DNA, 19 bp, Mus musculus
  siRNA target sequence for Rabep1 (NM_019400.1,1306-1324).
ccaaagctttaggctataa

SEQ ID NO: 566207 - DNA, 19 bp, Mus musculus
  siRNA target sequence for Rabep1 (NM_019400.1,1311-1329).
gctttaggctataactaca

SEQ ID NO: 566208 - DNA, 19 bp, Mus musculus
  siRNA target sequence for Rabep1 (NM_019400.1,1312-1330).
ctttaggctataactacaa

SEQ ID NO: 566209 - DNA, 19 bp, Mus musculus
  siRNA target sequence for Rabep1 (NM_019400.1,1333-1351).
cgaaatctgctggaaattt

SEQ ID NO: 566210 - DNA, 19 bp, Mus musculus
  siRNA target sequence for Rabep1 (NM_019400.1,1392-1410).
gtgtctgagaactttgata

SEQ ID NO: 566211 - DNA, 19 bp, Mus musculus
  siRNA target sequence for Rabep1 (NM_019400.1,1431-1449).
cagatgccaagtggattta

SEQ ID NO: 566212 - DNA, 19 bp, Mus musculus
  siRNA target sequence for Rabep1 (NM_019400.1,1436-1454).
gccaagtggatttatgtta

SEQ ID NO: 566213 - DNA, 19 bp, Mus musculus
  siRNA target sequence for Rabep1 (NM_019400.1,1441-1459).
gtggatttatgttaaccaa

SEQ ID NO: 566214 - DNA, 19 bp, Mus musculus
  siRNA target sequence for Rabep1 (NM_019400.1,1451-1469).
gttaaccaaagatcaagaa

SEQ ID NO: 566215 - DNA, 19 bp, Mus musculus
  siRNA target sequence for Rabep1 (NM_019400.1,1535-1553).
gggtatggagagtgcatat

SEQ ID NO: 566216 - DNA, 19 bp, Mus musculus
  siRNA target sequence for Rabep1 (NM_019400.1,1541-1559).
ggagagtgcatatgtatct

SEQ ID NO: 566217 - DNA, 19 bp, Mus musculus
  siRNA target sequence for Rabep1 (NM_019400.1,1634-1652).
gcttggtagacgttgtgat

SEQ ID NO: 566218 - DNA, 19 bp, Mus musculus
  siRNA target sequence for Rabep1 (NM_019400.1,1635-1653).
cttggtagacgttgtgata

SEQ ID NO: 566219 - DNA, 19 bp, Mus musculus
  siRNA target sequence for Rabep1 (NM_019400.1,1660-1678).
ccaattatgaaaaacagtt

SEQ ID NO: 566220 - DNA, 19 bp, Mus musculus
  siRNA target sequence for Rabep1 (NM_019400.1,1661-1679).
caattatgaaaaacagtta

SEQ ID NO: 566221 - DNA, 19 bp, Mus musculus
  siRNA target sequence for Rabep1 (NM_019400.1,1674-1692).
cagttacaaggaattcaga

SEQ ID NO: 566222 - DNA, 19 bp, Mus musculus
  siRNA target sequence for Rabep1 (NM_019400.1,1719-1737).
gtgaaaaaactgcagttaa

SEQ ID NO: 566223 - DNA, 19 bp, Mus musculus
  siRNA target sequence for Rabep1 (NM_019400.1,1821-1839).
gactcaagccaccagatat

SEQ ID NO: 566224 - DNA, 19 bp, Mus musculus
  siRNA target sequence for Rabep1 (NM_019400.1,1865-1883).
ctctgaggtcttacttgaa

SEQ ID NO: 566225 - DNA, 19 bp, Mus musculus
  siRNA target sequence for Rabep1 (NM_019400.1,1867-1885).
ctgaggtcttacttgaaga

SEQ ID NO: 566226 - DNA, 19 bp, Mus musculus
  siRNA target sequence for Rabep1 (NM_019400.1,1871-1889).
ggtcttacttgaagagtta

SEQ ID NO: 566227 - DNA, 19 bp, Mus musculus
  siRNA target sequence for Rabep1 (NM_019400.1,1951-1969).
cacgtgaacaggtttcaga

SEQ ID NO: 566228 - DNA, 19 bp, Mus musculus
  siRNA target sequence for Rabep1 (NM_019400.1,1977-1995).
gtgaggttacagaaagaca

SEQ ID NO: 566229 - DNA, 19 bp, Mus musculus
  siRNA target sequence for Rabep1 (NM_019400.1,2039-2057).
gctagcagaagacttcatt

SEQ ID NO: 566230 - DNA, 19 bp, Mus musculus
  siRNA target sequence for Rabep1 (NM_019400.1,2078-2096).
gctccgggaactggtttta

SEQ ID NO: 566231 - DNA, 19 bp, Mus musculus
  siRNA target sequence for Rabep1 (NM_019400.1,2079-2097).
ctccgggaactggttttaa

SEQ ID NO: 566232 - DNA, 19 bp, Mus musculus
  siRNA target sequence for Rabep1 (NM_019400.1,2082-2100).
cgggaactggttttaaaat

SEQ ID NO: 566233 - DNA, 19 bp, Mus musculus
  siRNA target sequence for Rabep1 (NM_019400.1,2083-2101).
gggaactggttttaaaata

SEQ ID NO: 566234 - DNA, 19 bp, Mus musculus
  siRNA target sequence for Rabep1 (NM_019400.1,2154-2172).
ctgaaggcggaaatacttt

SEQ ID NO: 566235 - DNA, 19 bp, Mus musculus
  siRNA target sequence for Rabep1 (NM_019400.1,2159-2177).
ggcggaaatacttttccta

SEQ ID NO: 566236 - DNA, 19 bp, Mus musculus
  siRNA target sequence for Rabep1 (NM_019400.1,2190-2208).
caagcggaacagtgtttaa

SEQ ID NO: 566237 - DNA, 19 bp, Mus musculus
  siRNA target sequence for Rabep1 (NM_019400.1,2255-2273).
ggaggaaatagcttccatt

SEQ ID NO: 566238 - DNA, 19 bp, Mus musculus
  siRNA target sequence for Rabep1 (NM_019400.1,2256-2274).
gaggaaatagcttccattt

SEQ ID NO: 566239 - DNA, 19 bp, Mus musculus
  siRNA target sequence for Rabep1 (NM_019400.1,2259-2277).
gaaatagcttccatttcta

SEQ ID NO: 566240 - DNA, 19 bp, Mus musculus
  siRNA target sequence for Rabep1 (NM_019400.1,2265-2283).
gcttccatttctagtctaa

SEQ ID NO: 566241 - DNA, 19 bp, Mus musculus
  siRNA target sequence for Rabep1 (NM_019400.1,2275-2293).
ctagtctaaaagctgaatt

SEQ ID NO: 566242 - DNA, 19 bp, Mus musculus
  siRNA target sequence for Rabep1 (NM_019400.1,2315-2333).
gggacagttggaatctaca

SEQ ID NO: 566243 - DNA, 19 bp, Mus musculus
  siRNA target sequence for Rabep1 (NM_019400.1,2316-2334).
ggacagttggaatctacat

SEQ ID NO: 566244 - DNA, 19 bp, Mus musculus
  siRNA target sequence for Rabep1 (NM_019400.1,2338-2356).
gagagaagtcgcaacaact

SEQ ID NO: 566245 - DNA, 19 bp, Mus musculus
  siRNA target sequence for Rabep1 (NM_019400.1,2416-2434).
ctaaggctactgttgaaca

SEQ ID NO: 566246 - DNA, 19 bp, Mus musculus
  siRNA target sequence for Rabep1 (NM_019400.1,2467-2485).
ggttgcagacagaattaga

SEQ ID NO: 566247 - DNA, 19 bp, Mus musculus
  siRNA target sequence for Rabep1 (NM_019400.1,2582-2600).
ccgggctattctgaatgat

SEQ ID NO: 566248 - DNA, 19 bp, Mus musculus
  siRNA target sequence for Rabep1 (NM_019400.1,2583-2601).
cgggctattctgaatgata

SEQ ID NO: 566249 - DNA, 19 bp, Mus musculus
  siRNA target sequence for Rabep1 (NM_019400.1,2592-2610).
ctgaatgataccaaactga

SEQ ID NO: 566250 - DNA, 19 bp, Mus musculus
  siRNA target sequence for Scgf (NM_009131.1,165-183).
gtccctcagcttttgagtt

SEQ ID NO: 566251 - DNA, 19 bp, Mus musculus
  siRNA target sequence for Scgf (NM_009131.1,407-425).
cacagcaccttcttctagt

SEQ ID NO: 566252 - DNA, 19 bp, Mus musculus
  siRNA target sequence for Scgf (NM_009131.1,505-523).
caggcctacaccaattgca

SEQ ID NO: 566253 - DNA, 19 bp, Mus musculus
  siRNA target sequence for Scgf (NM_009131.1,912-930).
ggccagcgcgtgtctttct

SEQ ID NO: 566254 - DNA, 19 bp, Mus musculus
  siRNA target sequence for Scgf (NM_009131.1,971-989).
gcctagtgcggcaacacat

SEQ ID NO: 566255 - DNA, 19 bp, Mus musculus
  siRNA target sequence for Tdgf1 (NM_011562.1,263-281).
catttccagtgcgtttgaa

SEQ ID NO: 566256 - DNA, 19 bp, Mus musculus
  siRNA target sequence for Tdgf1 (NM_011562.1,269-287).
cagtgcgtttgaatttgga

SEQ ID NO: 566257 - DNA, 19 bp, Mus musculus
  siRNA target sequence for Tdgf1 (NM_011562.1,325-343).
gcatttgggaccagaaaga

SEQ ID NO: 566258 - DNA, 19 bp, Mus musculus
  siRNA target sequence for Tdgf1 (NM_011562.1,326-344).
catttgggaccagaaagaa

SEQ ID NO: 566259 - DNA, 19 bp, Mus musculus
  siRNA target sequence for Tdgf1 (NM_011562.1,379-397).
cttccgtggggatacagaa

SEQ ID NO: 566260 - DNA, 19 bp, Mus musculus
  siRNA target sequence for Tdgf1 (NM_011562.1,387-405).
gggatacagaacagtaagt

SEQ ID NO: 566261 - DNA, 19 bp, Mus musculus
  siRNA target sequence for Tdgf1 (NM_011562.1,395-413).
gaacagtaagtcgcttaat

SEQ ID NO: 566262 - DNA, 19 bp, Mus musculus
  siRNA target sequence for Tdgf1 (NM_011562.1,686-704).
gacgaccacttttatgcta

SEQ ID NO: 566263 - DNA, 19 bp, Mus musculus
  siRNA target sequence for Tdgf1 (NM_011562.1,715-733).
gcctttttctagatatgaa

SEQ ID NO: 566264 - DNA, 19 bp, Mus musculus
  siRNA target sequence for Tdgf1 (NM_011562.1,716-734).
cctttttctagatatgaaa

SEQ ID NO: 566265 - DNA, 19 bp, Mus musculus
  siRNA target sequence for Tff1 (NM_009362.1,86-104).
ggcccaggaagaaacatgt

SEQ ID NO: 566266 - DNA, 19 bp, Mus musculus
  siRNA target sequence for Tff1 (NM_009362.1,87-105).
gcccaggaagaaacatgta

SEQ ID NO: 566267 - DNA, 19 bp, Mus musculus
  siRNA target sequence for Tgfa (NM_031199.1,205-223).
gtggtgtctcacttcaaca

SEQ ID NO: 566268 - DNA, 19 bp, Mus musculus
  siRNA target sequence for Tgfa (NM_031199.1,208-226).
gtgtctcacttcaacaagt

SEQ ID NO: 566269 - DNA, 19 bp, Mus musculus
  siRNA target sequence for Tgfa (NM_031199.1,260-278).
gaacctgccggtttttggt

SEQ ID NO: 566270 - DNA, 19 bp, Mus musculus
  siRNA target sequence for Vegfa (NM_009505.2,588-606).
ccgacgagatagagtacat

SEQ ID NO: 566271 - DNA, 19 bp, Mus musculus
  siRNA target sequence for Vegfa (NM_009505.2,831-849).
cagagcggagaaagcattt

SEQ ID NO: 566272 - DNA, 19 bp, Mus musculus
  siRNA target sequence for Vegfa (NM_009505.2,833-851).
gagcggagaaagcatttgt

SEQ ID NO: 566273 - DNA, 19 bp, Mus musculus
  siRNA target sequence for Vegfa (NM_009505.2,835-853).
gcggagaaagcatttgttt

SEQ ID NO: 566274 - DNA, 19 bp, Mus musculus
  siRNA target sequence for Vegfa (NM_009505.2,860-878).
gatccgcagacgtgtaaat

SEQ ID NO: 566275 - DNA, 19 bp, Mus musculus
  siRNA target sequence for Vegfa (NM_009505.2,863-881).
ccgcagacgtgtaaatgtt

SEQ ID NO: 566276 - DNA, 19 bp, Mus musculus
  siRNA target sequence for Vegfa (NM_009505.2,873-891).
gtaaatgttcctgcaaaaa

SEQ ID NO: 566277 - DNA, 19 bp, Mus musculus
  siRNA target sequence for Vegfa (NM_009505.2,910-928).
ggcgaggcagcttgagtta

SEQ ID NO: 566278 - DNA, 19 bp, Mus musculus
  siRNA target sequence for Vegfa (NM_009505.2,911-929).
gcgaggcagcttgagttaa

SEQ ID NO: 566279 - DNA, 19 bp, Mus musculus
  siRNA target sequence for Vegfa (NM_009505.2,912-930).
cgaggcagcttgagttaaa

SEQ ID NO: 566280 - DNA, 19 bp, Mus musculus
  siRNA target sequence for Vegfc (NM_009506.1,290-308).
gcgaggtcaaggcttttga

SEQ ID NO: 566281 - DNA, 19 bp, Mus musculus
  siRNA target sequence for Vegfc (NM_009506.1,447-465).
gacaggggacagtgtaaaa

SEQ ID NO: 566282 - DNA, 19 bp, Mus musculus
  siRNA target sequence for Vegfc (NM_009506.1,453-471).
ggacagtgtaaaatttgct

SEQ ID NO: 566283 - DNA, 19 bp, Mus musculus
  siRNA target sequence for Vegfc (NM_009506.1,486-504).
cacagagatcctgaaaagt

SEQ ID NO: 566284 - DNA, 19 bp, Mus musculus
  siRNA target sequence for Vegfc (NM_009506.1,492-510).
gatcctgaaaagtattgat

SEQ ID NO: 566285 - DNA, 19 bp, Mus musculus
  siRNA target sequence for Vegfc (NM_009506.1,514-532).
gagtggagaaagactcaat

SEQ ID NO: 566286 - DNA, 19 bp, Mus musculus
  siRNA target sequence for Vegfc (NM_009506.1,537-555).
gccacgtgaggtgtgtata

SEQ ID NO: 566287 - DNA, 19 bp, Mus musculus
  siRNA target sequence for Vegfc (NM_009506.1,539-557).
cacgtgaggtgtgtataga

SEQ ID NO: 566288 - DNA, 19 bp, Mus musculus
  siRNA target sequence for Vegfc (NM_009506.1,686-704).
gcaagacgttgtttgaaat

SEQ ID NO: 566289 - DNA, 19 bp, Mus musculus
  siRNA target sequence for Vegfc (NM_009506.1,690-708).
gacgttgtttgaaattaca

SEQ ID NO: 566290 - DNA, 19 bp, Mus musculus
  siRNA target sequence for Vegfc (NM_009506.1,764-782).
cctgccggtgcatgtctaa

SEQ ID NO: 566291 - DNA, 19 bp, Mus musculus
  siRNA target sequence for Vegfc (NM_009506.1,786-804).
ggatgtttacagacaagtt

SEQ ID NO: 566292 - DNA, 19 bp, Mus musculus
  siRNA target sequence for Vegfc (NM_009506.1,797-815).
gacaagttcattcaattat

SEQ ID NO: 566293 - DNA, 19 bp, Mus musculus
  siRNA target sequence for Vegfc (NM_009506.1,799-817).
caagttcattcaattatta

SEQ ID NO: 566294 - DNA, 19 bp, Mus musculus
  siRNA target sequence for Vegfc (NM_009506.1,875-893).
caaactatgtgtggaataa

SEQ ID NO: 566295 - DNA, 19 bp, Mus musculus
  siRNA target sequence for Vegfc (NM_009506.1,949-967).
gatgactcaaccaatggat

SEQ ID NO: 566296 - DNA, 19 bp, Mus musculus
  siRNA target sequence for Vegfc (NM_009506.1,1033-1051).
gggcttcggccatctagtt

SEQ ID NO: 566297 - DNA, 19 bp, Mus musculus
  siRNA target sequence for Vegfc (NM_009506.1,1035-1053).
gcttcggccatctagttgt

SEQ ID NO: 566298 - DNA, 19 bp, Mus musculus
  siRNA target sequence for Vegfc (NM_009506.1,1055-1073).
gaccccacaaagaactaga

SEQ ID NO: 566299 - DNA, 19 bp, Mus musculus
  siRNA target sequence for Vegfc (NM_009506.1,1057-1075).
ccccacaaagaactagata

SEQ ID NO: 566300 - DNA, 19 bp, Mus musculus
  siRNA target sequence for Vegfc (NM_009506.1,1059-1077).
ccacaaagaactagataga

SEQ ID NO: 566301 - DNA, 19 bp, Mus musculus
  siRNA target sequence for Vegfc (NM_009506.1,1207-1225).
gggaaatgtgcctgtgaat

SEQ ID NO: 566302 - DNA, 19 bp, Mus musculus
  siRNA target sequence for Vegfc (NM_009506.1,1306-1324).
gcgaatcgactgaagcatt

SEQ ID NO: 566303 - DNA, 19 bp, Mus musculus
  siRNA target sequence for Vegfc (NM_009506.1,1359-1377).
ccgctgtgtcccatcgtat

SEQ ID NO: 566304 - DNA, 19 bp, Mus musculus
  siRNA target sequence for Vegfc (NM_009506.1,1360-1378).
cgctgtgtcccatcgtatt

SEQ ID NO: 566305 - DNA, 19 bp, Mus musculus
  siRNA target sequence for Vegfc (NM_009506.1,1364-1382).
gtgtcccatcgtattggaa

SEQ ID NO: 566306 - DNA, 19 bp, Mus musculus
  siRNA target sequence for Vegfc (NM_009506.1,1366-1384).
gtcccatcgtattggaaaa

SEQ ID NO: 566307 - DNA, 19 bp, Mus musculus
  siRNA target sequence for Avp (NM_009732.1,7-25).
gccaggatgctcaacacta

SEQ ID NO: 566308 - DNA, 19 bp, Mus musculus
  siRNA target sequence for Avp (NM_009732.1,23-41).
ctacgctctccgcttgttt

SEQ ID NO: 566309 - DNA, 19 bp, Mus musculus
  siRNA target sequence for Avp (NM_009732.1,355-373).
gagtgccacgacggttttt

SEQ ID NO: 566310 - DNA, 19 bp, Mus musculus
  siRNA target sequence for 5033428E16Rik (NM_024435.2,186-204).
gccctggaggcagatctat

SEQ ID NO: 566311 - DNA, 19 bp, Mus musculus
  siRNA target sequence for 5033428E16Rik (NM_024435.2,187-205).
ccctggaggcagatctatt

SEQ ID NO: 566312 - DNA, 19 bp, Mus musculus
  siRNA target sequence for 5033428E16Rik (NM_024435.2,189-207).
ctggaggcagatctattga

SEQ ID NO: 566313 - DNA, 19 bp, Mus musculus
  siRNA target sequence for 5033428E16Rik (NM_024435.2,192-210).
gaggcagatctattgacaa

SEQ ID NO: 566314 - DNA, 19 bp, Mus musculus
  siRNA target sequence for 5033428E16Rik (NM_024435.2,243-261).
cctccgtcttggaaaatga

SEQ ID NO: 566315 - DNA, 19 bp, Mus musculus
  siRNA target sequence for 5033428E16Rik (NM_024435.2,361-379).
cccttgttctggatggttt

SEQ ID NO: 566316 - DNA, 19 bp, Mus musculus
  siRNA target sequence for 5033428E16Rik (NM_024435.2,363-381).
cttgttctggatggtttta

SEQ ID NO: 566317 - DNA, 19 bp, Mus musculus
  siRNA target sequence for 5033428E16Rik (NM_024435.2,470-488).
ccttgataacgtcaatgat

SEQ ID NO: 566318 - DNA, 19 bp, Mus musculus
  siRNA target sequence for 5033428E16Rik (NM_024435.2,471-489).
cttgataacgtcaatgata

SEQ ID NO: 566319 - DNA, 19 bp, Mus musculus
  siRNA target sequence for 5033428E16Rik (NM_024435.2,541-559).
ggcagctgtatgaaaataa

SEQ ID NO: 566320 - DNA, 19 bp, Mus musculus
  siRNA target sequence for Agrp (NM_007427.1,126-144).
cccaggtctaagtctgaat

SEQ ID NO: 566321 - DNA, 19 bp, Mus musculus
  siRNA target sequence for Agrp (NM_007427.1,137-155).
gtctgaatggcctcaagaa

SEQ ID NO: 566322 - DNA, 19 bp, Mus musculus
  siRNA target sequence for Agrp (NM_007427.1,164-182).
cagaccgagcagaagaagt

SEQ ID NO: 566323 - DNA, 19 bp, Mus musculus
  siRNA target sequence for Npff (NM_018787.1,107-125).
gtctttgcaggagaagata

SEQ ID NO: 566324 - DNA, 19 bp, Mus musculus
  siRNA target sequence for Wdr21 (NM_030246.1,310-328).
ctcccgggtcacaacaact

SEQ ID NO: 566325 - DNA, 19 bp, Mus musculus
  siRNA target sequence for Wdr21 (NM_030246.1,426-444).
cagagtgggatttaatgca

SEQ ID NO: 566326 - DNA, 19 bp, Mus musculus
  siRNA target sequence for Wdr21 (NM_030246.1,443-461).
catcttccatcctacgaaa

SEQ ID NO: 566327 - DNA, 19 bp, Mus musculus
  siRNA target sequence for Wdr21 (NM_030246.1,524-542).
gctgcatggagaggaaaaa

SEQ ID NO: 566328 - DNA, 19 bp, Mus musculus
  siRNA target sequence for Wdr21 (NM_030246.1,577-595).
gcaagtgaccggtttaact

SEQ ID NO: 566329 - DNA, 19 bp, Mus musculus
  siRNA target sequence for Wdr21 (NM_030246.1,578-596).
caagtgaccggtttaactt

SEQ ID NO: 566330 - DNA, 19 bp, Mus musculus
  siRNA target sequence for Wdr21 (NM_030246.1,581-599).
gtgaccggtttaacttcat

SEQ ID NO: 566331 - DNA, 19 bp, Mus musculus
  siRNA target sequence for Wdr21 (NM_030246.1,583-601).
gaccggtttaacttcatca

SEQ ID NO: 566332 - DNA, 19 bp, Mus musculus
  siRNA target sequence for Wdr21 (NM_030246.1,759-777).
gtgctgggcctcactcaat

SEQ ID NO: 566333 - DNA, 19 bp, Mus musculus
  siRNA target sequence for Wdr21 (NM_030246.1,764-782).
gggcctcactcaatcactt

SEQ ID NO: 566334 - DNA, 19 bp, Mus musculus
  siRNA target sequence for Wdr21 (NM_030246.1,847-865).
cccgcttcactgtttgtca

SEQ ID NO: 566335 - DNA, 19 bp, Mus musculus
  siRNA target sequence for Wdr21 (NM_030246.1,892-910).
cctggcatgctctgtagtt

SEQ ID NO: 566336 - DNA, 19 bp, Mus musculus
  siRNA target sequence for Wdr21 (NM_030246.1,1016-1034).
caggacaccggcagtcata

SEQ ID NO: 566337 - DNA, 19 bp, Mus musculus
  siRNA target sequence for Wdr21 (NM_030246.1,1027-1045).
cagtcatacaggatcaaca

SEQ ID NO: 566338 - DNA, 19 bp, Mus musculus
  siRNA target sequence for Wdr21 (NM_030246.1,1263-1281).
ggacctgagggccactaaa

SEQ ID NO: 566339 - DNA, 19 bp, Mus musculus
  siRNA target sequence for Wdr21 (NM_030246.1,1264-1282).
gacctgagggccactaaat

SEQ ID NO: 566340 - DNA, 19 bp, Mus musculus
  siRNA target sequence for Wdr21 (NM_030246.1,1319-1337).
cctacctgccactgcatat

SEQ ID NO: 566341 - DNA, 19 bp, Mus musculus
  siRNA target sequence for 1600016E11Rik (NM_025896.1,224-242).
ctgtgggagaatgtgtatt

SEQ ID NO: 566342 - DNA, 19 bp, Mus musculus
  siRNA target sequence for 1600016E11Rik (NM_025896.1,228-246).
gggagaatgtgtattccat

SEQ ID NO: 566343 - DNA, 19 bp, Mus musculus
  siRNA target sequence for 1600016E11Rik (NM_025896.1,255-273).
gctttgacatggaaggata

SEQ ID NO: 566344 - DNA, 19 bp, Mus musculus
  siRNA target sequence for 1600016E11Rik (NM_025896.1,265-283).
ggaaggatacaatgaaata

SEQ ID NO: 566345 - DNA, 19 bp, Mus musculus
  siRNA target sequence for 1600016E11Rik (NM_025896.1,270-288).
gatacaatgaaataaccat

SEQ ID NO: 566346 - DNA, 19 bp, Mus musculus
  siRNA target sequence for 1600016E11Rik (NM_025896.1,285-303).
ccattgaagaactctttga

SEQ ID NO: 566347 - DNA, 19 bp, Mus musculus
  siRNA target sequence for 1600016E11Rik (NM_025896.1,333-351).
caaacctcaccacacaaat

SEQ ID NO: 566348 - DNA, 19 bp, Mus musculus
  siRNA target sequence for 1600016E11Rik (NM_025896.1,485-503).
ctgaagatggtgatcagta

SEQ ID NO: 566349 - DNA, 19 bp, Mus musculus
  siRNA target sequence for 1600016E11Rik (NM_025896.1,514-532).
ctggtaccaccctctgaaa

SEQ ID NO: 566350 - DNA, 19 bp, Mus musculus
  siRNA target sequence for 1600016E11Rik (NM_025896.1,516-534).
ggtaccaccctctgaaaca

SEQ ID NO: 566351 - DNA, 19 bp, Mus musculus
  siRNA target sequence for 1600016E11Rik (NM_025896.1,517-535).
gtaccaccctctgaaacaa

SEQ ID NO: 566352 - DNA, 19 bp, Mus musculus
  siRNA target sequence for 1600016E11Rik (NM_025896.1,520-538).
ccaccctctgaaacaactt

SEQ ID NO: 566353 - DNA, 19 bp, Mus musculus
  siRNA target sequence for 1600016E11Rik (NM_025896.1,566-584).
gcctgcaagaccatactgt

SEQ ID NO: 566354 - DNA, 19 bp, Mus musculus
  siRNA target sequence for 1600016E11Rik (NM_025896.1,570-588).
gcaagaccatactgttgaa

SEQ ID NO: 566355 - DNA, 19 bp, Mus musculus
  siRNA target sequence for 1600016E11Rik (NM_025896.1,576-594).
ccatactgttgaaagtcat

SEQ ID NO: 566356 - DNA, 19 bp, Mus musculus
  siRNA target sequence for 1600016E11Rik (NM_025896.1,590-608).
gtcatagaagtgaaggaaa

SEQ ID NO: 566357 - DNA, 19 bp, Mus musculus
  siRNA target sequence for 1600016E11Rik (NM_025896.1,731-749).
cgctactttgctcttagta

SEQ ID NO: 566358 - DNA, 19 bp, Mus musculus
  siRNA target sequence for 1600016E11Rik (NM_025896.1,736-754).
ctttgctcttagtaacatt

SEQ ID NO: 566359 - DNA, 19 bp, Mus musculus
  siRNA target sequence for 1600016E11Rik (NM_025896.1,781-799).
caaagttgccacttatctt

SEQ ID NO: 566360 - DNA, 19 bp, Mus musculus
  siRNA target sequence for 1600016E11Rik (NM_025896.1,803-821).
gctctcaagtgccgaatta

SEQ ID NO: 566361 - DNA, 19 bp, Mus musculus
  siRNA target sequence for 1600016E11Rik (NM_025896.1,808-826).
caagtgccgaattatccat

SEQ ID NO: 566362 - DNA, 19 bp, Mus musculus
  siRNA target sequence for 1600016E11Rik (NM_025896.1,813-831).
gccgaattatccatcacaa

SEQ ID NO: 566363 - DNA, 19 bp, Mus musculus
  siRNA target sequence for 1600016E11Rik (NM_025896.1,816-834).
gaattatccatcacaacaa

SEQ ID NO: 566364 - DNA, 19 bp, Mus musculus
  siRNA target sequence for 1600017L04Rik (NM_028477.1,189-207).
ccccttgtagaaacattta

SEQ ID NO: 566365 - DNA, 19 bp, Mus musculus
  siRNA target sequence for 1600017L04Rik (NM_028477.1,190-208).
cccttgtagaaacatttaa

SEQ ID NO: 566366 - DNA, 19 bp, Mus musculus
  siRNA target sequence for 1600017L04Rik (NM_028477.1,251-269).
gcaaatgcatcaagagttt

SEQ ID NO: 566367 - DNA, 19 bp, Mus musculus
  siRNA target sequence for 1600017L04Rik (NM_028477.1,264-282).
gagtttctccacaatgagt

SEQ ID NO: 566368 - DNA, 19 bp, Mus musculus
  siRNA target sequence for 1600017L04Rik (NM_028477.1,292-310).
gacacttcacacactttaa

SEQ ID NO: 566369 - DNA, 19 bp, Mus musculus
  siRNA target sequence for 1600017L04Rik (NM_028477.1,394-412).
gacctgaatacaaaaatat

SEQ ID NO: 566370 - DNA, 19 bp, Mus musculus
  siRNA target sequence for 1600017L04Rik (NM_028477.1,469-487).
cactgtaccatctagtgat

SEQ ID NO: 566371 - DNA, 19 bp, Mus musculus
  siRNA target sequence for 1600017L04Rik (NM_028477.1,603-621).
cctacagcgaagatgaaga

SEQ ID NO: 566372 - DNA, 19 bp, Mus musculus
  siRNA target sequence for 1600017L04Rik (NM_028477.1,714-732).
cgtgtggatatattctaca

SEQ ID NO: 566373 - DNA, 19 bp, Mus musculus
  siRNA target sequence for 1600017L04Rik (NM_028477.1,717-735).
gtggatatattctacacta

SEQ ID NO: 566374 - DNA, 19 bp, Mus musculus
  siRNA target sequence for 1600017L04Rik (NM_028477.1,719-737).
ggatatattctacactaaa

SEQ ID NO: 566375 - DNA, 19 bp, Mus musculus
  siRNA target sequence for 1600017N11Rik (NM_026206.1,635-653).
gacagatctggcatcctta

SEQ ID NO: 566376 - DNA, 19 bp, Mus musculus
  siRNA target sequence for 4930569K13Rik (NM_029948.1,166-184).
cctacagctcgcaatgcaa

SEQ ID NO: 566377 - DNA, 19 bp, Mus musculus
  siRNA target sequence for 4930569K13Rik (NM_029948.1,167-185).
ctacagctcgcaatgcaaa

SEQ ID NO: 566378 - DNA, 19 bp, Mus musculus
  siRNA target sequence for 4930569K13Rik (NM_029948.1,273-291).
ctcacaaacgacttaacat

SEQ ID NO: 566379 - DNA, 19 bp, Mus musculus
  siRNA target sequence for 4930569K13Rik (NM_029948.1,333-351).
cgctgggtggtctgatgaa

SEQ ID NO: 566380 - DNA, 19 bp, Mus musculus
  siRNA target sequence for 4930569K13Rik (NM_029948.1,404-422).
gcactgcttgaccagaata

SEQ ID NO: 566381 - DNA, 19 bp, Mus musculus
  siRNA target sequence for 4930569K13Rik (NM_029948.1,423-441).
ctcaccccaggaattacaa

SEQ ID NO: 566382 - DNA, 19 bp, Mus musculus
  siRNA target sequence for 4930569K13Rik (NM_029948.1,494-512).
gctggagatacgacaacat

SEQ ID NO: 566383 - DNA, 19 bp, Mus musculus
  siRNA target sequence for 4930569K13Rik (NM_029948.1,497-515).
ggagatacgacaacatctt

SEQ ID NO: 566384 - DNA, 19 bp, Mus musculus
  siRNA target sequence for 4930569K13Rik (NM_029948.1,526-544).
ggtcaagtgtaggagaaaa

SEQ ID NO: 566385 - DNA, 19 bp, Mus musculus
  siRNA target sequence for 4930569K13Rik (NM_029948.1,572-590).
gccaagcaaaactcattga

SEQ ID NO: 566386 - DNA, 19 bp, Mus musculus
  siRNA target sequence for 4930569K13Rik (NM_029948.1,573-591).
ccaagcaaaactcattgaa

SEQ ID NO: 566387 - DNA, 19 bp, Mus musculus
  siRNA target sequence for 4930569K13Rik (NM_029948.1,578-596).
caaaactcattgaaagtgt

SEQ ID NO: 566388 - DNA, 19 bp, Mus musculus
  siRNA target sequence for 4930569K13Rik (NM_029948.1,602-620).
gacctgtacctcaaaccaa

SEQ ID NO: 566389 - DNA, 19 bp, Mus musculus
  siRNA target sequence for 4930569K13Rik (NM_029948.1,724-742).
ccagaatattgtgaagatt

SEQ ID NO: 566390 - DNA, 19 bp, Mus musculus
  siRNA target sequence for 4930569K13Rik (NM_029948.1,770-788).
gaggaagtagaagtatgtt

SEQ ID NO: 566391 - DNA, 19 bp, Mus musculus
  siRNA target sequence for 4930569K13Rik (NM_029948.1,772-790).
ggaagtagaagtatgttgt

SEQ ID NO: 566392 - DNA, 19 bp, Mus musculus
  siRNA target sequence for 4930569K13Rik (NM_029948.1,848-866).
cttctctcgatcattctct

SEQ ID NO: 566393 - DNA, 19 bp, Mus musculus
  siRNA target sequence for 4930569K13Rik (NM_029948.1,856-874).
gatcattctctctcacatt

SEQ ID NO: 566394 - DNA, 19 bp, Mus musculus
  siRNA target sequence for 4930569K13Rik (NM_029948.1,1036-1054).
ggagatcctctctattact

SEQ ID NO: 566395 - DNA, 19 bp, Mus musculus
  siRNA target sequence for 4930569K13Rik (NM_029948.1,1126-1144).
gaacctgagtggtgtcatt

SEQ ID NO: 566396 - DNA, 19 bp, Mus musculus
  siRNA target sequence for 4930569K13Rik (NM_029948.1,1139-1157).
gtcattctgaccgacataa

SEQ ID NO: 566397 - DNA, 19 bp, Mus musculus
  siRNA target sequence for 4930569K13Rik (NM_029948.1,1141-1159).
cattctgaccgacataagt

SEQ ID NO: 566398 - DNA, 19 bp, Mus musculus
  siRNA target sequence for 4930569K13Rik (NM_029948.1,1278-1296).
gtgctcagcttatcatgtt

SEQ ID NO: 566399 - DNA, 19 bp, Mus musculus
  siRNA target sequence for 4930569K13Rik (NM_029948.1,1283-1301).
cagcttatcatgttcaact

SEQ ID NO: 566400 - DNA, 19 bp, Mus musculus
  siRNA target sequence for 4930569K13Rik (NM_029948.1,1351-1369).
cacctccgggctgaactat

SEQ ID NO: 566401 - DNA, 19 bp, Mus musculus
  siRNA target sequence for 4930569K13Rik (NM_029948.1,1353-1371).
cctccgggctgaactattt

SEQ ID NO: 566402 - DNA, 19 bp, Mus musculus
  siRNA target sequence for 4930569K13Rik (NM_029948.1,1358-1376).
gggctgaactatttaagct

SEQ ID NO: 566403 - DNA, 19 bp, Mus musculus
  siRNA target sequence for 4930569K13Rik (NM_029948.1,1359-1377).
ggctgaactatttaagctt

SEQ ID NO: 566404 - DNA, 19 bp, Mus musculus
  siRNA target sequence for 4930569K13Rik (NM_029948.1,1389-1407).
ctaccccttgggagattta

SEQ ID NO: 566405 - DNA, 19 bp, Mus musculus
  siRNA target sequence for 4930569K13Rik (NM_029948.1,1393-1411).
cccttgggagatttatggt

SEQ ID NO: 566406 - DNA, 19 bp, Mus musculus
  siRNA target sequence for 4930569K13Rik (NM_029948.1,1415-1433).
cagggtgcttcctaccata

SEQ ID NO: 566407 - DNA, 19 bp, Mus musculus
  siRNA target sequence for 4930569K13Rik (NM_029948.1,1418-1436).
ggtgcttcctaccataaga

SEQ ID NO: 566408 - DNA, 19 bp, Mus musculus
  siRNA target sequence for 4930569K13Rik (NM_029948.1,1437-1455).
ggctagaacagcttagaga

SEQ ID NO: 566409 - DNA, 19 bp, Mus musculus
  siRNA target sequence for 4933440J22Rik (NM_028959.1,623-641).
gtgaatgggacctaagcaa

SEQ ID NO: 566410 - DNA, 19 bp, Mus musculus
  siRNA target sequence for 4933440J22Rik (NM_028959.1,758-776).
cgaggcgaggccatgagaa

SEQ ID NO: 566411 - DNA, 19 bp, Mus musculus
  siRNA target sequence for 4933440J22Rik (NM_028959.1,883-901).
cagcatgcccgcatcactt

SEQ ID NO: 566412 - DNA, 19 bp, Mus musculus
  siRNA target sequence for 4933440J22Rik (NM_028959.1,1286-1304).
cgcttctcgacctgataga

SEQ ID NO: 566413 - DNA, 19 bp, Mus musculus
  siRNA target sequence for 4933440J22Rik (NM_028959.1,1359-1377).
ggccaagcatgttttgtca

SEQ ID NO: 566414 - DNA, 19 bp, Mus musculus
  siRNA target sequence for 4933440J22Rik (NM_028959.1,1360-1378).
gccaagcatgttttgtcat

SEQ ID NO: 566415 - DNA, 19 bp, Mus musculus
  siRNA target sequence for 4933440J22Rik (NM_028959.1,1404-1422).
ggacagttcagcacttgaa

SEQ ID NO: 566416 - DNA, 19 bp, Mus musculus
  siRNA target sequence for 4933440J22Rik (NM_028959.1,1430-1448).
gaattggttacctatctct

SEQ ID NO: 566417 - DNA, 19 bp, Mus musculus
  siRNA target sequence for 4933440J22Rik (NM_028959.1,1435-1453).
ggttacctatctcttgaaa

SEQ ID NO: 566418 - DNA, 19 bp, Mus musculus
  siRNA target sequence for 4933440J22Rik (NM_028959.1,1525-1543).
gagctcaataatacaaaga

SEQ ID NO: 566419 - DNA, 19 bp, Mus musculus
  siRNA target sequence for 4933440J22Rik (NM_028959.1,1609-1627).
cttctgtacaatgtgaaaa

SEQ ID NO: 566420 - DNA, 19 bp, Mus musculus
  siRNA target sequence for 4933440J22Rik (NM_028959.1,1676-1694).
ctggacttcaggcaagtat

SEQ ID NO: 566421 - DNA, 19 bp, Mus musculus
  siRNA target sequence for 4933440J22Rik (NM_028959.1,1678-1696).
ggacttcaggcaagtatga

SEQ ID NO: 566422 - DNA, 19 bp, Mus musculus
  siRNA target sequence for 9330140G23 (NM_177647.2,163-181).
gagggctgactgtgaagta

SEQ ID NO: 566423 - DNA, 19 bp, Mus musculus
  siRNA target sequence for 9330140G23 (NM_177647.2,218-236).
ctaagcagaggcatagact

SEQ ID NO: 566424 - DNA, 19 bp, Mus musculus
  siRNA target sequence for 9330140G23 (NM_177647.2,240-258).
ctgcggacaccatagagaa

SEQ ID NO: 566425 - DNA, 19 bp, Mus musculus
  siRNA target sequence for 9330140G23 (NM_177647.2,366-384).
gtcccatgagtgtacacat

SEQ ID NO: 566426 - DNA, 19 bp, Mus musculus
  siRNA target sequence for 9330140G23 (NM_177647.2,382-400).
catacctgccgtgaagatt

SEQ ID NO: 566427 - DNA, 19 bp, Mus musculus
  siRNA target sequence for 9330140G23 (NM_177647.2,543-561).
catgtgcggagaaaagtga

SEQ ID NO: 566428 - DNA, 19 bp, Mus musculus
  siRNA target sequence for Adcyap1 (NM_009625.2,235-253).
gctggtgtatgggataata

SEQ ID NO: 566429 - DNA, 19 bp, Mus musculus
  siRNA target sequence for Adcyap1 (NM_009625.2,236-254).
ctggtgtatgggataataa

SEQ ID NO: 566430 - DNA, 19 bp, Mus musculus
  siRNA target sequence for Adcyap1 (NM_009625.2,241-259).
gtatgggataataatgcat

SEQ ID NO: 566431 - DNA, 19 bp, Mus musculus
  siRNA target sequence for Adcyap1 (NM_009625.2,339-357).
gaaacccgctgcaagactt

SEQ ID NO: 566432 - DNA, 19 bp, Mus musculus
  siRNA target sequence for Adcyap1 (NM_009625.2,407-425).
gacgcttacgccctttact

SEQ ID NO: 566433 - DNA, 19 bp, Mus musculus
  siRNA target sequence for Adcyap1 (NM_009625.2,441-459).
gagatgtcgcccacgaaat

SEQ ID NO: 566434 - DNA, 19 bp, Mus musculus
  siRNA target sequence for Adcyap1 (NM_009625.2,446-464).
gtcgcccacgaaatcctta

SEQ ID NO: 566435 - DNA, 19 bp, Mus musculus
  siRNA target sequence for Adcyap1 (NM_009625.2,450-468).
cccacgaaatccttaacga

SEQ ID NO: 566436 - DNA, 19 bp, Mus musculus
  siRNA target sequence for Adcyap1 (NM_009625.2,451-469).
ccacgaaatccttaacgaa

SEQ ID NO: 566437 - DNA, 19 bp, Mus musculus
  siRNA target sequence for Adcyap1 (NM_009625.2,461-479).
cttaacgaagcctatcgaa

SEQ ID NO: 566438 - DNA, 19 bp, Mus musculus
  siRNA target sequence for Adcyap1 (NM_009625.2,599-617).
gacggcatcttcacagata

SEQ ID NO: 566439 - DNA, 19 bp, Mus musculus
  siRNA target sequence for Adcyap1 (NM_009625.2,622-640).
cagccgctaccgaaaacaa

SEQ ID NO: 566440 - DNA, 19 bp, Mus musculus
  siRNA target sequence for Adcyap1 (NM_009625.2,624-642).
gccgctaccgaaaacaaat

SEQ ID NO: 566441 - DNA, 19 bp, Mus musculus
  siRNA target sequence for Adcyap1 (NM_009625.2,666-684).
ccgtgctagggaaaaggta

SEQ ID NO: 566442 - DNA, 19 bp, Mus musculus
  siRNA target sequence for Adcyap1 (NM_009625.2,667-685).
cgtgctagggaaaaggtat

SEQ ID NO: 566443 - DNA, 19 bp, Mus musculus
  siRNA target sequence for Adcyap1 (NM_009625.2,668-686).
gtgctagggaaaaggtata

SEQ ID NO: 566444 - DNA, 19 bp, Mus musculus
  siRNA target sequence for Adcyap1 (NM_009625.2,670-688).
gctagggaaaaggtataaa

SEQ ID NO: 566445 - DNA, 19 bp, Mus musculus
  siRNA target sequence for Adcyap1 (NM_009625.2,682-700).
gtataaacagagggttaaa

SEQ ID NO: 566446 - DNA, 19 bp, Mus musculus
  siRNA target sequence for Adcyap1 (NM_009625.2,703-721).
caaaggacgccgaatagca

SEQ ID NO: 566447 - DNA, 19 bp, Mus musculus
  siRNA target sequence for Adcyap1 (NM_009625.2,708-726).
gacgccgaatagcatactt

SEQ ID NO: 566448 - DNA, 19 bp, Mus musculus
  siRNA target sequence for Adcyap1 (NM_009625.2,710-728).
cgccgaatagcatacttgt

SEQ ID NO: 566449 - DNA, 19 bp, Mus musculus
  siRNA target sequence for Adm (NM_009627.1,208-226).
gggttcactcgctttccta

SEQ ID NO: 566450 - DNA, 19 bp, Mus musculus
  siRNA target sequence for Adm (NM_009627.1,255-273).
cttcgcagttccgaaagaa

SEQ ID NO: 566451 - DNA, 19 bp, Mus musculus
  siRNA target sequence for Adm (NM_009627.1,386-404).
ctggacgagcagaacacaa

SEQ ID NO: 566452 - DNA, 19 bp, Mus musculus
  siRNA target sequence for Adm (NM_009627.1,413-431).
ctacaagccagcaatcaga

SEQ ID NO: 566453 - DNA, 19 bp, Mus musculus
  siRNA target sequence for Adm (NM_009627.1,502-520).
cttcgggacctgcacattt

SEQ ID NO: 566454 - DNA, 19 bp, Mus musculus
  siRNA target sequence for Adm (NM_009627.1,569-587).
ggcatggctcccagaaaca

SEQ ID NO: 566455 - DNA, 19 bp, Mus musculus
  siRNA target sequence for Apln (NM_013912.2,452-470).
ctggtgaagcccagaactt

SEQ ID NO: 566456 - DNA, 19 bp, Mus musculus
  siRNA target sequence for Arsa (NM_009713.1,700-718).
ctaacatcctgctgatctt

SEQ ID NO: 566457 - DNA, 19 bp, Mus musculus
  siRNA target sequence for Arsa (NM_009713.1,804-822).
ggactacggttcacagatt

SEQ ID NO: 566458 - DNA, 19 bp, Mus musculus
  siRNA target sequence for Arsa (NM_009713.1,807-825).
ctacggttcacagatttct

SEQ ID NO: 566459 - DNA, 19 bp, Mus musculus
  siRNA target sequence for Arsa (NM_009713.1,811-829).
ggttcacagatttctatgt

SEQ ID NO: 566460 - DNA, 19 bp, Mus musculus
  siRNA target sequence for Arsa (NM_009713.1,1288-1306).
gaccgttcttcctgtacta

SEQ ID NO: 566461 - DNA, 19 bp, Mus musculus
  siRNA target sequence for Arsa (NM_009713.1,1407-1425).
gctgtaggggccttgatga

SEQ ID NO: 566462 - DNA, 19 bp, Mus musculus
  siRNA target sequence for Arsa (NM_009713.1,1526-1544).
cctcttgagatgtggaaaa

SEQ ID NO: 566463 - DNA, 19 bp, Mus musculus
  siRNA target sequence for Arsa (NM_009713.1,1589-1607).
ctggccaggtcacattact

SEQ ID NO: 566464 - DNA, 19 bp, Mus musculus
  siRNA target sequence for Arsa (NM_009713.1,1801-1819).
ctgttcggaatgggaaata

SEQ ID NO: 566465 - DNA, 19 bp, Mus musculus
  siRNA target sequence for Arsa (NM_009713.1,1803-1821).
gttcggaatgggaaataca

SEQ ID NO: 566466 - DNA, 19 bp, Mus musculus
  siRNA target sequence for Arsa (NM_009713.1,1914-1932).
ccactgctctacgacttat

SEQ ID NO: 566467 - DNA, 19 bp, Mus musculus
  siRNA target sequence for Arsa (NM_009713.1,1942-1960).
ctggggagaactacaatgt

SEQ ID NO: 566468 - DNA, 19 bp, Mus musculus
  siRNA target sequence for C230078M14 (NM_172851.1,966-984).
cacagagttgacttggata

SEQ ID NO: 566469 - DNA, 19 bp, Mus musculus
  siRNA target sequence for C230078M14 (NM_172851.1,1008-1026).
ctatgtcatgaacttaaat

SEQ ID NO: 566470 - DNA, 19 bp, Mus musculus
  siRNA target sequence for C230078M14 (NM_172851.1,1180-1198).
ccttactggggaggttatt

SEQ ID NO: 566471 - DNA, 19 bp, Mus musculus
  siRNA target sequence for C230078M14 (NM_172851.1,1242-1260).
cctggagatgtcaaacgat

SEQ ID NO: 566472 - DNA, 19 bp, Mus musculus
  siRNA target sequence for C230078M14 (NM_172851.1,1243-1261).
ctggagatgtcaaacgata

SEQ ID NO: 566473 - DNA, 19 bp, Mus musculus
  siRNA target sequence for C230078M14 (NM_172851.1,1500-1518).
ggagaccttattacatgta

SEQ ID NO: 566474 - DNA, 19 bp, Mus musculus
  siRNA target sequence for C230078M14 (NM_172851.1,2436-2454).
cagctgtgactccatgata

SEQ ID NO: 566475 - DNA, 19 bp, Mus musculus
  siRNA target sequence for C230078M14 (NM_172851.1,2438-2456).
gctgtgactccatgataga

SEQ ID NO: 566476 - DNA, 19 bp, Mus musculus
  siRNA target sequence for C230078M14 (NM_172851.1,2466-2484).
gactggagtgactactgtt

SEQ ID NO: 566477 - DNA, 19 bp, Mus musculus
  siRNA target sequence for C230078M14 (NM_172851.1,2468-2486).
ctggagtgactactgttta

SEQ ID NO: 566478 - DNA, 19 bp, Mus musculus
  siRNA target sequence for C230078M14 (NM_172851.1,2470-2488).
ggagtgactactgtttatt

SEQ ID NO: 566479 - DNA, 19 bp, Mus musculus
  siRNA target sequence for Calca (NM_007587.1,162-180).
gtgcctttgaggtcaatct

SEQ ID NO: 566480 - DNA, 19 bp, Mus musculus
  siRNA target sequence for Calcb (NM_054084.1,216-234).
cctcggcgaccaggaaaaa

SEQ ID NO: 566481 - DNA, 19 bp, Mus musculus
  siRNA target sequence for Calcb (NM_054084.1,219-237).
cggcgaccaggaaaaacat

SEQ ID NO: 566482 - DNA, 19 bp, Mus musculus
  siRNA target sequence for Calcb (NM_054084.1,221-239).
gcgaccaggaaaaacatct

SEQ ID NO: 566483 - DNA, 19 bp, Mus musculus
  siRNA target sequence for Calcb (NM_054084.1,251-269).
cactgatgcaggactatga

SEQ ID NO: 566484 - DNA, 19 bp, Mus musculus
  siRNA target sequence for Cck (NM_031161.1,246-264).
cactgctagcgcgatacat

SEQ ID NO: 566485 - DNA, 19 bp, Mus musculus
  siRNA target sequence for Cck (NM_031161.1,290-308).
ggccgcatgtccgttctta

SEQ ID NO: 566486 - DNA, 19 bp, Mus musculus
  siRNA target sequence for Cck (NM_031161.1,291-309).
gccgcatgtccgttcttaa

SEQ ID NO: 566487 - DNA, 19 bp, Mus musculus
  siRNA target sequence for Cck (NM_031161.1,293-311).
cgcatgtccgttcttaaga

SEQ ID NO: 566488 - DNA, 19 bp, Mus musculus
  siRNA target sequence for Cck (NM_031161.1,294-312).
gcatgtccgttcttaagaa

SEQ ID NO: 566489 - DNA, 19 bp, Mus musculus
  siRNA target sequence for Cck (NM_031161.1,325-343).
ggaccccagccatagaata

SEQ ID NO: 566490 - DNA, 19 bp, Mus musculus
  siRNA target sequence for Cck (NM_031161.1,328-346).
ccccagccatagaataagt

SEQ ID NO: 566491 - DNA, 19 bp, Mus musculus
  siRNA target sequence for Cck (NM_031161.1,330-348).
ccagccatagaataagtga

SEQ ID NO: 566492 - DNA, 19 bp, Mus musculus
  siRNA target sequence for Cga (NM_009889.1,173-191).
cctgatggagactttatta

SEQ ID NO: 566493 - DNA, 19 bp, Mus musculus
  siRNA target sequence for Cga (NM_009889.1,198-216).
gttgcccagaatgtaaact

SEQ ID NO: 566494 - DNA, 19 bp, Mus musculus
  siRNA target sequence for Cga (NM_009889.1,326-344).
gttccaaagaatattacct

SEQ ID NO: 566495 - DNA, 19 bp, Mus musculus
  siRNA target sequence for Cga (NM_009889.1,357-375).
gctgtgtggccaaagcatt

SEQ ID NO: 566496 - DNA, 19 bp, Mus musculus
  siRNA target sequence for Cga (NM_009889.1,401-419).
gccagagtggagaatcata

SEQ ID NO: 566497 - DNA, 19 bp, Mus musculus
  siRNA target sequence for Cort (NM_007745.2,361-379).
gcccccacacctggataaa

SEQ ID NO: 566498 - DNA, 19 bp, Mus musculus
  siRNA target sequence for Cort (NM_007745.2,363-381).
ccccacacctggataaaaa

SEQ ID NO: 566499 - DNA, 19 bp, Mus musculus
  siRNA target sequence for Csh2 (NM_008865.2,138-156).
ggagaaggtgacttcctta

SEQ ID NO: 566500 - DNA, 19 bp, Mus musculus
  siRNA target sequence for Csh2 (NM_008865.2,152-170).
ccttaccaaattatcgatt

SEQ ID NO: 566501 - DNA, 19 bp, Mus musculus
  siRNA target sequence for Csh2 (NM_008865.2,173-191).
ccactgaaagcctatacca

SEQ ID NO: 566502 - DNA, 19 bp, Mus musculus
  siRNA target sequence for Csh2 (NM_008865.2,174-192).
cactgaaagcctataccaa

SEQ ID NO: 566503 - DNA, 19 bp, Mus musculus
  siRNA target sequence for Csh2 (NM_008865.2,183-201).
cctataccaacgtgtgatt

SEQ ID NO: 566504 - DNA, 19 bp, Mus musculus
  siRNA target sequence for Csh2 (NM_008865.2,209-227).
cacacaacgcccatgatct

SEQ ID NO: 566505 - DNA, 19 bp, Mus musculus
  siRNA target sequence for Csh2 (NM_008865.2,218-236).
cccatgatcttgcttcaaa

SEQ ID NO: 566506 - DNA, 19 bp, Mus musculus
  siRNA target sequence for Csh2 (NM_008865.2,278-296).
ggacctatggcctgatgtt

SEQ ID NO: 566507 - DNA, 19 bp, Mus musculus
  siRNA target sequence for Csh2 (NM_008865.2,279-297).
gacctatggcctgatgtta

SEQ ID NO: 566508 - DNA, 19 bp, Mus musculus
  siRNA target sequence for Csh2 (NM_008865.2,306-324).
ccacactgctgcaatcctt

SEQ ID NO: 566509 - DNA, 19 bp, Mus musculus
  siRNA target sequence for Csh2 (NM_008865.2,373-391).
ctgaaagtgtccatcacta

SEQ ID NO: 566510 - DNA, 19 bp, Mus musculus
  siRNA target sequence for Csh2 (NM_008865.2,375-393).
gaaagtgtccatcactatt

SEQ ID NO: 566511 - DNA, 19 bp, Mus musculus
  siRNA target sequence for Csh2 (NM_008865.2,381-399).
gtccatcactattttacaa

SEQ ID NO: 566512 - DNA, 19 bp, Mus musculus
  siRNA target sequence for Csh2 (NM_008865.2,449-467).
cacatgtacctgatactct

SEQ ID NO: 566513 - DNA, 19 bp, Mus musculus
  siRNA target sequence for Csh2 (NM_008865.2,460-478).
gatactctgctgtcaagaa

SEQ ID NO: 566514 - DNA, 19 bp, Mus musculus
  siRNA target sequence for Csh2 (NM_008865.2,553-571).
gctgttgcaagtgactata

SEQ ID NO: 566515 - DNA, 19 bp, Mus musculus
  siRNA target sequence for Csh2 (NM_008865.2,556-574).
gttgcaagtgactatactt

SEQ ID NO: 566516 - DNA, 19 bp, Mus musculus
  siRNA target sequence for Csh2 (NM_008865.2,624-642).
cagtgctcttagaacctta

SEQ ID NO: 566517 - DNA, 19 bp, Mus musculus
  siRNA target sequence for Csh2 (NM_008865.2,650-668).
gcgtgcgcagggatacaca

SEQ ID NO: 566518 - DNA, 19 bp, Mus musculus
  siRNA target sequence for Csh2 (NM_008865.2,651-669).
cgtgcgcagggatacacat

SEQ ID NO: 566519 - DNA, 19 bp, Mus musculus
  siRNA target sequence for Csh2 (NM_008865.2,652-670).
gtgcgcagggatacacata

SEQ ID NO: 566520 - DNA, 19 bp, Mus musculus
  siRNA target sequence for Csh2 (NM_008865.2,654-672).
gcgcagggatacacataaa

SEQ ID NO: 566521 - DNA, 19 bp, Mus musculus
  siRNA target sequence for Csh2 (NM_008865.2,657-675).
cagggatacacataaagtt

SEQ ID NO: 566522 - DNA, 19 bp, Mus musculus
  siRNA target sequence for Csh2 (NM_008865.2,659-677).
gggatacacataaagttga

SEQ ID NO: 566523 - DNA, 19 bp, Mus musculus
  siRNA target sequence for Csh2 (NM_008865.2,693-711).
cctgaagtgtcgtgatgtt

SEQ ID NO: 566524 - DNA, 19 bp, Mus musculus
  siRNA target sequence for Csh2 (NM_008865.2,696-714).
gaagtgtcgtgatgttcat

SEQ ID NO: 566525 - DNA, 19 bp, Mus musculus
  siRNA target sequence for Csh2 (NM_008865.2,703-721).
cgtgatgttcataacaaca

SEQ ID NO: 566526 - DNA, 19 bp, Mus musculus
  siRNA target sequence for Csh2 (NM_008865.2,704-722).
gtgatgttcataacaacaa

SEQ ID NO: 566527 - DNA, 19 bp, Mus musculus
  siRNA target sequence for Csh2 (NM_008865.2,706-724).
gatgttcataacaacaact

SEQ ID NO: 566528 - DNA, 19 bp, Mus musculus
  siRNA target sequence for D13Wsu14e (NM_023746.3,63-81).
gcggctgtctaagattcaa

SEQ ID NO: 566529 - DNA, 19 bp, Mus musculus
  siRNA target sequence for D13Wsu14e (NM_023746.3,145-163).
gcctctgtgcccagatgta

SEQ ID NO: 566530 - DNA, 19 bp, Mus musculus
  siRNA target sequence for D13Wsu14e (NM_023746.3,149-167).
ctgtgcccagatgtatcat

SEQ ID NO: 566531 - DNA, 19 bp, Mus musculus
  siRNA target sequence for D13Wsu14e (NM_023746.3,182-200).
gccagaaggtcctcaacta

SEQ ID NO: 566532 - DNA, 19 bp, Mus musculus
  siRNA target sequence for D13Wsu14e (NM_023746.3,186-204).
gaaggtcctcaactacatt

SEQ ID NO: 566533 - DNA, 19 bp, Mus musculus
  siRNA target sequence for D13Wsu14e (NM_023746.3,221-239).
ccatatctgagaacttcaa

SEQ ID NO: 566534 - DNA, 19 bp, Mus musculus
  siRNA target sequence for D13Wsu14e (NM_023746.3,337-355).
cgctctgtcccaaacaaca

SEQ ID NO: 566535 - DNA, 19 bp, Mus musculus
  siRNA target sequence for D13Wsu14e (NM_023746.3,382-400).
gtggtgcttctgaatgtga

SEQ ID NO: 566536 - DNA, 19 bp, Mus musculus
  siRNA target sequence for D13Wsu14e (NM_023746.3,429-447).
ccttctgcaccatgtagaa

SEQ ID NO: 566537 - DNA, 19 bp, Mus musculus
  siRNA target sequence for D13Wsu14e (NM_023746.3,436-454).
caccatgtagaaaacaaca

SEQ ID NO: 566538 - DNA, 19 bp, Mus musculus
  siRNA target sequence for D13Wsu14e (NM_023746.3,465-483).
cgatggaactccttatgtt

SEQ ID NO: 566539 - DNA, 19 bp, Mus musculus
  siRNA target sequence for D13Wsu14e (NM_023746.3,466-484).
gatggaactccttatgtta

SEQ ID NO: 566540 - DNA, 19 bp, Mus musculus
  siRNA target sequence for D13Wsu14e (NM_023746.3,469-487).
ggaactccttatgttatca

SEQ ID NO: 566541 - DNA, 19 bp, Mus musculus
  siRNA target sequence for D13Wsu14e (NM_023746.3,470-488).
gaactccttatgttatcat

SEQ ID NO: 566542 - DNA, 19 bp, Mus musculus
  siRNA target sequence for D13Wsu14e (NM_023746.3,491-509).
caaaagttaagttgattga

SEQ ID NO: 566543 - DNA, 19 bp, Mus musculus
  siRNA target sequence for D13Wsu14e (NM_023746.3,554-572).
ctatactcagccaggttaa

SEQ ID NO: 566544 - DNA, 19 bp, Mus musculus
  siRNA target sequence for D13Wsu14e (NM_023746.3,568-586).
gttaatcctgaccttaaga

SEQ ID NO: 566545 - DNA, 19 bp, Mus musculus
  siRNA target sequence for D13Wsu14e (NM_023746.3,609-627).
gtcaggagagccatatgta

SEQ ID NO: 566546 - DNA, 19 bp, Mus musculus
  siRNA target sequence for D13Wsu14e (NM_023746.3,611-629).
caggagagccatatgtaca

SEQ ID NO: 566547 - DNA, 19 bp, Mus musculus
  siRNA target sequence for D13Wsu14e (NM_023746.3,649-667).
caactttttggtttgcata

SEQ ID NO: 566548 - DNA, 19 bp, Mus musculus
  siRNA target sequence for D13Wsu14e (NM_023746.3,719-737).
gtatcctgagagaccaaat

SEQ ID NO: 566549 - DNA, 19 bp, Mus musculus
  siRNA target sequence for D13Wsu14e (NM_023746.3,733-751).
caaattgtgcctaatcaat

SEQ ID NO: 566550 - DNA, 19 bp, Mus musculus
  siRNA target sequence for Dtprp (NM_010088.1,275-293).
ctggacaatttgaaacact

SEQ ID NO: 566551 - DNA, 19 bp, Mus musculus
  siRNA target sequence for Dtprp (NM_010088.1,338-356).
gaaatcactgccactctaa

SEQ ID NO: 566552 - DNA, 19 bp, Mus musculus
  siRNA target sequence for Dtprp (NM_010088.1,343-361).
cactgccactctaatgtca

SEQ ID NO: 566553 - DNA, 19 bp, Mus musculus
  siRNA target sequence for Dtprp (NM_010088.1,383-401).
ctgaacatgaaaatctcaa

SEQ ID NO: 566554 - DNA, 19 bp, Mus musculus
  siRNA target sequence for Dtprp (NM_010088.1,443-461).
catggatcactcctgtata

SEQ ID NO: 566555 - DNA, 19 bp, Mus musculus
  siRNA target sequence for Dtprp (NM_010088.1,446-464).
ggatcactcctgtatacta

SEQ ID NO: 566556 - DNA, 19 bp, Mus musculus
  siRNA target sequence for Dtprp (NM_010088.1,447-465).
gatcactcctgtatactat

SEQ ID NO: 566557 - DNA, 19 bp, Mus musculus
  siRNA target sequence for Dtprp (NM_010088.1,499-517).
cctgaatcaatctactcaa

SEQ ID NO: 566558 - DNA, 19 bp, Mus musculus
  siRNA target sequence for Dtprp (NM_010088.1,500-518).
ctgaatcaatctactcaaa

SEQ ID NO: 566559 - DNA, 19 bp, Mus musculus
  siRNA target sequence for Dtprp (NM_010088.1,566-584).
cgtgggtactcaaaaaggt

SEQ ID NO: 566560 - DNA, 19 bp, Mus musculus
  siRNA target sequence for Dtprp (NM_010088.1,576-594).
caaaaaggtctatcctaaa

SEQ ID NO: 566561 - DNA, 19 bp, Mus musculus
  siRNA target sequence for Dtprp (NM_010088.1,583-601).
gtctatcctaaagtaacat

SEQ ID NO: 566562 - DNA, 19 bp, Mus musculus
  siRNA target sequence for Dtprp (NM_010088.1,585-603).
ctatcctaaagtaacattt

SEQ ID NO: 566563 - DNA, 19 bp, Mus musculus
  siRNA target sequence for Dtprp (NM_010088.1,630-648).
ccttccaggcctaagatca

SEQ ID NO: 566564 - DNA, 19 bp, Mus musculus
  siRNA target sequence for Dtprp (NM_010088.1,644-662).
gatcaactgacacaagtaa

SEQ ID NO: 566565 - DNA, 19 bp, Mus musculus
  siRNA target sequence for Dtprp (NM_010088.1,647-665).
caactgacacaagtaaaaa

SEQ ID NO: 566566 - DNA, 19 bp, Mus musculus
  siRNA target sequence for Dtprp (NM_010088.1,691-709).
cactgcctacgcgttgata

SEQ ID NO: 566567 - DNA, 19 bp, Mus musculus
  siRNA target sequence for Dtprp (NM_010088.1,693-711).
ctgcctacgcgttgatata

SEQ ID NO: 566568 - DNA, 19 bp, Mus musculus
  siRNA target sequence for Dtprp (NM_010088.1,695-713).
gcctacgcgttgatatatt

SEQ ID NO: 566569 - DNA, 19 bp, Mus musculus
  siRNA target sequence for Dtprp (NM_010088.1,697-715).
ctacgcgttgatatattct

SEQ ID NO: 566570 - DNA, 19 bp, Mus musculus
  siRNA target sequence for Dtprp (NM_010088.1,700-718).
cgcgttgatatattcttca

SEQ ID NO: 566571 - DNA, 19 bp, Mus musculus
  siRNA target sequence for Dtprp (NM_010088.1,701-719).
gcgttgatatattcttcat

SEQ ID NO: 566572 - DNA, 19 bp, Mus musculus
  siRNA target sequence for Dtprp (NM_010088.1,703-721).
gttgatatattcttcatta

SEQ ID NO: 566573 - DNA, 19 bp, Mus musculus
  siRNA target sequence for Dtprp (NM_010088.1,727-745).
catctcagtgcattgatgt

SEQ ID NO: 566574 - DNA, 19 bp, Mus musculus
  siRNA target sequence for E330017M15 (NM_173773.1,519-537).
gagtgctcgatttaaggaa

SEQ ID NO: 566575 - DNA, 19 bp, Mus musculus
  siRNA target sequence for E330017M15 (NM_173773.1,523-541).
gctcgatttaaggaatgaa

SEQ ID NO: 566576 - DNA, 19 bp, Mus musculus
  siRNA target sequence for E330017M15 (NM_173773.1,524-542).
ctcgatttaaggaatgaat

SEQ ID NO: 566577 - DNA, 19 bp, Mus musculus
  siRNA target sequence for E330017M15 (NM_173773.1,682-700).
cgtggatggtggacttgat

SEQ ID NO: 566578 - DNA, 19 bp, Mus musculus
  siRNA target sequence for E330017M15 (NM_173773.1,685-703).
ggatggtggacttgatgaa

SEQ ID NO: 566579 - DNA, 19 bp, Mus musculus
  siRNA target sequence for E330017M15 (NM_173773.1,755-773).
ctatgctgtacgatgttga

SEQ ID NO: 566580 - DNA, 19 bp, Mus musculus
  siRNA target sequence for E330017M15 (NM_173773.1,759-777).
gctgtacgatgttgagaat

SEQ ID NO: 566581 - DNA, 19 bp, Mus musculus
  siRNA target sequence for E330017M15 (NM_173773.1,760-778).
ctgtacgatgttgagaatt

SEQ ID NO: 566582 - DNA, 19 bp, Mus musculus
  siRNA target sequence for E330017M15 (NM_173773.1,762-780).
gtacgatgttgagaattca

SEQ ID NO: 566583 - DNA, 19 bp, Mus musculus
  siRNA target sequence for E330017M15 (NM_173773.1,779-797).
catagcttacccaaagaca

SEQ ID NO: 566584 - DNA, 19 bp, Mus musculus
  siRNA target sequence for E330017M15 (NM_173773.1,783-801).
gcttacccaaagacatatt

SEQ ID NO: 566585 - DNA, 19 bp, Mus musculus
  siRNA target sequence for E330017M15 (NM_173773.1,804-822).
gagatatcctcaaaattgt

SEQ ID NO: 566586 - DNA, 19 bp, Mus musculus
  siRNA target sequence for E330017M15 (NM_173773.1,845-863).
cttcacttgaaggaattgt

SEQ ID NO: 566587 - DNA, 19 bp, Mus musculus
  siRNA target sequence for E330017M15 (NM_173773.1,848-866).
cacttgaaggaattgtaca

SEQ ID NO: 566588 - DNA, 19 bp, Mus musculus
  siRNA target sequence for E330017M15 (NM_173773.1,914-932).
cttcttacattcatgctaa

SEQ ID NO: 566589 - DNA, 19 bp, Mus musculus
  siRNA target sequence for E330017M15 (NM_173773.1,929-947).
ctaagtagcatcagagaaa

SEQ ID NO: 566590 - DNA, 19 bp, Mus musculus
  siRNA target sequence for E330017M15 (NM_173773.1,944-962).
gaaacctgcagaatggata

SEQ ID NO: 566591 - DNA, 19 bp, Mus musculus
  siRNA target sequence for E330017M15 (NM_173773.1,983-1001).
gagaatataagcaggttta

SEQ ID NO: 566592 - DNA, 19 bp, Mus musculus
  siRNA target sequence for E330017M15 (NM_173773.1,985-1003).
gaatataagcaggtttatt

SEQ ID NO: 566593 - DNA, 19 bp, Mus musculus
  siRNA target sequence for E330017M15 (NM_173773.1,1005-1023).
ctcgccttcccaaattcca

SEQ ID NO: 566594 - DNA, 19 bp, Mus musculus
  siRNA target sequence for E330017M15 (NM_173773.1,1065-1083).
gaaacaacctgaaagactt

SEQ ID NO: 566595 - DNA, 19 bp, Mus musculus
  siRNA target sequence for E330017M15 (NM_173773.1,1125-1143).
cttcttgtgacttatcaca

SEQ ID NO: 566596 - DNA, 19 bp, Mus musculus
  siRNA target sequence for E330017M15 (NM_173773.1,1162-1180).
gccctgttgccagaatact

SEQ ID NO: 566597 - DNA, 19 bp, Mus musculus
  siRNA target sequence for E330017M15 (NM_173773.1,1163-1181).
ccctgttgccagaatactt

SEQ ID NO: 566598 - DNA, 19 bp, Mus musculus
  siRNA target sequence for E330017M15 (NM_173773.1,1165-1183).
ctgttgccagaatacttct

SEQ ID NO: 566599 - DNA, 19 bp, Mus musculus
  siRNA target sequence for E330017M15 (NM_173773.1,1174-1192).
gaatacttctgcactcaaa

SEQ ID NO: 566600 - DNA, 19 bp, Mus musculus
  siRNA target sequence for E330017M15 (NM_173773.1,1198-1216).
gaacctgactgctacaagt

SEQ ID NO: 566601 - DNA, 19 bp, Mus musculus
  siRNA target sequence for E330017M15 (NM_173773.1,1212-1230).
caagtttgcgtggtttagt

SEQ ID NO: 566602 - DNA, 19 bp, Mus musculus
  siRNA target sequence for E330017M15 (NM_173773.1,1215-1233).
gtttgcgtggtttagtctt

SEQ ID NO: 566603 - DNA, 19 bp, Mus musculus
  siRNA target sequence for E330017M15 (NM_173773.1,1219-1237).
gcgtggtttagtctttcat

SEQ ID NO: 566604 - DNA, 19 bp, Mus musculus
  siRNA target sequence for E330017M15 (NM_173773.1,1396-1414).
gcctatcctgagacaactt

SEQ ID NO: 566605 - DNA, 19 bp, Mus musculus
  siRNA target sequence for E330017M15 (NM_173773.1,1398-1416).
ctatcctgagacaacttct

SEQ ID NO: 566606 - DNA, 19 bp, Mus musculus
  siRNA target sequence for E330017M15 (NM_173773.1,1476-1494).
gctataatgacatgaatat

SEQ ID NO: 566607 - DNA, 19 bp, Mus musculus
  siRNA target sequence for E330017M15 (NM_173773.1,1499-1517).
ctaacacataagttagaaa

SEQ ID NO: 566608 - DNA, 19 bp, Mus musculus
  siRNA target sequence for E330017M15 (NM_173773.1,1580-1598).
gctacatccaaatgtttaa

SEQ ID NO: 566609 - DNA, 19 bp, Mus musculus
  siRNA target sequence for E330017M15 (NM_173773.1,1641-1659).
gcctataccagaaagatct

SEQ ID NO: 566610 - DNA, 19 bp, Mus musculus
  siRNA target sequence for Fshb (NM_008045.2,115-133).
gctgccatagctgtgaatt

SEQ ID NO: 566611 - DNA, 19 bp, Mus musculus
  siRNA target sequence for Fshb (NM_008045.2,165-183).
gagtgccgtttctgcataa

SEQ ID NO: 566612 - DNA, 19 bp, Mus musculus
  siRNA target sequence for Fshb (NM_008045.2,204-222).
gcgggctactgctacacta

SEQ ID NO: 566613 - DNA, 19 bp, Mus musculus
  siRNA target sequence for Fshb (NM_008045.2,220-238).
ctagggatctggtgtataa

SEQ ID NO: 566614 - DNA, 19 bp, Mus musculus
  siRNA target sequence for Fshb (NM_008045.2,251-269).
gcccaatacccagaaagta

SEQ ID NO: 566615 - DNA, 19 bp, Mus musculus
  siRNA target sequence for Fshb (NM_008045.2,254-272).
caatacccagaaagtatgt

SEQ ID NO: 566616 - DNA, 19 bp, Mus musculus
  siRNA target sequence for Fshb (NM_008045.2,288-306).
gtatacgagaccgtaagat

SEQ ID NO: 566617 - DNA, 19 bp, Mus musculus
  siRNA target sequence for Gal (NM_010253.2,277-295).
gcccacatgccattgacaa

SEQ ID NO: 566618 - DNA, 19 bp, Mus musculus
  siRNA target sequence for Gal (NM_010253.2,291-309).
gacaaccacagatcattta

SEQ ID NO: 566619 - DNA, 19 bp, Mus musculus
  siRNA target sequence for Gal (NM_010253.2,331-349).
gcaagagggagttacaact

SEQ ID NO: 566620 - DNA, 19 bp, Mus musculus
  siRNA target sequence for Gal (NM_010253.2,389-407).
cctgcctgagagcaacatt

SEQ ID NO: 566621 - DNA, 19 bp, Mus musculus
  siRNA target sequence for Gal (NM_010253.2,401-419).
caacattgtccgcactata

SEQ ID NO: 566622 - DNA, 19 bp, Mus musculus
  siRNA target sequence for Gal (NM_010253.2,412-430).
gcactataatggagtttct

SEQ ID NO: 566623 - DNA, 19 bp, Mus musculus
  siRNA target sequence for Galp (NM_178028.2,355-373).
ggaggctggaccctcaata

SEQ ID NO: 566624 - DNA, 19 bp, Mus musculus
  siRNA target sequence for Galp (NM_178028.2,534-552).
gtttgtcaaagcgaatact

SEQ ID NO: 566625 - DNA, 19 bp, Mus musculus
  siRNA target sequence for Galp (NM_178028.2,551-569).
ctggagatatgcacatact

SEQ ID NO: 566626 - DNA, 19 bp, Mus musculus
  siRNA target sequence for Galp (NM_178028.2,561-579).
gcacatactggacaagaat

SEQ ID NO: 566627 - DNA, 19 bp, Mus musculus
  siRNA target sequence for Gcg (NM_008100.2,280-298).
gcgactacagcaaatacct

SEQ ID NO: 566628 - DNA, 19 bp, Mus musculus
  siRNA target sequence for Gcg (NM_008100.2,324-342).
gtgcagtggttgatgaaca

SEQ ID NO: 566629 - DNA, 19 bp, Mus musculus
  siRNA target sequence for Gcg (NM_008100.2,347-365).
gaggaaccggaacaacatt

SEQ ID NO: 566630 - DNA, 19 bp, Mus musculus
  siRNA target sequence for Gcg (NM_008100.2,366-384).
gccaaacgtcatgatgaat

SEQ ID NO: 566631 - DNA, 19 bp, Mus musculus
  siRNA target sequence for Gcg (NM_008100.2,367-385).
ccaaacgtcatgatgaatt

SEQ ID NO: 566632 - DNA, 19 bp, Mus musculus
  siRNA target sequence for Gcg (NM_008100.2,368-386).
caaacgtcatgatgaattt

SEQ ID NO: 566633 - DNA, 19 bp, Mus musculus
  siRNA target sequence for Gcg (NM_008100.2,372-390).
cgtcatgatgaatttgaga

SEQ ID NO: 566634 - DNA, 19 bp, Mus musculus
  siRNA target sequence for Gcg (NM_008100.2,393-411).
catgctgaagggaccttta

SEQ ID NO: 566635 - DNA, 19 bp, Mus musculus
  siRNA target sequence for Gcg (NM_008100.2,396-414).
gctgaagggacctttacca

SEQ ID NO: 566636 - DNA, 19 bp, Mus musculus
  siRNA target sequence for Gcg (NM_008100.2,602-620).
catcaactggctgattcaa

SEQ ID NO: 566637 - DNA, 19 bp, Mus musculus
  siRNA target sequence for Gh (NM_008117.1,152-170).
cccttgtccagtctgtttt

SEQ ID NO: 566638 - DNA, 19 bp, Mus musculus
  siRNA target sequence for Gh (NM_008117.1,157-175).
gtccagtctgttttctaat

SEQ ID NO: 566639 - DNA, 19 bp, Mus musculus
  siRNA target sequence for Gh (NM_008117.1,212-230).
gctgacacctacaaagagt

SEQ ID NO: 566640 - DNA, 19 bp, Mus musculus
  siRNA target sequence for Gh (NM_008117.1,229-247).
gttcgagcgtgcctacatt

SEQ ID NO: 566641 - DNA, 19 bp, Mus musculus
  siRNA target sequence for Gh (NM_008117.1,251-269).
gagggacagcgctattcca

SEQ ID NO: 566642 - DNA, 19 bp, Mus musculus
  siRNA target sequence for Gh (NM_008117.1,253-271).
gggacagcgctattccatt

SEQ ID NO: 566643 - DNA, 19 bp, Mus musculus
  siRNA target sequence for Gh (NM_008117.1,257-275).
cagcgctattccattcaga

SEQ ID NO: 566644 - DNA, 19 bp, Mus musculus
  siRNA target sequence for Gh (NM_008117.1,259-277).
gcgctattccattcagaat

SEQ ID NO: 566645 - DNA, 19 bp, Mus musculus
  siRNA target sequence for Gh (NM_008117.1,341-359).
cagagaaccgacatggaat

SEQ ID NO: 566646 - DNA, 19 bp, Mus musculus
  siRNA target sequence for Gh (NM_008117.1,345-363).
gaaccgacatggaattgct

SEQ ID NO: 566647 - DNA, 19 bp, Mus musculus
  siRNA target sequence for Gh (NM_008117.1,450-468).
cctcggaccgtgtctatga

SEQ ID NO: 566648 - DNA, 19 bp, Mus musculus
  siRNA target sequence for Gh (NM_008117.1,539-557).
gggcagatcctcaagcaaa

SEQ ID NO: 566649 - DNA, 19 bp, Mus musculus
  siRNA target sequence for Gh (NM_008117.1,548-566).
ctcaagcaaacctatgaca

SEQ ID NO: 566650 - DNA, 19 bp, Mus musculus
  siRNA target sequence for Gh (NM_008117.1,590-608).
gacgacgcgctgctcaaaa

SEQ ID NO: 566651 - DNA, 19 bp, Mus musculus
  siRNA target sequence for Gh (NM_008117.1,593-611).
gacgcgctgctcaaaaact

SEQ ID NO: 566652 - DNA, 19 bp, Mus musculus
  siRNA target sequence for Gh (NM_008117.1,657-675).
cctacctgcgggtcatgaa

SEQ ID NO: 566653 - DNA, 19 bp, Mus musculus
  siRNA target sequence for Ghrh (NM_010285.1,363-381).
ctgtatgcccggaaagtga

SEQ ID NO: 566654 - DNA, 19 bp, Mus musculus
  siRNA target sequence for Gip (NM_008119.2,183-201).
gttccgatcccatgctaaa

SEQ ID NO: 566655 - DNA, 19 bp, Mus musculus
  siRNA target sequence for Gip (NM_008119.2,186-204).
ccgatcccatgctaaattt

SEQ ID NO: 566656 - DNA, 19 bp, Mus musculus
  siRNA target sequence for Gip (NM_008119.2,241-259).
gggactttcatcagtgatt

SEQ ID NO: 566657 - DNA, 19 bp, Mus musculus
  siRNA target sequence for Gip (NM_008119.2,242-260).
ggactttcatcagtgatta

SEQ ID NO: 566658 - DNA, 19 bp, Mus musculus
  siRNA target sequence for Gip (NM_008119.2,273-291).
ggacaagatccgacaacaa

SEQ ID NO: 566659 - DNA, 19 bp, Mus musculus
  siRNA target sequence for Gip (NM_008119.2,459-477).
gctgagagaccttctgatt

SEQ ID NO: 566660 - DNA, 19 bp, Mus musculus
  siRNA target sequence for Gip (NM_008119.2,462-480).
gagagaccttctgattcaa

SEQ ID NO: 566661 - DNA, 19 bp, Mus musculus
  siRNA target sequence for Gip (NM_008119.2,464-482).
gagaccttctgattcaaga

SEQ ID NO: 566662 - DNA, 19 bp, Mus musculus
  siRNA target sequence for Gip (NM_008119.2,494-512).
ggatggtggaccaaacaga

SEQ ID NO: 566663 - DNA, 19 bp, Mus musculus
  siRNA target sequence for Gpha2 (NM_130453.2,261-279).
ggctatcggcacaacatca

SEQ ID NO: 566664 - DNA, 19 bp, Mus musculus
  siRNA target sequence for Gpha2 (NM_130453.2,382-400).
gggcctgccagtgtgatat

SEQ ID NO: 566665 - DNA, 19 bp, Mus musculus
  siRNA target sequence for Grtp1 (NM_025768.1,59-77).
cgatccgtatgggtttgaa

SEQ ID NO: 566666 - DNA, 19 bp, Mus musculus
  siRNA target sequence for Grtp1 (NM_025768.1,60-78).
gatccgtatgggtttgaaa

SEQ ID NO: 566667 - DNA, 19 bp, Mus musculus
  siRNA target sequence for Grtp1 (NM_025768.1,79-97).
ggcccgaagactttgacta

SEQ ID NO: 566668 - DNA, 19 bp, Mus musculus
  siRNA target sequence for Grtp1 (NM_025768.1,80-98).
gcccgaagactttgactat

SEQ ID NO: 566669 - DNA, 19 bp, Mus musculus
  siRNA target sequence for Grtp1 (NM_025768.1,99-117).
gcggcttatgaagaattct

SEQ ID NO: 566670 - DNA, 19 bp, Mus musculus
  siRNA target sequence for Grtp1 (NM_025768.1,100-118).
cggcttatgaagaattctt

SEQ ID NO: 566671 - DNA, 19 bp, Mus musculus
  siRNA target sequence for Grtp1 (NM_025768.1,101-119).
ggcttatgaagaattcttt

SEQ ID NO: 566672 - DNA, 19 bp, Mus musculus
  siRNA target sequence for Grtp1 (NM_025768.1,121-139).
ccacgtacctggtgatact

SEQ ID NO: 566673 - DNA, 19 bp, Mus musculus
  siRNA target sequence for Grtp1 (NM_025768.1,155-173).
caaatggtccaaacttcta

SEQ ID NO: 566674 - DNA, 19 bp, Mus musculus
  siRNA target sequence for Grtp1 (NM_025768.1,383-401).
ccctgacaacgtgatgttt

SEQ ID NO: 566675 - DNA, 19 bp, Mus musculus
  siRNA target sequence for Grtp1 (NM_025768.1,537-555).
ctgacaggaatgaatttca

SEQ ID NO: 566676 - DNA, 19 bp, Mus musculus
  siRNA target sequence for Grtp1 (NM_025768.1,558-576).
gctgggtatctgatcctta

SEQ ID NO: 566677 - DNA, 19 bp, Mus musculus
  siRNA target sequence for Grtp1 (NM_025768.1,559-577).
ctgggtatctgatccttat

SEQ ID NO: 566678 - DNA, 19 bp, Mus musculus
  siRNA target sequence for Grtp1 (NM_025768.1,561-579).
gggtatctgatccttatca

SEQ ID NO: 566679 - DNA, 19 bp, Mus musculus
  siRNA target sequence for Grtp1 (NM_025768.1,569-587).
gatccttatcacgaagaat

SEQ ID NO: 566680 - DNA, 19 bp, Mus musculus
  siRNA target sequence for Grtp1 (NM_025768.1,572-590).
ccttatcacgaagaatgaa

SEQ ID NO: 566681 - DNA, 19 bp, Mus musculus
  siRNA target sequence for Grtp1 (NM_025768.1,625-643).
gaaggatactacctgatta

SEQ ID NO: 566682 - DNA, 19 bp, Mus musculus
  siRNA target sequence for Grtp1 (NM_025768.1,628-646).
ggatactacctgattacta

SEQ ID NO: 566683 - DNA, 19 bp, Mus musculus
  siRNA target sequence for Grtp1 (NM_025768.1,629-647).
gatactacctgattactat

SEQ ID NO: 566684 - DNA, 19 bp, Mus musculus
  siRNA target sequence for Grtp1 (NM_025768.1,765-783).
gtgtcccgctggttcatct

SEQ ID NO: 566685 - DNA, 19 bp, Mus musculus
  siRNA target sequence for Grtp1 (NM_025768.1,867-885).
cgggttgctctgaccttaa

SEQ ID NO: 566686 - DNA, 19 bp, Mus musculus
  siRNA target sequence for Grtp1 (NM_025768.1,868-886).
gggttgctctgaccttaat

SEQ ID NO: 566687 - DNA, 19 bp, Mus musculus
  siRNA target sequence for Grtp1 (NM_025768.1,869-887).
ggttgctctgaccttaatt

SEQ ID NO: 566688 - DNA, 19 bp, Mus musculus
  siRNA target sequence for Grtp1 (NM_025768.1,976-994).
cagagtgtcacgcattcat

SEQ ID NO: 566689 - DNA, 19 bp, Mus musculus
  siRNA target sequence for Iapp (NM_010491.1,238-256).
gcctggcaaactttttggt

SEQ ID NO: 566690 - DNA, 19 bp, Mus musculus
  siRNA target sequence for Iapp (NM_010491.1,296-314).
caacgtgggatcgaataca

SEQ ID NO: 566691 - DNA, 19 bp, Mus musculus
  siRNA target sequence for Iapp (NM_010491.1,299-317).
cgtgggatcgaatacatat

SEQ ID NO: 566692 - DNA, 19 bp, Mus musculus
  siRNA target sequence for Iapp (NM_010491.1,330-348).
gcggcaggggatccaaata

SEQ ID NO: 566693 - DNA, 19 bp, Mus musculus
  siRNA target sequence for Insl5 (NM_011831.1,85-103).
gctgtggtggaagtaagaa

SEQ ID NO: 566694 - DNA, 19 bp, Mus musculus
  siRNA target sequence for Insl5 (NM_011831.1,132-150).
ggactacgtgagaacagtt

SEQ ID NO: 566695 - DNA, 19 bp, Mus musculus
  siRNA target sequence for Insl5 (NM_011831.1,139-157).
gtgagaacagttatctaca

SEQ ID NO: 566696 - DNA, 19 bp, Mus musculus
  siRNA target sequence for Insl6 (NM_013754.1,107-125).
ggcacctgctgatagaagt

SEQ ID NO: 566697 - DNA, 19 bp, Mus musculus
  siRNA target sequence for Insl6 (NM_013754.1,109-127).
cacctgctgatagaagtta

SEQ ID NO: 566698 - DNA, 19 bp, Mus musculus
  siRNA target sequence for Insl6 (NM_013754.1,111-129).
cctgctgatagaagttata

SEQ ID NO: 566699 - DNA, 19 bp, Mus musculus
  siRNA target sequence for Insl6 (NM_013754.1,112-130).
ctgctgatagaagttataa

SEQ ID NO: 566700 - DNA, 19 bp, Mus musculus
  siRNA target sequence for Insl6 (NM_013754.1,171-189).
ggagcaaagtcctatgaca

SEQ ID NO: 566701 - DNA, 19 bp, Mus musculus
  siRNA target sequence for Insl6 (NM_013754.1,326-344).
cactgcccgactatcagtt

SEQ ID NO: 566702 - DNA, 19 bp, Mus musculus
  siRNA target sequence for Insl6 (NM_013754.1,330-348).
gcccgactatcagtttgaa

SEQ ID NO: 566703 - DNA, 19 bp, Mus musculus
  siRNA target sequence for Insl6 (NM_013754.1,331-349).
cccgactatcagtttgaaa

SEQ ID NO: 566704 - DNA, 19 bp, Mus musculus
  siRNA target sequence for Insl6 (NM_013754.1,394-412).
ggcaagccctatgttaaga

SEQ ID NO: 566705 - DNA, 19 bp, Mus musculus
  siRNA target sequence for Insl6 (NM_013754.1,413-431).
gcgtacaacttcagaagaa

SEQ ID NO: 566706 - DNA, 19 bp, Mus musculus
  siRNA target sequence for Insl6 (NM_013754.1,414-432).
cgtacaacttcagaagaaa

SEQ ID NO: 566707 - DNA, 19 bp, Mus musculus
  siRNA target sequence for Insl6 (NM_013754.1,437-455).
cgaacaaaatgaatacctt

SEQ ID NO: 566708 - DNA, 19 bp, Mus musculus
  siRNA target sequence for Insl6 (NM_013754.1,522-540).
gataggatgcaccaaagaa

SEQ ID NO: 566709 - DNA, 19 bp, Mus musculus
  siRNA target sequence for Insl6 (NM_013754.1,557-575).
gcctcccctttgttgattt

SEQ ID NO: 566710 - DNA, 19 bp, Mus musculus
  siRNA target sequence for Lhb (NM_008497.1,104-122).
ctctggccgcagagaatga

SEQ ID NO: 566711 - DNA, 19 bp, Mus musculus
  siRNA target sequence for Lhb (NM_008497.1,283-301).
ggtgtagaccccatagtct

SEQ ID NO: 566712 - DNA, 19 bp, Mus musculus
  siRNA target sequence for Nppb (NM_008726.2,185-203).
ctccagagcaattcaagat

SEQ ID NO: 566713 - DNA, 19 bp, Mus musculus
  siRNA target sequence for Nppb (NM_008726.2,213-231).
gctggagctgataagagaa

SEQ ID NO: 566714 - DNA, 19 bp, Mus musculus
  siRNA target sequence for Nppb (NM_008726.2,227-245).
gagaaaagtcggaggaaat

SEQ ID NO: 566715 - DNA, 19 bp, Mus musculus
  siRNA target sequence for Nppb (NM_008726.2,375-393).
ctgctttgggcacaagata

SEQ ID NO: 566716 - DNA, 19 bp, Mus musculus
  siRNA target sequence for Nppb (NM_008726.2,422-440).
gctgtaacgcactgaagtt

SEQ ID NO: 566717 - DNA, 19 bp, Mus musculus
  siRNA target sequence for Nppb (NM_008726.2,425-443).
gtaacgcactgaagttgtt

SEQ ID NO: 566718 - DNA, 19 bp, Mus musculus
  siRNA target sequence for Npy (NM_023456.2,222-240).
ccgctctgcgacactacat

SEQ ID NO: 566719 - DNA, 19 bp, Mus musculus
  siRNA target sequence for Npy (NM_023456.2,224-242).
gctctgcgacactacatca

SEQ ID NO: 566720 - DNA, 19 bp, Mus musculus
  siRNA target sequence for Npy (NM_023456.2,225-243).
ctctgcgacactacatcaa

SEQ ID NO: 566721 - DNA, 19 bp, Mus musculus
  siRNA target sequence for Npy (NM_023456.2,230-248).
cgacactacatcaatctca

SEQ ID NO: 566722 - DNA, 19 bp, Mus musculus
  siRNA target sequence for Npy (NM_023456.2,247-265).
catcaccagacagagatat

SEQ ID NO: 566723 - DNA, 19 bp, Mus musculus
  siRNA target sequence for Npy (NM_023456.2,277-295).
cagccctgagacactgatt

SEQ ID NO: 566724 - DNA, 19 bp, Mus musculus
  siRNA target sequence for Npy (NM_023456.2,280-298).
ccctgagacactgatttca

SEQ ID NO: 566725 - DNA, 19 bp, Mus musculus
  siRNA target sequence for Npy (NM_023456.2,299-317).
gacctcttaatgaaggaaa

SEQ ID NO: 566726 - DNA, 19 bp, Mus musculus
  siRNA target sequence for Plfr (NM_011120.1,252-270).
gtaatcatgcgcaaagaat

SEQ ID NO: 566727 - DNA, 19 bp, Mus musculus
  siRNA target sequence for Plfr (NM_011120.1,287-305).
ctcttcagagacgttcaat

SEQ ID NO: 566728 - DNA, 19 bp, Mus musculus
  siRNA target sequence for Plfr (NM_011120.1,289-307).
cttcagagacgttcaataa

SEQ ID NO: 566729 - DNA, 19 bp, Mus musculus
  siRNA target sequence for Plfr (NM_011120.1,296-314).
gacgttcaataagattata

SEQ ID NO: 566730 - DNA, 19 bp, Mus musculus
  siRNA target sequence for Plfr (NM_011120.1,302-320).
caataagattatattagat

SEQ ID NO: 566731 - DNA, 19 bp, Mus musculus
  siRNA target sequence for Plfr (NM_011120.1,326-344).
caagagtacggagaatata

SEQ ID NO: 566732 - DNA, 19 bp, Mus musculus
  siRNA target sequence for Plfr (NM_011120.1,377-395).
catcaacgttcctgaaaca

SEQ ID NO: 566733 - DNA, 19 bp, Mus musculus
  siRNA target sequence for Plfr (NM_011120.1,399-417).
gaggatgtccgaaagacat

SEQ ID NO: 566734 - DNA, 19 bp, Mus musculus
  siRNA target sequence for Plfr (NM_011120.1,407-425).
ccgaaagacatcgtttgaa

SEQ ID NO: 566735 - DNA, 19 bp, Mus musculus
  siRNA target sequence for Plfr (NM_011120.1,409-427).
gaaagacatcgtttgaaga

SEQ ID NO: 566736 - DNA, 19 bp, Mus musculus
  siRNA target sequence for Plfr (NM_011120.1,413-431).
gacatcgtttgaagagttt

SEQ ID NO: 566737 - DNA, 19 bp, Mus musculus
  siRNA target sequence for Plfr (NM_011120.1,415-433).
catcgtttgaagagttttt

SEQ ID NO: 566738 - DNA, 19 bp, Mus musculus
  siRNA target sequence for Plfr (NM_011120.1,508-526).
cagaatgcccttataggat

SEQ ID NO: 566739 - DNA, 19 bp, Mus musculus
  siRNA target sequence for Plfr (NM_011120.1,566-584).
ccttctagagtacatcata

SEQ ID NO: 566740 - DNA, 19 bp, Mus musculus
  siRNA target sequence for Plfr (NM_011120.1,575-593).
gtacatcataagaataata

SEQ ID NO: 566741 - DNA, 19 bp, Mus musculus
  siRNA target sequence for Plfr (NM_011120.1,634-652).
cgacctggtcagatttgga

SEQ ID NO: 566742 - DNA, 19 bp, Mus musculus
  siRNA target sequence for Plfr (NM_011120.1,716-734).
gcgtattgacctagaaaca

SEQ ID NO: 566743 - DNA, 19 bp, Mus musculus
  siRNA target sequence for Plfr (NM_011120.1,744-762).
ctagtcaatttcctaaaat

SEQ ID NO: 566744 - DNA, 19 bp, Mus musculus
  siRNA target sequence for Plfr (NM_011120.1,780-798).
gatgtctgctactctgaat

SEQ ID NO: 566745 - DNA, 19 bp, Mus musculus
  siRNA target sequence for Plfr (NM_011120.1,783-801).
gtctgctactctgaatttt

SEQ ID NO: 566746 - DNA, 19 bp, Mus musculus
  siRNA target sequence for Pomc1 (NM_008895.2,550-568).
caagccggtgggcaagaaa

SEQ ID NO: 566747 - DNA, 19 bp, Mus musculus
  siRNA target sequence for Ppy (NM_008918.1,167-185).
gcagatggcacaatatgaa

SEQ ID NO: 566748 - DNA, 19 bp, Mus musculus
  siRNA target sequence for Ppy (NM_008918.1,170-188).
gatggcacaatatgaaact

SEQ ID NO: 566749 - DNA, 19 bp, Mus musculus
  siRNA target sequence for Ppy (NM_008918.1,187-205).
ctcagctccgcagatacat

SEQ ID NO: 566750 - DNA, 19 bp, Mus musculus
  siRNA target sequence for Prl (NM_011164.1,117-135).
gctgttctgccaaaatgtt

SEQ ID NO: 566751 - DNA, 19 bp, Mus musculus
  siRNA target sequence for Prl (NM_011164.1,136-154).
cagcctctgccaatctgtt

SEQ ID NO: 566752 - DNA, 19 bp, Mus musculus
  siRNA target sequence for Prl (NM_011164.1,176-194).
ctctccgagagctgtttga

SEQ ID NO: 566753 - DNA, 19 bp, Mus musculus
  siRNA target sequence for Prl (NM_011164.1,208-226).
ctttctcactacatccata

SEQ ID NO: 566754 - DNA, 19 bp, Mus musculus
  siRNA target sequence for Prl (NM_011164.1,219-237).
catccataccctgtataca

SEQ ID NO: 566755 - DNA, 19 bp, Mus musculus
  siRNA target sequence for Prl (NM_011164.1,223-241).
cataccctgtatacagata

SEQ ID NO: 566756 - DNA, 19 bp, Mus musculus
  siRNA target sequence for Prl (NM_011164.1,227-245).
ccctgtatacagatatgtt

SEQ ID NO: 566757 - DNA, 19 bp, Mus musculus
  siRNA target sequence for Prl (NM_011164.1,229-247).
ctgtatacagatatgttca

SEQ ID NO: 566758 - DNA, 19 bp, Mus musculus
  siRNA target sequence for Prl (NM_011164.1,231-249).
gtatacagatatgttcatt

SEQ ID NO: 566759 - DNA, 19 bp, Mus musculus
  siRNA target sequence for Prl (NM_011164.1,243-261).
gttcattgaattcgataaa

SEQ ID NO: 566760 - DNA, 19 bp, Mus musculus
  siRNA target sequence for Prl (NM_011164.1,410-428).
gtgaccctctgtttcaact

SEQ ID NO: 566761 - DNA, 19 bp, Mus musculus
  siRNA target sequence for Prl (NM_011164.1,414-432).
ccctctgtttcaactaata

SEQ ID NO: 566762 - DNA, 19 bp, Mus musculus
  siRNA target sequence for Prl (NM_011164.1,487-505).
gagattgaggaacaaaaca

SEQ ID NO: 566763 - DNA, 19 bp, Mus musculus
  siRNA target sequence for Prl (NM_011164.1,520-538).
ggagttgagaagataatta

SEQ ID NO: 566764 - DNA, 19 bp, Mus musculus
  siRNA target sequence for Prl (NM_011164.1,563-581).
gaaatgggatctactttgt

SEQ ID NO: 566765 - DNA, 19 bp, Mus musculus
  siRNA target sequence for Prl (NM_011164.1,576-594).
ctttgtttggtcacaactt

SEQ ID NO: 566766 - DNA, 19 bp, Mus musculus
  siRNA target sequence for Prl (NM_011164.1,599-617).
ccctacagggagttgatga

SEQ ID NO: 566767 - DNA, 19 bp, Mus musculus
  siRNA target sequence for Prl (NM_011164.1,600-618).
cctacagggagttgatgaa

SEQ ID NO: 566768 - DNA, 19 bp, Mus musculus
  siRNA target sequence for Prl (NM_011164.1,608-626).
gagttgatgaagaatccaa

SEQ ID NO: 566769 - DNA, 19 bp, Mus musculus
  siRNA target sequence for Prl (NM_011164.1,671-689).
cccacaaggttgacaattt

SEQ ID NO: 566770 - DNA, 19 bp, Mus musculus
  siRNA target sequence for Prl (NM_011164.1,672-690).
ccacaaggttgacaatttt

SEQ ID NO: 566771 - DNA, 19 bp, Mus musculus
  siRNA target sequence for Prlpa (NM_011165.1,142-160).
gctatgagagctaaaaggt

SEQ ID NO: 566772 - DNA, 19 bp, Mus musculus
  siRNA target sequence for Prlpa (NM_011165.1,143-161).
ctatgagagctaaaaggtt

SEQ ID NO: 566773 - DNA, 19 bp, Mus musculus
  siRNA target sequence for Prlpa (NM_011165.1,168-186).
ccacgactacacaaccttt

SEQ ID NO: 566774 - DNA, 19 bp, Mus musculus
  siRNA target sequence for Prlpa (NM_011165.1,225-243).
catgaatcaccgaatttca

SEQ ID NO: 566775 - DNA, 19 bp, Mus musculus
  siRNA target sequence for Prlpa (NM_011165.1,228-246).
gaatcaccgaatttcagaa

SEQ ID NO: 566776 - DNA, 19 bp, Mus musculus
  siRNA target sequence for Prlpa (NM_011165.1,275-293).
cccaaggccgaggatttga

SEQ ID NO: 566777 - DNA, 19 bp, Mus musculus
  siRNA target sequence for Prlpa (NM_011165.1,276-294).
ccaaggccgaggatttgaa

SEQ ID NO: 566778 - DNA, 19 bp, Mus musculus
  siRNA target sequence for Prlpa (NM_011165.1,280-298).
ggccgaggatttgaaaaga

SEQ ID NO: 566779 - DNA, 19 bp, Mus musculus
  siRNA target sequence for Prlpa (NM_011165.1,561-579).
caacgaaaacgggaactat

SEQ ID NO: 566780 - DNA, 19 bp, Mus musculus
  siRNA target sequence for Prlpa (NM_011165.1,564-582).
cgaaaacgggaactatact

SEQ ID NO: 566781 - DNA, 19 bp, Mus musculus
  siRNA target sequence for Prlpa (NM_011165.1,613-631).
cccaatagagacactagat

SEQ ID NO: 566782 - DNA, 19 bp, Mus musculus
  siRNA target sequence for Prlpa (NM_011165.1,614-632).
ccaatagagacactagata

SEQ ID NO: 566783 - DNA, 19 bp, Mus musculus
  siRNA target sequence for Prlpa (NM_011165.1,622-640).
gacactagatactttgctt

SEQ ID NO: 566784 - DNA, 19 bp, Mus musculus
  siRNA target sequence for Prlpa (NM_011165.1,626-644).
ctagatactttgcttttca

SEQ ID NO: 566785 - DNA, 19 bp, Mus musculus
  siRNA target sequence for Prlpa (NM_011165.1,649-667).
ctgtttcactgcctgaaaa

SEQ ID NO: 566786 - DNA, 19 bp, Mus musculus
  siRNA target sequence for Prlpa (NM_011165.1,655-673).
cactgcctgaaaaaagact

SEQ ID NO: 566787 - DNA, 19 bp, Mus musculus
  siRNA target sequence for Prlpa (NM_011165.1,710-728).
gccgactgatccaaagcaa

SEQ ID NO: 566788 - DNA, 19 bp, Mus musculus
  siRNA target sequence for Prlpb (NM_011166.1,187-205).
cgtcaccatactatctcat

SEQ ID NO: 566789 - DNA, 19 bp, Mus musculus
  siRNA target sequence for Prlpb (NM_011166.1,188-206).
gtcaccatactatctcata

SEQ ID NO: 566790 - DNA, 19 bp, Mus musculus
  siRNA target sequence for Prlpb (NM_011166.1,190-208).
caccatactatctcataat

SEQ ID NO: 566791 - DNA, 19 bp, Mus musculus
  siRNA target sequence for Prlpb (NM_011166.1,192-210).
ccatactatctcataatgt

SEQ ID NO: 566792 - DNA, 19 bp, Mus musculus
  siRNA target sequence for Prlpb (NM_011166.1,224-242).
gcagaaatgcacaggatat

SEQ ID NO: 566793 - DNA, 19 bp, Mus musculus
  siRNA target sequence for Prlpb (NM_011166.1,227-245).
gaaatgcacaggatattta

SEQ ID NO: 566794 - DNA, 19 bp, Mus musculus
  siRNA target sequence for Prlpb (NM_011166.1,250-268).
ggatgtgcgatataaacca

SEQ ID NO: 566795 - DNA, 19 bp, Mus musculus
  siRNA target sequence for Prlpb (NM_011166.1,273-291).
ggtggttctctgacagata

SEQ ID NO: 566796 - DNA, 19 bp, Mus musculus
  siRNA target sequence for Prlpb (NM_011166.1,304-322).
ccacacatctacattgact

SEQ ID NO: 566797 - DNA, 19 bp, Mus musculus
  siRNA target sequence for Prlpb (NM_011166.1,348-366).
gacagatgccgggtgtatt

SEQ ID NO: 566798 - DNA, 19 bp, Mus musculus
  siRNA target sequence for Prlpb (NM_011166.1,352-370).
gatgccgggtgtattcctt

SEQ ID NO: 566799 - DNA, 19 bp, Mus musculus
  siRNA target sequence for Prlpb (NM_011166.1,357-375).
cgggtgtattccttgtgaa

SEQ ID NO: 566800 - DNA, 19 bp, Mus musculus
  siRNA target sequence for Prlpb (NM_011166.1,362-380).
gtattccttgtgaaagaga

SEQ ID NO: 566801 - DNA, 19 bp, Mus musculus
  siRNA target sequence for Prlpb (NM_011166.1,368-386).
cttgtgaaagagatgatca

SEQ ID NO: 566802 - DNA, 19 bp, Mus musculus
  siRNA target sequence for Prlpb (NM_011166.1,377-395).
gagatgatcagtatgttga

SEQ ID NO: 566803 - DNA, 19 bp, Mus musculus
  siRNA target sequence for Prlpb (NM_011166.1,391-409).
gttgacagcttggagatat

SEQ ID NO: 566804 - DNA, 19 bp, Mus musculus
  siRNA target sequence for Prlpb (NM_011166.1,410-428).
cctctgtatcacataataa

SEQ ID NO: 566805 - DNA, 19 bp, Mus musculus
  siRNA target sequence for Prlpb (NM_011166.1,415-433).
gtatcacataataactgaa

SEQ ID NO: 566806 - DNA, 19 bp, Mus musculus
  siRNA target sequence for Prlpb (NM_011166.1,452-470).
gctccagatgagatcatat

SEQ ID NO: 566807 - DNA, 19 bp, Mus musculus
  siRNA target sequence for Prlpb (NM_011166.1,466-484).
catatcaagagccagaaat

SEQ ID NO: 566808 - DNA, 19 bp, Mus musculus
  siRNA target sequence for Prlpb (NM_011166.1,515-533).
gctcttagagggatactca

SEQ ID NO: 566809 - DNA, 19 bp, Mus musculus
  siRNA target sequence for Prlpb (NM_011166.1,620-638).
cgccatcttacattattta

SEQ ID NO: 566810 - DNA, 19 bp, Mus musculus
  siRNA target sequence for Prlpb (NM_011166.1,621-639).
gccatcttacattatttaa

SEQ ID NO: 566811 - DNA, 19 bp, Mus musculus
  siRNA target sequence for Prlpb (NM_011166.1,623-641).
catcttacattatttaact

SEQ ID NO: 566812 - DNA, 19 bp, Mus musculus
  siRNA target sequence for Prlpb (NM_011166.1,662-680).
gattcacgtaagattgact

SEQ ID NO: 566813 - DNA, 19 bp, Mus musculus
  siRNA target sequence for Prlpb (NM_011166.1,668-686).
cgtaagattgactctagta

SEQ ID NO: 566814 - DNA, 19 bp, Mus musculus
  siRNA target sequence for Prlpb (NM_011166.1,710-728).
ctctataacagagattgtt

SEQ ID NO: 566815 - DNA, 19 bp, Mus musculus
  siRNA target sequence for Prlpc1 (NM_011167.1,125-143).
gttgctggaacccactttt

SEQ ID NO: 566816 - DNA, 19 bp, Mus musculus
  siRNA target sequence for Prlpc1 (NM_011167.1,128-146).
gctggaacccacttttgga

SEQ ID NO: 566817 - DNA, 19 bp, Mus musculus
  siRNA target sequence for Prlpc1 (NM_011167.1,248-266).
gggattttagttctcaaat

SEQ ID NO: 566818 - DNA, 19 bp, Mus musculus
  siRNA target sequence for Prlpc1 (NM_011167.1,574-592).
ccccactgggaatatcttt

SEQ ID NO: 566819 - DNA, 19 bp, Mus musculus
  siRNA target sequence for Prlpc1 (NM_011167.1,576-594).
ccactgggaatatctttca

SEQ ID NO: 566820 - DNA, 19 bp, Mus musculus
  siRNA target sequence for Prlpc1 (NM_011167.1,651-669).
ctgcatagatcatgattca

SEQ ID NO: 566821 - DNA, 19 bp, Mus musculus
  siRNA target sequence for Prlpc1 (NM_011167.1,661-679).
catgattcaaagtacattt

SEQ ID NO: 566822 - DNA, 19 bp, Mus musculus
  siRNA target sequence for Prlpc2 (NM_023332.2,238-256).
gtacacttgctgaccaatt

SEQ ID NO: 566823 - DNA, 19 bp, Mus musculus
  siRNA target sequence for Prlpc2 (NM_023332.2,241-259).
cacttgctgaccaattcta

SEQ ID NO: 566824 - DNA, 19 bp, Mus musculus
  siRNA target sequence for Prlpc2 (NM_023332.2,286-304).
catctggacaatttttgat

SEQ ID NO: 566825 - DNA, 19 bp, Mus musculus
  siRNA target sequence for Prlpc2 (NM_023332.2,467-485).
ccctctataccatgtagta

SEQ ID NO: 566826 - DNA, 19 bp, Mus musculus
  siRNA target sequence for Prlpc2 (NM_023332.2,469-487).
ctctataccatgtagtaat

SEQ ID NO: 566827 - DNA, 19 bp, Mus musculus
  siRNA target sequence for Prlpc2 (NM_023332.2,633-651).
gcatgggaacatctttcat

SEQ ID NO: 566828 - DNA, 19 bp, Mus musculus
  siRNA target sequence for Prlpc2 (NM_023332.2,634-652).
catgggaacatctttcatt

SEQ ID NO: 566829 - DNA, 19 bp, Mus musculus
  siRNA target sequence for Prlpc2 (NM_023332.2,699-717).
ctttccaactgcatataca

SEQ ID NO: 566830 - DNA, 19 bp, Mus musculus
  siRNA target sequence for Prlpc2 (NM_023332.2,704-722).
caactgcatatacaatgaa

SEQ ID NO: 566831 - DNA, 19 bp, Mus musculus
  siRNA target sequence for Prlpc3 (NM_023741.1,186-204).
cccacggatggaaacattt

SEQ ID NO: 566832 - DNA, 19 bp, Mus musculus
  siRNA target sequence for Prlpc3 (NM_023741.1,188-206).
cacggatggaaacatttga

SEQ ID NO: 566833 - DNA, 19 bp, Mus musculus
  siRNA target sequence for Prlpc3 (NM_023741.1,190-208).
cggatggaaacatttgaca

SEQ ID NO: 566834 - DNA, 19 bp, Mus musculus
  siRNA target sequence for Prlpc3 (NM_023741.1,226-244).
gaaacccttcgtacagttt

SEQ ID NO: 566835 - DNA, 19 bp, Mus musculus
  siRNA target sequence for Prlpc3 (NM_023741.1,230-248).
cccttcgtacagtttctaa

SEQ ID NO: 566836 - DNA, 19 bp, Mus musculus
  siRNA target sequence for Prlpc3 (NM_023741.1,231-249).
ccttcgtacagtttctaaa

SEQ ID NO: 566837 - DNA, 19 bp, Mus musculus
  siRNA target sequence for Prlpc3 (NM_023741.1,235-253).
cgtacagtttctaaacaat

SEQ ID NO: 566838 - DNA, 19 bp, Mus musculus
  siRNA target sequence for Prlpc3 (NM_023741.1,355-373).
cactgccattctactctaa

SEQ ID NO: 566839 - DNA, 19 bp, Mus musculus
  siRNA target sequence for Prlpc3 (NM_023741.1,357-375).
ctgccattctactctaaca

SEQ ID NO: 566840 - DNA, 19 bp, Mus musculus
  siRNA target sequence for Prlpc3 (NM_023741.1,360-378).
ccattctactctaacaaat

SEQ ID NO: 566841 - DNA, 19 bp, Mus musculus
  siRNA target sequence for Prlpc3 (NM_023741.1,380-398).
ccccaaataagggaattca

SEQ ID NO: 566842 - DNA, 19 bp, Mus musculus
  siRNA target sequence for Prlpc3 (NM_023741.1,383-401).
caaataagggaattcaata

SEQ ID NO: 566843 - DNA, 19 bp, Mus musculus
  siRNA target sequence for Prlpc3 (NM_023741.1,390-408).
gggaattcaatacataact

SEQ ID NO: 566844 - DNA, 19 bp, Mus musculus
  siRNA target sequence for Prlpc3 (NM_023741.1,391-409).
ggaattcaatacataacta

SEQ ID NO: 566845 - DNA, 19 bp, Mus musculus
  siRNA target sequence for Prlpc3 (NM_023741.1,392-410).
gaattcaatacataactat

SEQ ID NO: 566846 - DNA, 19 bp, Mus musculus
  siRNA target sequence for Prlpc3 (NM_023741.1,402-420).
cataactattgaaattcca

SEQ ID NO: 566847 - DNA, 19 bp, Mus musculus
  siRNA target sequence for Prlpc3 (NM_023741.1,662-680).
gtagcagaaattctaagtt

SEQ ID NO: 566848 - DNA, 19 bp, Mus musculus
  siRNA target sequence for Prlpc3 (NM_023741.1,701-719).
cccactgtctagagtatga

SEQ ID NO: 566849 - DNA, 19 bp, Mus musculus
  siRNA target sequence for Prlpc3 (NM_023741.1,705-723).
ctgtctagagtatgataca

SEQ ID NO: 566850 - DNA, 19 bp, Mus musculus
  siRNA target sequence for Prlpc3 (NM_023741.1,707-725).
gtctagagtatgatacaca

SEQ ID NO: 566851 - DNA, 19 bp, Mus musculus
  siRNA target sequence for Prlpc3 (NM_023741.1,718-736).
gatacacagttctttctat

SEQ ID NO: 566852 - DNA, 19 bp, Mus musculus
  siRNA target sequence for Prlpc3 (NM_023741.1,756-774).
gtgtcgtataactggaaaa

SEQ ID NO: 566853 - DNA, 19 bp, Mus musculus
  siRNA target sequence for Prlpe (NM_008930.1,114-132).
gtggcctgtctacctttaa

SEQ ID NO: 566854 - DNA, 19 bp, Mus musculus
  siRNA target sequence for Prlpe (NM_008930.1,117-135).
gcctgtctacctttaagca

SEQ ID NO: 566855 - DNA, 19 bp, Mus musculus
  siRNA target sequence for Prlpe (NM_008930.1,176-194).
gttggatcatgccatgata

SEQ ID NO: 566856 - DNA, 19 bp, Mus musculus
  siRNA target sequence for Prlpe (NM_008930.1,183-201).
catgccatgatactttcta

SEQ ID NO: 566857 - DNA, 19 bp, Mus musculus
  siRNA target sequence for Prlpe (NM_008930.1,187-205).
ccatgatactttctaagaa

SEQ ID NO: 566858 - DNA, 19 bp, Mus musculus
  siRNA target sequence for Prlpe (NM_008930.1,224-242).
ggagttgcgcaggatattt

SEQ ID NO: 566859 - DNA, 19 bp, Mus musculus
  siRNA target sequence for Prlpe (NM_008930.1,225-243).
gagttgcgcaggatattta

SEQ ID NO: 566860 - DNA, 19 bp, Mus musculus
  siRNA target sequence for Prlpe (NM_008930.1,248-266).
cagtgagatgtcagctaaa

SEQ ID NO: 566861 - DNA, 19 bp, Mus musculus
  siRNA target sequence for Prlpe (NM_008930.1,250-268).
gtgagatgtcagctaaact

SEQ ID NO: 566862 - DNA, 19 bp, Mus musculus
  siRNA target sequence for Prlpe (NM_008930.1,252-270).
gagatgtcagctaaactta

SEQ ID NO: 566863 - DNA, 19 bp, Mus musculus
  siRNA target sequence for Prlpe (NM_008930.1,261-279).
gctaaacttattgataaat

SEQ ID NO: 566864 - DNA, 19 bp, Mus musculus
  siRNA target sequence for Prlpe (NM_008930.1,267-285).
cttattgataaatttctaa

SEQ ID NO: 566865 - DNA, 19 bp, Mus musculus
  siRNA target sequence for Prlpe (NM_008930.1,298-316).
catcagactcctatgatca

SEQ ID NO: 566866 - DNA, 19 bp, Mus musculus
  siRNA target sequence for Prlpe (NM_008930.1,308-326).
ctatgatcaatttatgctt

SEQ ID NO: 566867 - DNA, 19 bp, Mus musculus
  siRNA target sequence for Prlpe (NM_008930.1,342-360).
caggagttactgactaaga

SEQ ID NO: 566868 - DNA, 19 bp, Mus musculus
  siRNA target sequence for Prlpe (NM_008930.1,484-502).
ctctgaaaaaccgaatcaa

SEQ ID NO: 566869 - DNA, 19 bp, Mus musculus
  siRNA target sequence for Prlpe (NM_008930.1,494-512).
ccgaatcaacctatctgaa

SEQ ID NO: 566870 - DNA, 19 bp, Mus musculus
  siRNA target sequence for Prlpe (NM_008930.1,519-537).
ccaggaatagacgatgata

SEQ ID NO: 566871 - DNA, 19 bp, Mus musculus
  siRNA target sequence for Prlpe (NM_008930.1,523-541).
gaatagacgatgatatcct

SEQ ID NO: 566872 - DNA, 19 bp, Mus musculus
  siRNA target sequence for Prlpe (NM_008930.1,534-552).
gatatcctccctatatata

SEQ ID NO: 566873 - DNA, 19 bp, Mus musculus
  siRNA target sequence for Prlpe (NM_008930.1,565-583).
caaaaattgcagaacttct

SEQ ID NO: 566874 - DNA, 19 bp, Mus musculus
  siRNA target sequence for Prlpe (NM_008930.1,657-675).
ggtcttgaagaccttcaat

SEQ ID NO: 566875 - DNA, 19 bp, Mus musculus
  siRNA target sequence for Prlpe (NM_008930.1,693-711).
cgatttttggctctttgta

SEQ ID NO: 566876 - DNA, 19 bp, Mus musculus
  siRNA target sequence for Prlpe (NM_008930.1,718-736).
cctattgtttgcatgttga

SEQ ID NO: 566877 - DNA, 19 bp, Mus musculus
  siRNA target sequence for Prlpe (NM_008930.1,740-758).
ccacacagctaacttttat

SEQ ID NO: 566878 - DNA, 19 bp, Mus musculus
  siRNA target sequence for Prlpf (NM_011168.1,115-133).
ggcctctgtacctttgagt

SEQ ID NO: 566879 - DNA, 19 bp, Mus musculus
  siRNA target sequence for Prlpf (NM_011168.1,135-153).
gcaatgagactgatggtta

SEQ ID NO: 566880 - DNA, 19 bp, Mus musculus
  siRNA target sequence for Prlpf (NM_011168.1,142-160).
gactgatggttatccatta

SEQ ID NO: 566881 - DNA, 19 bp, Mus musculus
  siRNA target sequence for Prlpf (NM_011168.1,162-180).
ccatcaatgggctgtttca

SEQ ID NO: 566882 - DNA, 19 bp, Mus musculus
  siRNA target sequence for Prlpf (NM_011168.1,163-181).
catcaatgggctgtttcat

SEQ ID NO: 566883 - DNA, 19 bp, Mus musculus
  siRNA target sequence for Prlpf (NM_011168.1,179-197).
cataatgccatgagactaa

SEQ ID NO: 566884 - DNA, 19 bp, Mus musculus
  siRNA target sequence for Prlpf (NM_011168.1,187-205).
catgagactaacttggaat

SEQ ID NO: 566885 - DNA, 19 bp, Mus musculus
  siRNA target sequence for Prlpf (NM_011168.1,192-210).
gactaacttggaatatcaa

SEQ ID NO: 566886 - DNA, 19 bp, Mus musculus
  siRNA target sequence for Prlpf (NM_011168.1,223-241).
ggaactgcgcaagacatat

SEQ ID NO: 566887 - DNA, 19 bp, Mus musculus
  siRNA target sequence for Prlpf (NM_011168.1,224-242).
gaactgcgcaagacatata

SEQ ID NO: 566888 - DNA, 19 bp, Mus musculus
  siRNA target sequence for Prlpf (NM_011168.1,232-250).
caagacatatacagtcaat

SEQ ID NO: 566889 - DNA, 19 bp, Mus musculus
  siRNA target sequence for Prlpf (NM_011168.1,235-253).
gacatatacagtcaatcaa

SEQ ID NO: 566890 - DNA, 19 bp, Mus musculus
  siRNA target sequence for Prlpf (NM_011168.1,237-255).
catatacagtcaatcaagt

SEQ ID NO: 566891 - DNA, 19 bp, Mus musculus
  siRNA target sequence for Prlpf (NM_011168.1,245-263).
gtcaatcaagtctctgaaa

SEQ ID NO: 566892 - DNA, 19 bp, Mus musculus
  siRNA target sequence for Prlpf (NM_011168.1,274-292).
gaactatatgcttgacttt

SEQ ID NO: 566893 - DNA, 19 bp, Mus musculus
  siRNA target sequence for Prlpf (NM_011168.1,277-295).
ctatatgcttgactttatt

SEQ ID NO: 566894 - DNA, 19 bp, Mus musculus
  siRNA target sequence for Prlpf (NM_011168.1,335-353).
cacaattattccatcaaaa

SEQ ID NO: 566895 - DNA, 19 bp, Mus musculus
  siRNA target sequence for Prlpf (NM_011168.1,367-385).
ggacgaagctcaacagatt

SEQ ID NO: 566896 - DNA, 19 bp, Mus musculus
  siRNA target sequence for Prlpf (NM_011168.1,371-389).
gaagctcaacagattcctt

SEQ ID NO: 566897 - DNA, 19 bp, Mus musculus
  siRNA target sequence for Prlpf (NM_011168.1,374-392).
gctcaacagattcctttta

SEQ ID NO: 566898 - DNA, 19 bp, Mus musculus
  siRNA target sequence for Prlpf (NM_011168.1,380-398).
cagattccttttaacgaat

SEQ ID NO: 566899 - DNA, 19 bp, Mus musculus
  siRNA target sequence for Prlpf (NM_011168.1,382-400).
gattccttttaacgaattt

SEQ ID NO: 566900 - DNA, 19 bp, Mus musculus
  siRNA target sequence for Prlpf (NM_011168.1,407-425).
ctgatcctcagtagaatgt

SEQ ID NO: 566901 - DNA, 19 bp, Mus musculus
  siRNA target sequence for Prlpf (NM_011168.1,455-473).
ctgaccacactcagaagta

SEQ ID NO: 566902 - DNA, 19 bp, Mus musculus
  siRNA target sequence for Prlpf (NM_011168.1,477-495).
caggaatgcatgatgatgt

SEQ ID NO: 566903 - DNA, 19 bp, Mus musculus
  siRNA target sequence for Prlpf (NM_011168.1,555-573).
gtatactcaactcgattta

SEQ ID NO: 566904 - DNA, 19 bp, Mus musculus
  siRNA target sequence for Prlpf (NM_011168.1,560-578).
ctcaactcgatttatggaa

SEQ ID NO: 566905 - DNA, 19 bp, Mus musculus
  siRNA target sequence for Prlpf (NM_011168.1,565-583).
ctcgatttatggaacaaca

SEQ ID NO: 566906 - DNA, 19 bp, Mus musculus
  siRNA target sequence for Prlpf (NM_011168.1,639-657).
ctgatgaagaatttagtct

SEQ ID NO: 566907 - DNA, 19 bp, Mus musculus
  siRNA target sequence for Prlpf (NM_011168.1,679-697).
ctattgcttacgtgtagat

SEQ ID NO: 566908 - DNA, 19 bp, Mus musculus
  siRNA target sequence for Prlpf (NM_011168.1,684-702).
gcttacgtgtagatataca

SEQ ID NO: 566909 - DNA, 19 bp, Mus musculus
  siRNA target sequence for Prlpf (NM_011168.1,710-728).
gaactttatctcaagctat

SEQ ID NO: 566910 - DNA, 19 bp, Mus musculus
  siRNA target sequence for Prlpf (NM_011168.1,739-757).
ggtatatgttagtagtgat

SEQ ID NO: 566911 - DNA, 19 bp, Mus musculus
  siRNA target sequence for Prlpi (NM_013766.1,147-165).
cgatatgaccggaaatcca

SEQ ID NO: 566912 - DNA, 19 bp, Mus musculus
  siRNA target sequence for Prlpi (NM_013766.1,148-166).
gatatgaccggaaatccaa

SEQ ID NO: 566913 - DNA, 19 bp, Mus musculus
  siRNA target sequence for Prlpi (NM_013766.1,209-227).
ccatagagttgccaaaaaa

SEQ ID NO: 566914 - DNA, 19 bp, Mus musculus
  siRNA target sequence for Prlpi (NM_013766.1,214-232).
gagttgccaaaaaaatgta

SEQ ID NO: 566915 - DNA, 19 bp, Mus musculus
  siRNA target sequence for Prlpi (NM_013766.1,216-234).
gttgccaaaaaaatgtata

SEQ ID NO: 566916 - DNA, 19 bp, Mus musculus
  siRNA target sequence for Prlpi (NM_013766.1,251-269).
gttaactgagggagtatgt

SEQ ID NO: 566917 - DNA, 19 bp, Mus musculus
  siRNA target sequence for Prlpi (NM_013766.1,258-276).
gagggagtatgttttagga

SEQ ID NO: 566918 - DNA, 19 bp, Mus musculus
  siRNA target sequence for Prlpi (NM_013766.1,260-278).
gggagtatgttttaggaat

SEQ ID NO: 566919 - DNA, 19 bp, Mus musculus
  siRNA target sequence for Prlpi (NM_013766.1,261-279).
ggagtatgttttaggaata

SEQ ID NO: 566920 - DNA, 19 bp, Mus musculus
  siRNA target sequence for Prlpi (NM_013766.1,293-311).
gtgccaaaccatttctaca

SEQ ID NO: 566921 - DNA, 19 bp, Mus musculus
  siRNA target sequence for Prlpi (NM_013766.1,345-363).
gtcatcatcaatgtttcaa

SEQ ID NO: 566922 - DNA, 19 bp, Mus musculus
  siRNA target sequence for Prlpi (NM_013766.1,373-391).
catatccactgaaaatgct

SEQ ID NO: 566923 - DNA, 19 bp, Mus musculus
  siRNA target sequence for Prlpi (NM_013766.1,404-422).
gttgactcatctagattct

SEQ ID NO: 566924 - DNA, 19 bp, Mus musculus
  siRNA target sequence for Prlpi (NM_013766.1,407-425).
gactcatctagattctgat

SEQ ID NO: 566925 - DNA, 19 bp, Mus musculus
  siRNA target sequence for Prlpi (NM_013766.1,423-441).
gatgatgggatgatgacaa

SEQ ID NO: 566926 - DNA, 19 bp, Mus musculus
  siRNA target sequence for Prlpi (NM_013766.1,439-457).
caagagctgtagagcttaa

SEQ ID NO: 566927 - DNA, 19 bp, Mus musculus
  siRNA target sequence for Prlpi (NM_013766.1,447-465).
gtagagcttaactatggaa

SEQ ID NO: 566928 - DNA, 19 bp, Mus musculus
  siRNA target sequence for Prlpi (NM_013766.1,450-468).
gagcttaactatggaaata

SEQ ID NO: 566929 - DNA, 19 bp, Mus musculus
  siRNA target sequence for Prlpi (NM_013766.1,479-497).
ggagggagcaaaagcttta

SEQ ID NO: 566930 - DNA, 19 bp, Mus musculus
  siRNA target sequence for Prlpi (NM_013766.1,482-500).
gggagcaaaagctttactt

SEQ ID NO: 566931 - DNA, 19 bp, Mus musculus
  siRNA target sequence for Prlpi (NM_013766.1,505-523).
ggattcagcctggaattga

SEQ ID NO: 566932 - DNA, 19 bp, Mus musculus
  siRNA target sequence for Prlpi (NM_013766.1,547-565).
ggtcagacctaagagaatt

SEQ ID NO: 566933 - DNA, 19 bp, Mus musculus
  siRNA target sequence for Prlpi (NM_013766.1,561-579).
gaattgaggtcctccaaaa

SEQ ID NO: 566934 - DNA, 19 bp, Mus musculus
  siRNA target sequence for Prlpi (NM_013766.1,619-637).
gtctacgcaaggatacaaa

SEQ ID NO: 566935 - DNA, 19 bp, Mus musculus
  siRNA target sequence for Prlpi (NM_013766.1,621-639).
ctacgcaaggatacaaaaa

SEQ ID NO: 566936 - DNA, 19 bp, Mus musculus
  siRNA target sequence for Prlpi (NM_013766.1,625-643).
gcaaggatacaaaaatggt

SEQ ID NO: 566937 - DNA, 19 bp, Mus musculus
  siRNA target sequence for Prlpi (NM_013766.1,663-681).
ctgaagcatggcaaaatca

SEQ ID NO: 566938 - DNA, 19 bp, Mus musculus
  siRNA target sequence for Prlpi (NM_013766.1,665-683).
gaagcatggcaaaatcaaa

SEQ ID NO: 566939 - DNA, 19 bp, Mus musculus
  siRNA target sequence for Prlpk (NM_025532.1,150-168).
gagaatgtagtctctacat

SEQ ID NO: 566940 - DNA, 19 bp, Mus musculus
  siRNA target sequence for Prlpk (NM_025532.1,200-218).
ggactccttagagaaactt

SEQ ID NO: 566941 - DNA, 19 bp, Mus musculus
  siRNA target sequence for Prlpk (NM_025532.1,243-261).
caagttgtcagtagtgaaa

SEQ ID NO: 566942 - DNA, 19 bp, Mus musculus
  siRNA target sequence for Prlpk (NM_025532.1,332-350).
gacttgtcacactgagttt

SEQ ID NO: 566943 - DNA, 19 bp, Mus musculus
  siRNA target sequence for Prlpk (NM_025532.1,334-352).
cttgtcacactgagttttt

SEQ ID NO: 566944 - DNA, 19 bp, Mus musculus
  siRNA target sequence for Prlpk (NM_025532.1,341-359).
cactgagttttttgatact

SEQ ID NO: 566945 - DNA, 19 bp, Mus musculus
  siRNA target sequence for Prlpk (NM_025532.1,368-386).
caaggagcaatctctagta

SEQ ID NO: 566946 - DNA, 19 bp, Mus musculus
  siRNA target sequence for Prlpk (NM_025532.1,371-389).
ggagcaatctctagtaaga

SEQ ID NO: 566947 - DNA, 19 bp, Mus musculus
  siRNA target sequence for Prlpk (NM_025532.1,409-427).
cattggtacacagtctatt

SEQ ID NO: 566948 - DNA, 19 bp, Mus musculus
  siRNA target sequence for Prlpk (NM_025532.1,414-432).
gtacacagtctattgaatt

SEQ ID NO: 566949 - DNA, 19 bp, Mus musculus
  siRNA target sequence for Prlpk (NM_025532.1,436-454).
ggacgaacgctctgaatca

SEQ ID NO: 566950 - DNA, 19 bp, Mus musculus
  siRNA target sequence for Prlpk (NM_025532.1,437-455).
gacgaacgctctgaatcat

SEQ ID NO: 566951 - DNA, 19 bp, Mus musculus
  siRNA target sequence for Prlpk (NM_025532.1,439-457).
cgaacgctctgaatcatct

SEQ ID NO: 566952 - DNA, 19 bp, Mus musculus
  siRNA target sequence for Prlpk (NM_025532.1,440-458).
gaacgctctgaatcatctt

SEQ ID NO: 566953 - DNA, 19 bp, Mus musculus
  siRNA target sequence for Prlpk (NM_025532.1,449-467).
gaatcatcttgtgaatgaa

SEQ ID NO: 566954 - DNA, 19 bp, Mus musculus
  siRNA target sequence for Prlpk (NM_025532.1,540-558).
ctcacgacaggtgttaaaa

SEQ ID NO: 566955 - DNA, 19 bp, Mus musculus
  siRNA target sequence for Prlpk (NM_025532.1,542-560).
cacgacaggtgttaaaata

SEQ ID NO: 566956 - DNA, 19 bp, Mus musculus
  siRNA target sequence for Prlpk (NM_025532.1,544-562).
cgacaggtgttaaaatagt

SEQ ID NO: 566957 - DNA, 19 bp, Mus musculus
  siRNA target sequence for Prlpk (NM_025532.1,545-563).
gacaggtgttaaaatagtt

SEQ ID NO: 566958 - DNA, 19 bp, Mus musculus
  siRNA target sequence for Prlpk (NM_025532.1,547-565).
caggtgttaaaatagttca

SEQ ID NO: 566959 - DNA, 19 bp, Mus musculus
  siRNA target sequence for Prlpk (NM_025532.1,572-590).
gattggagagagagatatt

SEQ ID NO: 566960 - DNA, 19 bp, Mus musculus
  siRNA target sequence for Prlpk (NM_025532.1,626-644).
gcagtcaagcaatgaagat

SEQ ID NO: 566961 - DNA, 19 bp, Mus musculus
  siRNA target sequence for Prlpk (NM_025532.1,629-647).
gtcaagcaatgaagatgtt

SEQ ID NO: 566962 - DNA, 19 bp, Mus musculus
  siRNA target sequence for Prlpk (NM_025532.1,683-701).
gctcagagattctcgaaaa

SEQ ID NO: 566963 - DNA, 19 bp, Mus musculus
  siRNA target sequence for Prlpk (NM_025532.1,686-704).
cagagattctcgaaaagta

SEQ ID NO: 566964 - DNA, 19 bp, Mus musculus
  siRNA target sequence for Prlpk (NM_025532.1,717-735).
gaggtcatcaaatacaaaa

SEQ ID NO: 566965 - DNA, 19 bp, Mus musculus
  siRNA target sequence for Prlpm (NM_019991.1,141-159).
catatgctcagtaaggaat

SEQ ID NO: 566966 - DNA, 19 bp, Mus musculus
  siRNA target sequence for Prlpm (NM_019991.1,167-185).
gctttggttcctttgaaga

SEQ ID NO: 566967 - DNA, 19 bp, Mus musculus
  siRNA target sequence for Prlpm (NM_019991.1,289-307).
gtcaagagcctcaaaaaat

SEQ ID NO: 566968 - DNA, 19 bp, Mus musculus
  siRNA target sequence for Prlpm (NM_019991.1,291-309).
caagagcctcaaaaaatgt

SEQ ID NO: 566969 - DNA, 19 bp, Mus musculus
  siRNA target sequence for Prlpm (NM_019991.1,376-394).
ctgaaattagcaagcaaat

SEQ ID NO: 566970 - DNA, 19 bp, Mus musculus
  siRNA target sequence for Prlpm (NM_019991.1,509-527).
gactcctggagggagttaa

SEQ ID NO: 566971 - DNA, 19 bp, Mus musculus
  siRNA target sequence for Prlpm (NM_019991.1,530-548).
gcattctcatccaaatgca

SEQ ID NO: 566972 - DNA, 19 bp, Mus musculus
  siRNA target sequence for Prlpm (NM_019991.1,699-717).
ggtgaaatgcaaaatttca

SEQ ID NO: 566973 - DNA, 19 bp, Mus musculus
  siRNA target sequence for Pthlh (NM_008970.1,738-756).
gcaagtccatccaagactt

SEQ ID NO: 566974 - DNA, 19 bp, Mus musculus
  siRNA target sequence for Pthlh (NM_008970.1,796-814).
ccacacagccgaaatcaga

SEQ ID NO: 566975 - DNA, 19 bp, Mus musculus
  siRNA target sequence for Pthlh (NM_008970.1,889-907).
cgatgagggcagataccta

SEQ ID NO: 566976 - DNA, 19 bp, Mus musculus
  siRNA target sequence for Pthlh (NM_008970.1,922-940).
caaggtggagacgtacaaa

SEQ ID NO: 566977 - DNA, 19 bp, Mus musculus
  siRNA target sequence for Pyy (NM_145435.1,68-86).
cggtcgcaatgctgctaat

SEQ ID NO: 566978 - DNA, 19 bp, Mus musculus
  siRNA target sequence for Pyy (NM_145435.1,216-234).
ccggcagcggtatggaaaa

SEQ ID NO: 566979 - DNA, 19 bp, Mus musculus
  siRNA target sequence for Pyy (NM_145435.1,217-235).
cggcagcggtatggaaaaa

SEQ ID NO: 566980 - DNA, 19 bp, Mus musculus
  siRNA target sequence for Pyy (NM_145435.1,219-237).
gcagcggtatggaaaaaga

SEQ ID NO: 566981 - DNA, 19 bp, Mus musculus
  siRNA target sequence for Retn (NM_022984.3,317-335).
gtgggacattcgtgaagaa

SEQ ID NO: 566982 - DNA, 19 bp, Mus musculus
  siRNA target sequence for Retn (NM_022984.3,319-337).
gggacattcgtgaagaaaa

SEQ ID NO: 566983 - DNA, 19 bp, Mus musculus
  siRNA target sequence for Retnla (NM_020509.2,208-226).
ctgatgagaccatagagat

SEQ ID NO: 566984 - DNA, 19 bp, Mus musculus
  siRNA target sequence for Retnla (NM_020509.2,304-322).
gcactagtgtcaagactat

SEQ ID NO: 566985 - DNA, 19 bp, Mus musculus
  siRNA target sequence for Retnla (NM_020509.2,307-325).
ctagtgtcaagactatgaa

SEQ ID NO: 566986 - DNA, 19 bp, Mus musculus
  siRNA target sequence for Retnla (NM_020509.2,312-330).
gtcaagactatgaacagat

SEQ ID NO: 566987 - DNA, 19 bp, Mus musculus
  siRNA target sequence for Retnla (NM_020509.2,398-416).
gatccagagtggagatact

SEQ ID NO: 566988 - DNA, 19 bp, Mus musculus
  siRNA target sequence for Retnlb (NM_023881.2,310-328).
gcgcaatgctcctttgagt

SEQ ID NO: 566989 - DNA, 19 bp, Mus musculus
  siRNA target sequence for Retnlb (NM_023881.2,325-343).
gagtctttggtggatcaaa

SEQ ID NO: 566990 - DNA, 19 bp, Mus musculus
  siRNA target sequence for Stc1 (NM_009285.2,205-223).
gcgcacgaggcggaacaaa

SEQ ID NO: 566991 - DNA, 19 bp, Mus musculus
  siRNA target sequence for Stc1 (NM_009285.2,210-228).
cgaggcggaacaaaatgat

SEQ ID NO: 566992 - DNA, 19 bp, Mus musculus
  siRNA target sequence for Stc1 (NM_009285.2,211-229).
gaggcggaacaaaatgatt

SEQ ID NO: 566993 - DNA, 19 bp, Mus musculus
  siRNA target sequence for Stc1 (NM_009285.2,248-266).
cccgggtggcggctcaaaa

SEQ ID NO: 566994 - DNA, 19 bp, Mus musculus
  siRNA target sequence for Stc1 (NM_009285.2,249-267).
ccgggtggcggctcaaaat

SEQ ID NO: 566995 - DNA, 19 bp, Mus musculus
  siRNA target sequence for Stc1 (NM_009285.2,250-268).
cgggtggcggctcaaaatt

SEQ ID NO: 566996 - DNA, 19 bp, Mus musculus
  siRNA target sequence for Stc1 (NM_009285.2,252-270).
ggtggcggctcaaaattca

SEQ ID NO: 566997 - DNA, 19 bp, Mus musculus
  siRNA target sequence for Stc1 (NM_009285.2,355-373).
gatgggatgtacgacattt

SEQ ID NO: 566998 - DNA, 19 bp, Mus musculus
  siRNA target sequence for Stc1 (NM_009285.2,358-376).
gggatgtacgacatttgta

SEQ ID NO: 566999 - DNA, 19 bp, Mus musculus
  siRNA target sequence for Stc1 (NM_009285.2,359-377).
ggatgtacgacatttgtaa

SEQ ID NO: 567000 - DNA, 19 bp, Mus musculus
  siRNA target sequence for Stc1 (NM_009285.2,360-378).
gatgtacgacatttgtaaa

SEQ ID NO: 567001 - DNA, 19 bp, Mus musculus
  siRNA target sequence for Stc1 (NM_009285.2,384-402).
cttgtacagtgctgctaaa

SEQ ID NO: 567002 - DNA, 19 bp, Mus musculus
  siRNA target sequence for Stc1 (NM_009285.2,387-405).
gtacagtgctgctaaattt

SEQ ID NO: 567003 - DNA, 19 bp, Mus musculus
  siRNA target sequence for Stc1 (NM_009285.2,427-445).
gtcaaagagagcttaaagt

SEQ ID NO: 567004 - DNA, 19 bp, Mus musculus
  siRNA target sequence for Stc1 (NM_009285.2,458-476).
ggatcacctccaaggtatt

SEQ ID NO: 567005 - DNA, 19 bp, Mus musculus
  siRNA target sequence for Stc1 (NM_009285.2,462-480).
cacctccaaggtattcctt

SEQ ID NO: 567006 - DNA, 19 bp, Mus musculus
  siRNA target sequence for Stc1 (NM_009285.2,536-554).
gctacagcaagcttaacgt

SEQ ID NO: 567007 - DNA, 19 bp, Mus musculus
  siRNA target sequence for Stc1 (NM_009285.2,537-555).
ctacagcaagcttaacgtt

SEQ ID NO: 567008 - DNA, 19 bp, Mus musculus
  siRNA target sequence for Stc2 (NM_011491.3,212-230).
cggctgggccagtttgtga

SEQ ID NO: 567009 - DNA, 19 bp, Mus musculus
  siRNA target sequence for Stc2 (NM_011491.3,389-407).
ggctgtggtgtgtttgagt

SEQ ID NO: 567010 - DNA, 19 bp, Mus musculus
  siRNA target sequence for Stc2 (NM_011491.3,412-430).
cgagaacaactcttgtgaa

SEQ ID NO: 567011 - DNA, 19 bp, Mus musculus
  siRNA target sequence for Stc2 (NM_011491.3,485-503).
gatgcccagggaaagtcat

SEQ ID NO: 567012 - DNA, 19 bp, Mus musculus
  siRNA target sequence for Stc2 (NM_011491.3,489-507).
cccagggaaagtcattcat

SEQ ID NO: 567013 - DNA, 19 bp, Mus musculus
  siRNA target sequence for Stc2 (NM_011491.3,531-549).
cccatgccctgcgtcataa

SEQ ID NO: 567014 - DNA, 19 bp, Mus musculus
  siRNA target sequence for Stc2 (NM_011491.3,532-550).
ccatgccctgcgtcataaa

SEQ ID NO: 567015 - DNA, 19 bp, Mus musculus
  siRNA target sequence for Stc2 (NM_011491.3,576-594).
cagcaattagggaaatggt

SEQ ID NO: 567016 - DNA, 19 bp, Mus musculus
  siRNA target sequence for Stc2 (NM_011491.3,601-619).
gttgcagagggaatgctat

SEQ ID NO: 567017 - DNA, 19 bp, Mus musculus
  siRNA target sequence for Stc2 (NM_011491.3,605-623).
cagagggaatgctatctga

SEQ ID NO: 567018 - DNA, 19 bp, Mus musculus
  siRNA target sequence for Stc2 (NM_011491.3,660-678).
gtgtgattgtggagatgat

SEQ ID NO: 567019 - DNA, 19 bp, Mus musculus
  siRNA target sequence for Stc2 (NM_011491.3,664-682).
gattgtggagatgattcat

SEQ ID NO: 567020 - DNA, 19 bp, Mus musculus
  siRNA target sequence for Stc2 (NM_011491.3,1054-1072).
ggatgaacagtctgagtat

SEQ ID NO: 567021 - DNA, 19 bp, Mus musculus
  siRNA target sequence for Stc2 (NM_011491.3,1055-1073).
gatgaacagtctgagtatt

SEQ ID NO: 567022 - DNA, 19 bp, Mus musculus
  siRNA target sequence for Tshb (NM_009432.1,205-223).
caagcagcatccttttgta

SEQ ID NO: 567023 - DNA, 19 bp, Mus musculus
  siRNA target sequence for Tshb (NM_009432.1,226-244).
cccactgagtatacaatgt

SEQ ID NO: 567024 - DNA, 19 bp, Mus musculus
  siRNA target sequence for Tshb (NM_009432.1,227-245).
ccactgagtatacaatgta

SEQ ID NO: 567025 - DNA, 19 bp, Mus musculus
  siRNA target sequence for Tshb (NM_009432.1,308-326).
gtatgacacgggatatcaa

SEQ ID NO: 567026 - DNA, 19 bp, Mus musculus
  siRNA target sequence for Tshb (NM_009432.1,319-337).
gatatcaatggcaaactgt

SEQ ID NO: 567027 - DNA, 19 bp, Mus musculus
  siRNA target sequence for Tshb (NM_009432.1,374-392).
catacagagacttcatcta

SEQ ID NO: 567028 - DNA, 19 bp, Mus musculus
  siRNA target sequence for Tshb (NM_009432.1,390-408).
ctacagaacggtggaaata

SEQ ID NO: 567029 - DNA, 19 bp, Mus musculus
  siRNA target sequence for Tshb (NM_009432.1,468-486).
gtgtggcaagtgtaatact

SEQ ID NO: 567030 - DNA, 19 bp, Mus musculus
  siRNA target sequence for Tshb (NM_009432.1,511-529).
gctgtcagaaccaactact

SEQ ID NO: 567031 - DNA, 19 bp, Mus musculus
  siRNA target sequence for Tshb (NM_009432.1,530-548).
gcaccaagccgcagtcttt

SEQ ID NO: 567032 - DNA, 19 bp, Mus musculus
  siRNA target sequence for Tshb (NM_009432.1,533-551).
ccaagccgcagtctttcta

SEQ ID NO: 567033 - DNA, 19 bp, Mus musculus
  siRNA target sequence for Tshb (NM_009432.1,534-552).
caagccgcagtctttctat

SEQ ID NO: 567034 - DNA, 19 bp, Mus musculus
  siRNA target sequence for Uts2 (NM_011910.1,66-84).
cttcataggacttctgaat

SEQ ID NO: 567035 - DNA, 19 bp, Mus musculus
  siRNA target sequence for Uts2 (NM_011910.1,295-313).
gctttcgctgggcaaaatt

SEQ ID NO: 567036 - DNA, 19 bp, Mus musculus
  siRNA target sequence for Vip (NM_011702.1,420-438).
gttttcaccagcgattaca

SEQ ID NO: 567037 - DNA, 19 bp, Mus musculus
  siRNA target sequence for Vip (NM_011702.1,453-471).
cagatttctgccaaaaaat

SEQ ID NO: 567038 - DNA, 19 bp, Mus musculus
  siRNA target sequence for Vip (NM_011702.1,481-499).
cactcattggcaaacgaat

SEQ ID NO: 567039 - DNA, 19 bp, Mus musculus
  siRNA target sequence for Vip (NM_011702.1,546-564).
gatgccgtcttcacagata

SEQ ID NO: 567040 - DNA, 19 bp, Mus musculus
  siRNA target sequence for Vip (NM_011702.1,549-567).
gccgtcttcacagataact

SEQ ID NO: 567041 - DNA, 19 bp, Mus musculus
  siRNA target sequence for Vip (NM_011702.1,569-587).
cacccgcctcagaaagcaa

SEQ ID NO: 567042 - DNA, 19 bp, Mus musculus
  siRNA target sequence for Vip (NM_011702.1,643-661).
gagattctgcagactttct

SEQ ID NO: 567043 - DNA, 19 bp, Mus musculus
  siRNA target sequence for Zlut1 (NM_175644.1,332-350).
ggagcctccctacattgaa

SEQ ID NO: 567044 - DNA, 19 bp, Mus musculus
  siRNA target sequence for Zlut1 (NM_175644.1,341-359).
ctacattgaagcctatcat

SEQ ID NO: 567045 - DNA, 19 bp, Mus musculus
  siRNA target sequence for Zlut1 (NM_175644.1,361-379).
gagtgtgtacatacaatga

SEQ ID NO: 567046 - DNA, 19 bp, Mus musculus
  siRNA target sequence for Zlut1 (NM_175644.1,415-433).
cccctggagtcgatccttt

SEQ ID NO: 567047 - DNA, 19 bp, Mus musculus
  siRNA target sequence for Zlut1 (NM_175644.1,418-436).
ctggagtcgatcctttcta

SEQ ID NO: 567048 - DNA, 19 bp, Mus musculus
  siRNA target sequence for Zlut1 (NM_175644.1,420-438).
ggagtcgatcctttctaca

SEQ ID NO: 567049 - DNA, 19 bp, Mus musculus
  siRNA target sequence for Dok1 (NM_010070.3,50-68).
gatggagggtccgcttttt

SEQ ID NO: 567050 - DNA, 19 bp, Mus musculus
  siRNA target sequence for Dok1 (NM_010070.3,151-169).
ggctggaattctttgatca

SEQ ID NO: 567051 - DNA, 19 bp, Mus musculus
  siRNA target sequence for Dok1 (NM_010070.3,210-228).
cgtctagactgcaagatga

SEQ ID NO: 567052 - DNA, 19 bp, Mus musculus
  siRNA target sequence for Dok1 (NM_010070.3,211-229).
gtctagactgcaagatgat

SEQ ID NO: 567053 - DNA, 19 bp, Mus musculus
  siRNA target sequence for Dok1 (NM_010070.3,227-245).
gatacgcctggctgaatgt

SEQ ID NO: 567054 - DNA, 19 bp, Mus musculus
  siRNA target sequence for Dok1 (NM_010070.3,358-376).
ccgcctgggtgcagacttt

SEQ ID NO: 567055 - DNA, 19 bp, Mus musculus
  siRNA target sequence for Dok1 (NM_010070.3,421-439).
cggagaaccaacctaagtt

SEQ ID NO: 567056 - DNA, 19 bp, Mus musculus
  siRNA target sequence for Dok1 (NM_010070.3,423-441).
gagaaccaacctaagtttt

SEQ ID NO: 567057 - DNA, 19 bp, Mus musculus
  siRNA target sequence for Dok1 (NM_010070.3,515-533).
gaagaccgaggcttctgaa

SEQ ID NO: 567058 - DNA, 19 bp, Mus musculus
  siRNA target sequence for Dok1 (NM_010070.3,542-560).
cttgcaaggctcctacata

SEQ ID NO: 567059 - DNA, 19 bp, Mus musculus
  siRNA target sequence for Dok1 (NM_010070.3,546-564).
caaggctcctacatactga

SEQ ID NO: 567060 - DNA, 19 bp, Mus musculus
  siRNA target sequence for Dok1 (NM_010070.3,601-619).
gtgcgcagagtcaaatcct

SEQ ID NO: 567061 - DNA, 19 bp, Mus musculus
  siRNA target sequence for Dok1 (NM_010070.3,666-684).
cgggacaaggtaatgttct

SEQ ID NO: 567062 - DNA, 19 bp, Mus musculus
  siRNA target sequence for Dok1 (NM_010070.3,742-760).
ctcagggaaatgacatctt

SEQ ID NO: 567063 - DNA, 19 bp, Mus musculus
  siRNA target sequence for Dok1 (NM_010070.3,1106-1124).
ggaccccatctatgatgaa

SEQ ID NO: 567064 - DNA, 19 bp, Mus musculus
  siRNA target sequence for Dok1 (NM_010070.3,1222-1240).
gctatgagctcccttacaa

SEQ ID NO: 567065 - DNA, 19 bp, Mus musculus
  siRNA target sequence for Dok1 (NM_010070.3,1241-1259).
ccctgccaccgatgactat

SEQ ID NO: 567066 - DNA, 19 bp, Mus musculus
  siRNA target sequence for Dok1 (NM_010070.3,1385-1403).
cagccaggtccagaaaagt

SEQ ID NO: 567067 - DNA, 19 bp, Mus musculus
  siRNA target sequence for Dok1 (NM_010070.3,1424-1442).
ctgtggactctctaaagta

SEQ ID NO: 567068 - DNA, 19 bp, Mus musculus
  siRNA target sequence for Dok2 (NM_010071.1,139-157).
cggttcgcagccgtgttat

SEQ ID NO: 567069 - DNA, 19 bp, Mus musculus
  siRNA target sequence for Dok2 (NM_010071.1,140-158).
ggttcgcagccgtgttata

SEQ ID NO: 567070 - DNA, 19 bp, Mus musculus
  siRNA target sequence for Dok2 (NM_010071.1,141-159).
gttcgcagccgtgttatat

SEQ ID NO: 567071 - DNA, 19 bp, Mus musculus
  siRNA target sequence for Dok2 (NM_010071.1,144-162).
cgcagccgtgttatatgga

SEQ ID NO: 567072 - DNA, 19 bp, Mus musculus
  siRNA target sequence for Dok2 (NM_010071.1,465-483).
ggaggagaacgagttgtat

SEQ ID NO: 567073 - DNA, 19 bp, Mus musculus
  siRNA target sequence for Dok2 (NM_010071.1,466-484).
gaggagaacgagttgtata

SEQ ID NO: 567074 - DNA, 19 bp, Mus musculus
  siRNA target sequence for Dok2 (NM_010071.1,556-574).
cggctccgagggtcctata

SEQ ID NO: 567075 - DNA, 19 bp, Mus musculus
  siRNA target sequence for Dok2 (NM_010071.1,625-643).
ggcacacagctatatgact

SEQ ID NO: 567076 - DNA, 19 bp, Mus musculus
  siRNA target sequence for Dok2 (NM_010071.1,671-689).
ggcgtgacaaggcaacttt

SEQ ID NO: 567077 - DNA, 19 bp, Mus musculus
  siRNA target sequence for Dok2 (NM_010071.1,672-690).
gcgtgacaaggcaactttt

SEQ ID NO: 567078 - DNA, 19 bp, Mus musculus
  siRNA target sequence for Dok2 (NM_010071.1,673-691).
cgtgacaaggcaacttttt

SEQ ID NO: 567079 - DNA, 19 bp, Mus musculus
  siRNA target sequence for Dok2 (NM_010071.1,717-735).
ctctggagagggcaacttt

SEQ ID NO: 567080 - DNA, 19 bp, Mus musculus
  siRNA target sequence for Dok2 (NM_010071.1,727-745).
ggcaactttgagttcgaaa

SEQ ID NO: 567081 - DNA, 19 bp, Mus musculus
  siRNA target sequence for Dok2 (NM_010071.1,746-764).
cacgacacggcaatgagat

SEQ ID NO: 567082 - DNA, 19 bp, Mus musculus
  siRNA target sequence for Dok2 (NM_010071.1,749-767).
gacacggcaatgagatctt

SEQ ID NO: 567083 - DNA, 19 bp, Mus musculus
  siRNA target sequence for Dok2 (NM_010071.1,966-984).
gtatgccgtaccctttgat

SEQ ID NO: 567084 - DNA, 19 bp, Mus musculus
  siRNA target sequence for Dok2 (NM_010071.1,1247-1265).
cacaggcaactgagtatga

SEQ ID NO: 567085 - DNA, 19 bp, Mus musculus
  siRNA target sequence for Dok2 (NM_010071.1,1249-1267).
caggcaactgagtatgaca

SEQ ID NO: 567086 - DNA, 19 bp, Mus musculus
  siRNA target sequence for Dok2 (NM_010071.1,1251-1269).
ggcaactgagtatgacaat

SEQ ID NO: 567087 - DNA, 19 bp, Mus musculus
  siRNA target sequence for Dok2 (NM_010071.1,1253-1271).
caactgagtatgacaatgt

SEQ ID NO: 567088 - DNA, 19 bp, Mus musculus
  siRNA target sequence for Dok2 (NM_010071.1,1256-1274).
ctgagtatgacaatgtcat

SEQ ID NO: 567089 - DNA, 19 bp, Mus musculus
  siRNA target sequence for Dok4 (NM_053246.1,523-541).
ggtggccatcatattcaca

SEQ ID NO: 567090 - DNA, 19 bp, Mus musculus
  siRNA target sequence for Dok4 (NM_053246.1,623-641).
ggatcacggctcaatgaca

SEQ ID NO: 567091 - DNA, 19 bp, Mus musculus
  siRNA target sequence for Dok4 (NM_053246.1,854-872).
gatgctacgcgctttacct

SEQ ID NO: 567092 - DNA, 19 bp, Mus musculus
  siRNA target sequence for Dok4 (NM_053246.1,900-918).
gggaagggctctatacctt

SEQ ID NO: 567093 - DNA, 19 bp, Mus musculus
  siRNA target sequence for Dok4 (NM_053246.1,901-919).
ggaagggctctataccttt

SEQ ID NO: 567094 - DNA, 19 bp, Mus musculus
  siRNA target sequence for Dok4 (NM_053246.1,1093-1111).
gtactggcaccatatcaca

SEQ ID NO: 567095 - DNA, 19 bp, Mus musculus
  siRNA target sequence for Dok4 (NM_053246.1,1138-1156).
cagctatggggaaagttat

SEQ ID NO: 567096 - DNA, 19 bp, Mus musculus
  siRNA target sequence for Dok5 (NM_029761.2,237-255).
gcagacgcctggggattta

SEQ ID NO: 567097 - DNA, 19 bp, Mus musculus
  siRNA target sequence for Dok5 (NM_029761.2,238-256).
cagacgcctggggatttat

SEQ ID NO: 567098 - DNA, 19 bp, Mus musculus
  siRNA target sequence for Dok5 (NM_029761.2,261-279).
gatgctggttagtgttcaa

SEQ ID NO: 567099 - DNA, 19 bp, Mus musculus
  siRNA target sequence for Dok5 (NM_029761.2,358-376).
ggttacagaactcaacaat

SEQ ID NO: 567100 - DNA, 19 bp, Mus musculus
  siRNA target sequence for Dok5 (NM_029761.2,416-434).
catgctatagggatttatt

SEQ ID NO: 567101 - DNA, 19 bp, Mus musculus
  siRNA target sequence for Dok5 (NM_029761.2,456-474).
cctttgcctgtgaatcaga

SEQ ID NO: 567102 - DNA, 19 bp, Mus musculus
  siRNA target sequence for Dok5 (NM_029761.2,516-534).
gtgtggggaccagaatcaa

SEQ ID NO: 567103 - DNA, 19 bp, Mus musculus
  siRNA target sequence for Dok5 (NM_029761.2,522-540).
ggaccagaatcaatgacat

SEQ ID NO: 567104 - DNA, 19 bp, Mus musculus
  siRNA target sequence for Dok5 (NM_029761.2,586-604).
gcagagcgagaggttcaat

SEQ ID NO: 567105 - DNA, 19 bp, Mus musculus
  siRNA target sequence for Dok5 (NM_029761.2,591-609).
gcgagaggttcaatgtgta

SEQ ID NO: 567106 - DNA, 19 bp, Mus musculus
  siRNA target sequence for Dok5 (NM_029761.2,593-611).
gagaggttcaatgtgtatt

SEQ ID NO: 567107 - DNA, 19 bp, Mus musculus
  siRNA target sequence for Dok5 (NM_029761.2,613-631).
gatgccatctcctaactta

SEQ ID NO: 567108 - DNA, 19 bp, Mus musculus
  siRNA target sequence for Dok5 (NM_029761.2,621-639).
ctcctaacttagatgtaca

SEQ ID NO: 567109 - DNA, 19 bp, Mus musculus
  siRNA target sequence for Dok5 (NM_029761.2,648-666).
gtgccttgcagattacata

SEQ ID NO: 567110 - DNA, 19 bp, Mus musculus
  siRNA target sequence for Dok5 (NM_029761.2,651-669).
ccttgcagattacatatga

SEQ ID NO: 567111 - DNA, 19 bp, Mus musculus
  siRNA target sequence for Dok5 (NM_029761.2,752-770).
gacaccacgtggttcactt

SEQ ID NO: 567112 - DNA, 19 bp, Mus musculus
  siRNA target sequence for Dok5 (NM_029761.2,754-772).
caccacgtggttcactttt

SEQ ID NO: 567113 - DNA, 19 bp, Mus musculus
  siRNA target sequence for Dok5 (NM_029761.2,756-774).
ccacgtggttcacttttga

SEQ ID NO: 567114 - DNA, 19 bp, Mus musculus
  siRNA target sequence for Dok5 (NM_029761.2,793-811).
gactggcgaagggttattt

SEQ ID NO: 567115 - DNA, 19 bp, Mus musculus
  siRNA target sequence for Dok5 (NM_029761.2,795-813).
ctggcgaagggttatttat

SEQ ID NO: 567116 - DNA, 19 bp, Mus musculus
  siRNA target sequence for Dok5 (NM_029761.2,896-914).
ctgcagagcgtgaaaaatt

SEQ ID NO: 567117 - DNA, 19 bp, Mus musculus
  siRNA target sequence for Frs2 (NM_177798.3,366-384).
gttgtagctgtccagataa

SEQ ID NO: 567118 - DNA, 19 bp, Mus musculus
  siRNA target sequence for Frs2 (NM_177798.3,398-416).
gataaccatcggaacaagt

SEQ ID NO: 567119 - DNA, 19 bp, Mus musculus
  siRNA target sequence for Frs2 (NM_177798.3,505-523).
gaaacgggactcggtaaaa

SEQ ID NO: 567120 - DNA, 19 bp, Mus musculus
  siRNA target sequence for Frs2 (NM_177798.3,542-560).
cgacgatacggctatgact

SEQ ID NO: 567121 - DNA, 19 bp, Mus musculus
  siRNA target sequence for Frs2 (NM_177798.3,551-569).
ggctatgactcaaatctgt

SEQ ID NO: 567122 - DNA, 19 bp, Mus musculus
  siRNA target sequence for Frs2 (NM_177798.3,552-570).
gctatgactcaaatctgtt

SEQ ID NO: 567123 - DNA, 19 bp, Mus musculus
  siRNA target sequence for Frs2 (NM_177798.3,553-571).
ctatgactcaaatctgttt

SEQ ID NO: 567124 - DNA, 19 bp, Mus musculus
  siRNA target sequence for Frs2 (NM_177798.3,627-645).
gtgcccgtgcagaagaatt

SEQ ID NO: 567125 - DNA, 19 bp, Mus musculus
  siRNA target sequence for Frs2 (NM_177798.3,629-647).
gcccgtgcagaagaattat

SEQ ID NO: 567126 - DNA, 19 bp, Mus musculus
  siRNA target sequence for Frs2 (NM_177798.3,631-649).
ccgtgcagaagaattattt

SEQ ID NO: 567127 - DNA, 19 bp, Mus musculus
  siRNA target sequence for Frs2 (NM_177798.3,632-650).
cgtgcagaagaattattta

SEQ ID NO: 567128 - DNA, 19 bp, Mus musculus
  siRNA target sequence for Frs2 (NM_177798.3,635-653).
gcagaagaattatttaaca

SEQ ID NO: 567129 - DNA, 19 bp, Mus musculus
  siRNA target sequence for Frs2 (NM_177798.3,775-793).
gctcggtgctcagaactta

SEQ ID NO: 567130 - DNA, 19 bp, Mus musculus
  siRNA target sequence for Frs2 (NM_177798.3,866-884).
ggaagtgctcgcttacctt

SEQ ID NO: 567131 - DNA, 19 bp, Mus musculus
  siRNA target sequence for Frs2 (NM_177798.3,916-934).
cgtggctgaggaacaagta

SEQ ID NO: 567132 - DNA, 19 bp, Mus musculus
  siRNA target sequence for Frs2 (NM_177798.3,929-947).
caagtacatacttatgtta

SEQ ID NO: 567133 - DNA, 19 bp, Mus musculus
  siRNA target sequence for Frs2 (NM_177798.3,1070-1088).
gacccgcaagtgcttctta

SEQ ID NO: 567134 - DNA, 19 bp, Mus musculus
  siRNA target sequence for Frs2 (NM_177798.3,1125-1143).
ctgtccagaagcagttaat

SEQ ID NO: 567135 - DNA, 19 bp, Mus musculus
  siRNA target sequence for Frs2 (NM_177798.3,1129-1147).
ccagaagcagttaatggaa

SEQ ID NO: 567136 - DNA, 19 bp, Mus musculus
  siRNA target sequence for Frs2 (NM_177798.3,1130-1148).
cagaagcagttaatggaaa

SEQ ID NO: 567137 - DNA, 19 bp, Mus musculus
  siRNA target sequence for Frs2 (NM_177798.3,1378-1396).
gagaagacctgcactatta

SEQ ID NO: 567138 - DNA, 19 bp, Mus musculus
  siRNA target sequence for Frs2 (NM_177798.3,1380-1398).
gaagacctgcactattaaa

SEQ ID NO: 567139 - DNA, 19 bp, Mus musculus
  siRNA target sequence for Frs2 (NM_177798.3,1383-1401).
gacctgcactattaaacta

SEQ ID NO: 567140 - DNA, 19 bp, Mus musculus
  siRNA target sequence for Frs2 (NM_177798.3,1386-1404).
ctgcactattaaactatga

SEQ ID NO: 567141 - DNA, 19 bp, Mus musculus
  siRNA target sequence for Frs2 (NM_177798.3,1444-1462).
gctcagtagggatgaagat

SEQ ID NO: 567142 - DNA, 19 bp, Mus musculus
  siRNA target sequence for Frs2 (NM_177798.3,1497-1515).
gctaccataataatctaga

SEQ ID NO: 567143 - DNA, 19 bp, Mus musculus
  siRNA target sequence for Frs2 (NM_177798.3,1498-1516).
ctaccataataatctagat

SEQ ID NO: 567144 - DNA, 19 bp, Mus musculus
  siRNA target sequence for Frs2 (NM_177798.3,1518-1536).
caatgcataactatgttaa

SEQ ID NO: 567145 - DNA, 19 bp, Mus musculus
  siRNA target sequence for Frs2 (NM_177798.3,1557-1575).
cggcaagtgctcacaaaat

SEQ ID NO: 567146 - DNA, 19 bp, Mus musculus
  siRNA target sequence for Frs2 (NM_177798.3,1560-1578).
caagtgctcacaaaataga

SEQ ID NO: 567147 - DNA, 19 bp, Mus musculus
  siRNA target sequence for Frs2 (NM_177798.3,1565-1583).
gctcacaaaatagactatt

SEQ ID NO: 567148 - DNA, 19 bp, Mus musculus
  siRNA target sequence for Frs2 (NM_177798.3,1568-1586).
cacaaaatagactattcga

SEQ ID NO: 567149 - DNA, 19 bp, Mus musculus
  siRNA target sequence for Frs2 (NM_177798.3,1585-1603).
gaagcgcagggattgtaca

SEQ ID NO: 567150 - DNA, 19 bp, Mus musculus
  siRNA target sequence for Frs2 (NM_177798.3,1599-1617).
gtacaccgacagtctttaa

SEQ ID NO: 567151 - DNA, 19 bp, Mus musculus
  siRNA target sequence for Frs2 (NM_177798.3,1602-1620).
caccgacagtctttaactt

SEQ ID NO: 567152 - DNA, 19 bp, Mus musculus
  siRNA target sequence for Frs2 (NM_177798.3,1605-1623).
cgacagtctttaactttga

SEQ ID NO: 567153 - DNA, 19 bp, Mus musculus
  siRNA target sequence for Frs2 (NM_177798.3,1627-1645).
caggcgacccagtttagaa

SEQ ID NO: 567154 - DNA, 19 bp, Mus musculus
  siRNA target sequence for Frs2 (NM_177798.3,1629-1647).
ggcgacccagtttagaaca

SEQ ID NO: 567155 - DNA, 19 bp, Mus musculus
  siRNA target sequence for Frs2 (NM_177798.3,1630-1648).
gcgacccagtttagaacat

SEQ ID NO: 567156 - DNA, 19 bp, Mus musculus
  siRNA target sequence for Frs2 (NM_177798.3,1631-1649).
cgacccagtttagaacata

SEQ ID NO: 567157 - DNA, 19 bp, Mus musculus
  siRNA target sequence for Frs2 (NM_177798.3,1646-1664).
cataggcaactcaattata

SEQ ID NO: 567158 - DNA, 19 bp, Mus musculus
  siRNA target sequence for Frs2 (NM_177798.3,1763-1781).
ctgtacgctgtgatagaca

SEQ ID NO: 567159 - DNA, 19 bp, Mus musculus
  siRNA target sequence for Frs2 (NM_177798.3,1765-1783).
gtacgctgtgatagacatt

SEQ ID NO: 567160 - DNA, 19 bp, Mus musculus
  siRNA target sequence for Frs2 (NM_177798.3,1844-1862).
cggaagacgaggcacaata

SEQ ID NO: 567161 - DNA, 19 bp, Mus musculus
  siRNA target sequence for Frs2 (NM_177798.3,1846-1864).
gaagacgaggcacaatagt

SEQ ID NO: 567162 - DNA, 19 bp, Mus musculus
  siRNA target sequence for Frs2 (NM_177798.3,1849-1867).
gacgaggcacaatagtact

SEQ ID NO: 567163 - DNA, 19 bp, Mus musculus
  siRNA target sequence for Frs3 (NM_144939.1,428-446).
ggctacgactccaatctct

SEQ ID NO: 567164 - DNA, 19 bp, Mus musculus
  siRNA target sequence for Frs3 (NM_144939.1,429-447).
gctacgactccaatctctt

SEQ ID NO: 567165 - DNA, 19 bp, Mus musculus
  siRNA target sequence for Frs3 (NM_144939.1,479-497).
ggccagggcatctttgcat

SEQ ID NO: 567166 - DNA, 19 bp, Mus musculus
  siRNA target sequence for Frs3 (NM_144939.1,570-588).
cggaggagccggtcatcat

SEQ ID NO: 567167 - DNA, 19 bp, Mus musculus
  siRNA target sequence for Frs3 (NM_144939.1,1288-1306).
gcttaccccgtcctcaaat

SEQ ID NO: 567168 - DNA, 19 bp, Mus musculus
  siRNA target sequence for Frs3 (NM_144939.1,1424-1442).
cgggtcttcaactttgatt

SEQ ID NO: 567169 - DNA, 19 bp, Mus musculus
  siRNA target sequence for Frs3 (NM_144939.1,1425-1443).
gggtcttcaactttgattt

SEQ ID NO: 567170 - DNA, 19 bp, Mus musculus
  siRNA target sequence for Frs3 (NM_144939.1,1467-1485).
caaggcagctcaactacat

SEQ ID NO: 567171 - DNA, 19 bp, Mus musculus
  siRNA target sequence for Frs3 (NM_144939.1,1645-1663).
ggctctgccccgagatgat

SEQ ID NO: 567172 - DNA, 19 bp, Mus musculus
  siRNA target sequence for Irs1 (NM_010570.2,995-1013).
gtatgcataagcgcttttt

SEQ ID NO: 567173 - DNA, 19 bp, Mus musculus
  siRNA target sequence for Irs1 (NM_010570.2,1117-1135).
cccctcgagagctgtttca

SEQ ID NO: 567174 - DNA, 19 bp, Mus musculus
  siRNA target sequence for Irs1 (NM_010570.2,1120-1138).
ctcgagagctgtttcaaca

SEQ ID NO: 567175 - DNA, 19 bp, Mus musculus
  siRNA target sequence for Irs1 (NM_010570.2,1185-1203).
cacccgagacgaacacttt

SEQ ID NO: 567176 - DNA, 19 bp, Mus musculus
  siRNA target sequence for Irs1 (NM_010570.2,1682-1700).
gggccatgagcgatgagtt

SEQ ID NO: 567177 - DNA, 19 bp, Mus musculus
  siRNA target sequence for Irs1 (NM_010570.2,1683-1701).
ggccatgagcgatgagttt

SEQ ID NO: 567178 - DNA, 19 bp, Mus musculus
  siRNA target sequence for Irs1 (NM_010570.2,2079-2097).
gagtctgtcatctagtagt

SEQ ID NO: 567179 - DNA, 19 bp, Mus musculus
  siRNA target sequence for Irs1 (NM_010570.2,2168-2186).
ctagcgatggcggtttcat

SEQ ID NO: 567180 - DNA, 19 bp, Mus musculus
  siRNA target sequence for Irs1 (NM_010570.2,2447-2465).
gtgcagcagatctggataa

SEQ ID NO: 567181 - DNA, 19 bp, Mus musculus
  siRNA target sequence for Irs1 (NM_010570.2,2458-2476).
ctggataaccggtttcgaa

SEQ ID NO: 567182 - DNA, 19 bp, Mus musculus
  siRNA target sequence for Irs1 (NM_010570.2,2545-2563).
gcttctattgaggaatata

SEQ ID NO: 567183 - DNA, 19 bp, Mus musculus
  siRNA target sequence for Irs1 (NM_010570.2,2660-2678).
ccgaagagggtctagagat

SEQ ID NO: 567184 - DNA, 19 bp, Mus musculus
  siRNA target sequence for Irs1 (NM_010570.2,2724-2742).
caacctccacactgatgat

SEQ ID NO: 567185 - DNA, 19 bp, Mus musculus
  siRNA target sequence for Irs1 (NM_010570.2,2836-2854).
gccccacagcagatcatta

SEQ ID NO: 567186 - DNA, 19 bp, Mus musculus
  siRNA target sequence for Irs1 (NM_010570.2,2887-2905).
cccaatggctacatgatga

SEQ ID NO: 567187 - DNA, 19 bp, Mus musculus
  siRNA target sequence for Irs1 (NM_010570.2,3144-3162).
cccctcagaatgctactat

SEQ ID NO: 567188 - DNA, 19 bp, Mus musculus
  siRNA target sequence for Irs1 (NM_010570.2,3206-3224).
cattgccaaggtcctttaa

SEQ ID NO: 567189 - DNA, 19 bp, Mus musculus
  siRNA target sequence for Irs1 (NM_010570.2,3271-3289).
catcttcgtctctcttcta

SEQ ID NO: 567190 - DNA, 19 bp, Mus musculus
  siRNA target sequence for Irs1 (NM_010570.2,3578-3596).
ccaaaagcccaggagaata

SEQ ID NO: 567191 - DNA, 19 bp, Mus musculus
  siRNA target sequence for Irs1 (NM_010570.2,3579-3597).
caaaagcccaggagaatat

SEQ ID NO: 567192 - DNA, 19 bp, Mus musculus
  siRNA target sequence for Irs1 (NM_010570.2,3617-3635).
gcggccagcctggctattt

SEQ ID NO: 567193 - DNA, 19 bp, Mus musculus
  siRNA target sequence for Irs1 (NM_010570.2,3654-3672).
ccgtagctctccttcagtt

SEQ ID NO: 567194 - DNA, 19 bp, Mus musculus
  siRNA target sequence for Irs1 (NM_010570.2,3890-3908).
gttgtcctcgtcaaagcta

SEQ ID NO: 567195 - DNA, 19 bp, Mus musculus
  siRNA target sequence for Irs1 (NM_010570.2,4299-4317).
cggcagtgaggatgtaaaa

SEQ ID NO: 567196 - DNA, 19 bp, Mus musculus
  siRNA target sequence for Irs1 (NM_010570.2,4414-4432).
ggtttggagaagagtctta

SEQ ID NO: 567197 - DNA, 19 bp, Mus musculus
  siRNA target sequence for Irs1 (NM_010570.2,4422-4440).
gaagagtcttaactacata

SEQ ID NO: 567198 - DNA, 19 bp, Mus musculus
  siRNA target sequence for Irs1 (NM_010570.2,4550-4568).
gacgctccagtgaggattt

SEQ ID NO: 567199 - DNA, 19 bp, Mus musculus
  siRNA target sequence for Irs1 (NM_010570.2,4552-4570).
cgctccagtgaggatttaa

SEQ ID NO: 567200 - DNA, 19 bp, Mus musculus
  siRNA target sequence for Irs1 (NM_010570.2,4556-4574).
ccagtgaggatttaagcaa

SEQ ID NO: 567201 - DNA, 19 bp, Mus musculus
  siRNA target sequence for Irs3 (NM_010571.1,257-275).
ctcggctcaccgtttcctt

SEQ ID NO: 567202 - DNA, 19 bp, Mus musculus
  siRNA target sequence for Irs3 (NM_010571.1,448-466).
ggagggtgcctgcactatt

SEQ ID NO: 567203 - DNA, 19 bp, Mus musculus
  siRNA target sequence for Irs3 (NM_010571.1,449-467).
gagggtgcctgcactatta

SEQ ID NO: 567204 - DNA, 19 bp, Mus musculus
  siRNA target sequence for Irs3 (NM_010571.1,452-470).
ggtgcctgcactattagca

SEQ ID NO: 567205 - DNA, 19 bp, Mus musculus
  siRNA target sequence for Irs3 (NM_010571.1,453-471).
gtgcctgcactattagcaa

SEQ ID NO: 567206 - DNA, 19 bp, Mus musculus
  siRNA target sequence for Irs3 (NM_010571.1,494-512).
cacctgatcgtcatctata

SEQ ID NO: 567207 - DNA, 19 bp, Mus musculus
  siRNA target sequence for Irs3 (NM_010571.1,497-515).
ctgatcgtcatctatacca

SEQ ID NO: 567208 - DNA, 19 bp, Mus musculus
  siRNA target sequence for Irs3 (NM_010571.1,867-885).
gtggccacgcagactcttt

SEQ ID NO: 567209 - DNA, 19 bp, Mus musculus
  siRNA target sequence for Irs3 (NM_010571.1,958-976).
ggtggcccaaagcattcat

SEQ ID NO: 567210 - DNA, 19 bp, Mus musculus
  siRNA target sequence for Irs3 (NM_010571.1,1080-1098).
ccccgacaccatatgaaat

SEQ ID NO: 567211 - DNA, 19 bp, Mus musculus
  siRNA target sequence for Irs3 (NM_010571.1,1186-1204).
ctcctacaagggactagat

SEQ ID NO: 567212 - DNA, 19 bp, Mus musculus
  siRNA target sequence for Irs3 (NM_010571.1,1188-1206).
cctacaagggactagatct

SEQ ID NO: 567213 - DNA, 19 bp, Mus musculus
  siRNA target sequence for Irs3 (NM_010571.1,1314-1332).
ctgccagggcagatcctaa

SEQ ID NO: 567214 - DNA, 19 bp, Mus musculus
  siRNA target sequence for Irs3 (NM_010571.1,1316-1334).
gccagggcagatcctaata

SEQ ID NO: 567215 - DNA, 19 bp, Mus musculus
  siRNA target sequence for Irs3 (NM_010571.1,1320-1338).
gggcagatcctaataagca

SEQ ID NO: 567216 - DNA, 19 bp, Mus musculus
  siRNA target sequence for Irs3 (NM_010571.1,1436-1454).
catccgggtgcccattgta

SEQ ID NO: 567217 - DNA, 19 bp, Mus musculus
  siRNA target sequence for Irs3 (NM_010571.1,1531-1549).
gtccatccccgactatgta

SEQ ID NO: 567218 - DNA, 19 bp, Mus musculus
  siRNA target sequence for Irs3 (NM_010571.1,1647-1665).
ggaagagtccacatagcta

SEQ ID NO: 567219 - DNA, 19 bp, Mus musculus
  siRNA target sequence for Irs3 (NM_010571.1,1648-1666).
gaagagtccacatagctat

SEQ ID NO: 567220 - DNA, 19 bp, Mus musculus
  siRNA target sequence for Irs4 (NM_010572.1,284-302).
gttacttcgtgctcaaact

SEQ ID NO: 567221 - DNA, 19 bp, Mus musculus
  siRNA target sequence for Irs4 (NM_010572.1,317-335).
ctccagctcgactcgaata

SEQ ID NO: 567222 - DNA, 19 bp, Mus musculus
  siRNA target sequence for Irs4 (NM_010572.1,319-337).
ccagctcgactcgaatact

SEQ ID NO: 567223 - DNA, 19 bp, Mus musculus
  siRNA target sequence for Irs4 (NM_010572.1,320-338).
cagctcgactcgaatacta

SEQ ID NO: 567224 - DNA, 19 bp, Mus musculus
  siRNA target sequence for Irs4 (NM_010572.1,680-698).
cggagccacccttctacaa

SEQ ID NO: 567225 - DNA, 19 bp, Mus musculus
  siRNA target sequence for Irs4 (NM_010572.1,779-797).
ccgacgaagaggtagtgtt

SEQ ID NO: 567226 - DNA, 19 bp, Mus musculus
  siRNA target sequence for Irs4 (NM_010572.1,780-798).
cgacgaagaggtagtgttt

SEQ ID NO: 567227 - DNA, 19 bp, Mus musculus
  siRNA target sequence for Irs4 (NM_010572.1,862-880).
cactcggagcagtacttct

SEQ ID NO: 567228 - DNA, 19 bp, Mus musculus
  siRNA target sequence for Irs4 (NM_010572.1,891-909).
cggcagatccactgtcata

SEQ ID NO: 567229 - DNA, 19 bp, Mus musculus
  siRNA target sequence for Irs4 (NM_010572.1,991-1009).
gccttgtgcgcagatgaat

SEQ ID NO: 567230 - DNA, 19 bp, Mus musculus
  siRNA target sequence for Irs4 (NM_010572.1,992-1010).
ccttgtgcgcagatgaata

SEQ ID NO: 567231 - DNA, 19 bp, Mus musculus
  siRNA target sequence for Irs4 (NM_010572.1,996-1014).
gtgcgcagatgaatacaga

SEQ ID NO: 567232 - DNA, 19 bp, Mus musculus
  siRNA target sequence for Irs4 (NM_010572.1,1024-1042).
cgcagctacagcatcagta

SEQ ID NO: 567233 - DNA, 19 bp, Mus musculus
  siRNA target sequence for Irs4 (NM_010572.1,1025-1043).
gcagctacagcatcagtat

SEQ ID NO: 567234 - DNA, 19 bp, Mus musculus
  siRNA target sequence for Irs4 (NM_010572.1,1026-1044).
cagctacagcatcagtatt

SEQ ID NO: 567235 - DNA, 19 bp, Mus musculus
  siRNA target sequence for Irs4 (NM_010572.1,1424-1442).
gaaaccgaggtgattgcat

SEQ ID NO: 567236 - DNA, 19 bp, Mus musculus
  siRNA target sequence for Irs4 (NM_010572.1,1429-1447).
cgaggtgattgcataccta

SEQ ID NO: 567237 - DNA, 19 bp, Mus musculus
  siRNA target sequence for Irs4 (NM_010572.1,1430-1448).
gaggtgattgcatacctat

SEQ ID NO: 567238 - DNA, 19 bp, Mus musculus
  siRNA target sequence for Irs4 (NM_010572.1,1433-1451).
gtgattgcatacctatgaa

SEQ ID NO: 567239 - DNA, 19 bp, Mus musculus
  siRNA target sequence for Irs4 (NM_010572.1,1435-1453).
gattgcatacctatgaaca

SEQ ID NO: 567240 - DNA, 19 bp, Mus musculus
  siRNA target sequence for Irs4 (NM_010572.1,1712-1730).
gaagtgggaaaaattctga

SEQ ID NO: 567241 - DNA, 19 bp, Mus musculus
  siRNA target sequence for Irs4 (NM_010572.1,1731-1749).
cgatggtgaccgtggaaaa

SEQ ID NO: 567242 - DNA, 19 bp, Mus musculus
  siRNA target sequence for Irs4 (NM_010572.1,1732-1750).
gatggtgaccgtggaaaat

SEQ ID NO: 567243 - DNA, 19 bp, Mus musculus
  siRNA target sequence for Irs4 (NM_010572.1,1736-1754).
gtgaccgtggaaaatctgt

SEQ ID NO: 567244 - DNA, 19 bp, Mus musculus
  siRNA target sequence for Irs4 (NM_010572.1,1742-1760).
gtggaaaatctgtgaagaa

SEQ ID NO: 567245 - DNA, 19 bp, Mus musculus
  siRNA target sequence for Irs4 (NM_010572.1,1755-1773).
gaagaaaagatcctacttt

SEQ ID NO: 567246 - DNA, 19 bp, Mus musculus
  siRNA target sequence for Irs4 (NM_010572.1,1871-1889).
gaagattccgactttattt

SEQ ID NO: 567247 - DNA, 19 bp, Mus musculus
  siRNA target sequence for Irs4 (NM_010572.1,1924-1942).
gccaaagaggtaagagata

SEQ ID NO: 567248 - DNA, 19 bp, Mus musculus
  siRNA target sequence for Irs4 (NM_010572.1,1925-1943).
ccaaagaggtaagagatat

SEQ ID NO: 567249 - DNA, 19 bp, Mus musculus
  siRNA target sequence for Irs4 (NM_010572.1,1977-1995).
cagagccagagctttcgat

SEQ ID NO: 567250 - DNA, 19 bp, Mus musculus
  siRNA target sequence for Irs4 (NM_010572.1,1982-2000).
ccagagctttcgatgaaga

SEQ ID NO: 567251 - DNA, 19 bp, Mus musculus
  siRNA target sequence for Irs4 (NM_010572.1,2010-2028).
cccgtatgtgccaatgaga

SEQ ID NO: 567252 - DNA, 19 bp, Mus musculus
  siRNA target sequence for Irs4 (NM_010572.1,2047-2065).
cttgcgtgttccagtgatt

SEQ ID NO: 567253 - DNA, 19 bp, Mus musculus
  siRNA target sequence for Irs4 (NM_010572.1,2050-2068).
gcgtgttccagtgattata

SEQ ID NO: 567254 - DNA, 19 bp, Mus musculus
  siRNA target sequence for Irs4 (NM_010572.1,2070-2088).
gccaatggctcctcaaaat

SEQ ID NO: 567255 - DNA, 19 bp, Mus musculus
  siRNA target sequence for Irs4 (NM_010572.1,2071-2089).
ccaatggctcctcaaaatt

SEQ ID NO: 567256 - DNA, 19 bp, Mus musculus
  siRNA target sequence for Irs4 (NM_010572.1,2114-2132).
ctaggtcaccctttgaaga

SEQ ID NO: 567257 - DNA, 19 bp, Mus musculus
  siRNA target sequence for Irs4 (NM_010572.1,2135-2153).
ccagagggtacatgatgat

SEQ ID NO: 567258 - DNA, 19 bp, Mus musculus
  siRNA target sequence for Irs4 (NM_010572.1,2272-2290).
ggagcaggtgcgattccta

SEQ ID NO: 567259 - DNA, 19 bp, Mus musculus
  siRNA target sequence for Irs4 (NM_010572.1,2273-2291).
gagcaggtgcgattcctaa

SEQ ID NO: 567260 - DNA, 19 bp, Mus musculus
  siRNA target sequence for Irs4 (NM_010572.1,2275-2293).
gcaggtgcgattcctaaaa

SEQ ID NO: 567261 - DNA, 19 bp, Mus musculus
  siRNA target sequence for Irs4 (NM_010572.1,2276-2294).
caggtgcgattcctaaaaa

SEQ ID NO: 567262 - DNA, 19 bp, Mus musculus
  siRNA target sequence for Irs4 (NM_010572.1,2430-2448).
ggggagcggtctacacaaa

SEQ ID NO: 567263 - DNA, 19 bp, Mus musculus
  siRNA target sequence for Irs4 (NM_010572.1,2432-2450).
ggagcggtctacacaaaga

SEQ ID NO: 567264 - DNA, 19 bp, Mus musculus
  siRNA target sequence for Irs4 (NM_010572.1,2433-2451).
gagcggtctacacaaagaa

SEQ ID NO: 567265 - DNA, 19 bp, Mus musculus
  siRNA target sequence for Irs4 (NM_010572.1,2462-2480).
gccagggcaccaaaaatgt

SEQ ID NO: 567266 - DNA, 19 bp, Mus musculus
  siRNA target sequence for Irs4 (NM_010572.1,2464-2482).
cagggcaccaaaaatgtgt

SEQ ID NO: 567267 - DNA, 19 bp, Mus musculus
  siRNA target sequence for Irs4 (NM_010572.1,2554-2572).
gatgtgcccccaatgaaca

SEQ ID NO: 567268 - DNA, 19 bp, Mus musculus
  siRNA target sequence for Irs4 (NM_010572.1,2666-2684).
ctggctcccgtgactatat

SEQ ID NO: 567269 - DNA, 19 bp, Mus musculus
  siRNA target sequence for Irs4 (NM_010572.1,2668-2686).
ggctcccgtgactatatca

SEQ ID NO: 567270 - DNA, 19 bp, Mus musculus
  siRNA target sequence for Irs4 (NM_010572.1,2669-2687).
gctcccgtgactatatcaa

SEQ ID NO: 567271 - DNA, 19 bp, Mus musculus
  siRNA target sequence for Irs4 (NM_010572.1,2673-2691).
ccgtgactatatcaacatt

SEQ ID NO: 567272 - DNA, 19 bp, Mus musculus
  siRNA target sequence for Irs4 (NM_010572.1,2772-2790).
cgcacccacagctttttct

SEQ ID NO: 567273 - DNA, 19 bp, Mus musculus
  siRNA target sequence for Irs4 (NM_010572.1,2911-2929).
ccaggcagtgctataggta

SEQ ID NO: 567274 - DNA, 19 bp, Mus musculus
  siRNA target sequence for Irs4 (NM_010572.1,2916-2934).
cagtgctataggtagcatt

SEQ ID NO: 567275 - DNA, 19 bp, Mus musculus
  siRNA target sequence for Irs4 (NM_010572.1,2935-2953).
gtggaagcgggagaataca

SEQ ID NO: 567276 - DNA, 19 bp, Mus musculus
  siRNA target sequence for Irs4 (NM_010572.1,2937-2955).
ggaagcgggagaatacatt

SEQ ID NO: 567277 - DNA, 19 bp, Mus musculus
  siRNA target sequence for Irs4 (NM_010572.1,2942-2960).
cgggagaatacattgaagt

SEQ ID NO: 567278 - DNA, 19 bp, Mus musculus
  siRNA target sequence for Irs4 (NM_010572.1,2943-2961).
gggagaatacattgaagtt

SEQ ID NO: 567279 - DNA, 19 bp, Mus musculus
  siRNA target sequence for Irs4 (NM_010572.1,2944-2962).
ggagaatacattgaagtta

SEQ ID NO: 567280 - DNA, 19 bp, Mus musculus
  siRNA target sequence for Irs4 (NM_010572.1,2945-2963).
gagaatacattgaagttat

SEQ ID NO: 567281 - DNA, 19 bp, Mus musculus
  siRNA target sequence for Irs4 (NM_010572.1,3003-3021).
cagtgccatttgctatgat

SEQ ID NO: 567282 - DNA, 19 bp, Mus musculus
  siRNA target sequence for Irs4 (NM_010572.1,3065-3083).
gctgtatggacgtttctct

SEQ ID NO: 567283 - DNA, 19 bp, Mus musculus
  siRNA target sequence for Cd4 (NM_013488.1,364-382).
gcatggcaaaggtgtatta

SEQ ID NO: 567284 - DNA, 19 bp, Mus musculus
  siRNA target sequence for Cd4 (NM_013488.1,365-383).
catggcaaaggtgtattaa

SEQ ID NO: 567285 - DNA, 19 bp, Mus musculus
  siRNA target sequence for Cd4 (NM_013488.1,368-386).
ggcaaaggtgtattaatta

SEQ ID NO: 567286 - DNA, 19 bp, Mus musculus
  siRNA target sequence for Cd4 (NM_013488.1,402-420).
cgcagtttgatcgttttga

SEQ ID NO: 567287 - DNA, 19 bp, Mus musculus
  siRNA target sequence for Cd4 (NM_013488.1,403-421).
gcagtttgatcgttttgat

SEQ ID NO: 567288 - DNA, 19 bp, Mus musculus
  siRNA target sequence for Cd4 (NM_013488.1,404-422).
cagtttgatcgttttgatt

SEQ ID NO: 567289 - DNA, 19 bp, Mus musculus
  siRNA target sequence for Cd4 (NM_013488.1,410-428).
gatcgttttgattccaaaa

SEQ ID NO: 567290 - DNA, 19 bp, Mus musculus
  siRNA target sequence for Cd4 (NM_013488.1,450-468).
cgtttcctctcatcatcaa

SEQ ID NO: 567291 - DNA, 19 bp, Mus musculus
  siRNA target sequence for Cd4 (NM_013488.1,532-550).
ggagttgtgggtgttcaaa

SEQ ID NO: 567292 - DNA, 19 bp, Mus musculus
  siRNA target sequence for Cd4 (NM_013488.1,597-615).
ccctgaccttggatagcaa

SEQ ID NO: 567293 - DNA, 19 bp, Mus musculus
  siRNA target sequence for Cd4 (NM_013488.1,801-819).
cagctatcacggcctataa

SEQ ID NO: 567294 - DNA, 19 bp, Mus musculus
  siRNA target sequence for Cd4 (NM_013488.1,803-821).
gctatcacggcctataaga

SEQ ID NO: 567295 - DNA, 19 bp, Mus musculus
  siRNA target sequence for Cd4 (NM_013488.1,927-945).
ggatctccttctccataaa

SEQ ID NO: 567296 - DNA, 19 bp, Mus musculus
  siRNA target sequence for Cd4 (NM_013488.1,934-952).
cttctccataaagaacaaa

SEQ ID NO: 567297 - DNA, 19 bp, Mus musculus
  siRNA target sequence for Cd4 (NM_013488.1,953-971).
gaggtgtccgtacaaaagt

SEQ ID NO: 567298 - DNA, 19 bp, Mus musculus
  siRNA target sequence for Cd4 (NM_013488.1,1030-1048).
ccaggtctcgcttcagttt

SEQ ID NO: 567299 - DNA, 19 bp, Mus musculus
  siRNA target sequence for Cd4 (NM_013488.1,1124-1142).
gtggctcagctcaacaata

SEQ ID NO: 567300 - DNA, 19 bp, Mus musculus
  siRNA target sequence for Cd4 (NM_013488.1,1126-1144).
ggctcagctcaacaatact

SEQ ID NO: 567301 - DNA, 19 bp, Mus musculus
  siRNA target sequence for Cd4 (NM_013488.1,1127-1145).
gctcagctcaacaatactt

SEQ ID NO: 567302 - DNA, 19 bp, Mus musculus
  siRNA target sequence for Cd4 (NM_013488.1,1130-1148).
cagctcaacaatactttga

SEQ ID NO: 567303 - DNA, 19 bp, Mus musculus
  siRNA target sequence for Cd4 (NM_013488.1,1447-1465).
ccaggcagcacgaatgtct

SEQ ID NO: 567304 - DNA, 19 bp, Mus musculus
  siRNA target sequence for Cd4 (NM_013488.1,1455-1473).
cacgaatgtctcagatcaa

SEQ ID NO: 567305 - DNA, 19 bp, Mus musculus
  siRNA target sequence for Cd4 (NM_013488.1,1520-1538).
cagaagagccataatctca

SEQ ID NO: 567306 - DNA, 19 bp, Mus musculus
  siRNA target sequence for Icos (NM_017480.1,116-134).
gctcggccgatcataggat

SEQ ID NO: 567307 - DNA, 19 bp, Mus musculus
  siRNA target sequence for Icos (NM_017480.1,120-138).
ggccgatcataggatgttt

SEQ ID NO: 567308 - DNA, 19 bp, Mus musculus
  siRNA target sequence for Icos (NM_017480.1,121-139).
gccgatcataggatgtttt

SEQ ID NO: 567309 - DNA, 19 bp, Mus musculus
  siRNA target sequence for Icos (NM_017480.1,154-172).
ggtgtacagatttcttgta

SEQ ID NO: 567310 - DNA, 19 bp, Mus musculus
  siRNA target sequence for Icos (NM_017480.1,185-203).
ctgtccagcagttaaaaat

SEQ ID NO: 567311 - DNA, 19 bp, Mus musculus
  siRNA target sequence for Icos (NM_017480.1,284-302).
caatgctctgtctatatca

SEQ ID NO: 567312 - DNA, 19 bp, Mus musculus
  siRNA target sequence for Icos (NM_017480.1,317-335).
gcgtctcttttttcctaaa

SEQ ID NO: 567313 - DNA, 19 bp, Mus musculus
  siRNA target sequence for Icos (NM_017480.1,347-365).
gctcccagggaagctatta

SEQ ID NO: 567314 - DNA, 19 bp, Mus musculus
  siRNA target sequence for Icos (NM_017480.1,350-368).
cccagggaagctattactt

SEQ ID NO: 567315 - DNA, 19 bp, Mus musculus
  siRNA target sequence for Icos (NM_017480.1,411-429).
gaaccttagtggaggatat

SEQ ID NO: 567316 - DNA, 19 bp, Mus musculus
  siRNA target sequence for Icos (NM_017480.1,498-516).
cgttgtggtactccttttt

SEQ ID NO: 567317 - DNA, 19 bp, Mus musculus
  siRNA target sequence for Icos (NM_017480.1,511-529).
ctttttggatgcatactta

SEQ ID NO: 567318 - DNA, 19 bp, Mus musculus
  siRNA target sequence for Icos (NM_017480.1,567-585).
gcatgaccctaatagtgaa

SEQ ID NO: 567319 - DNA, 19 bp, Mus musculus
  siRNA target sequence for Icos (NM_017480.1,568-586).
catgaccctaatagtgaat

SEQ ID NO: 567320 - DNA, 19 bp, Mus musculus
  siRNA target sequence for Icos (NM_017480.1,571-589).
gaccctaatagtgaataca

SEQ ID NO: 567321 - DNA, 19 bp, Mus musculus
  siRNA target sequence for Gpnmb (NM_053110.2,159-177).
ggctgccaagcgatttcgt

SEQ ID NO: 567322 - DNA, 19 bp, Mus musculus
  siRNA target sequence for Gpnmb (NM_053110.2,235-253).
ggctggtcttcggatgaaa

SEQ ID NO: 567323 - DNA, 19 bp, Mus musculus
  siRNA target sequence for Gpnmb (NM_053110.2,236-254).
gctggtcttcggatgaaaa

SEQ ID NO: 567324 - DNA, 19 bp, Mus musculus
  siRNA target sequence for Gpnmb (NM_053110.2,434-452).
gcaatatcgtctatgagaa

SEQ ID NO: 567325 - DNA, 19 bp, Mus musculus
  siRNA target sequence for Gpnmb (NM_053110.2,614-632).
gctttgtctacgtctttca

SEQ ID NO: 567326 - DNA, 19 bp, Mus musculus
  siRNA target sequence for Gpnmb (NM_053110.2,671-689).
cagcacgggtttctataaa

SEQ ID NO: 567327 - DNA, 19 bp, Mus musculus
  siRNA target sequence for Gpnmb (NM_053110.2,724-742).
gaagtgactgtctttcgaa

SEQ ID NO: 567328 - DNA, 19 bp, Mus musculus
  siRNA target sequence for Gpnmb (NM_053110.2,888-906).
cgatgtcctcattcatgat

SEQ ID NO: 567329 - DNA, 19 bp, Mus musculus
  siRNA target sequence for Gpnmb (NM_053110.2,990-1008).
cactttgaatcacacttat

SEQ ID NO: 567330 - DNA, 19 bp, Mus musculus
  siRNA target sequence for Gpnmb (NM_053110.2,992-1010).
ctttgaatcacacttatgt

SEQ ID NO: 567331 - DNA, 19 bp, Mus musculus
  siRNA target sequence for Gpnmb (NM_053110.2,1168-1186).
cctactggttacaaatcca

SEQ ID NO: 567332 - DNA, 19 bp, Mus musculus
  siRNA target sequence for Gpnmb (NM_053110.2,1169-1187).
ctactggttacaaatccat

SEQ ID NO: 567333 - DNA, 19 bp, Mus musculus
  siRNA target sequence for Gpnmb (NM_053110.2,1194-1212).
gagtgacatttccaatgaa

SEQ ID NO: 567334 - DNA, 19 bp, Mus musculus
  siRNA target sequence for Gpnmb (NM_053110.2,1210-1228).
gaaaactgccgaataaaca

SEQ ID NO: 567335 - DNA, 19 bp, Mus musculus
  siRNA target sequence for Gpnmb (NM_053110.2,1244-1262).
gagccaccatcacaattgt

SEQ ID NO: 567336 - DNA, 19 bp, Mus musculus
  siRNA target sequence for Gpnmb (NM_053110.2,1247-1265).
ccaccatcacaattgtaga

SEQ ID NO: 567337 - DNA, 19 bp, Mus musculus
  siRNA target sequence for Nisch (NM_022656.1,435-453).
gccctgtgactgctatcat

SEQ ID NO: 567338 - DNA, 19 bp, Mus musculus
  siRNA target sequence for Nisch (NM_022656.1,504-522).
gtgagatcgacgaatctgt

SEQ ID NO: 567339 - DNA, 19 bp, Mus musculus
  siRNA target sequence for Nisch (NM_022656.1,508-526).
gatcgacgaatctgtgaaa

SEQ ID NO: 567340 - DNA, 19 bp, Mus musculus
  siRNA target sequence for Nisch (NM_022656.1,512-530).
gacgaatctgtgaaactga

SEQ ID NO: 567341 - DNA, 19 bp, Mus musculus
  siRNA target sequence for Nisch (NM_022656.1,523-541).
gaaactgatcccaaagata

SEQ ID NO: 567342 - DNA, 19 bp, Mus musculus
  siRNA target sequence for Nisch (NM_022656.1,567-585).
gactgcgagttgtggataa

SEQ ID NO: 567343 - DNA, 19 bp, Mus musculus
  siRNA target sequence for Nisch (NM_022656.1,660-678).
ctaaactgggcaatgtcaa

SEQ ID NO: 567344 - DNA, 19 bp, Mus musculus
  siRNA target sequence for Nisch (NM_022656.1,692-710).
gcaggcaacttcttagaga

SEQ ID NO: 567345 - DNA, 19 bp, Mus musculus
  siRNA target sequence for Nisch (NM_022656.1,822-840).
gtttgaccttgctgaacaa

SEQ ID NO: 567346 - DNA, 19 bp, Mus musculus
  siRNA target sequence for Nisch (NM_022656.1,893-911).
gaacgagcctctgagattt

SEQ ID NO: 567347 - DNA, 19 bp, Mus musculus
  siRNA target sequence for Nisch (NM_022656.1,1122-1140).
ccaaccaaggtatcatgtt

SEQ ID NO: 567348 - DNA, 19 bp, Mus musculus
  siRNA target sequence for Nisch (NM_022656.1,1123-1141).
caaccaaggtatcatgttt

SEQ ID NO: 567349 - DNA, 19 bp, Mus musculus
  siRNA target sequence for Nisch (NM_022656.1,1126-1144).
ccaaggtatcatgtttgta

SEQ ID NO: 567350 - DNA, 19 bp, Mus musculus
  siRNA target sequence for Nisch (NM_022656.1,1344-1362).
ctgggtccggccagatcat

SEQ ID NO: 567351 - DNA, 19 bp, Mus musculus
  siRNA target sequence for Nisch (NM_022656.1,1398-1416).
ccaaccaggactttatcca

SEQ ID NO: 567352 - DNA, 19 bp, Mus musculus
  siRNA target sequence for Nisch (NM_022656.1,1553-1571).
gagaaccgctactttgaaa

SEQ ID NO: 567353 - DNA, 19 bp, Mus musculus
  siRNA target sequence for Nisch (NM_022656.1,1798-1816).
cttcggcatcgcagtcttt

SEQ ID NO: 567354 - DNA, 19 bp, Mus musculus
  siRNA target sequence for Nisch (NM_022656.1,1863-1881).
catccctgcgttttgtctt

SEQ ID NO: 567355 - DNA, 19 bp, Mus musculus
  siRNA target sequence for Nisch (NM_022656.1,1981-1999).
ctcggatgctgccaactta

SEQ ID NO: 567356 - DNA, 19 bp, Mus musculus
  siRNA target sequence for Nisch (NM_022656.1,1983-2001).
cggatgctgccaacttaca

SEQ ID NO: 567357 - DNA, 19 bp, Mus musculus
  siRNA target sequence for Nisch (NM_022656.1,2002-2020).
cgagttccatgctgatcta

SEQ ID NO: 567358 - DNA, 19 bp, Mus musculus
  siRNA target sequence for Nisch (NM_022656.1,2217-2235).
gggactattcaggcaatat

SEQ ID NO: 567359 - DNA, 19 bp, Mus musculus
  siRNA target sequence for Nisch (NM_022656.1,2221-2239).
ctattcaggcaatatcgaa

SEQ ID NO: 567360 - DNA, 19 bp, Mus musculus
  siRNA target sequence for Nisch (NM_022656.1,2411-2429).
cgcaacagcttcaagctta

SEQ ID NO: 567361 - DNA, 19 bp, Mus musculus
  siRNA target sequence for Nisch (NM_022656.1,2525-2543).
gtgggctaccgcttcgtta

SEQ ID NO: 567362 - DNA, 19 bp, Mus musculus
  siRNA target sequence for Nisch (NM_022656.1,2536-2554).
cttcgttaccgccatcttt

SEQ ID NO: 567363 - DNA, 19 bp, Mus musculus
  siRNA target sequence for Nisch (NM_022656.1,2555-2573).
gtgctgccccacgagaaat

SEQ ID NO: 567364 - DNA, 19 bp, Mus musculus
  siRNA target sequence for Nisch (NM_022656.1,2819-2837).
gaggaccgaggtctaactt

SEQ ID NO: 567365 - DNA, 19 bp, Mus musculus
  siRNA target sequence for Nisch (NM_022656.1,2821-2839).
ggaccgaggtctaacttca

SEQ ID NO: 567366 - DNA, 19 bp, Mus musculus
  siRNA target sequence for Nisch (NM_022656.1,3204-3222).
caagtgagcgcctaatcca

SEQ ID NO: 567367 - DNA, 19 bp, Mus musculus
  siRNA target sequence for Nisch (NM_022656.1,3223-3241).
gtccacatctgaagagaat

SEQ ID NO: 567368 - DNA, 19 bp, Mus musculus
  siRNA target sequence for Nisch (NM_022656.1,3509-3527).
cagaaaaacaccgactata

SEQ ID NO: 567369 - DNA, 19 bp, Mus musculus
  siRNA target sequence for Nisch (NM_022656.1,3735-3753).
cgcctgagcctgttgacaa

SEQ ID NO: 567370 - DNA, 19 bp, Mus musculus
  siRNA target sequence for Nisch (NM_022656.1,3892-3910).
ggctgatcctgcaaagaat

SEQ ID NO: 567371 - DNA, 19 bp, Mus musculus
  siRNA target sequence for Nisch (NM_022656.1,4080-4098).
caccgcagagggacagata

SEQ ID NO: 567372 - DNA, 19 bp, Mus musculus
  siRNA target sequence for Cdc42ep2 (NM_026772.1,335-353).
caccaaggtccccatctat

SEQ ID NO: 567373 - DNA, 19 bp, Mus musculus
  siRNA target sequence for Cdc42ep2 (NM_026772.1,337-355).
ccaaggtccccatctattt

SEQ ID NO: 567374 - DNA, 19 bp, Mus musculus
  siRNA target sequence for Cdc42ep2 (NM_026772.1,341-359).
ggtccccatctatttgaaa

SEQ ID NO: 567375 - DNA, 19 bp, Mus musculus
  siRNA target sequence for Cdc42ep2 (NM_026772.1,440-458).
ccgtcacactattcacatt

SEQ ID NO: 567376 - DNA, 19 bp, Mus musculus
  siRNA target sequence for Cdc42ep2 (NM_026772.1,579-597).
cagtttactcgcactacaa

SEQ ID NO: 567377 - DNA, 19 bp, Mus musculus
  siRNA target sequence for Cdc42ep2 (NM_026772.1,653-671).
ctccctccctgtaattggt

SEQ ID NO: 567378 - DNA, 19 bp, Mus musculus
  siRNA target sequence for Cdc42ep2 (NM_026772.1,720-738).
cctcgcttgcaccttgaat

SEQ ID NO: 567379 - DNA, 19 bp, Mus musculus
  siRNA target sequence for Pdyn (NM_018863.2,239-257).
cctcgtgatgccctctaat

SEQ ID NO: 567380 - DNA, 19 bp, Mus musculus
  siRNA target sequence for Pdyn (NM_018863.2,242-260).
cgtgatgccctctaatgtt

SEQ ID NO: 567381 - DNA, 19 bp, Mus musculus
  siRNA target sequence for Pdyn (NM_018863.2,243-261).
gtgatgccctctaatgtta

SEQ ID NO: 567382 - DNA, 19 bp, Mus musculus
  siRNA target sequence for Pdyn (NM_018863.2,614-632).
gggtgctgaccggatgaat

SEQ ID NO: 567383 - DNA, 19 bp, Mus musculus
  siRNA target sequence for Pdyn (NM_018863.2,619-637).
ctgaccggatgaatgatga

SEQ ID NO: 567384 - DNA, 19 bp, Mus musculus
  siRNA target sequence for Pdyn (NM_018863.2,703-721).
gcggctttttgcgcaaata

SEQ ID NO: 567385 - DNA, 19 bp, Mus musculus
  siRNA target sequence for Pdyn (NM_018863.2,909-927).
caggagaaccccaatacct

SEQ ID NO: 567386 - DNA, 19 bp, Mus musculus
  siRNA target sequence for Pdyn (NM_018863.2,914-932).
gaaccccaatacctattct

SEQ ID NO: 567387 - DNA, 19 bp, Mus musculus
  siRNA target sequence for Pdyn (NM_018863.2,917-935).
ccccaatacctattctgaa

SEQ ID NO: 567388 - DNA, 19 bp, Mus musculus
  siRNA target sequence for Pdyn (NM_018863.2,920-938).
caatacctattctgaagat

SEQ ID NO: 567389 - DNA, 19 bp, Mus musculus
  siRNA target sequence for Pdyn (NM_018863.2,926-944).
ctattctgaagatttagat

SEQ ID NO: 567390 - DNA, 19 bp, Mus musculus
  siRNA target sequence for Pnoc (NM_010932.1,272-290).
ctgtatgcaccaaagtcat

SEQ ID NO: 567391 - DNA, 19 bp, Mus musculus
  siRNA target sequence for Pnoc (NM_010932.1,567-585).
gaagcggttcagtgagttt

SEQ ID NO: 567392 - DNA, 19 bp, Mus musculus
  siRNA target sequence for Pnoc (NM_010932.1,606-624).
gagcatgcagtcaagtcaa

SEQ ID NO: 567393 - DNA, 19 bp, Mus musculus
  siRNA target sequence for Pnoc (NM_010932.1,635-653).
ccctgcaccagaatggtaa

SEQ ID NO: 567394 - DNA, 19 bp, Mus musculus
  siRNA target sequence for Pnoc (NM_010932.1,636-654).
cctgcaccagaatggtaat

SEQ ID NO: 567395 - DNA, 19 bp, Mus musculus
  siRNA target sequence for Tlr8 (NM_133212.1,70-88).
gccccctcagtcatggatt

SEQ ID NO: 567396 - DNA, 19 bp, Mus musculus
  siRNA target sequence for Tlr8 (NM_133212.1,120-138).
ccagtgccatcttccataa

SEQ ID NO: 567397 - DNA, 19 bp, Mus musculus
  siRNA target sequence for Tlr8 (NM_133212.1,130-148).
cttccataaagcgaactat

SEQ ID NO: 567398 - DNA, 19 bp, Mus musculus
  siRNA target sequence for Tlr8 (NM_133212.1,178-196).
gcacaactcccttgtgatt

SEQ ID NO: 567399 - DNA, 19 bp, Mus musculus
  siRNA target sequence for Tlr8 (NM_133212.1,232-250).
ccaaactataggcaagtat

SEQ ID NO: 567400 - DNA, 19 bp, Mus musculus
  siRNA target sequence for Tlr8 (NM_133212.1,259-277).
catagacttgtcagacaat

SEQ ID NO: 567401 - DNA, 19 bp, Mus musculus
  siRNA target sequence for Tlr8 (NM_133212.1,268-286).
gtcagacaatgccattaca

SEQ ID NO: 567402 - DNA, 19 bp, Mus musculus
  siRNA target sequence for Tlr8 (NM_133212.1,274-292).
caatgccattacacatata

SEQ ID NO: 567403 - DNA, 19 bp, Mus musculus
  siRNA target sequence for Tlr8 (NM_133212.1,278-296).
gccattacacatataacga

SEQ ID NO: 567404 - DNA, 19 bp, Mus musculus
  siRNA target sequence for Tlr8 (NM_133212.1,279-297).
ccattacacatataacgaa

SEQ ID NO: 567405 - DNA, 19 bp, Mus musculus
  siRNA target sequence for Tlr8 (NM_133212.1,280-298).
cattacacatataacgaaa

SEQ ID NO: 567406 - DNA, 19 bp, Mus musculus
  siRNA target sequence for Tlr8 (NM_133212.1,313-331).
gctgcaaaacctcactaaa

SEQ ID NO: 567407 - DNA, 19 bp, Mus musculus
  siRNA target sequence for Tlr8 (NM_133212.1,314-332).
ctgcaaaacctcactaaaa

SEQ ID NO: 567408 - DNA, 19 bp, Mus musculus
  siRNA target sequence for Tlr8 (NM_133212.1,415-433).
cctaagaaatctaacagtt

SEQ ID NO: 567409 - DNA, 19 bp, Mus musculus
  siRNA target sequence for Tlr8 (NM_133212.1,416-434).
ctaagaaatctaacagttt

SEQ ID NO: 567410 - DNA, 19 bp, Mus musculus
  siRNA target sequence for Tlr8 (NM_133212.1,451-469).
ccagttatatactatacct

SEQ ID NO: 567411 - DNA, 19 bp, Mus musculus
  siRNA target sequence for Tlr8 (NM_133212.1,497-515).
cttagcctaattcaaaaca

SEQ ID NO: 567412 - DNA, 19 bp, Mus musculus
  siRNA target sequence for Tlr8 (NM_133212.1,501-519).
gcctaattcaaaacaatat

SEQ ID NO: 567413 - DNA, 19 bp, Mus musculus
  siRNA target sequence for Tlr8 (NM_133212.1,578-596).
ggctggaactgctatttta

SEQ ID NO: 567414 - DNA, 19 bp, Mus musculus
  siRNA target sequence for Tlr8 (NM_133212.1,600-618).
gtaatcaaacctttaaggt

SEQ ID NO: 567415 - DNA, 19 bp, Mus musculus
  siRNA target sequence for Tlr8 (NM_133212.1,627-645).
gggcatttaaaaatcttat

SEQ ID NO: 567416 - DNA, 19 bp, Mus musculus
  siRNA target sequence for Tlr8 (NM_133212.1,649-667).
cttgaaggtactctcatta

SEQ ID NO: 567417 - DNA, 19 bp, Mus musculus
  siRNA target sequence for Tlr8 (NM_133212.1,652-670).
gaaggtactctcattatct

SEQ ID NO: 567418 - DNA, 19 bp, Mus musculus
  siRNA target sequence for Tlr8 (NM_133212.1,656-674).
gtactctcattatctttca

SEQ ID NO: 567419 - DNA, 19 bp, Mus musculus
  siRNA target sequence for Tlr8 (NM_133212.1,659-677).
ctctcattatctttcaata

SEQ ID NO: 567420 - DNA, 19 bp, Mus musculus
  siRNA target sequence for Tlr8 (NM_133212.1,669-687).
ctttcaataaccttttcta

SEQ ID NO: 567421 - DNA, 19 bp, Mus musculus
  siRNA target sequence for Tlr8 (NM_133212.1,766-784).
cttcaaaggactggaaaat

SEQ ID NO: 567422 - DNA, 19 bp, Mus musculus
  siRNA target sequence for Tlr8 (NM_133212.1,811-829).
ctgtccaaggtgttacaat

SEQ ID NO: 567423 - DNA, 19 bp, Mus musculus
  siRNA target sequence for Tlr8 (NM_133212.1,992-1010).
catcttgaattcaactatt

SEQ ID NO: 567424 - DNA, 19 bp, Mus musculus
  siRNA target sequence for Tlr8 (NM_133212.1,1075-1093).
gtccttcaactttcaatat

SEQ ID NO: 567425 - DNA, 19 bp, Mus musculus
  siRNA target sequence for Tlr8 (NM_133212.1,1077-1095).
ccttcaactttcaatataa

SEQ ID NO: 567426 - DNA, 19 bp, Mus musculus
  siRNA target sequence for Tlr8 (NM_133212.1,1081-1099).
caactttcaatataaggaa

SEQ ID NO: 567427 - DNA, 19 bp, Mus musculus
  siRNA target sequence for Tlr8 (NM_133212.1,1148-1166).
ctcaagaagttgcacttaa

SEQ ID NO: 567428 - DNA, 19 bp, Mus musculus
  siRNA target sequence for Tlr8 (NM_133212.1,1171-1189).
ctatgtgttccgagaactt

SEQ ID NO: 567429 - DNA, 19 bp, Mus musculus
  siRNA target sequence for Tlr8 (NM_133212.1,1175-1193).
gtgttccgagaacttaaaa

SEQ ID NO: 567430 - DNA, 19 bp, Mus musculus
  siRNA target sequence for Tlr8 (NM_133212.1,1236-1254).
ccatcaacttgggcattaa

SEQ ID NO: 567431 - DNA, 19 bp, Mus musculus
  siRNA target sequence for Tlr8 (NM_133212.1,1243-1261).
cttgggcattaactttatt

SEQ ID NO: 567432 - DNA, 19 bp, Mus musculus
  siRNA target sequence for Tlr8 (NM_133212.1,1247-1265).
ggcattaactttattgaga

SEQ ID NO: 567433 - DNA, 19 bp, Mus musculus
  siRNA target sequence for Tlr8 (NM_133212.1,1296-1314).
ccaaactcgacgttatcta

SEQ ID NO: 567434 - DNA, 19 bp, Mus musculus
  siRNA target sequence for Tlr8 (NM_133212.1,1297-1315).
caaactcgacgttatctat

SEQ ID NO: 567435 - DNA, 19 bp, Mus musculus
  siRNA target sequence for Tlr8 (NM_133212.1,1301-1319).
ctcgacgttatctatttat

SEQ ID NO: 567436 - DNA, 19 bp, Mus musculus
  siRNA target sequence for Tlr8 (NM_133212.1,1303-1321).
cgacgttatctatttatca

SEQ ID NO: 567437 - DNA, 19 bp, Mus musculus
  siRNA target sequence for Tlr8 (NM_133212.1,1329-1347).
gcatagcatctgtattaga

SEQ ID NO: 567438 - DNA, 19 bp, Mus musculus
  siRNA target sequence for Tlr8 (NM_133212.1,1340-1358).
gtattagatggtacagatt

SEQ ID NO: 567439 - DNA, 19 bp, Mus musculus
  siRNA target sequence for Tlr8 (NM_133212.1,1421-1439).
cacgtgaatttttaccata

SEQ ID NO: 567440 - DNA, 19 bp, Mus musculus
  siRNA target sequence for Tlr8 (NM_133212.1,1459-1477).
gccacagtgtactgcttat

SEQ ID NO: 567441 - DNA, 19 bp, Mus musculus
  siRNA target sequence for Tlr8 (NM_133212.1,1485-1503).
ccttggatttaagtttgaa

SEQ ID NO: 567442 - DNA, 19 bp, Mus musculus
  siRNA target sequence for Tlr8 (NM_133212.1,1489-1507).
ggatttaagtttgaacaat

SEQ ID NO: 567443 - DNA, 19 bp, Mus musculus
  siRNA target sequence for Tlr8 (NM_133212.1,1527-1545).
gccaatttgaaggttttca

SEQ ID NO: 567444 - DNA, 19 bp, Mus musculus
  siRNA target sequence for Tlr8 (NM_133212.1,1544-1562).
caggatatcgcctgcttaa

SEQ ID NO: 567445 - DNA, 19 bp, Mus musculus
  siRNA target sequence for Tlr8 (NM_133212.1,1546-1564).
ggatatcgcctgcttaaat

SEQ ID NO: 567446 - DNA, 19 bp, Mus musculus
  siRNA target sequence for Tlr8 (NM_133212.1,1570-1588).
cttcaatgccaatactcaa

SEQ ID NO: 567447 - DNA, 19 bp, Mus musculus
  siRNA target sequence for Tlr8 (NM_133212.1,1577-1595).
gccaatactcaagtgttta

SEQ ID NO: 567448 - DNA, 19 bp, Mus musculus
  siRNA target sequence for Tlr8 (NM_133212.1,1611-1629).
cctccatgccccacattaa

SEQ ID NO: 567449 - DNA, 19 bp, Mus musculus
  siRNA target sequence for Tlr8 (NM_133212.1,1648-1666).
caacagactagactttgat

SEQ ID NO: 567450 - DNA, 19 bp, Mus musculus
  siRNA target sequence for Tlr8 (NM_133212.1,1651-1669).
cagactagactttgatgat

SEQ ID NO: 567451 - DNA, 19 bp, Mus musculus
  siRNA target sequence for Tlr8 (NM_133212.1,1683-1701).
gtgatcttcacgatctaga

SEQ ID NO: 567452 - DNA, 19 bp, Mus musculus
  siRNA target sequence for Tlr8 (NM_133212.1,1714-1732).
gagccacaatgcacactat

SEQ ID NO: 567453 - DNA, 19 bp, Mus musculus
  siRNA target sequence for Tlr8 (NM_133212.1,1716-1734).
gccacaatgcacactattt

SEQ ID NO: 567454 - DNA, 19 bp, Mus musculus
  siRNA target sequence for Tlr8 (NM_133212.1,1718-1736).
cacaatgcacactatttca

SEQ ID NO: 567455 - DNA, 19 bp, Mus musculus
  siRNA target sequence for Tlr8 (NM_133212.1,1752-1770).
cgcaccgtctaggatttat

SEQ ID NO: 567456 - DNA, 19 bp, Mus musculus
  siRNA target sequence for Tlr8 (NM_133212.1,1870-1888).
ggttttcagtggaaatcgt

SEQ ID NO: 567457 - DNA, 19 bp, Mus musculus
  siRNA target sequence for Tlr8 (NM_133212.1,1954-1972).
gatacgcctggacttatca

SEQ ID NO: 567458 - DNA, 19 bp, Mus musculus
  siRNA target sequence for Tlr8 (NM_133212.1,1958-1976).
cgcctggacttatcataca

SEQ ID NO: 567459 - DNA, 19 bp, Mus musculus
  siRNA target sequence for Tlr8 (NM_133212.1,1971-1989).
catacaataaccttcaaca

SEQ ID NO: 567460 - DNA, 19 bp, Mus musculus
  siRNA target sequence for Tlr8 (NM_133212.1,2027-2045).
ctccaagagttacttatca

SEQ ID NO: 567461 - DNA, 19 bp, Mus musculus
  siRNA target sequence for Tlr8 (NM_133212.1,2029-2047).
ccaagagttacttatcagt

SEQ ID NO: 567462 - DNA, 19 bp, Mus musculus
  siRNA target sequence for Tlr8 (NM_133212.1,2044-2062).
cagtggtaacaaattacgt

SEQ ID NO: 567463 - DNA, 19 bp, Mus musculus
  siRNA target sequence for Tlr8 (NM_133212.1,2046-2064).
gtggtaacaaattacgttt

SEQ ID NO: 567464 - DNA, 19 bp, Mus musculus
  siRNA target sequence for Tlr8 (NM_133212.1,2073-2091).
ggacattactccagtattt

SEQ ID NO: 567465 - DNA, 19 bp, Mus musculus
  siRNA target sequence for Tlr8 (NM_133212.1,2074-2092).
gacattactccagtatttt

SEQ ID NO: 567466 - DNA, 19 bp, Mus musculus
  siRNA target sequence for Tlr8 (NM_133212.1,2098-2116).
ccttcacttgctggattta

SEQ ID NO: 567467 - DNA, 19 bp, Mus musculus
  siRNA target sequence for Tlr8 (NM_133212.1,2102-2120).
cacttgctggatttatcga

SEQ ID NO: 567468 - DNA, 19 bp, Mus musculus
  siRNA target sequence for Tlr8 (NM_133212.1,2107-2125).
gctggatttatcgagaaat

SEQ ID NO: 567469 - DNA, 19 bp, Mus musculus
  siRNA target sequence for Tlr8 (NM_133212.1,2118-2136).
cgagaaatgagctgtattt

SEQ ID NO: 567470 - DNA, 19 bp, Mus musculus
  siRNA target sequence for Tlr8 (NM_133212.1,2141-2159).
cccaattgcctatctaagt

SEQ ID NO: 567471 - DNA, 19 bp, Mus musculus
  siRNA target sequence for Tlr8 (NM_133212.1,2142-2160).
ccaattgcctatctaagtt

SEQ ID NO: 567472 - DNA, 19 bp, Mus musculus
  siRNA target sequence for Tlr8 (NM_133212.1,2143-2161).
caattgcctatctaagttt

SEQ ID NO: 567473 - DNA, 19 bp, Mus musculus
  siRNA target sequence for Tlr8 (NM_133212.1,2183-2201).
ctactgagccataatcatt

SEQ ID NO: 567474 - DNA, 19 bp, Mus musculus
  siRNA target sequence for Tlr8 (NM_133212.1,2255-2273).
gatctaagtttcaacacaa

SEQ ID NO: 567475 - DNA, 19 bp, Mus musculus
  siRNA target sequence for Tlr8 (NM_133212.1,2295-2313).
ccctgcaaaccaagatgaa

SEQ ID NO: 567476 - DNA, 19 bp, Mus musculus
  siRNA target sequence for Tlr8 (NM_133212.1,2311-2329).
gaaaacgaacttgtctatt

SEQ ID NO: 567477 - DNA, 19 bp, Mus musculus
  siRNA target sequence for Tlr8 (NM_133212.1,2332-2350).
ggagctacatgggaactat

SEQ ID NO: 567478 - DNA, 19 bp, Mus musculus
  siRNA target sequence for Tlr8 (NM_133212.1,2333-2351).
gagctacatgggaactatt

SEQ ID NO: 567479 - DNA, 19 bp, Mus musculus
  siRNA target sequence for Tlr8 (NM_133212.1,2335-2353).
gctacatgggaactatttt

SEQ ID NO: 567480 - DNA, 19 bp, Mus musculus
  siRNA target sequence for Tlr8 (NM_133212.1,2356-2374).
ctgcacgtgtgacataagt

SEQ ID NO: 567481 - DNA, 19 bp, Mus musculus
  siRNA target sequence for Tlr8 (NM_133212.1,2361-2379).
cgtgtgacataagtgattt

SEQ ID NO: 567482 - DNA, 19 bp, Mus musculus
  siRNA target sequence for Tlr8 (NM_133212.1,2381-2399).
cgaagctggctagatgaaa

SEQ ID NO: 567483 - DNA, 19 bp, Mus musculus
  siRNA target sequence for Tlr8 (NM_133212.1,2382-2400).
gaagctggctagatgaaaa

SEQ ID NO: 567484 - DNA, 19 bp, Mus musculus
  siRNA target sequence for Tlr8 (NM_133212.1,2404-2422).
gaatatcacaattcctaaa

SEQ ID NO: 567485 - DNA, 19 bp, Mus musculus
  siRNA target sequence for Tlr8 (NM_133212.1,2410-2428).
cacaattcctaaattggta

SEQ ID NO: 567486 - DNA, 19 bp, Mus musculus
  siRNA target sequence for Tlr8 (NM_133212.1,2418-2436).
ctaaattggtaaatgttat

SEQ ID NO: 567487 - DNA, 19 bp, Mus musculus
  siRNA target sequence for Tlr8 (NM_133212.1,2442-2460).
ccaatcctggggatcaaaa

SEQ ID NO: 567488 - DNA, 19 bp, Mus musculus
  siRNA target sequence for Tlr8 (NM_133212.1,2443-2461).
caatcctggggatcaaaaa

SEQ ID NO: 567489 - DNA, 19 bp, Mus musculus
  siRNA target sequence for Tlr8 (NM_133212.1,2450-2468).
ggggatcaaaaatcaaaga

SEQ ID NO: 567490 - DNA, 19 bp, Mus musculus
  siRNA target sequence for Tlr8 (NM_133212.1,2452-2470).
ggatcaaaaatcaaagagt

SEQ ID NO: 567491 - DNA, 19 bp, Mus musculus
  siRNA target sequence for Tlr8 (NM_133212.1,2469-2487).
gtatcatgagcctagatct

SEQ ID NO: 567492 - DNA, 19 bp, Mus musculus
  siRNA target sequence for Tlr8 (NM_133212.1,2483-2501).
gatctcacgacttgtgtat

SEQ ID NO: 567493 - DNA, 19 bp, Mus musculus
  siRNA target sequence for Tlr8 (NM_133212.1,2592-2610).
gggatgtttggtttatcta

SEQ ID NO: 567494 - DNA, 19 bp, Mus musculus
  siRNA target sequence for Tlr8 (NM_133212.1,2597-2615).
gtttggtttatctatcaca

SEQ ID NO: 567495 - DNA, 19 bp, Mus musculus
  siRNA target sequence for Tlr8 (NM_133212.1,2653-2671).
cacatcccaaactttctat

SEQ ID NO: 567496 - DNA, 19 bp, Mus musculus
  siRNA target sequence for Tlr8 (NM_133212.1,2708-2726).
gttactgactgggtaatca

SEQ ID NO: 567497 - DNA, 19 bp, Mus musculus
  siRNA target sequence for Tlr8 (NM_133212.1,2712-2730).
ctgactgggtaatcaatga

SEQ ID NO: 567498 - DNA, 19 bp, Mus musculus
  siRNA target sequence for Tlr8 (NM_133212.1,2791-2809).
ggattgggatccaggatta

SEQ ID NO: 567499 - DNA, 19 bp, Mus musculus
  siRNA target sequence for Tlr8 (NM_133212.1,2804-2822).
ggattacccatcattgata

SEQ ID NO: 567500 - DNA, 19 bp, Mus musculus
  siRNA target sequence for Tlr8 (NM_133212.1,2805-2823).
gattacccatcattgataa

SEQ ID NO: 567501 - DNA, 19 bp, Mus musculus
  siRNA target sequence for Tlr8 (NM_133212.1,2920-2938).
cttgcagaggctaatggat

SEQ ID NO: 567502 - DNA, 19 bp, Mus musculus
  siRNA target sequence for Tlr8 (NM_133212.1,2928-2946).
ggctaatggatgagaacat

SEQ ID NO: 567503 - DNA, 19 bp, Mus musculus
  siRNA target sequence for Tlr8 (NM_133212.1,3053-3071).
cccaaagcagaaaacttgt

SEQ ID NO: 567504 - DNA, 19 bp, Mus musculus
  siRNA target sequence for Tlr8 (NM_133212.1,3114-3132).
cacggtatgacgatttgta

SEQ ID NO: 567505 - DNA, 19 bp, Mus musculus
  siRNA target sequence for Tlr8 (NM_133212.1,3116-3134).
cggtatgacgatttgtaca

SEQ ID NO: 567506 - DNA, 19 bp, Mus musculus
  siRNA target sequence for Tlr8 (NM_133212.1,3117-3135).
ggtatgacgatttgtacat

SEQ ID NO: 567507 - DNA, 19 bp, Mus musculus
  siRNA target sequence for Tlr8 (NM_133212.1,3122-3140).
gacgatttgtacattgatt

SEQ ID NO: 567508 - DNA, 19 bp, Mus musculus
  siRNA target sequence for Gprc5c (NM_147217.1,885-903).
ctctcatctacgtaatgct

SEQ ID NO: 567509 - DNA, 19 bp, Mus musculus
  siRNA target sequence for Gprc5c (NM_147217.1,1017-1035).
gggtggtatggattgtcat

SEQ ID NO: 567510 - DNA, 19 bp, Mus musculus
  siRNA target sequence for Gprc5c (NM_147217.1,1022-1040).
gtatggattgtcatgtaca

SEQ ID NO: 567511 - DNA, 19 bp, Mus musculus
  siRNA target sequence for Gprc5c (NM_147217.1,1182-1200).
gctaccagggggacatgta

SEQ ID NO: 567512 - DNA, 19 bp, Mus musculus
  siRNA target sequence for Gprc5d (NM_053118.1,165-183).
gaagtccacagaagactat

SEQ ID NO: 567513 - DNA, 19 bp, Mus musculus
  siRNA target sequence for Gprc5d (NM_053118.1,170-188).
ccacagaagactattacct

SEQ ID NO: 567514 - DNA, 19 bp, Mus musculus
  siRNA target sequence for Gprc5d (NM_053118.1,360-378).
cgggctcttcggacttact

SEQ ID NO: 567515 - DNA, 19 bp, Mus musculus
  siRNA target sequence for Gprc5d (NM_053118.1,361-379).
gggctcttcggacttactt

SEQ ID NO: 567516 - DNA, 19 bp, Mus musculus
  siRNA target sequence for Gprc5d (NM_053118.1,362-380).
ggctcttcggacttacttt

SEQ ID NO: 567517 - DNA, 19 bp, Mus musculus
  siRNA target sequence for Gprc5d (NM_053118.1,363-381).
gctcttcggacttactttt

SEQ ID NO: 567518 - DNA, 19 bp, Mus musculus
  siRNA target sequence for Gprc5d (NM_053118.1,521-539).
gctggacaacaattctgtt

SEQ ID NO: 567519 - DNA, 19 bp, Mus musculus
  siRNA target sequence for Gprc5d (NM_053118.1,569-587).
ccatcattgcgatagagta

SEQ ID NO: 567520 - DNA, 19 bp, Mus musculus
  siRNA target sequence for Gprc5d (NM_053118.1,570-588).
catcattgcgatagagtat

SEQ ID NO: 567521 - DNA, 19 bp, Mus musculus
  siRNA target sequence for Gprc5d (NM_053118.1,611-629).
gcttgatgttcgagcatat

SEQ ID NO: 567522 - DNA, 19 bp, Mus musculus
  siRNA target sequence for Gprc5d (NM_053118.1,632-650).
caccgtatcagctcaatgt

SEQ ID NO: 567523 - DNA, 19 bp, Mus musculus
  siRNA target sequence for Gprc5d (NM_053118.1,748-766).
cagcacggaaggctcatat

SEQ ID NO: 567524 - DNA, 19 bp, Mus musculus
  siRNA target sequence for Gprc5d (NM_053118.1,753-771).
cggaaggctcatatttgct

SEQ ID NO: 567525 - DNA, 19 bp, Mus musculus
  siRNA target sequence for Gprc5d (NM_053118.1,925-943).
cctgagctgagcatactct

SEQ ID NO: 567526 - DNA, 19 bp, Mus musculus
  siRNA target sequence for Gprc5d (NM_053118.1,1006-1024).
cgcagcttcaggatggata

SEQ ID NO: 567527 - DNA, 19 bp, Mus musculus
  siRNA target sequence for Raet1d (NM_020030.1,385-403).
gggggaatgtttaacacaa

SEQ ID NO: 567528 - DNA, 19 bp, Mus musculus
  siRNA target sequence for Icosl (NM_015790.2,350-368).
ccccacagacgccatttca

SEQ ID NO: 567529 - DNA, 19 bp, Mus musculus
  siRNA target sequence for Icosl (NM_015790.2,351-369).
cccacagacgccatttcaa

SEQ ID NO: 567530 - DNA, 19 bp, Mus musculus
  siRNA target sequence for Icosl (NM_015790.2,353-371).
cacagacgccatttcaact

SEQ ID NO: 567531 - DNA, 19 bp, Mus musculus
  siRNA target sequence for Icosl (NM_015790.2,373-391).
gagtggtctgtatgtctat

SEQ ID NO: 567532 - DNA, 19 bp, Mus musculus
  siRNA target sequence for Icosl (NM_015790.2,386-404).
gtctattggcaaatcgaaa

SEQ ID NO: 567533 - DNA, 19 bp, Mus musculus
  siRNA target sequence for Icosl (NM_015790.2,408-426).
cagaagtttcggtgactta

SEQ ID NO: 567534 - DNA, 19 bp, Mus musculus
  siRNA target sequence for Icosl (NM_015790.2,410-428).
gaagtttcggtgacttact

SEQ ID NO: 567535 - DNA, 19 bp, Mus musculus
  siRNA target sequence for Icosl (NM_015790.2,423-441).
cttactacctgccttacaa

SEQ ID NO: 567536 - DNA, 19 bp, Mus musculus
  siRNA target sequence for Icosl (NM_015790.2,439-457).
caagtctccagggatcaat

SEQ ID NO: 567537 - DNA, 19 bp, Mus musculus
  siRNA target sequence for Icosl (NM_015790.2,501-519).
ccatgaagcagggtaactt

SEQ ID NO: 567538 - DNA, 19 bp, Mus musculus
  siRNA target sequence for Icosl (NM_015790.2,562-580).
gttcacatgccgggtattt

SEQ ID NO: 567539 - DNA, 19 bp, Mus musculus
  siRNA target sequence for Icosl (NM_015790.2,567-585).
catgccgggtatttatgaa

SEQ ID NO: 567540 - DNA, 19 bp, Mus musculus
  siRNA target sequence for Icosl (NM_015790.2,571-589).
ccgggtatttatgaataca

SEQ ID NO: 567541 - DNA, 19 bp, Mus musculus
  siRNA target sequence for Icosl (NM_015790.2,591-609).
ccacagagttagtcaagat

SEQ ID NO: 567542 - DNA, 19 bp, Mus musculus
  siRNA target sequence for Icosl (NM_015790.2,734-752).
gagcccaacctgtattgga

SEQ ID NO: 567543 - DNA, 19 bp, Mus musculus
  siRNA target sequence for Icosl (NM_015790.2,762-780).
cggacaatagcctaataga

SEQ ID NO: 567544 - DNA, 19 bp, Mus musculus
  siRNA target sequence for Icosl (NM_015790.2,764-782).
gacaatagcctaatagaca

SEQ ID NO: 567545 - DNA, 19 bp, Mus musculus
  siRNA target sequence for Icosl (NM_015790.2,784-802).
ggctctgcagaataacact

SEQ ID NO: 567546 - DNA, 19 bp, Mus musculus
  siRNA target sequence for Icosl (NM_015790.2,801-819).
ctgtctacttgaacaagtt

SEQ ID NO: 567547 - DNA, 19 bp, Mus musculus
  siRNA target sequence for Icosl (NM_015790.2,814-832).
caagttgggcctgtatgat

SEQ ID NO: 567548 - DNA, 19 bp, Mus musculus
  siRNA target sequence for Icosl (NM_015790.2,861-879).
catctcgtggggatgttct

SEQ ID NO: 567549 - DNA, 19 bp, Mus musculus
  siRNA target sequence for Icosl (NM_015790.2,922-940).
cattagccaggcagaaagt

SEQ ID NO: 567550 - DNA, 19 bp, Mus musculus
  siRNA target sequence for Icosl (NM_015790.2,935-953).
gaaagtttcactggaaata

SEQ ID NO: 567551 - DNA, 19 bp, Mus musculus
  siRNA target sequence for Icosl (NM_015790.2,975-993).
cccacaataatgagttaaa

SEQ ID NO: 567552 - DNA, 19 bp, Mus musculus
  siRNA target sequence for Icosl (NM_015790.2,976-994).
ccacaataatgagttaaaa

SEQ ID NO: 567553 - DNA, 19 bp, Mus musculus
  siRNA target sequence for Icosl (NM_015790.2,1026-1044).
cagcggcattcgtttcctt

SEQ ID NO: 567554 - DNA, 19 bp, Mus musculus
  siRNA target sequence for Icosl (NM_015790.2,1037-1055).
gtttccttcatcatataca

SEQ ID NO: 567555 - DNA, 19 bp, Mus musculus
  siRNA target sequence for Icosl (NM_015790.2,1063-1081).
gcgtccccaccgaagctat

SEQ ID NO: 567556 - DNA, 19 bp, Mus musculus
  siRNA target sequence for Icosl (NM_015790.2,1064-1082).
cgtccccaccgaagctata

SEQ ID NO: 567557 - DNA, 19 bp, Mus musculus
  siRNA target sequence for Ntn3 (NM_010947.2,650-668).
gggagcctcgctcttgtat

SEQ ID NO: 567558 - DNA, 19 bp, Mus musculus
  siRNA target sequence for Ntn3 (NM_010947.2,651-669).
ggagcctcgctcttgtatt

SEQ ID NO: 567559 - DNA, 19 bp, Mus musculus
  siRNA target sequence for Ntn3 (NM_010947.2,844-862).
caggcacctttcaacgtaa

SEQ ID NO: 567560 - DNA, 19 bp, Mus musculus
  siRNA target sequence for Ntn3 (NM_010947.2,1199-1217).
cagatattcgcatagtact

SEQ ID NO: 567561 - DNA, 19 bp, Mus musculus
  siRNA target sequence for Ntn3 (NM_010947.2,1498-1516).
cgaagatgccgcttcaaca

SEQ ID NO: 567562 - DNA, 19 bp, Mus musculus
  siRNA target sequence for Ntn3 (NM_010947.2,1499-1517).
gaagatgccgcttcaacat

SEQ ID NO: 567563 - DNA, 19 bp, Mus musculus
  siRNA target sequence for Ntn3 (NM_010947.2,1798-1816).
gtggcaccttgcgttaaga

SEQ ID NO: 567564 - DNA, 19 bp, Mus musculus
  siRNA target sequence for Ntn3 (NM_010947.2,1800-1818).
ggcaccttgcgttaagact

SEQ ID NO: 567565 - DNA, 19 bp, Mus musculus
  siRNA target sequence for Nxph3 (NM_130858.1,200-218).
cgcaagcgaggtcatatct

SEQ ID NO: 567566 - DNA, 19 bp, Mus musculus
  siRNA target sequence for Nxph3 (NM_130858.1,333-351).
cctcgaccaaggtgaaaaa

SEQ ID NO: 567567 - DNA, 19 bp, Mus musculus
  siRNA target sequence for Nxph3 (NM_130858.1,334-352).
ctcgaccaaggtgaaaaaa

SEQ ID NO: 567568 - DNA, 19 bp, Mus musculus
  siRNA target sequence for Nxph3 (NM_130858.1,471-489).
ccacgggccaaggtaacat

SEQ ID NO: 567569 - DNA, 19 bp, Mus musculus
  siRNA target sequence for Nxph3 (NM_130858.1,553-571).
cgaagccaaggcatccaaa

SEQ ID NO: 567570 - DNA, 19 bp, Mus musculus
  siRNA target sequence for Nxph3 (NM_130858.1,638-656).
gacccagccaagatctgtt

SEQ ID NO: 567571 - DNA, 19 bp, Mus musculus
  siRNA target sequence for Nxph3 (NM_130858.1,718-736).
cgtctatattgccttctat

SEQ ID NO: 567572 - DNA, 19 bp, Mus musculus
  siRNA target sequence for Nxph3 (NM_130858.1,719-737).
gtctatattgccttctata

SEQ ID NO: 567573 - DNA, 19 bp, Mus musculus
  siRNA target sequence for Tac1 (NM_009311.1,117-135).
ccgtggcggtcttttttct

SEQ ID NO: 567574 - DNA, 19 bp, Mus musculus
  siRNA target sequence for Tac1 (NM_009311.1,136-154).
cgtttccactcaactgttt

SEQ ID NO: 567575 - DNA, 19 bp, Mus musculus
  siRNA target sequence for Tac1 (NM_009311.1,151-169).
gtttgcagaggaaatcgat

SEQ ID NO: 567576 - DNA, 19 bp, Mus musculus
  siRNA target sequence for Tac1 (NM_009311.1,166-184).
cgatgccaacgatgatcta

SEQ ID NO: 567577 - DNA, 19 bp, Mus musculus
  siRNA target sequence for Tac1 (NM_009311.1,167-185).
gatgccaacgatgatctaa

SEQ ID NO: 567578 - DNA, 19 bp, Mus musculus
  siRNA target sequence for Tac1 (NM_009311.1,170-188).
gccaacgatgatctaaatt

SEQ ID NO: 567579 - DNA, 19 bp, Mus musculus
  siRNA target sequence for Tac1 (NM_009311.1,171-189).
ccaacgatgatctaaatta

SEQ ID NO: 567580 - DNA, 19 bp, Mus musculus
  siRNA target sequence for Tac1 (NM_009311.1,172-190).
caacgatgatctaaattat

SEQ ID NO: 567581 - DNA, 19 bp, Mus musculus
  siRNA target sequence for Tac1 (NM_009311.1,176-194).
gatgatctaaattattggt

SEQ ID NO: 567582 - DNA, 19 bp, Mus musculus
  siRNA target sequence for Tac1 (NM_009311.1,204-222).
ccgacagtgaccagatcaa

SEQ ID NO: 567583 - DNA, 19 bp, Mus musculus
  siRNA target sequence for Tac1 (NM_009311.1,421-439).
gggcaaaagagctttaaat

SEQ ID NO: 567584 - DNA, 19 bp, Mus musculus
  siRNA target sequence for Tac1 (NM_009311.1,472-490).
ctacgaaagaagacgtaaa

SEQ ID NO: 567585 - DNA, 19 bp, Mus musculus
  siRNA target sequence for Tac2 (NM_009312.1,506-524).
gtgacatgcacgacttctt

SEQ ID NO: 567586 - DNA, 19 bp, Mus musculus
  siRNA target sequence for Tac2 (NM_009312.1,566-584).
ccaccgacgtggttgaaga

SEQ ID NO: 567587 - DNA, 19 bp, Mus musculus
  siRNA target sequence for Tac4 (NM_053093.1,341-359).
gcaggactcgccagttcta

SEQ ID NO: 567588 - DNA, 19 bp, Mus musculus
  siRNA target sequence for Tac4 (NM_053093.1,342-360).
caggactcgccagttctat

SEQ ID NO: 567589 - DNA, 19 bp, Mus musculus
  siRNA target sequence for Tac4 (NM_053093.1,387-405).
gtatcagctgggacgtata

SEQ ID NO: 567590 - DNA, 19 bp, Mus musculus
  siRNA target sequence for Tac4 (NM_053093.1,426-444).
gagaggtttgtccatagaa

SEQ ID NO: 567591 - DNA, 19 bp, Mus musculus
  siRNA target sequence for Mbl1 (NM_010775.1,370-388).
ggggaccatggagacaata

SEQ ID NO: 567592 - DNA, 19 bp, Mus musculus
  siRNA target sequence for Mbl1 (NM_010775.1,424-442).
gagataaggatcctgaaat

SEQ ID NO: 567593 - DNA, 19 bp, Mus musculus
  siRNA target sequence for Mbl1 (NM_010775.1,477-495).
ctcaatgggcaaaaagtct

SEQ ID NO: 567594 - DNA, 19 bp, Mus musculus
  siRNA target sequence for Mbl1 (NM_010775.1,523-541).
gagaagatgcccttttcca

SEQ ID NO: 567595 - DNA, 19 bp, Mus musculus
  siRNA target sequence for Mbl1 (NM_010775.1,525-543).
gaagatgcccttttccaaa

SEQ ID NO: 567596 - DNA, 19 bp, Mus musculus
  siRNA target sequence for Mbl1 (NM_010775.1,665-683).
ctgaagggcagttcatgta

SEQ ID NO: 567597 - DNA, 19 bp, Mus musculus
  siRNA target sequence for Mbl1 (NM_010775.1,750-768).
ggaagactgtgtcattata

SEQ ID NO: 567598 - DNA, 19 bp, Mus musculus
  siRNA target sequence for Mbl1 (NM_010775.1,758-776).
gtgtcattatattagataa

SEQ ID NO: 567599 - DNA, 19 bp, Mus musculus
  siRNA target sequence for Mbl1 (NM_010775.1,762-780).
cattatattagataatggt

SEQ ID NO: 567600 - DNA, 19 bp, Mus musculus
  siRNA target sequence for Mbl2 (NM_010776.1,208-226).
gtgtggtgacagtggttta

SEQ ID NO: 567601 - DNA, 19 bp, Mus musculus
  siRNA target sequence for Mbl2 (NM_010776.1,212-230).
ggtgacagtggtttatgca

SEQ ID NO: 567602 - DNA, 19 bp, Mus musculus
  siRNA target sequence for Mbl2 (NM_010776.1,222-240).
gtttatgcagagaccttaa

SEQ ID NO: 567603 - DNA, 19 bp, Mus musculus
  siRNA target sequence for Mbl2 (NM_010776.1,409-427).
cagggaatccggggttaaa

SEQ ID NO: 567604 - DNA, 19 bp, Mus musculus
  siRNA target sequence for Mbl2 (NM_010776.1,413-431).
gaatccggggttaaaagga

SEQ ID NO: 567605 - DNA, 19 bp, Mus musculus
  siRNA target sequence for Mbl2 (NM_010776.1,474-492).
gatactagcgaaattgatt

SEQ ID NO: 567606 - DNA, 19 bp, Mus musculus
  siRNA target sequence for Mbl2 (NM_010776.1,582-600).
gtgagcagtgttaaaaaga

SEQ ID NO: 567607 - DNA, 19 bp, Mus musculus
  siRNA target sequence for Mbl2 (NM_010776.1,622-640).
ccctgtgctccgaattcca

SEQ ID NO: 567608 - DNA, 19 bp, Mus musculus
  siRNA target sequence for Mbl2 (NM_010776.1,771-789).
gtgcgctatactaattgga

SEQ ID NO: 567609 - DNA, 19 bp, Mus musculus
  siRNA target sequence for Mbl2 (NM_010776.1,773-791).
gcgctatactaattggaat

SEQ ID NO: 567610 - DNA, 19 bp, Mus musculus
  siRNA target sequence for Mbl2 (NM_010776.1,776-794).
ctatactaattggaatgat

SEQ ID NO: 567611 - DNA, 19 bp, Mus musculus
  siRNA target sequence for Mrc1 (NM_008625.1,159-177).
ggacgcgaggcaattttta

SEQ ID NO: 567612 - DNA, 19 bp, Mus musculus
  siRNA target sequence for Mrc1 (NM_008625.1,164-182).
cgaggcaatttttaatcta

SEQ ID NO: 567613 - DNA, 19 bp, Mus musculus
  siRNA target sequence for Mrc1 (NM_008625.1,165-183).
gaggcaatttttaatctat

SEQ ID NO: 567614 - DNA, 19 bp, Mus musculus
  siRNA target sequence for Mrc1 (NM_008625.1,201-219).
ctgcgtggacgctctaagt

SEQ ID NO: 567615 - DNA, 19 bp, Mus musculus
  siRNA target sequence for Mrc1 (NM_008625.1,273-291).
ccgctgggtgtcagattct

SEQ ID NO: 567616 - DNA, 19 bp, Mus musculus
  siRNA target sequence for Mrc1 (NM_008625.1,300-318).
gagtgttgctttcaaatta

SEQ ID NO: 567617 - DNA, 19 bp, Mus musculus
  siRNA target sequence for Mrc1 (NM_008625.1,324-342).
gggagtgccatcaaaaact

SEQ ID NO: 567618 - DNA, 19 bp, Mus musculus
  siRNA target sequence for Mrc1 (NM_008625.1,369-387).
ctgtgattcgaaaagtgaa

SEQ ID NO: 567619 - DNA, 19 bp, Mus musculus
  siRNA target sequence for Mrc1 (NM_008625.1,371-389).
gtgattcgaaaagtgaata

SEQ ID NO: 567620 - DNA, 19 bp, Mus musculus
  siRNA target sequence for Mrc1 (NM_008625.1,432-450).
gggcacagagttatatttt

SEQ ID NO: 567621 - DNA, 19 bp, Mus musculus
  siRNA target sequence for Mrc1 (NM_008625.1,434-452).
gcacagagttatattttaa

SEQ ID NO: 567622 - DNA, 19 bp, Mus musculus
  siRNA target sequence for Mrc1 (NM_008625.1,464-482).
gacaagagaagaatatcaa

SEQ ID NO: 567623 - DNA, 19 bp, Mus musculus
  siRNA target sequence for Mrc1 (NM_008625.1,540-558).
cctgtgctcgagaggatat

SEQ ID NO: 567624 - DNA, 19 bp, Mus musculus
  siRNA target sequence for Mrc1 (NM_008625.1,543-561).
gtgctcgagaggatatgaa

SEQ ID NO: 567625 - DNA, 19 bp, Mus musculus
  siRNA target sequence for Mrc1 (NM_008625.1,572-590).
ccttactgggcaatgcaaa

SEQ ID NO: 567626 - DNA, 19 bp, Mus musculus
  siRNA target sequence for Mrc1 (NM_008625.1,573-591).
cttactgggcaatgcaaat

SEQ ID NO: 567627 - DNA, 19 bp, Mus musculus
  siRNA target sequence for Mrc1 (NM_008625.1,596-614).
ccgtctgtgcatttccatt

SEQ ID NO: 567628 - DNA, 19 bp, Mus musculus
  siRNA target sequence for Mrc1 (NM_008625.1,689-707).
ccactgactacgacaaaga

SEQ ID NO: 567629 - DNA, 19 bp, Mus musculus
  siRNA target sequence for Mrc1 (NM_008625.1,706-724).
gacaagctgtttggatttt

SEQ ID NO: 567630 - DNA, 19 bp, Mus musculus
  siRNA target sequence for Mrc1 (NM_008625.1,739-757).
gagggaagcgagagattat

SEQ ID NO: 567631 - DNA, 19 bp, Mus musculus
  siRNA target sequence for Mrc1 (NM_008625.1,742-760).
ggaagcgagagattatgga

SEQ ID NO: 567632 - DNA, 19 bp, Mus musculus
  siRNA target sequence for Mrc1 (NM_008625.1,747-765).
cgagagattatggaacaaa

SEQ ID NO: 567633 - DNA, 19 bp, Mus musculus
  siRNA target sequence for Mrc1 (NM_008625.1,1101-1119).
gaagcttggctacatttgt

SEQ ID NO: 567634 - DNA, 19 bp, Mus musculus
  siRNA target sequence for Mrc1 (NM_008625.1,1136-1154).
ccttgaacccatttatcat

SEQ ID NO: 567635 - DNA, 19 bp, Mus musculus
  siRNA target sequence for Mrc1 (NM_008625.1,1213-1231).
cactgctacaggatccata

SEQ ID NO: 567636 - DNA, 19 bp, Mus musculus
  siRNA target sequence for Mrc1 (NM_008625.1,1248-1266).
ccagaaatatgctttgcaa

SEQ ID NO: 567637 - DNA, 19 bp, Mus musculus
  siRNA target sequence for Mrc1 (NM_008625.1,1341-1359).
cggatatgagccaaatgat

SEQ ID NO: 567638 - DNA, 19 bp, Mus musculus
  siRNA target sequence for Mrc1 (NM_008625.1,1357-1375).
gatgagctgtggattggtt

SEQ ID NO: 567639 - DNA, 19 bp, Mus musculus
  siRNA target sequence for Mrc1 (NM_008625.1,1360-1378).
gagctgtggattggtttaa

SEQ ID NO: 567640 - DNA, 19 bp, Mus musculus
  siRNA target sequence for Mrc1 (NM_008625.1,1362-1380).
gctgtggattggtttaaat

SEQ ID NO: 567641 - DNA, 19 bp, Mus musculus
  siRNA target sequence for Mrc1 (NM_008625.1,1386-1404).
caagattcagatgtacttt

SEQ ID NO: 567642 - DNA, 19 bp, Mus musculus
  siRNA target sequence for Mrc1 (NM_008625.1,1422-1440).
cccagtgacatttactaaa

SEQ ID NO: 567643 - DNA, 19 bp, Mus musculus
  siRNA target sequence for Mrc1 (NM_008625.1,1423-1441).
ccagtgacatttactaaat

SEQ ID NO: 567644 - DNA, 19 bp, Mus musculus
  siRNA target sequence for Mrc1 (NM_008625.1,1451-1469).
gagagccaagccatgagaa

SEQ ID NO: 567645 - DNA, 19 bp, Mus musculus
  siRNA target sequence for Mrc1 (NM_008625.1,1482-1500).
ggactgcgtggttatgaaa

SEQ ID NO: 567646 - DNA, 19 bp, Mus musculus
  siRNA target sequence for Mrc1 (NM_008625.1,1532-1550).
gtgagcaaccactaggtta

SEQ ID NO: 567647 - DNA, 19 bp, Mus musculus
  siRNA target sequence for Mrc1 (NM_008625.1,1537-1555).
caaccactaggttacatct

SEQ ID NO: 567648 - DNA, 19 bp, Mus musculus
  siRNA target sequence for Mrc1 (NM_008625.1,1543-1561).
ctaggttacatctgtaaga

SEQ ID NO: 567649 - DNA, 19 bp, Mus musculus
  siRNA target sequence for Mrc1 (NM_008625.1,1554-1572).
ctgtaagatggtatcacaa

SEQ ID NO: 567650 - DNA, 19 bp, Mus musculus
  siRNA target sequence for Mrc1 (NM_008625.1,1633-1651).
gggttttactgctacttga

SEQ ID NO: 567651 - DNA, 19 bp, Mus musculus
  siRNA target sequence for Mrc1 (NM_008625.1,1634-1652).
ggttttactgctacttgat

SEQ ID NO: 567652 - DNA, 19 bp, Mus musculus
  siRNA target sequence for Mrc1 (NM_008625.1,1635-1653).
gttttactgctacttgatt

SEQ ID NO: 567653 - DNA, 19 bp, Mus musculus
  siRNA target sequence for Mrc1 (NM_008625.1,1718-1736).
caacagttgaagacagata

SEQ ID NO: 567654 - DNA, 19 bp, Mus musculus
  siRNA target sequence for Mrc1 (NM_008625.1,1741-1759).
caagcattcctgactagtt

SEQ ID NO: 567655 - DNA, 19 bp, Mus musculus
  siRNA target sequence for Mrc1 (NM_008625.1,1842-1860).
cgagcaggtgcagtttaca

SEQ ID NO: 567656 - DNA, 19 bp, Mus musculus
  siRNA target sequence for Mrc1 (NM_008625.1,1924-1942).
ggtggcttatgggatgttt

SEQ ID NO: 567657 - DNA, 19 bp, Mus musculus
  siRNA target sequence for Mrc1 (NM_008625.1,1927-1945).
ggcttatgggatgttttga

SEQ ID NO: 567658 - DNA, 19 bp, Mus musculus
  siRNA target sequence for Mrc1 (NM_008625.1,2060-2078).
gtaaaaccagcatgtgttt

SEQ ID NO: 567659 - DNA, 19 bp, Mus musculus
  siRNA target sequence for Mrc1 (NM_008625.1,2117-2135).
ggtttgaatctcgagattt

SEQ ID NO: 567660 - DNA, 19 bp, Mus musculus
  siRNA target sequence for Mrc1 (NM_008625.1,2118-2136).
gtttgaatctcgagatttt

SEQ ID NO: 567661 - DNA, 19 bp, Mus musculus
  siRNA target sequence for Mrc1 (NM_008625.1,2122-2140).
gaatctcgagatttttgca

SEQ ID NO: 567662 - DNA, 19 bp, Mus musculus
  siRNA target sequence for Mrc1 (NM_008625.1,2128-2146).
cgagatttttgcaaagcta

SEQ ID NO: 567663 - DNA, 19 bp, Mus musculus
  siRNA target sequence for Mrc1 (NM_008625.1,2158-2176).
ctggcgagcatcaagagta

SEQ ID NO: 567664 - DNA, 19 bp, Mus musculus
  siRNA target sequence for Mrc1 (NM_008625.1,2160-2178).
ggcgagcatcaagagtaaa

SEQ ID NO: 567665 - DNA, 19 bp, Mus musculus
  siRNA target sequence for Mrc1 (NM_008625.1,2162-2180).
cgagcatcaagagtaaaga

SEQ ID NO: 567666 - DNA, 19 bp, Mus musculus
  siRNA target sequence for Mrc1 (NM_008625.1,2315-2333).
gggcttacggtgaaccaaa

SEQ ID NO: 567667 - DNA, 19 bp, Mus musculus
  siRNA target sequence for Mrc1 (NM_008625.1,2316-2334).
ggcttacggtgaaccaaat

SEQ ID NO: 567668 - DNA, 19 bp, Mus musculus
  siRNA target sequence for Mrc1 (NM_008625.1,2317-2335).
gcttacggtgaaccaaata

SEQ ID NO: 567669 - DNA, 19 bp, Mus musculus
  siRNA target sequence for Mrc1 (NM_008625.1,2318-2336).
cttacggtgaaccaaataa

SEQ ID NO: 567670 - DNA, 19 bp, Mus musculus
  siRNA target sequence for Mrc1 (NM_008625.1,2380-2398).
ggcatgtcctggaatgata

SEQ ID NO: 567671 - DNA, 19 bp, Mus musculus
  siRNA target sequence for Mrc1 (NM_008625.1,2381-2399).
gcatgtcctggaatgatat

SEQ ID NO: 567672 - DNA, 19 bp, Mus musculus
  siRNA target sequence for Mrc1 (NM_008625.1,2421-2439).
ctggatttgtcagatacaa

SEQ ID NO: 567673 - DNA, 19 bp, Mus musculus
  siRNA target sequence for Mrc1 (NM_008625.1,2468-2486).
cacctgctccacaagacaa

SEQ ID NO: 567674 - DNA, 19 bp, Mus musculus
  siRNA target sequence for Mrc1 (NM_008625.1,2503-2521).
gatgggtgggttatttaca

SEQ ID NO: 567675 - DNA, 19 bp, Mus musculus
  siRNA target sequence for Mrc1 (NM_008625.1,2510-2528).
gggttatttacaaagacta

SEQ ID NO: 567676 - DNA, 19 bp, Mus musculus
  siRNA target sequence for Mrc1 (NM_008625.1,2524-2542).
gactaccagtactatttta

SEQ ID NO: 567677 - DNA, 19 bp, Mus musculus
  siRNA target sequence for Mrc1 (NM_008625.1,2529-2547).
ccagtactattttagcaaa

SEQ ID NO: 567678 - DNA, 19 bp, Mus musculus
  siRNA target sequence for Mrc1 (NM_008625.1,2596-2614).
ggtgatcttgctacaatta

SEQ ID NO: 567679 - DNA, 19 bp, Mus musculus
  siRNA target sequence for Mrc1 (NM_008625.1,2597-2615).
gtgatcttgctacaattaa

SEQ ID NO: 567680 - DNA, 19 bp, Mus musculus
  siRNA target sequence for Mrc1 (NM_008625.1,2721-2739).
gatggatgggagcaaagta

SEQ ID NO: 567681 - DNA, 19 bp, Mus musculus
  siRNA target sequence for Mrc1 (NM_008625.1,2768-2786).
ccaactttgcaaatgatga

SEQ ID NO: 567682 - DNA, 19 bp, Mus musculus
  siRNA target sequence for Mrc1 (NM_008625.1,2842-2860).
ggttatccaaataacttca

SEQ ID NO: 567683 - DNA, 19 bp, Mus musculus
  siRNA target sequence for Mrc1 (NM_008625.1,2935-2953).
gaaggttggcatttgtaca

SEQ ID NO: 567684 - DNA, 19 bp, Mus musculus
  siRNA target sequence for Mrc1 (NM_008625.1,2942-2960).
ggcatttgtacaagaacaa

SEQ ID NO: 567685 - DNA, 19 bp, Mus musculus
  siRNA target sequence for Mrc1 (NM_008625.1,3012-3030).
cgcacggcaagcttgcaaa

SEQ ID NO: 567686 - DNA, 19 bp, Mus musculus
  siRNA target sequence for Mrc1 (NM_008625.1,3048-3066).
ggtgtccatagaaaatgca

SEQ ID NO: 567687 - DNA, 19 bp, Mus musculus
  siRNA target sequence for Mrc1 (NM_008625.1,3096-3114).
gagagactccactttcaat

SEQ ID NO: 567688 - DNA, 19 bp, Mus musculus
  siRNA target sequence for Mrc1 (NM_008625.1,3116-3134).
cctggactgggctgaatga

SEQ ID NO: 567689 - DNA, 19 bp, Mus musculus
  siRNA target sequence for Mrc1 (NM_008625.1,3119-3137).
ggactgggctgaatgatat

SEQ ID NO: 567690 - DNA, 19 bp, Mus musculus
  siRNA target sequence for Mrc1 (NM_008625.1,3224-3242).
gtagcctatcttatgaaga

SEQ ID NO: 567691 - DNA, 19 bp, Mus musculus
  siRNA target sequence for Mrc1 (NM_008625.1,3303-3321).
cacctgtgacagtaaacaa

SEQ ID NO: 567692 - DNA, 19 bp, Mus musculus
  siRNA target sequence for Mrc1 (NM_008625.1,3319-3337).
caaggctatatatgtcaaa

SEQ ID NO: 567693 - DNA, 19 bp, Mus musculus
  siRNA target sequence for Mrc1 (NM_008625.1,3394-3412).
gttacatatgggaaaagca

SEQ ID NO: 567694 - DNA, 19 bp, Mus musculus
  siRNA target sequence for Mrc1 (NM_008625.1,3444-3462).
gcatgaagcagagacatat

SEQ ID NO: 567695 - DNA, 19 bp, Mus musculus
  siRNA target sequence for Mrc1 (NM_008625.1,3448-3466).
gaagcagagacatattgca

SEQ ID NO: 567696 - DNA, 19 bp, Mus musculus
  siRNA target sequence for Mrc1 (NM_008625.1,3499-3517).
gacccctacagtaatgcat

SEQ ID NO: 567697 - DNA, 19 bp, Mus musculus
  siRNA target sequence for Mrc1 (NM_008625.1,3501-3519).
cccctacagtaatgcattt

SEQ ID NO: 567698 - DNA, 19 bp, Mus musculus
  siRNA target sequence for Mrc1 (NM_008625.1,3576-3594).
cttgaccaataatgaatat

SEQ ID NO: 567699 - DNA, 19 bp, Mus musculus
  siRNA target sequence for Mrc1 (NM_008625.1,3579-3597).
gaccaataatgaatatact

SEQ ID NO: 567700 - DNA, 19 bp, Mus musculus
  siRNA target sequence for Mrc1 (NM_008625.1,3637-3655).
gctgacgagccgaagctta

SEQ ID NO: 567701 - DNA, 19 bp, Mus musculus
  siRNA target sequence for Mrc1 (NM_008625.1,3640-3658).
gacgagccgaagcttaagt

SEQ ID NO: 567702 - DNA, 19 bp, Mus musculus
  siRNA target sequence for Mrc1 (NM_008625.1,3642-3660).
cgagccgaagcttaagtca

SEQ ID NO: 567703 - DNA, 19 bp, Mus musculus
  siRNA target sequence for Mrc1 (NM_008625.1,3682-3700).
gatggctactggagaacat

SEQ ID NO: 567704 - DNA, 19 bp, Mus musculus
  siRNA target sequence for Mrc1 (NM_008625.1,3731-3749).
gcaaaaaatcagacgaaat

SEQ ID NO: 567705 - DNA, 19 bp, Mus musculus
  siRNA target sequence for Mrc1 (NM_008625.1,3949-3967).
cgtgttgaacctcttaaaa

SEQ ID NO: 567706 - DNA, 19 bp, Mus musculus
  siRNA target sequence for Mrc1 (NM_008625.1,3952-3970).
gttgaacctcttaaaagta

SEQ ID NO: 567707 - DNA, 19 bp, Mus musculus
  siRNA target sequence for Mrc1 (NM_008625.1,3968-3986).
gtaaaaccaatttttggat

SEQ ID NO: 567708 - DNA, 19 bp, Mus musculus
  siRNA target sequence for Mrc1 (NM_008625.1,4071-4089).
ctctggtgaacggaatgat

SEQ ID NO: 567709 - DNA, 19 bp, Mus musculus
  siRNA target sequence for Mrc1 (NM_008625.1,4076-4094).
gtgaacggaatgattgtgt

SEQ ID NO: 567710 - DNA, 19 bp, Mus musculus
  siRNA target sequence for Mrc1 (NM_008625.1,4109-4127).
cttcgggcctttggaataa

SEQ ID NO: 567711 - DNA, 19 bp, Mus musculus
  siRNA target sequence for Mrc1 (NM_008625.1,4112-4130).
cgggcctttggaataatat

SEQ ID NO: 567712 - DNA, 19 bp, Mus musculus
  siRNA target sequence for Mrc1 (NM_008625.1,4115-4133).
gcctttggaataatatcca

SEQ ID NO: 567713 - DNA, 19 bp, Mus musculus
  siRNA target sequence for Mrc1 (NM_008625.1,4136-4154).
gttcttcgtacaaaggatt

SEQ ID NO: 567714 - DNA, 19 bp, Mus musculus
  siRNA target sequence for Mrc1 (NM_008625.1,4211-4229).
ccaaagctgaccaaaggaa

SEQ ID NO: 567715 - DNA, 19 bp, Mus musculus
  siRNA target sequence for Mrc1 (NM_008625.1,4245-4263).
caagggctcttctaaagca

SEQ ID NO: 567716 - DNA, 19 bp, Mus musculus
  siRNA target sequence for Mrc1 (NM_008625.1,4277-4295).
ccgtggtcctcctgattgt

SEQ ID NO: 567717 - DNA, 19 bp, Mus musculus
  siRNA target sequence for Mrc1 (NM_008625.1,4281-4299).
ggtcctcctgattgtgata

SEQ ID NO: 567718 - DNA, 19 bp, Mus musculus
  siRNA target sequence for Mrc1 (NM_008625.1,4308-4326).
cgttgcagcctatttcttt

SEQ ID NO: 567719 - DNA, 19 bp, Mus musculus
  siRNA target sequence for Mrc1 (NM_008625.1,4309-4327).
gttgcagcctatttctttt

SEQ ID NO: 567720 - DNA, 19 bp, Mus musculus
  siRNA target sequence for Mrc1 (NM_008625.1,4313-4331).
cagcctatttcttttataa

SEQ ID NO: 567721 - DNA, 19 bp, Mus musculus
  siRNA target sequence for Mrc1 (NM_008625.1,4362-4380).
ggccacctttgaaaacact

SEQ ID NO: 567722 - DNA, 19 bp, Mus musculus
  siRNA target sequence for Mrc1 (NM_008625.1,4379-4397).
ctctctacttcaacagtaa

SEQ ID NO: 567723 - DNA, 19 bp, Mus musculus
  siRNA target sequence for Mrc1 (NM_008625.1,4412-4430).
caagtgacacgaaagatct

SEQ ID NO: 567724 - DNA, 19 bp, Mus musculus
  siRNA target sequence for Mrc1 (NM_008625.1,4449-4467).
gaatgagcatgcgatcatt

SEQ ID NO: 567725 - DNA, 19 bp, Mus musculus
  siRNA target sequence for Lgals1 (NM_008495.1,112-130).
ctggggaatgtctcaaagt

SEQ ID NO: 567726 - DNA, 19 bp, Mus musculus
  siRNA target sequence for Lgals1 (NM_008495.1,206-224).
cttcaatcctcgcttcaat

SEQ ID NO: 567727 - DNA, 19 bp, Mus musculus
  siRNA target sequence for Lgals1 (NM_008495.1,234-252).
gacgccaacaccattgtgt

SEQ ID NO: 567728 - DNA, 19 bp, Mus musculus
  siRNA target sequence for Lgals1 (NM_008495.1,371-389).
gctgccagacggacatgaa

SEQ ID NO: 567729 - DNA, 19 bp, Mus musculus
  siRNA target sequence for Lgals1 (NM_008495.1,375-393).
ccagacggacatgaattca

SEQ ID NO: 567730 - DNA, 19 bp, Mus musculus
  siRNA target sequence for Lgals1 (NM_008495.1,378-396).
gacggacatgaattcaagt

SEQ ID NO: 567731 - DNA, 19 bp, Mus musculus
  siRNA target sequence for Slc2a8 (NM_019488.2,475-493).
ctagtggcaccggtttaca

SEQ ID NO: 567732 - DNA, 19 bp, Mus musculus
  siRNA target sequence for Slc2a8 (NM_019488.2,478-496).
gtggcaccggtttacatct

SEQ ID NO: 567733 - DNA, 19 bp, Mus musculus
  siRNA target sequence for Slc2a8 (NM_019488.2,666-684).
gcccgagaccccacgtttt

SEQ ID NO: 567734 - DNA, 19 bp, Mus musculus
  siRNA target sequence for Slc2a8 (NM_019488.2,872-890).
caggggtcaatgctatcat

SEQ ID NO: 567735 - DNA, 19 bp, Mus musculus
  siRNA target sequence for Slc2a8 (NM_019488.2,874-892).
ggggtcaatgctatcatgt

SEQ ID NO: 567736 - DNA, 19 bp, Mus musculus
  siRNA target sequence for Slc2a8 (NM_019488.2,875-893).
gggtcaatgctatcatgtt

SEQ ID NO: 567737 - DNA, 19 bp, Mus musculus
  siRNA target sequence for Slc2a8 (NM_019488.2,1031-1049).
ccttgtcgggtgtgatcat

SEQ ID NO: 567738 - DNA, 19 bp, Mus musculus
  siRNA target sequence for Slc2a8 (NM_019488.2,1072-1090).
ggtacctacttcaaactga

SEQ ID NO: 567739 - DNA, 19 bp, Mus musculus
  siRNA target sequence for Slc2a8 (NM_019488.2,1313-1331).
ggttcatggcctttctagt

SEQ ID NO: 567740 - DNA, 19 bp, Mus musculus
  siRNA target sequence for Slc2a8 (NM_019488.2,1403-1421).
gcgctctcagtgtcctatt

SEQ ID NO: 567741 - DNA, 19 bp, Mus musculus
  siRNA target sequence for Slc2a8 (NM_019488.2,1405-1423).
gctctcagtgtcctattca

SEQ ID NO: 567742 - DNA, 19 bp, Mus musculus
  siRNA target sequence for Slc2a8 (NM_019488.2,1430-1448).
ccgttgtccctgagactaa

SEQ ID NO: 567743 - DNA, 19 bp, Mus musculus
  siRNA target sequence for Slc2a8 (NM_019488.2,1431-1449).
cgttgtccctgagactaaa

SEQ ID NO: 567744 - DNA, 19 bp, Mus musculus
  siRNA target sequence for 1110055L24Rik (NM_025422.1,357-375).
cgccgactgtccttcatct

SEQ ID NO: 567745 - DNA, 19 bp, Mus musculus
  siRNA target sequence for 1110055L24Rik (NM_025422.1,358-376).
gccgactgtccttcatcta

SEQ ID NO: 567746 - DNA, 19 bp, Mus musculus
  siRNA target sequence for 1110055L24Rik (NM_025422.1,390-408).
ccaaggcagctgttatgct

SEQ ID NO: 567747 - DNA, 19 bp, Mus musculus
  siRNA target sequence for 1110055L24Rik (NM_025422.1,478-496).
gacatggtaagcatacaca

SEQ ID NO: 567748 - DNA, 19 bp, Mus musculus
  siRNA target sequence for 1110055L24Rik (NM_025422.1,480-498).
catggtaagcatacacaat

SEQ ID NO: 567749 - DNA, 19 bp, Mus musculus
  siRNA target sequence for 1110055L24Rik (NM_025422.1,483-501).
ggtaagcatacacaatgaa

SEQ ID NO: 567750 - DNA, 19 bp, Mus musculus
  siRNA target sequence for 1110055L24Rik (NM_025422.1,512-530).
cgtttatactggacacttt

SEQ ID NO: 567751 - DNA, 19 bp, Mus musculus
  siRNA target sequence for 1110055L24Rik (NM_025422.1,561-579).
cctgctaggcatgttctat

SEQ ID NO: 567752 - DNA, 19 bp, Mus musculus
  siRNA target sequence for 1110055L24Rik (NM_025422.1,603-621).
gtggtatgatcattcaaat

SEQ ID NO: 567753 - DNA, 19 bp, Mus musculus
  siRNA target sequence for 1110055L24Rik (NM_025422.1,630-648).
cgacaagtgggcagatcaa

SEQ ID NO: 567754 - DNA, 19 bp, Mus musculus
  siRNA target sequence for 1110055L24Rik (NM_025422.1,633-651).
caagtgggcagatcaagat

SEQ ID NO: 567755 - DNA, 19 bp, Mus musculus
  siRNA target sequence for 1110055L24Rik (NM_025422.1,749-767).
gcaaagcagcaaataacca

SEQ ID NO: 567756 - DNA, 19 bp, Mus musculus
  siRNA target sequence for 1110055L24Rik (NM_025422.1,789-807).
gatcgctagcacagtaact

SEQ ID NO: 567757 - DNA, 19 bp, Mus musculus
  siRNA target sequence for 1110055L24Rik (NM_025422.1,918-936).
ggtagttgcagaagaagat

SEQ ID NO: 567758 - DNA, 19 bp, Mus musculus
  siRNA target sequence for 1200003C23Rik (NM_025809.3,176-194).
caccacgctaccttcaaga

SEQ ID NO: 567759 - DNA, 19 bp, Mus musculus
  siRNA target sequence for 1200003C23Rik (NM_025809.3,250-268).
ctcaggctcggagtttcaa

SEQ ID NO: 567760 - DNA, 19 bp, Mus musculus
  siRNA target sequence for 1200003C23Rik (NM_025809.3,306-324).
gcggaggctccaaagatct

SEQ ID NO: 567761 - DNA, 19 bp, Mus musculus
  siRNA target sequence for 1200003C23Rik (NM_025809.3,307-325).
cggaggctccaaagatctt

SEQ ID NO: 567762 - DNA, 19 bp, Mus musculus
  siRNA target sequence for 1200003C23Rik (NM_025809.3,552-570).
ccgatggctacctatgcaa

SEQ ID NO: 567763 - DNA, 19 bp, Mus musculus
  siRNA target sequence for 1200003C23Rik (NM_025809.3,604-622).
cccaggagccgcctctaat

SEQ ID NO: 567764 - DNA, 19 bp, Mus musculus
  siRNA target sequence for 1200003C23Rik (NM_025809.3,605-623).
ccaggagccgcctctaatt

SEQ ID NO: 567765 - DNA, 19 bp, Mus musculus
  siRNA target sequence for 1200003C23Rik (NM_025809.3,608-626).
ggagccgcctctaatttga

SEQ ID NO: 567766 - DNA, 19 bp, Mus musculus
  siRNA target sequence for 1200003C23Rik (NM_025809.3,837-855).
ctgactgtctagatcactt

SEQ ID NO: 567767 - DNA, 19 bp, Mus musculus
  siRNA target sequence for 1200003C23Rik (NM_025809.3,898-916).
gaaggacggacgttcttgt

SEQ ID NO: 567768 - DNA, 19 bp, Mus musculus
  siRNA target sequence for 1200003C23Rik (NM_025809.3,1014-1032).
ggccaggtcaggtctatga

SEQ ID NO: 567769 - DNA, 19 bp, Mus musculus
  siRNA target sequence for 1200003C23Rik (NM_025809.3,1084-1102).
gagtactttacctactatt

SEQ ID NO: 567770 - DNA, 19 bp, Mus musculus
  siRNA target sequence for 1200003C23Rik (NM_025809.3,1113-1131).
cacaaaccaagccaaaagt

SEQ ID NO: 567771 - DNA, 19 bp, Mus musculus
  siRNA target sequence for 1200003C23Rik (NM_025809.3,1115-1133).
caaaccaagccaaaagtca

SEQ ID NO: 567772 - DNA, 19 bp, Mus musculus
  siRNA target sequence for 1200003C23Rik (NM_025809.3,1209-1227).
ccacggtggtcttcatact

SEQ ID NO: 567773 - DNA, 19 bp, Mus musculus
  siRNA target sequence for 1200003C23Rik (NM_025809.3,1210-1228).
cacggtggtcttcatactt

SEQ ID NO: 567774 - DNA, 19 bp, Mus musculus
  siRNA target sequence for 1200003C23Rik (NM_025809.3,1252-1270).
ggtcgtcttgaccattaca

SEQ ID NO: 567775 - DNA, 19 bp, Mus musculus
  siRNA target sequence for 1810046I24Rik (NM_027218.1,197-215).
cgagctgtgtggacaaagt

SEQ ID NO: 567776 - DNA, 19 bp, Mus musculus
  siRNA target sequence for 3110037K17Rik (NM_153197.1,351-369).
ctgaattggagtgtacaaa

SEQ ID NO: 567777 - DNA, 19 bp, Mus musculus
  siRNA target sequence for 3110037K17Rik (NM_153197.1,353-371).
gaattggagtgtacaaaat

SEQ ID NO: 567778 - DNA, 19 bp, Mus musculus
  siRNA target sequence for 3110037K17Rik (NM_153197.1,565-583).
ggacactggtactgcttat

SEQ ID NO: 567779 - DNA, 19 bp, Mus musculus
  siRNA target sequence for 3110037K17Rik (NM_153197.1,566-584).
gacactggtactgcttatt

SEQ ID NO: 567780 - DNA, 19 bp, Mus musculus
  siRNA target sequence for 3110037K17Rik (NM_153197.1,570-588).
ctggtactgcttattttat

SEQ ID NO: 567781 - DNA, 19 bp, Mus musculus
  siRNA target sequence for 3110037K17Rik (NM_153197.1,634-652).
gacaccgtacgatgataat

SEQ ID NO: 567782 - DNA, 19 bp, Mus musculus
  siRNA target sequence for 3110037K17Rik (NM_153197.1,638-656).
ccgtacgatgataatacca

SEQ ID NO: 567783 - DNA, 19 bp, Mus musculus
  siRNA target sequence for 3110037K17Rik (NM_153197.1,644-662).
gatgataataccacattct

SEQ ID NO: 567784 - DNA, 19 bp, Mus musculus
  siRNA target sequence for 3110037K17Rik (NM_153197.1,678-696).
ctagcagtgacaatgaaca

SEQ ID NO: 567785 - DNA, 19 bp, Mus musculus
  siRNA target sequence for 3110037K17Rik (NM_153197.1,686-704).
gacaatgaacagtgtgtta

SEQ ID NO: 567786 - DNA, 19 bp, Mus musculus
  siRNA target sequence for 3110037K17Rik (NM_153197.1,697-715).
gtgtgttataataaatcat

SEQ ID NO: 567787 - DNA, 19 bp, Mus musculus
  siRNA target sequence for 3110037K17Rik (NM_153197.1,743-761).
gatatcccttgcagtgata

SEQ ID NO: 567788 - DNA, 19 bp, Mus musculus
  siRNA target sequence for 3110037K17Rik (NM_153197.1,769-787).
ctcaatttgccatgtgaaa

SEQ ID NO: 567789 - DNA, 19 bp, Mus musculus
  siRNA target sequence for 4632412I24Rik (NM_028727.1,26-44).
cggagtcggaggtgttaca

SEQ ID NO: 567790 - DNA, 19 bp, Mus musculus
  siRNA target sequence for 4632412I24Rik (NM_028727.1,229-247).
gcgcacgtggcggtaaagt

SEQ ID NO: 567791 - DNA, 19 bp, Mus musculus
  siRNA target sequence for 4632412I24Rik (NM_028727.1,467-485).
cgggagagggtttcacttt

SEQ ID NO: 567792 - DNA, 19 bp, Mus musculus
  siRNA target sequence for 4632412I24Rik (NM_028727.1,529-547).
gtatacggccatatcatca

SEQ ID NO: 567793 - DNA, 19 bp, Mus musculus
  siRNA target sequence for 4632412I24Rik (NM_028727.1,578-596).
ctgtctacacccactctta

SEQ ID NO: 567794 - DNA, 19 bp, Mus musculus
  siRNA target sequence for 4632412I24Rik (NM_028727.1,621-639).
cgcagaacccgagaaaagt

SEQ ID NO: 567795 - DNA, 19 bp, Mus musculus
  siRNA target sequence for 4632412I24Rik (NM_028727.1,623-641).
cagaacccgagaaaagtga

SEQ ID NO: 567796 - DNA, 19 bp, Mus musculus
  siRNA target sequence for 4632412I24Rik (NM_028727.1,675-693).
caagccttacacgaaacta

SEQ ID NO: 567797 - DNA, 19 bp, Mus musculus
  siRNA target sequence for 4632412I24Rik (NM_028727.1,826-844).
gctcctgttcgggtcaatt

SEQ ID NO: 567798 - DNA, 19 bp, Mus musculus
  siRNA target sequence for 4632412I24Rik (NM_028727.1,830-848).
ctgttcgggtcaattctga

SEQ ID NO: 567799 - DNA, 19 bp, Mus musculus
  siRNA target sequence for 4632412I24Rik (NM_028727.1,835-853).
cgggtcaattctgagttta

SEQ ID NO: 567800 - DNA, 19 bp, Mus musculus
  siRNA target sequence for 4632412I24Rik (NM_028727.1,837-855).
ggtcaattctgagtttaca

SEQ ID NO: 567801 - DNA, 19 bp, Mus musculus
  siRNA target sequence for 4632412I24Rik (NM_028727.1,838-856).
gtcaattctgagtttacaa

SEQ ID NO: 567802 - DNA, 19 bp, Mus musculus
  siRNA target sequence for 4632412I24Rik (NM_028727.1,840-858).
caattctgagtttacaact

SEQ ID NO: 567803 - DNA, 19 bp, Mus musculus
  siRNA target sequence for 4632412I24Rik (NM_028727.1,890-908).
ggaagaaagccatttgctt

SEQ ID NO: 567804 - DNA, 19 bp, Mus musculus
  siRNA target sequence for 4632412I24Rik (NM_028727.1,981-999).
gtgtggcgcttgtgacatt

SEQ ID NO: 567805 - DNA, 19 bp, Mus musculus
  siRNA target sequence for 4632412I24Rik (NM_028727.1,986-1004).
gcgcttgtgacattggaaa

SEQ ID NO: 567806 - DNA, 19 bp, Mus musculus
  siRNA target sequence for 4632412I24Rik (NM_028727.1,1007-1025).
caacgttcaatagaatact

SEQ ID NO: 567807 - DNA, 19 bp, Mus musculus
  siRNA target sequence for 4632412I24Rik (NM_028727.1,1010-1028).
cgttcaatagaatactgat

SEQ ID NO: 567808 - DNA, 19 bp, Mus musculus
  siRNA target sequence for 4632412I24Rik (NM_028727.1,1011-1029).
gttcaatagaatactgatt

SEQ ID NO: 567809 - DNA, 19 bp, Mus musculus
  siRNA target sequence for 4632412I24Rik (NM_028727.1,1024-1042).
ctgattaaccagttattaa

SEQ ID NO: 567810 - DNA, 19 bp, Mus musculus
  siRNA target sequence for 4632412I24Rik (NM_028727.1,1026-1044).
gattaaccagttattaaat

SEQ ID NO: 567811 - DNA, 19 bp, Mus musculus
  siRNA target sequence for 4632412I24Rik (NM_028727.1,1109-1127).
gtgtcgctttacttaccat

SEQ ID NO: 567812 - DNA, 19 bp, Mus musculus
  siRNA target sequence for 4632412I24Rik (NM_028727.1,1218-1236).
cgagaattacattgacata

SEQ ID NO: 567813 - DNA, 19 bp, Mus musculus
  siRNA target sequence for 4632412I24Rik (NM_028727.1,1265-1283).
gagagtttccacttatcat

SEQ ID NO: 567814 - DNA, 19 bp, Mus musculus
  siRNA target sequence for 4632412I24Rik (NM_028727.1,1267-1285).
gagtttccacttatcatca

SEQ ID NO: 567815 - DNA, 19 bp, Mus musculus
  siRNA target sequence for 4632412I24Rik (NM_028727.1,1293-1311).
gggctgggtgtcagataat

SEQ ID NO: 567816 - DNA, 19 bp, Mus musculus
  siRNA target sequence for 4632412I24Rik (NM_028727.1,1340-1358).
gggtgctgtctcccaatta

SEQ ID NO: 567817 - DNA, 19 bp, Mus musculus
  siRNA target sequence for 4632412I24Rik (NM_028727.1,1341-1359).
ggtgctgtctcccaattat

SEQ ID NO: 567818 - DNA, 19 bp, Mus musculus
  siRNA target sequence for 4632412I24Rik (NM_028727.1,1352-1370).
ccaattatgtcgttcagtt

SEQ ID NO: 567819 - DNA, 19 bp, Mus musculus
  siRNA target sequence for 4632412I24Rik (NM_028727.1,1353-1371).
caattatgtcgttcagtta

SEQ ID NO: 567820 - DNA, 19 bp, Mus musculus
  siRNA target sequence for 4632412I24Rik (NM_028727.1,1400-1418).
cactgacctccgaatacgt

SEQ ID NO: 567821 - DNA, 19 bp, Mus musculus
  siRNA target sequence for 4632412I24Rik (NM_028727.1,1423-1441).
ctcacagatggcctgtata

SEQ ID NO: 567822 - DNA, 19 bp, Mus musculus
  siRNA target sequence for 4632412I24Rik (NM_028727.1,1449-1467).
caagatcaaaagatatcga

SEQ ID NO: 567823 - DNA, 19 bp, Mus musculus
  siRNA target sequence for 4632412I24Rik (NM_028727.1,1460-1478).
gatatcgaggttttgaaat

SEQ ID NO: 567824 - DNA, 19 bp, Mus musculus
  siRNA target sequence for 4632412I24Rik (NM_028727.1,1492-1510).
gacaatttagaatttactt

SEQ ID NO: 567825 - DNA, 19 bp, Mus musculus
  siRNA target sequence for 4632412I24Rik (NM_028727.1,1565-1583).
ctgttcactccgaattctt

SEQ ID NO: 567826 - DNA, 19 bp, Mus musculus
  siRNA target sequence for 4632412I24Rik (NM_028727.1,1567-1585).
gttcactccgaattcttaa

SEQ ID NO: 567827 - DNA, 19 bp, Mus musculus
  siRNA target sequence for 4632412I24Rik (NM_028727.1,1572-1590).
ctccgaattcttaagtagt

SEQ ID NO: 567828 - DNA, 19 bp, Mus musculus
  siRNA target sequence for 4632412I24Rik (NM_028727.1,1574-1592).
ccgaattcttaagtagtaa

SEQ ID NO: 567829 - DNA, 19 bp, Mus musculus
  siRNA target sequence for 4632412I24Rik (NM_028727.1,1575-1593).
cgaattcttaagtagtaaa

SEQ ID NO: 567830 - DNA, 19 bp, Mus musculus
  siRNA target sequence for 4632412I24Rik (NM_028727.1,1639-1657).
gcagtgttgggctacctta

SEQ ID NO: 567831 - DNA, 19 bp, Mus musculus
  siRNA target sequence for 4632412I24Rik (NM_028727.1,1672-1690).
cccgtgccagagtcactta

SEQ ID NO: 567832 - DNA, 19 bp, Mus musculus
  siRNA target sequence for 4632412I24Rik (NM_028727.1,1674-1692).
cgtgccagagtcacttagt

SEQ ID NO: 567833 - DNA, 19 bp, Mus musculus
  siRNA target sequence for 4632412I24Rik (NM_028727.1,1765-1783).
gcgcctacccacatactgt

SEQ ID NO: 567834 - DNA, 19 bp, Mus musculus
  siRNA target sequence for 4632412I24Rik (NM_028727.1,1766-1784).
cgcctacccacatactgta

SEQ ID NO: 567835 - DNA, 19 bp, Mus musculus
  siRNA target sequence for 4632412I24Rik (NM_028727.1,1767-1785).
gcctacccacatactgtat

SEQ ID NO: 567836 - DNA, 19 bp, Mus musculus
  siRNA target sequence for 4632412I24Rik (NM_028727.1,1814-1832).
gcaggatcgtggatgatat

SEQ ID NO: 567837 - DNA, 19 bp, Mus musculus
  siRNA target sequence for 4632412I24Rik (NM_028727.1,1817-1835).
ggatcgtggatgatatgaa

SEQ ID NO: 567838 - DNA, 19 bp, Mus musculus
  siRNA target sequence for 4632412I24Rik (NM_028727.1,1818-1836).
gatcgtggatgatatgaaa

SEQ ID NO: 567839 - DNA, 19 bp, Mus musculus
  siRNA target sequence for 4632412I24Rik (NM_028727.1,1882-1900).
gactgtttgggctttggta

SEQ ID NO: 567840 - DNA, 19 bp, Mus musculus
  siRNA target sequence for 4632412I24Rik (NM_028727.1,1987-2005).
ctggttggttccatttcca

SEQ ID NO: 567841 - DNA, 19 bp, Mus musculus
  siRNA target sequence for 4632412I24Rik (NM_028727.1,1998-2016).
catttccatcccacattgt

SEQ ID NO: 567842 - DNA, 19 bp, Mus musculus
  siRNA target sequence for 4632412I24Rik (NM_028727.1,2003-2021).
ccatcccacattgtatttt

SEQ ID NO: 567843 - DNA, 19 bp, Mus musculus
  siRNA target sequence for 4632413B12Rik (NM_027562.1,271-289).
cggaactggaggtgtacat

SEQ ID NO: 567844 - DNA, 19 bp, Mus musculus
  siRNA target sequence for 4632413B12Rik (NM_027562.1,276-294).
ctggaggtgtacattctta

SEQ ID NO: 567845 - DNA, 19 bp, Mus musculus
  siRNA target sequence for 4632413B12Rik (NM_027562.1,278-296).
ggaggtgtacattcttata

SEQ ID NO: 567846 - DNA, 19 bp, Mus musculus
  siRNA target sequence for 4632413B12Rik (NM_027562.1,279-297).
gaggtgtacattcttataa

SEQ ID NO: 567847 - DNA, 19 bp, Mus musculus
  siRNA target sequence for 4632413B12Rik (NM_027562.1,281-299).
ggtgtacattcttataaaa

SEQ ID NO: 567848 - DNA, 19 bp, Mus musculus
  siRNA target sequence for 5930406N14Rik (NM_175526.1,158-176).
caccataagcctgtattct

SEQ ID NO: 567849 - DNA, 19 bp, Mus musculus
  siRNA target sequence for 5930406N14Rik (NM_175526.1,206-224).
gcccaggcactcagagaat

SEQ ID NO: 567850 - DNA, 19 bp, Mus musculus
  siRNA target sequence for 5930406N14Rik (NM_175526.1,375-393).
gaaaagctggggaacatgt

SEQ ID NO: 567851 - DNA, 19 bp, Mus musculus
  siRNA target sequence for 5930406N14Rik (NM_175526.1,417-435).
gcccagaacagaaaactca

SEQ ID NO: 567852 - DNA, 19 bp, Mus musculus
  siRNA target sequence for 5930406N14Rik (NM_175526.1,427-445).
gaaaactcattgaaactct

SEQ ID NO: 567853 - DNA, 19 bp, Mus musculus
  siRNA target sequence for 5930406N14Rik (NM_175526.1,450-468).
caggtagccgtaaaactgt

SEQ ID NO: 567854 - DNA, 19 bp, Mus musculus
  siRNA target sequence for 5930406N14Rik (NM_175526.1,465-483).
ctgtgccgtgaactttaca

SEQ ID NO: 567855 - DNA, 19 bp, Mus musculus
  siRNA target sequence for 5930406N14Rik (NM_175526.1,510-528).
ccttgcccagaaaaatgga

SEQ ID NO: 567856 - DNA, 19 bp, Mus musculus
  siRNA target sequence for 5930406N14Rik (NM_175526.1,511-529).
cttgcccagaaaaatggaa

SEQ ID NO: 567857 - DNA, 19 bp, Mus musculus
  siRNA target sequence for 5930406N14Rik (NM_175526.1,530-548).
gtggtatggagacaaatgt

SEQ ID NO: 567858 - DNA, 19 bp, Mus musculus
  siRNA target sequence for 5930406N14Rik (NM_175526.1,542-560).
caaatgttaccagttctat

SEQ ID NO: 567859 - DNA, 19 bp, Mus musculus
  siRNA target sequence for 5930406N14Rik (NM_175526.1,547-565).
gttaccagttctataaaga

SEQ ID NO: 567860 - DNA, 19 bp, Mus musculus
  siRNA target sequence for 5930406N14Rik (NM_175526.1,577-595).
ggcagagttgtgaatactt

SEQ ID NO: 567861 - DNA, 19 bp, Mus musculus
  siRNA target sequence for 5930406N14Rik (NM_175526.1,579-597).
cagagttgtgaatacttct

SEQ ID NO: 567862 - DNA, 19 bp, Mus musculus
  siRNA target sequence for 5930406N14Rik (NM_175526.1,593-611).
cttctgcctggctgacaat

SEQ ID NO: 567863 - DNA, 19 bp, Mus musculus
  siRNA target sequence for 5930406N14Rik (NM_175526.1,746-764).
gacaccttactcctttgaa

SEQ ID NO: 567864 - DNA, 19 bp, Mus musculus
  siRNA target sequence for 5930406N14Rik (NM_175526.1,748-766).
caccttactcctttgaact

SEQ ID NO: 567865 - DNA, 19 bp, Mus musculus
  siRNA target sequence for 5930406N14Rik (NM_175526.1,807-825).
gactgtatgaccatcttca

SEQ ID NO: 567866 - DNA, 19 bp, Mus musculus
  siRNA target sequence for 5930406N14Rik (NM_175526.1,809-827).
ctgtatgaccatcttcaat

SEQ ID NO: 567867 - DNA, 19 bp, Mus musculus
  siRNA target sequence for 9830005G06Rik (NM_172732.1,97-115).
gcatgcggaagaaatatat

SEQ ID NO: 567868 - DNA, 19 bp, Mus musculus
  siRNA target sequence for 9830005G06Rik (NM_172732.1,98-116).
catgcggaagaaatatata

SEQ ID NO: 567869 - DNA, 19 bp, Mus musculus
  siRNA target sequence for 9830005G06Rik (NM_172732.1,101-119).
gcggaagaaatatatacct

SEQ ID NO: 567870 - DNA, 19 bp, Mus musculus
  siRNA target sequence for 9830005G06Rik (NM_172732.1,122-140).
cttcagtgggacattccta

SEQ ID NO: 567871 - DNA, 19 bp, Mus musculus
  siRNA target sequence for 9830005G06Rik (NM_172732.1,163-181).
ccaatcccctagcaaatgt

SEQ ID NO: 567872 - DNA, 19 bp, Mus musculus
  siRNA target sequence for 9830005G06Rik (NM_172732.1,197-215).
gttgtgacgatgatttcct

SEQ ID NO: 567873 - DNA, 19 bp, Mus musculus
  siRNA target sequence for 9830005G06Rik (NM_172732.1,220-238).
ggtctgtatgggcttgtta

SEQ ID NO: 567874 - DNA, 19 bp, Mus musculus
  siRNA target sequence for 9830005G06Rik (NM_172732.1,344-362).
cagtggcagaggaaataca

SEQ ID NO: 567875 - DNA, 19 bp, Mus musculus
  siRNA target sequence for 9830005G06Rik (NM_172732.1,528-546).
gaaaaagttgttactatgt

SEQ ID NO: 567876 - DNA, 19 bp, Mus musculus
  siRNA target sequence for 9830005G06Rik (NM_172732.1,560-578).
gaaatgtggaacatcagta

SEQ ID NO: 567877 - DNA, 19 bp, Mus musculus
  siRNA target sequence for 9830005G06Rik (NM_172732.1,598-616).
gggcgctagtctctttcaa

SEQ ID NO: 567878 - DNA, 19 bp, Mus musculus
  siRNA target sequence for 9830005G06Rik (NM_172732.1,599-617).
ggcgctagtctctttcaaa

SEQ ID NO: 567879 - DNA, 19 bp, Mus musculus
  siRNA target sequence for 9830005G06Rik (NM_172732.1,600-618).
gcgctagtctctttcaaat

SEQ ID NO: 567880 - DNA, 19 bp, Mus musculus
  siRNA target sequence for 9830005G06Rik (NM_172732.1,601-619).
cgctagtctctttcaaata

SEQ ID NO: 567881 - DNA, 19 bp, Mus musculus
  siRNA target sequence for 9830005G06Rik (NM_172732.1,603-621).
ctagtctctttcaaataga

SEQ ID NO: 567882 - DNA, 19 bp, Mus musculus
  siRNA target sequence for 9830005G06Rik (NM_172732.1,649-667).
cagtatagggaaactcaaa

SEQ ID NO: 567883 - DNA, 19 bp, Mus musculus
  siRNA target sequence for 9830005G06Rik (NM_172732.1,684-702).
gggtgggagtgtttcaaga

SEQ ID NO: 567884 - DNA, 19 bp, Mus musculus
  siRNA target sequence for 9830005G06Rik (NM_172732.1,685-703).
ggtgggagtgtttcaagat

SEQ ID NO: 567885 - DNA, 19 bp, Mus musculus
  siRNA target sequence for 9830005G06Rik (NM_172732.1,741-759).
ctcctctctctgacttgtt

SEQ ID NO: 567886 - DNA, 19 bp, Mus musculus
  siRNA target sequence for 9830005G06Rik (NM_172732.1,797-815).
ggatacctcaaagattcta

SEQ ID NO: 567887 - DNA, 19 bp, Mus musculus
  siRNA target sequence for 9830005G06Rik (NM_172732.1,813-831).
ctactctcatctcagataa

SEQ ID NO: 567888 - DNA, 19 bp, Mus musculus
  siRNA target sequence for 9830005G06Rik (NM_172732.1,832-850).
gtgcgatagctggaaatat

SEQ ID NO: 567889 - DNA, 19 bp, Mus musculus
  siRNA target sequence for 9830005G06Rik (NM_172732.1,834-852).
gcgatagctggaaatattt

SEQ ID NO: 567890 - DNA, 19 bp, Mus musculus
  siRNA target sequence for 9830005G06Rik (NM_172732.1,836-854).
gatagctggaaatatttta

SEQ ID NO: 567891 - DNA, 19 bp, Mus musculus
  siRNA target sequence for 9830005G06Rik (NM_172732.1,956-974).
gagattgatgtgagactat

SEQ ID NO: 567892 - DNA, 19 bp, Mus musculus
  siRNA target sequence for A530090P03Rik (NM_177155.2,96-114).
gagattattaacataggaa

SEQ ID NO: 567893 - DNA, 19 bp, Mus musculus
  siRNA target sequence for A530090P03Rik (NM_177155.2,115-133).
caaaatctcccacatttca

SEQ ID NO: 567894 - DNA, 19 bp, Mus musculus
  siRNA target sequence for A530090P03Rik (NM_177155.2,248-266).
cgatgtgggcaaaggaata

SEQ ID NO: 567895 - DNA, 19 bp, Mus musculus
  siRNA target sequence for A530090P03Rik (NM_177155.2,300-318).
gtcatcttagcaacgttat

SEQ ID NO: 567896 - DNA, 19 bp, Mus musculus
  siRNA target sequence for A530090P03Rik (NM_177155.2,305-323).
cttagcaacgttatgcatt

SEQ ID NO: 567897 - DNA, 19 bp, Mus musculus
  siRNA target sequence for A530090P03Rik (NM_177155.2,309-327).
gcaacgttatgcattattt

SEQ ID NO: 567898 - DNA, 19 bp, Mus musculus
  siRNA target sequence for A530090P03Rik (NM_177155.2,313-331).
cgttatgcattattttggt

SEQ ID NO: 567899 - DNA, 19 bp, Mus musculus
  siRNA target sequence for A530090P03Rik (NM_177155.2,319-337).
gcattattttggtcacaaa

SEQ ID NO: 567900 - DNA, 19 bp, Mus musculus
  siRNA target sequence for A530090P03Rik (NM_177155.2,347-365).
cttgattccaagcttattt

SEQ ID NO: 567901 - DNA, 19 bp, Mus musculus
  siRNA target sequence for A530090P03Rik (NM_177155.2,456-474).
gactggattgcttttggaa

SEQ ID NO: 567902 - DNA, 19 bp, Mus musculus
  siRNA target sequence for A530090P03Rik (NM_177155.2,465-483).
gcttttggaaacaatttct

SEQ ID NO: 567903 - DNA, 19 bp, Mus musculus
  siRNA target sequence for A530090P03Rik (NM_177155.2,489-507).
gtttttcgagaaaactcaa

SEQ ID NO: 567904 - DNA, 19 bp, Mus musculus
  siRNA target sequence for A530090P03Rik (NM_177155.2,495-513).
cgagaaaactcaaaaacct

SEQ ID NO: 567905 - DNA, 19 bp, Mus musculus
  siRNA target sequence for A530090P03Rik (NM_177155.2,531-549).
gcgtgtgaggagctgaatt

SEQ ID NO: 567906 - DNA, 19 bp, Mus musculus
  siRNA target sequence for A530090P03Rik (NM_177155.2,550-568).
ctcatcttgtgatcataga

SEQ ID NO: 567907 - DNA, 19 bp, Mus musculus
  siRNA target sequence for A530090P03Rik (NM_177155.2,579-597).
gaggtggaaaatttgttat

SEQ ID NO: 567908 - DNA, 19 bp, Mus musculus
  siRNA target sequence for A530090P03Rik (NM_177155.2,582-600).
gtggaaaatttgttattgt

SEQ ID NO: 567909 - DNA, 19 bp, Mus musculus
  siRNA target sequence for A530090P03Rik (NM_177155.2,680-698).
gaacaccctaatgaatgat

SEQ ID NO: 567910 - DNA, 19 bp, Mus musculus
  siRNA target sequence for A530090P03Rik (NM_177155.2,683-701).
caccctaatgaatgattca

SEQ ID NO: 567911 - DNA, 19 bp, Mus musculus
  siRNA target sequence for A530090P03Rik (NM_177155.2,685-703).
ccctaatgaatgattcaga

SEQ ID NO: 567912 - DNA, 19 bp, Mus musculus
  siRNA target sequence for A530090P03Rik (NM_177155.2,686-704).
cctaatgaatgattcagaa

SEQ ID NO: 567913 - DNA, 19 bp, Mus musculus
  siRNA target sequence for A530090P03Rik (NM_177155.2,740-758).
catattcatgcctgatgaa

SEQ ID NO: 567914 - DNA, 19 bp, Mus musculus
  siRNA target sequence for A630024B12Rik (NM_153094.1,34-52).
ggcaatgtaaagccattta

SEQ ID NO: 567915 - DNA, 19 bp, Mus musculus
  siRNA target sequence for A630024B12Rik (NM_153094.1,198-216).
gagattcctagtgcaaaaa

SEQ ID NO: 567916 - DNA, 19 bp, Mus musculus
  siRNA target sequence for A630024B12Rik (NM_153094.1,310-328).
ccacactggaacaaatgtt

SEQ ID NO: 567917 - DNA, 19 bp, Mus musculus
  siRNA target sequence for A630024B12Rik (NM_153094.1,512-530).
ggatagatggctctatttt

SEQ ID NO: 567918 - DNA, 19 bp, Mus musculus
  siRNA target sequence for Apcs (NM_011318.1,260-278).
ctgaaactgatcatgtgaa

SEQ ID NO: 567919 - DNA, 19 bp, Mus musculus
  siRNA target sequence for Apcs (NM_011318.1,276-294).
gaagctgatcccacatcta

SEQ ID NO: 567920 - DNA, 19 bp, Mus musculus
  siRNA target sequence for Apcs (NM_011318.1,670-688).
ggagagttttcagatttat

SEQ ID NO: 567921 - DNA, 19 bp, Mus musculus
  siRNA target sequence for Apcs (NM_011318.1,673-691).
gagttttcagatttataca

SEQ ID NO: 567922 - DNA, 19 bp, Mus musculus
  siRNA target sequence for Apcs (NM_011318.1,705-723).
gctgaccccacaagacatt

SEQ ID NO: 567923 - DNA, 19 bp, Mus musculus
  siRNA target sequence for Apcs (NM_011318.1,713-731).
cacaagacattctatttgt

SEQ ID NO: 567924 - DNA, 19 bp, Mus musculus
  siRNA target sequence for Apcs (NM_011318.1,724-742).
ctatttgtgtacagagatt

SEQ ID NO: 567925 - DNA, 19 bp, Mus musculus
  siRNA target sequence for Apcs (NM_011318.1,739-757).
gattcccctgtcaatccta

SEQ ID NO: 567926 - DNA, 19 bp, Mus musculus
  siRNA target sequence for Apcs (NM_011318.1,746-764).
ctgtcaatcctaatatttt

SEQ ID NO: 567927 - DNA, 19 bp, Mus musculus
  siRNA target sequence for Asb2 (NM_023049.1,427-445).
ccatcggacatgaggaata

SEQ ID NO: 567928 - DNA, 19 bp, Mus musculus
  siRNA target sequence for Asb2 (NM_023049.1,764-782).
ccaggatgggaagaatctt

SEQ ID NO: 567929 - DNA, 19 bp, Mus musculus
  siRNA target sequence for Asb2 (NM_023049.1,815-833).
ccacgaggctgcctactat

SEQ ID NO: 567930 - DNA, 19 bp, Mus musculus
  siRNA target sequence for Asb2 (NM_023049.1,978-996).
gagcctgacatctctaaca

SEQ ID NO: 567931 - DNA, 19 bp, Mus musculus
  siRNA target sequence for Asb2 (NM_023049.1,980-998).
gcctgacatctctaacaaa

SEQ ID NO: 567932 - DNA, 19 bp, Mus musculus
  siRNA target sequence for Asb2 (NM_023049.1,984-1002).
gacatctctaacaaatcca

SEQ ID NO: 567933 - DNA, 19 bp, Mus musculus
  siRNA target sequence for Asb2 (NM_023049.1,1003-1021).
gggagactccactttacaa

SEQ ID NO: 567934 - DNA, 19 bp, Mus musculus
  siRNA target sequence for Asb2 (NM_023049.1,1041-1059).
gcggaggcggtgaggatat

SEQ ID NO: 567935 - DNA, 19 bp, Mus musculus
  siRNA target sequence for Asb2 (NM_023049.1,1042-1060).
cggaggcggtgaggatatt

SEQ ID NO: 567936 - DNA, 19 bp, Mus musculus
  siRNA target sequence for Asb2 (NM_023049.1,1054-1072).
ggatattggtgcgatacaa

SEQ ID NO: 567937 - DNA, 19 bp, Mus musculus
  siRNA target sequence for Asb2 (NM_023049.1,1080-1098).
gccaaccaccgctgtaaca

SEQ ID NO: 567938 - DNA, 19 bp, Mus musculus
  siRNA target sequence for Asb2 (NM_023049.1,1179-1197).
gtggaggccaagaatgtct

SEQ ID NO: 567939 - DNA, 19 bp, Mus musculus
  siRNA target sequence for Asb2 (NM_023049.1,1199-1217).
cagcatcacccctttgttt

SEQ ID NO: 567940 - DNA, 19 bp, Mus musculus
  siRNA target sequence for Asb2 (NM_023049.1,1201-1219).
gcatcacccctttgtttgt

SEQ ID NO: 567941 - DNA, 19 bp, Mus musculus
  siRNA target sequence for Asb2 (NM_023049.1,1427-1445).
gaagggcaactatagaata

SEQ ID NO: 567942 - DNA, 19 bp, Mus musculus
  siRNA target sequence for Asb2 (NM_023049.1,1621-1639).
gcagttctgcgctctactt

SEQ ID NO: 567943 - DNA, 19 bp, Mus musculus
  siRNA target sequence for Asb2 (NM_023049.1,1852-1870).
gcctgtcgttactcaagtt

SEQ ID NO: 567944 - DNA, 19 bp, Mus musculus
  siRNA target sequence for Asb2 (NM_023049.1,2200-2218).
ggaaggccataggaaaata

SEQ ID NO: 567945 - DNA, 19 bp, Mus musculus
  siRNA target sequence for Asb2 (NM_023049.1,2212-2230).
gaaaataccggataaaact

SEQ ID NO: 567946 - DNA, 19 bp, Mus musculus
  siRNA target sequence for Asb2 (NM_023049.1,2247-2265).
cttcccggcaggctaatca

SEQ ID NO: 567947 - DNA, 19 bp, Mus musculus
  siRNA target sequence for Asb2 (NM_023049.1,2250-2268).
cccggcaggctaatcagat

SEQ ID NO: 567948 - DNA, 19 bp, Mus musculus
  siRNA target sequence for Asb2 (NM_023049.1,2251-2269).
ccggcaggctaatcagata

SEQ ID NO: 567949 - DNA, 19 bp, Mus musculus
  siRNA target sequence for Asb2 (NM_023049.1,2270-2288).
cctgaaatatgagaataca

SEQ ID NO: 567950 - DNA, 19 bp, Mus musculus
  siRNA target sequence for Asgr1 (NM_009714.1,231-249).
gacaaaggattatcaagat

SEQ ID NO: 567951 - DNA, 19 bp, Mus musculus
  siRNA target sequence for Asgr1 (NM_009714.1,233-251).
caaaggattatcaagattt

SEQ ID NO: 567952 - DNA, 19 bp, Mus musculus
  siRNA target sequence for Asgr1 (NM_009714.1,416-434).
cccaactccgggaagatct

SEQ ID NO: 567953 - DNA, 19 bp, Mus musculus
  siRNA target sequence for Asgr1 (NM_009714.1,601-619).
cacgtgaagcagttagtgt

SEQ ID NO: 567954 - DNA, 19 bp, Mus musculus
  siRNA target sequence for Asgr1 (NM_009714.1,658-676).
cggggcaatggctctgaaa

SEQ ID NO: 567955 - DNA, 19 bp, Mus musculus
  siRNA target sequence for Asgr1 (NM_009714.1,693-711).
caactgggtggagtatgaa

SEQ ID NO: 567956 - DNA, 19 bp, Mus musculus
  siRNA target sequence for Asgr1 (NM_009714.1,854-872).
cttggattggcctaactga

SEQ ID NO: 567957 - DNA, 19 bp, Mus musculus
  siRNA target sequence for Asgr1 (NM_009714.1,1046-1064).
gctgggtctgtgagacaaa

SEQ ID NO: 567958 - DNA, 19 bp, Mus musculus
  siRNA target sequence for Asgr1 (NM_009714.1,1049-1067).
gggtctgtgagacaaagtt

SEQ ID NO: 567959 - DNA, 19 bp, Mus musculus
  siRNA target sequence for Asgr1 (NM_009714.1,1055-1073).
gtgagacaaagttggataa

SEQ ID NO: 567960 - DNA, 19 bp, Mus musculus
  siRNA target sequence for Asgr2 (NM_007493.2,403-421).
gcatacagctgcaagaaga

SEQ ID NO: 567961 - DNA, 19 bp, Mus musculus
  siRNA target sequence for Asgr2 (NM_007493.2,422-440).
gtttcggaccctgaaagaa

SEQ ID NO: 567962 - DNA, 19 bp, Mus musculus
  siRNA target sequence for Asgr2 (NM_007493.2,663-681).
gaatgctgccctgttaact

SEQ ID NO: 567963 - DNA, 19 bp, Mus musculus
  siRNA target sequence for Asgr2 (NM_007493.2,798-816).
gagcaggactttgttgtaa

SEQ ID NO: 567964 - DNA, 19 bp, Mus musculus
  siRNA target sequence for Asgr2 (NM_007493.2,881-899).
ggatggaactgattataga

SEQ ID NO: 567965 - DNA, 19 bp, Mus musculus
  siRNA target sequence for Asgr2 (NM_007493.2,882-900).
gatggaactgattatagaa

SEQ ID NO: 567966 - DNA, 19 bp, Mus musculus
  siRNA target sequence for Asgr2 (NM_007493.2,919-937).
ccttcactcagccagataa

SEQ ID NO: 567967 - DNA, 19 bp, Mus musculus
  siRNA target sequence for Asgr2 (NM_007493.2,1029-1047).
cgctgggtatgcgaaaaga

SEQ ID NO: 567968 - DNA, 19 bp, Mus musculus
  siRNA target sequence for Asgr2 (NM_007493.2,1041-1059).
gaaaagagacggaacatca

SEQ ID NO: 567969 - DNA, 19 bp, Mus musculus
  siRNA target sequence for Atrn (NM_009730.1,484-502).
ggctcttctggatttgtaa

SEQ ID NO: 567970 - DNA, 19 bp, Mus musculus
  siRNA target sequence for Atrn (NM_009730.1,505-523).
gatggacctgggaattata

SEQ ID NO: 567971 - DNA, 19 bp, Mus musculus
  siRNA target sequence for Atrn (NM_009730.1,553-571).
gaaggacagccaaatagaa

SEQ ID NO: 567972 - DNA, 19 bp, Mus musculus
  siRNA target sequence for Atrn (NM_009730.1,556-574).
ggacagccaaatagaataa

SEQ ID NO: 567973 - DNA, 19 bp, Mus musculus
  siRNA target sequence for Atrn (NM_009730.1,557-575).
gacagccaaatagaataat

SEQ ID NO: 567974 - DNA, 19 bp, Mus musculus
  siRNA target sequence for Atrn (NM_009730.1,559-577).
cagccaaatagaataatga

SEQ ID NO: 567975 - DNA, 19 bp, Mus musculus
  siRNA target sequence for Atrn (NM_009730.1,561-579).
gccaaatagaataatgaga

SEQ ID NO: 567976 - DNA, 19 bp, Mus musculus
  siRNA target sequence for Atrn (NM_009730.1,578-596).
gacttcgcttcaaccattt

SEQ ID NO: 567977 - DNA, 19 bp, Mus musculus
  siRNA target sequence for Atrn (NM_009730.1,583-601).
cgcttcaaccattttgcta

SEQ ID NO: 567978 - DNA, 19 bp, Mus musculus
  siRNA target sequence for Atrn (NM_009730.1,742-760).
gcactgctgcattttttca

SEQ ID NO: 567979 - DNA, 19 bp, Mus musculus
  siRNA target sequence for Atrn (NM_009730.1,784-802).
ggatttaatatcacttaca

SEQ ID NO: 567980 - DNA, 19 bp, Mus musculus
  siRNA target sequence for Atrn (NM_009730.1,808-826).
gacatgtgtccgaataatt

SEQ ID NO: 567981 - DNA, 19 bp, Mus musculus
  siRNA target sequence for Atrn (NM_009730.1,830-848).
caggccgaggagagtgtaa

SEQ ID NO: 567982 - DNA, 19 bp, Mus musculus
  siRNA target sequence for Atrn (NM_009730.1,841-859).
gagtgtaagagcagtaaca

SEQ ID NO: 567983 - DNA, 19 bp, Mus musculus
  siRNA target sequence for Atrn (NM_009730.1,874-892).
gagtgtgaatgttctgaaa

SEQ ID NO: 567984 - DNA, 19 bp, Mus musculus
  siRNA target sequence for Atrn (NM_009730.1,947-965).
ctcaccgaggcatctgtaa

SEQ ID NO: 567985 - DNA, 19 bp, Mus musculus
  siRNA target sequence for Atrn (NM_009730.1,951-969).
ccgaggcatctgtaatgca

SEQ ID NO: 567986 - DNA, 19 bp, Mus musculus
  siRNA target sequence for Atrn (NM_009730.1,952-970).
cgaggcatctgtaatgcaa

SEQ ID NO: 567987 - DNA, 19 bp, Mus musculus
  siRNA target sequence for Atrn (NM_009730.1,1103-1121).
ctgtggtcaatggaaatat

SEQ ID NO: 567988 - DNA, 19 bp, Mus musculus
  siRNA target sequence for Atrn (NM_009730.1,1177-1195).
gcgtatgacctgacttcta

SEQ ID NO: 567989 - DNA, 19 bp, Mus musculus
  siRNA target sequence for Atrn (NM_009730.1,1222-1240).
gtgaacagtgtggttgtaa

SEQ ID NO: 567990 - DNA, 19 bp, Mus musculus
  siRNA target sequence for Atrn (NM_009730.1,1224-1242).
gaacagtgtggttgtaaga

SEQ ID NO: 567991 - DNA, 19 bp, Mus musculus
  siRNA target sequence for Atrn (NM_009730.1,1249-1267).
cattctttggcattacata

SEQ ID NO: 567992 - DNA, 19 bp, Mus musculus
  siRNA target sequence for Atrn (NM_009730.1,1253-1271).
ctttggcattacataagga

SEQ ID NO: 567993 - DNA, 19 bp, Mus musculus
  siRNA target sequence for Atrn (NM_009730.1,1320-1338).
caatgagctgagagtattt

SEQ ID NO: 567994 - DNA, 19 bp, Mus musculus
  siRNA target sequence for Atrn (NM_009730.1,1351-1369).
gaatcatgggtattgttaa

SEQ ID NO: 567995 - DNA, 19 bp, Mus musculus
  siRNA target sequence for Atrn (NM_009730.1,1373-1391).
cgaaagctaaggatcagta

SEQ ID NO: 567996 - DNA, 19 bp, Mus musculus
  siRNA target sequence for Atrn (NM_009730.1,1405-1423).
cactcagcacacattgtta

SEQ ID NO: 567997 - DNA, 19 bp, Mus musculus
  siRNA target sequence for Atrn (NM_009730.1,1433-1451).
ctggccgtgtggtcatgtt

SEQ ID NO: 567998 - DNA, 19 bp, Mus musculus
  siRNA target sequence for Atrn (NM_009730.1,1461-1479).
cggtcattgcccactctat

SEQ ID NO: 567999 - DNA, 19 bp, Mus musculus
  siRNA target sequence for Atrn (NM_009730.1,1465-1483).
cattgcccactctatggat

SEQ ID NO: 568000 - DNA, 19 bp, Mus musculus
  siRNA target sequence for Atrn (NM_009730.1,1469-1487).
gcccactctatggatatat

SEQ ID NO: 568001 - DNA, 19 bp, Mus musculus
  siRNA target sequence for Atrn (NM_009730.1,1470-1488).
cccactctatggatatata

SEQ ID NO: 568002 - DNA, 19 bp, Mus musculus
  siRNA target sequence for Atrn (NM_009730.1,1471-1489).
ccactctatggatatataa

SEQ ID NO: 568003 - DNA, 19 bp, Mus musculus
  siRNA target sequence for Atrn (NM_009730.1,1492-1510).
gttgtgcaggaatatgact

SEQ ID NO: 568004 - DNA, 19 bp, Mus musculus
  siRNA target sequence for Atrn (NM_009730.1,1630-1648).
gctttcagcgccaacaaat

SEQ ID NO: 568005 - DNA, 19 bp, Mus musculus
  siRNA target sequence for Atrn (NM_009730.1,1631-1649).
ctttcagcgccaacaaata

SEQ ID NO: 568006 - DNA, 19 bp, Mus musculus
  siRNA target sequence for Atrn (NM_009730.1,1673-1691).
gatacgatgtggatactca

SEQ ID NO: 568007 - DNA, 19 bp, Mus musculus
  siRNA target sequence for Atrn (NM_009730.1,1715-1733).
gccgatttttccgttactt

SEQ ID NO: 568008 - DNA, 19 bp, Mus musculus
  siRNA target sequence for Atrn (NM_009730.1,1735-1753).
catacagctgtgatagtga

SEQ ID NO: 568009 - DNA, 19 bp, Mus musculus
  siRNA target sequence for Atrn (NM_009730.1,1775-1793).
gagggaacacacacaatga

SEQ ID NO: 568010 - DNA, 19 bp, Mus musculus
  siRNA target sequence for Atrn (NM_009730.1,1891-1909).
catcatgatgtcaacagat

SEQ ID NO: 568011 - DNA, 19 bp, Mus musculus
  siRNA target sequence for Atrn (NM_009730.1,1929-1947).
gtacaacagcaccatgtat

SEQ ID NO: 568012 - DNA, 19 bp, Mus musculus
  siRNA target sequence for Atrn (NM_009730.1,1981-1999).
gacgtcttggtctttacct

SEQ ID NO: 568013 - DNA, 19 bp, Mus musculus
  siRNA target sequence for Atrn (NM_009730.1,2103-2121).
gttggcaactgaagaacaa

SEQ ID NO: 568014 - DNA, 19 bp, Mus musculus
  siRNA target sequence for Atrn (NM_009730.1,2182-2200).
cagcacacagattgttaca

SEQ ID NO: 568015 - DNA, 19 bp, Mus musculus
  siRNA target sequence for Atrn (NM_009730.1,2223-2241).
ctgccactggtgcaatgat

SEQ ID NO: 568016 - DNA, 19 bp, Mus musculus
  siRNA target sequence for Atrn (NM_009730.1,2225-2243).
gccactggtgcaatgatca

SEQ ID NO: 568017 - DNA, 19 bp, Mus musculus
  siRNA target sequence for Atrn (NM_009730.1,2280-2298).
gatctccattgccaagtat

SEQ ID NO: 568018 - DNA, 19 bp, Mus musculus
  siRNA target sequence for Atrn (NM_009730.1,2320-2338).
cccatgtactactgcaata

SEQ ID NO: 568019 - DNA, 19 bp, Mus musculus
  siRNA target sequence for Atrn (NM_009730.1,2321-2339).
ccatgtactactgcaataa

SEQ ID NO: 568020 - DNA, 19 bp, Mus musculus
  siRNA target sequence for Atrn (NM_009730.1,2325-2343).
gtactactgcaataagaaa

SEQ ID NO: 568021 - DNA, 19 bp, Mus musculus
  siRNA target sequence for Atrn (NM_009730.1,2406-2424).
catcgccctgccggaaaat

SEQ ID NO: 568022 - DNA, 19 bp, Mus musculus
  siRNA target sequence for Atrn (NM_009730.1,2412-2430).
cctgccggaaaatatctgt

SEQ ID NO: 568023 - DNA, 19 bp, Mus musculus
  siRNA target sequence for Atrn (NM_009730.1,2433-2451).
caatggctggcatttggtt

SEQ ID NO: 568024 - DNA, 19 bp, Mus musculus
  siRNA target sequence for Atrn (NM_009730.1,2452-2470).
ggaaactcgtgtctgaaaa

SEQ ID NO: 568025 - DNA, 19 bp, Mus musculus
  siRNA target sequence for Atrn (NM_009730.1,2453-2471).
gaaactcgtgtctgaaaat

SEQ ID NO: 568026 - DNA, 19 bp, Mus musculus
  siRNA target sequence for Atrn (NM_009730.1,2457-2475).
ctcgtgtctgaaaatcact

SEQ ID NO: 568027 - DNA, 19 bp, Mus musculus
  siRNA target sequence for Atrn (NM_009730.1,2474-2492).
ctactgctaaggagaatta

SEQ ID NO: 568028 - DNA, 19 bp, Mus musculus
  siRNA target sequence for Atrn (NM_009730.1,2571-2589).
ccttaagcagcttcgatta

SEQ ID NO: 568029 - DNA, 19 bp, Mus musculus
  siRNA target sequence for Atrn (NM_009730.1,2572-2590).
cttaagcagcttcgattaa

SEQ ID NO: 568030 - DNA, 19 bp, Mus musculus
  siRNA target sequence for Atrn (NM_009730.1,2577-2595).
gcagcttcgattaatgcaa

SEQ ID NO: 568031 - DNA, 19 bp, Mus musculus
  siRNA target sequence for Atrn (NM_009730.1,2581-2599).
cttcgattaatgcaatcat

SEQ ID NO: 568032 - DNA, 19 bp, Mus musculus
  siRNA target sequence for Atrn (NM_009730.1,2593-2611).
caatcatctcaaagtatgt

SEQ ID NO: 568033 - DNA, 19 bp, Mus musculus
  siRNA target sequence for Atrn (NM_009730.1,2635-2653).
gttggtcttcggaagatca

SEQ ID NO: 568034 - DNA, 19 bp, Mus musculus
  siRNA target sequence for Atrn (NM_009730.1,2645-2663).
ggaagatcaatgtgtctta

SEQ ID NO: 568035 - DNA, 19 bp, Mus musculus
  siRNA target sequence for Atrn (NM_009730.1,2684-2702).
ctccattcacaaatagttt

SEQ ID NO: 568036 - DNA, 19 bp, Mus musculus
  siRNA target sequence for Atrn (NM_009730.1,2761-2779).
cctagtactcggggattaa

SEQ ID NO: 568037 - DNA, 19 bp, Mus musculus
  siRNA target sequence for Atrn (NM_009730.1,2762-2780).
ctagtactcggggattaaa

SEQ ID NO: 568038 - DNA, 19 bp, Mus musculus
  siRNA target sequence for Atrn (NM_009730.1,2984-3002).
gtatggaatggtatacgat

SEQ ID NO: 568039 - DNA, 19 bp, Mus musculus
  siRNA target sequence for Atrn (NM_009730.1,3078-3096).
gtgtactgatcctagcaat

SEQ ID NO: 568040 - DNA, 19 bp, Mus musculus
  siRNA target sequence for Atrn (NM_009730.1,3113-3131).
gtattgagggcagctataa

SEQ ID NO: 568041 - DNA, 19 bp, Mus musculus
  siRNA target sequence for Atrn (NM_009730.1,3330-3348).
ctgcgagacctgcatatct

SEQ ID NO: 568042 - DNA, 19 bp, Mus musculus
  siRNA target sequence for Atrn (NM_009730.1,3339-3357).
ctgcatatctggcttctat

SEQ ID NO: 568043 - DNA, 19 bp, Mus musculus
  siRNA target sequence for Atrn (NM_009730.1,3354-3372).
ctatggtgacccgactaat

SEQ ID NO: 568044 - DNA, 19 bp, Mus musculus
  siRNA target sequence for Atrn (NM_009730.1,3366-3384).
gactaatggaggcaaatgt

SEQ ID NO: 568045 - DNA, 19 bp, Mus musculus
  siRNA target sequence for Atrn (NM_009730.1,3539-3557).
cccttctcattgactatca

SEQ ID NO: 568046 - DNA, 19 bp, Mus musculus
  siRNA target sequence for Atrn (NM_009730.1,3550-3568).
gactatcagttcaccttta

SEQ ID NO: 568047 - DNA, 19 bp, Mus musculus
  siRNA target sequence for Atrn (NM_009730.1,3580-3598).
gaagacgaccgctactaca

SEQ ID NO: 568048 - DNA, 19 bp, Mus musculus
  siRNA target sequence for Atrn (NM_009730.1,3615-3633).
ggctactcctgatgaacaa

SEQ ID NO: 568049 - DNA, 19 bp, Mus musculus
  siRNA target sequence for Atrn (NM_009730.1,3617-3635).
ctactcctgatgaacaaaa

SEQ ID NO: 568050 - DNA, 19 bp, Mus musculus
  siRNA target sequence for Atrn (NM_009730.1,3638-3656).
gggatttggacatgttcat

SEQ ID NO: 568051 - DNA, 19 bp, Mus musculus
  siRNA target sequence for Atrn (NM_009730.1,3727-3745).
gaagaggtgcctgttgttt

SEQ ID NO: 568052 - DNA, 19 bp, Mus musculus
  siRNA target sequence for Atrn (NM_009730.1,3780-3798).
ctctaatgagaaatttgat

SEQ ID NO: 568053 - DNA, 19 bp, Mus musculus
  siRNA target sequence for Atrn (NM_009730.1,3848-3866).
cttggcccatcaaaattca

SEQ ID NO: 568054 - DNA, 19 bp, Mus musculus
  siRNA target sequence for Atrn (NM_009730.1,4268-4286).
cagcagatgccaatagtgt

SEQ ID NO: 568055 - DNA, 19 bp, Mus musculus
  siRNA target sequence for Atrn (NM_009730.1,4294-4312).
gaagtcaggagctgtaaga

SEQ ID NO: 568056 - DNA, 19 bp, Mus musculus
  siRNA target sequence for Atrn (NM_009730.1,4343-4361).
ggaacctgcatttgatact

SEQ ID NO: 568057 - DNA, 19 bp, Mus musculus
  siRNA target sequence for Atrn (NM_009730.1,4462-4480).
cttgaagcgtccaactcat

SEQ ID NO: 568058 - DNA, 19 bp, Mus musculus
  siRNA target sequence for Bcan (NM_007529.1,430-448).
gggctgcgcgtcaaggtaa

SEQ ID NO: 568059 - DNA, 19 bp, Mus musculus
  siRNA target sequence for Bcan (NM_007529.1,431-449).
ggctgcgcgtcaaggtaaa

SEQ ID NO: 568060 - DNA, 19 bp, Mus musculus
  siRNA target sequence for Bcan (NM_007529.1,435-453).
gcgcgtcaaggtaaacgaa

SEQ ID NO: 568061 - DNA, 19 bp, Mus musculus
  siRNA target sequence for Bcan (NM_007529.1,498-516).
cacggatgtgtctctagta

SEQ ID NO: 568062 - DNA, 19 bp, Mus musculus
  siRNA target sequence for Bcan (NM_007529.1,500-518).
cggatgtgtctctagtatt

SEQ ID NO: 568063 - DNA, 19 bp, Mus musculus
  siRNA target sequence for Bcan (NM_007529.1,637-655).
ggctctgcgcgctatgctt

SEQ ID NO: 568064 - DNA, 19 bp, Mus musculus
  siRNA target sequence for Bcan (NM_007529.1,638-656).
gctctgcgcgctatgcttt

SEQ ID NO: 568065 - DNA, 19 bp, Mus musculus
  siRNA target sequence for Bcan (NM_007529.1,867-885).
gggtcctgatgatctctat

SEQ ID NO: 568066 - DNA, 19 bp, Mus musculus
  siRNA target sequence for Bcan (NM_007529.1,896-914).
gttatgccgaagacctaaa

SEQ ID NO: 568067 - DNA, 19 bp, Mus musculus
  siRNA target sequence for Bcan (NM_007529.1,1176-1194).
caagcagaaccgcttcaat

SEQ ID NO: 568068 - DNA, 19 bp, Mus musculus
  siRNA target sequence for Bcan (NM_007529.1,1417-1435).
cccaggactccgctagaat

SEQ ID NO: 568069 - DNA, 19 bp, Mus musculus
  siRNA target sequence for Bcan (NM_007529.1,1592-1610).
ctactggctcagaaacaga

SEQ ID NO: 568070 - DNA, 19 bp, Mus musculus
  siRNA target sequence for Bcan (NM_007529.1,1697-1715).
gaccgcctgcagagacttt

SEQ ID NO: 568071 - DNA, 19 bp, Mus musculus
  siRNA target sequence for Bcan (NM_007529.1,2012-2030).
cctcatcaggtgactgtat

SEQ ID NO: 568072 - DNA, 19 bp, Mus musculus
  siRNA target sequence for Bcan (NM_007529.1,2077-2095).
ggtttccgctgcctatgtt

SEQ ID NO: 568073 - DNA, 19 bp, Mus musculus
  siRNA target sequence for Bcan (NM_007529.1,2261-2279).
cccctgaggagcaagactt

SEQ ID NO: 568074 - DNA, 19 bp, Mus musculus
  siRNA target sequence for Bcan (NM_007529.1,2362-2380).
gcccctctgctctatgaaa

SEQ ID NO: 568075 - DNA, 19 bp, Mus musculus
  siRNA target sequence for Bcan (NM_007529.1,2363-2381).
cccctctgctctatgaaaa

SEQ ID NO: 568076 - DNA, 19 bp, Mus musculus
  siRNA target sequence for Bcan (NM_007529.1,2473-2491).
ccctgcaactaccatctat

SEQ ID NO: 568077 - DNA, 19 bp, Mus musculus
  siRNA target sequence for Bcan (NM_007529.1,2576-2594).
gctacgcggtggatactgt

SEQ ID NO: 568078 - DNA, 19 bp, Mus musculus
  siRNA target sequence for Bcan (NM_007529.1,2586-2604).
ggatactgtgcttcgatat

SEQ ID NO: 568079 - DNA, 19 bp, Mus musculus
  siRNA target sequence for Bcan (NM_007529.1,2671-2689).
gaggcccctcagatttcct

SEQ ID NO: 568080 - DNA, 19 bp, Mus musculus
  siRNA target sequence for Cd207 (NM_144943.2,239-257).
gtgcttcaggctgttttct

SEQ ID NO: 568081 - DNA, 19 bp, Mus musculus
  siRNA target sequence for Cd207 (NM_144943.2,245-263).
caggctgttttctatccta

SEQ ID NO: 568082 - DNA, 19 bp, Mus musculus
  siRNA target sequence for Cd207 (NM_144943.2,261-279).
ctaggttgatgggcaaaat

SEQ ID NO: 568083 - DNA, 19 bp, Mus musculus
  siRNA target sequence for Cd207 (NM_144943.2,294-312).
gtgatgcccagatgttgaa

SEQ ID NO: 568084 - DNA, 19 bp, Mus musculus
  siRNA target sequence for Cd207 (NM_144943.2,334-352).
caccctgggttctgatctt

SEQ ID NO: 568085 - DNA, 19 bp, Mus musculus
  siRNA target sequence for Cd207 (NM_144943.2,336-354).
ccctgggttctgatcttaa

SEQ ID NO: 568086 - DNA, 19 bp, Mus musculus
  siRNA target sequence for Cd207 (NM_144943.2,426-444).
gttctcagatcctgtcttt

SEQ ID NO: 568087 - DNA, 19 bp, Mus musculus
  siRNA target sequence for Cd207 (NM_144943.2,470-488).
gatcagctccagatattaa

SEQ ID NO: 568088 - DNA, 19 bp, Mus musculus
  siRNA target sequence for Cd207 (NM_144943.2,558-576).
ccagcgccttgaacacaaa

SEQ ID NO: 568089 - DNA, 19 bp, Mus musculus
  siRNA target sequence for Cd207 (NM_144943.2,676-694).
ggggaacttctattacttt

SEQ ID NO: 568090 - DNA, 19 bp, Mus musculus
  siRNA target sequence for Cd207 (NM_144943.2,721-739).
cgcagagcagttctgtatt

SEQ ID NO: 568091 - DNA, 19 bp, Mus musculus
  siRNA target sequence for Cd207 (NM_144943.2,722-740).
gcagagcagttctgtattt

SEQ ID NO: 568092 - DNA, 19 bp, Mus musculus
  siRNA target sequence for Cd207 (NM_144943.2,725-743).
gagcagttctgtatttcta

SEQ ID NO: 568093 - DNA, 19 bp, Mus musculus
  siRNA target sequence for Cd207 (NM_144943.2,727-745).
gcagttctgtatttctaga

SEQ ID NO: 568094 - DNA, 19 bp, Mus musculus
  siRNA target sequence for Cd207 (NM_144943.2,768-786).
cctcagaatcggaacaaaa

SEQ ID NO: 568095 - DNA, 19 bp, Mus musculus
  siRNA target sequence for Cd207 (NM_144943.2,777-795).
cggaacaaaagtttctcta

SEQ ID NO: 568096 - DNA, 19 bp, Mus musculus
  siRNA target sequence for Cd207 (NM_144943.2,820-838).
ctggattggacttaccaaa

SEQ ID NO: 568097 - DNA, 19 bp, Mus musculus
  siRNA target sequence for Cd207 (NM_144943.2,864-882).
gggtggaccagacatcatt

SEQ ID NO: 568098 - DNA, 19 bp, Mus musculus
  siRNA target sequence for Cd207 (NM_144943.2,866-884).
gtggaccagacatcattca

SEQ ID NO: 568099 - DNA, 19 bp, Mus musculus
  siRNA target sequence for Cd207 (NM_144943.2,944-962).
gagcactgtgccaatatca

SEQ ID NO: 568100 - DNA, 19 bp, Mus musculus
  siRNA target sequence for Cd207 (NM_144943.2,988-1006).
cgatggtccctgtgacaat

SEQ ID NO: 568101 - DNA, 19 bp, Mus musculus
  siRNA target sequence for Cd207 (NM_144943.2,989-1007).
gatggtccctgtgacaata

SEQ ID NO: 568102 - DNA, 19 bp, Mus musculus
  siRNA target sequence for Cd207 (NM_144943.2,993-1011).
gtccctgtgacaatacatt

SEQ ID NO: 568103 - DNA, 19 bp, Mus musculus
  siRNA target sequence for Cd207 (NM_144943.2,999-1017).
gtgacaatacatttctttt

SEQ ID NO: 568104 - DNA, 19 bp, Mus musculus
  siRNA target sequence for Cd207 (NM_144943.2,1033-1051).
ctacgtccaaacaactgaa

SEQ ID NO: 568105 - DNA, 19 bp, Mus musculus
  siRNA target sequence for Cd209a (NM_133238.2,447-465).
ctcaacttgtggtcatcaa

SEQ ID NO: 568106 - DNA, 19 bp, Mus musculus
  siRNA target sequence for Cd209a (NM_133238.2,519-537).
cttggatggggctcattga

SEQ ID NO: 568107 - DNA, 19 bp, Mus musculus
  siRNA target sequence for Cd209a (NM_133238.2,522-540).
ggatggggctcattgacat

SEQ ID NO: 568108 - DNA, 19 bp, Mus musculus
  siRNA target sequence for Cd209a (NM_133238.2,609-627).
gtaaaggagaacctaacaa

SEQ ID NO: 568109 - DNA, 19 bp, Mus musculus
  siRNA target sequence for Cd209a (NM_133238.2,670-688).
gaatgacaccaaatgtact

SEQ ID NO: 568110 - DNA, 19 bp, Mus musculus
  siRNA target sequence for Cd209c (NM_130903.2,1159-1177).
ctggaatgactctgtcaat

SEQ ID NO: 568111 - DNA, 19 bp, Mus musculus
  siRNA target sequence for Cd209c (NM_130903.2,1198-1216).
ccaactagtggttatcaaa

SEQ ID NO: 568112 - DNA, 19 bp, Mus musculus
  siRNA target sequence for Cd209c (NM_130903.2,1423-1441).
cgatgccccatgtacaatt

SEQ ID NO: 568113 - DNA, 19 bp, Mus musculus
  siRNA target sequence for Cd209c (NM_130903.2,1424-1442).
gatgccccatgtacaatta

SEQ ID NO: 568114 - DNA, 19 bp, Mus musculus
  siRNA target sequence for Cd209c (NM_130903.2,1427-1445).
gccccatgtacaattaaga

SEQ ID NO: 568115 - DNA, 19 bp, Mus musculus
  siRNA target sequence for Cd209c (NM_130903.2,1428-1446).
ccccatgtacaattaagaa

SEQ ID NO: 568116 - DNA, 19 bp, Mus musculus
  siRNA target sequence for Cd209c (NM_130903.2,1430-1448).
ccatgtacaattaagaaat

SEQ ID NO: 568117 - DNA, 19 bp, Mus musculus
  siRNA target sequence for Cd209c (NM_130903.2,1431-1449).
catgtacaattaagaaata

SEQ ID NO: 568118 - DNA, 19 bp, Mus musculus
  siRNA target sequence for CD209d (NM_130904.2,82-100).
gagtggcaccaggtattct

SEQ ID NO: 568119 - DNA, 19 bp, Mus musculus
  siRNA target sequence for CD209d (NM_130904.2,84-102).
gtggcaccaggtattctga

SEQ ID NO: 568120 - DNA, 19 bp, Mus musculus
  siRNA target sequence for CD209d (NM_130904.2,108-126).
gctcccgattacaaacaaa

SEQ ID NO: 568121 - DNA, 19 bp, Mus musculus
  siRNA target sequence for CD209d (NM_130904.2,109-127).
ctcccgattacaaacaaaa

SEQ ID NO: 568122 - DNA, 19 bp, Mus musculus
  siRNA target sequence for CD209d (NM_130904.2,111-129).
cccgattacaaacaaaatt

SEQ ID NO: 568123 - DNA, 19 bp, Mus musculus
  siRNA target sequence for CD209d (NM_130904.2,112-130).
ccgattacaaacaaaattt

SEQ ID NO: 568124 - DNA, 19 bp, Mus musculus
  siRNA target sequence for CD209d (NM_130904.2,136-154).
caagagtttggcagagtat

SEQ ID NO: 568125 - DNA, 19 bp, Mus musculus
  siRNA target sequence for CD209d (NM_130904.2,260-278).
gaggttcagaacaaaatct

SEQ ID NO: 568126 - DNA, 19 bp, Mus musculus
  siRNA target sequence for CD209d (NM_130904.2,432-450).
cccaactggtcatcataga

SEQ ID NO: 568127 - DNA, 19 bp, Mus musculus
  siRNA target sequence for CD209d (NM_130904.2,576-594).
gctttacacgctattggaa

SEQ ID NO: 568128 - DNA, 19 bp, Mus musculus
  siRNA target sequence for CD209d (NM_130904.2,577-595).
ctttacacgctattggaat

SEQ ID NO: 568129 - DNA, 19 bp, Mus musculus
  siRNA target sequence for CD209d (NM_130904.2,597-615).
gaggggagcccaacaatgt

SEQ ID NO: 568130 - DNA, 19 bp, Mus musculus
  siRNA target sequence for CD209d (NM_130904.2,607-625).
caacaatgtcggtgatgaa

SEQ ID NO: 568131 - DNA, 19 bp, Mus musculus
  siRNA target sequence for CD209d (NM_130904.2,645-663).
gggatggctggaatgatct

SEQ ID NO: 568132 - DNA, 19 bp, Mus musculus
  siRNA target sequence for CD209d (NM_130904.2,664-682).
cagttgtgataaactactt

SEQ ID NO: 568133 - DNA, 19 bp, Mus musculus
  siRNA target sequence for CD209d (NM_130904.2,666-684).
gttgtgataaactactttt

SEQ ID NO: 568134 - DNA, 19 bp, Mus musculus
  siRNA target sequence for CD209d (NM_130904.2,677-695).
ctacttttctggatctgta

SEQ ID NO: 568135 - DNA, 19 bp, Mus musculus
  siRNA target sequence for CD209d (NM_130904.2,685-703).
ctggatctgtaagaaagtt

SEQ ID NO: 568136 - DNA, 19 bp, Mus musculus
  siRNA target sequence for CD209d (NM_130904.2,688-706).
gatctgtaagaaagtttca

SEQ ID NO: 568137 - DNA, 19 bp, Mus musculus
  siRNA target sequence for Cd209e (NM_130905.2,53-71).
gctctctgggatttctaga

SEQ ID NO: 568138 - DNA, 19 bp, Mus musculus
  siRNA target sequence for Cd209e (NM_130905.2,136-154).
gccatcatcatccaagttt

SEQ ID NO: 568139 - DNA, 19 bp, Mus musculus
  siRNA target sequence for Cd209e (NM_130905.2,183-201).
gtgggaacacacaaagcaa

SEQ ID NO: 568140 - DNA, 19 bp, Mus musculus
  siRNA target sequence for Cd209e (NM_130905.2,219-237).
cctgagccaactgaaatct

SEQ ID NO: 568141 - DNA, 19 bp, Mus musculus
  siRNA target sequence for Cd209e (NM_130905.2,222-240).
gagccaactgaaatctgaa

SEQ ID NO: 568142 - DNA, 19 bp, Mus musculus
  siRNA target sequence for Cd209e (NM_130905.2,225-243).
ccaactgaaatctgaagtt

SEQ ID NO: 568143 - DNA, 19 bp, Mus musculus
  siRNA target sequence for Cd209e (NM_130905.2,231-249).
gaaatctgaagttgataga

SEQ ID NO: 568144 - DNA, 19 bp, Mus musculus
  siRNA target sequence for Cd209e (NM_130905.2,443-461).
ggctgtcagatctgaacaa

SEQ ID NO: 568145 - DNA, 19 bp, Mus musculus
  siRNA target sequence for Cd209e (NM_130905.2,551-569).
gacaagactgtgtggaatt

SEQ ID NO: 568146 - DNA, 19 bp, Mus musculus
  siRNA target sequence for Cd209e (NM_130905.2,593-611).
ccaaatgtgaacaaaggaa

SEQ ID NO: 568147 - DNA, 19 bp, Mus musculus
  siRNA target sequence for Cd33 (NM_021293.1,146-164).
ctccattaagctcacttta

SEQ ID NO: 568148 - DNA, 19 bp, Mus musculus
  siRNA target sequence for Cd33 (NM_021293.1,303-321).
gactgttccctgttcatca

SEQ ID NO: 568149 - DNA, 19 bp, Mus musculus
  siRNA target sequence for Cd33 (NM_021293.1,361-379).
gagtggtcagagaaccttt

SEQ ID NO: 568150 - DNA, 19 bp, Mus musculus
  siRNA target sequence for Cd33 (NM_021293.1,366-384).
gtcagagaaccttttgtga

SEQ ID NO: 568151 - DNA, 19 bp, Mus musculus
  siRNA target sequence for Cd33 (NM_021293.1,376-394).
cttttgtgagatattctta

SEQ ID NO: 568152 - DNA, 19 bp, Mus musculus
  siRNA target sequence for Cd33 (NM_021293.1,433-451).
cacggactcctgacattat

SEQ ID NO: 568153 - DNA, 19 bp, Mus musculus
  siRNA target sequence for Cd33 (NM_021293.1,435-453).
cggactcctgacattataa

SEQ ID NO: 568154 - DNA, 19 bp, Mus musculus
  siRNA target sequence for Cd33 (NM_021293.1,555-573).
gccctcacctccttgagtt

SEQ ID NO: 568155 - DNA, 19 bp, Mus musculus
  siRNA target sequence for Cd33 (NM_021293.1,695-713).
caatgttacccggaaatca

SEQ ID NO: 568156 - DNA, 19 bp, Mus musculus
  siRNA target sequence for Cd33 (NM_021293.1,757-775).
cggtcaagctcctgattct

SEQ ID NO: 568157 - DNA, 19 bp, Mus musculus
  siRNA target sequence for Cd33 (NM_021293.1,784-802).
gtctcgtgtttctcattgt

SEQ ID NO: 568158 - DNA, 19 bp, Mus musculus
  siRNA target sequence for Cd33 (NM_021293.1,786-804).
ctcgtgtttctcattgtga

SEQ ID NO: 568159 - DNA, 19 bp, Mus musculus
  siRNA target sequence for Cd33 (NM_021293.1,837-855).
gtgcacatgggctgtgaaa

SEQ ID NO: 568160 - DNA, 19 bp, Mus musculus
  siRNA target sequence for Cd33 (NM_021293.1,839-857).
gcacatgggctgtgaaaat

SEQ ID NO: 568161 - DNA, 19 bp, Mus musculus
  siRNA target sequence for Cd33 (NM_021293.1,842-860).
catgggctgtgaaaatcct

SEQ ID NO: 568162 - DNA, 19 bp, Mus musculus
  siRNA target sequence for Cd33 (NM_021293.1,947-965).
cagtgtccacactaagatt

SEQ ID NO: 568163 - DNA, 19 bp, Mus musculus
  siRNA target sequence for Cd72 (NM_007654.1,90-108).
gaacagcgcatctaaccat

SEQ ID NO: 568164 - DNA, 19 bp, Mus musculus
  siRNA target sequence for Cd72 (NM_007654.1,412-430).
caggaggggaccaggattt

SEQ ID NO: 568165 - DNA, 19 bp, Mus musculus
  siRNA target sequence for Cd72 (NM_007654.1,531-549).
ctcgagccaggacacatta

SEQ ID NO: 568166 - DNA, 19 bp, Mus musculus
  siRNA target sequence for Cd72 (NM_007654.1,533-551).
cgagccaggacacattaca

SEQ ID NO: 568167 - DNA, 19 bp, Mus musculus
  siRNA target sequence for Cd72 (NM_007654.1,729-747).
ctgtccatgcggatggatt

SEQ ID NO: 568168 - DNA, 19 bp, Mus musculus
  siRNA target sequence for Cd72 (NM_007654.1,734-752).
catgcggatggattccata

SEQ ID NO: 568169 - DNA, 19 bp, Mus musculus
  siRNA target sequence for Cd72 (NM_007654.1,796-814).
gaggagagccaaaaatact

SEQ ID NO: 568170 - DNA, 19 bp, Mus musculus
  siRNA target sequence for Cd72 (NM_007654.1,831-849).
caaactggcagcattcgat

SEQ ID NO: 568171 - DNA, 19 bp, Mus musculus
  siRNA target sequence for Cd72 (NM_007654.1,842-860).
cattcgatgaaccttctaa

SEQ ID NO: 568172 - DNA, 19 bp, Mus musculus
  siRNA target sequence for Cd72 (NM_007654.1,846-864).
cgatgaaccttctaagtat

SEQ ID NO: 568173 - DNA, 19 bp, Mus musculus
  siRNA target sequence for Cd72 (NM_007654.1,847-865).
gatgaaccttctaagtatt

SEQ ID NO: 568174 - DNA, 19 bp, Mus musculus
  siRNA target sequence for Cd72 (NM_007654.1,850-868).
gaaccttctaagtattact

SEQ ID NO: 568175 - DNA, 19 bp, Mus musculus
  siRNA target sequence for Cd72 (NM_007654.1,854-872).
cttctaagtattactatga

SEQ ID NO: 568176 - DNA, 19 bp, Mus musculus
  siRNA target sequence for Cd72 (NM_007654.1,904-922).
ctagatcgttcgaagtcat

SEQ ID NO: 568177 - DNA, 19 bp, Mus musculus
  siRNA target sequence for Cd72 (NM_007654.1,907-925).
gatcgttcgaagtcatatt

SEQ ID NO: 568178 - DNA, 19 bp, Mus musculus
  siRNA target sequence for Cd72 (NM_007654.1,910-928).
cgttcgaagtcatattgga

SEQ ID NO: 568179 - DNA, 19 bp, Mus musculus
  siRNA target sequence for Cd72 (NM_007654.1,911-929).
gttcgaagtcatattggat

SEQ ID NO: 568180 - DNA, 19 bp, Mus musculus
  siRNA target sequence for Cd72 (NM_007654.1,1036-1054).
gagcttcacccctgcattt

SEQ ID NO: 568181 - DNA, 19 bp, Mus musculus
  siRNA target sequence for Chodl (NM_139134.1,417-435).
ggctggcttgtgaaagtga

SEQ ID NO: 568182 - DNA, 19 bp, Mus musculus
  siRNA target sequence for Chodl (NM_139134.1,418-436).
gctggcttgtgaaagtgaa

SEQ ID NO: 568183 - DNA, 19 bp, Mus musculus
  siRNA target sequence for Chodl (NM_139134.1,514-532).
cggaacaggtatttcagat

SEQ ID NO: 568184 - DNA, 19 bp, Mus musculus
  siRNA target sequence for Chodl (NM_139134.1,653-671).
ccttcttgtgggagtgaaa

SEQ ID NO: 568185 - DNA, 19 bp, Mus musculus
  siRNA target sequence for Chodl (NM_139134.1,666-684).
gtgaaaaatgtgtagtcat

SEQ ID NO: 568186 - DNA, 19 bp, Mus musculus
  siRNA target sequence for Chodl (NM_139134.1,801-819).
caacagagcccgctgaaaa

SEQ ID NO: 568187 - DNA, 19 bp, Mus musculus
  siRNA target sequence for Chodl (NM_139134.1,811-829).
cgctgaaaagccgtatctt

SEQ ID NO: 568188 - DNA, 19 bp, Mus musculus
  siRNA target sequence for Chodl (NM_139134.1,812-830).
gctgaaaagccgtatctta

SEQ ID NO: 568189 - DNA, 19 bp, Mus musculus
  siRNA target sequence for Chodl (NM_139134.1,815-833).
gaaaagccgtatcttacaa

SEQ ID NO: 568190 - DNA, 19 bp, Mus musculus
  siRNA target sequence for Chodl (NM_139134.1,820-838).
gccgtatcttacaaaccaa

SEQ ID NO: 568191 - DNA, 19 bp, Mus musculus
  siRNA target sequence for Chodl (NM_139134.1,887-905).
cccaatctaatctatgtta

SEQ ID NO: 568192 - DNA, 19 bp, Mus musculus
  siRNA target sequence for Chodl (NM_139134.1,888-906).
ccaatctaatctatgttat

SEQ ID NO: 568193 - DNA, 19 bp, Mus musculus
  siRNA target sequence for Chodl (NM_139134.1,889-907).
caatctaatctatgttatt

SEQ ID NO: 568194 - DNA, 19 bp, Mus musculus
  siRNA target sequence for Chodl (NM_139134.1,967-985).
gatgttgcataaaagtaaa

SEQ ID NO: 568195 - DNA, 19 bp, Mus musculus
  siRNA target sequence for Chodl (NM_139134.1,970-988).
gttgcataaaagtaaagga

SEQ ID NO: 568196 - DNA, 19 bp, Mus musculus
  siRNA target sequence for Chst4 (NM_011998.3,468-486).
gcggtcaggatcctctttt

SEQ ID NO: 568197 - DNA, 19 bp, Mus musculus
  siRNA target sequence for Chst4 (NM_011998.3,470-488).
ggtcaggatcctcttttgt

SEQ ID NO: 568198 - DNA, 19 bp, Mus musculus
  siRNA target sequence for Chst4 (NM_011998.3,503-521).
ggcagcacccggatgtgtt

SEQ ID NO: 568199 - DNA, 19 bp, Mus musculus
  siRNA target sequence for Chst4 (NM_011998.3,626-644).
gtgacatgagcgtctttga

SEQ ID NO: 568200 - DNA, 19 bp, Mus musculus
  siRNA target sequence for Chst4 (NM_011998.3,783-801).
cggtcagcagccctttgat

SEQ ID NO: 568201 - DNA, 19 bp, Mus musculus
  siRNA target sequence for Chst4 (NM_011998.3,784-802).
ggtcagcagccctttgata

SEQ ID NO: 568202 - DNA, 19 bp, Mus musculus
  siRNA target sequence for Chst4 (NM_011998.3,785-803).
gtcagcagccctttgatat

SEQ ID NO: 568203 - DNA, 19 bp, Mus musculus
  siRNA target sequence for Chst4 (NM_011998.3,1004-1022).
ggcagcatttggaaacgat

SEQ ID NO: 568204 - DNA, 19 bp, Mus musculus
  siRNA target sequence for Chst4 (NM_011998.3,1168-1186).
gcccagacgaccagactat

SEQ ID NO: 568205 - DNA, 19 bp, Mus musculus
  siRNA target sequence for Chst4 (NM_011998.3,1169-1187).
cccagacgaccagactata

SEQ ID NO: 568206 - DNA, 19 bp, Mus musculus
  siRNA target sequence for Chst4 (NM_011998.3,1173-1191).
gacgaccagactatataaa

SEQ ID NO: 568207 - DNA, 19 bp, Mus musculus
  siRNA target sequence for Chst4 (NM_011998.3,1175-1193).
cgaccagactatataaatt

SEQ ID NO: 568208 - DNA, 19 bp, Mus musculus
  siRNA target sequence for Chst4 (NM_011998.3,1176-1194).
gaccagactatataaattt

SEQ ID NO: 568209 - DNA, 19 bp, Mus musculus
  siRNA target sequence for Chst4 (NM_011998.3,1316-1334).
ggcgttggtccttacctta

SEQ ID NO: 568210 - DNA, 19 bp, Mus musculus
  siRNA target sequence for Chst4 (NM_011998.3,1322-1340).
ggtccttaccttacgaaaa

SEQ ID NO: 568211 - DNA, 19 bp, Mus musculus
  siRNA target sequence for Chst4 (NM_011998.3,1362-1380).
ctgcggtgaggctatggat

SEQ ID NO: 568212 - DNA, 19 bp, Mus musculus
  siRNA target sequence for Chst4 (NM_011998.3,1364-1382).
gcggtgaggctatggattt

SEQ ID NO: 568213 - DNA, 19 bp, Mus musculus
  siRNA target sequence for Chst4 (NM_011998.3,1367-1385).
gtgaggctatggatttgct

SEQ ID NO: 568214 - DNA, 19 bp, Mus musculus
  siRNA target sequence for Chst4 (NM_011998.3,1395-1413).
ccaggtcagatctcaacaa

SEQ ID NO: 568215 - DNA, 19 bp, Mus musculus
  siRNA target sequence for Chst4 (NM_011998.3,1398-1416).
ggtcagatctcaacaagaa

SEQ ID NO: 568216 - DNA, 19 bp, Mus musculus
  siRNA target sequence for Clecsf10 (NM_020001.1,212-230).
gtgatttccatgttactct

SEQ ID NO: 568217 - DNA, 19 bp, Mus musculus
  siRNA target sequence for Clecsf10 (NM_020001.1,229-247).
cttgagtacctgtttcatt

SEQ ID NO: 568218 - DNA, 19 bp, Mus musculus
  siRNA target sequence for Clecsf10 (NM_020001.1,253-271).
ctgtgtggtgacttaccaa

SEQ ID NO: 568219 - DNA, 19 bp, Mus musculus
  siRNA target sequence for Clecsf10 (NM_020001.1,255-273).
gtgtggtgacttaccaatt

SEQ ID NO: 568220 - DNA, 19 bp, Mus musculus
  siRNA target sequence for Clecsf10 (NM_020001.1,280-298).
ggaccagcccagtagaaga

SEQ ID NO: 568221 - DNA, 19 bp, Mus musculus
  siRNA target sequence for Clecsf10 (NM_020001.1,347-365).
gggactatggtgtcagaaa

SEQ ID NO: 568222 - DNA, 19 bp, Mus musculus
  siRNA target sequence for Clecsf10 (NM_020001.1,348-366).
ggactatggtgtcagaaaa

SEQ ID NO: 568223 - DNA, 19 bp, Mus musculus
  siRNA target sequence for Clecsf10 (NM_020001.1,372-390).
ggggatgctgcccaaatca

SEQ ID NO: 568224 - DNA, 19 bp, Mus musculus
  siRNA target sequence for Clecsf10 (NM_020001.1,487-505).
ggtggtgatcaatactgaa

SEQ ID NO: 568225 - DNA, 19 bp, Mus musculus
  siRNA target sequence for Clecsf10 (NM_020001.1,592-610).
gcaatggatcgatgatact

SEQ ID NO: 568226 - DNA, 19 bp, Mus musculus
  siRNA target sequence for Clecsf10 (NM_020001.1,601-619).
cgatgatactcctttcagt

SEQ ID NO: 568227 - DNA, 19 bp, Mus musculus
  siRNA target sequence for Clecsf10 (NM_020001.1,605-623).
gatactcctttcagtcaaa

SEQ ID NO: 568228 - DNA, 19 bp, Mus musculus
  siRNA target sequence for Clecsf10 (NM_020001.1,609-627).
ctcctttcagtcaaaatgt

SEQ ID NO: 568229 - DNA, 19 bp, Mus musculus
  siRNA target sequence for Clecsf10 (NM_020001.1,667-685).
gcggtgtgtttcaatagtt

SEQ ID NO: 568230 - DNA, 19 bp, Mus musculus
  siRNA target sequence for Clecsf10 (NM_020001.1,668-686).
cggtgtgtttcaatagttt

SEQ ID NO: 568231 - DNA, 19 bp, Mus musculus
  siRNA target sequence for Clecsf10 (NM_020001.1,669-687).
ggtgtgtttcaatagttta

SEQ ID NO: 568232 - DNA, 19 bp, Mus musculus
  siRNA target sequence for Clecsf10 (NM_020001.1,724-742).
ctgtgatagtaaacacaat

SEQ ID NO: 568233 - DNA, 19 bp, Mus musculus
  siRNA target sequence for Clecsf10 (NM_020001.1,728-746).
gatagtaaacacaattcaa

SEQ ID NO: 568234 - DNA, 19 bp, Mus musculus
  siRNA target sequence for Clecsf10 (NM_020001.1,750-768).
gtgaaatgaagaagattta

SEQ ID NO: 568235 - DNA, 19 bp, Mus musculus
  siRNA target sequence for Clecsf12 (NM_020008.1,128-146).
ggatatactcaattagact

SEQ ID NO: 568236 - DNA, 19 bp, Mus musculus
  siRNA target sequence for Clecsf12 (NM_020008.1,151-169).
cactcaagacatccataaa

SEQ ID NO: 568237 - DNA, 19 bp, Mus musculus
  siRNA target sequence for Clecsf12 (NM_020008.1,278-296).
ctgggtgccctagcatttt

SEQ ID NO: 568238 - DNA, 19 bp, Mus musculus
  siRNA target sequence for Clecsf12 (NM_020008.1,326-344).
gagaaagacaacttcctat

SEQ ID NO: 568239 - DNA, 19 bp, Mus musculus
  siRNA target sequence for Clecsf12 (NM_020008.1,332-350).
gacaacttcctatcaagaa

SEQ ID NO: 568240 - DNA, 19 bp, Mus musculus
  siRNA target sequence for Clecsf12 (NM_020008.1,334-352).
caacttcctatcaagaaat

SEQ ID NO: 568241 - DNA, 19 bp, Mus musculus
  siRNA target sequence for Clecsf12 (NM_020008.1,372-390).
cagaatcatctttagatga

SEQ ID NO: 568242 - DNA, 19 bp, Mus musculus
  siRNA target sequence for Clecsf12 (NM_020008.1,420-438).
ctacaggaggtttttctca

SEQ ID NO: 568243 - DNA, 19 bp, Mus musculus
  siRNA target sequence for Clecsf12 (NM_020008.1,467-485).
gggaagagctgttacctat

SEQ ID NO: 568244 - DNA, 19 bp, Mus musculus
  siRNA target sequence for Clecsf12 (NM_020008.1,469-487).
gaagagctgttacctattt

SEQ ID NO: 568245 - DNA, 19 bp, Mus musculus
  siRNA target sequence for Clecsf12 (NM_020008.1,474-492).
gctgttacctatttagctt

SEQ ID NO: 568246 - DNA, 19 bp, Mus musculus
  siRNA target sequence for Clecsf12 (NM_020008.1,497-515).
ggaaattcctggtatggaa

SEQ ID NO: 568247 - DNA, 19 bp, Mus musculus
  siRNA target sequence for Clecsf12 (NM_020008.1,532-550).
ccagctaggtgctcatcta

SEQ ID NO: 568248 - DNA, 19 bp, Mus musculus
  siRNA target sequence for Clecsf12 (NM_020008.1,540-558).
gtgctcatctactgaagat

SEQ ID NO: 568249 - DNA, 19 bp, Mus musculus
  siRNA target sequence for Clecsf12 (NM_020008.1,543-561).
ctcatctactgaagataga

SEQ ID NO: 568250 - DNA, 19 bp, Mus musculus
  siRNA target sequence for Clecsf12 (NM_020008.1,597-615).
catcgtctcaccgtattaa

SEQ ID NO: 568251 - DNA, 19 bp, Mus musculus
  siRNA target sequence for Clecsf12 (NM_020008.1,601-619).
gtctcaccgtattaatgca

SEQ ID NO: 568252 - DNA, 19 bp, Mus musculus
  siRNA target sequence for Clecsf12 (NM_020008.1,603-621).
ctcaccgtattaatgcatt

SEQ ID NO: 568253 - DNA, 19 bp, Mus musculus
  siRNA target sequence for Clecsf12 (NM_020008.1,605-623).
caccgtattaatgcatttt

SEQ ID NO: 568254 - DNA, 19 bp, Mus musculus
  siRNA target sequence for Clecsf12 (NM_020008.1,608-626).
cgtattaatgcattttgga

SEQ ID NO: 568255 - DNA, 19 bp, Mus musculus
  siRNA target sequence for Clecsf12 (NM_020008.1,629-647).
ggcctttcccgcaatcaga

SEQ ID NO: 568256 - DNA, 19 bp, Mus musculus
  siRNA target sequence for Clecsf12 (NM_020008.1,685-703).
cttccccaactcgtttcaa

SEQ ID NO: 568257 - DNA, 19 bp, Mus musculus
  siRNA target sequence for Clecsf12 (NM_020008.1,694-712).
ctcgtttcaagtcagaaat

SEQ ID NO: 568258 - DNA, 19 bp, Mus musculus
  siRNA target sequence for Clecsf12 (NM_020008.1,697-715).
gtttcaagtcagaaataca

SEQ ID NO: 568259 - DNA, 19 bp, Mus musculus
  siRNA target sequence for Clecsf12 (NM_020008.1,729-747).
gcttactgcacaattgtgt

SEQ ID NO: 568260 - DNA, 19 bp, Mus musculus
  siRNA target sequence for Clecsf12 (NM_020008.1,730-748).
cttactgcacaattgtgta

SEQ ID NO: 568261 - DNA, 19 bp, Mus musculus
  siRNA target sequence for Clecsf12 (NM_020008.1,736-754).
gcacaattgtgtatggatt

SEQ ID NO: 568262 - DNA, 19 bp, Mus musculus
  siRNA target sequence for Clecsf12 (NM_020008.1,739-757).
caattgtgtatggattcat

SEQ ID NO: 568263 - DNA, 19 bp, Mus musculus
  siRNA target sequence for Clecsf12 (NM_020008.1,772-790).
caaccaaatctgcaatact

SEQ ID NO: 568264 - DNA, 19 bp, Mus musculus
  siRNA target sequence for Clecsf12 (NM_020008.1,776-794).
caaatctgcaatacttctt

SEQ ID NO: 568265 - DNA, 19 bp, Mus musculus
  siRNA target sequence for Clecsf13 (NM_016751.2,110-128).
gatatggctagatattgca

SEQ ID NO: 568266 - DNA, 19 bp, Mus musculus
  siRNA target sequence for Clecsf13 (NM_016751.2,207-225).
ggcacgtccaggtcattct

SEQ ID NO: 568267 - DNA, 19 bp, Mus musculus
  siRNA target sequence for Clecsf13 (NM_016751.2,215-233).
caggtcattctggcattaa

SEQ ID NO: 568268 - DNA, 19 bp, Mus musculus
  siRNA target sequence for Clecsf13 (NM_016751.2,291-309).
ggagacctgagtggaataa

SEQ ID NO: 568269 - DNA, 19 bp, Mus musculus
  siRNA target sequence for Clecsf13 (NM_016751.2,346-364).
ctctggacacgacaatcat

SEQ ID NO: 568270 - DNA, 19 bp, Mus musculus
  siRNA target sequence for Clecsf13 (NM_016751.2,455-473).
cagatactgaagtaccaaa

SEQ ID NO: 568271 - DNA, 19 bp, Mus musculus
  siRNA target sequence for Clecsf13 (NM_016751.2,531-549).
ctgacatcctgcagacaaa

SEQ ID NO: 568272 - DNA, 19 bp, Mus musculus
  siRNA target sequence for Clecsf13 (NM_016751.2,535-553).
catcctgcagacaaaagat

SEQ ID NO: 568273 - DNA, 19 bp, Mus musculus
  siRNA target sequence for Clecsf13 (NM_016751.2,621-639).
gtgctgatatccatagtct

SEQ ID NO: 568274 - DNA, 19 bp, Mus musculus
  siRNA target sequence for Clecsf13 (NM_016751.2,871-889).
cgtgagagatggtatggaa

SEQ ID NO: 568275 - DNA, 19 bp, Mus musculus
  siRNA target sequence for Clecsf13 (NM_016751.2,872-890).
gtgagagatggtatggaaa

SEQ ID NO: 568276 - DNA, 19 bp, Mus musculus
  siRNA target sequence for Clecsf13 (NM_016751.2,988-1006).
gatccagggcttaaaagct

SEQ ID NO: 568277 - DNA, 19 bp, Mus musculus
  siRNA target sequence for Clecsf13 (NM_016751.2,1046-1064).
gtggtcaatggccaaatga

SEQ ID NO: 568278 - DNA, 19 bp, Mus musculus
  siRNA target sequence for Clecsf13 (NM_016751.2,1048-1066).
ggtcaatggccaaatgaaa

SEQ ID NO: 568279 - DNA, 19 bp, Mus musculus
  siRNA target sequence for Clecsf13 (NM_016751.2,1322-1340).
gcgcagaactggaagtact

SEQ ID NO: 568280 - DNA, 19 bp, Mus musculus
  siRNA target sequence for Clecsf13 (NM_016751.2,1323-1341).
cgcagaactggaagtactt

SEQ ID NO: 568281 - DNA, 19 bp, Mus musculus
  siRNA target sequence for Clecsf13 (NM_016751.2,1388-1406).
gaggctgagaagttctgta

SEQ ID NO: 568282 - DNA, 19 bp, Mus musculus
  siRNA target sequence for Clecsf13 (NM_016751.2,1460-1478).
ctggtacagactacaagtt

SEQ ID NO: 568283 - DNA, 19 bp, Mus musculus
  siRNA target sequence for Clecsf13 (NM_016751.2,1462-1480).
ggtacagactacaagttct

SEQ ID NO: 568284 - DNA, 19 bp, Mus musculus
  siRNA target sequence for Clecsf13 (NM_016751.2,1476-1494).
gttctggggaccattggat

SEQ ID NO: 568285 - DNA, 19 bp, Mus musculus
  siRNA target sequence for Clecsf5 (NM_021364.1,167-185).
catctcggggcttatcgta

SEQ ID NO: 568286 - DNA, 19 bp, Mus musculus
  siRNA target sequence for Clecsf5 (NM_021364.1,172-190).
cggggcttatcgtagtagt

SEQ ID NO: 568287 - DNA, 19 bp, Mus musculus
  siRNA target sequence for Clecsf5 (NM_021364.1,175-193).
ggcttatcgtagtagtgat

SEQ ID NO: 568288 - DNA, 19 bp, Mus musculus
  siRNA target sequence for Clecsf5 (NM_021364.1,198-216).
gttgttggaatgacctttt

SEQ ID NO: 568289 - DNA, 19 bp, Mus musculus
  siRNA target sequence for Clecsf5 (NM_021364.1,243-261).
gggagaaatgacgaaagta

SEQ ID NO: 568290 - DNA, 19 bp, Mus musculus
  siRNA target sequence for Clecsf5 (NM_021364.1,304-322).
gggattttcaccaaggaaa

SEQ ID NO: 568291 - DNA, 19 bp, Mus musculus
  siRNA target sequence for Clecsf5 (NM_021364.1,445-463).
ctggtattgagaattactt

SEQ ID NO: 568292 - DNA, 19 bp, Mus musculus
  siRNA target sequence for Clecsf5 (NM_021364.1,554-572).
cttcgactgtgtcactata

SEQ ID NO: 568293 - DNA, 19 bp, Mus musculus
  siRNA target sequence for Clecsf5 (NM_021364.1,574-592).
gtctgacgaagacatatga

SEQ ID NO: 568294 - DNA, 19 bp, Mus musculus
  siRNA target sequence for Clecsf5 (NM_021364.1,620-638).
ctggatctgcgaaatgaat

SEQ ID NO: 568295 - DNA, 19 bp, Mus musculus
  siRNA target sequence for Clecsf8 (NM_010819.1,198-216).
cccgacatccccaactgat

SEQ ID NO: 568296 - DNA, 19 bp, Mus musculus
  siRNA target sequence for Clecsf8 (NM_010819.1,276-294).
gtttggtgactcatcatta

SEQ ID NO: 568297 - DNA, 19 bp, Mus musculus
  siRNA target sequence for Clecsf8 (NM_010819.1,280-298).
ggtgactcatcattacttt

SEQ ID NO: 568298 - DNA, 19 bp, Mus musculus
  siRNA target sequence for Clecsf8 (NM_010819.1,335-353).
gactaccacacgagagtaa

SEQ ID NO: 568299 - DNA, 19 bp, Mus musculus
  siRNA target sequence for Clecsf8 (NM_010819.1,425-443).
gccttccagtctaactgtt

SEQ ID NO: 568300 - DNA, 19 bp, Mus musculus
  siRNA target sequence for Clecsf8 (NM_010819.1,426-444).
ccttccagtctaactgtta

SEQ ID NO: 568301 - DNA, 19 bp, Mus musculus
  siRNA target sequence for Clecsf8 (NM_010819.1,528-546).
ccgaagcagaacagaattt

SEQ ID NO: 568302 - DNA, 19 bp, Mus musculus
  siRNA target sequence for Clecsf8 (NM_010819.1,529-547).
cgaagcagaacagaatttt

SEQ ID NO: 568303 - DNA, 19 bp, Mus musculus
  siRNA target sequence for Clecsf8 (NM_010819.1,548-566).
gtgacccagcttttggata

SEQ ID NO: 568304 - DNA, 19 bp, Mus musculus
  siRNA target sequence for Clecsf8 (NM_010819.1,550-568).
gacccagcttttggataaa

SEQ ID NO: 568305 - DNA, 19 bp, Mus musculus
  siRNA target sequence for Clecsf8 (NM_010819.1,586-604).
gggacttgctgatgagaat

SEQ ID NO: 568306 - DNA, 19 bp, Mus musculus
  siRNA target sequence for Clecsf8 (NM_010819.1,664-682).
ggaaaagggggaatccaat

SEQ ID NO: 568307 - DNA, 19 bp, Mus musculus
  siRNA target sequence for Clecsf8 (NM_010819.1,670-688).
gggggaatccaatgacttt

SEQ ID NO: 568308 - DNA, 19 bp, Mus musculus
  siRNA target sequence for Clecsf8 (NM_010819.1,671-689).
ggggaatccaatgacttta

SEQ ID NO: 568309 - DNA, 19 bp, Mus musculus
  siRNA target sequence for Clecsf9 (NM_019948.1,245-263).
ccagatgtgtcgtaacata

SEQ ID NO: 568310 - DNA, 19 bp, Mus musculus
  siRNA target sequence for Clecsf9 (NM_019948.1,246-264).
cagatgtgtcgtaacatat

SEQ ID NO: 568311 - DNA, 19 bp, Mus musculus
  siRNA target sequence for Clecsf9 (NM_019948.1,260-278).
catatcgcagctctcaaat

SEQ ID NO: 568312 - DNA, 19 bp, Mus musculus
  siRNA target sequence for Clecsf9 (NM_019948.1,288-306).
gaacttacagccacataga

SEQ ID NO: 568313 - DNA, 19 bp, Mus musculus
  siRNA target sequence for Clecsf9 (NM_019948.1,299-317).
cacatagaaatattaagga

SEQ ID NO: 568314 - DNA, 19 bp, Mus musculus
  siRNA target sequence for Clecsf9 (NM_019948.1,365-383).
ctttgaactggaaacatta

SEQ ID NO: 568315 - DNA, 19 bp, Mus musculus
  siRNA target sequence for Clecsf9 (NM_019948.1,379-397).
cattatcaatctagttgtt

SEQ ID NO: 568316 - DNA, 19 bp, Mus musculus
  siRNA target sequence for Clecsf9 (NM_019948.1,417-435).
cttgacctggtcatcaagt

SEQ ID NO: 568317 - DNA, 19 bp, Mus musculus
  siRNA target sequence for Clecsf9 (NM_019948.1,420-438).
gacctggtcatcaagttta

SEQ ID NO: 568318 - DNA, 19 bp, Mus musculus
  siRNA target sequence for Clecsf9 (NM_019948.1,422-440).
cctggtcatcaagtttaaa

SEQ ID NO: 568319 - DNA, 19 bp, Mus musculus
  siRNA target sequence for Clecsf9 (NM_019948.1,501-519).
cctttttcgcacaaaacct

SEQ ID NO: 568320 - DNA, 19 bp, Mus musculus
  siRNA target sequence for Clecsf9 (NM_019948.1,502-520).
ctttttcgcacaaaaccta

SEQ ID NO: 568321 - DNA, 19 bp, Mus musculus
  siRNA target sequence for Clecsf9 (NM_019948.1,508-526).
cgcacaaaacctaaaagga

SEQ ID NO: 568322 - DNA, 19 bp, Mus musculus
  siRNA target sequence for Clecsf9 (NM_019948.1,517-535).
cctaaaaggaaagagtttt

SEQ ID NO: 568323 - DNA, 19 bp, Mus musculus
  siRNA target sequence for Clecsf9 (NM_019948.1,573-591).
gcaatgggtggatgataca

SEQ ID NO: 568324 - DNA, 19 bp, Mus musculus
  siRNA target sequence for Clecsf9 (NM_019948.1,582-600).
ggatgatacacctttcaca

SEQ ID NO: 568325 - DNA, 19 bp, Mus musculus
  siRNA target sequence for Clecsf9 (NM_019948.1,626-644).
gggagcccaacaatatagt

SEQ ID NO: 568326 - DNA, 19 bp, Mus musculus
  siRNA target sequence for Clecsf9 (NM_019948.1,627-645).
ggagcccaacaatatagtt

SEQ ID NO: 568327 - DNA, 19 bp, Mus musculus
  siRNA target sequence for Clecsf9 (NM_019948.1,628-646).
gagcccaacaatatagttt

SEQ ID NO: 568328 - DNA, 19 bp, Mus musculus
  siRNA target sequence for Clecsf9 (NM_019948.1,632-650).
ccaacaatatagttttggt

SEQ ID NO: 568329 - DNA, 19 bp, Mus musculus
  siRNA target sequence for Clecsf9 (NM_019948.1,652-670).
gaggactgtgccaccataa

SEQ ID NO: 568330 - DNA, 19 bp, Mus musculus
  siRNA target sequence for Clecsf9 (NM_019948.1,703-721).
gatataccctgtttctaca

SEQ ID NO: 568331 - DNA, 19 bp, Mus musculus
  siRNA target sequence for Clra (NM_153506.1,68-86).
caaaatgtctcggaatcat

SEQ ID NO: 568332 - DNA, 19 bp, Mus musculus
  siRNA target sequence for Clra (NM_153506.1,84-102).
catctccgctgcatcttgt

SEQ ID NO: 568333 - DNA, 19 bp, Mus musculus
  siRNA target sequence for Clra (NM_153506.1,89-107).
ccgctgcatcttgtgttaa

SEQ ID NO: 568334 - DNA, 19 bp, Mus musculus
  siRNA target sequence for Clra (NM_153506.1,90-108).
cgctgcatcttgtgttaaa

SEQ ID NO: 568335 - DNA, 19 bp, Mus musculus
  siRNA target sequence for Clra (NM_153506.1,309-327).
ctcctgcatagcactagat

SEQ ID NO: 568336 - DNA, 19 bp, Mus musculus
  siRNA target sequence for Clra (NM_153506.1,329-347).
cccatctagctctatttga

SEQ ID NO: 568337 - DNA, 19 bp, Mus musculus
  siRNA target sequence for Clra (NM_153506.1,331-349).
catctagctctatttgaca

SEQ ID NO: 568338 - DNA, 19 bp, Mus musculus
  siRNA target sequence for Clra (NM_153506.1,490-508).
ggagaatgtgcctacttga

SEQ ID NO: 568339 - DNA, 19 bp, Mus musculus
  siRNA target sequence for Clra (NM_153506.1,493-511).
gaatgtgcctacttgagta

SEQ ID NO: 568340 - DNA, 19 bp, Mus musculus
  siRNA target sequence for Clra (NM_153506.1,509-527).
gtaacagggggatctacaa

SEQ ID NO: 568341 - DNA, 19 bp, Mus musculus
  siRNA target sequence for Clra (NM_153506.1,535-553).
ggggatatacataaaaaat

SEQ ID NO: 568342 - DNA, 19 bp, Mus musculus
  siRNA target sequence for Clra (NM_153506.1,581-599).
ccttacagcgcccactaat

SEQ ID NO: 568343 - DNA, 19 bp, Mus musculus
  siRNA target sequence for Clra (NM_153506.1,582-600).
cttacagcgcccactaatt

SEQ ID NO: 568344 - DNA, 19 bp, Mus musculus
  siRNA target sequence for Clra (NM_153506.1,586-604).
cagcgcccactaattgtaa

SEQ ID NO: 568345 - DNA, 19 bp, Mus musculus
  siRNA target sequence for Clrf (NM_053165.1,380-398).
cctcctgcgtagcatcaaa

SEQ ID NO: 568346 - DNA, 19 bp, Mus musculus
  siRNA target sequence for Clrf (NM_053165.1,381-399).
ctcctgcgtagcatcaaat

SEQ ID NO: 568347 - DNA, 19 bp, Mus musculus
  siRNA target sequence for Clrf (NM_053165.1,605-623).
ggagctacacacataggaa

SEQ ID NO: 568348 - DNA, 19 bp, Mus musculus
  siRNA target sequence for Clrf (NM_053165.1,616-634).
cataggaagtggatttgta

SEQ ID NO: 568349 - DNA, 19 bp, Mus musculus
  siRNA target sequence for Clrf (NM_053165.1,626-644).
ggatttgtagcaagtttgt

SEQ ID NO: 568350 - DNA, 19 bp, Mus musculus
  siRNA target sequence for Clrf (NM_053165.1,636-654).
caagtttgtcagtagttgt

SEQ ID NO: 568351 - DNA, 19 bp, Mus musculus
  siRNA target sequence for Clrf (NM_053165.1,643-661).
gtcagtagttgtaaatcca

SEQ ID NO: 568352 - DNA, 19 bp, Mus musculus
  siRNA target sequence for Colec12 (NM_130449.1,119-137).
ggttacaagaggtttggta

SEQ ID NO: 568353 - DNA, 19 bp, Mus musculus
  siRNA target sequence for Colec12 (NM_130449.1,120-138).
gttacaagaggtttggtat

SEQ ID NO: 568354 - DNA, 19 bp, Mus musculus
  siRNA target sequence for Colec12 (NM_130449.1,148-166).
gacacagtgtaccaaatgt

SEQ ID NO: 568355 - DNA, 19 bp, Mus musculus
  siRNA target sequence for Colec12 (NM_130449.1,178-196).
ggcactgaagttttcgatt

SEQ ID NO: 568356 - DNA, 19 bp, Mus musculus
  siRNA target sequence for Colec12 (NM_130449.1,182-200).
ctgaagttttcgattgtat

SEQ ID NO: 568357 - DNA, 19 bp, Mus musculus
  siRNA target sequence for Colec12 (NM_130449.1,184-202).
gaagttttcgattgtatta

SEQ ID NO: 568358 - DNA, 19 bp, Mus musculus
  siRNA target sequence for Colec12 (NM_130449.1,187-205).
gttttcgattgtattatta

SEQ ID NO: 568359 - DNA, 19 bp, Mus musculus
  siRNA target sequence for Colec12 (NM_130449.1,300-318).
ctcaccagacttatgacaa

SEQ ID NO: 568360 - DNA, 19 bp, Mus musculus
  siRNA target sequence for Colec12 (NM_130449.1,304-322).
ccagacttatgacaacaaa

SEQ ID NO: 568361 - DNA, 19 bp, Mus musculus
  siRNA target sequence for Colec12 (NM_130449.1,402-420).
ctaccttcagatcagatat

SEQ ID NO: 568362 - DNA, 19 bp, Mus musculus
  siRNA target sequence for Colec12 (NM_130449.1,424-442).
ggatctccgtcaacaactt

SEQ ID NO: 568363 - DNA, 19 bp, Mus musculus
  siRNA target sequence for Colec12 (NM_130449.1,484-502).
ggagaagttgcaagcaaat

SEQ ID NO: 568364 - DNA, 19 bp, Mus musculus
  siRNA target sequence for Colec12 (NM_130449.1,565-583).
cattaccaccgtcaacaaa

SEQ ID NO: 568365 - DNA, 19 bp, Mus musculus
  siRNA target sequence for Colec12 (NM_130449.1,570-588).
ccaccgtcaacaaaacact

SEQ ID NO: 568366 - DNA, 19 bp, Mus musculus
  siRNA target sequence for Colec12 (NM_130449.1,593-611).
gcatataatggctatgtca

SEQ ID NO: 568367 - DNA, 19 bp, Mus musculus
  siRNA target sequence for Colec12 (NM_130449.1,671-689).
cagagcgtggttatcatga

SEQ ID NO: 568368 - DNA, 19 bp, Mus musculus
  siRNA target sequence for Colec12 (NM_130449.1,719-737).
cagcagaggaaccttatct

SEQ ID NO: 568369 - DNA, 19 bp, Mus musculus
  siRNA target sequence for Colec12 (NM_130449.1,770-788).
ctggccatccagcgaatta

SEQ ID NO: 568370 - DNA, 19 bp, Mus musculus
  siRNA target sequence for Colec12 (NM_130449.1,773-791).
gccatccagcgaattaaga

SEQ ID NO: 568371 - DNA, 19 bp, Mus musculus
  siRNA target sequence for Colec12 (NM_130449.1,774-792).
ccatccagcgaattaagaa

SEQ ID NO: 568372 - DNA, 19 bp, Mus musculus
  siRNA target sequence for Colec12 (NM_130449.1,775-793).
catccagcgaattaagaat

SEQ ID NO: 568373 - DNA, 19 bp, Mus musculus
  siRNA target sequence for Colec12 (NM_130449.1,838-856).
caccgattggctaaaggaa

SEQ ID NO: 568374 - DNA, 19 bp, Mus musculus
  siRNA target sequence for Colec12 (NM_130449.1,840-858).
ccgattggctaaaggaaaa

SEQ ID NO: 568375 - DNA, 19 bp, Mus musculus
  siRNA target sequence for Colec12 (NM_130449.1,841-859).
cgattggctaaaggaaaaa

SEQ ID NO: 568376 - DNA, 19 bp, Mus musculus
  siRNA target sequence for Colec12 (NM_130449.1,902-920).
gccaaagccaacaatgaca

SEQ ID NO: 568377 - DNA, 19 bp, Mus musculus
  siRNA target sequence for Colec12 (NM_130449.1,968-986).
gacaacattaccactatct

SEQ ID NO: 568378 - DNA, 19 bp, Mus musculus
  siRNA target sequence for Colec12 (NM_130449.1,970-988).
caacattaccactatctca

SEQ ID NO: 568379 - DNA, 19 bp, Mus musculus
  siRNA target sequence for Colec12 (NM_130449.1,1013-1031).
gaccttcaggacttacaca

SEQ ID NO: 568380 - DNA, 19 bp, Mus musculus
  siRNA target sequence for Colec12 (NM_130449.1,1019-1037).
caggacttacacaaggata

SEQ ID NO: 568381 - DNA, 19 bp, Mus musculus
  siRNA target sequence for Colec12 (NM_130449.1,1024-1042).
cttacacaaggatacagaa

SEQ ID NO: 568382 - DNA, 19 bp, Mus musculus
  siRNA target sequence for Colec12 (NM_130449.1,1033-1051).
ggatacagaaaatagaaca

SEQ ID NO: 568383 - DNA, 19 bp, Mus musculus
  siRNA target sequence for Colec12 (NM_130449.1,1156-1174).
gaccagcaatctgaatgat

SEQ ID NO: 568384 - DNA, 19 bp, Mus musculus
  siRNA target sequence for Colec12 (NM_130449.1,1158-1176).
ccagcaatctgaatgatgt

SEQ ID NO: 568385 - DNA, 19 bp, Mus musculus
  siRNA target sequence for Colec12 (NM_130449.1,1217-1235).
gacctgacctccttgaata

SEQ ID NO: 568386 - DNA, 19 bp, Mus musculus
  siRNA target sequence for Colec12 (NM_130449.1,1244-1262).
gtcaacatccgcttggatt

SEQ ID NO: 568387 - DNA, 19 bp, Mus musculus
  siRNA target sequence for Colec12 (NM_130449.1,1252-1270).
ccgcttggattctatttct

SEQ ID NO: 568388 - DNA, 19 bp, Mus musculus
  siRNA target sequence for Colec12 (NM_130449.1,1286-1304).
gacatgatgaggtcaaagt

SEQ ID NO: 568389 - DNA, 19 bp, Mus musculus
  siRNA target sequence for Colec12 (NM_130449.1,1288-1306).
catgatgaggtcaaagtta

SEQ ID NO: 568390 - DNA, 19 bp, Mus musculus
  siRNA target sequence for Colec12 (NM_130449.1,1378-1396).
catcaagaactttaccatt

SEQ ID NO: 568391 - DNA, 19 bp, Mus musculus
  siRNA target sequence for Colec12 (NM_130449.1,1381-1399).
caagaactttaccattcta

SEQ ID NO: 568392 - DNA, 19 bp, Mus musculus
  siRNA target sequence for Colec12 (NM_130449.1,1519-1537).
gggtgagaggggcacaatt

SEQ ID NO: 568393 - DNA, 19 bp, Mus musculus
  siRNA target sequence for Colec12 (NM_130449.1,1898-1916).
ccgcctcactggaagaact

SEQ ID NO: 568394 - DNA, 19 bp, Mus musculus
  siRNA target sequence for Colec12 (NM_130449.1,1918-1936).
cacagataaatgctactat

SEQ ID NO: 568395 - DNA, 19 bp, Mus musculus
  siRNA target sequence for Colec12 (NM_130449.1,1992-2010).
cttcccatctcgttttcat

SEQ ID NO: 568396 - DNA, 19 bp, Mus musculus
  siRNA target sequence for Colec12 (NM_130449.1,1995-2013).
cccatctcgttttcataaa

SEQ ID NO: 568397 - DNA, 19 bp, Mus musculus
  siRNA target sequence for Colec12 (NM_130449.1,1997-2015).
catctcgttttcataaact

SEQ ID NO: 568398 - DNA, 19 bp, Mus musculus
  siRNA target sequence for Colec12 (NM_130449.1,2024-2042).
gaacagcaatggataaaaa

SEQ ID NO: 568399 - DNA, 19 bp, Mus musculus
  siRNA target sequence for Colec12 (NM_130449.1,2150-2168).
gctggacaaccagataact

SEQ ID NO: 568400 - DNA, 19 bp, Mus musculus
  siRNA target sequence for Colec12 (NM_130449.1,2281-2299).
ggcagtaccatcatccata

SEQ ID NO: 568401 - DNA, 19 bp, Mus musculus
  siRNA target sequence for Colec12 (NM_130449.1,2282-2300).
gcagtaccatcatccatat

SEQ ID NO: 568402 - DNA, 19 bp, Mus musculus
  siRNA target sequence for Colec12 (NM_130449.1,2285-2303).
gtaccatcatccatattat

SEQ ID NO: 568403 - DNA, 19 bp, Mus musculus
  siRNA target sequence for D230024O04 (NM_177686.2,233-251).
ccgatgcttcccattcaca

SEQ ID NO: 568404 - DNA, 19 bp, Mus musculus
  siRNA target sequence for D230024O04 (NM_177686.2,260-278).
cagtcttgattctgattct

SEQ ID NO: 568405 - DNA, 19 bp, Mus musculus
  siRNA target sequence for D230024O04 (NM_177686.2,309-327).
ggtcttaggaggcatcttt

SEQ ID NO: 568406 - DNA, 19 bp, Mus musculus
  siRNA target sequence for D230024O04 (NM_177686.2,310-328).
gtcttaggaggcatctttt

SEQ ID NO: 568407 - DNA, 19 bp, Mus musculus
  siRNA target sequence for D230024O04 (NM_177686.2,312-330).
cttaggaggcatcttttat

SEQ ID NO: 568408 - DNA, 19 bp, Mus musculus
  siRNA target sequence for D230024O04 (NM_177686.2,344-362).
cagaaatgataaaatcgaa

SEQ ID NO: 568409 - DNA, 19 bp, Mus musculus
  siRNA target sequence for D230024O04 (NM_177686.2,409-427).
cagctgaagcacaatctca

SEQ ID NO: 568410 - DNA, 19 bp, Mus musculus
  siRNA target sequence for D230024O04 (NM_177686.2,488-506).
gccgagagctgtatagcaa

SEQ ID NO: 568411 - DNA, 19 bp, Mus musculus
  siRNA target sequence for D230024O04 (NM_177686.2,489-507).
ccgagagctgtatagcaaa

SEQ ID NO: 568412 - DNA, 19 bp, Mus musculus
  siRNA target sequence for D230024O04 (NM_177686.2,536-554).
caaagggttcagaatggta

SEQ ID NO: 568413 - DNA, 19 bp, Mus musculus
  siRNA target sequence for D230024O04 (NM_177686.2,555-573).
caaggacagctgttattct

SEQ ID NO: 568414 - DNA, 19 bp, Mus musculus
  siRNA target sequence for D230024O04 (NM_177686.2,563-581).
gctgttattctcaactcaa

SEQ ID NO: 568415 - DNA, 19 bp, Mus musculus
  siRNA target sequence for D230024O04 (NM_177686.2,574-592).
caactcaatcagtatggaa

SEQ ID NO: 568416 - DNA, 19 bp, Mus musculus
  siRNA target sequence for D230024O04 (NM_177686.2,661-679).
gtgctggaatttataaagt

SEQ ID NO: 568417 - DNA, 19 bp, Mus musculus
  siRNA target sequence for D230024O04 (NM_177686.2,692-710).
gctatttttggcttgcatt

SEQ ID NO: 568418 - DNA, 19 bp, Mus musculus
  siRNA target sequence for D230024O04 (NM_177686.2,719-737).
gaaaagatcgcacacaata

SEQ ID NO: 568419 - DNA, 19 bp, Mus musculus
  siRNA target sequence for D230024O04 (NM_177686.2,731-749).
cacaatatccactaagtga

SEQ ID NO: 568420 - DNA, 19 bp, Mus musculus
  siRNA target sequence for D230024O04 (NM_177686.2,782-800).
gcacagatgacatagataa

SEQ ID NO: 568421 - DNA, 19 bp, Mus musculus
  siRNA target sequence for D230024O04 (NM_177686.2,822-840).
cagggtcaatgtttattat

SEQ ID NO: 568422 - DNA, 19 bp, Mus musculus
  siRNA target sequence for D230024O04 (NM_177686.2,851-869).
ctgatgagaacaatatcat

SEQ ID NO: 568423 - DNA, 19 bp, Mus musculus
  siRNA target sequence for Dcl1 (NM_020257.1,52-70).
ctgtttgtacataacatga

SEQ ID NO: 568424 - DNA, 19 bp, Mus musculus
  siRNA target sequence for Dcl1 (NM_020257.1,546-564).
cctaggagtgggaagatat

SEQ ID NO: 568425 - DNA, 19 bp, Mus musculus
  siRNA target sequence for Dcl1 (NM_020257.1,593-611).
gttcgaggagctatataaa

SEQ ID NO: 568426 - DNA, 19 bp, Mus musculus
  siRNA target sequence for Dgcr2 (NM_010048.1,294-312).
ggccaacgtgtgaggataa

SEQ ID NO: 568427 - DNA, 19 bp, Mus musculus
  siRNA target sequence for Dgcr2 (NM_010048.1,296-314).
ccaacgtgtgaggataaga

SEQ ID NO: 568428 - DNA, 19 bp, Mus musculus
  siRNA target sequence for Dgcr2 (NM_010048.1,350-368).
cgtccttatgggaaggaaa

SEQ ID NO: 568429 - DNA, 19 bp, Mus musculus
  siRNA target sequence for Dgcr2 (NM_010048.1,477-495).
gtgggtggcaccactatga

SEQ ID NO: 568430 - DNA, 19 bp, Mus musculus
  siRNA target sequence for Dgcr2 (NM_010048.1,677-695).
ctctgggttggttatcagt

SEQ ID NO: 568431 - DNA, 19 bp, Mus musculus
  siRNA target sequence for Dgcr2 (NM_010048.1,679-697).
ctgggttggttatcagtat

SEQ ID NO: 568432 - DNA, 19 bp, Mus musculus
  siRNA target sequence for Dgcr2 (NM_010048.1,681-699).
gggttggttatcagtatgt

SEQ ID NO: 568433 - DNA, 19 bp, Mus musculus
  siRNA target sequence for Dgcr2 (NM_010048.1,686-704).
ggttatcagtatgtcatta

SEQ ID NO: 568434 - DNA, 19 bp, Mus musculus
  siRNA target sequence for Dgcr2 (NM_010048.1,732-750).
gctgggaagtggcattcaa

SEQ ID NO: 568435 - DNA, 19 bp, Mus musculus
  siRNA target sequence for Dgcr2 (NM_010048.1,733-751).
ctgggaagtggcattcaaa

SEQ ID NO: 568436 - DNA, 19 bp, Mus musculus
  siRNA target sequence for Dgcr2 (NM_010048.1,793-811).
ctctgccatgtctgagaat

SEQ ID NO: 568437 - DNA, 19 bp, Mus musculus
  siRNA target sequence for Dgcr2 (NM_010048.1,825-843).
gcgcccagctccagtgttt

SEQ ID NO: 568438 - DNA, 19 bp, Mus musculus
  siRNA target sequence for Dgcr2 (NM_010048.1,913-931).
gtttctgtgtaaaagaagt

SEQ ID NO: 568439 - DNA, 19 bp, Mus musculus
  siRNA target sequence for Dgcr2 (NM_010048.1,930-948).
gtcagacgtgtgttgatat

SEQ ID NO: 568440 - DNA, 19 bp, Mus musculus
  siRNA target sequence for Dgcr2 (NM_010048.1,932-950).
cagacgtgtgttgatatca

SEQ ID NO: 568441 - DNA, 19 bp, Mus musculus
  siRNA target sequence for Dgcr2 (NM_010048.1,934-952).
gacgtgtgttgatatcaaa

SEQ ID NO: 568442 - DNA, 19 bp, Mus musculus
  siRNA target sequence for Dgcr2 (NM_010048.1,936-954).
cgtgtgttgatatcaaaga

SEQ ID NO: 568443 - DNA, 19 bp, Mus musculus
  siRNA target sequence for Dgcr2 (NM_010048.1,939-957).
gtgttgatatcaaagataa

SEQ ID NO: 568444 - DNA, 19 bp, Mus musculus
  siRNA target sequence for Dgcr2 (NM_010048.1,965-983).
gatgaagggttctacttca

SEQ ID NO: 568445 - DNA, 19 bp, Mus musculus
  siRNA target sequence for Dgcr2 (NM_010048.1,1088-1106).
cgcaaggaccctaaggaat

SEQ ID NO: 568446 - DNA, 19 bp, Mus musculus
  siRNA target sequence for Dgcr2 (NM_010048.1,1097-1115).
cctaaggaatgctgcaaat

SEQ ID NO: 568447 - DNA, 19 bp, Mus musculus
  siRNA target sequence for Dgcr2 (NM_010048.1,1098-1116).
ctaaggaatgctgcaaatt

SEQ ID NO: 568448 - DNA, 19 bp, Mus musculus
  siRNA target sequence for Dgcr2 (NM_010048.1,1281-1299).
caaacttgcaccatttcaa

SEQ ID NO: 568449 - DNA, 19 bp, Mus musculus
  siRNA target sequence for Dgcr2 (NM_010048.1,1355-1373).
ctcacgccactacatcttt

SEQ ID NO: 568450 - DNA, 19 bp, Mus musculus
  siRNA target sequence for Dgcr2 (NM_010048.1,1357-1375).
cacgccactacatctttct

SEQ ID NO: 568451 - DNA, 19 bp, Mus musculus
  siRNA target sequence for Dgcr2 (NM_010048.1,1359-1377).
cgccactacatctttctga

SEQ ID NO: 568452 - DNA, 19 bp, Mus musculus
  siRNA target sequence for Dgcr2 (NM_010048.1,1419-1437).
ctccttatacagcttacaa

SEQ ID NO: 568453 - DNA, 19 bp, Mus musculus
  siRNA target sequence for Dgcr2 (NM_010048.1,1422-1440).
cttatacagcttacaagta

SEQ ID NO: 568454 - DNA, 19 bp, Mus musculus
  siRNA target sequence for Dgcr2 (NM_010048.1,1475-1493).
ccctatgaggcgtctatca

SEQ ID NO: 568455 - DNA, 19 bp, Mus musculus
  siRNA target sequence for Dgcr2 (NM_010048.1,1476-1494).
cctatgaggcgtctatcaa

SEQ ID NO: 568456 - DNA, 19 bp, Mus musculus
  siRNA target sequence for Fcna (NM_007995.2,162-180).
ggtgcctgtccagatgtta

SEQ ID NO: 568457 - DNA, 19 bp, Mus musculus
  siRNA target sequence for Fcna (NM_007995.2,163-181).
gtgcctgtccagatgttaa

SEQ ID NO: 568458 - DNA, 19 bp, Mus musculus
  siRNA target sequence for Fcna (NM_007995.2,166-184).
cctgtccagatgttaaggt

SEQ ID NO: 568459 - DNA, 19 bp, Mus musculus
  siRNA target sequence for Fcna (NM_007995.2,453-471).
ccccggagctgcaaagact

SEQ ID NO: 568460 - DNA, 19 bp, Mus musculus
  siRNA target sequence for Fcna (NM_007995.2,569-587).
gggctggaccgtttttcaa

SEQ ID NO: 568461 - DNA, 19 bp, Mus musculus
  siRNA target sequence for Fcna (NM_007995.2,594-612).
gtggacgggtctatcgatt

SEQ ID NO: 568462 - DNA, 19 bp, Mus musculus
  siRNA target sequence for Fcna (NM_007995.2,597-615).
gacgggtctatcgatttct

SEQ ID NO: 568463 - DNA, 19 bp, Mus musculus
  siRNA target sequence for Fcna (NM_007995.2,621-639).
gactgggactcctataaaa

SEQ ID NO: 568464 - DNA, 19 bp, Mus musculus
  siRNA target sequence for Fcna (NM_007995.2,623-641).
ctgggactcctataaaaga

SEQ ID NO: 568465 - DNA, 19 bp, Mus musculus
  siRNA target sequence for Fcna (NM_007995.2,719-737).
gctccgagttgacttacaa

SEQ ID NO: 568466 - DNA, 19 bp, Mus musculus
  siRNA target sequence for Fcna (NM_007995.2,722-740).
ccgagttgacttacaagat

SEQ ID NO: 568467 - DNA, 19 bp, Mus musculus
  siRNA target sequence for Gckr (NM_144909.1,96-114).
ggagttgtcagggtatgaa

SEQ ID NO: 568468 - DNA, 19 bp, Mus musculus
  siRNA target sequence for Gckr (NM_144909.1,176-194).
cagagaaaattgttcaact

SEQ ID NO: 568469 - DNA, 19 bp, Mus musculus
  siRNA target sequence for Gckr (NM_144909.1,223-241).
caggaggaggggcaaatca

SEQ ID NO: 568470 - DNA, 19 bp, Mus musculus
  siRNA target sequence for Gckr (NM_144909.1,830-848).
gcgccaccaagattctact

SEQ ID NO: 568471 - DNA, 19 bp, Mus musculus
  siRNA target sequence for Gckr (NM_144909.1,941-959).
gggctcatcaggtaaccta

SEQ ID NO: 568472 - DNA, 19 bp, Mus musculus
  siRNA target sequence for Gckr (NM_144909.1,951-969).
ggtaacctacagtcaaagt

SEQ ID NO: 568473 - DNA, 19 bp, Mus musculus
  siRNA target sequence for Gckr (NM_144909.1,952-970).
gtaacctacagtcaaagtt

SEQ ID NO: 568474 - DNA, 19 bp, Mus musculus
  siRNA target sequence for Gckr (NM_144909.1,960-978).
cagtcaaagttccaaaatt

SEQ ID NO: 568475 - DNA, 19 bp, Mus musculus
  siRNA target sequence for Gckr (NM_144909.1,1000-1018).
ggcatcagcctggagaaaa

SEQ ID NO: 568476 - DNA, 19 bp, Mus musculus
  siRNA target sequence for Gckr (NM_144909.1,1043-1061).
ggcagaccctcggtatcat

SEQ ID NO: 568477 - DNA, 19 bp, Mus musculus
  siRNA target sequence for Gckr (NM_144909.1,1055-1073).
gtatcatcgccattatgga

SEQ ID NO: 568478 - DNA, 19 bp, Mus musculus
  siRNA target sequence for Gckr (NM_144909.1,1100-1118).
gtgctgatttccgagatat

SEQ ID NO: 568479 - DNA, 19 bp, Mus musculus
  siRNA target sequence for Gckr (NM_144909.1,1230-1248).
gccatcccttacggaaatt

SEQ ID NO: 568480 - DNA, 19 bp, Mus musculus
  siRNA target sequence for Gckr (NM_144909.1,1232-1250).
catcccttacggaaattga

SEQ ID NO: 568481 - DNA, 19 bp, Mus musculus
  siRNA target sequence for Gckr (NM_144909.1,1448-1466).
ggagctacgttcagaagtt

SEQ ID NO: 568482 - DNA, 19 bp, Mus musculus
  siRNA target sequence for Gfpt1 (NM_013528.2,179-197).
ccatgttcctcgaacaaga

SEQ ID NO: 568483 - DNA, 19 bp, Mus musculus
  siRNA target sequence for Gfpt1 (NM_013528.2,189-207).
cgaacaagacgagaaatct

SEQ ID NO: 568484 - DNA, 19 bp, Mus musculus
  siRNA target sequence for Gfpt1 (NM_013528.2,201-219).
gaaatcttggagacactaa

SEQ ID NO: 568485 - DNA, 19 bp, Mus musculus
  siRNA target sequence for Gfpt1 (NM_013528.2,206-224).
cttggagacactaatcaaa

SEQ ID NO: 568486 - DNA, 19 bp, Mus musculus
  siRNA target sequence for Gfpt1 (NM_013528.2,239-257).
ggaatacagaggatatgat

SEQ ID NO: 568487 - DNA, 19 bp, Mus musculus
  siRNA target sequence for Gfpt1 (NM_013528.2,240-258).
gaatacagaggatatgatt

SEQ ID NO: 568488 - DNA, 19 bp, Mus musculus
  siRNA target sequence for Gfpt1 (NM_013528.2,273-291).
cttgacggaggcaatgaca

SEQ ID NO: 568489 - DNA, 19 bp, Mus musculus
  siRNA target sequence for Gfpt1 (NM_013528.2,300-318).
gaagccaacgcctgcaaaa

SEQ ID NO: 568490 - DNA, 19 bp, Mus musculus
  siRNA target sequence for Gfpt1 (NM_013528.2,304-322).
ccaacgcctgcaaaatcca

SEQ ID NO: 568491 - DNA, 19 bp, Mus musculus
  siRNA target sequence for Gfpt1 (NM_013528.2,386-404).
ggacttggatatagaattt

SEQ ID NO: 568492 - DNA, 19 bp, Mus musculus
  siRNA target sequence for Gfpt1 (NM_013528.2,471-489).
cacccccagcgctctgata

SEQ ID NO: 568493 - DNA, 19 bp, Mus musculus
  siRNA target sequence for Gfpt1 (NM_013528.2,473-491).
cccccagcgctctgataaa

SEQ ID NO: 568494 - DNA, 19 bp, Mus musculus
  siRNA target sequence for Gfpt1 (NM_013528.2,476-494).
ccagcgctctgataaaaat

SEQ ID NO: 568495 - DNA, 19 bp, Mus musculus
  siRNA target sequence for Gfpt1 (NM_013528.2,477-495).
cagcgctctgataaaaata

SEQ ID NO: 568496 - DNA, 19 bp, Mus musculus
  siRNA target sequence for Gfpt1 (NM_013528.2,519-537).
ggaatcatcaccaactaca

SEQ ID NO: 568497 - DNA, 19 bp, Mus musculus
  siRNA target sequence for Gfpt1 (NM_013528.2,611-629).
gctcgtcaagtacatgtat

SEQ ID NO: 568498 - DNA, 19 bp, Mus musculus
  siRNA target sequence for Gfpt1 (NM_013528.2,645-663).
caggacgtcagttttacca

SEQ ID NO: 568499 - DNA, 19 bp, Mus musculus
  siRNA target sequence for Gfpt1 (NM_013528.2,664-682).
ccttggtggagagagttat

SEQ ID NO: 568500 - DNA, 19 bp, Mus musculus
  siRNA target sequence for Gfpt1 (NM_013528.2,676-694).
gagttatccaacaattgga

SEQ ID NO: 568501 - DNA, 19 bp, Mus musculus
  siRNA target sequence for Gfpt1 (NM_013528.2,782-800).
gcggagtgaacataagctt

SEQ ID NO: 568502 - DNA, 19 bp, Mus musculus
  siRNA target sequence for Gfpt1 (NM_013528.2,783-801).
cggagtgaacataagcttt

SEQ ID NO: 568503 - DNA, 19 bp, Mus musculus
  siRNA target sequence for Gfpt1 (NM_013528.2,797-815).
gctttctacagatcacatt

SEQ ID NO: 568504 - DNA, 19 bp, Mus musculus
  siRNA target sequence for Gfpt1 (NM_013528.2,807-825).
gatcacattccgattctgt

SEQ ID NO: 568505 - DNA, 19 bp, Mus musculus
  siRNA target sequence for Gfpt1 (NM_013528.2,908-926).
ggcagttgaatattacttt

SEQ ID NO: 568506 - DNA, 19 bp, Mus musculus
  siRNA target sequence for Gfpt1 (NM_013528.2,1016-1034).
ctctatccaccgaattaaa

SEQ ID NO: 568507 - DNA, 19 bp, Mus musculus
  siRNA target sequence for Gfpt1 (NM_013528.2,1057-1075).
gccgagctgtgcaaactct

SEQ ID NO: 568508 - DNA, 19 bp, Mus musculus
  siRNA target sequence for Gfpt1 (NM_013528.2,1097-1115).
catgaagggcaactttagt

SEQ ID NO: 568509 - DNA, 19 bp, Mus musculus
  siRNA target sequence for Gfpt1 (NM_013528.2,1100-1118).
gaagggcaactttagttca

SEQ ID NO: 568510 - DNA, 19 bp, Mus musculus
  siRNA target sequence for Gfpt1 (NM_013528.2,1149-1167).
gaatctgttgtgaacacaa

SEQ ID NO: 568511 - DNA, 19 bp, Mus musculus
  siRNA target sequence for Gfpt1 (NM_013528.2,1171-1189).
gaggaagagtcaattttga

SEQ ID NO: 568512 - DNA, 19 bp, Mus musculus
  siRNA target sequence for Gfpt1 (NM_013528.2,1174-1192).
gaagagtcaattttgatga

SEQ ID NO: 568513 - DNA, 19 bp, Mus musculus
  siRNA target sequence for Gfpt1 (NM_013528.2,1210-1228).
gaggtttgaaagatcacat

SEQ ID NO: 568514 - DNA, 19 bp, Mus musculus
  siRNA target sequence for Gfpt1 (NM_013528.2,1212-1230).
ggtttgaaagatcacatta

SEQ ID NO: 568515 - DNA, 19 bp, Mus musculus
  siRNA target sequence for Gfpt1 (NM_013528.2,1244-1262).
gtgtcggcggttgattctt

SEQ ID NO: 568516 - DNA, 19 bp, Mus musculus
  siRNA target sequence for Gfpt1 (NM_013528.2,1246-1264).
gtcggcggttgattcttat

SEQ ID NO: 568517 - DNA, 19 bp, Mus musculus
  siRNA target sequence for Gfpt1 (NM_013528.2,1250-1268).
gcggttgattcttattgct

SEQ ID NO: 568518 - DNA, 19 bp, Mus musculus
  siRNA target sequence for Gfpt1 (NM_013528.2,1378-1396).
cagtctttcgagatgatgt

SEQ ID NO: 568519 - DNA, 19 bp, Mus musculus
  siRNA target sequence for Gfpt1 (NM_013528.2,1380-1398).
gtctttcgagatgatgttt

SEQ ID NO: 568520 - DNA, 19 bp, Mus musculus
  siRNA target sequence for Gfpt1 (NM_013528.2,1435-1453).
ccctgatgggacttcgtta

SEQ ID NO: 568521 - DNA, 19 bp, Mus musculus
  siRNA target sequence for Gfpt1 (NM_013528.2,1497-1515).
gtcggcagttctatatcaa

SEQ ID NO: 568522 - DNA, 19 bp, Mus musculus
  siRNA target sequence for Gfpt1 (NM_013528.2,1522-1540).
cagattgcggggttcatat

SEQ ID NO: 568523 - DNA, 19 bp, Mus musculus
  siRNA target sequence for Gfpt1 (NM_013528.2,1524-1542).
gattgcggggttcatatta

SEQ ID NO: 568524 - DNA, 19 bp, Mus musculus
  siRNA target sequence for Gfpt1 (NM_013528.2,1529-1547).
cggggttcatattaatgct

SEQ ID NO: 568525 - DNA, 19 bp, Mus musculus
  siRNA target sequence for Gfpt1 (NM_013528.2,1682-1700).
gcgactgccggacttgatt

SEQ ID NO: 568526 - DNA, 19 bp, Mus musculus
  siRNA target sequence for Gfpt1 (NM_013528.2,1683-1701).
cgactgccggacttgatta

SEQ ID NO: 568527 - DNA, 19 bp, Mus musculus
  siRNA target sequence for Gfpt1 (NM_013528.2,1688-1706).
gccggacttgattaaggaa

SEQ ID NO: 568528 - DNA, 19 bp, Mus musculus
  siRNA target sequence for Gfpt1 (NM_013528.2,1758-1776).
cagaagtcggtcctgataa

SEQ ID NO: 568529 - DNA, 19 bp, Mus musculus
  siRNA target sequence for Gfpt1 (NM_013528.2,1928-1946).
catgcgagaccacacttat

SEQ ID NO: 568530 - DNA, 19 bp, Mus musculus
  siRNA target sequence for Gfpt1 (NM_013528.2,1996-2014).
cagtcgtgatctgtgataa

SEQ ID NO: 568531 - DNA, 19 bp, Mus musculus
  siRNA target sequence for Gfpt1 (NM_013528.2,2008-2026).
gtgataaggaggatactga

SEQ ID NO: 568532 - DNA, 19 bp, Mus musculus
  siRNA target sequence for Gfpt1 (NM_013528.2,2016-2034).
gaggatactgagaccatta

SEQ ID NO: 568533 - DNA, 19 bp, Mus musculus
  siRNA target sequence for Gfpt1 (NM_013528.2,2138-2156).
gagaggctacgatgttgat

SEQ ID NO: 568534 - DNA, 19 bp, Mus musculus
  siRNA target sequence for Gfpt1 (NM_013528.2,2140-2158).
gaggctacgatgttgattt

SEQ ID NO: 568535 - DNA, 19 bp, Mus musculus
  siRNA target sequence for Gfpt1 (NM_013528.2,2164-2182).
ggaatcttgccaaatctgt

SEQ ID NO: 568536 - DNA, 19 bp, Mus musculus
  siRNA target sequence for Gfpt1 (NM_013528.2,2165-2183).
gaatcttgccaaatctgta

SEQ ID NO: 568537 - DNA, 19 bp, Mus musculus
  siRNA target sequence for Gfpt2 (NM_013529.1,179-197).
ggaataaccacgaagtcaa

SEQ ID NO: 568538 - DNA, 19 bp, Mus musculus
  siRNA target sequence for Gfpt2 (NM_013529.1,180-198).
gaataaccacgaagtcaaa

SEQ ID NO: 568539 - DNA, 19 bp, Mus musculus
  siRNA target sequence for Gfpt2 (NM_013529.1,186-204).
ccacgaagtcaaagaaaga

SEQ ID NO: 568540 - DNA, 19 bp, Mus musculus
  siRNA target sequence for Gfpt2 (NM_013529.1,365-383).
cgcagcgttcggacaaaga

SEQ ID NO: 568541 - DNA, 19 bp, Mus musculus
  siRNA target sequence for Gfpt2 (NM_013529.1,367-385).
cagcgttcggacaaagaca

SEQ ID NO: 568542 - DNA, 19 bp, Mus musculus
  siRNA target sequence for Gfpt2 (NM_013529.1,369-387).
gcgttcggacaaagacaat

SEQ ID NO: 568543 - DNA, 19 bp, Mus musculus
  siRNA target sequence for Gfpt2 (NM_013529.1,403-421).
cacaacgggatcatcacta

SEQ ID NO: 568544 - DNA, 19 bp, Mus musculus
  siRNA target sequence for Gfpt2 (NM_013529.1,405-423).
caacgggatcatcactaat

SEQ ID NO: 568545 - DNA, 19 bp, Mus musculus
  siRNA target sequence for Gfpt2 (NM_013529.1,409-427).
gggatcatcactaattaca

SEQ ID NO: 568546 - DNA, 19 bp, Mus musculus
  siRNA target sequence for Gfpt2 (NM_013529.1,410-428).
ggatcatcactaattacaa

SEQ ID NO: 568547 - DNA, 19 bp, Mus musculus
  siRNA target sequence for Gfpt2 (NM_013529.1,495-513).
cgccaagctgattaaatat

SEQ ID NO: 568548 - DNA, 19 bp, Mus musculus
  siRNA target sequence for Gfpt2 (NM_013529.1,531-549).
gactgaggacataacgttt

SEQ ID NO: 568549 - DNA, 19 bp, Mus musculus
  siRNA target sequence for Gfpt2 (NM_013529.1,535-553).
gaggacataacgttttcca

SEQ ID NO: 568550 - DNA, 19 bp, Mus musculus
  siRNA target sequence for Gfpt2 (NM_013529.1,551-569).
ccacattggtcgaaagagt

SEQ ID NO: 568551 - DNA, 19 bp, Mus musculus
  siRNA target sequence for Gfpt2 (NM_013529.1,587-605).
gcgcctttgcactggtttt

SEQ ID NO: 568552 - DNA, 19 bp, Mus musculus
  siRNA target sequence for Gfpt2 (NM_013529.1,595-613).
gcactggttttcaagagta

SEQ ID NO: 568553 - DNA, 19 bp, Mus musculus
  siRNA target sequence for Gfpt2 (NM_013529.1,601-619).
gttttcaagagtattcact

SEQ ID NO: 568554 - DNA, 19 bp, Mus musculus
  siRNA target sequence for Gfpt2 (NM_013529.1,663-681).
catcggggtacgaagcaaa

SEQ ID NO: 568555 - DNA, 19 bp, Mus musculus
  siRNA target sequence for Gfpt2 (NM_013529.1,697-715).
gagcagatccccgtcttat

SEQ ID NO: 568556 - DNA, 19 bp, Mus musculus
  siRNA target sequence for Gfpt2 (NM_013529.1,699-717).
gcagatccccgtcttatat

SEQ ID NO: 568557 - DNA, 19 bp, Mus musculus
  siRNA target sequence for Gfpt2 (NM_013529.1,711-729).
cttatatccgacatgcaat

SEQ ID NO: 568558 - DNA, 19 bp, Mus musculus
  siRNA target sequence for Gfpt2 (NM_013529.1,722-740).
catgcaatatcgagaatgt

SEQ ID NO: 568559 - DNA, 19 bp, Mus musculus
  siRNA target sequence for Gfpt2 (NM_013529.1,725-743).
gcaatatcgagaatgtgaa

SEQ ID NO: 568560 - DNA, 19 bp, Mus musculus
  siRNA target sequence for Gfpt2 (NM_013529.1,792-810).
gcacgctgtgggcgataaa

SEQ ID NO: 568561 - DNA, 19 bp, Mus musculus
  siRNA target sequence for Gfpt2 (NM_013529.1,795-813).
cgctgtgggcgataaagct

SEQ ID NO: 568562 - DNA, 19 bp, Mus musculus
  siRNA target sequence for Gfpt2 (NM_013529.1,803-821).
gcgataaagctgtggaatt

SEQ ID NO: 568563 - DNA, 19 bp, Mus musculus
  siRNA target sequence for Gfpt2 (NM_013529.1,861-879).
caaccgggtcatcttctta

SEQ ID NO: 568564 - DNA, 19 bp, Mus musculus
  siRNA target sequence for Gfpt2 (NM_013529.1,864-882).
ccgggtcatcttcttagaa

SEQ ID NO: 568565 - DNA, 19 bp, Mus musculus
  siRNA target sequence for Gfpt2 (NM_013529.1,866-884).
gggtcatcttcttagaaga

SEQ ID NO: 568566 - DNA, 19 bp, Mus musculus
  siRNA target sequence for Gfpt2 (NM_013529.1,933-951).
caagcgctcagctactgat

SEQ ID NO: 568567 - DNA, 19 bp, Mus musculus
  siRNA target sequence for Gfpt2 (NM_013529.1,1006-1024).
ggtaacttcagcgcattta

SEQ ID NO: 568568 - DNA, 19 bp, Mus musculus
  siRNA target sequence for Gfpt2 (NM_013529.1,1007-1025).
gtaacttcagcgcatttat

SEQ ID NO: 568569 - DNA, 19 bp, Mus musculus
  siRNA target sequence for Gfpt2 (NM_013529.1,1044-1062).
gcagccagaatcagttttt

SEQ ID NO: 568570 - DNA, 19 bp, Mus musculus
  siRNA target sequence for Gfpt2 (NM_013529.1,1045-1063).
cagccagaatcagttttta

SEQ ID NO: 568571 - DNA, 19 bp, Mus musculus
  siRNA target sequence for Gfpt2 (NM_013529.1,1047-1065).
gccagaatcagtttttaat

SEQ ID NO: 568572 - DNA, 19 bp, Mus musculus
  siRNA target sequence for Gfpt2 (NM_013529.1,1048-1066).
ccagaatcagtttttaata

SEQ ID NO: 568573 - DNA, 19 bp, Mus musculus
  siRNA target sequence for Gfpt2 (NM_013529.1,1073-1091).
gaggtcgggtgaattttga

SEQ ID NO: 568574 - DNA, 19 bp, Mus musculus
  siRNA target sequence for Gfpt2 (NM_013529.1,1114-1132).
ggcttgaaggaccatttga

SEQ ID NO: 568575 - DNA, 19 bp, Mus musculus
  siRNA target sequence for Gfpt2 (NM_013529.1,1115-1133).
gcttgaaggaccatttgaa

SEQ ID NO: 568576 - DNA, 19 bp, Mus musculus
  siRNA target sequence for Gfpt2 (NM_013529.1,1199-1217).
ctacacggcaagtcttaga

SEQ ID NO: 568577 - DNA, 19 bp, Mus musculus
  siRNA target sequence for Gfpt2 (NM_013529.1,1341-1359).
cctggcgctgcgatactgt

SEQ ID NO: 568578 - DNA, 19 bp, Mus musculus
  siRNA target sequence for Gfpt2 (NM_013529.1,1342-1360).
ctggcgctgcgatactgta

SEQ ID NO: 568579 - DNA, 19 bp, Mus musculus
  siRNA target sequence for Gfpt2 (NM_013529.1,1347-1365).
gctgcgatactgtaaggat

SEQ ID NO: 568580 - DNA, 19 bp, Mus musculus
  siRNA target sequence for Gfpt2 (NM_013529.1,1481-1499).
cgtacaccagccagttcat

SEQ ID NO: 568581 - DNA, 19 bp, Mus musculus
  siRNA target sequence for Gfpt2 (NM_013529.1,1524-1542).
gatgtctgaagatcgaatt

SEQ ID NO: 568582 - DNA, 19 bp, Mus musculus
  siRNA target sequence for Gfpt2 (NM_013529.1,1572-1590).
ccgtggcctcagatcttta

SEQ ID NO: 568583 - DNA, 19 bp, Mus musculus
  siRNA target sequence for Gfpt2 (NM_013529.1,1675-1693).
gtgatgggacggggatata

SEQ ID NO: 568584 - DNA, 19 bp, Mus musculus
  siRNA target sequence for Gfpt2 (NM_013529.1,1886-1904).
gccagggtcgcccaatcat

SEQ ID NO: 568585 - DNA, 19 bp, Mus musculus
  siRNA target sequence for Gfpt2 (NM_013529.1,1887-1905).
ccagggtcgcccaatcata

SEQ ID NO: 568586 - DNA, 19 bp, Mus musculus
  siRNA target sequence for Gfpt2 (NM_013529.1,1927-1945).
gagagctccaagtttgcat

SEQ ID NO: 568587 - DNA, 19 bp, Mus musculus
  siRNA target sequence for Gfpt2 (NM_013529.1,1929-1947).
gagctccaagtttgcatat

SEQ ID NO: 568588 - DNA, 19 bp, Mus musculus
  siRNA target sequence for Gfpt2 (NM_013529.1,1931-1949).
gctccaagtttgcatataa

SEQ ID NO: 568589 - DNA, 19 bp, Mus musculus
  siRNA target sequence for Gfpt2 (NM_013529.1,1932-1950).
ctccaagtttgcatataaa

SEQ ID NO: 568590 - DNA, 19 bp, Mus musculus
  siRNA target sequence for Gfpt2 (NM_013529.1,2031-2049).
ggctgtcctccgaggttat

SEQ ID NO: 568591 - DNA, 19 bp, Mus musculus
  siRNA target sequence for Gfpt2 (NM_013529.1,2033-2051).
ctgtcctccgaggttatga

SEQ ID NO: 568592 - DNA, 19 bp, Mus musculus
  siRNA target sequence for Gfpt2 (NM_013529.1,2042-2060).
gaggttatgatgttgactt

SEQ ID NO: 568593 - DNA, 19 bp, Mus musculus
  siRNA target sequence for Ingaprp (NM_013893.1,206-224).
gctcctattgctatttact

SEQ ID NO: 568594 - DNA, 19 bp, Mus musculus
  siRNA target sequence for Ingaprp (NM_013893.1,209-227).
cctattgctatttactgat

SEQ ID NO: 568595 - DNA, 19 bp, Mus musculus
  siRNA target sequence for Ingaprp (NM_013893.1,510-528).
gtctcaggcctcaggttat

SEQ ID NO: 568596 - DNA, 19 bp, Mus musculus
  siRNA target sequence for Ingaprp (NM_013893.1,514-532).
caggcctcaggttatcaga

SEQ ID NO: 568597 - DNA, 19 bp, Mus musculus
  siRNA target sequence for Klra10 (NM_008459.2,384-402).
gaatagtgaaaccaatact

SEQ ID NO: 568598 - DNA, 19 bp, Mus musculus
  siRNA target sequence for Klra2 (NM_008462.3,398-416).
caggagaaaactctaaata

SEQ ID NO: 568599 - DNA, 19 bp, Mus musculus
  siRNA target sequence for Klra2 (NM_008462.3,428-446).
gagtaccaggtcatgaaaa

SEQ ID NO: 568600 - DNA, 19 bp, Mus musculus
  siRNA target sequence for Klra2 (NM_008462.3,493-511).
gtgtaaggccctcaatgat

SEQ ID NO: 568601 - DNA, 19 bp, Mus musculus
  siRNA target sequence for Klra2 (NM_008462.3,682-700).
ctgccaggcttacaactta

SEQ ID NO: 568602 - DNA, 19 bp, Mus musculus
  siRNA target sequence for Klra2 (NM_008462.3,689-707).
gcttacaacttaactcttt

SEQ ID NO: 568603 - DNA, 19 bp, Mus musculus
  siRNA target sequence for Klra2 (NM_008462.3,739-757).
ccttaaatcccaacttcaa

SEQ ID NO: 568604 - DNA, 19 bp, Mus musculus
  siRNA target sequence for Klra2 (NM_008462.3,740-758).
cttaaatcccaacttcaaa

SEQ ID NO: 568605 - DNA, 19 bp, Mus musculus
  siRNA target sequence for Klra2 (NM_008462.3,843-861).
cagcagcaaggaattcagt

SEQ ID NO: 568606 - DNA, 19 bp, Mus musculus
  siRNA target sequence for Klra2 (NM_008462.3,858-876).
cagtacctaatagagaaaa

SEQ ID NO: 568607 - DNA, 19 bp, Mus musculus
  siRNA target sequence for Klra2 (NM_008462.3,860-878).
gtacctaatagagaaaagt

SEQ ID NO: 568608 - DNA, 19 bp, Mus musculus
  siRNA target sequence for Klra2 (NM_008462.3,877-895).
gtgtgcatatctaaattca

SEQ ID NO: 568609 - DNA, 19 bp, Mus musculus
  siRNA target sequence for Klra2 (NM_008462.3,910-928).
ggatgaccgtgctagaaat

SEQ ID NO: 568610 - DNA, 19 bp, Mus musculus
  siRNA target sequence for Klra2 (NM_008462.3,955-973).
gaataaattccctattcca

SEQ ID NO: 568611 - DNA, 19 bp, Mus musculus
  siRNA target sequence for Klra2 (NM_008462.3,983-1001).
gccaagggaagaactcaat

SEQ ID NO: 568612 - DNA, 19 bp, Mus musculus
  siRNA target sequence for Klra5 (NM_008463.1,245-263).
ctgtgagatcgcttggaat

SEQ ID NO: 568613 - DNA, 19 bp, Mus musculus
  siRNA target sequence for Klra5 (NM_008463.1,437-455).
gtccaggtgaggaacttct

SEQ ID NO: 568614 - DNA, 19 bp, Mus musculus
  siRNA target sequence for Klra7 (NM_014194.1,170-188).
gcttgctacagagagtatt

SEQ ID NO: 568615 - DNA, 19 bp, Mus musculus
  siRNA target sequence for Klrb1a (NM_010737.2,24-42).
cacagcaagggtctacttt

SEQ ID NO: 568616 - DNA, 19 bp, Mus musculus
  siRNA target sequence for Klrb1a (NM_010737.2,363-381).
ggaggaaggtctagttgat

SEQ ID NO: 568617 - DNA, 19 bp, Mus musculus
  siRNA target sequence for Klrb1a (NM_010737.2,364-382).
gaggaaggtctagttgatt

SEQ ID NO: 568618 - DNA, 19 bp, Mus musculus
  siRNA target sequence for Klrb1a (NM_010737.2,527-545).
gatcgactttaaattctga

SEQ ID NO: 568619 - DNA, 19 bp, Mus musculus
  siRNA target sequence for Klrb1c (NM_008527.1,113-131).
gtatctacctcggtttaaa

SEQ ID NO: 568620 - DNA, 19 bp, Mus musculus
  siRNA target sequence for Klrb1c (NM_008527.1,279-297).
cttagtgcgagtcttagta

SEQ ID NO: 568621 - DNA, 19 bp, Mus musculus
  siRNA target sequence for Klrb1c (NM_008527.1,345-363).
gaataaaacaacagttaat

SEQ ID NO: 568622 - DNA, 19 bp, Mus musculus
  siRNA target sequence for Klrb1c (NM_008527.1,660-678).
ctccatcttaggagataaa

SEQ ID NO: 568623 - DNA, 19 bp, Mus musculus
  siRNA target sequence for Klrb1d (NM_030599.3,412-430).
ggaaggaatgtcgaattga

SEQ ID NO: 568624 - DNA, 19 bp, Mus musculus
  siRNA target sequence for Klrb1d (NM_030599.3,413-431).
gaaggaatgtcgaattgat

SEQ ID NO: 568625 - DNA, 19 bp, Mus musculus
  siRNA target sequence for Klrb1d (NM_030599.3,416-434).
ggaatgtcgaattgattgt

SEQ ID NO: 568626 - DNA, 19 bp, Mus musculus
  siRNA target sequence for Klrb1d (NM_030599.3,423-441).
cgaattgattgtgataaaa

SEQ ID NO: 568627 - DNA, 19 bp, Mus musculus
  siRNA target sequence for Klrb1d (NM_030599.3,424-442).
gaattgattgtgataaaaa

SEQ ID NO: 568628 - DNA, 19 bp, Mus musculus
  siRNA target sequence for Klrc1 (NM_010652.1,76-94).
ggtcctcgcagctccattt

SEQ ID NO: 568629 - DNA, 19 bp, Mus musculus
  siRNA target sequence for Klrc1 (NM_010652.1,80-98).
ctcgcagctccatttcagt

SEQ ID NO: 568630 - DNA, 19 bp, Mus musculus
  siRNA target sequence for Klrc1 (NM_010652.1,95-113).
cagtcatcgagcaggaaat

SEQ ID NO: 568631 - DNA, 19 bp, Mus musculus
  siRNA target sequence for Klrc1 (NM_010652.1,97-115).
gtcatcgagcaggaaatca

SEQ ID NO: 568632 - DNA, 19 bp, Mus musculus
  siRNA target sequence for Klrc1 (NM_010652.1,256-274).
gctgtggttgtaattacta

SEQ ID NO: 568633 - DNA, 19 bp, Mus musculus
  siRNA target sequence for Klrc1 (NM_010652.1,275-293).
cagttgccacaccatatat

SEQ ID NO: 568634 - DNA, 19 bp, Mus musculus
  siRNA target sequence for Klrc1 (NM_010652.1,281-299).
ccacaccatatataaacta

SEQ ID NO: 568635 - DNA, 19 bp, Mus musculus
  siRNA target sequence for Klrd1 (NM_010654.1,40-58).
gtcatctttggaataaaat

SEQ ID NO: 568636 - DNA, 19 bp, Mus musculus
  siRNA target sequence for Klrd1 (NM_010654.1,81-99).
gggagttttgctgataaat

SEQ ID NO: 568637 - DNA, 19 bp, Mus musculus
  siRNA target sequence for Klrd1 (NM_010654.1,82-100).
ggagttttgctgataaatt

SEQ ID NO: 568638 - DNA, 19 bp, Mus musculus
  siRNA target sequence for Klrd1 (NM_010654.1,85-103).
gttttgctgataaattcat

SEQ ID NO: 568639 - DNA, 19 bp, Mus musculus
  siRNA target sequence for Klrd1 (NM_010654.1,140-158).
ccaccactgtagaattcca

SEQ ID NO: 568640 - DNA, 19 bp, Mus musculus
  siRNA target sequence for Klrd1 (NM_010654.1,196-214).
gttgggcatcagtgcaatt

SEQ ID NO: 568641 - DNA, 19 bp, Mus musculus
  siRNA target sequence for Klrd1 (NM_010654.1,199-217).
gggcatcagtgcaattgtt

SEQ ID NO: 568642 - DNA, 19 bp, Mus musculus
  siRNA target sequence for Klrd1 (NM_010654.1,295-313).
ccccaatccagaaatgaat

SEQ ID NO: 568643 - DNA, 19 bp, Mus musculus
  siRNA target sequence for Klrd1 (NM_010654.1,296-314).
cccaatccagaaatgaatt

SEQ ID NO: 568644 - DNA, 19 bp, Mus musculus
  siRNA target sequence for Klrd1 (NM_010654.1,302-320).
ccagaaatgaattgagttt

SEQ ID NO: 568645 - DNA, 19 bp, Mus musculus
  siRNA target sequence for Klrd1 (NM_010654.1,324-342).
gaacttcagtcaaaccttt

SEQ ID NO: 568646 - DNA, 19 bp, Mus musculus
  siRNA target sequence for Klrd1 (NM_010654.1,348-366).
gattggaatgcattatagt

SEQ ID NO: 568647 - DNA, 19 bp, Mus musculus
  siRNA target sequence for Klrd1 (NM_010654.1,352-370).
ggaatgcattatagtgaaa

SEQ ID NO: 568648 - DNA, 19 bp, Mus musculus
  siRNA target sequence for Klrd1 (NM_010654.1,398-416).
gcacagttccctcaaaaga

SEQ ID NO: 568649 - DNA, 19 bp, Mus musculus
  siRNA target sequence for Klrd1 (NM_010654.1,444-462).
gccagagcactgcattgtt

SEQ ID NO: 568650 - DNA, 19 bp, Mus musculus
  siRNA target sequence for Klrd1 (NM_010654.1,512-530).
gttacatctgtaagaaact

SEQ ID NO: 568651 - DNA, 19 bp, Mus musculus
  siRNA target sequence for Klre1 (NM_153590.2,512-530).
cccgttctaccctaaatgt

SEQ ID NO: 568652 - DNA, 19 bp, Mus musculus
  siRNA target sequence for Klre1 (NM_153590.2,514-532).
cgttctaccctaaatgtga

SEQ ID NO: 568653 - DNA, 19 bp, Mus musculus
  siRNA target sequence for Klre1 (NM_153590.2,515-533).
gttctaccctaaatgtgaa

SEQ ID NO: 568654 - DNA, 19 bp, Mus musculus
  siRNA target sequence for Klre1 (NM_153590.2,564-582).
gattaagaatacacttaat

SEQ ID NO: 568655 - DNA, 19 bp, Mus musculus
  siRNA target sequence for Klre1 (NM_153590.2,570-588).
gaatacacttaattcaaat

SEQ ID NO: 568656 - DNA, 19 bp, Mus musculus
  siRNA target sequence for Klre1 (NM_153590.2,768-786).
cacaaagtcatcttctgaa

SEQ ID NO: 568657 - DNA, 19 bp, Mus musculus
  siRNA target sequence for Klre1 (NM_153590.2,907-925).
cgtgcctgcttgtctctta

SEQ ID NO: 568658 - DNA, 19 bp, Mus musculus
  siRNA target sequence for Klre1 (NM_153590.2,989-1007).
gggttggagtttactataa

SEQ ID NO: 568659 - DNA, 19 bp, Mus musculus
  siRNA target sequence for Klre1 (NM_153590.2,994-1012).
ggagtttactataatgaaa

SEQ ID NO: 568660 - DNA, 19 bp, Mus musculus
  siRNA target sequence for Klre1 (NM_153590.2,1078-1096).
gctaatatgaaaaacttct

SEQ ID NO: 568661 - DNA, 19 bp, Mus musculus
  siRNA target sequence for Klrg1 (NM_016970.1,29-47).
gacagctctatctattcaa

SEQ ID NO: 568662 - DNA, 19 bp, Mus musculus
  siRNA target sequence for Klrg1 (NM_016970.1,34-52).
ctctatctattcaacacta

SEQ ID NO: 568663 - DNA, 19 bp, Mus musculus
  siRNA target sequence for Klrg1 (NM_016970.1,151-169).
ggggcttttgactgtgatt

SEQ ID NO: 568664 - DNA, 19 bp, Mus musculus
  siRNA target sequence for Klrg1 (NM_016970.1,155-173).
cttttgactgtgattctca

SEQ ID NO: 568665 - DNA, 19 bp, Mus musculus
  siRNA target sequence for Klrg1 (NM_016970.1,172-190).
catgagtctactgatgtat

SEQ ID NO: 568666 - DNA, 19 bp, Mus musculus
  siRNA target sequence for Klrg1 (NM_016970.1,175-193).
gagtctactgatgtatcaa

SEQ ID NO: 568667 - DNA, 19 bp, Mus musculus
  siRNA target sequence for Klrg1 (NM_016970.1,254-272).
ctctggacgaggaatggta

SEQ ID NO: 568668 - DNA, 19 bp, Mus musculus
  siRNA target sequence for Klrg1 (NM_016970.1,264-282).
ggaatggtagccactgtta

SEQ ID NO: 568669 - DNA, 19 bp, Mus musculus
  siRNA target sequence for Klrg1 (NM_016970.1,270-288).
gtagccactgttactattt

SEQ ID NO: 568670 - DNA, 19 bp, Mus musculus
  siRNA target sequence for Klrg1 (NM_016970.1,341-359).
ggctcacatctccttacat

SEQ ID NO: 568671 - DNA, 19 bp, Mus musculus
  siRNA target sequence for Klrg1 (NM_016970.1,418-436).
gatcggcttgaggaacatt

SEQ ID NO: 568672 - DNA, 19 bp, Mus musculus
  siRNA target sequence for Klrg1 (NM_016970.1,421-439).
cggcttgaggaacattgat

SEQ ID NO: 568673 - DNA, 19 bp, Mus musculus
  siRNA target sequence for Klrk1 (NM_033078.2,66-84).
cattgattcgtgatcgaaa

SEQ ID NO: 568674 - DNA, 19 bp, Mus musculus
  siRNA target sequence for Klrk1 (NM_033078.2,70-88).
gattcgtgatcgaaagtct

SEQ ID NO: 568675 - DNA, 19 bp, Mus musculus
  siRNA target sequence for Klrk1 (NM_033078.2,105-123).
gcaaatgccataattacga

SEQ ID NO: 568676 - DNA, 19 bp, Mus musculus
  siRNA target sequence for Klrk1 (NM_033078.2,167-185).
caaagattagcactaacta

SEQ ID NO: 568677 - DNA, 19 bp, Mus musculus
  siRNA target sequence for Klrk1 (NM_033078.2,197-215).
ggagaaaatggtatcataa

SEQ ID NO: 568678 - DNA, 19 bp, Mus musculus
  siRNA target sequence for Klrk1 (NM_033078.2,207-225).
gtatcataagaggaagata

SEQ ID NO: 568679 - DNA, 19 bp, Mus musculus
  siRNA target sequence for Klrk1 (NM_033078.2,216-234).
gaggaagataccctataga

SEQ ID NO: 568680 - DNA, 19 bp, Mus musculus
  siRNA target sequence for Klrk1 (NM_033078.2,219-237).
gaagataccctatagaaaa

SEQ ID NO: 568681 - DNA, 19 bp, Mus musculus
  siRNA target sequence for Klrk1 (NM_033078.2,222-240).
gataccctatagaaaaact

SEQ ID NO: 568682 - DNA, 19 bp, Mus musculus
  siRNA target sequence for Klrk1 (NM_033078.2,293-311).
cgattcacccttaacacat

SEQ ID NO: 568683 - DNA, 19 bp, Mus musculus
  siRNA target sequence for Klrk1 (NM_033078.2,294-312).
gattcacccttaacacatt

SEQ ID NO: 568684 - DNA, 19 bp, Mus musculus
  siRNA target sequence for Klrk1 (NM_033078.2,318-336).
ggcttgccattttcaaaga

SEQ ID NO: 568685 - DNA, 19 bp, Mus musculus
  siRNA target sequence for Klrk1 (NM_033078.2,398-416).
ggcccatgccctaacaact

SEQ ID NO: 568686 - DNA, 19 bp, Mus musculus
  siRNA target sequence for Klrk1 (NM_033078.2,408-426).
ctaacaactggatatgtca

SEQ ID NO: 568687 - DNA, 19 bp, Mus musculus
  siRNA target sequence for Klrk1 (NM_033078.2,433-451).
caactgttaccaatttttt

SEQ ID NO: 568688 - DNA, 19 bp, Mus musculus
  siRNA target sequence for Klrk1 (NM_033078.2,438-456).
gttaccaattttttaatga

SEQ ID NO: 568689 - DNA, 19 bp, Mus musculus
  siRNA target sequence for Klrk1 (NM_033078.2,580-598).
ggtccagatcccagcaaat

SEQ ID NO: 568690 - DNA, 19 bp, Mus musculus
  siRNA target sequence for Klrk1 (NM_033078.2,620-638).
ggctcctctctctcataca

SEQ ID NO: 568691 - DNA, 19 bp, Mus musculus
  siRNA target sequence for Klrk1 (NM_033078.2,627-645).
ctctctcatacaatcagtt

SEQ ID NO: 568692 - DNA, 19 bp, Mus musculus
  siRNA target sequence for Klrk1 (NM_033078.2,629-647).
ctctcatacaatcagttaa

SEQ ID NO: 568693 - DNA, 19 bp, Mus musculus
  siRNA target sequence for Klrk1 (NM_033078.2,633-651).
catacaatcagttaactct

SEQ ID NO: 568694 - DNA, 19 bp, Mus musculus
  siRNA target sequence for Klrk1 (NM_033078.2,680-698).
gtctatggctcaagcttta

SEQ ID NO: 568695 - DNA, 19 bp, Mus musculus
  siRNA target sequence for Lgals2 (NM_025622.1,72-90).
gtcaaagacctgaacatga

SEQ ID NO: 568696 - DNA, 19 bp, Mus musculus
  siRNA target sequence for Lgals2 (NM_025622.1,204-222).
gatgaatccaccattgtct

SEQ ID NO: 568697 - DNA, 19 bp, Mus musculus
  siRNA target sequence for Lgals2 (NM_025622.1,255-273).
gagcaacgagaaaatcaca

SEQ ID NO: 568698 - DNA, 19 bp, Mus musculus
  siRNA target sequence for Lgals8 (NM_018886.2,284-302).
gttgtccttaaataaccta

SEQ ID NO: 568699 - DNA, 19 bp, Mus musculus
  siRNA target sequence for Lgals8 (NM_018886.2,289-307).
ccttaaataacctacaaaa

SEQ ID NO: 568700 - DNA, 19 bp, Mus musculus
  siRNA target sequence for Lgals8 (NM_018886.2,300-318).
ctacaaaatatcatctata

SEQ ID NO: 568701 - DNA, 19 bp, Mus musculus
  siRNA target sequence for Lgals8 (NM_018886.2,320-338).
cccgataatcccctatgtt

SEQ ID NO: 568702 - DNA, 19 bp, Mus musculus
  siRNA target sequence for Lgals8 (NM_018886.2,330-348).
ccctatgttggcaccatta

SEQ ID NO: 568703 - DNA, 19 bp, Mus musculus
  siRNA target sequence for Lgals8 (NM_018886.2,332-350).
ctatgttggcaccattact

SEQ ID NO: 568704 - DNA, 19 bp, Mus musculus
  siRNA target sequence for Lgals8 (NM_018886.2,340-358).
gcaccattactgagcaatt

SEQ ID NO: 568705 - DNA, 19 bp, Mus musculus
  siRNA target sequence for Lgals8 (NM_018886.2,385-403).
gtgggcatgtccctaaaga

SEQ ID NO: 568706 - DNA, 19 bp, Mus musculus
  siRNA target sequence for Lgals8 (NM_018886.2,396-414).
cctaaagattcagaaagat

SEQ ID NO: 568707 - DNA, 19 bp, Mus musculus
  siRNA target sequence for Lgals8 (NM_018886.2,412-430).
gattccaggttgactttca

SEQ ID NO: 568708 - DNA, 19 bp, Mus musculus
  siRNA target sequence for Lgals8 (NM_018886.2,494-512).
gtctagctgcattgtttgt

SEQ ID NO: 568709 - DNA, 19 bp, Mus musculus
  siRNA target sequence for Lgals8 (NM_018886.2,500-518).
ctgcattgtttgtaacaca

SEQ ID NO: 568710 - DNA, 19 bp, Mus musculus
  siRNA target sequence for Lgals8 (NM_018886.2,717-735).
cactccatcgggttcagat

SEQ ID NO: 568711 - DNA, 19 bp, Mus musculus
  siRNA target sequence for Lgals8 (NM_018886.2,731-749).
cagattcagctcggattta

SEQ ID NO: 568712 - DNA, 19 bp, Mus musculus
  siRNA target sequence for Lgals8 (NM_018886.2,733-751).
gattcagctcggatttaca

SEQ ID NO: 568713 - DNA, 19 bp, Mus musculus
  siRNA target sequence for Lgals8 (NM_018886.2,739-757).
gctcggatttacagagtat

SEQ ID NO: 568714 - DNA, 19 bp, Mus musculus
  siRNA target sequence for Lgals8 (NM_018886.2,868-886).
ctggacgaaccgttgtcat

SEQ ID NO: 568715 - DNA, 19 bp, Mus musculus
  siRNA target sequence for Lgals8 (NM_018886.2,870-888).
ggacgaaccgttgtcatta

SEQ ID NO: 568716 - DNA, 19 bp, Mus musculus
  siRNA target sequence for Lgals8 (NM_018886.2,871-889).
gacgaaccgttgtcattaa

SEQ ID NO: 568717 - DNA, 19 bp, Mus musculus
  siRNA target sequence for Lgals8 (NM_018886.2,902-920).
caccaatgcccgaagcttt

SEQ ID NO: 568718 - DNA, 19 bp, Mus musculus
  siRNA target sequence for Lgals8 (NM_018886.2,910-928).
cccgaagctttaatgttga

SEQ ID NO: 568719 - DNA, 19 bp, Mus musculus
  siRNA target sequence for Lgals8 (NM_018886.2,927-945).
gacctagtggcaggaaaaa

SEQ ID NO: 568720 - DNA, 19 bp, Mus musculus
  siRNA target sequence for Lgals8 (NM_018886.2,930-948).
ctagtggcaggaaaaacaa

SEQ ID NO: 568721 - DNA, 19 bp, Mus musculus
  siRNA target sequence for Lgals8 (NM_018886.2,975-993).
cgcctcaatgtgaaagcat

SEQ ID NO: 568722 - DNA, 19 bp, Mus musculus
  siRNA target sequence for Lgals8 (NM_018886.2,1069-1087).
ggatgtactttgagatgat

SEQ ID NO: 568723 - DNA, 19 bp, Mus musculus
  siRNA target sequence for Lgals8 (NM_018886.2,1112-1130).
caaggttgctataaatggt

SEQ ID NO: 568724 - DNA, 19 bp, Mus musculus
  siRNA target sequence for Lgals8 (NM_018886.2,1133-1151).
gcacagcctggagtacaaa

SEQ ID NO: 568725 - DNA, 19 bp, Mus musculus
  siRNA target sequence for Lgals8 (NM_018886.2,1166-1184).
cctaagcagtattgataca

SEQ ID NO: 568726 - DNA, 19 bp, Mus musculus
  siRNA target sequence for Lgals8 (NM_018886.2,1174-1192).
gtattgatacactatcagt

SEQ ID NO: 568727 - DNA, 19 bp, Mus musculus
  siRNA target sequence for Lgals9 (NM_010708.1,29-47).
gtgcccagtctccatacat

SEQ ID NO: 568728 - DNA, 19 bp, Mus musculus
  siRNA target sequence for Lgals9 (NM_010708.1,31-49).
gcccagtctccatacatta

SEQ ID NO: 568729 - DNA, 19 bp, Mus musculus
  siRNA target sequence for Lgals9 (NM_010708.1,32-50).
cccagtctccatacattaa

SEQ ID NO: 568730 - DNA, 19 bp, Mus musculus
  siRNA target sequence for Lgals9 (NM_010708.1,51-69).
cccgatcatcccctttact

SEQ ID NO: 568731 - DNA, 19 bp, Mus musculus
  siRNA target sequence for Lgals9 (NM_010708.1,63-81).
ctttactggaccaatccaa

SEQ ID NO: 568732 - DNA, 19 bp, Mus musculus
  siRNA target sequence for Lgals9 (NM_010708.1,117-135).
ggggactaccaagagtttt

SEQ ID NO: 568733 - DNA, 19 bp, Mus musculus
  siRNA target sequence for Lgals9 (NM_010708.1,162-180).
gaacagcttcaatggaaat

SEQ ID NO: 568734 - DNA, 19 bp, Mus musculus
  siRNA target sequence for Lgals9 (NM_010708.1,576-594).
ggcacccatggctcaaact

SEQ ID NO: 568735 - DNA, 19 bp, Mus musculus
  siRNA target sequence for Lgals9 (NM_010708.1,577-595).
gcacccatggctcaaacta

SEQ ID NO: 568736 - DNA, 19 bp, Mus musculus
  siRNA target sequence for Lgals9 (NM_010708.1,586-604).
gctcaaactaccatccata

SEQ ID NO: 568737 - DNA, 19 bp, Mus musculus
  siRNA target sequence for Lgals9 (NM_010708.1,587-605).
ctcaaactaccatccatat

SEQ ID NO: 568738 - DNA, 19 bp, Mus musculus
  siRNA target sequence for Lgals9 (NM_010708.1,674-692).
cctataccatacctttcta

SEQ ID NO: 568739 - DNA, 19 bp, Mus musculus
  siRNA target sequence for Lgals9 (NM_010708.1,757-775).
gatgctacgaggttccata

SEQ ID NO: 568740 - DNA, 19 bp, Mus musculus
  siRNA target sequence for Lgals9 (NM_010708.1,760-778).
gctacgaggttccatatca

SEQ ID NO: 568741 - DNA, 19 bp, Mus musculus
  siRNA target sequence for Lgals9 (NM_010708.1,810-828).
cctgaacccccgtttcaat

SEQ ID NO: 568742 - DNA, 19 bp, Mus musculus
  siRNA target sequence for Lgals9 (NM_010708.1,845-863).
gaaacactcagatcaacaa

SEQ ID NO: 568743 - DNA, 19 bp, Mus musculus
  siRNA target sequence for Lgals9 (NM_010708.1,924-942).
cttctcggtgtggatcata

SEQ ID NO: 568744 - DNA, 19 bp, Mus musculus
  siRNA target sequence for Lgals9 (NM_010708.1,957-975).
cttcaaggtagctgtgaat

SEQ ID NO: 568745 - DNA, 19 bp, Mus musculus
  siRNA target sequence for Lgals9 (NM_010708.1,968-986).
ctgtgaatggtcaacacat

SEQ ID NO: 568746 - DNA, 19 bp, Mus musculus
  siRNA target sequence for Lgals9 (NM_010708.1,976-994).
ggtcaacacatgtgtgaat

SEQ ID NO: 568747 - DNA, 19 bp, Mus musculus
  siRNA target sequence for Lgals9 (NM_010708.1,1020-1038).
ggatatcaacactctagaa

SEQ ID NO: 568748 - DNA, 19 bp, Mus musculus
  siRNA target sequence for Lman2 (NM_025828.2,278-296).
cccgagccccacgacattt

SEQ ID NO: 568749 - DNA, 19 bp, Mus musculus
  siRNA target sequence for Lman2 (NM_025828.2,281-299).
gagccccacgacatttcta

SEQ ID NO: 568750 - DNA, 19 bp, Mus musculus
  siRNA target sequence for Lman2 (NM_025828.2,283-301).
gccccacgacatttctaca

SEQ ID NO: 568751 - DNA, 19 bp, Mus musculus
  siRNA target sequence for Lman2 (NM_025828.2,284-302).
ccccacgacatttctacat

SEQ ID NO: 568752 - DNA, 19 bp, Mus musculus
  siRNA target sequence for Lman2 (NM_025828.2,286-304).
ccacgacatttctacattt

SEQ ID NO: 568753 - DNA, 19 bp, Mus musculus
  siRNA target sequence for Lman2 (NM_025828.2,289-307).
cgacatttctacatttgct

SEQ ID NO: 568754 - DNA, 19 bp, Mus musculus
  siRNA target sequence for Lman2 (NM_025828.2,367-385).
gggagcactcgctcatcaa

SEQ ID NO: 568755 - DNA, 19 bp, Mus musculus
  siRNA target sequence for Lman2 (NM_025828.2,626-644).
cgtaccagggcctgtgttt

SEQ ID NO: 568756 - DNA, 19 bp, Mus musculus
  siRNA target sequence for Lman2 (NM_025828.2,683-701).
ggacacgtatcccaatgat

SEQ ID NO: 568757 - DNA, 19 bp, Mus musculus
  siRNA target sequence for Lman2 (NM_025828.2,758-776).
gtcgtacgatcatagcaaa

SEQ ID NO: 568758 - DNA, 19 bp, Mus musculus
  siRNA target sequence for Lman2 (NM_025828.2,761-779).
gtacgatcatagcaaagat

SEQ ID NO: 568759 - DNA, 19 bp, Mus musculus
  siRNA target sequence for Lman2 (NM_025828.2,939-957).
ctgcccactggctactact

SEQ ID NO: 568760 - DNA, 19 bp, Mus musculus
  siRNA target sequence for Lman2 (NM_025828.2,941-959).
gcccactggctactacttt

SEQ ID NO: 568761 - DNA, 19 bp, Mus musculus
  siRNA target sequence for Lman2 (NM_025828.2,988-1006).
ctgacaaccacgacatcat

SEQ ID NO: 568762 - DNA, 19 bp, Mus musculus
  siRNA target sequence for Lman2 (NM_025828.2,990-1008).
gacaaccacgacatcatct

SEQ ID NO: 568763 - DNA, 19 bp, Mus musculus
  siRNA target sequence for Lman2 (NM_025828.2,1058-1076).
catcgactggaccaagatt

SEQ ID NO: 568764 - DNA, 19 bp, Mus musculus
  siRNA target sequence for Lman2 (NM_025828.2,1221-1239).
ggcgctgtggtgtttcaga

SEQ ID NO: 568765 - DNA, 19 bp, Mus musculus
  siRNA target sequence for Lman2 (NM_025828.2,1245-1263).
caggaacggaacaaacgtt

SEQ ID NO: 568766 - DNA, 19 bp, Mus musculus
  siRNA target sequence for Lman2 (NM_025828.2,1251-1269).
cggaacaaacgtttctact

SEQ ID NO: 568767 - DNA, 19 bp, Mus musculus
  siRNA target sequence for LOC239447 (NM_173422.1,25-43).
ctgcttcgaagcaacctat

SEQ ID NO: 568768 - DNA, 19 bp, Mus musculus
  siRNA target sequence for LOC239447 (NM_173422.1,61-79).
gctctcttgcactttcaga

SEQ ID NO: 568769 - DNA, 19 bp, Mus musculus
  siRNA target sequence for LOC239447 (NM_173422.1,82-100).
ctgggtctggatgttgata

SEQ ID NO: 568770 - DNA, 19 bp, Mus musculus
  siRNA target sequence for LOC239447 (NM_173422.1,120-138).
ctgtgccacacataccatt

SEQ ID NO: 568771 - DNA, 19 bp, Mus musculus
  siRNA target sequence for LOC239447 (NM_173422.1,252-270).
gggagcccagggtaatatt

SEQ ID NO: 568772 - DNA, 19 bp, Mus musculus
  siRNA target sequence for LOC239447 (NM_173422.1,392-410).
gacaactggatattagtgt

SEQ ID NO: 568773 - DNA, 19 bp, Mus musculus
  siRNA target sequence for LOC239447 (NM_173422.1,409-427).
gttgctcgtcttaagacat

SEQ ID NO: 568774 - DNA, 19 bp, Mus musculus
  siRNA target sequence for LOC239447 (NM_173422.1,413-431).
ctcgtcttaagacatcaat

SEQ ID NO: 568775 - DNA, 19 bp, Mus musculus
  siRNA target sequence for LOC239447 (NM_173422.1,416-434).
gtcttaagacatcaatgaa

SEQ ID NO: 568776 - DNA, 19 bp, Mus musculus
  siRNA target sequence for LOC239447 (NM_173422.1,472-490).
gaagagaaattctactaca

SEQ ID NO: 568777 - DNA, 19 bp, Mus musculus
  siRNA target sequence for LOC239447 (NM_173422.1,576-594).
cgttaacacccttattgct

SEQ ID NO: 568778 - DNA, 19 bp, Mus musculus
  siRNA target sequence for LOC239447 (NM_173422.1,582-600).
cacccttattgctgactat

SEQ ID NO: 568779 - DNA, 19 bp, Mus musculus
  siRNA target sequence for LOC239447 (NM_173422.1,584-602).
cccttattgctgactatgt

SEQ ID NO: 568780 - DNA, 19 bp, Mus musculus
  siRNA target sequence for LOC239447 (NM_173422.1,785-803).
cagagtgtcaccttaccat

SEQ ID NO: 568781 - DNA, 19 bp, Mus musculus
  siRNA target sequence for LOC239447 (NM_173422.1,791-809).
gtcaccttaccatgtattt

SEQ ID NO: 568782 - DNA, 19 bp, Mus musculus
  siRNA target sequence for Ly6g5c (NM_148947.1,282-300).
gaacagcagcggttttaat

SEQ ID NO: 568783 - DNA, 19 bp, Mus musculus
  siRNA target sequence for Ly6g5c (NM_148947.1,287-305).
gcagcggttttaatgtcat

SEQ ID NO: 568784 - DNA, 19 bp, Mus musculus
  siRNA target sequence for Ly6g5c (NM_148947.1,328-346).
gagcagatggtccattgtt

SEQ ID NO: 568785 - DNA, 19 bp, Mus musculus
  siRNA target sequence for Ly6g5c (NM_148947.1,333-351).
gatggtccattgttcatat

SEQ ID NO: 568786 - DNA, 19 bp, Mus musculus
  siRNA target sequence for Ly6g5c (NM_148947.1,421-439).
ccggacaacagaaagaata

SEQ ID NO: 568787 - DNA, 19 bp, Mus musculus
  siRNA target sequence for Ly75 (NM_013825.1,123-141).
gctcaggtaatgatccatt

SEQ ID NO: 568788 - DNA, 19 bp, Mus musculus
  siRNA target sequence for Ly75 (NM_013825.1,145-163).
catcgtccatgaaaacact

SEQ ID NO: 568789 - DNA, 19 bp, Mus musculus
  siRNA target sequence for Ly75 (NM_013825.1,206-224).
gactgtagcggaactaaca

SEQ ID NO: 568790 - DNA, 19 bp, Mus musculus
  siRNA target sequence for Ly75 (NM_013825.1,210-228).
gtagcggaactaacaacat

SEQ ID NO: 568791 - DNA, 19 bp, Mus musculus
  siRNA target sequence for Ly75 (NM_013825.1,213-231).
gcggaactaacaacatgtt

SEQ ID NO: 568792 - DNA, 19 bp, Mus musculus
  siRNA target sequence for Ly75 (NM_013825.1,280-298).
gtgcctcggcctcgatatt

SEQ ID NO: 568793 - DNA, 19 bp, Mus musculus
  siRNA target sequence for Ly75 (NM_013825.1,284-302).
ctcggcctcgatattacca

SEQ ID NO: 568794 - DNA, 19 bp, Mus musculus
  siRNA target sequence for Ly75 (NM_013825.1,286-304).
cggcctcgatattaccaaa

SEQ ID NO: 568795 - DNA, 19 bp, Mus musculus
  siRNA target sequence for Ly75 (NM_013825.1,309-327).
cggacaacctgcgaatgtt

SEQ ID NO: 568796 - DNA, 19 bp, Mus musculus
  siRNA target sequence for Ly75 (NM_013825.1,311-329).
gacaacctgcgaatgttca

SEQ ID NO: 568797 - DNA, 19 bp, Mus musculus
  siRNA target sequence for Ly75 (NM_013825.1,422-440).
gccgtagccaatacgaata

SEQ ID NO: 568798 - DNA, 19 bp, Mus musculus
  siRNA target sequence for Ly75 (NM_013825.1,424-442).
cgtagccaatacgaataca

SEQ ID NO: 568799 - DNA, 19 bp, Mus musculus
  siRNA target sequence for Ly75 (NM_013825.1,425-443).
gtagccaatacgaatacat

SEQ ID NO: 568800 - DNA, 19 bp, Mus musculus
  siRNA target sequence for Ly75 (NM_013825.1,462-480).
gaggctccgaggaaaacct

SEQ ID NO: 568801 - DNA, 19 bp, Mus musculus
  siRNA target sequence for Ly75 (NM_013825.1,464-482).
ggctccgaggaaaaccttt

SEQ ID NO: 568802 - DNA, 19 bp, Mus musculus
  siRNA target sequence for Ly75 (NM_013825.1,487-505).
ccagccttatcatgagata

SEQ ID NO: 568803 - DNA, 19 bp, Mus musculus
  siRNA target sequence for Ly75 (NM_013825.1,491-509).
ccttatcatgagatataca

SEQ ID NO: 568804 - DNA, 19 bp, Mus musculus
  siRNA target sequence for Ly75 (NM_013825.1,526-544).
ctacgggagaccttgtgaa

SEQ ID NO: 568805 - DNA, 19 bp, Mus musculus
  siRNA target sequence for Ly75 (NM_013825.1,580-598).
ctgcattcatgatgaagat

SEQ ID NO: 568806 - DNA, 19 bp, Mus musculus
  siRNA target sequence for Ly75 (NM_013825.1,615-633).
gtgccactaccctaagtta

SEQ ID NO: 568807 - DNA, 19 bp, Mus musculus
  siRNA target sequence for Ly75 (NM_013825.1,618-636).
ccactaccctaagttatga

SEQ ID NO: 568808 - DNA, 19 bp, Mus musculus
  siRNA target sequence for Ly75 (NM_013825.1,619-637).
cactaccctaagttatgaa

SEQ ID NO: 568809 - DNA, 19 bp, Mus musculus
  siRNA target sequence for Ly75 (NM_013825.1,624-642).
ccctaagttatgaatatga

SEQ ID NO: 568810 - DNA, 19 bp, Mus musculus
  siRNA target sequence for Ly75 (NM_013825.1,625-643).
cctaagttatgaatatgat

SEQ ID NO: 568811 - DNA, 19 bp, Mus musculus
  siRNA target sequence for Ly75 (NM_013825.1,683-701).
gaaggtaactgggaaaaga

SEQ ID NO: 568812 - DNA, 19 bp, Mus musculus
  siRNA target sequence for Ly75 (NM_013825.1,720-738).
gctaccaatttaataatca

SEQ ID NO: 568813 - DNA, 19 bp, Mus musculus
  siRNA target sequence for Ly75 (NM_013825.1,805-823).
ccacagtgctgccgaatta

SEQ ID NO: 568814 - DNA, 19 bp, Mus musculus
  siRNA target sequence for Ly75 (NM_013825.1,815-833).
gccgaattagcctacatta

SEQ ID NO: 568815 - DNA, 19 bp, Mus musculus
  siRNA target sequence for Ly75 (NM_013825.1,911-929).
gacttcaggccactcaaat

SEQ ID NO: 568816 - DNA, 19 bp, Mus musculus
  siRNA target sequence for Ly75 (NM_013825.1,952-970).
gcccgttgcacctgtgatt

SEQ ID NO: 568817 - DNA, 19 bp, Mus musculus
  siRNA target sequence for Ly75 (NM_013825.1,1007-1025).
gggctgtggcaaagtgttt

SEQ ID NO: 568818 - DNA, 19 bp, Mus musculus
  siRNA target sequence for Ly75 (NM_013825.1,1091-1109).
gtttggacttacacagata

SEQ ID NO: 568819 - DNA, 19 bp, Mus musculus
  siRNA target sequence for Ly75 (NM_013825.1,1121-1139).
gtgggctggctgccaaata

SEQ ID NO: 568820 - DNA, 19 bp, Mus musculus
  siRNA target sequence for Ly75 (NM_013825.1,1123-1141).
gggctggctgccaaataat

SEQ ID NO: 568821 - DNA, 19 bp, Mus musculus
  siRNA target sequence for Ly75 (NM_013825.1,1133-1151).
ccaaataatgggttttgct

SEQ ID NO: 568822 - DNA, 19 bp, Mus musculus
  siRNA target sequence for Ly75 (NM_013825.1,1134-1152).
caaataatgggttttgcta

SEQ ID NO: 568823 - DNA, 19 bp, Mus musculus
  siRNA target sequence for Ly75 (NM_013825.1,1150-1168).
ctatctgctggcgaatgaa

SEQ ID NO: 568824 - DNA, 19 bp, Mus musculus
  siRNA target sequence for Ly75 (NM_013825.1,1345-1363).
ggacggaacggaagttact

SEQ ID NO: 568825 - DNA, 19 bp, Mus musculus
  siRNA target sequence for Ly75 (NM_013825.1,1348-1366).
cggaacggaagttactcta

SEQ ID NO: 568826 - DNA, 19 bp, Mus musculus
  siRNA target sequence for Ly75 (NM_013825.1,1349-1367).
ggaacggaagttactctaa

SEQ ID NO: 568827 - DNA, 19 bp, Mus musculus
  siRNA target sequence for Ly75 (NM_013825.1,1353-1371).
cggaagttactctaacgta

SEQ ID NO: 568828 - DNA, 19 bp, Mus musculus
  siRNA target sequence for Ly75 (NM_013825.1,1364-1382).
ctaacgtactggaatgaga

SEQ ID NO: 568829 - DNA, 19 bp, Mus musculus
  siRNA target sequence for Ly75 (NM_013825.1,1368-1386).
cgtactggaatgagaatga

SEQ ID NO: 568830 - DNA, 19 bp, Mus musculus
  siRNA target sequence for Ly75 (NM_013825.1,1389-1407).
cgagtgttcccttcaacaa

SEQ ID NO: 568831 - DNA, 19 bp, Mus musculus
  siRNA target sequence for Ly75 (NM_013825.1,1410-1428).
ctcccaactgtgtttccta

SEQ ID NO: 568832 - DNA, 19 bp, Mus musculus
  siRNA target sequence for Ly75 (NM_013825.1,1417-1435).
ctgtgtttcctatttagga

SEQ ID NO: 568833 - DNA, 19 bp, Mus musculus
  siRNA target sequence for Ly75 (NM_013825.1,1468-1486).
gaagaaactcagatatgta

SEQ ID NO: 568834 - DNA, 19 bp, Mus musculus
  siRNA target sequence for Ly75 (NM_013825.1,1562-1580).
catggagaaacctgttaca

SEQ ID NO: 568835 - DNA, 19 bp, Mus musculus
  siRNA target sequence for Ly75 (NM_013825.1,1568-1586).
gaaacctgttacaagattt

SEQ ID NO: 568836 - DNA, 19 bp, Mus musculus
  siRNA target sequence for Ly75 (NM_013825.1,1635-1653).
gcaggttcgagcaggaatt

SEQ ID NO: 568837 - DNA, 19 bp, Mus musculus
  siRNA target sequence for Ly75 (NM_013825.1,1638-1656).
ggttcgagcaggaattctt

SEQ ID NO: 568838 - DNA, 19 bp, Mus musculus
  siRNA target sequence for Ly75 (NM_013825.1,1724-1742).
gactctcgaggagaataca

SEQ ID NO: 568839 - DNA, 19 bp, Mus musculus
  siRNA target sequence for Ly75 (NM_013825.1,1819-1837).
cgggtgcgtggctatgtct

SEQ ID NO: 568840 - DNA, 19 bp, Mus musculus
  siRNA target sequence for Ly75 (NM_013825.1,1820-1838).
gggtgcgtggctatgtcta

SEQ ID NO: 568841 - DNA, 19 bp, Mus musculus
  siRNA target sequence for Ly75 (NM_013825.1,1881-1899).
gcttccgtgctctttcaat

SEQ ID NO: 568842 - DNA, 19 bp, Mus musculus
  siRNA target sequence for Ly75 (NM_013825.1,1882-1900).
cttccgtgctctttcaata

SEQ ID NO: 568843 - DNA, 19 bp, Mus musculus
  siRNA target sequence for Ly75 (NM_013825.1,1886-1904).
cgtgctctttcaatatgca

SEQ ID NO: 568844 - DNA, 19 bp, Mus musculus
  siRNA target sequence for Ly75 (NM_013825.1,1887-1905).
gtgctctttcaatatgcaa

SEQ ID NO: 568845 - DNA, 19 bp, Mus musculus
  siRNA target sequence for Ly75 (NM_013825.1,2001-2019).
gttataaggtgttccatat

SEQ ID NO: 568846 - DNA, 19 bp, Mus musculus
  siRNA target sequence for Ly75 (NM_013825.1,2014-2032).
ccatatagaaagaatcgta

SEQ ID NO: 568847 - DNA, 19 bp, Mus musculus
  siRNA target sequence for Ly75 (NM_013825.1,2015-2033).
catatagaaagaatcgtaa

SEQ ID NO: 568848 - DNA, 19 bp, Mus musculus
  siRNA target sequence for Ly75 (NM_013825.1,2046-2064).
gggaagaagccgaaaggtt

SEQ ID NO: 568849 - DNA, 19 bp, Mus musculus
  siRNA target sequence for Ly75 (NM_013825.1,2098-2116).
cagtcgtagagaggaaatt

SEQ ID NO: 568850 - DNA, 19 bp, Mus musculus
  siRNA target sequence for Ly75 (NM_013825.1,2100-2118).
gtcgtagagaggaaattaa

SEQ ID NO: 568851 - DNA, 19 bp, Mus musculus
  siRNA target sequence for Ly75 (NM_013825.1,2103-2121).
gtagagaggaaattaagga

SEQ ID NO: 568852 - DNA, 19 bp, Mus musculus
  siRNA target sequence for Ly75 (NM_013825.1,2164-2182).
gttgtggattggtctgaat

SEQ ID NO: 568853 - DNA, 19 bp, Mus musculus
  siRNA target sequence for Ly75 (NM_013825.1,2170-2188).
gattggtctgaataagaga

SEQ ID NO: 568854 - DNA, 19 bp, Mus musculus
  siRNA target sequence for Ly75 (NM_013825.1,2248-2266).
gatggagccggagtttcaa

SEQ ID NO: 568855 - DNA, 19 bp, Mus musculus
  siRNA target sequence for Ly75 (NM_013825.1,2322-2340).
gaagagtctggcatctcta

SEQ ID NO: 568856 - DNA, 19 bp, Mus musculus
  siRNA target sequence for Ly75 (NM_013825.1,2365-2383).
gaaaccttttgcttgtgat

SEQ ID NO: 568857 - DNA, 19 bp, Mus musculus
  siRNA target sequence for Ly75 (NM_013825.1,2397-2415).
gggtgtgccagattccaaa

SEQ ID NO: 568858 - DNA, 19 bp, Mus musculus
  siRNA target sequence for Ly75 (NM_013825.1,2398-2416).
ggtgtgccagattccaaaa

SEQ ID NO: 568859 - DNA, 19 bp, Mus musculus
  siRNA target sequence for Ly75 (NM_013825.1,2401-2419).
gtgccagattccaaaaggt

SEQ ID NO: 568860 - DNA, 19 bp, Mus musculus
  siRNA target sequence for Ly75 (NM_013825.1,2429-2447).
cagatgccagactggtata

SEQ ID NO: 568861 - DNA, 19 bp, Mus musculus
  siRNA target sequence for Ly75 (NM_013825.1,2431-2449).
gatgccagactggtataat

SEQ ID NO: 568862 - DNA, 19 bp, Mus musculus
  siRNA target sequence for Ly75 (NM_013825.1,2434-2452).
gccagactggtataatcca

SEQ ID NO: 568863 - DNA, 19 bp, Mus musculus
  siRNA target sequence for Ly75 (NM_013825.1,2510-2528).
gttgctgatccccacttaa

SEQ ID NO: 568864 - DNA, 19 bp, Mus musculus
  siRNA target sequence for Ly75 (NM_013825.1,2513-2531).
gctgatccccacttaaact

SEQ ID NO: 568865 - DNA, 19 bp, Mus musculus
  siRNA target sequence for Ly75 (NM_013825.1,2514-2532).
ctgatccccacttaaacta

SEQ ID NO: 568866 - DNA, 19 bp, Mus musculus
  siRNA target sequence for Ly75 (NM_013825.1,2534-2552).
gaagaagccgtcttatact

SEQ ID NO: 568867 - DNA, 19 bp, Mus musculus
  siRNA target sequence for Ly75 (NM_013825.1,2545-2563).
cttatactgtgctagcaat

SEQ ID NO: 568868 - DNA, 19 bp, Mus musculus
  siRNA target sequence for Ly75 (NM_013825.1,2569-2587).
ctttcttgccacgataaca

SEQ ID NO: 568869 - DNA, 19 bp, Mus musculus
  siRNA target sequence for Ly75 (NM_013825.1,2586-2604).
catcgttcacaggactaaa

SEQ ID NO: 568870 - DNA, 19 bp, Mus musculus
  siRNA target sequence for Ly75 (NM_013825.1,2590-2608).
gttcacaggactaaaagct

SEQ ID NO: 568871 - DNA, 19 bp, Mus musculus
  siRNA target sequence for Ly75 (NM_013825.1,2597-2615).
ggactaaaagctatcaaaa

SEQ ID NO: 568872 - DNA, 19 bp, Mus musculus
  siRNA target sequence for Ly75 (NM_013825.1,2664-2682).
cgagtgagaatccaattga

SEQ ID NO: 568873 - DNA, 19 bp, Mus musculus
  siRNA target sequence for Ly75 (NM_013825.1,2665-2683).
gagtgagaatccaattgat

SEQ ID NO: 568874 - DNA, 19 bp, Mus musculus
  siRNA target sequence for Ly75 (NM_013825.1,2676-2694).
caattgatcgttactttct

SEQ ID NO: 568875 - DNA, 19 bp, Mus musculus
  siRNA target sequence for Ly75 (NM_013825.1,2767-2785).
gacgtggcttgttgactta

SEQ ID NO: 568876 - DNA, 19 bp, Mus musculus
  siRNA target sequence for Ly75 (NM_013825.1,2770-2788).
gtggcttgttgacttaagt

SEQ ID NO: 568877 - DNA, 19 bp, Mus musculus
  siRNA target sequence for Ly75 (NM_013825.1,2772-2790).
ggcttgttgacttaagtaa

SEQ ID NO: 568878 - DNA, 19 bp, Mus musculus
  siRNA target sequence for Ly75 (NM_013825.1,2787-2805).
gtaaacgagcggactgtaa

SEQ ID NO: 568879 - DNA, 19 bp, Mus musculus
  siRNA target sequence for Ly75 (NM_013825.1,2807-2825).
gccaagttgcccttcatct

SEQ ID NO: 568880 - DNA, 19 bp, Mus musculus
  siRNA target sequence for Ly75 (NM_013825.1,2832-2850).
gatacaatgtctcttcatt

SEQ ID NO: 568881 - DNA, 19 bp, Mus musculus
  siRNA target sequence for Ly75 (NM_013825.1,2892-2910).
ctgagaagtggattccttt

SEQ ID NO: 568882 - DNA, 19 bp, Mus musculus
  siRNA target sequence for Ly75 (NM_013825.1,2963-2981).
gcaagcggcatttgtcatt

SEQ ID NO: 568883 - DNA, 19 bp, Mus musculus
  siRNA target sequence for Ly75 (NM_013825.1,3050-3068).
gaaatggaagctagtctat

SEQ ID NO: 568884 - DNA, 19 bp, Mus musculus
  siRNA target sequence for Ly75 (NM_013825.1,3080-3098).
cgctggactgcctacgaaa

SEQ ID NO: 568885 - DNA, 19 bp, Mus musculus
  siRNA target sequence for Ly75 (NM_013825.1,3084-3102).
ggactgcctacgaaaggat

SEQ ID NO: 568886 - DNA, 19 bp, Mus musculus
  siRNA target sequence for Ly75 (NM_013825.1,3085-3103).
gactgcctacgaaaggata

SEQ ID NO: 568887 - DNA, 19 bp, Mus musculus
  siRNA target sequence for Ly75 (NM_013825.1,3087-3105).
ctgcctacgaaaggataaa

SEQ ID NO: 568888 - DNA, 19 bp, Mus musculus
  siRNA target sequence for Ly75 (NM_013825.1,3089-3107).
gcctacgaaaggataaaca

SEQ ID NO: 568889 - DNA, 19 bp, Mus musculus
  siRNA target sequence for Ly75 (NM_013825.1,3091-3109).
ctacgaaaggataaacaga

SEQ ID NO: 568890 - DNA, 19 bp, Mus musculus
  siRNA target sequence for Ly75 (NM_013825.1,3164-3182).
cggaggctgagcataccaa

SEQ ID NO: 568891 - DNA, 19 bp, Mus musculus
  siRNA target sequence for Ly75 (NM_013825.1,3169-3187).
gctgagcataccaacgaat

SEQ ID NO: 568892 - DNA, 19 bp, Mus musculus
  siRNA target sequence for Ly75 (NM_013825.1,3170-3188).
ctgagcataccaacgaatt

SEQ ID NO: 568893 - DNA, 19 bp, Mus musculus
  siRNA target sequence for Ly75 (NM_013825.1,3180-3198).
caacgaatttctttgatga

SEQ ID NO: 568894 - DNA, 19 bp, Mus musculus
  siRNA target sequence for Ly75 (NM_013825.1,3208-3226).
cttccactgcgccttgatt

SEQ ID NO: 568895 - DNA, 19 bp, Mus musculus
  siRNA target sequence for Ly75 (NM_013825.1,3211-3229).
ccactgcgccttgattctt

SEQ ID NO: 568896 - DNA, 19 bp, Mus musculus
  siRNA target sequence for Ly75 (NM_013825.1,3212-3230).
cactgcgccttgattctta

SEQ ID NO: 568897 - DNA, 19 bp, Mus musculus
  siRNA target sequence for Ly75 (NM_013825.1,3214-3232).
ctgcgccttgattcttaat

SEQ ID NO: 568898 - DNA, 19 bp, Mus musculus
  siRNA target sequence for Ly75 (NM_013825.1,3357-3375).
cagtgaagtatctaaataa

SEQ ID NO: 568899 - DNA, 19 bp, Mus musculus
  siRNA target sequence for Ly75 (NM_013825.1,3361-3379).
gaagtatctaaataaccta

SEQ ID NO: 568900 - DNA, 19 bp, Mus musculus
  siRNA target sequence for Ly75 (NM_013825.1,3368-3386).
ctaaataacctatacaaaa

SEQ ID NO: 568901 - DNA, 19 bp, Mus musculus
  siRNA target sequence for Ly75 (NM_013825.1,3526-3544).
cggactctccagtcaagat

SEQ ID NO: 568902 - DNA, 19 bp, Mus musculus
  siRNA target sequence for Ly75 (NM_013825.1,3528-3546).
gactctccagtcaagatga

SEQ ID NO: 568903 - DNA, 19 bp, Mus musculus
  siRNA target sequence for Ly75 (NM_013825.1,3537-3555).
gtcaagatgatgaactcaa

SEQ ID NO: 568904 - DNA, 19 bp, Mus musculus
  siRNA target sequence for Ly75 (NM_013825.1,3545-3563).
gatgaactcaactttggtt

SEQ ID NO: 568905 - DNA, 19 bp, Mus musculus
  siRNA target sequence for Ly75 (NM_013825.1,3572-3590).
gggaaacgtcttcaattta

SEQ ID NO: 568906 - DNA, 19 bp, Mus musculus
  siRNA target sequence for Ly75 (NM_013825.1,3574-3592).
gaaacgtcttcaatttagt

SEQ ID NO: 568907 - DNA, 19 bp, Mus musculus
  siRNA target sequence for Ly75 (NM_013825.1,3603-3621).
gaagcaatgagcaacttga

SEQ ID NO: 568908 - DNA, 19 bp, Mus musculus
  siRNA target sequence for Ly75 (NM_013825.1,3606-3624).
gcaatgagcaacttgatga

SEQ ID NO: 568909 - DNA, 19 bp, Mus musculus
  siRNA target sequence for Ly75 (NM_013825.1,3617-3635).
cttgatgactgcgtgatat

SEQ ID NO: 568910 - DNA, 19 bp, Mus musculus
  siRNA target sequence for Ly75 (NM_013825.1,3623-3641).
gactgcgtgatattagaca

SEQ ID NO: 568911 - DNA, 19 bp, Mus musculus
  siRNA target sequence for Ly75 (NM_013825.1,3790-3808).
ccagaactcctgctacaat

SEQ ID NO: 568912 - DNA, 19 bp, Mus musculus
  siRNA target sequence for Ly75 (NM_013825.1,3791-3809).
cagaactcctgctacaatt

SEQ ID NO: 568913 - DNA, 19 bp, Mus musculus
  siRNA target sequence for Ly75 (NM_013825.1,3798-3816).
cctgctacaatttcatgat

SEQ ID NO: 568914 - DNA, 19 bp, Mus musculus
  siRNA target sequence for Ly75 (NM_013825.1,3799-3817).
ctgctacaatttcatgatt

SEQ ID NO: 568915 - DNA, 19 bp, Mus musculus
  siRNA target sequence for Ly75 (NM_013825.1,3941-3959).
cttctgtacttcaattata

SEQ ID NO: 568916 - DNA, 19 bp, Mus musculus
  siRNA target sequence for Ly75 (NM_013825.1,3966-3984).
catgggtcatgttaggaat

SEQ ID NO: 568917 - DNA, 19 bp, Mus musculus
  siRNA target sequence for Ly75 (NM_013825.1,3971-3989).
gtcatgttaggaataacct

SEQ ID NO: 568918 - DNA, 19 bp, Mus musculus
  siRNA target sequence for Ly75 (NM_013825.1,3973-3991).
catgttaggaataacctat

SEQ ID NO: 568919 - DNA, 19 bp, Mus musculus
  siRNA target sequence for Ly75 (NM_013825.1,3976-3994).
gttaggaataacctatgaa

SEQ ID NO: 568920 - DNA, 19 bp, Mus musculus
  siRNA target sequence for Ly75 (NM_013825.1,3980-3998).
ggaataacctatgaaaaca

SEQ ID NO: 568921 - DNA, 19 bp, Mus musculus
  siRNA target sequence for Ly75 (NM_013825.1,3981-3999).
gaataacctatgaaaacaa

SEQ ID NO: 568922 - DNA, 19 bp, Mus musculus
  siRNA target sequence for Ly75 (NM_013825.1,4084-4102).
ggctggtctaagtactgat

SEQ ID NO: 568923 - DNA, 19 bp, Mus musculus
  siRNA target sequence for Ly75 (NM_013825.1,4193-4211).
gactatgaggacaaacaca

SEQ ID NO: 568924 - DNA, 19 bp, Mus musculus
  siRNA target sequence for Ly75 (NM_013825.1,4246-4264).
cggcgtctacagcgttatt

SEQ ID NO: 568925 - DNA, 19 bp, Mus musculus
  siRNA target sequence for Ly75 (NM_013825.1,4248-4266).
gcgtctacagcgttattca

SEQ ID NO: 568926 - DNA, 19 bp, Mus musculus
  siRNA target sequence for Ly75 (NM_013825.1,4250-4268).
gtctacagcgttattcaga

SEQ ID NO: 568927 - DNA, 19 bp, Mus musculus
  siRNA target sequence for Ly75 (NM_013825.1,4278-4296).
cgtggtatgaagcattgaa

SEQ ID NO: 568928 - DNA, 19 bp, Mus musculus
  siRNA target sequence for Ly75 (NM_013825.1,4294-4312).
gaacgcgtgctctcaaagt

SEQ ID NO: 568929 - DNA, 19 bp, Mus musculus
  siRNA target sequence for Ly75 (NM_013825.1,4396-4414).
ggttgggctctcaagtcat

SEQ ID NO: 568930 - DNA, 19 bp, Mus musculus
  siRNA target sequence for Ly75 (NM_013825.1,4441-4459).
gtccgatggcagagcattt

SEQ ID NO: 568931 - DNA, 19 bp, Mus musculus
  siRNA target sequence for Ly75 (NM_013825.1,4493-4511).
ggagactgtgtcgtcttat

SEQ ID NO: 568932 - DNA, 19 bp, Mus musculus
  siRNA target sequence for Ly75 (NM_013825.1,4494-4512).
gagactgtgtcgtcttata

SEQ ID NO: 568933 - DNA, 19 bp, Mus musculus
  siRNA target sequence for Ly75 (NM_013825.1,4498-4516).
ctgtgtcgtcttatatcca

SEQ ID NO: 568934 - DNA, 19 bp, Mus musculus
  siRNA target sequence for Ly75 (NM_013825.1,4500-4518).
gtgtcgtcttatatccaaa

SEQ ID NO: 568935 - DNA, 19 bp, Mus musculus
  siRNA target sequence for Ly75 (NM_013825.1,4504-4522).
cgtcttatatccaaaagga

SEQ ID NO: 568936 - DNA, 19 bp, Mus musculus
  siRNA target sequence for Ly75 (NM_013825.1,4507-4525).
cttatatccaaaaggaatt

SEQ ID NO: 568937 - DNA, 19 bp, Mus musculus
  siRNA target sequence for Ly75 (NM_013825.1,4535-4553).
gaaaaatgcctgtctgtta

SEQ ID NO: 568938 - DNA, 19 bp, Mus musculus
  siRNA target sequence for Ly75 (NM_013825.1,4723-4741).
gtgtcaagagcttgatcat

SEQ ID NO: 568939 - DNA, 19 bp, Mus musculus
  siRNA target sequence for Ly75 (NM_013825.1,4810-4828).
ctataatattactatgaga

SEQ ID NO: 568940 - DNA, 19 bp, Mus musculus
  siRNA target sequence for Ly75 (NM_013825.1,4869-4887).
ggagttggctcgatggatt

SEQ ID NO: 568941 - DNA, 19 bp, Mus musculus
  siRNA target sequence for Ly75 (NM_013825.1,4870-4888).
gagttggctcgatggatta

SEQ ID NO: 568942 - DNA, 19 bp, Mus musculus
  siRNA target sequence for Ly75 (NM_013825.1,4875-4893).
ggctcgatggattagatgt

SEQ ID NO: 568943 - DNA, 19 bp, Mus musculus
  siRNA target sequence for Ly75 (NM_013825.1,4925-4943).
gatggtgatgggaaatgta

SEQ ID NO: 568944 - DNA, 19 bp, Mus musculus
  siRNA target sequence for Ly75 (NM_013825.1,5140-5158).
ctcctcggttcggtatgaa

SEQ ID NO: 568945 - DNA, 19 bp, Mus musculus
  siRNA target sequence for Ly75 (NM_013825.1,5142-5160).
cctcggttcggtatgaaca

SEQ ID NO: 568946 - DNA, 19 bp, Mus musculus
  siRNA target sequence for Ly75 (NM_013825.1,5143-5161).
ctcggttcggtatgaacat

SEQ ID NO: 568947 - DNA, 19 bp, Mus musculus
  siRNA target sequence for Mag (NM_010758.1,167-185).
ccctgccgctgttttggat

SEQ ID NO: 568948 - DNA, 19 bp, Mus musculus
  siRNA target sequence for Mag (NM_010758.1,168-186).
cctgccgctgttttggata

SEQ ID NO: 568949 - DNA, 19 bp, Mus musculus
  siRNA target sequence for Mag (NM_010758.1,169-187).
ctgccgctgttttggataa

SEQ ID NO: 568950 - DNA, 19 bp, Mus musculus
  siRNA target sequence for Mag (NM_010758.1,172-190).
ccgctgttttggataatga

SEQ ID NO: 568951 - DNA, 19 bp, Mus musculus
  siRNA target sequence for Mag (NM_010758.1,173-191).
cgctgttttggataatgat

SEQ ID NO: 568952 - DNA, 19 bp, Mus musculus
  siRNA target sequence for Mag (NM_010758.1,177-195).
gttttggataatgatttca

SEQ ID NO: 568953 - DNA, 19 bp, Mus musculus
  siRNA target sequence for Mag (NM_010758.1,321-339).
cgtctggtatttcaatagt

SEQ ID NO: 568954 - DNA, 19 bp, Mus musculus
  siRNA target sequence for Mag (NM_010758.1,338-356).
gtccctaccccaagaacta

SEQ ID NO: 568955 - DNA, 19 bp, Mus musculus
  siRNA target sequence for Mag (NM_010758.1,428-446).
gagacctgggcctacgaaa

SEQ ID NO: 568956 - DNA, 19 bp, Mus musculus
  siRNA target sequence for Mag (NM_010758.1,432-450).
cctgggcctacgaaactgt

SEQ ID NO: 568957 - DNA, 19 bp, Mus musculus
  siRNA target sequence for Mag (NM_010758.1,433-451).
ctgggcctacgaaactgta

SEQ ID NO: 568958 - DNA, 19 bp, Mus musculus
  siRNA target sequence for Mag (NM_010758.1,476-494).
ccgagctgggaggcaaata

SEQ ID NO: 568959 - DNA, 19 bp, Mus musculus
  siRNA target sequence for Mag (NM_010758.1,481-499).
ctgggaggcaaatactatt

SEQ ID NO: 568960 - DNA, 19 bp, Mus musculus
  siRNA target sequence for Mag (NM_010758.1,561-579).
cgtcaacacccccaacatt

SEQ ID NO: 568961 - DNA, 19 bp, Mus musculus
  siRNA target sequence for Mag (NM_010758.1,858-876).
caagtaccccccagtgatt

SEQ ID NO: 568962 - DNA, 19 bp, Mus musculus
  siRNA target sequence for Mag (NM_010758.1,1045-1063).
gaggacggcgtctatgctt

SEQ ID NO: 568963 - DNA, 19 bp, Mus musculus
  siRNA target sequence for Mag (NM_010758.1,1380-1398).
gtttgcccccataatcctt

SEQ ID NO: 568964 - DNA, 19 bp, Mus musculus
  siRNA target sequence for Mag (NM_010758.1,1428-1446).
caccgtgcagtgtctatgt

SEQ ID NO: 568965 - DNA, 19 bp, Mus musculus
  siRNA target sequence for Mag (NM_010758.1,1494-1512).
ccgcaacgtgactgtgaat

SEQ ID NO: 568966 - DNA, 19 bp, Mus musculus
  siRNA target sequence for Mag (NM_010758.1,1517-1535).
cggagagggagtttgtgta

SEQ ID NO: 568967 - DNA, 19 bp, Mus musculus
  siRNA target sequence for Mag (NM_010758.1,1673-1691).
gactgatgtgggccaaaat

SEQ ID NO: 568968 - DNA, 19 bp, Mus musculus
  siRNA target sequence for Mag (NM_010758.1,1819-1837).
ctgtacagccccgaattca

SEQ ID NO: 568969 - DNA, 19 bp, Mus musculus
  siRNA target sequence for Mag (NM_010758.1,1821-1839).
gtacagccccgaattcaga

SEQ ID NO: 568970 - DNA, 19 bp, Mus musculus
  siRNA target sequence for Mag (NM_010758.1,1827-1845).
ccccgaattcagaatctct

SEQ ID NO: 568971 - DNA, 19 bp, Mus musculus
  siRNA target sequence for Mgl2 (NM_145137.1,64-82).
caatgagatatgaaaactt

SEQ ID NO: 568972 - DNA, 19 bp, Mus musculus
  siRNA target sequence for Mgl2 (NM_145137.1,852-870).
gacaaaggtttcaagaatt

SEQ ID NO: 568973 - DNA, 19 bp, Mus musculus
  siRNA target sequence for Mgl2 (NM_145137.1,968-986).
ctgccagaggcattaccat

SEQ ID NO: 568974 - DNA, 19 bp, Mus musculus
  siRNA target sequence for Mgl2 (NM_145137.1,983-1001).
ccattggatctgtgaaaca

SEQ ID NO: 568975 - DNA, 19 bp, Mus musculus
  siRNA target sequence for Mgl2 (NM_145137.1,1023-1041).
gcccactccccacaactta

SEQ ID NO: 568976 - DNA, 19 bp, Mus musculus
  siRNA target sequence for Mgl2 (NM_145137.1,1024-1042).
cccactccccacaacttat

SEQ ID NO: 568977 - DNA, 19 bp, Mus musculus
  siRNA target sequence for Mrc2 (NM_008626.1,223-241).
ctgatgtcttcctcatctt

SEQ ID NO: 568978 - DNA, 19 bp, Mus musculus
  siRNA target sequence for Mrc2 (NM_008626.1,343-361).
cccggaaccgactcttcaa

SEQ ID NO: 568979 - DNA, 19 bp, Mus musculus
  siRNA target sequence for Mrc2 (NM_008626.1,504-522).
gggggctcgtgcaagcaat

SEQ ID NO: 568980 - DNA, 19 bp, Mus musculus
  siRNA target sequence for Mrc2 (NM_008626.1,508-526).
gctcgtgcaagcaatgcat

SEQ ID NO: 568981 - DNA, 19 bp, Mus musculus
  siRNA target sequence for Mrc2 (NM_008626.1,565-583).
gtggccattggaacatcta

SEQ ID NO: 568982 - DNA, 19 bp, Mus musculus
  siRNA target sequence for Mrc2 (NM_008626.1,604-622).
gtgctcgaccttactatga

SEQ ID NO: 568983 - DNA, 19 bp, Mus musculus
  siRNA target sequence for Mrc2 (NM_008626.1,629-647).
caccatccagggaaactca

SEQ ID NO: 568984 - DNA, 19 bp, Mus musculus
  siRNA target sequence for Mrc2 (NM_008626.1,661-679).
gcactatccccttcaaata

SEQ ID NO: 568985 - DNA, 19 bp, Mus musculus
  siRNA target sequence for Mrc2 (NM_008626.1,749-767).
ccaggactacggcaaagat

SEQ ID NO: 568986 - DNA, 19 bp, Mus musculus
  siRNA target sequence for Mrc2 (NM_008626.1,910-928).
gtgcagacttgctgagtat

SEQ ID NO: 568987 - DNA, 19 bp, Mus musculus
  siRNA target sequence for Mrc2 (NM_008626.1,977-995).
cagctccacgctatggatt

SEQ ID NO: 568988 - DNA, 19 bp, Mus musculus
  siRNA target sequence for Mrc2 (NM_008626.1,1157-1175).
catcgccctgccctatgtt

SEQ ID NO: 568989 - DNA, 19 bp, Mus musculus
  siRNA target sequence for Mrc2 (NM_008626.1,1218-1236).
gaccggtggaccaatgtca

SEQ ID NO: 568990 - DNA, 19 bp, Mus musculus
  siRNA target sequence for Mrc2 (NM_008626.1,1505-1523).
ctttgagcccaacaacttt

SEQ ID NO: 568991 - DNA, 19 bp, Mus musculus
  siRNA target sequence for Mrc2 (NM_008626.1,1708-1726).
gagaggaccaagtgatcta

SEQ ID NO: 568992 - DNA, 19 bp, Mus musculus
  siRNA target sequence for Mrc2 (NM_008626.1,1851-1869).
ctgcaagacctcaacagta

SEQ ID NO: 568993 - DNA, 19 bp, Mus musculus
  siRNA target sequence for Mrc2 (NM_008626.1,1889-1907).
cagtggggatgaagtcata

SEQ ID NO: 568994 - DNA, 19 bp, Mus musculus
  siRNA target sequence for Mrc2 (NM_008626.1,1893-1911).
ggggatgaagtcatatata

SEQ ID NO: 568995 - DNA, 19 bp, Mus musculus
  siRNA target sequence for Mrc2 (NM_008626.1,1904-1922).
catatatacccattggaat

SEQ ID NO: 568996 - DNA, 19 bp, Mus musculus
  siRNA target sequence for Mrc2 (NM_008626.1,2274-2292).
cacatgctcaacaagatct

SEQ ID NO: 568997 - DNA, 19 bp, Mus musculus
  siRNA target sequence for Mrc2 (NM_008626.1,2388-2406).
gacggtctagggttttcct

SEQ ID NO: 568998 - DNA, 19 bp, Mus musculus
  siRNA target sequence for Mrc2 (NM_008626.1,2419-2437).
cccggagccgacatgatga

SEQ ID NO: 568999 - DNA, 19 bp, Mus musculus
  siRNA target sequence for Mrc2 (NM_008626.1,2427-2445).
cgacatgatgacgatgata

SEQ ID NO: 569000 - DNA, 19 bp, Mus musculus
  siRNA target sequence for Mrc2 (NM_008626.1,2428-2446).
gacatgatgacgatgatat

SEQ ID NO: 569001 - DNA, 19 bp, Mus musculus
  siRNA target sequence for Mrc2 (NM_008626.1,2803-2821).
ggtggacagatggttctat

SEQ ID NO: 569002 - DNA, 19 bp, Mus musculus
  siRNA target sequence for Mrc2 (NM_008626.1,2807-2825).
gacagatggttctattata

SEQ ID NO: 569003 - DNA, 19 bp, Mus musculus
  siRNA target sequence for Mrc2 (NM_008626.1,2814-2832).
ggttctattataaacttca

SEQ ID NO: 569004 - DNA, 19 bp, Mus musculus
  siRNA target sequence for Mrc2 (NM_008626.1,2815-2833).
gttctattataaacttcat

SEQ ID NO: 569005 - DNA, 19 bp, Mus musculus
  siRNA target sequence for Mrc2 (NM_008626.1,3191-3209).
gacctttgacctttggatt

SEQ ID NO: 569006 - DNA, 19 bp, Mus musculus
  siRNA target sequence for Mrc2 (NM_008626.1,3233-3251).
cttccagtggattgaacaa

SEQ ID NO: 569007 - DNA, 19 bp, Mus musculus
  siRNA target sequence for Mrc2 (NM_008626.1,3249-3267).
caagaacccctgctctata

SEQ ID NO: 569008 - DNA, 19 bp, Mus musculus
  siRNA target sequence for Mrc2 (NM_008626.1,3527-3545).
gccactgcgctggaaagat

SEQ ID NO: 569009 - DNA, 19 bp, Mus musculus
  siRNA target sequence for Mrc2 (NM_008626.1,3672-3690).
gagggctcacggaggtatt

SEQ ID NO: 569010 - DNA, 19 bp, Mus musculus
  siRNA target sequence for Mrc2 (NM_008626.1,3675-3693).
ggctcacggaggtattcct

SEQ ID NO: 569011 - DNA, 19 bp, Mus musculus
  siRNA target sequence for Mrc2 (NM_008626.1,3793-3811).
ccaccagctgtgataccaa

SEQ ID NO: 569012 - DNA, 19 bp, Mus musculus
  siRNA target sequence for Mrc2 (NM_008626.1,3849-3867).
ccaccccgaaggataaact

SEQ ID NO: 569013 - DNA, 19 bp, Mus musculus
  siRNA target sequence for Mrc2 (NM_008626.1,3850-3868).
caccccgaaggataaacta

SEQ ID NO: 569014 - DNA, 19 bp, Mus musculus
  siRNA target sequence for Mrc2 (NM_008626.1,3917-3935).
cagggagcattgctattct

SEQ ID NO: 569015 - DNA, 19 bp, Mus musculus
  siRNA target sequence for Mrc2 (NM_008626.1,3919-3937).
gggagcattgctattcttt

SEQ ID NO: 569016 - DNA, 19 bp, Mus musculus
  siRNA target sequence for Mrc2 (NM_008626.1,3998-4016).
gacggttctgtccattctt

SEQ ID NO: 569017 - DNA, 19 bp, Mus musculus
  siRNA target sequence for Mrc2 (NM_008626.1,4000-4018).
cggttctgtccattcttga

SEQ ID NO: 569018 - DNA, 19 bp, Mus musculus
  siRNA target sequence for Mrc2 (NM_008626.1,4001-4019).
ggttctgtccattcttgat

SEQ ID NO: 569019 - DNA, 19 bp, Mus musculus
  siRNA target sequence for Mrc2 (NM_008626.1,4017-4035).
gatgagatggagaatgtgt

SEQ ID NO: 569020 - DNA, 19 bp, Mus musculus
  siRNA target sequence for Mrc2 (NM_008626.1,4080-4098).
gcctggttgggcatgaact

SEQ ID NO: 569021 - DNA, 19 bp, Mus musculus
  siRNA target sequence for Mrc2 (NM_008626.1,4081-4099).
cctggttgggcatgaactt

SEQ ID NO: 569022 - DNA, 19 bp, Mus musculus
  siRNA target sequence for Mrc2 (NM_008626.1,4084-4102).
ggttgggcatgaacttcaa

SEQ ID NO: 569023 - DNA, 19 bp, Mus musculus
  siRNA target sequence for Mrc2 (NM_008626.1,4117-4135).
cgctggtctggcaagacaa

SEQ ID NO: 569024 - DNA, 19 bp, Mus musculus
  siRNA target sequence for Mrc2 (NM_008626.1,4140-4158).
gctgtgaactattctaact

SEQ ID NO: 569025 - DNA, 19 bp, Mus musculus
  siRNA target sequence for Mrc2 (NM_008626.1,4173-4191).
ctgggccctagcatgctaa

SEQ ID NO: 569026 - DNA, 19 bp, Mus musculus
  siRNA target sequence for Mrc2 (NM_008626.1,4489-4507).
ccaccgagaagaacattct

SEQ ID NO: 569027 - DNA, 19 bp, Mus musculus
  siRNA target sequence for N28137 (NM_030889.1,244-262).
cccggtgtgcagatcacta

SEQ ID NO: 569028 - DNA, 19 bp, Mus musculus
  siRNA target sequence for N28137 (NM_030889.1,288-306).
gtccggcgatcgcaaagat

SEQ ID NO: 569029 - DNA, 19 bp, Mus musculus
  siRNA target sequence for N28137 (NM_030889.1,585-603).
caaggttctggaaagttct

SEQ ID NO: 569030 - DNA, 19 bp, Mus musculus
  siRNA target sequence for N28137 (NM_030889.1,606-624).
gtggaggtcctcagatttt

SEQ ID NO: 569031 - DNA, 19 bp, Mus musculus
  siRNA target sequence for N28137 (NM_030889.1,692-710).
gcccagctaacaaaaggaa

SEQ ID NO: 569032 - DNA, 19 bp, Mus musculus
  siRNA target sequence for N28137 (NM_030889.1,777-795).
cgccacgttccagaagtat

SEQ ID NO: 569033 - DNA, 19 bp, Mus musculus
  siRNA target sequence for N28137 (NM_030889.1,887-905).
catcggacctgggaaagaa

SEQ ID NO: 569034 - DNA, 19 bp, Mus musculus
  siRNA target sequence for N28137 (NM_030889.1,1012-1030).
ggaggctatcggtactaca

SEQ ID NO: 569035 - DNA, 19 bp, Mus musculus
  siRNA target sequence for N28137 (NM_030889.1,1111-1129).
caggatgagtacatctttt

SEQ ID NO: 569036 - DNA, 19 bp, Mus musculus
  siRNA target sequence for N28137 (NM_030889.1,1114-1132).
gatgagtacatctttttga

SEQ ID NO: 569037 - DNA, 19 bp, Mus musculus
  siRNA target sequence for N28137 (NM_030889.1,1145-1163).
caaaccgaaccaagtacta

SEQ ID NO: 569038 - DNA, 19 bp, Mus musculus
  siRNA target sequence for N28137 (NM_030889.1,1150-1168).
cgaaccaagtactatgtct

SEQ ID NO: 569039 - DNA, 19 bp, Mus musculus
  siRNA target sequence for N28137 (NM_030889.1,1170-1188).
ctatcgccgaagtgacttt

SEQ ID NO: 569040 - DNA, 19 bp, Mus musculus
  siRNA target sequence for N28137 (NM_030889.1,1484-1502).
gccgtgactgggattacct

SEQ ID NO: 569041 - DNA, 19 bp, Mus musculus
  siRNA target sequence for N28137 (NM_030889.1,1667-1685).
cacagctggtggagtataa

SEQ ID NO: 569042 - DNA, 19 bp, Mus musculus
  siRNA target sequence for N28137 (NM_030889.1,1764-1782).
ggaccacggtggtgtcatt

SEQ ID NO: 569043 - DNA, 19 bp, Mus musculus
  siRNA target sequence for N28137 (NM_030889.1,2194-2212).
gggtttgagcgctcatctt

SEQ ID NO: 569044 - DNA, 19 bp, Mus musculus
  siRNA target sequence for N28137 (NM_030889.1,2250-2268).
ctggttcaaccctttgtct

SEQ ID NO: 569045 - DNA, 19 bp, Mus musculus
  siRNA target sequence for N28137 (NM_030889.1,2282-2300).
gtgtcttgggtcagactta

SEQ ID NO: 569046 - DNA, 19 bp, Mus musculus
  siRNA target sequence for N28137 (NM_030889.1,2284-2302).
gtcttgggtcagacttaca

SEQ ID NO: 569047 - DNA, 19 bp, Mus musculus
  siRNA target sequence for N28137 (NM_030889.1,2290-2308).
ggtcagacttacactagta

SEQ ID NO: 569048 - DNA, 19 bp, Mus musculus
  siRNA target sequence for N28137 (NM_030889.1,2442-2460).
cgtgcggcctagagaagat

SEQ ID NO: 569049 - DNA, 19 bp, Mus musculus
  siRNA target sequence for N28137 (NM_030889.1,2491-2509).
gatgtcctgaccactaaat

SEQ ID NO: 569050 - DNA, 19 bp, Mus musculus
  siRNA target sequence for N28137 (NM_030889.1,2571-2589).
gcccattcgacatcactat

SEQ ID NO: 569051 - DNA, 19 bp, Mus musculus
  siRNA target sequence for N28137 (NM_030889.1,2829-2847).
ctcggtgacaacaaagttt

SEQ ID NO: 569052 - DNA, 19 bp, Mus musculus
  siRNA target sequence for N28137 (NM_030889.1,3098-3116).
ccaccatagccgacttgta

SEQ ID NO: 569053 - DNA, 19 bp, Mus musculus
  siRNA target sequence for N28137 (NM_030889.1,3099-3117).
caccatagccgacttgtat

SEQ ID NO: 569054 - DNA, 19 bp, Mus musculus
  siRNA target sequence for N28137 (NM_030889.1,3101-3119).
ccatagccgacttgtatgt

SEQ ID NO: 569055 - DNA, 19 bp, Mus musculus
  siRNA target sequence for N28137 (NM_030889.1,3190-3208).
caggcgctgaactctcata

SEQ ID NO: 569056 - DNA, 19 bp, Mus musculus
  siRNA target sequence for N28137 (NM_030889.1,3192-3210).
ggcgctgaactctcataga

SEQ ID NO: 569057 - DNA, 19 bp, Mus musculus
  siRNA target sequence for N28137 (NM_030889.1,3193-3211).
gcgctgaactctcatagaa

SEQ ID NO: 569058 - DNA, 19 bp, Mus musculus
  siRNA target sequence for N28137 (NM_030889.1,3194-3212).
cgctgaactctcatagaat

SEQ ID NO: 569059 - DNA, 19 bp, Mus musculus
  siRNA target sequence for N28137 (NM_030889.1,3493-3511).
gtggtcctgagcatcaact

SEQ ID NO: 569060 - DNA, 19 bp, Mus musculus
  siRNA target sequence for N28137 (NM_030889.1,3512-3530).
ctcgtgagatgcatagcta

SEQ ID NO: 569061 - DNA, 19 bp, Mus musculus
  siRNA target sequence for Nptx2 (NM_016789.2,592-610).
gctccagctccgcacaaat

SEQ ID NO: 569062 - DNA, 19 bp, Mus musculus
  siRNA target sequence for Nptx2 (NM_016789.2,715-733).
gaagtccctgcttcataat

SEQ ID NO: 569063 - DNA, 19 bp, Mus musculus
  siRNA target sequence for Nptx2 (NM_016789.2,809-827).
ggcaacagtgcattcaagt

SEQ ID NO: 569064 - DNA, 19 bp, Mus musculus
  siRNA target sequence for Nptx2 (NM_016789.2,826-844).
gtcaccagatgcattcaaa

SEQ ID NO: 569065 - DNA, 19 bp, Mus musculus
  siRNA target sequence for Nptx2 (NM_016789.2,830-848).
ccagatgcattcaaagtgt

SEQ ID NO: 569066 - DNA, 19 bp, Mus musculus
  siRNA target sequence for Nptx2 (NM_016789.2,878-896).
ggcaagatcaagaagacat

SEQ ID NO: 569067 - DNA, 19 bp, Mus musculus
  siRNA target sequence for Nptx2 (NM_016789.2,879-897).
gcaagatcaagaagacatt

SEQ ID NO: 569068 - DNA, 19 bp, Mus musculus
  siRNA target sequence for Nptx2 (NM_016789.2,987-1005).
ggcaagccaacgagattgt

SEQ ID NO: 569069 - DNA, 19 bp, Mus musculus
  siRNA target sequence for Nptx2 (NM_016789.2,1061-1079).
cagctgccgctgtttgtca

SEQ ID NO: 569070 - DNA, 19 bp, Mus musculus
  siRNA target sequence for Nptx2 (NM_016789.2,1237-1255).
cacggtgggaggcagattt

SEQ ID NO: 569071 - DNA, 19 bp, Mus musculus
  siRNA target sequence for Nptx2 (NM_016789.2,1239-1257).
cggtgggaggcagatttga

SEQ ID NO: 569072 - DNA, 19 bp, Mus musculus
  siRNA target sequence for Nptx2 (NM_016789.2,1240-1258).
ggtgggaggcagatttgat

SEQ ID NO: 569073 - DNA, 19 bp, Mus musculus
  siRNA target sequence for Nptx2 (NM_016789.2,1283-1301).
ctcagccagttcaacatat

SEQ ID NO: 569074 - DNA, 19 bp, Mus musculus
  siRNA target sequence for Nptx2 (NM_016789.2,1375-1393).
cccgtgggtggacaacaat

SEQ ID NO: 569075 - DNA, 19 bp, Mus musculus
  siRNA target sequence for Nptx2 (NM_016789.2,1377-1395).
cgtgggtggacaacaatgt

SEQ ID NO: 569076 - DNA, 19 bp, Mus musculus
  siRNA target sequence for Nrip3 (NM_020610.1,206-224).
ccctggacggcctcaaaaa

SEQ ID NO: 569077 - DNA, 19 bp, Mus musculus
  siRNA target sequence for Nrip3 (NM_020610.1,241-259).
gacacgcaaccccataaca

SEQ ID NO: 569078 - DNA, 19 bp, Mus musculus
  siRNA target sequence for Nrip3 (NM_020610.1,243-261).
cacgcaaccccataacatt

SEQ ID NO: 569079 - DNA, 19 bp, Mus musculus
  siRNA target sequence for Nrip3 (NM_020610.1,245-263).
cgcaaccccataacattct

SEQ ID NO: 569080 - DNA, 19 bp, Mus musculus
  siRNA target sequence for Nrip3 (NM_020610.1,269-287).
ggcgcctcatggaaaccaa

SEQ ID NO: 569081 - DNA, 19 bp, Mus musculus
  siRNA target sequence for Nrip3 (NM_020610.1,321-339).
ggcctctaagaccaacaaa

SEQ ID NO: 569082 - DNA, 19 bp, Mus musculus
  siRNA target sequence for Nrip3 (NM_020610.1,323-341).
cctctaagaccaacaaatt

SEQ ID NO: 569083 - DNA, 19 bp, Mus musculus
  siRNA target sequence for Nrip3 (NM_020610.1,436-454).
gttgacactggctgtcaat

SEQ ID NO: 569084 - DNA, 19 bp, Mus musculus
  siRNA target sequence for Nrip3 (NM_020610.1,439-457).
gacactggctgtcaatata

SEQ ID NO: 569085 - DNA, 19 bp, Mus musculus
  siRNA target sequence for Nrip3 (NM_020610.1,441-459).
cactggctgtcaatataat

SEQ ID NO: 569086 - DNA, 19 bp, Mus musculus
  siRNA target sequence for Nrip3 (NM_020610.1,539-557).
ctctaccacggcatctcaa

SEQ ID NO: 569087 - DNA, 19 bp, Mus musculus
  siRNA target sequence for Nrip3 (NM_020610.1,566-584).
gccagattgagcacctaat

SEQ ID NO: 569088 - DNA, 19 bp, Mus musculus
  siRNA target sequence for Nrip3 (NM_020610.1,627-645).
ggttgatgataatgaaaaa

SEQ ID NO: 569089 - DNA, 19 bp, Mus musculus
  siRNA target sequence for Nrip3 (NM_020610.1,677-695).
ccctgaagtgcatcataaa

SEQ ID NO: 569090 - DNA, 19 bp, Mus musculus
  siRNA target sequence for Nrip3 (NM_020610.1,766-784).
gtgaatgacgacaacactt

SEQ ID NO: 569091 - DNA, 19 bp, Mus musculus
  siRNA target sequence for Ocil (NM_053109.1,548-566).
ccggggagaggaaagattt

SEQ ID NO: 569092 - DNA, 19 bp, Mus musculus
  siRNA target sequence for Olr1 (NM_138648.1,115-133).
ctaaaggtctgcatttgct

SEQ ID NO: 569093 - DNA, 19 bp, Mus musculus
  siRNA target sequence for Olr1 (NM_138648.1,188-206).
gttgtcagtgacccttatt

SEQ ID NO: 569094 - DNA, 19 bp, Mus musculus
  siRNA target sequence for Olr1 (NM_138648.1,191-209).
gtcagtgacccttattgta

SEQ ID NO: 569095 - DNA, 19 bp, Mus musculus
  siRNA target sequence for Olr1 (NM_138648.1,193-211).
cagtgacccttattgtaca

SEQ ID NO: 569096 - DNA, 19 bp, Mus musculus
  siRNA target sequence for Olr1 (NM_138648.1,230-248).
ggtatctgacctcttaaaa

SEQ ID NO: 569097 - DNA, 19 bp, Mus musculus
  siRNA target sequence for Olr1 (NM_138648.1,235-253).
ctgacctcttaaaacaata

SEQ ID NO: 569098 - DNA, 19 bp, Mus musculus
  siRNA target sequence for Olr1 (NM_138648.1,249-267).
caataccaagcgaacctta

SEQ ID NO: 569099 - DNA, 19 bp, Mus musculus
  siRNA target sequence for Olr1 (NM_138648.1,324-342).
gcttcacaggaatcaaaga

SEQ ID NO: 569100 - DNA, 19 bp, Mus musculus
  siRNA target sequence for Olr1 (NM_138648.1,823-841).
ggcagacctgccaatcttt

SEQ ID NO: 569101 - DNA, 19 bp, Mus musculus
  siRNA target sequence for Olr1 (NM_138648.1,838-856).
ctttgggtggccagttact

SEQ ID NO: 569102 - DNA, 19 bp, Mus musculus
  siRNA target sequence for Olr1 (NM_138648.1,844-862).
gtggccagttactacaaat

SEQ ID NO: 569103 - DNA, 19 bp, Mus musculus
  siRNA target sequence for Olr1 (NM_138648.1,847-865).
gccagttactacaaattaa

SEQ ID NO: 569104 - DNA, 19 bp, Mus musculus
  siRNA target sequence for Olr1 (NM_138648.1,851-869).
gttactacaaattaatggt

SEQ ID NO: 569105 - DNA, 19 bp, Mus musculus
  siRNA target sequence for Olr1 (NM_138648.1,867-885).
ggtgcagatgatttgacat

SEQ ID NO: 569106 - DNA, 19 bp, Mus musculus
  siRNA target sequence for Olr1 (NM_138648.1,868-886).
gtgcagatgatttgacatt

SEQ ID NO: 569107 - DNA, 19 bp, Mus musculus
  siRNA target sequence for Olr1 (NM_138648.1,916-934).
ccccgttctggattggatt

SEQ ID NO: 569108 - DNA, 19 bp, Mus musculus
  siRNA target sequence for Olr1 (NM_138648.1,1004-1022).
gaccaggggcgtttcttta

SEQ ID NO: 569109 - DNA, 19 bp, Mus musculus
  siRNA target sequence for Olr1 (NM_138648.1,1006-1024).
ccaggggcgtttctttaca

SEQ ID NO: 569110 - DNA, 19 bp, Mus musculus
  siRNA target sequence for Olr1 (NM_138648.1,1065-1083).
gctgtgttcgctgaaaact

SEQ ID NO: 569111 - DNA, 19 bp, Mus musculus
  siRNA target sequence for Olr1 (NM_138648.1,1073-1091).
cgctgaaaactgcattcta

SEQ ID NO: 569112 - DNA, 19 bp, Mus musculus
  siRNA target sequence for Olr1 (NM_138648.1,1089-1107).
ctaattgcattcagcatat

SEQ ID NO: 569113 - DNA, 19 bp, Mus musculus
  siRNA target sequence for Pap (NM_011036.1,317-335).
ggaaacagctaccaataca

SEQ ID NO: 569114 - DNA, 19 bp, Mus musculus
  siRNA target sequence for Pap (NM_011036.1,325-343).
ctaccaatacacttggatt

SEQ ID NO: 569115 - DNA, 19 bp, Mus musculus
  siRNA target sequence for Pap (NM_011036.1,399-417).
gtaacaatgacgtgatgaa

SEQ ID NO: 569116 - DNA, 19 bp, Mus musculus
  siRNA target sequence for Pla2g1br (NM_008867.1,198-216).
cagggcatcgcccaagatt

SEQ ID NO: 569117 - DNA, 19 bp, Mus musculus
  siRNA target sequence for Pla2g1br (NM_008867.1,201-219).
ggcatcgcccaagatttga

SEQ ID NO: 569118 - DNA, 19 bp, Mus musculus
  siRNA target sequence for Pla2g1br (NM_008867.1,203-221).
catcgcccaagatttgact

SEQ ID NO: 569119 - DNA, 19 bp, Mus musculus
  siRNA target sequence for Pla2g1br (NM_008867.1,238-256).
ccctcgagtggcgtgataa

SEQ ID NO: 569120 - DNA, 19 bp, Mus musculus
  siRNA target sequence for Pla2g1br (NM_008867.1,249-267).
cgtgataaaggaattttca

SEQ ID NO: 569121 - DNA, 19 bp, Mus musculus
  siRNA target sequence for Pla2g1br (NM_008867.1,296-314).
cattcaggcaggtaaatct

SEQ ID NO: 569122 - DNA, 19 bp, Mus musculus
  siRNA target sequence for Pla2g1br (NM_008867.1,374-392).
cgacgaccacctctttaat

SEQ ID NO: 569123 - DNA, 19 bp, Mus musculus
  siRNA target sequence for Pla2g1br (NM_008867.1,410-428).
cctaggcctgaacatatct

SEQ ID NO: 569124 - DNA, 19 bp, Mus musculus
  siRNA target sequence for Pla2g1br (NM_008867.1,427-445).
ctgctctggagcaaccatt

SEQ ID NO: 569125 - DNA, 19 bp, Mus musculus
  siRNA target sequence for Pla2g1br (NM_008867.1,618-636).
gagcatcctagcagagatt

SEQ ID NO: 569126 - DNA, 19 bp, Mus musculus
  siRNA target sequence for Pla2g1br (NM_008867.1,620-638).
gcatcctagcagagattta

SEQ ID NO: 569127 - DNA, 19 bp, Mus musculus
  siRNA target sequence for Pla2g1br (NM_008867.1,621-639).
catcctagcagagatttat

SEQ ID NO: 569128 - DNA, 19 bp, Mus musculus
  siRNA target sequence for Pla2g1br (NM_008867.1,624-642).
cctagcagagatttatata

SEQ ID NO: 569129 - DNA, 19 bp, Mus musculus
  siRNA target sequence for Pla2g1br (NM_008867.1,628-646).
gcagagatttatatacgtt

SEQ ID NO: 569130 - DNA, 19 bp, Mus musculus
  siRNA target sequence for Pla2g1br (NM_008867.1,629-647).
cagagatttatatacgtta

SEQ ID NO: 569131 - DNA, 19 bp, Mus musculus
  siRNA target sequence for Pla2g1br (NM_008867.1,631-649).
gagatttatatacgttaaa

SEQ ID NO: 569132 - DNA, 19 bp, Mus musculus
  siRNA target sequence for Pla2g1br (NM_008867.1,755-773).
caccacaagccgatacgaa

SEQ ID NO: 569133 - DNA, 19 bp, Mus musculus
  siRNA target sequence for Pla2g1br (NM_008867.1,799-817).
cagatcctacctctatgaa

SEQ ID NO: 569134 - DNA, 19 bp, Mus musculus
  siRNA target sequence for Pla2g1br (NM_008867.1,849-867).
ggcagttcacgcatttgct

SEQ ID NO: 569135 - DNA, 19 bp, Mus musculus
  siRNA target sequence for Pla2g1br (NM_008867.1,850-868).
gcagttcacgcatttgcta

SEQ ID NO: 569136 - DNA, 19 bp, Mus musculus
  siRNA target sequence for Pla2g1br (NM_008867.1,930-948).
ggaggtgctttgctaagta

SEQ ID NO: 569137 - DNA, 19 bp, Mus musculus
  siRNA target sequence for Pla2g1br (NM_008867.1,931-949).
gaggtgctttgctaagtat

SEQ ID NO: 569138 - DNA, 19 bp, Mus musculus
  siRNA target sequence for Pla2g1br (NM_008867.1,941-959).
gctaagtattgcagatgaa

SEQ ID NO: 569139 - DNA, 19 bp, Mus musculus
  siRNA target sequence for Pla2g1br (NM_008867.1,1183-1201).
ccttgccttatatatgcaa

SEQ ID NO: 569140 - DNA, 19 bp, Mus musculus
  siRNA target sequence for Pla2g1br (NM_008867.1,1184-1202).
cttgccttatatatgcaaa

SEQ ID NO: 569141 - DNA, 19 bp, Mus musculus
  siRNA target sequence for Pla2g1br (NM_008867.1,1282-1300).
ggactcccttcaatcgtaa

SEQ ID NO: 569142 - DNA, 19 bp, Mus musculus
  siRNA target sequence for Pla2g1br (NM_008867.1,1283-1301).
gactcccttcaatcgtaaa

SEQ ID NO: 569143 - DNA, 19 bp, Mus musculus
  siRNA target sequence for Pla2g1br (NM_008867.1,1287-1305).
cccttcaatcgtaaatgct

SEQ ID NO: 569144 - DNA, 19 bp, Mus musculus
  siRNA target sequence for Pla2g1br (NM_008867.1,1288-1306).
ccttcaatcgtaaatgcta

SEQ ID NO: 569145 - DNA, 19 bp, Mus musculus
  siRNA target sequence for Pla2g1br (NM_008867.1,1292-1310).
caatcgtaaatgctacaaa

SEQ ID NO: 569146 - DNA, 19 bp, Mus musculus
  siRNA target sequence for Pla2g1br (NM_008867.1,1296-1314).
cgtaaatgctacaaactta

SEQ ID NO: 569147 - DNA, 19 bp, Mus musculus
  siRNA target sequence for Pla2g1br (NM_008867.1,1346-1364).
gcactcttgccaatcgaat

SEQ ID NO: 569148 - DNA, 19 bp, Mus musculus
  siRNA target sequence for Pla2g1br (NM_008867.1,1360-1378).
cgaatgacagcgtgttgat

SEQ ID NO: 569149 - DNA, 19 bp, Mus musculus
  siRNA target sequence for Pla2g1br (NM_008867.1,1417-1435).
gcctccttagggatgaaaa

SEQ ID NO: 569150 - DNA, 19 bp, Mus musculus
  siRNA target sequence for Pla2g1br (NM_008867.1,1418-1436).
cctccttagggatgaaaat

SEQ ID NO: 569151 - DNA, 19 bp, Mus musculus
  siRNA target sequence for Pla2g1br (NM_008867.1,1421-1439).
ccttagggatgaaaatgca

SEQ ID NO: 569152 - DNA, 19 bp, Mus musculus
  siRNA target sequence for Pla2g1br (NM_008867.1,1422-1440).
cttagggatgaaaatgcat

SEQ ID NO: 569153 - DNA, 19 bp, Mus musculus
  siRNA target sequence for Pla2g1br (NM_008867.1,1441-1459).
cagaaacgtggattggttt

SEQ ID NO: 569154 - DNA, 19 bp, Mus musculus
  siRNA target sequence for Pla2g1br (NM_008867.1,1451-1469).
gattggtttgagtagcaat

SEQ ID NO: 569155 - DNA, 19 bp, Mus musculus
  siRNA target sequence for Pla2g1br (NM_008867.1,1592-1610).
cggacgctggaaagtgaaa

SEQ ID NO: 569156 - DNA, 19 bp, Mus musculus
  siRNA target sequence for Pla2g1br (NM_008867.1,1594-1612).
gacgctggaaagtgaaaga

SEQ ID NO: 569157 - DNA, 19 bp, Mus musculus
  siRNA target sequence for Pla2g1br (NM_008867.1,1699-1717).
gacacggcagattttgtta

SEQ ID NO: 569158 - DNA, 19 bp, Mus musculus
  siRNA target sequence for Pla2g1br (NM_008867.1,1701-1719).
cacggcagattttgttaca

SEQ ID NO: 569159 - DNA, 19 bp, Mus musculus
  siRNA target sequence for Pla2g1br (NM_008867.1,1705-1723).
gcagattttgttacaaaat

SEQ ID NO: 569160 - DNA, 19 bp, Mus musculus
  siRNA target sequence for Pla2g1br (NM_008867.1,1708-1726).
gattttgttacaaaatcga

SEQ ID NO: 569161 - DNA, 19 bp, Mus musculus
  siRNA target sequence for Pla2g1br (NM_008867.1,1752-1770).
gcttcgagtggctattact

SEQ ID NO: 569162 - DNA, 19 bp, Mus musculus
  siRNA target sequence for Pla2g1br (NM_008867.1,1789-1807).
ccatcaccagccgatttga

SEQ ID NO: 569163 - DNA, 19 bp, Mus musculus
  siRNA target sequence for Pla2g1br (NM_008867.1,1793-1811).
caccagccgatttgaacaa

SEQ ID NO: 569164 - DNA, 19 bp, Mus musculus
  siRNA target sequence for Pla2g1br (NM_008867.1,1799-1817).
ccgatttgaacaagctttt

SEQ ID NO: 569165 - DNA, 19 bp, Mus musculus
  siRNA target sequence for Pla2g1br (NM_008867.1,1800-1818).
cgatttgaacaagctttta

SEQ ID NO: 569166 - DNA, 19 bp, Mus musculus
  siRNA target sequence for Pla2g1br (NM_008867.1,1869-1887).
gctcttcaagaccaaaaca

SEQ ID NO: 569167 - DNA, 19 bp, Mus musculus
  siRNA target sequence for Pla2g1br (NM_008867.1,1872-1890).
cttcaagaccaaaacaata

SEQ ID NO: 569168 - DNA, 19 bp, Mus musculus
  siRNA target sequence for Pla2g1br (NM_008867.1,1972-1990).
gtggtggctgcgttgttgt

SEQ ID NO: 569169 - DNA, 19 bp, Mus musculus
  siRNA target sequence for Pla2g1br (NM_008867.1,2036-2054).
cgactttaaggcaatgtct

SEQ ID NO: 569170 - DNA, 19 bp, Mus musculus
  siRNA target sequence for Pla2g1br (NM_008867.1,2059-2077).
gcaagacaccagtcaaaat

SEQ ID NO: 569171 - DNA, 19 bp, Mus musculus
  siRNA target sequence for Pla2g1br (NM_008867.1,2109-2127).
ccgtttcacccctgctata

SEQ ID NO: 569172 - DNA, 19 bp, Mus musculus
  siRNA target sequence for Pla2g1br (NM_008867.1,2110-2128).
cgtttcacccctgctatat

SEQ ID NO: 569173 - DNA, 19 bp, Mus musculus
  siRNA target sequence for Pla2g1br (NM_008867.1,2240-2258).
ggctcacctcgcaagcttt

SEQ ID NO: 569174 - DNA, 19 bp, Mus musculus
  siRNA target sequence for Pla2g1br (NM_008867.1,2249-2267).
cgcaagctttgcccatata

SEQ ID NO: 569175 - DNA, 19 bp, Mus musculus
  siRNA target sequence for Pla2g1br (NM_008867.1,2251-2269).
caagctttgcccatataga

SEQ ID NO: 569176 - DNA, 19 bp, Mus musculus
  siRNA target sequence for Pla2g1br (NM_008867.1,2261-2279).
ccatatagaggaagaaaat

SEQ ID NO: 569177 - DNA, 19 bp, Mus musculus
  siRNA target sequence for Pla2g1br (NM_008867.1,2285-2303).
gaatgagcttctacattca

SEQ ID NO: 569178 - DNA, 19 bp, Mus musculus
  siRNA target sequence for Pla2g1br (NM_008867.1,2395-2413).
cacctgttgtctcttcatt

SEQ ID NO: 569179 - DNA, 19 bp, Mus musculus
  siRNA target sequence for Pla2g1br (NM_008867.1,2507-2525).
cgagtggatatgcagaatt

SEQ ID NO: 569180 - DNA, 19 bp, Mus musculus
  siRNA target sequence for Pla2g1br (NM_008867.1,2574-2592).
ccgtggctcttctatcaga

SEQ ID NO: 569181 - DNA, 19 bp, Mus musculus
  siRNA target sequence for Pla2g1br (NM_008867.1,2662-2680).
gaagtgacttcctcacaat

SEQ ID NO: 569182 - DNA, 19 bp, Mus musculus
  siRNA target sequence for Pla2g1br (NM_008867.1,2665-2683).
gtgacttcctcacaattta

SEQ ID NO: 569183 - DNA, 19 bp, Mus musculus
  siRNA target sequence for Pla2g1br (NM_008867.1,2667-2685).
gacttcctcacaatttatt

SEQ ID NO: 569184 - DNA, 19 bp, Mus musculus
  siRNA target sequence for Pla2g1br (NM_008867.1,2749-2767).
ggtggatcggacttgaaga

SEQ ID NO: 569185 - DNA, 19 bp, Mus musculus
  siRNA target sequence for Pla2g1br (NM_008867.1,2803-2821).
ggtcgcccgtgatattcca

SEQ ID NO: 569186 - DNA, 19 bp, Mus musculus
  siRNA target sequence for Pla2g1br (NM_008867.1,2867-2885).
gcgatgtgtcttcatatct

SEQ ID NO: 569187 - DNA, 19 bp, Mus musculus
  siRNA target sequence for Pla2g1br (NM_008867.1,2876-2894).
cttcatatcttccataaca

SEQ ID NO: 569188 - DNA, 19 bp, Mus musculus
  siRNA target sequence for Pla2g1br (NM_008867.1,2939-2957).
ctgtaagcgagtgaagata

SEQ ID NO: 569189 - DNA, 19 bp, Mus musculus
  siRNA target sequence for Pla2g1br (NM_008867.1,3013-3031).
ggctgtattttaactataa

SEQ ID NO: 569190 - DNA, 19 bp, Mus musculus
  siRNA target sequence for Pla2g1br (NM_008867.1,3032-3050).
gtgcttcctggtgacaatt

SEQ ID NO: 569191 - DNA, 19 bp, Mus musculus
  siRNA target sequence for Pla2g1br (NM_008867.1,3147-3165).
caagcttttattactatga

SEQ ID NO: 569192 - DNA, 19 bp, Mus musculus
  siRNA target sequence for Pla2g1br (NM_008867.1,3174-3192).
ggccagaccacgaatgtgt

SEQ ID NO: 569193 - DNA, 19 bp, Mus musculus
  siRNA target sequence for Pla2g1br (NM_008867.1,3189-3207).
gtgtggatagggttacaaa

SEQ ID NO: 569194 - DNA, 19 bp, Mus musculus
  siRNA target sequence for Pla2g1br (NM_008867.1,3191-3209).
gtggatagggttacaaagt

SEQ ID NO: 569195 - DNA, 19 bp, Mus musculus
  siRNA target sequence for Pla2g1br (NM_008867.1,3194-3212).
gatagggttacaaagtact

SEQ ID NO: 569196 - DNA, 19 bp, Mus musculus
  siRNA target sequence for Pla2g1br (NM_008867.1,3199-3217).
ggttacaaagtactaatca

SEQ ID NO: 569197 - DNA, 19 bp, Mus musculus
  siRNA target sequence for Pla2g1br (NM_008867.1,3200-3218).
gttacaaagtactaatcat

SEQ ID NO: 569198 - DNA, 19 bp, Mus musculus
  siRNA target sequence for Pla2g1br (NM_008867.1,3259-3277).
ggtctccatcggatataat

SEQ ID NO: 569199 - DNA, 19 bp, Mus musculus
  siRNA target sequence for Pla2g1br (NM_008867.1,3260-3278).
gtctccatcggatataata

SEQ ID NO: 569200 - DNA, 19 bp, Mus musculus
  siRNA target sequence for Pla2g1br (NM_008867.1,3262-3280).
ctccatcggatataataaa

SEQ ID NO: 569201 - DNA, 19 bp, Mus musculus
  siRNA target sequence for Pla2g1br (NM_008867.1,3264-3282).
ccatcggatataataaata

SEQ ID NO: 569202 - DNA, 19 bp, Mus musculus
  siRNA target sequence for Pla2g1br (NM_008867.1,3289-3307).
gttataacaccactgaatt

SEQ ID NO: 569203 - DNA, 19 bp, Mus musculus
  siRNA target sequence for Pla2g1br (NM_008867.1,3328-3346).
gtgccctcatgtcaagtaa

SEQ ID NO: 569204 - DNA, 19 bp, Mus musculus
  siRNA target sequence for Pla2g1br (NM_008867.1,3332-3350).
cctcatgtcaagtaatcct

SEQ ID NO: 569205 - DNA, 19 bp, Mus musculus
  siRNA target sequence for Pla2g1br (NM_008867.1,3333-3351).
ctcatgtcaagtaatccta

SEQ ID NO: 569206 - DNA, 19 bp, Mus musculus
  siRNA target sequence for Pla2g1br (NM_008867.1,3335-3353).
catgtcaagtaatcctaat

SEQ ID NO: 569207 - DNA, 19 bp, Mus musculus
  siRNA target sequence for Pla2g1br (NM_008867.1,3364-3382).
ctggaaaatggtatttcga

SEQ ID NO: 569208 - DNA, 19 bp, Mus musculus
  siRNA target sequence for Pla2g1br (NM_008867.1,3444-3462).
catgtaaacgtgtctgata

SEQ ID NO: 569209 - DNA, 19 bp, Mus musculus
  siRNA target sequence for Pla2g1br (NM_008867.1,3473-3491).
ccccagtacgttagaatat

SEQ ID NO: 569210 - DNA, 19 bp, Mus musculus
  siRNA target sequence for Pla2g1br (NM_008867.1,3476-3494).
cagtacgttagaatatgga

SEQ ID NO: 569211 - DNA, 19 bp, Mus musculus
  siRNA target sequence for Pla2g1br (NM_008867.1,3482-3500).
gttagaatatggaaacaga

SEQ ID NO: 569212 - DNA, 19 bp, Mus musculus
  siRNA target sequence for Pla2g1br (NM_008867.1,3664-3682).
cagacaatggtcagacttt

SEQ ID NO: 569213 - DNA, 19 bp, Mus musculus
  siRNA target sequence for Pla2g1br (NM_008867.1,3787-3805).
gcacagcctgcgagtcatt

SEQ ID NO: 569214 - DNA, 19 bp, Mus musculus
  siRNA target sequence for Pla2g1br (NM_008867.1,3790-3808).
cagcctgcgagtcatttct

SEQ ID NO: 569215 - DNA, 19 bp, Mus musculus
  siRNA target sequence for Pla2g1br (NM_008867.1,3825-3843).
cacgtagtcactgaaacaa

SEQ ID NO: 569216 - DNA, 19 bp, Mus musculus
  siRNA target sequence for Pla2g1br (NM_008867.1,3935-3953).
cagcaggagttttgaagat

SEQ ID NO: 569217 - DNA, 19 bp, Mus musculus
  siRNA target sequence for Pla2g1br (NM_008867.1,3954-3972).
gctcatgaattttgcaaaa

SEQ ID NO: 569218 - DNA, 19 bp, Mus musculus
  siRNA target sequence for Pla2g1br (NM_008867.1,4001-4019).
ggatgcggctgaaaattca

SEQ ID NO: 569219 - DNA, 19 bp, Mus musculus
  siRNA target sequence for Pla2g1br (NM_008867.1,4002-4020).
gatgcggctgaaaattcat

SEQ ID NO: 569220 - DNA, 19 bp, Mus musculus
  siRNA target sequence for Pla2g1br (NM_008867.1,4070-4088).
gttgaatgctcagtttgat

SEQ ID NO: 569221 - DNA, 19 bp, Mus musculus
  siRNA target sequence for Pla2g1br (NM_008867.1,4199-4217).
gaggatcccggaaggaata

SEQ ID NO: 569222 - DNA, 19 bp, Mus musculus
  siRNA target sequence for Pla2g1br (NM_008867.1,4228-4246).
ccccatgcgaggacaaaaa

SEQ ID NO: 569223 - DNA, 19 bp, Mus musculus
  siRNA target sequence for Pla2g1br (NM_008867.1,4239-4257).
gacaaaaaggggttcatat

SEQ ID NO: 569224 - DNA, 19 bp, Mus musculus
  siRNA target sequence for Pla2g1br (NM_008867.1,4241-4259).
caaaaaggggttcatatgt

SEQ ID NO: 569225 - DNA, 19 bp, Mus musculus
  siRNA target sequence for Pla2g1br (NM_008867.1,4249-4267).
ggttcatatgtaaaatgga

SEQ ID NO: 569226 - DNA, 19 bp, Mus musculus
  siRNA target sequence for Pla2g1br (NM_008867.1,4335-4353).
gtaacgctgacgttgataa

SEQ ID NO: 569227 - DNA, 19 bp, Mus musculus
  siRNA target sequence for Pla2g1br (NM_008867.1,4378-4396).
gcttctggatatataagca

SEQ ID NO: 569228 - DNA, 19 bp, Mus musculus
  siRNA target sequence for Pla2g1br (NM_008867.1,4385-4403).
gatatataagcagaaaagt

SEQ ID NO: 569229 - DNA, 19 bp, Mus musculus
  siRNA target sequence for Pla2g1br (NM_008867.1,4423-4441).
cggggtctcggggttctta

SEQ ID NO: 569230 - DNA, 19 bp, Mus musculus
  siRNA target sequence for Pla2g1br (NM_008867.1,4425-4443).
gggtctcggggttcttact

SEQ ID NO: 569231 - DNA, 19 bp, Mus musculus
  siRNA target sequence for Pla2g1br (NM_008867.1,4426-4444).
ggtctcggggttcttacta

SEQ ID NO: 569232 - DNA, 19 bp, Mus musculus
  siRNA target sequence for Pla2g1br (NM_008867.1,4457-4475).
cttcagcacagcacattta

SEQ ID NO: 569233 - DNA, 19 bp, Mus musculus
  siRNA target sequence for Prg2 (NM_008920.2,333-351).
gaggacacaacaagtctta

SEQ ID NO: 569234 - DNA, 19 bp, Mus musculus
  siRNA target sequence for Prg2 (NM_008920.2,558-576).
cgatgcaaacgctttcgat

SEQ ID NO: 569235 - DNA, 19 bp, Mus musculus
  siRNA target sequence for Prg2 (NM_008920.2,582-600).
gatggaagttcttggaatt

SEQ ID NO: 569236 - DNA, 19 bp, Mus musculus
  siRNA target sequence for Prg2 (NM_008920.2,589-607).
gttcttggaattttgcata

SEQ ID NO: 569237 - DNA, 19 bp, Mus musculus
  siRNA target sequence for Prg2 (NM_008920.2,670-688).
gccactggcgtctatctca

SEQ ID NO: 569238 - DNA, 19 bp, Mus musculus
  siRNA target sequence for Prg3 (NM_016914.1,351-369).
gttcccaacaccaagacat

SEQ ID NO: 569239 - DNA, 19 bp, Mus musculus
  siRNA target sequence for Prg3 (NM_016914.1,396-414).
cagatccagatgccttaaa

SEQ ID NO: 569240 - DNA, 19 bp, Mus musculus
  siRNA target sequence for Prg3 (NM_016914.1,472-490).
gtgcaagagctgcaactat

SEQ ID NO: 569241 - DNA, 19 bp, Mus musculus
  siRNA target sequence for Prg3 (NM_016914.1,499-517).
gaggactcccgagacattt

SEQ ID NO: 569242 - DNA, 19 bp, Mus musculus
  siRNA target sequence for Prg3 (NM_016914.1,501-519).
ggactcccgagacatttga

SEQ ID NO: 569243 - DNA, 19 bp, Mus musculus
  siRNA target sequence for Prg3 (NM_016914.1,563-581).
gcttccgtccacagttata

SEQ ID NO: 569244 - DNA, 19 bp, Mus musculus
  siRNA target sequence for Prg3 (NM_016914.1,582-600).
gtttcaactaccaaattca

SEQ ID NO: 569245 - DNA, 19 bp, Mus musculus
  siRNA target sequence for Prg3 (NM_016914.1,608-626).
gccaggaagatcaatcagt

SEQ ID NO: 569246 - DNA, 19 bp, Mus musculus
  siRNA target sequence for Prg3 (NM_016914.1,781-799).
gcgaagagcttcatgcaaa

SEQ ID NO: 569247 - DNA, 19 bp, Mus musculus
  siRNA target sequence for Prg3 (NM_016914.1,782-800).
cgaagagcttcatgcaaaa

SEQ ID NO: 569248 - DNA, 19 bp, Mus musculus
  siRNA target sequence for Prg3 (NM_016914.1,786-804).
gagcttcatgcaaaagtca

SEQ ID NO: 569249 - DNA, 19 bp, Mus musculus
  siRNA target sequence for Reg1 (NM_009042.1,75-93).
gctaggaacgcctacttca

SEQ ID NO: 569250 - DNA, 19 bp, Mus musculus
  siRNA target sequence for Reg1 (NM_009042.1,199-217).
gctcctattgttactactt

SEQ ID NO: 569251 - DNA, 19 bp, Mus musculus
  siRNA target sequence for Reg1 (NM_009042.1,218-236).
cactgaagaccgtttaact

SEQ ID NO: 569252 - DNA, 19 bp, Mus musculus
  siRNA target sequence for Reg1 (NM_009042.1,449-467).
gtctcctaacagttccaat

SEQ ID NO: 569253 - DNA, 19 bp, Mus musculus
  siRNA target sequence for Reg1 (NM_009042.1,534-552).
gcccaatactcatttgtct

SEQ ID NO: 569254 - DNA, 19 bp, Mus musculus
  siRNA target sequence for Reg2 (NM_009043.1,109-127).
gcctgatgttcctgtcata

SEQ ID NO: 569255 - DNA, 19 bp, Mus musculus
  siRNA target sequence for Reg2 (NM_009043.1,155-173).
cttccccttggctgaaaaa

SEQ ID NO: 569256 - DNA, 19 bp, Mus musculus
  siRNA target sequence for Reg2 (NM_009043.1,180-198).
ccttctgccaaaatcaact

SEQ ID NO: 569257 - DNA, 19 bp, Mus musculus
  siRNA target sequence for Reg2 (NM_009043.1,207-225).
ggtgccaacgcctatggtt

SEQ ID NO: 569258 - DNA, 19 bp, Mus musculus
  siRNA target sequence for Reg2 (NM_009043.1,227-245).
ctactgttattatctaatt

SEQ ID NO: 569259 - DNA, 19 bp, Mus musculus
  siRNA target sequence for Reg2 (NM_009043.1,298-316).
caggtcacctggtgtcaat

SEQ ID NO: 569260 - DNA, 19 bp, Mus musculus
  siRNA target sequence for Reg2 (NM_009043.1,301-319).
gtcacctggtgtcaatact

SEQ ID NO: 569261 - DNA, 19 bp, Mus musculus
  siRNA target sequence for Reg2 (NM_009043.1,303-321).
cacctggtgtcaatactca

SEQ ID NO: 569262 - DNA, 19 bp, Mus musculus
  siRNA target sequence for Reg2 (NM_009043.1,396-414).
cttcatgaccctaaaagta

SEQ ID NO: 569263 - DNA, 19 bp, Mus musculus
  siRNA target sequence for Reg2 (NM_009043.1,439-457).
gctccctatttctcttcaa

SEQ ID NO: 569264 - DNA, 19 bp, Mus musculus
  siRNA target sequence for Reg2 (NM_009043.1,444-462).
ctatttctcttcaagtcat

SEQ ID NO: 569265 - DNA, 19 bp, Mus musculus
  siRNA target sequence for Reg2 (NM_009043.1,487-505).
ccaaccgtggttattgtgt

SEQ ID NO: 569266 - DNA, 19 bp, Mus musculus
  siRNA target sequence for Reg2 (NM_009043.1,488-506).
caaccgtggttattgtgta

SEQ ID NO: 569267 - DNA, 19 bp, Mus musculus
  siRNA target sequence for Reg3a (NM_011259.1,88-106).
cacctggtcctcaacagta

SEQ ID NO: 569268 - DNA, 19 bp, Mus musculus
  siRNA target sequence for Reg3a (NM_011259.1,90-108).
cctggtcctcaacagtatt

SEQ ID NO: 569269 - DNA, 19 bp, Mus musculus
  siRNA target sequence for Reg3a (NM_011259.1,91-109).
ctggtcctcaacagtattt

SEQ ID NO: 569270 - DNA, 19 bp, Mus musculus
  siRNA target sequence for Reg3a (NM_011259.1,94-112).
gtcctcaacagtatttcct

SEQ ID NO: 569271 - DNA, 19 bp, Mus musculus
  siRNA target sequence for Reg3a (NM_011259.1,194-212).
gctgccccatgggttacaa

SEQ ID NO: 569272 - DNA, 19 bp, Mus musculus
  siRNA target sequence for Reg3a (NM_011259.1,225-243).
ccactgctatgccttagtt

SEQ ID NO: 569273 - DNA, 19 bp, Mus musculus
  siRNA target sequence for Reg3a (NM_011259.1,226-244).
cactgctatgccttagtta

SEQ ID NO: 569274 - DNA, 19 bp, Mus musculus
  siRNA target sequence for Reg3a (NM_011259.1,237-255).
cttagttatgacacctaaa

SEQ ID NO: 569275 - DNA, 19 bp, Mus musculus
  siRNA target sequence for Reg3a (NM_011259.1,241-259).
gttatgacacctaaatcct

SEQ ID NO: 569276 - DNA, 19 bp, Mus musculus
  siRNA target sequence for Reg3a (NM_011259.1,299-317).
gacatctcgtgtctattct

SEQ ID NO: 569277 - DNA, 19 bp, Mus musculus
  siRNA target sequence for Reg3a (NM_011259.1,301-319).
catctcgtgtctattctta

SEQ ID NO: 569278 - DNA, 19 bp, Mus musculus
  siRNA target sequence for Reg3a (NM_011259.1,392-410).
ggctccatgatccaacaat

SEQ ID NO: 569279 - DNA, 19 bp, Mus musculus
  siRNA target sequence for Reg3a (NM_011259.1,452-470).
ccgatgtgctgaattatct

SEQ ID NO: 569280 - DNA, 19 bp, Mus musculus
  siRNA target sequence for Reg3a (NM_011259.1,454-472).
gatgtgctgaattatctta

SEQ ID NO: 569281 - DNA, 19 bp, Mus musculus
  siRNA target sequence for Reg3a (NM_011259.1,564-582).
ctgcgatgggacattacca

SEQ ID NO: 569282 - DNA, 19 bp, Mus musculus
  siRNA target sequence for Reg3a (NM_011259.1,566-584).
gcgatgggacattaccatt

SEQ ID NO: 569283 - DNA, 19 bp, Mus musculus
  siRNA target sequence for Reg3a (NM_011259.1,571-589).
gggacattaccatttgtct

SEQ ID NO: 569284 - DNA, 19 bp, Mus musculus
  siRNA target sequence for Reg3g (NM_011260.1,185-203).
ctatgccttgtttagtgta

SEQ ID NO: 569285 - DNA, 19 bp, Mus musculus
  siRNA target sequence for Reg3g (NM_011260.1,319-337).
gtaacagtggccaatatgt

SEQ ID NO: 569286 - DNA, 19 bp, Mus musculus
  siRNA target sequence for Reg3g (NM_011260.1,356-374).
cccgacactgggctatgaa

SEQ ID NO: 569287 - DNA, 19 bp, Mus musculus
  siRNA target sequence for Reg3g (NM_011260.1,400-418).
gcaatgctgatgtgatgaa

SEQ ID NO: 569288 - DNA, 19 bp, Mus musculus
  siRNA target sequence for Reg4 (NM_026328.1,181-199).
gcgtgcggctactcttact

SEQ ID NO: 569289 - DNA, 19 bp, Mus musculus
  siRNA target sequence for Reg4 (NM_026328.1,225-243).
gtcctgagcgatatcttga

SEQ ID NO: 569290 - DNA, 19 bp, Mus musculus
  siRNA target sequence for Reg4 (NM_026328.1,256-274).
ccccaggatggttttacta

SEQ ID NO: 569291 - DNA, 19 bp, Mus musculus
  siRNA target sequence for Reg4 (NM_026328.1,257-275).
cccaggatggttttactat

SEQ ID NO: 569292 - DNA, 19 bp, Mus musculus
  siRNA target sequence for Reg4 (NM_026328.1,258-276).
ccaggatggttttactata

SEQ ID NO: 569293 - DNA, 19 bp, Mus musculus
  siRNA target sequence for Reg4 (NM_026328.1,365-383).
ggcatctgtcttgaatcaa

SEQ ID NO: 569294 - DNA, 19 bp, Mus musculus
  siRNA target sequence for Reg4 (NM_026328.1,366-384).
gcatctgtcttgaatcaaa

SEQ ID NO: 569295 - DNA, 19 bp, Mus musculus
  siRNA target sequence for Reg4 (NM_026328.1,390-408).
gccagtgtcatatcaaagt

SEQ ID NO: 569296 - DNA, 19 bp, Mus musculus
  siRNA target sequence for Reg4 (NM_026328.1,391-409).
ccagtgtcatatcaaagta

SEQ ID NO: 569297 - DNA, 19 bp, Mus musculus
  siRNA target sequence for Reg4 (NM_026328.1,398-416).
catatcaaagtacataact

SEQ ID NO: 569298 - DNA, 19 bp, Mus musculus
  siRNA target sequence for Reg4 (NM_026328.1,566-584).
caaggataaattcttaact

SEQ ID NO: 569299 - DNA, 19 bp, Mus musculus
  siRNA target sequence for Sele (NM_011345.1,192-210).
gcacagcttggtactacaa

SEQ ID NO: 569300 - DNA, 19 bp, Mus musculus
  siRNA target sequence for Sele (NM_011345.1,193-211).
cacagcttggtactacaat

SEQ ID NO: 569301 - DNA, 19 bp, Mus musculus
  siRNA target sequence for Sele (NM_011345.1,299-317).
gagatcaactaccttaact

SEQ ID NO: 569302 - DNA, 19 bp, Mus musculus
  siRNA target sequence for Sele (NM_011345.1,329-347).
cattcaccgagttactact

SEQ ID NO: 569303 - DNA, 19 bp, Mus musculus
  siRNA target sequence for Sele (NM_011345.1,510-528).
ggaatgacgagagatgtaa

SEQ ID NO: 569304 - DNA, 19 bp, Mus musculus
  siRNA target sequence for Sele (NM_011345.1,515-533).
gacgagagatgtaacaaaa

SEQ ID NO: 569305 - DNA, 19 bp, Mus musculus
  siRNA target sequence for Sele (NM_011345.1,553-571).
cacagcttcgtgtaccaat

SEQ ID NO: 569306 - DNA, 19 bp, Mus musculus
  siRNA target sequence for Sele (NM_011345.1,557-575).
gcttcgtgtaccaatgcat

SEQ ID NO: 569307 - DNA, 19 bp, Mus musculus
  siRNA target sequence for Sele (NM_011345.1,587-605).
catggtgaatgcatagaga

SEQ ID NO: 569308 - DNA, 19 bp, Mus musculus
  siRNA target sequence for Sele (NM_011345.1,598-616).
catagagaccatcaatagt

SEQ ID NO: 569309 - DNA, 19 bp, Mus musculus
  siRNA target sequence for Sele (NM_011345.1,602-620).
gagaccatcaatagttaca

SEQ ID NO: 569310 - DNA, 19 bp, Mus musculus
  siRNA target sequence for Sele (NM_011345.1,661-679).
gcaagctgtgacttgcaaa

SEQ ID NO: 569311 - DNA, 19 bp, Mus musculus
  siRNA target sequence for Sele (NM_011345.1,686-704).
gaacaccctgactatggaa

SEQ ID NO: 569312 - DNA, 19 bp, Mus musculus
  siRNA target sequence for Sele (NM_011345.1,847-865).
ctgccatgtggttgaatgt

SEQ ID NO: 569313 - DNA, 19 bp, Mus musculus
  siRNA target sequence for Sele (NM_011345.1,849-867).
gccatgtggttgaatgtga

SEQ ID NO: 569314 - DNA, 19 bp, Mus musculus
  siRNA target sequence for Sele (NM_011345.1,850-868).
ccatgtggttgaatgtgaa

SEQ ID NO: 569315 - DNA, 19 bp, Mus musculus
  siRNA target sequence for Sele (NM_011345.1,884-902).
gcccacggtatcaggaaat

SEQ ID NO: 569316 - DNA, 19 bp, Mus musculus
  siRNA target sequence for Sele (NM_011345.1,886-904).
ccacggtatcaggaaatgt

SEQ ID NO: 569317 - DNA, 19 bp, Mus musculus
  siRNA target sequence for Sele (NM_011345.1,887-905).
cacggtatcaggaaatgtt

SEQ ID NO: 569318 - DNA, 19 bp, Mus musculus
  siRNA target sequence for Sele (NM_011345.1,898-916).
gaaatgttcctcaaatcct

SEQ ID NO: 569319 - DNA, 19 bp, Mus musculus
  siRNA target sequence for Sele (NM_011345.1,1005-1023).
ctggcatctgggataacga

SEQ ID NO: 569320 - DNA, 19 bp, Mus musculus
  siRNA target sequence for Sele (NM_011345.1,1021-1039).
cgagacgccatcatgcaaa

SEQ ID NO: 569321 - DNA, 19 bp, Mus musculus
  siRNA target sequence for Sele (NM_011345.1,1104-1122).
ctggagaacttgcgtttaa

SEQ ID NO: 569322 - DNA, 19 bp, Mus musculus
  siRNA target sequence for Sele (NM_011345.1,1106-1124).
ggagaacttgcgtttaagt

SEQ ID NO: 569323 - DNA, 19 bp, Mus musculus
  siRNA target sequence for Sele (NM_011345.1,1109-1127).
gaacttgcgtttaagtcat

SEQ ID NO: 569324 - DNA, 19 bp, Mus musculus
  siRNA target sequence for Sele (NM_011345.1,1197-1215).
ggcagtggacaccacaaat

SEQ ID NO: 569325 - DNA, 19 bp, Mus musculus
  siRNA target sequence for Sele (NM_011345.1,1259-1277).
cagcagggcaacatgaaat

SEQ ID NO: 569326 - DNA, 19 bp, Mus musculus
  siRNA target sequence for Sele (NM_011345.1,1290-1308).
cttctggacctttccaaaa

SEQ ID NO: 569327 - DNA, 19 bp, Mus musculus
  siRNA target sequence for Sele (NM_011345.1,1332-1350).
gcgaagaaggatttgaact

SEQ ID NO: 569328 - DNA, 19 bp, Mus musculus
  siRNA target sequence for Sele (NM_011345.1,1351-1369).
gaagggatcaagaagactt

SEQ ID NO: 569329 - DNA, 19 bp, Mus musculus
  siRNA target sequence for Sele (NM_011345.1,1383-1401).
gaggggaatgggatagcaa

SEQ ID NO: 569330 - DNA, 19 bp, Mus musculus
  siRNA target sequence for Sele (NM_011345.1,1484-1502).
ggagaattcacctacaagt

SEQ ID NO: 569331 - DNA, 19 bp, Mus musculus
  siRNA target sequence for Sele (NM_011345.1,1521-1539).
gcaatgagggctttagctt

SEQ ID NO: 569332 - DNA, 19 bp, Mus musculus
  siRNA target sequence for Sele (NM_011345.1,1675-1693).
cggcacagtgtgtgagttt

SEQ ID NO: 569333 - DNA, 19 bp, Mus musculus
  siRNA target sequence for Sele (NM_011345.1,1678-1696).
cacagtgtgtgagtttaca

SEQ ID NO: 569334 - DNA, 19 bp, Mus musculus
  siRNA target sequence for Sele (NM_011345.1,1706-1724).
gattggacactcaatggat

SEQ ID NO: 569335 - DNA, 19 bp, Mus musculus
  siRNA target sequence for Sele (NM_011345.1,1807-1825).
cttggtagttgcactttct

SEQ ID NO: 569336 - DNA, 19 bp, Mus musculus
  siRNA target sequence for Sele (NM_011345.1,1854-1872).
cctcattgctctacttgtt

SEQ ID NO: 569337 - DNA, 19 bp, Mus musculus
  siRNA target sequence for Sele (NM_011345.1,1862-1880).
ctctacttgttgatgagat

SEQ ID NO: 569338 - DNA, 19 bp, Mus musculus
  siRNA target sequence for Sele (NM_011345.1,1876-1894).
gagatactttcggaagaaa

SEQ ID NO: 569339 - DNA, 19 bp, Mus musculus
  siRNA target sequence for Sell (NM_011346.1,119-137).
ggagatgtgagggtactta

SEQ ID NO: 569340 - DNA, 19 bp, Mus musculus
  siRNA target sequence for Sell (NM_011346.1,214-232).
cactgttggacttaccatt

SEQ ID NO: 569341 - DNA, 19 bp, Mus musculus
  siRNA target sequence for Sell (NM_011346.1,216-234).
ctgttggacttaccattat

SEQ ID NO: 569342 - DNA, 19 bp, Mus musculus
  siRNA target sequence for Sell (NM_011346.1,224-242).
cttaccattattctgaaaa

SEQ ID NO: 569343 - DNA, 19 bp, Mus musculus
  siRNA target sequence for Sell (NM_011346.1,243-261).
gcccatgaactgggaaaat

SEQ ID NO: 569344 - DNA, 19 bp, Mus musculus
  siRNA target sequence for Sell (NM_011346.1,292-310).
gatttagtcgccatacaaa

SEQ ID NO: 569345 - DNA, 19 bp, Mus musculus
  siRNA target sequence for Sell (NM_011346.1,347-365).
ccaaaagcccttattacta

SEQ ID NO: 569346 - DNA, 19 bp, Mus musculus
  siRNA target sequence for Sell (NM_011346.1,368-386).
ggataggaatcaggaaaat

SEQ ID NO: 569347 - DNA, 19 bp, Mus musculus
  siRNA target sequence for Sell (NM_011346.1,417-435).
caaaactctcactaaagaa

SEQ ID NO: 569348 - DNA, 19 bp, Mus musculus
  siRNA target sequence for Sell (NM_011346.1,514-532).
cgagactctgggaaatgga

SEQ ID NO: 569349 - DNA, 19 bp, Mus musculus
  siRNA target sequence for Sell (NM_011346.1,538-556).
gacgcctgtcacaaacgaa

SEQ ID NO: 569350 - DNA, 19 bp, Mus musculus
  siRNA target sequence for Sell (NM_011346.1,613-631).
gaatgtgtggaaactatca

SEQ ID NO: 569351 - DNA, 19 bp, Mus musculus
  siRNA target sequence for Sell (NM_011346.1,1163-1181).
ggctggcaaggcggttaaa

SEQ ID NO: 569352 - DNA, 19 bp, Mus musculus
  siRNA target sequence for Sell (NM_011346.1,1164-1182).
gctggcaaggcggttaaaa

SEQ ID NO: 569353 - DNA, 19 bp, Mus musculus
  siRNA target sequence for Sell (NM_011346.1,1165-1183).
ctggcaaggcggttaaaaa

SEQ ID NO: 569354 - DNA, 19 bp, Mus musculus
  siRNA target sequence for Selp (NM_011347.1,12-30).
ggctggctgcccaaaaggt

SEQ ID NO: 569355 - DNA, 19 bp, Mus musculus
  siRNA target sequence for Selp (NM_011347.1,13-31).
gctggctgcccaaaaggtt

SEQ ID NO: 569356 - DNA, 19 bp, Mus musculus
  siRNA target sequence for Selp (NM_011347.1,96-114).
gatctctgagcttgtaaat

SEQ ID NO: 569357 - DNA, 19 bp, Mus musculus
  siRNA target sequence for Selp (NM_011347.1,124-142).
gtggctgcgtggacctata

SEQ ID NO: 569358 - DNA, 19 bp, Mus musculus
  siRNA target sequence for Selp (NM_011347.1,127-145).
gctgcgtggacctataact

SEQ ID NO: 569359 - DNA, 19 bp, Mus musculus
  siRNA target sequence for Selp (NM_011347.1,128-146).
ctgcgtggacctataacta

SEQ ID NO: 569360 - DNA, 19 bp, Mus musculus
  siRNA target sequence for Selp (NM_011347.1,130-148).
gcgtggacctataactaca

SEQ ID NO: 569361 - DNA, 19 bp, Mus musculus
  siRNA target sequence for Selp (NM_011347.1,147-165).
cagcacaaaggcatactca

SEQ ID NO: 569362 - DNA, 19 bp, Mus musculus
  siRNA target sequence for Selp (NM_011347.1,157-175).
gcatactcatggaataact

SEQ ID NO: 569363 - DNA, 19 bp, Mus musculus
  siRNA target sequence for Selp (NM_011347.1,192-210).
gaggcacttcacagactta

SEQ ID NO: 569364 - DNA, 19 bp, Mus musculus
  siRNA target sequence for Selp (NM_011347.1,253-271).
gtcatcccattcttcaact

SEQ ID NO: 569365 - DNA, 19 bp, Mus musculus
  siRNA target sequence for Selp (NM_011347.1,281-299).
ggattggtatccgaaagat

SEQ ID NO: 569366 - DNA, 19 bp, Mus musculus
  siRNA target sequence for Selp (NM_011347.1,292-310).
cgaaagatcaacaataagt

SEQ ID NO: 569367 - DNA, 19 bp, Mus musculus
  siRNA target sequence for Selp (NM_011347.1,312-330).
gacctgggtgggaacaaat

SEQ ID NO: 569368 - DNA, 19 bp, Mus musculus
  siRNA target sequence for Selp (NM_011347.1,314-332).
cctgggtgggaacaaataa

SEQ ID NO: 569369 - DNA, 19 bp, Mus musculus
  siRNA target sequence for Selp (NM_011347.1,535-553).
gagaccattgggagctata

SEQ ID NO: 569370 - DNA, 19 bp, Mus musculus
  siRNA target sequence for Selp (NM_011347.1,581-599).
ggccagagtgtgaatacgt

SEQ ID NO: 569371 - DNA, 19 bp, Mus musculus
  siRNA target sequence for Selp (NM_011347.1,597-615).
cgtcaaggagtgtggaaaa

SEQ ID NO: 569372 - DNA, 19 bp, Mus musculus
  siRNA target sequence for Selp (NM_011347.1,618-636).
caacatccctcaacatgtt

SEQ ID NO: 569373 - DNA, 19 bp, Mus musculus
  siRNA target sequence for Selp (NM_011347.1,661-679).
ggggagttctccttcaact

SEQ ID NO: 569374 - DNA, 19 bp, Mus musculus
  siRNA target sequence for Selp (NM_011347.1,779-797).
gtgacgctgtgcaatgtca

SEQ ID NO: 569375 - DNA, 19 bp, Mus musculus
  siRNA target sequence for Selp (NM_011347.1,831-849).
ctgtatgcacccaattgct

SEQ ID NO: 569376 - DNA, 19 bp, Mus musculus
  siRNA target sequence for Selp (NM_011347.1,861-879).
cgactccagctgtaaattt

SEQ ID NO: 569377 - DNA, 19 bp, Mus musculus
  siRNA target sequence for Selp (NM_011347.1,882-900).
gtgccagcctggatataga

SEQ ID NO: 569378 - DNA, 19 bp, Mus musculus
  siRNA target sequence for Selp (NM_011347.1,1033-1051).
ggaacctttgggtacaaca

SEQ ID NO: 569379 - DNA, 19 bp, Mus musculus
  siRNA target sequence for Selp (NM_011347.1,1173-1191).
gtttccggttcccagtaaa

SEQ ID NO: 569380 - DNA, 19 bp, Mus musculus
  siRNA target sequence for Selp (NM_011347.1,1275-1293).
ggtgggagcaagtgtgata

SEQ ID NO: 569381 - DNA, 19 bp, Mus musculus
  siRNA target sequence for Selp (NM_011347.1,1322-1340).
gggctcctcccgaatgtca

SEQ ID NO: 569382 - DNA, 19 bp, Mus musculus
  siRNA target sequence for Selp (NM_011347.1,1323-1341).
ggctcctcccgaatgtcaa

SEQ ID NO: 569383 - DNA, 19 bp, Mus musculus
  siRNA target sequence for Selp (NM_011347.1,1396-1414).
cagcctcttgggaattcca

SEQ ID NO: 569384 - DNA, 19 bp, Mus musculus
  siRNA target sequence for Selp (NM_011347.1,1405-1423).
gggaattccacctacaaat

SEQ ID NO: 569385 - DNA, 19 bp, Mus musculus
  siRNA target sequence for Selp (NM_011347.1,1442-1460).
gcgatgaaggattttatct

SEQ ID NO: 569386 - DNA, 19 bp, Mus musculus
  siRNA target sequence for Selp (NM_011347.1,1443-1461).
cgatgaaggattttatcta

SEQ ID NO: 569387 - DNA, 19 bp, Mus musculus
  siRNA target sequence for Selp (NM_011347.1,1707-1725).
ctgcaaaggcataacatca

SEQ ID NO: 569388 - DNA, 19 bp, Mus musculus
  siRNA target sequence for Selp (NM_011347.1,1810-1828).
ggtccgaacaccacttgtt

SEQ ID NO: 569389 - DNA, 19 bp, Mus musculus
  siRNA target sequence for Selp (NM_011347.1,1811-1829).
gtccgaacaccacttgtta

SEQ ID NO: 569390 - DNA, 19 bp, Mus musculus
  siRNA target sequence for Selp (NM_011347.1,1813-1831).
ccgaacaccacttgttact

SEQ ID NO: 569391 - DNA, 19 bp, Mus musculus
  siRNA target sequence for Selp (NM_011347.1,1814-1832).
cgaacaccacttgttactt

SEQ ID NO: 569392 - DNA, 19 bp, Mus musculus
  siRNA target sequence for Selp (NM_011347.1,1815-1833).
gaacaccacttgttacttt

SEQ ID NO: 569393 - DNA, 19 bp, Mus musculus
  siRNA target sequence for Selp (NM_011347.1,1834-1852).
gggtgcaaaaccggattta

SEQ ID NO: 569394 - DNA, 19 bp, Mus musculus
  siRNA target sequence for Selp (NM_011347.1,1836-1854).
gtgcaaaaccggatttaca

SEQ ID NO: 569395 - DNA, 19 bp, Mus musculus
  siRNA target sequence for Selp (NM_011347.1,1838-1856).
gcaaaaccggatttacact

SEQ ID NO: 569396 - DNA, 19 bp, Mus musculus
  siRNA target sequence for Selp (NM_011347.1,1976-1994).
ccaatccctggggaaactt

SEQ ID NO: 569397 - DNA, 19 bp, Mus musculus
  siRNA target sequence for Selp (NM_011347.1,1977-1995).
caatccctggggaaacttt

SEQ ID NO: 569398 - DNA, 19 bp, Mus musculus
  siRNA target sequence for Selp (NM_011347.1,2210-2228).
gaaagcgtctcagaaagaa

SEQ ID NO: 569399 - DNA, 19 bp, Mus musculus
  siRNA target sequence for Selp (NM_011347.1,2273-2291).
catacggagtcttcactaa

SEQ ID NO: 569400 - DNA, 19 bp, Mus musculus
  siRNA target sequence for Selp (NM_011347.1,2283-2301).
cttcactaacgctgcatat

SEQ ID NO: 569401 - DNA, 19 bp, Mus musculus
  siRNA target sequence for Selpl (NM_009151.2,158-176).
cctgggggcatgaaaccaa

SEQ ID NO: 569402 - DNA, 19 bp, Mus musculus
  siRNA target sequence for Selpl (NM_009151.2,219-237).
ggttggggatgacgatttt

SEQ ID NO: 569403 - DNA, 19 bp, Mus musculus
  siRNA target sequence for Selpl (NM_009151.2,238-256).
gaggaccctgactatacgt

SEQ ID NO: 569404 - DNA, 19 bp, Mus musculus
  siRNA target sequence for Selpl (NM_009151.2,240-258).
ggaccctgactatacgtat

SEQ ID NO: 569405 - DNA, 19 bp, Mus musculus
  siRNA target sequence for Selpl (NM_009151.2,241-259).
gaccctgactatacgtata

SEQ ID NO: 569406 - DNA, 19 bp, Mus musculus
  siRNA target sequence for Selpl (NM_009151.2,244-262).
cctgactatacgtataaca

SEQ ID NO: 569407 - DNA, 19 bp, Mus musculus
  siRNA target sequence for Selpl (NM_009151.2,268-286).
cccccagaattgctgaaaa

SEQ ID NO: 569408 - DNA, 19 bp, Mus musculus
  siRNA target sequence for Selpl (NM_009151.2,270-288).
cccagaattgctgaaaaat

SEQ ID NO: 569409 - DNA, 19 bp, Mus musculus
  siRNA target sequence for Selpl (NM_009151.2,274-292).
gaattgctgaaaaatgtca

SEQ ID NO: 569410 - DNA, 19 bp, Mus musculus
  siRNA target sequence for Selpl (NM_009151.2,460-478).
gccacacagtggagtctaa

SEQ ID NO: 569411 - DNA, 19 bp, Mus musculus
  siRNA target sequence for Selpl (NM_009151.2,777-795).
gattcaggctgtaaaaact

SEQ ID NO: 569412 - DNA, 19 bp, Mus musculus
  siRNA target sequence for Selpl (NM_009151.2,854-872).
cggcgtccacagagtctaa

SEQ ID NO: 569413 - DNA, 19 bp, Mus musculus
  siRNA target sequence for Selpl (NM_009151.2,894-912).
gccatccgtgactcactta

SEQ ID NO: 569414 - DNA, 19 bp, Mus musculus
  siRNA target sequence for Selpl (NM_009151.2,1088-1106).
cccgtaagacccacatgta

SEQ ID NO: 569415 - DNA, 19 bp, Mus musculus
  siRNA target sequence for Sftpa (NM_023134.3,159-177).
gtgcaatgggacagaagtt

SEQ ID NO: 569416 - DNA, 19 bp, Mus musculus
  siRNA target sequence for Sftpa (NM_023134.3,206-224).
ctcccggaaaccatggttt

SEQ ID NO: 569417 - DNA, 19 bp, Mus musculus
  siRNA target sequence for Sftpa (NM_023134.3,428-446).
ctgcactctacgagatcaa

SEQ ID NO: 569418 - DNA, 19 bp, Mus musculus
  siRNA target sequence for Sftpa (NM_023134.3,431-449).
cactctacgagatcaaaca

SEQ ID NO: 569419 - DNA, 19 bp, Mus musculus
  siRNA target sequence for Sftpa (NM_023134.3,438-456).
cgagatcaaacatcagatt

SEQ ID NO: 569420 - DNA, 19 bp, Mus musculus
  siRNA target sequence for Sftpa (NM_023134.3,500-518).
cagtgggggataaagtctt

SEQ ID NO: 569421 - DNA, 19 bp, Mus musculus
  siRNA target sequence for Sftpa (NM_023134.3,505-523).
ggggataaagtcttttcca

SEQ ID NO: 569422 - DNA, 19 bp, Mus musculus
  siRNA target sequence for Sftpa (NM_023134.3,536-554).
cagtcaactttgataccat

SEQ ID NO: 569423 - DNA, 19 bp, Mus musculus
  siRNA target sequence for Sftpa (NM_023134.3,538-556).
gtcaactttgataccatta

SEQ ID NO: 569424 - DNA, 19 bp, Mus musculus
  siRNA target sequence for Sftpa (NM_023134.3,540-558).
caactttgataccattaga

SEQ ID NO: 569425 - DNA, 19 bp, Mus musculus
  siRNA target sequence for Sftpa (NM_023134.3,616-634).
gaggccatcgcaagcatta

SEQ ID NO: 569426 - DNA, 19 bp, Mus musculus
  siRNA target sequence for Sftpa (NM_023134.3,618-636).
ggccatcgcaagcattaca

SEQ ID NO: 569427 - DNA, 19 bp, Mus musculus
  siRNA target sequence for Sftpa (NM_023134.3,619-637).
gccatcgcaagcattacaa

SEQ ID NO: 569428 - DNA, 19 bp, Mus musculus
  siRNA target sequence for Sftpa (NM_023134.3,620-638).
ccatcgcaagcattacaaa

SEQ ID NO: 569429 - DNA, 19 bp, Mus musculus
  siRNA target sequence for Sftpa (NM_023134.3,625-643).
gcaagcattacaaagaagt

SEQ ID NO: 569430 - DNA, 19 bp, Mus musculus
  siRNA target sequence for Sftpa (NM_023134.3,645-663).
caacacctatccctactta

SEQ ID NO: 569431 - DNA, 19 bp, Mus musculus
  siRNA target sequence for Sftpa (NM_023134.3,657-675).
ctacttaggtgtgattgaa

SEQ ID NO: 569432 - DNA, 19 bp, Mus musculus
  siRNA target sequence for Sftpa (NM_023134.3,822-840).
gtaccggctggccatttgt

SEQ ID NO: 569433 - DNA, 19 bp, Mus musculus
  siRNA target sequence for Sftpa (NM_023134.3,826-844).
cggctggccatttgtgaat

SEQ ID NO: 569434 - DNA, 19 bp, Mus musculus
  siRNA target sequence for Sftpd (NM_009160.1,114-132).
cctctcgcagagatcagta

SEQ ID NO: 569435 - DNA, 19 bp, Mus musculus
  siRNA target sequence for Sftpd (NM_009160.1,336-354).
gggagaacgtggactaagt

SEQ ID NO: 569436 - DNA, 19 bp, Mus musculus
  siRNA target sequence for Sftpd (NM_009160.1,438-456).
caaaccaggtcctaaagga

SEQ ID NO: 569437 - DNA, 19 bp, Mus musculus
  siRNA target sequence for Sftpd (NM_009160.1,737-755).
ccttaaaaggaaaactaca

SEQ ID NO: 569438 - DNA, 19 bp, Mus musculus
  siRNA target sequence for Sftpd (NM_009160.1,817-835).
gttggagacaagatcttca

SEQ ID NO: 569439 - DNA, 19 bp, Mus musculus
  siRNA target sequence for Sftpd (NM_009160.1,1027-1045).
gagcccctggtctattcta

SEQ ID NO: 569440 - DNA, 19 bp, Mus musculus
  siRNA target sequence for Sftpd (NM_009160.1,1029-1047).
gcccctggtctattctaat

SEQ ID NO: 569441 - DNA, 19 bp, Mus musculus
  siRNA target sequence for Sftpd (NM_009160.1,1104-1122).
caccaatgggcaatggaat

SEQ ID NO: 569442 - DNA, 19 bp, Mus musculus
  siRNA target sequence for Sftpd (NM_009160.1,1107-1125).
caatgggcaatggaatgat

SEQ ID NO: 569443 - DNA, 19 bp, Mus musculus
  siRNA target sequence for Sftpd (NM_009160.1,1136-1154).
gagagcagcgccttgttat

SEQ ID NO: 569444 - DNA, 19 bp, Mus musculus
  siRNA target sequence for Siglec5 (NM_145581.1,83-101).
ctggctacggacggttatt

SEQ ID NO: 569445 - DNA, 19 bp, Mus musculus
  siRNA target sequence for Siglec5 (NM_145581.1,136-154).
gggcctgtgcgtctttgta

SEQ ID NO: 569446 - DNA, 19 bp, Mus musculus
  siRNA target sequence for Siglec5 (NM_145581.1,282-300).
ctcaaggtcgattctatct

SEQ ID NO: 569447 - DNA, 19 bp, Mus musculus
  siRNA target sequence for Siglec5 (NM_145581.1,304-322).
ggggaaggaaaatagtcat

SEQ ID NO: 569448 - DNA, 19 bp, Mus musculus
  siRNA target sequence for Siglec5 (NM_145581.1,305-323).
gggaaggaaaatagtcata

SEQ ID NO: 569449 - DNA, 19 bp, Mus musculus
  siRNA target sequence for Siglec5 (NM_145581.1,366-384).
ggacgtacttcttcagatt

SEQ ID NO: 569450 - DNA, 19 bp, Mus musculus
  siRNA target sequence for Siglec5 (NM_145581.1,370-388).
gtacttcttcagattggat

SEQ ID NO: 569451 - DNA, 19 bp, Mus musculus
  siRNA target sequence for Siglec5 (NM_145581.1,652-670).
cacctgccaggtgaactta

SEQ ID NO: 569452 - DNA, 19 bp, Mus musculus
  siRNA target sequence for Siglec5 (NM_145581.1,944-962).
gaccagggaaaatacatct

SEQ ID NO: 569453 - DNA, 19 bp, Mus musculus
  siRNA target sequence for Siglec5 (NM_145581.1,1011-1029).
gcataaggagccttctaca

SEQ ID NO: 569454 - DNA, 19 bp, Mus musculus
  siRNA target sequence for Siglec5 (NM_145581.1,1157-1175).
ggctccttcacggttaagt

SEQ ID NO: 569455 - DNA, 19 bp, Mus musculus
  siRNA target sequence for Siglec5 (NM_145581.1,1492-1510).
ccctgcctccaccataaat

SEQ ID NO: 569456 - DNA, 19 bp, Mus musculus
  siRNA target sequence for Siglec5 (NM_145581.1,1504-1522).
cataaatagtgcaagcata

SEQ ID NO: 569457 - DNA, 19 bp, Mus musculus
  siRNA target sequence for Siglec5 (NM_145581.1,1702-1720).
ggaggctatgaaatctgta

SEQ ID NO: 569458 - DNA, 19 bp, Mus musculus
  siRNA target sequence for Siglec5 (NM_145581.1,1703-1721).
gaggctatgaaatctgtat

SEQ ID NO: 569459 - DNA, 19 bp, Mus musculus
  siRNA target sequence for Siglecl1 (NM_031181.1,419-437).
cacaaataacccaattcgt

SEQ ID NO: 569460 - DNA, 19 bp, Mus musculus
  siRNA target sequence for Siglecl1 (NM_031181.1,531-549).
gatgcggggttatacttct

SEQ ID NO: 569461 - DNA, 19 bp, Mus musculus
  siRNA target sequence for Siglecl1 (NM_031181.1,554-572).
cctggagcgtggaaaaaca

SEQ ID NO: 569462 - DNA, 19 bp, Mus musculus
  siRNA target sequence for Siglecl1 (NM_031181.1,558-576).
gagcgtggaaaaacaaagt

SEQ ID NO: 569463 - DNA, 19 bp, Mus musculus
  siRNA target sequence for Siglecl1 (NM_031181.1,560-578).
gcgtggaaaaacaaagtat

SEQ ID NO: 569464 - DNA, 19 bp, Mus musculus
  siRNA target sequence for Siglecl1 (NM_031181.1,609-627).
gtaacagccctcactaaca

SEQ ID NO: 569465 - DNA, 19 bp, Mus musculus
  siRNA target sequence for Siglecl1 (NM_031181.1,622-640).
ctaacaccccccaaattct

SEQ ID NO: 569466 - DNA, 19 bp, Mus musculus
  siRNA target sequence for Siglecl1 (NM_031181.1,868-886).
gaatgaccacccgtctaaa

SEQ ID NO: 569467 - DNA, 19 bp, Mus musculus
  siRNA target sequence for Siglecl1 (NM_031181.1,877-895).
cccgtctaaacgtgtcata

SEQ ID NO: 569468 - DNA, 19 bp, Mus musculus
  siRNA target sequence for Siglecl1 (NM_031181.1,878-896).
ccgtctaaacgtgtcatat

SEQ ID NO: 569469 - DNA, 19 bp, Mus musculus
  siRNA target sequence for Siglecl1 (NM_031181.1,890-908).
gtcatatgctccaaagaat

SEQ ID NO: 569470 - DNA, 19 bp, Mus musculus
  siRNA target sequence for Siglecl1 (NM_031181.1,1195-1213).
cacagagcagtgcaacttt

SEQ ID NO: 569471 - DNA, 19 bp, Mus musculus
  siRNA target sequence for Siglecl1 (NM_031181.1,1201-1219).
gcagtgcaactttatctga

SEQ ID NO: 569472 - DNA, 19 bp, Mus musculus
  siRNA target sequence for Siglecl1 (NM_031181.1,1249-1267).
gagtcacagccctcctttt

SEQ ID NO: 569473 - DNA, 19 bp, Mus musculus
  siRNA target sequence for Siglecl1 (NM_031181.1,1532-1550).
cacggagtactcagagata

SEQ ID NO: 569474 - DNA, 19 bp, Mus musculus
  siRNA target sequence for Siglecl1 (NM_031181.1,1534-1552).
cggagtactcagagataaa

SEQ ID NO: 569475 - DNA, 19 bp, Mus musculus
  siRNA target sequence for Sn (NM_011426.1,836-854).
cacagccatctggtactat

SEQ ID NO: 569476 - DNA, 19 bp, Mus musculus
  siRNA target sequence for Sn (NM_011426.1,840-858).
gccatctggtactatgact

SEQ ID NO: 569477 - DNA, 19 bp, Mus musculus
  siRNA target sequence for Sn (NM_011426.1,841-859).
ccatctggtactatgacta

SEQ ID NO: 569478 - DNA, 19 bp, Mus musculus
  siRNA target sequence for Sn (NM_011426.1,922-940).
ggggtcgagctgaactgat

SEQ ID NO: 569479 - DNA, 19 bp, Mus musculus
  siRNA target sequence for Sn (NM_011426.1,1017-1035).
cgctttgagatcagtgata

SEQ ID NO: 569480 - DNA, 19 bp, Mus musculus
  siRNA target sequence for Sn (NM_011426.1,1036-1054).
gcaaccgctggttagatgt

SEQ ID NO: 569481 - DNA, 19 bp, Mus musculus
  siRNA target sequence for Sn (NM_011426.1,1040-1058).
ccgctggttagatgtcaaa

SEQ ID NO: 569482 - DNA, 19 bp, Mus musculus
  siRNA target sequence for Sn (NM_011426.1,1266-1284).
caccagacgaccctacata

SEQ ID NO: 569483 - DNA, 19 bp, Mus musculus
  siRNA target sequence for Sn (NM_011426.1,1348-1366).
gtagtcggaaagaggttta

SEQ ID NO: 569484 - DNA, 19 bp, Mus musculus
  siRNA target sequence for Sn (NM_011426.1,1351-1369).
gtcggaaagaggtttacct

SEQ ID NO: 569485 - DNA, 19 bp, Mus musculus
  siRNA target sequence for Sn (NM_011426.1,1588-1606).
gccaagcaacaaatgatat

SEQ ID NO: 569486 - DNA, 19 bp, Mus musculus
  siRNA target sequence for Sn (NM_011426.1,1626-1644).
ccgctcagcctccatgttt

SEQ ID NO: 569487 - DNA, 19 bp, Mus musculus
  siRNA target sequence for Sn (NM_011426.1,1627-1645).
cgctcagcctccatgtttt

SEQ ID NO: 569488 - DNA, 19 bp, Mus musculus
  siRNA target sequence for Sn (NM_011426.1,1743-1761).
cgctatagctggtacaaga

SEQ ID NO: 569489 - DNA, 19 bp, Mus musculus
  siRNA target sequence for Sn (NM_011426.1,1744-1762).
gctatagctggtacaagaa

SEQ ID NO: 569490 - DNA, 19 bp, Mus musculus
  siRNA target sequence for Sn (NM_011426.1,1753-1771).
ggtacaagaaccacattct

SEQ ID NO: 569491 - DNA, 19 bp, Mus musculus
  siRNA target sequence for Sn (NM_011426.1,1824-1842).
gatactggcttctacttct

SEQ ID NO: 569492 - DNA, 19 bp, Mus musculus
  siRNA target sequence for Sn (NM_011426.1,1953-1971).
cttgtgggcatcttgcatt

SEQ ID NO: 569493 - DNA, 19 bp, Mus musculus
  siRNA target sequence for Sn (NM_011426.1,2033-2051).
ctccaactctggagaaaat

SEQ ID NO: 569494 - DNA, 19 bp, Mus musculus
  siRNA target sequence for Sn (NM_011426.1,2132-2150).
cggagagtacacatgctta

SEQ ID NO: 569495 - DNA, 19 bp, Mus musculus
  siRNA target sequence for Sn (NM_011426.1,2173-2191).
caacgtccagcctagactt

SEQ ID NO: 569496 - DNA, 19 bp, Mus musculus
  siRNA target sequence for Sn (NM_011426.1,2176-2194).
cgtccagcctagacttcta

SEQ ID NO: 569497 - DNA, 19 bp, Mus musculus
  siRNA target sequence for Sn (NM_011426.1,2183-2201).
cctagacttctatgctaat

SEQ ID NO: 569498 - DNA, 19 bp, Mus musculus
  siRNA target sequence for Sn (NM_011426.1,2377-2395).
ctgatgcgggctcatacta

SEQ ID NO: 569499 - DNA, 19 bp, Mus musculus
  siRNA target sequence for Sn (NM_011426.1,2379-2397).
gatgcgggctcatactact

SEQ ID NO: 569500 - DNA, 19 bp, Mus musculus
  siRNA target sequence for Sn (NM_011426.1,2382-2400).
gcgggctcatactactgta

SEQ ID NO: 569501 - DNA, 19 bp, Mus musculus
  siRNA target sequence for Sn (NM_011426.1,2487-2505).
gccaggctggatttggata

SEQ ID NO: 569502 - DNA, 19 bp, Mus musculus
  siRNA target sequence for Sn (NM_011426.1,2633-2651).
ctgttcccagcgcacaaaa

SEQ ID NO: 569503 - DNA, 19 bp, Mus musculus
  siRNA target sequence for Sn (NM_011426.1,2635-2653).
gttcccagcgcacaaaagt

SEQ ID NO: 569504 - DNA, 19 bp, Mus musculus
  siRNA target sequence for Sn (NM_011426.1,2725-2743).
gtgaggctagcaacacatt

SEQ ID NO: 569505 - DNA, 19 bp, Mus musculus
  siRNA target sequence for Sn (NM_011426.1,2792-2810).
ggtcatcacaccgtcaaat

SEQ ID NO: 569506 - DNA, 19 bp, Mus musculus
  siRNA target sequence for Sn (NM_011426.1,2793-2811).
gtcatcacaccgtcaaata

SEQ ID NO: 569507 - DNA, 19 bp, Mus musculus
  siRNA target sequence for Sn (NM_011426.1,2795-2813).
catcacaccgtcaaataca

SEQ ID NO: 569508 - DNA, 19 bp, Mus musculus
  siRNA target sequence for Sn (NM_011426.1,3088-3106).
gccacatggccgtgttcat

SEQ ID NO: 569509 - DNA, 19 bp, Mus musculus
  siRNA target sequence for Sn (NM_011426.1,3239-3257).
gctagaggtccgagaacta

SEQ ID NO: 569510 - DNA, 19 bp, Mus musculus
  siRNA target sequence for Sn (NM_011426.1,3303-3321).
cttgggtcagccaacagtt

SEQ ID NO: 569511 - DNA, 19 bp, Mus musculus
  siRNA target sequence for Sn (NM_011426.1,3471-3489).
caggagtcaacctcatcta

SEQ ID NO: 569512 - DNA, 19 bp, Mus musculus
  siRNA target sequence for Sn (NM_011426.1,3494-3512).
ccgcattgcagccataagt

SEQ ID NO: 569513 - DNA, 19 bp, Mus musculus
  siRNA target sequence for Sn (NM_011426.1,3496-3514).
gcattgcagccataagtct

SEQ ID NO: 569514 - DNA, 19 bp, Mus musculus
  siRNA target sequence for Sn (NM_011426.1,3519-3537).
caagctggtgcctaccatt

SEQ ID NO: 569515 - DNA, 19 bp, Mus musculus
  siRNA target sequence for Sn (NM_011426.1,3548-3566).
ggccccagacacagctatt

SEQ ID NO: 569516 - DNA, 19 bp, Mus musculus
  siRNA target sequence for Sn (NM_011426.1,3602-3620).
ctataccccacgtcatgtt

SEQ ID NO: 569517 - DNA, 19 bp, Mus musculus
  siRNA target sequence for Sn (NM_011426.1,3668-3686).
ggtgtgcagtgtacaaagt

SEQ ID NO: 569518 - DNA, 19 bp, Mus musculus
  siRNA target sequence for Sn (NM_011426.1,3697-3715).
cgcagctgcaactgtttca

SEQ ID NO: 569519 - DNA, 19 bp, Mus musculus
  siRNA target sequence for Sn (NM_011426.1,3755-3773).
cgaattggcaggcagtaat

SEQ ID NO: 569520 - DNA, 19 bp, Mus musculus
  siRNA target sequence for Sn (NM_011426.1,3839-3857).
ggatgacgggacctataca

SEQ ID NO: 569521 - DNA, 19 bp, Mus musculus
  siRNA target sequence for Sn (NM_011426.1,3840-3858).
gatgacgggacctatacat

SEQ ID NO: 569522 - DNA, 19 bp, Mus musculus
  siRNA target sequence for Sn (NM_011426.1,4002-4020).
gactcactcagctacacat

SEQ ID NO: 569523 - DNA, 19 bp, Mus musculus
  siRNA target sequence for Sn (NM_011426.1,4433-4451).
ggaaggtgtccgagtgaaa

SEQ ID NO: 569524 - DNA, 19 bp, Mus musculus
  siRNA target sequence for Sn (NM_011426.1,4434-4452).
gaaggtgtccgagtgaaaa

SEQ ID NO: 569525 - DNA, 19 bp, Mus musculus
  siRNA target sequence for Sn (NM_011426.1,4437-4455).
ggtgtccgagtgaaaatga

SEQ ID NO: 569526 - DNA, 19 bp, Mus musculus
  siRNA target sequence for Sn (NM_011426.1,4438-4456).
gtgtccgagtgaaaatgaa

SEQ ID NO: 569527 - DNA, 19 bp, Mus musculus
  siRNA target sequence for Sn (NM_011426.1,4532-4550).
ctatgcctggtttcacaat

SEQ ID NO: 569528 - DNA, 19 bp, Mus musculus
  siRNA target sequence for Sn (NM_011426.1,4609-4627).
ctcacgctggtgcttactt

SEQ ID NO: 569529 - DNA, 19 bp, Mus musculus
  siRNA target sequence for Sn (NM_011426.1,4611-4629).
cacgctggtgcttactttt

SEQ ID NO: 569530 - DNA, 19 bp, Mus musculus
  siRNA target sequence for Sn (NM_011426.1,4673-4691).
cagcctgcaaattctctat

SEQ ID NO: 569531 - DNA, 19 bp, Mus musculus
  siRNA target sequence for Sn (NM_011426.1,4740-4758).
ctcatggtcgtgattcagt

SEQ ID NO: 569532 - DNA, 19 bp, Mus musculus
  siRNA target sequence for Sn (NM_011426.1,4888-4906).
gactacaagtgcaagatgt

SEQ ID NO: 569533 - DNA, 19 bp, Mus musculus
  siRNA target sequence for Sn (NM_011426.1,4917-4935).
gatggcaacacctatgttt

SEQ ID NO: 569534 - DNA, 19 bp, Mus musculus
  siRNA target sequence for Sn (NM_011426.1,4980-4998).
cttctgacggagactgata

SEQ ID NO: 569535 - DNA, 19 bp, Mus musculus
  siRNA target sequence for Sn (NM_011426.1,4985-5003).
gacggagactgatatacgt

SEQ ID NO: 569536 - DNA, 19 bp, Mus musculus
  siRNA target sequence for Sn (NM_011426.1,5036-5054).
gggcacagctctgaactta

SEQ ID NO: 569537 - DNA, 19 bp, Mus musculus
  siRNA target sequence for Sn (NM_011426.1,5037-5055).
ggcacagctctgaacttaa

SEQ ID NO: 569538 - DNA, 19 bp, Mus musculus
  siRNA target sequence for Sn (NM_011426.1,5079-5097).
gggcccacgggcaactctt

SEQ ID NO: 569539 - DNA, 19 bp, Mus musculus
  siRNA target sequence for Sn (NM_011426.1,5114-5132).
gaatcgccaccgactacat

SEQ ID NO: 569540 - DNA, 19 bp, Mus musculus
  siRNA target sequence for Sn (NM_011426.1,5270-5288).
gcccactctcatagtgttt

SEQ ID NO: 569541 - DNA, 19 bp, Mus musculus
  siRNA target sequence for Sn (NM_011426.1,5272-5290).
ccactctcatagtgtttgt

SEQ ID NO: 569542 - DNA, 19 bp, Mus musculus
  siRNA target sequence for Sn (NM_011426.1,5468-5486).
ggagctcggccctagcaat

SEQ ID NO: 569543 - DNA, 19 bp, Mus musculus
  siRNA target sequence for Sn (NM_011426.1,5471-5489).
gctcggccctagcaatcaa

SEQ ID NO: 569544 - DNA, 19 bp, Mus musculus
  siRNA target sequence for Sn (NM_011426.1,5482-5500).
gcaatcaaggggagtatgt

SEQ ID NO: 569545 - DNA, 19 bp, Mus musculus
  siRNA target sequence for Sn (NM_011426.1,5682-5700).
ctgaatgaggatgagaatt

SEQ ID NO: 569546 - DNA, 19 bp, Mus musculus
  siRNA target sequence for Tna (NM_011606.1,571-589).
ggcaacgatgcgaacatct

SEQ ID NO: 569547 - DNA, 19 bp, Mus musculus
  siRNA target sequence for Tna (NM_011606.1,766-784).
gatcagttgccctacatct

SEQ ID NO: 569548 - DNA, 19 bp, Mus musculus
  siRNA target sequence for 2200003E03Rik (NM_023186.3,54-72).
gctggggtctgcctacaat

SEQ ID NO: 569549 - DNA, 19 bp, Mus musculus
  siRNA target sequence for 2200003E03Rik (NM_023186.3,58-76).
gggtctgcctacaatctga

SEQ ID NO: 569550 - DNA, 19 bp, Mus musculus
  siRNA target sequence for 2200003E03Rik (NM_023186.3,60-78).
gtctgcctacaatctgata

SEQ ID NO: 569551 - DNA, 19 bp, Mus musculus
  siRNA target sequence for 2200003E03Rik (NM_023186.3,64-82).
gcctacaatctgatatgct

SEQ ID NO: 569552 - DNA, 19 bp, Mus musculus
  siRNA target sequence for 2200003E03Rik (NM_023186.3,65-83).
cctacaatctgatatgcta

SEQ ID NO: 569553 - DNA, 19 bp, Mus musculus
  siRNA target sequence for 2200003E03Rik (NM_023186.3,66-84).
ctacaatctgatatgctat

SEQ ID NO: 569554 - DNA, 19 bp, Mus musculus
  siRNA target sequence for 2200003E03Rik (NM_023186.3,204-222).
caccatagaatggaatgat

SEQ ID NO: 569555 - DNA, 19 bp, Mus musculus
  siRNA target sequence for 2200003E03Rik (NM_023186.3,216-234).
gaatgatgttactctctat

SEQ ID NO: 569556 - DNA, 19 bp, Mus musculus
  siRNA target sequence for 2200003E03Rik (NM_023186.3,238-256).
gctttcaatgacttgaaaa

SEQ ID NO: 569557 - DNA, 19 bp, Mus musculus
  siRNA target sequence for 2200003E03Rik (NM_023186.3,307-325).
ggaactgctcctttcacta

SEQ ID NO: 569558 - DNA, 19 bp, Mus musculus
  siRNA target sequence for 2200003E03Rik (NM_023186.3,365-383).
cctcagtcatcaaatttct

SEQ ID NO: 569559 - DNA, 19 bp, Mus musculus
  siRNA target sequence for 2200003E03Rik (NM_023186.3,585-603).
ctatgagatccctgaactt

SEQ ID NO: 569560 - DNA, 19 bp, Mus musculus
  siRNA target sequence for 2200003E03Rik (NM_023186.3,621-639).
catccatgtcatgacatat

SEQ ID NO: 569561 - DNA, 19 bp, Mus musculus
  siRNA target sequence for 2200003E03Rik (NM_023186.3,675-693).
gaatagtcctctttacaaa

SEQ ID NO: 569562 - DNA, 19 bp, Mus musculus
  siRNA target sequence for 2200003E03Rik (NM_023186.3,720-738).
ctacctcaatgtggattat

SEQ ID NO: 569563 - DNA, 19 bp, Mus musculus
  siRNA target sequence for 2200003E03Rik (NM_023186.3,730-748).
gtggattatgtcatgaact

SEQ ID NO: 569564 - DNA, 19 bp, Mus musculus
  siRNA target sequence for 2200003E03Rik (NM_023186.3,828-846).
cccctctgataatggaatt

SEQ ID NO: 569565 - DNA, 19 bp, Mus musculus
  siRNA target sequence for 2200003E03Rik (NM_023186.3,1046-1064).
ggcttaagcagaacaattt

SEQ ID NO: 569566 - DNA, 19 bp, Mus musculus
  siRNA target sequence for 2200003E03Rik (NM_023186.3,1310-1328).
ctgtggcagatgacagaaa

SEQ ID NO: 569567 - DNA, 19 bp, Mus musculus
  siRNA target sequence for 2200003E03Rik (NM_023186.3,1337-1355).
ggcagtgcatcaatggaat

SEQ ID NO: 569568 - DNA, 19 bp, Mus musculus
  siRNA target sequence for 2200003E03Rik (NM_023186.3,1343-1361).
gcatcaatggaatcacata

SEQ ID NO: 569569 - DNA, 19 bp, Mus musculus
  siRNA target sequence for 2200003E03Rik (NM_023186.3,1358-1376).
cataccagcagcattgtca

SEQ ID NO: 569570 - DNA, 19 bp, Mus musculus
  siRNA target sequence for 2200003E03Rik (NM_023186.3,1378-1396).
gcagggcttgtttttgata

SEQ ID NO: 569571 - DNA, 19 bp, Mus musculus
  siRNA target sequence for 0710001E19Rik (NM_029716.1,348-366).
ggccaatggtggtagacat

SEQ ID NO: 569572 - DNA, 19 bp, Mus musculus
  siRNA target sequence for 0710001E19Rik (NM_029716.1,382-400).
cgagtccagaggtcttaat

SEQ ID NO: 569573 - DNA, 19 bp, Mus musculus
  siRNA target sequence for 0710001E19Rik (NM_029716.1,385-403).
gtccagaggtcttaattct

SEQ ID NO: 569574 - DNA, 19 bp, Mus musculus
  siRNA target sequence for 0710001E19Rik (NM_029716.1,387-405).
ccagaggtcttaattctga

SEQ ID NO: 569575 - DNA, 19 bp, Mus musculus
  siRNA target sequence for 0710001E19Rik (NM_029716.1,432-450).
gtgacctgattgaagatgt

SEQ ID NO: 569576 - DNA, 19 bp, Mus musculus
  siRNA target sequence for 0710001E19Rik (NM_029716.1,483-501).
cggatatttctgtgaacat

SEQ ID NO: 569577 - DNA, 19 bp, Mus musculus
  siRNA target sequence for 0710001E19Rik (NM_029716.1,508-526).
ggacatcaacattatcact

SEQ ID NO: 569578 - DNA, 19 bp, Mus musculus
  siRNA target sequence for 0710001E19Rik (NM_029716.1,525-543).
ctggtgcacttaaactgta

SEQ ID NO: 569579 - DNA, 19 bp, Mus musculus
  siRNA target sequence for 0710001E19Rik (NM_029716.1,557-575).
ccaattcctctcatcacat

SEQ ID NO: 569580 - DNA, 19 bp, Mus musculus
  siRNA target sequence for 0710001E19Rik (NM_029716.1,725-743).
catgagaaggagaatctga

SEQ ID NO: 569581 - DNA, 19 bp, Mus musculus
  siRNA target sequence for 0710001E19Rik (NM_029716.1,853-871).
gctgcttatcaaaaacgaa

SEQ ID NO: 569582 - DNA, 19 bp, Mus musculus
  siRNA target sequence for 0710001E19Rik (NM_175752.1,456-474).
ggtcggggaggaaagctaa

SEQ ID NO: 569583 - DNA, 19 bp, Mus musculus
  siRNA target sequence for 0710001E19Rik (NM_175752.1,509-527).
cggcagcaaggcttactga

SEQ ID NO: 569584 - DNA, 19 bp, Mus musculus
  siRNA target sequence for 0710001E19Rik (NM_175752.1,548-566).
ctgggctctcaaaagtcat

SEQ ID NO: 569585 - DNA, 19 bp, Mus musculus
  siRNA target sequence for 0710001E19Rik (NM_175752.1,599-617).
gcttattcgcagttgacat

SEQ ID NO: 569586 - DNA, 19 bp, Mus musculus
  siRNA target sequence for 0710001E19Rik (NM_175752.1,613-631).
gacatcacttgttagaaga

SEQ ID NO: 569587 - DNA, 19 bp, Mus musculus
  siRNA target sequence for 0710001E19Rik (NM_175752.1,777-795).
gtgggttgaatgttcacaa

SEQ ID NO: 569588 - DNA, 19 bp, Mus musculus
  siRNA target sequence for Dgke (NM_019505.1,139-157).
ctgcaccgcagggatatct

SEQ ID NO: 569589 - DNA, 19 bp, Mus musculus
  siRNA target sequence for Dgke (NM_019505.1,425-443).
gtggcagccagcctaaact

SEQ ID NO: 569590 - DNA, 19 bp, Mus musculus
  siRNA target sequence for Dgke (NM_019505.1,427-445).
ggcagccagcctaaactgt

SEQ ID NO: 569591 - DNA, 19 bp, Mus musculus
  siRNA target sequence for Dgke (NM_019505.1,448-466).
gattacaggtgcatttggt

SEQ ID NO: 569592 - DNA, 19 bp, Mus musculus
  siRNA target sequence for Dgke (NM_019505.1,549-567).
catcccgccaagctactta

SEQ ID NO: 569593 - DNA, 19 bp, Mus musculus
  siRNA target sequence for Dgke (NM_019505.1,552-570).
cccgccaagctacttaact

SEQ ID NO: 569594 - DNA, 19 bp, Mus musculus
  siRNA target sequence for Dgke (NM_019505.1,553-571).
ccgccaagctacttaactt

SEQ ID NO: 569595 - DNA, 19 bp, Mus musculus
  siRNA target sequence for Dgke (NM_019505.1,556-574).
ccaagctacttaacttcta

SEQ ID NO: 569596 - DNA, 19 bp, Mus musculus
  siRNA target sequence for Dgke (NM_019505.1,560-578).
gctacttaacttctattaa

SEQ ID NO: 569597 - DNA, 19 bp, Mus musculus
  siRNA target sequence for Dgke (NM_019505.1,580-598).
cagatgcgtaaagacaaaa

SEQ ID NO: 569598 - DNA, 19 bp, Mus musculus
  siRNA target sequence for Dgke (NM_019505.1,637-655).
caatggaccccattaataa

SEQ ID NO: 569599 - DNA, 19 bp, Mus musculus
  siRNA target sequence for Dgke (NM_019505.1,668-686).
ctcgtagtggaactaacat

SEQ ID NO: 569600 - DNA, 19 bp, Mus musculus
  siRNA target sequence for Dgke (NM_019505.1,732-750).
ccaggtgtttgatgtaact

SEQ ID NO: 569601 - DNA, 19 bp, Mus musculus
  siRNA target sequence for Dgke (NM_019505.1,733-751).
caggtgtttgatgtaacta

SEQ ID NO: 569602 - DNA, 19 bp, Mus musculus
  siRNA target sequence for Dgke (NM_019505.1,735-753).
ggtgtttgatgtaactaaa

SEQ ID NO: 569603 - DNA, 19 bp, Mus musculus
  siRNA target sequence for Dgke (NM_019505.1,782-800).
gcactcttcttccttatta

SEQ ID NO: 569604 - DNA, 19 bp, Mus musculus
  siRNA target sequence for Dgke (NM_019505.1,850-868).
ctcgatgccattgatgaaa

SEQ ID NO: 569605 - DNA, 19 bp, Mus musculus
  siRNA target sequence for Dgke (NM_019505.1,928-946).
ggtaatgatctgtccaata

SEQ ID NO: 569606 - DNA, 19 bp, Mus musculus
  siRNA target sequence for Dgke (NM_019505.1,1026-1044).
caaactagacagatggaaa

SEQ ID NO: 569607 - DNA, 19 bp, Mus musculus
  siRNA target sequence for Dgke (NM_019505.1,1063-1081).
ggatactacaatttaagaa

SEQ ID NO: 569608 - DNA, 19 bp, Mus musculus
  siRNA target sequence for Dgke (NM_019505.1,1084-1102).
cccaaggagttcacaatga

SEQ ID NO: 569609 - DNA, 19 bp, Mus musculus
  siRNA target sequence for Dgke (NM_019505.1,1090-1108).
gagttcacaatgaacaact

SEQ ID NO: 569610 - DNA, 19 bp, Mus musculus
  siRNA target sequence for Dgke (NM_019505.1,1130-1148).
ccctcatggctctcaattt

SEQ ID NO: 569611 - DNA, 19 bp, Mus musculus
  siRNA target sequence for Dgke (NM_019505.1,1179-1197).
gttttccagccgaatcctt

SEQ ID NO: 569612 - DNA, 19 bp, Mus musculus
  siRNA target sequence for Dgke (NM_019505.1,1195-1213).
cttaacaaggctgtttatt

SEQ ID NO: 569613 - DNA, 19 bp, Mus musculus
  siRNA target sequence for Dgke (NM_019505.1,1223-1241).
gaactaaagattgtttagt

SEQ ID NO: 569614 - DNA, 19 bp, Mus musculus
  siRNA target sequence for Dgke (NM_019505.1,1295-1313).
gagttgagctgcctaactt

SEQ ID NO: 569615 - DNA, 19 bp, Mus musculus
  siRNA target sequence for Dgke (NM_019505.1,1307-1325).
ctaacttggagggcataat

SEQ ID NO: 569616 - DNA, 19 bp, Mus musculus
  siRNA target sequence for Dgke (NM_019505.1,1319-1337).
gcataattgttctgaacat

SEQ ID NO: 569617 - DNA, 19 bp, Mus musculus
  siRNA target sequence for Dgke (NM_019505.1,1457-1475).
ctcaaatccaggtgaaact

SEQ ID NO: 569618 - DNA, 19 bp, Mus musculus
  siRNA target sequence for Dgke (NM_019505.1,1467-1485).
ggtgaaactggcaaatcct

SEQ ID NO: 569619 - DNA, 19 bp, Mus musculus
  siRNA target sequence for Dgke (NM_019505.1,1474-1492).
ctggcaaatccttttcgaa

SEQ ID NO: 569620 - DNA, 19 bp, Mus musculus
  siRNA target sequence for Dgke (NM_019505.1,1476-1494).
ggcaaatccttttcgaata

SEQ ID NO: 569621 - DNA, 19 bp, Mus musculus
  siRNA target sequence for Dgke (NM_019505.1,1508-1526).
cagtgcggctgactttgaa

SEQ ID NO: 569622 - DNA, 19 bp, Mus musculus
  siRNA target sequence for Dgke (NM_019505.1,1576-1594).
ccctgtactgtcaccataa

SEQ ID NO: 569623 - DNA, 19 bp, Mus musculus
  siRNA target sequence for Vav1 (NM_011691.2,208-226).
ctcttgtgccaattgctta

SEQ ID NO: 569624 - DNA, 19 bp, Mus musculus
  siRNA target sequence for Vav1 (NM_011691.2,284-302).
cccagttcctttgtcttaa

SEQ ID NO: 569625 - DNA, 19 bp, Mus musculus
  siRNA target sequence for Vav1 (NM_011691.2,310-328).
cgaaccttcctgtctactt

SEQ ID NO: 569626 - DNA, 19 bp, Mus musculus
  siRNA target sequence for Vav1 (NM_011691.2,323-341).
ctacttgctgtgagaagtt

SEQ ID NO: 569627 - DNA, 19 bp, Mus musculus
  siRNA target sequence for Vav1 (NM_011691.2,348-366).
caagcgcagtgaactcttt

SEQ ID NO: 569628 - DNA, 19 bp, Mus musculus
  siRNA target sequence for Vav1 (NM_011691.2,487-505).
gctctgaacgacgaagata

SEQ ID NO: 569629 - DNA, 19 bp, Mus musculus
  siRNA target sequence for Vav1 (NM_011691.2,488-506).
ctctgaacgacgaagatat

SEQ ID NO: 569630 - DNA, 19 bp, Mus musculus
  siRNA target sequence for Vav1 (NM_011691.2,495-513).
cgacgaagatatttacagt

SEQ ID NO: 569631 - DNA, 19 bp, Mus musculus
  siRNA target sequence for Vav1 (NM_011691.2,587-605).
cagagggggacgagatcta

SEQ ID NO: 569632 - DNA, 19 bp, Mus musculus
  siRNA target sequence for Vav1 (NM_011691.2,634-652).
cctacgccacccaagatga

SEQ ID NO: 569633 - DNA, 19 bp, Mus musculus
  siRNA target sequence for Vav1 (NM_011691.2,694-712).
cagacggaggagaagtata

SEQ ID NO: 569634 - DNA, 19 bp, Mus musculus
  siRNA target sequence for Vav1 (NM_011691.2,818-836).
ctgtgcatacccacttctt

SEQ ID NO: 569635 - DNA, 19 bp, Mus musculus
  siRNA target sequence for Vav1 (NM_011691.2,820-838).
gtgcatacccacttcttaa

SEQ ID NO: 569636 - DNA, 19 bp, Mus musculus
  siRNA target sequence for Vav1 (NM_011691.2,906-924).
ggagaggttcctggtttat

SEQ ID NO: 569637 - DNA, 19 bp, Mus musculus
  siRNA target sequence for Vav1 (NM_011691.2,916-934).
ctggtttatggccgttatt

SEQ ID NO: 569638 - DNA, 19 bp, Mus musculus
  siRNA target sequence for Vav1 (NM_011691.2,956-974).
gcaagcacttggatcaagt

SEQ ID NO: 569639 - DNA, 19 bp, Mus musculus
  siRNA target sequence for Vav1 (NM_011691.2,1002-1020).
gaagctggaggaatgttct

SEQ ID NO: 569640 - DNA, 19 bp, Mus musculus
  siRNA target sequence for Vav1 (NM_011691.2,1220-1238).
ccctacggcagatcacaaa

SEQ ID NO: 569641 - DNA, 19 bp, Mus musculus
  siRNA target sequence for Vav1 (NM_011691.2,1222-1240).
ctacggcagatcacaaact

SEQ ID NO: 569642 - DNA, 19 bp, Mus musculus
  siRNA target sequence for Vav1 (NM_011691.2,1303-1321).
ggtgagctcaagattacct

SEQ ID NO: 569643 - DNA, 19 bp, Mus musculus
  siRNA target sequence for Vav1 (NM_011691.2,1324-1342).
gtggagcgtcgctcaaaga

SEQ ID NO: 569644 - DNA, 19 bp, Mus musculus
  siRNA target sequence for Vav1 (NM_011691.2,1326-1344).
ggagcgtcgctcaaagaca

SEQ ID NO: 569645 - DNA, 19 bp, Mus musculus
  siRNA target sequence for Vav1 (NM_011691.2,1460-1478).
ccggggagcgagacaacaa

SEQ ID NO: 569646 - DNA, 19 bp, Mus musculus
  siRNA target sequence for Vav1 (NM_011691.2,1462-1480).
ggggagcgagacaacaaga

SEQ ID NO: 569647 - DNA, 19 bp, Mus musculus
  siRNA target sequence for Vav1 (NM_011691.2,1596-1614).
caacatttacccagagaat

SEQ ID NO: 569648 - DNA, 19 bp, Mus musculus
  siRNA target sequence for Vav1 (NM_011691.2,1708-1726).
cagggatatcgctgttaca

SEQ ID NO: 569649 - DNA, 19 bp, Mus musculus
  siRNA target sequence for Vav1 (NM_011691.2,1777-1795).
ggtcgccatgggcaagatt

SEQ ID NO: 569650 - DNA, 19 bp, Mus musculus
  siRNA target sequence for Vav1 (NM_011691.2,1778-1796).
gtcgccatgggcaagattt

SEQ ID NO: 569651 - DNA, 19 bp, Mus musculus
  siRNA target sequence for Vav1 (NM_011691.2,2199-2217).
cgccatcagcattaagtat

SEQ ID NO: 569652 - DNA, 19 bp, Mus musculus
  siRNA target sequence for Vav1 (NM_011691.2,2200-2218).
gccatcagcattaagtata

SEQ ID NO: 569653 - DNA, 19 bp, Mus musculus
  siRNA target sequence for Vav1 (NM_011691.2,2201-2219).
ccatcagcattaagtataa

SEQ ID NO: 569654 - DNA, 19 bp, Mus musculus
  siRNA target sequence for Vav1 (NM_011691.2,2220-2238).
cgtggaggtcaagcatatt

SEQ ID NO: 569655 - DNA, 19 bp, Mus musculus
  siRNA target sequence for Vav1 (NM_011691.2,2223-2241).
ggaggtcaagcatattaaa

SEQ ID NO: 569656 - DNA, 19 bp, Mus musculus
  siRNA target sequence for Vav1 (NM_011691.2,2224-2242).
gaggtcaagcatattaaaa

SEQ ID NO: 569657 - DNA, 19 bp, Mus musculus
  siRNA target sequence for Vav1 (NM_011691.2,2417-2435).
ctggaagcaccaagtattt

SEQ ID NO: 569658 - DNA, 19 bp, Mus musculus
  siRNA target sequence for Vav1 (NM_011691.2,2480-2498).
cggaactgtcccttaagga

SEQ ID NO: 569659 - DNA, 19 bp, Mus musculus
  siRNA target sequence for Vav1 (NM_011691.2,2497-2515).
gagggtgatatcatcaaga

SEQ ID NO: 569660 - DNA, 19 bp, Mus musculus
  siRNA target sequence for Vav1 (NM_011691.2,2543-2561).
ggtggcgtggggagatcta

SEQ ID NO: 569661 - DNA, 19 bp, Mus musculus
  siRNA target sequence for Vav1 (NM_011691.2,2574-2592).
ctggttcccttctaactat

SEQ ID NO: 569662 - DNA, 19 bp, Mus musculus
  siRNA target sequence for Vav1 (NM_011691.2,2598-2616).
ggaagactattccgaatat

SEQ ID NO: 569663 - DNA, 19 bp, Mus musculus
  siRNA target sequence for Vav1 (NM_011691.2,2602-2620).
gactattccgaatattgct

SEQ ID NO: 569664 - DNA, 19 bp, Mus musculus
  siRNA target sequence for Vav2 (NM_009500.1,520-538).
gaccttaaggacatcaact

SEQ ID NO: 569665 - DNA, 19 bp, Mus musculus
  siRNA target sequence for Vav2 (NM_009500.1,545-563).
cgcagatgtcccagttctt

SEQ ID NO: 569666 - DNA, 19 bp, Mus musculus
  siRNA target sequence for Vav2 (NM_009500.1,580-598).
cgcaccttcctcaaagtct

SEQ ID NO: 569667 - DNA, 19 bp, Mus musculus
  siRNA target sequence for Vav2 (NM_009500.1,597-615).
ctgccatgacaaatttgga

SEQ ID NO: 569668 - DNA, 19 bp, Mus musculus
  siRNA target sequence for Vav2 (NM_009500.1,941-959).
gctgcttgttagagattca

SEQ ID NO: 569669 - DNA, 19 bp, Mus musculus
  siRNA target sequence for Vav2 (NM_009500.1,1170-1188).
ggaaaggctcctgatctat

SEQ ID NO: 569670 - DNA, 19 bp, Mus musculus
  siRNA target sequence for Vav2 (NM_009500.1,1443-1461).
cttggccatgtacatcaat

SEQ ID NO: 569671 - DNA, 19 bp, Mus musculus
  siRNA target sequence for Vav2 (NM_009500.1,1560-1578).
gattgacggggagcttaaa

SEQ ID NO: 569672 - DNA, 19 bp, Mus musculus
  siRNA target sequence for Vav2 (NM_009500.1,1613-1631).
ggtacctgttcctatttga

SEQ ID NO: 569673 - DNA, 19 bp, Mus musculus
  siRNA target sequence for Vav2 (NM_009500.1,1780-1798).
ggaaagcaaggctttcagt

SEQ ID NO: 569674 - DNA, 19 bp, Mus musculus
  siRNA target sequence for Vav2 (NM_009500.1,1846-1864).
gagatggccatgtcaaaca

SEQ ID NO: 569675 - DNA, 19 bp, Mus musculus
  siRNA target sequence for Vav2 (NM_009500.1,1859-1877).
caaacatcaagccagataa

SEQ ID NO: 569676 - DNA, 19 bp, Mus musculus
  siRNA target sequence for Vav2 (NM_009500.1,1879-1897).
gccaatgccaaccatcata

SEQ ID NO: 569677 - DNA, 19 bp, Mus musculus
  siRNA target sequence for Vav2 (NM_009500.1,1894-1912).
catagcttccagatgtaca

SEQ ID NO: 569678 - DNA, 19 bp, Mus musculus
  siRNA target sequence for Vav2 (NM_009500.1,1935-1953).
caaagcctgcaagatgttt

SEQ ID NO: 569679 - DNA, 19 bp, Mus musculus
  siRNA target sequence for Vav2 (NM_009500.1,2308-2326).
ccatcccgggagatcgatt

SEQ ID NO: 569680 - DNA, 19 bp, Mus musculus
  siRNA target sequence for Vav2 (NM_009500.1,2309-2327).
catcccgggagatcgatta

SEQ ID NO: 569681 - DNA, 19 bp, Mus musculus
  siRNA target sequence for Vav2 (NM_009500.1,2363-2381).
ggcagcagacggacaatct

SEQ ID NO: 569682 - DNA, 19 bp, Mus musculus
  siRNA target sequence for Vav2 (NM_009500.1,2517-2535).
cacggaagctaagaagttt

SEQ ID NO: 569683 - DNA, 19 bp, Mus musculus
  siRNA target sequence for Vav2 (NM_009500.1,2675-2693).
cctgcgcttcctacaactt

SEQ ID NO: 569684 - DNA, 19 bp, Mus musculus
  siRNA target sequence for Vav2 (NM_009500.1,2676-2694).
ctgcgcttcctacaacttt

SEQ ID NO: 569685 - DNA, 19 bp, Mus musculus
  siRNA target sequence for Vav2 (NM_009500.1,2785-2803).
gccgtggccaggtacaact

SEQ ID NO: 569686 - DNA, 19 bp, Mus musculus
  siRNA target sequence for Vav2 (NM_009500.1,2786-2804).
ccgtggccaggtacaactt

SEQ ID NO: 569687 - DNA, 19 bp, Mus musculus
  siRNA target sequence for Vav2 (NM_009500.1,2856-2874).
gatctacagccgaattggt

SEQ ID NO: 569688 - DNA, 19 bp, Mus musculus
  siRNA target sequence for Vav3 (NM_020505.1,178-196).
ggccacactccatcaatct

SEQ ID NO: 569689 - DNA, 19 bp, Mus musculus
  siRNA target sequence for Vav3 (NM_020505.1,180-198).
ccacactccatcaatctga

SEQ ID NO: 569690 - DNA, 19 bp, Mus musculus
  siRNA target sequence for Vav3 (NM_020505.1,181-199).
cacactccatcaatctgaa

SEQ ID NO: 569691 - DNA, 19 bp, Mus musculus
  siRNA target sequence for Vav3 (NM_020505.1,266-284).
cgcctgctgcgataccttt

SEQ ID NO: 569692 - DNA, 19 bp, Mus musculus
  siRNA target sequence for Vav3 (NM_020505.1,281-299).
ctttggaatgaggaaaagt

SEQ ID NO: 569693 - DNA, 19 bp, Mus musculus
  siRNA target sequence for Vav3 (NM_020505.1,313-331).
catttgacctatttgatgt

SEQ ID NO: 569694 - DNA, 19 bp, Mus musculus
  siRNA target sequence for Vav3 (NM_020505.1,368-386).
gctatcccgaacaccaata

SEQ ID NO: 569695 - DNA, 19 bp, Mus musculus
  siRNA target sequence for Vav3 (NM_020505.1,407-425).
gccgttccccactgaagaa

SEQ ID NO: 569696 - DNA, 19 bp, Mus musculus
  siRNA target sequence for Vav3 (NM_020505.1,410-428).
gttccccactgaagaaagt

SEQ ID NO: 569697 - DNA, 19 bp, Mus musculus
  siRNA target sequence for Vav3 (NM_020505.1,454-472).
gccttcccgacttaataga

SEQ ID NO: 569698 - DNA, 19 bp, Mus musculus
  siRNA target sequence for Vav3 (NM_020505.1,455-473).
ccttcccgacttaatagat

SEQ ID NO: 569699 - DNA, 19 bp, Mus musculus
  siRNA target sequence for Vav3 (NM_020505.1,649-667).
cagaaacgttggagtcaat

SEQ ID NO: 569700 - DNA, 19 bp, Mus musculus
  siRNA target sequence for Vav3 (NM_020505.1,655-673).
cgttggagtcaatagaaaa

SEQ ID NO: 569701 - DNA, 19 bp, Mus musculus
  siRNA target sequence for Vav3 (NM_020505.1,711-729).
gcggaatttgattcagtat

SEQ ID NO: 569702 - DNA, 19 bp, Mus musculus
  siRNA target sequence for Vav3 (NM_020505.1,712-730).
cggaatttgattcagtatt

SEQ ID NO: 569703 - DNA, 19 bp, Mus musculus
  siRNA target sequence for Vav3 (NM_020505.1,737-755).
cattcctgaccttgtaaaa

SEQ ID NO: 569704 - DNA, 19 bp, Mus musculus
  siRNA target sequence for Vav3 (NM_020505.1,779-797).
gattcatgattccattgta

SEQ ID NO: 569705 - DNA, 19 bp, Mus musculus
  siRNA target sequence for Vav3 (NM_020505.1,783-801).
catgattccattgtaaata

SEQ ID NO: 569706 - DNA, 19 bp, Mus musculus
  siRNA target sequence for Vav3 (NM_020505.1,790-808).
ccattgtaaataaagatga

SEQ ID NO: 569707 - DNA, 19 bp, Mus musculus
  siRNA target sequence for Vav3 (NM_020505.1,839-857).
caaggaaagattggttatt

SEQ ID NO: 569708 - DNA, 19 bp, Mus musculus
  siRNA target sequence for Vav3 (NM_020505.1,842-860).
ggaaagattggttatttat

SEQ ID NO: 569709 - DNA, 19 bp, Mus musculus
  siRNA target sequence for Vav3 (NM_020505.1,884-902).
gtcagccatctctaaccta

SEQ ID NO: 569710 - DNA, 19 bp, Mus musculus
  siRNA target sequence for Vav3 (NM_020505.1,889-907).
ccatctctaacctagacta

SEQ ID NO: 569711 - DNA, 19 bp, Mus musculus
  siRNA target sequence for Vav3 (NM_020505.1,911-929).
ctctaagacaaaagaagat

SEQ ID NO: 569712 - DNA, 19 bp, Mus musculus
  siRNA target sequence for Vav3 (NM_020505.1,952-970).
gttcaaaaagagccaataa

SEQ ID NO: 569713 - DNA, 19 bp, Mus musculus
  siRNA target sequence for Vav3 (NM_020505.1,963-981).
gccaataacgggaagttta

SEQ ID NO: 569714 - DNA, 19 bp, Mus musculus
  siRNA target sequence for Vav3 (NM_020505.1,965-983).
caataacgggaagtttact

SEQ ID NO: 569715 - DNA, 19 bp, Mus musculus
  siRNA target sequence for Vav3 (NM_020505.1,1182-1200).
ctatctatagagaatttga

SEQ ID NO: 569716 - DNA, 19 bp, Mus musculus
  siRNA target sequence for Vav3 (NM_020505.1,1228-1246).
cacagggagacggtgaaat

SEQ ID NO: 569717 - DNA, 19 bp, Mus musculus
  siRNA target sequence for Vav3 (NM_020505.1,1236-1254).
gacggtgaaatccgaataa

SEQ ID NO: 569718 - DNA, 19 bp, Mus musculus
  siRNA target sequence for Vav3 (NM_020505.1,1239-1257).
ggtgaaatccgaataacca

SEQ ID NO: 569719 - DNA, 19 bp, Mus musculus
  siRNA target sequence for Vav3 (NM_020505.1,1281-1299).
gaaaggcatatcttcttat

SEQ ID NO: 569720 - DNA, 19 bp, Mus musculus
  siRNA target sequence for Vav3 (NM_020505.1,1285-1303).
ggcatatcttcttattcga

SEQ ID NO: 569721 - DNA, 19 bp, Mus musculus
  siRNA target sequence for Vav3 (NM_020505.1,1333-1351).
gcgataactacgagatgaa

SEQ ID NO: 569722 - DNA, 19 bp, Mus musculus
  siRNA target sequence for Vav3 (NM_020505.1,1340-1358).
ctacgagatgaaggaaata

SEQ ID NO: 569723 - DNA, 19 bp, Mus musculus
  siRNA target sequence for Vav3 (NM_020505.1,1409-1427).
gaataaaaagtggtcttat

SEQ ID NO: 569724 - DNA, 19 bp, Mus musculus
  siRNA target sequence for Vav3 (NM_020505.1,1452-1470).
ggacaaaatgggttagaat

SEQ ID NO: 569725 - DNA, 19 bp, Mus musculus
  siRNA target sequence for Vav3 (NM_020505.1,1461-1479).
gggttagaattttattgca

SEQ ID NO: 569726 - DNA, 19 bp, Mus musculus
  siRNA target sequence for Vav3 (NM_020505.1,1532-1550).
caacataaggccagactat

SEQ ID NO: 569727 - DNA, 19 bp, Mus musculus
  siRNA target sequence for Vav3 (NM_020505.1,1545-1563).
gactatgcagactccaatt

SEQ ID NO: 569728 - DNA, 19 bp, Mus musculus
  siRNA target sequence for Vav3 (NM_020505.1,1628-1646).
gaggggaacattttatcaa

SEQ ID NO: 569729 - DNA, 19 bp, Mus musculus
  siRNA target sequence for Vav3 (NM_020505.1,1644-1662).
caaggctacttatgtttta

SEQ ID NO: 569730 - DNA, 19 bp, Mus musculus
  siRNA target sequence for Vav3 (NM_020505.1,1649-1667).
ctacttatgttttaagtgt

SEQ ID NO: 569731 - DNA, 19 bp, Mus musculus
  siRNA target sequence for Vav3 (NM_020505.1,1694-1712).
gggaagagtagacaattgt

SEQ ID NO: 569732 - DNA, 19 bp, Mus musculus
  siRNA target sequence for Vav3 (NM_020505.1,1706-1724).
caattgtggcagagttaat

SEQ ID NO: 569733 - DNA, 19 bp, Mus musculus
  siRNA target sequence for Vav3 (NM_020505.1,1717-1735).
gagttaattccgttgaaca

SEQ ID NO: 569734 - DNA, 19 bp, Mus musculus
  siRNA target sequence for Vav3 (NM_020505.1,1886-1904).
ggcaggcgacactgttgaa

SEQ ID NO: 569735 - DNA, 19 bp, Mus musculus
  siRNA target sequence for Vav3 (NM_020505.1,1891-1909).
gcgacactgttgaacttct

SEQ ID NO: 569736 - DNA, 19 bp, Mus musculus
  siRNA target sequence for Vav3 (NM_020505.1,1938-1956).
cagggacgaaacttagctt

SEQ ID NO: 569737 - DNA, 19 bp, Mus musculus
  siRNA target sequence for Vav3 (NM_020505.1,1996-2014).
cctctccatgtgtacctaa

SEQ ID NO: 569738 - DNA, 19 bp, Mus musculus
  siRNA target sequence for Vav3 (NM_020505.1,2007-2025).
gtacctaaaccagtagatt

SEQ ID NO: 569739 - DNA, 19 bp, Mus musculus
  siRNA target sequence for Vav3 (NM_020505.1,2010-2028).
cctaaaccagtagattatt

SEQ ID NO: 569740 - DNA, 19 bp, Mus musculus
  siRNA target sequence for Vav3 (NM_020505.1,2082-2100).
cttattaacagggtgaata

SEQ ID NO: 569741 - DNA, 19 bp, Mus musculus
  siRNA target sequence for Vav3 (NM_020505.1,2093-2111).
ggtgaatagtacttacctt

SEQ ID NO: 569742 - DNA, 19 bp, Mus musculus
  siRNA target sequence for Vav3 (NM_020505.1,2125-2143).
ccaaagaatctggagaata

SEQ ID NO: 569743 - DNA, 19 bp, Mus musculus
  siRNA target sequence for Vav3 (NM_020505.1,2130-2148).
gaatctggagaatatgcaa

SEQ ID NO: 569744 - DNA, 19 bp, Mus musculus
  siRNA target sequence for Vav3 (NM_020505.1,2145-2163).
gcaattagcattaagtaca

SEQ ID NO: 569745 - DNA, 19 bp, Mus musculus
  siRNA target sequence for Vav3 (NM_020505.1,2152-2170).
gcattaagtacaataatga

SEQ ID NO: 569746 - DNA, 19 bp, Mus musculus
  siRNA target sequence for Vav3 (NM_020505.1,2267-2285).
gcaccattctctcaaagaa

SEQ ID NO: 569747 - DNA, 19 bp, Mus musculus
  siRNA target sequence for Vav3 (NM_020505.1,2286-2304).
gggttcaggaccttagata

SEQ ID NO: 569748 - DNA, 19 bp, Mus musculus
  siRNA target sequence for Vav3 (NM_020505.1,2288-2306).
gttcaggaccttagataca

SEQ ID NO: 569749 - DNA, 19 bp, Mus musculus
  siRNA target sequence for Vav3 (NM_020505.1,2305-2323).
caacgctacagtttccata

SEQ ID NO: 569750 - DNA, 19 bp, Mus musculus
  siRNA target sequence for Vav3 (NM_020505.1,2308-2326).
cgctacagtttccatacaa

SEQ ID NO: 569751 - DNA, 19 bp, Mus musculus
  siRNA target sequence for Vav3 (NM_020505.1,2343-2361).
gctggacagaggggtaata

SEQ ID NO: 569752 - DNA, 19 bp, Mus musculus
  siRNA target sequence for Vav3 (NM_020505.1,2441-2459).
ggagctctccctattgaaa

SEQ ID NO: 569753 - DNA, 19 bp, Mus musculus
  siRNA target sequence for Vav3 (NM_020505.1,2461-2479).
gagacatggtgaagattta

SEQ ID NO: 569754 - DNA, 19 bp, Mus musculus
  siRNA target sequence for Vav3 (NM_020505.1,2480-2498).
cacgaagatgagtgcaaat

SEQ ID NO: 569755 - DNA, 19 bp, Mus musculus
  siRNA target sequence for Vav3 (NM_020505.1,2503-2521).
ggtggagaggtgaagtaaa

SEQ ID NO: 569756 - DNA, 19 bp, Mus musculus
  siRNA target sequence for Vav3 (NM_020505.1,2504-2522).
gtggagaggtgaagtaaat

SEQ ID NO: 569757 - DNA, 19 bp, Mus musculus
  siRNA target sequence for 1300014E15Rik (NM_028793.1,152-170).
ccagagtttgccgaaaaat

SEQ ID NO: 569758 - DNA, 19 bp, Mus musculus
  siRNA target sequence for 1300014E15Rik (NM_028793.1,180-198).
caaccaacaaatgaaatga

SEQ ID NO: 569759 - DNA, 19 bp, Mus musculus
  siRNA target sequence for 1300014E15Rik (NM_028793.1,268-286).
gggatcctattggaagata

SEQ ID NO: 569760 - DNA, 19 bp, Mus musculus
  siRNA target sequence for 1300014E15Rik (NM_028793.1,269-287).
ggatcctattggaagatat

SEQ ID NO: 569761 - DNA, 19 bp, Mus musculus
  siRNA target sequence for 1300014E15Rik (NM_028793.1,307-325).
cactgggtgatatgactaa

SEQ ID NO: 569762 - DNA, 19 bp, Mus musculus
  siRNA target sequence for 1300014E15Rik (NM_028793.1,311-329).
gggtgatatgactaaagaa

SEQ ID NO: 569763 - DNA, 19 bp, Mus musculus
  siRNA target sequence for 1300014E15Rik (NM_028793.1,313-331).
gtgatatgactaaagaaga

SEQ ID NO: 569764 - DNA, 19 bp, Mus musculus
  siRNA target sequence for 1300014E15Rik (NM_028793.1,335-353).
catgattgcatatgttgaa

SEQ ID NO: 569765 - DNA, 19 bp, Mus musculus
  siRNA target sequence for 1300014E15Rik (NM_028793.1,404-422).
gttgctgcatgttataggt

SEQ ID NO: 569766 - DNA, 19 bp, Mus musculus
  siRNA target sequence for 1300014E15Rik (NM_028793.1,421-439).
gtccattttacgagattgt

SEQ ID NO: 569767 - DNA, 19 bp, Mus musculus
  siRNA target sequence for 1300014E15Rik (NM_028793.1,473-491).
gacctcagatcttggtaat

SEQ ID NO: 569768 - DNA, 19 bp, Mus musculus
  siRNA target sequence for 1300014E15Rik (NM_028793.1,511-529).
ccaaagctgttaatggtaa

SEQ ID NO: 569769 - DNA, 19 bp, Mus musculus
  siRNA target sequence for 1300014E15Rik (NM_028793.1,600-618).
cagagcggcagtgatgata

SEQ ID NO: 569770 - DNA, 19 bp, Mus musculus
  siRNA target sequence for 1300014E15Rik (NM_028793.1,604-622).
gcggcagtgatgataagaa

SEQ ID NO: 569771 - DNA, 19 bp, Mus musculus
  siRNA target sequence for 1300014E15Rik (NM_028793.1,605-623).
cggcagtgatgataagaaa

SEQ ID NO: 569772 - DNA, 19 bp, Mus musculus
  siRNA target sequence for 1300014E15Rik (NM_028793.1,674-692).
ctataaaggtagctttgtt

SEQ ID NO: 569773 - DNA, 19 bp, Mus musculus
  siRNA target sequence for 1300014E15Rik (NM_028793.1,841-859).
cttcaggaatacaccattt

SEQ ID NO: 569774 - DNA, 19 bp, Mus musculus
  siRNA target sequence for 1300014E15Rik (NM_028793.1,889-907).
gtgactctatggagcaatt

SEQ ID NO: 569775 - DNA, 19 bp, Mus musculus
  siRNA target sequence for 1300014E15Rik (NM_028793.1,909-927).
ggacaagaagagtattatt

SEQ ID NO: 569776 - DNA, 19 bp, Mus musculus
  siRNA target sequence for 1300014E15Rik (NM_028793.1,939-957).
cctactcagcacttggaaa

SEQ ID NO: 569777 - DNA, 19 bp, Mus musculus
  siRNA target sequence for 1300014E15Rik (NM_028793.1,953-971).
ggaaagttctggtttttgt

SEQ ID NO: 569778 - DNA, 19 bp, Mus musculus
  siRNA target sequence for 1300014E15Rik (NM_028793.1,1144-1162).
ggagagtagggaatagaat

SEQ ID NO: 569779 - DNA, 19 bp, Mus musculus
  siRNA target sequence for 1300014E15Rik (NM_028793.1,1243-1261).
ccagaggcagcctcaatga

SEQ ID NO: 569780 - DNA, 19 bp, Mus musculus
  siRNA target sequence for 1300014E15Rik (NM_028793.1,1268-1286).
cgctcttgtgctcattaga

SEQ ID NO: 569781 - DNA, 19 bp, Mus musculus
  siRNA target sequence for 1300014E15Rik (NM_028793.1,1269-1287).
gctcttgtgctcattagat

SEQ ID NO: 569782 - DNA, 19 bp, Mus musculus
  siRNA target sequence for 1300014E15Rik (NM_028793.1,1342-1360).
ctgcttcgcaggcgaaatt

SEQ ID NO: 569783 - DNA, 19 bp, Mus musculus
  siRNA target sequence for 1300014E15Rik (NM_028793.1,1344-1362).
gcttcgcaggcgaaattat

SEQ ID NO: 569784 - DNA, 19 bp, Mus musculus
  siRNA target sequence for 1300014E15Rik (NM_028793.1,1348-1366).
cgcaggcgaaattatcttt

SEQ ID NO: 569785 - DNA, 19 bp, Mus musculus
  siRNA target sequence for 1300014E15Rik (NM_028793.1,1363-1381).
ctttgcagacaagtaatca

SEQ ID NO: 569786 - DNA, 19 bp, Mus musculus
  siRNA target sequence for 1300014E15Rik (NM_028793.1,1429-1447).
gtgcattagcttttgctat

SEQ ID NO: 569787 - DNA, 19 bp, Mus musculus
  siRNA target sequence for 1300014E15Rik (NM_028793.1,1432-1450).
cattagcttttgctattat

SEQ ID NO: 569788 - DNA, 19 bp, Mus musculus
  siRNA target sequence for 1300014E15Rik (NM_028793.1,1471-1489).
ggttggcacatttgtatta

SEQ ID NO: 569789 - DNA, 19 bp, Mus musculus
  siRNA target sequence for 1300014E15Rik (NM_028793.1,1475-1493).
ggcacatttgtattatcaa

SEQ ID NO: 569790 - DNA, 19 bp, Mus musculus
  siRNA target sequence for 1810022C23Rik (NM_026947.2,56-74).
ctaagcctggtgtgtttaa

SEQ ID NO: 569791 - DNA, 19 bp, Mus musculus
  siRNA target sequence for 1810022C23Rik (NM_026947.2,90-108).
cacgtgggatgcaagaaat

SEQ ID NO: 569792 - DNA, 19 bp, Mus musculus
  siRNA target sequence for 1810022C23Rik (NM_026947.2,321-339).
gtatctggatattatgcat

SEQ ID NO: 569793 - DNA, 19 bp, Mus musculus
  siRNA target sequence for 1810022C23Rik (NM_026947.2,357-375).
cacggataactcagtcata

SEQ ID NO: 569794 - DNA, 19 bp, Mus musculus
  siRNA target sequence for 1810022C23Rik (NM_026947.2,360-378).
ggataactcagtcataact

SEQ ID NO: 569795 - DNA, 19 bp, Mus musculus
  siRNA target sequence for 1810022C23Rik (NM_026947.2,463-481).
gtagccacgtctactaaga

SEQ ID NO: 569796 - DNA, 19 bp, Mus musculus
  siRNA target sequence for 1810022C23Rik (NM_026947.2,467-485).
ccacgtctactaagatact

SEQ ID NO: 569797 - DNA, 19 bp, Mus musculus
  siRNA target sequence for 1810022C23Rik (NM_026947.2,569-587).
ccatcctggcactatttga

SEQ ID NO: 569798 - DNA, 19 bp, Mus musculus
  siRNA target sequence for 1810022C23Rik (NM_026947.2,570-588).
catcctggcactatttgat

SEQ ID NO: 569799 - DNA, 19 bp, Mus musculus
  siRNA target sequence for 2010015A21Rik (NM_025988.1,516-534).
gcagtcagcgtcattcaga

SEQ ID NO: 569800 - DNA, 19 bp, Mus musculus
  siRNA target sequence for 2010015A21Rik (NM_025988.1,651-669).
cccattggacgttacaagt

SEQ ID NO: 569801 - DNA, 19 bp, Mus musculus
  siRNA target sequence for 2010015A21Rik (NM_025988.1,711-729).
gccatgtctgcctacatct

SEQ ID NO: 569802 - DNA, 19 bp, Mus musculus
  siRNA target sequence for 2010015A21Rik (NM_025988.1,789-807).
gaggatatgtttggttatt

SEQ ID NO: 569803 - DNA, 19 bp, Mus musculus
  siRNA target sequence for 2010015A21Rik (NM_025988.1,1384-1402).
cgctgctcttctttatcct

SEQ ID NO: 569804 - DNA, 19 bp, Mus musculus
  siRNA target sequence for 2010015A21Rik (NM_025988.1,1421-1439).
gtggctcttccgacagttt

SEQ ID NO: 569805 - DNA, 19 bp, Mus musculus
  siRNA target sequence for Acbd3 (NM_133225.1,316-334).
ctggcgctgcgcttctaca

SEQ ID NO: 569806 - DNA, 19 bp, Mus musculus
  siRNA target sequence for Acbd3 (NM_133225.1,318-336).
ggcgctgcgcttctacaaa

SEQ ID NO: 569807 - DNA, 19 bp, Mus musculus
  siRNA target sequence for Acbd3 (NM_133225.1,319-337).
gcgctgcgcttctacaaaa

SEQ ID NO: 569808 - DNA, 19 bp, Mus musculus
  siRNA target sequence for Acbd3 (NM_133225.1,320-338).
cgctgcgcttctacaaaat

SEQ ID NO: 569809 - DNA, 19 bp, Mus musculus
  siRNA target sequence for Acbd3 (NM_133225.1,321-339).
gctgcgcttctacaaaata

SEQ ID NO: 569810 - DNA, 19 bp, Mus musculus
  siRNA target sequence for Acbd3 (NM_133225.1,322-340).
ctgcgcttctacaaaataa

SEQ ID NO: 569811 - DNA, 19 bp, Mus musculus
  siRNA target sequence for Acbd3 (NM_133225.1,362-380).
caacttatgaagaaaaact

SEQ ID NO: 569812 - DNA, 19 bp, Mus musculus
  siRNA target sequence for Acbd3 (NM_133225.1,387-405).
cgtggcactgcataagcaa

SEQ ID NO: 569813 - DNA, 19 bp, Mus musculus
  siRNA target sequence for Acbd3 (NM_133225.1,394-412).
ctgcataagcaagttcttt

SEQ ID NO: 569814 - DNA, 19 bp, Mus musculus
  siRNA target sequence for Acbd3 (NM_133225.1,531-549).
gtttgtgaagcttctaaat

SEQ ID NO: 569815 - DNA, 19 bp, Mus musculus
  siRNA target sequence for Acbd3 (NM_133225.1,537-555).
gaagcttctaaataagtgt

SEQ ID NO: 569816 - DNA, 19 bp, Mus musculus
  siRNA target sequence for Acbd3 (NM_133225.1,806-824).
cgcagactgccgtgcaatt

SEQ ID NO: 569817 - DNA, 19 bp, Mus musculus
  siRNA target sequence for Acbd3 (NM_133225.1,898-916).
cagcactatcagcagtata

SEQ ID NO: 569818 - DNA, 19 bp, Mus musculus
  siRNA target sequence for Acbd3 (NM_133225.1,910-928).
cagtatatgcagcagttat

SEQ ID NO: 569819 - DNA, 19 bp, Mus musculus
  siRNA target sequence for Acbd3 (NM_133225.1,949-967).
caacaggcagcattacaga

SEQ ID NO: 569820 - DNA, 19 bp, Mus musculus
  siRNA target sequence for Acbd3 (NM_133225.1,1037-1055).
gtgatacactgtcagttaa

SEQ ID NO: 569821 - DNA, 19 bp, Mus musculus
  siRNA target sequence for Acbd3 (NM_133225.1,1214-1232).
ggcaggatgcagattctgt

SEQ ID NO: 569822 - DNA, 19 bp, Mus musculus
  siRNA target sequence for Acbd3 (NM_133225.1,1218-1236).
ggatgcagattctgtgatt

SEQ ID NO: 569823 - DNA, 19 bp, Mus musculus
  siRNA target sequence for Acbd3 (NM_133225.1,1219-1237).
gatgcagattctgtgatta

SEQ ID NO: 569824 - DNA, 19 bp, Mus musculus
  siRNA target sequence for Acbd3 (NM_133225.1,1277-1295).
ctcatgaggaaggatcata

SEQ ID NO: 569825 - DNA, 19 bp, Mus musculus
  siRNA target sequence for Acbd3 (NM_133225.1,1282-1300).
gaggaaggatcatacctat

SEQ ID NO: 569826 - DNA, 19 bp, Mus musculus
  siRNA target sequence for Acbd3 (NM_133225.1,1284-1302).
ggaaggatcatacctattt

SEQ ID NO: 569827 - DNA, 19 bp, Mus musculus
  siRNA target sequence for Acbd3 (NM_133225.1,1285-1303).
gaaggatcatacctatttt

SEQ ID NO: 569828 - DNA, 19 bp, Mus musculus
  siRNA target sequence for Acbd3 (NM_133225.1,1329-1347).
cattgggtttggggtttat

SEQ ID NO: 569829 - DNA, 19 bp, Mus musculus
  siRNA target sequence for Acbd3 (NM_133225.1,1507-1525).
gactgtcacgaggaagtat

SEQ ID NO: 569830 - DNA, 19 bp, Mus musculus
  siRNA target sequence for Acbd3 (NM_133225.1,1509-1527).
ctgtcacgaggaagtatat

SEQ ID NO: 569831 - DNA, 19 bp, Mus musculus
  siRNA target sequence for Acbd3 (NM_133225.1,1564-1582).
ctcctcaagtttgataatt

SEQ ID NO: 569832 - DNA, 19 bp, Mus musculus
  siRNA target sequence for Acbd3 (NM_133225.1,1598-1616).
ggtccaagtccgtctacta

SEQ ID NO: 569833 - DNA, 19 bp, Mus musculus
  siRNA target sequence for Acbd3 (NM_133225.1,1608-1626).
cgtctactacagagtctat

SEQ ID NO: 569834 - DNA, 19 bp, Mus musculus
  siRNA target sequence for Acbd3 (NM_133225.1,1609-1627).
gtctactacagagtctatt

SEQ ID NO: 569835 - DNA, 19 bp, Mus musculus
  siRNA target sequence for Acbd3 (NM_133225.1,1614-1632).
ctacagagtctattatact

SEQ ID NO: 569836 - DNA, 19 bp, Mus musculus
  siRNA target sequence for Acbd6 (NM_028250.1,723-741).
ggttcaagcaggtcaaagt

SEQ ID NO: 569837 - DNA, 19 bp, Mus musculus
  siRNA target sequence for Acbd6 (NM_028250.1,724-742).
gttcaagcaggtcaaagtt

SEQ ID NO: 569838 - DNA, 19 bp, Mus musculus
  siRNA target sequence for Acbd6 (NM_028250.1,731-749).
caggtcaaagttggaaatt

SEQ ID NO: 569839 - DNA, 19 bp, Mus musculus
  siRNA target sequence for Acbd6 (NM_028250.1,825-843).
caagccctagccaagcaat

SEQ ID NO: 569840 - DNA, 19 bp, Mus musculus
  siRNA target sequence for Acbd6 (NM_028250.1,834-852).
gccaagcaatgcaggaata

SEQ ID NO: 569841 - DNA, 19 bp, Mus musculus
  siRNA target sequence for Acbd6 (NM_028250.1,856-874).
cgcggcagttaaaaaacta

SEQ ID NO: 569842 - DNA, 19 bp, Mus musculus
  siRNA target sequence for Acbd6 (NM_028250.1,858-876).
cggcagttaaaaaactaga

SEQ ID NO: 569843 - DNA, 19 bp, Mus musculus
  siRNA target sequence for Acbd6 (NM_028250.1,885-903).
ggaatcctcaggtatcaga

SEQ ID NO: 569844 - DNA, 19 bp, Mus musculus
  siRNA target sequence for Acbd6 (NM_028250.1,934-952).
cggtggtccggttgttagt

SEQ ID NO: 569845 - DNA, 19 bp, Mus musculus
  siRNA target sequence for Acbd6 (NM_028250.1,935-953).
ggtggtccggttgttagtt

SEQ ID NO: 569846 - DNA, 19 bp, Mus musculus
  siRNA target sequence for Acbd6 (NM_028250.1,941-959).
ccggttgttagttctctat

SEQ ID NO: 569847 - DNA, 19 bp, Mus musculus
  siRNA target sequence for Acbd6 (NM_028250.1,942-960).
cggttgttagttctctata

SEQ ID NO: 569848 - DNA, 19 bp, Mus musculus
  siRNA target sequence for Acbd6 (NM_028250.1,951-969).
gttctctatatcatgaaga

SEQ ID NO: 569849 - DNA, 19 bp, Mus musculus
  siRNA target sequence for Acbd6 (NM_028250.1,1034-1052).
gccaaagccatcaaatcga

SEQ ID NO: 569850 - DNA, 19 bp, Mus musculus
  siRNA target sequence for Acbd6 (NM_028250.1,1036-1054).
caaagccatcaaatcgaaa

SEQ ID NO: 569851 - DNA, 19 bp, Mus musculus
  siRNA target sequence for Acbd6 (NM_028250.1,1050-1068).
cgaaagctgcggatgtgaa

SEQ ID NO: 569852 - DNA, 19 bp, Mus musculus
  siRNA target sequence for Acbd6 (NM_028250.1,1051-1069).
gaaagctgcggatgtgaat

SEQ ID NO: 569853 - DNA, 19 bp, Mus musculus
  siRNA target sequence for Acbd6 (NM_028250.1,1055-1073).
gctgcggatgtgaatatga

SEQ ID NO: 569854 - DNA, 19 bp, Mus musculus
  siRNA target sequence for Acbd6 (NM_028250.1,1107-1125).
catgtgaccgaggacataa

SEQ ID NO: 569855 - DNA, 19 bp, Mus musculus
  siRNA target sequence for Acbd6 (NM_028250.1,1110-1128).
gtgaccgaggacataagga

SEQ ID NO: 569856 - DNA, 19 bp, Mus musculus
  siRNA target sequence for Acbd6 (NM_028250.1,1135-1153).
gaaagtcttgctacagtat

SEQ ID NO: 569857 - DNA, 19 bp, Mus musculus
  siRNA target sequence for Acbd6 (NM_028250.1,1150-1168).
gtatgaagctggcattaat

SEQ ID NO: 569858 - DNA, 19 bp, Mus musculus
  siRNA target sequence for Acbd6 (NM_028250.1,1205-1223).
gccgctgcctgcgagtttt

SEQ ID NO: 569859 - DNA, 19 bp, Mus musculus
  siRNA target sequence for Dbi (NM_007830.2,118-136).
ctcaggctgaatttgacaa

SEQ ID NO: 569860 - DNA, 19 bp, Mus musculus
  siRNA target sequence for Dbi (NM_007830.2,161-179).
caagactcagccaactgat

SEQ ID NO: 569861 - DNA, 19 bp, Mus musculus
  siRNA target sequence for Dbi (NM_007830.2,164-182).
gactcagccaactgatgaa

SEQ ID NO: 569862 - DNA, 19 bp, Mus musculus
  siRNA target sequence for Dbi (NM_007830.2,194-212).
catctacagtcacttcaaa

SEQ ID NO: 569863 - DNA, 19 bp, Mus musculus
  siRNA target sequence for Dbi (NM_007830.2,216-234).
gctactgtgggcgatgtaa

SEQ ID NO: 569864 - DNA, 19 bp, Mus musculus
  siRNA target sequence for Dbi (NM_007830.2,217-235).
ctactgtgggcgatgtaaa

SEQ ID NO: 569865 - DNA, 19 bp, Mus musculus
  siRNA target sequence for Dbi (NM_007830.2,224-242).
gggcgatgtaaatacagat

SEQ ID NO: 569866 - DNA, 19 bp, Mus musculus
  siRNA target sequence for Dbil5 (NM_021294.1,272-290).
ccacccagggcgactgtaa

SEQ ID NO: 569867 - DNA, 19 bp, Mus musculus
  siRNA target sequence for Dbil5 (NM_021294.1,381-399).
gaggatctacattgctaaa

SEQ ID NO: 569868 - DNA, 19 bp, Mus musculus
  siRNA target sequence for Peci (NM_011868.1,409-427).
ggaaacgaagtgaagctaa

SEQ ID NO: 569869 - DNA, 19 bp, Mus musculus
  siRNA target sequence for Peci (NM_011868.1,482-500).
ctggtatgcttgactttgt

SEQ ID NO: 569870 - DNA, 19 bp, Mus musculus
  siRNA target sequence for Peci (NM_011868.1,1255-1273).
ccgccaaacgccatgagaa

SEQ ID NO: 569871 - DNA, 19 bp, Mus musculus
  siRNA target sequence for Peci (NM_011868.1,1389-1407).
gagcttcgtctccagaaaa

SEQ ID NO: 569872 - DNA, 19 bp, Mus musculus
  siRNA target sequence for Ndufab1 (NM_028177.2,264-282).
caaggaccgagttctgtat

SEQ ID NO: 569873 - DNA, 19 bp, Mus musculus
  siRNA target sequence for Ndufab1 (NM_028177.2,268-286).
gaccgagttctgtatgtct

SEQ ID NO: 569874 - DNA, 19 bp, Mus musculus
  siRNA target sequence for Ndufab1 (NM_028177.2,288-306).
gaaactctatgataagatt

SEQ ID NO: 569875 - DNA, 19 bp, Mus musculus
  siRNA target sequence for Ndufab1 (NM_028177.2,318-336).
gctctccgtaaattctcat

SEQ ID NO: 569876 - DNA, 19 bp, Mus musculus
  siRNA target sequence for Ndufab1 (NM_028177.2,319-337).
ctctccgtaaattctcatt

SEQ ID NO: 569877 - DNA, 19 bp, Mus musculus
  siRNA target sequence for Ndufab1 (NM_028177.2,362-380).
gtttggaccaagtggaaat

SEQ ID NO: 569878 - DNA, 19 bp, Mus musculus
  siRNA target sequence for Plekha2 (NM_031257.2,331-349).
ccattctgcttcgttatca

SEQ ID NO: 569879 - DNA, 19 bp, Mus musculus
  siRNA target sequence for Plekha2 (NM_031257.2,357-375).
gtctcagagatattttctt

SEQ ID NO: 569880 - DNA, 19 bp, Mus musculus
  siRNA target sequence for Plekha2 (NM_031257.2,500-518).
ctcccaccctagagaagaa

SEQ ID NO: 569881 - DNA, 19 bp, Mus musculus
  siRNA target sequence for Plekha2 (NM_031257.2,530-548).
cctacaagactgagatcat

SEQ ID NO: 569882 - DNA, 19 bp, Mus musculus
  siRNA target sequence for Plekha2 (NM_031257.2,682-700).
gggcctcccctcattaaga

SEQ ID NO: 569883 - DNA, 19 bp, Mus musculus
  siRNA target sequence for Plekha2 (NM_031257.2,684-702).
gcctcccctcattaagagt

SEQ ID NO: 569884 - DNA, 19 bp, Mus musculus
  siRNA target sequence for Plekha2 (NM_031257.2,721-739).
gggaatgtgcggaagagtt

SEQ ID NO: 569885 - DNA, 19 bp, Mus musculus
  siRNA target sequence for Plekha2 (NM_031257.2,753-771).
ctttgccctcgatgacttt

SEQ ID NO: 569886 - DNA, 19 bp, Mus musculus
  siRNA target sequence for Plekha2 (NM_031257.2,824-842).
cgctcaaggatgttctcaa

SEQ ID NO: 569887 - DNA, 19 bp, Mus musculus
  siRNA target sequence for Plekha2 (NM_031257.2,1006-1024).
cctagggagccgtcctttt

SEQ ID NO: 569888 - DNA, 19 bp, Mus musculus
  siRNA target sequence for Plekha2 (NM_031257.2,1041-1059).
gactcgacctggaagttct

SEQ ID NO: 569889 - DNA, 19 bp, Mus musculus
  siRNA target sequence for Plekha2 (NM_031257.2,1217-1235).
cagaggactctctattcat

SEQ ID NO: 569890 - DNA, 19 bp, Mus musculus
  siRNA target sequence for Plekha2 (NM_031257.2,1338-1356).
ccttgatgacgaaaacata

SEQ ID NO: 569891 - DNA, 19 bp, Mus musculus
  siRNA target sequence for Plekha3 (NM_031256.2,141-159).
gatggtttgttctggataa

SEQ ID NO: 569892 - DNA, 19 bp, Mus musculus
  siRNA target sequence for Plekha3 (NM_031256.2,162-180).
gaatcctgtcctactatga

SEQ ID NO: 569893 - DNA, 19 bp, Mus musculus
  siRNA target sequence for Plekha3 (NM_031256.2,248-266).
catcccgcagacaacacaa

SEQ ID NO: 569894 - DNA, 19 bp, Mus musculus
  siRNA target sequence for Plekha3 (NM_031256.2,264-282).
caagaatggagttaatcat

SEQ ID NO: 569895 - DNA, 19 bp, Mus musculus
  siRNA target sequence for Plekha3 (NM_031256.2,412-430).
gaccagtgaatctctgaaa

SEQ ID NO: 569896 - DNA, 19 bp, Mus musculus
  siRNA target sequence for Plekha3 (NM_031256.2,467-485).
ctgatgcagcaggttcata

SEQ ID NO: 569897 - DNA, 19 bp, Mus musculus
  siRNA target sequence for Plekha3 (NM_031256.2,567-585).
gtgccacctgtaacacatt

SEQ ID NO: 569898 - DNA, 19 bp, Mus musculus
  siRNA target sequence for Plekha3 (NM_031256.2,619-637).
caacgccaagtttaaacct

SEQ ID NO: 569899 - DNA, 19 bp, Mus musculus
  siRNA target sequence for Plekha3 (NM_031256.2,628-646).
gtttaaacctgagatgttt

SEQ ID NO: 569900 - DNA, 19 bp, Mus musculus
  siRNA target sequence for Plekha3 (NM_031256.2,684-702).
cgccttctcctgttcagat

SEQ ID NO: 569901 - DNA, 19 bp, Mus musculus
  siRNA target sequence for Plekha3 (NM_031256.2,823-841).
cacagactcttgtaatgat

SEQ ID NO: 569902 - DNA, 19 bp, Mus musculus
  siRNA target sequence for Plekha3 (NM_031256.2,911-929).
gcaaccattccggaagaaa

SEQ ID NO: 569903 - DNA, 19 bp, Mus musculus
  siRNA target sequence for Plekha3 (NM_031256.2,937-955).
catggccaagacacaatct

SEQ ID NO: 569904 - DNA, 19 bp, Mus musculus
  siRNA target sequence for Plekha3 (NM_031256.2,940-958).
ggccaagacacaatctgaa

SEQ ID NO: 569905 - DNA, 19 bp, Mus musculus
  siRNA target sequence for Apoa5 (NM_080434.2,106-124).
gactacttcagccaaaaca

SEQ ID NO: 569906 - DNA, 19 bp, Mus musculus
  siRNA target sequence for Apoa5 (NM_080434.2,193-211).
caagacctctacaatatga

SEQ ID NO: 569907 - DNA, 19 bp, Mus musculus
  siRNA target sequence for Apoa5 (NM_080434.2,196-214).
gacctctacaatatgaaca

SEQ ID NO: 569908 - DNA, 19 bp, Mus musculus
  siRNA target sequence for Apoa5 (NM_080434.2,198-216).
cctctacaatatgaacaat

SEQ ID NO: 569909 - DNA, 19 bp, Mus musculus
  siRNA target sequence for Apoa5 (NM_080434.2,204-222).
caatatgaacaattaccta

SEQ ID NO: 569910 - DNA, 19 bp, Mus musculus
  siRNA target sequence for Apoa5 (NM_080434.2,561-579).
ccataccgaccgagtcaaa

SEQ ID NO: 569911 - DNA, 19 bp, Mus musculus
  siRNA target sequence for Apoa5 (NM_080434.2,1005-1023).
gggacactcagacagtaat

SEQ ID NO: 569912 - DNA, 19 bp, Mus musculus
  siRNA target sequence for Apoa5 (NM_080434.2,1007-1025).
gacactcagacagtaataa

SEQ ID NO: 569913 - DNA, 19 bp, Mus musculus
  siRNA target sequence for Apoa5 (NM_080434.2,1056-1074).
cgacctgtgggaagatatt

SEQ ID NO: 569914 - DNA, 19 bp, Mus musculus
  siRNA target sequence for Apoa5 (NM_080434.2,1090-1108).
gaccagggtcatagtcatt

SEQ ID NO: 569915 - DNA, 19 bp, Mus musculus
  siRNA target sequence for 2310034L21Rik (NM_025631.1,173-191).
caaggcagcattggattat

SEQ ID NO: 569916 - DNA, 19 bp, Mus musculus
  siRNA target sequence for 2310034L21Rik (NM_025631.1,177-195).
gcagcattggattatgtgt

SEQ ID NO: 569917 - DNA, 19 bp, Mus musculus
  siRNA target sequence for 2310034L21Rik (NM_025631.1,225-243).
gccctgcaggtcactatct

SEQ ID NO: 569918 - DNA, 19 bp, Mus musculus
  siRNA target sequence for 2310034L21Rik (NM_025631.1,227-245).
cctgcaggtcactatctct

SEQ ID NO: 569919 - DNA, 19 bp, Mus musculus
  siRNA target sequence for 2310034L21Rik (NM_025631.1,278-296).
gtctaccagggttcagatt

SEQ ID NO: 569920 - DNA, 19 bp, Mus musculus
  siRNA target sequence for 2310034L21Rik (NM_025631.1,367-385).
ccaatttcaccatcaaagt

SEQ ID NO: 569921 - DNA, 19 bp, Mus musculus
  siRNA target sequence for 2310034L21Rik (NM_025631.1,719-737).
catcaccagtaactatata

SEQ ID NO: 569922 - DNA, 19 bp, Mus musculus
  siRNA target sequence for 2310034L21Rik (NM_025631.1,744-762).
gatatcggagccattctct

SEQ ID NO: 569923 - DNA, 19 bp, Mus musculus
  siRNA target sequence for 2310034L21Rik (NM_025631.1,910-928).
gctctctcaacctggaaat

SEQ ID NO: 569924 - DNA, 19 bp, Mus musculus
  siRNA target sequence for 2310034L21Rik (NM_025631.1,936-954).
cagctgaattcgaagaaca

SEQ ID NO: 569925 - DNA, 19 bp, Mus musculus
  siRNA target sequence for 2310034L21Rik (NM_025631.1,938-956).
gctgaattcgaagaacaat

SEQ ID NO: 569926 - DNA, 19 bp, Mus musculus
  siRNA target sequence for 2310034L21Rik (NM_025631.1,1273-1291).
ctgttgatatggatcaagt

SEQ ID NO: 569927 - DNA, 19 bp, Mus musculus
  siRNA target sequence for 2310034L21Rik (NM_025631.1,1290-1308).
gtactcacactcataagca

SEQ ID NO: 569928 - DNA, 19 bp, Mus musculus
  siRNA target sequence for 2310034L21Rik (NM_025631.1,1370-1388).
ccccagggtgcacaatcta

SEQ ID NO: 569929 - DNA, 19 bp, Mus musculus
  siRNA target sequence for 2310034L21Rik (NM_025631.1,1375-1393).
gggtgcacaatctacatta

SEQ ID NO: 569930 - DNA, 19 bp, Mus musculus
  siRNA target sequence for 2310034L21Rik (NM_025631.1,1376-1394).
ggtgcacaatctacattat

SEQ ID NO: 569931 - DNA, 19 bp, Mus musculus
  siRNA target sequence for 2310034L21Rik (NM_025631.1,1412-1430).
ggtccgtgagggctatgtt

SEQ ID NO: 569932 - DNA, 19 bp, Mus musculus
  siRNA target sequence for 4732454E24 (NM_177772.2,172-190).
ccagcgtgcactagactat

SEQ ID NO: 569933 - DNA, 19 bp, Mus musculus
  siRNA target sequence for 4732454E24 (NM_177772.2,217-235).
ggagcaattggcaaaggaa

SEQ ID NO: 569934 - DNA, 19 bp, Mus musculus
  siRNA target sequence for 4732454E24 (NM_177772.2,256-274).
cggttctgagtctcttaaa

SEQ ID NO: 569935 - DNA, 19 bp, Mus musculus
  siRNA target sequence for 4732454E24 (NM_177772.2,258-276).
gttctgagtctcttaaatt

SEQ ID NO: 569936 - DNA, 19 bp, Mus musculus
  siRNA target sequence for 4732454E24 (NM_177772.2,298-316).
gtacaacttctcaaacata

SEQ ID NO: 569937 - DNA, 19 bp, Mus musculus
  siRNA target sequence for 4732454E24 (NM_177772.2,450-468).
cgggagctgccaatctgtt

SEQ ID NO: 569938 - DNA, 19 bp, Mus musculus
  siRNA target sequence for 4732454E24 (NM_177772.2,466-484).
gttcctctctggaatctat

SEQ ID NO: 569939 - DNA, 19 bp, Mus musculus
  siRNA target sequence for 4732454E24 (NM_177772.2,500-518).
gcctttacccgtaatgact

SEQ ID NO: 569940 - DNA, 19 bp, Mus musculus
  siRNA target sequence for 4732454E24 (NM_177772.2,501-519).
cctttacccgtaatgactt

SEQ ID NO: 569941 - DNA, 19 bp, Mus musculus
  siRNA target sequence for 4732454E24 (NM_177772.2,502-520).
ctttacccgtaatgacttt

SEQ ID NO: 569942 - DNA, 19 bp, Mus musculus
  siRNA target sequence for 4732454E24 (NM_177772.2,507-525).
cccgtaatgactttggtta

SEQ ID NO: 569943 - DNA, 19 bp, Mus musculus
  siRNA target sequence for 4732454E24 (NM_177772.2,541-559).
ccaagactgccatgttcaa

SEQ ID NO: 569944 - DNA, 19 bp, Mus musculus
  siRNA target sequence for 4732454E24 (NM_177772.2,591-609).
gtctcagtgccctgtataa

SEQ ID NO: 569945 - DNA, 19 bp, Mus musculus
  siRNA target sequence for 4732454E24 (NM_177772.2,593-611).
ctcagtgccctgtataact

SEQ ID NO: 569946 - DNA, 19 bp, Mus musculus
  siRNA target sequence for 4732454E24 (NM_177772.2,636-654).
ccattctaaagaatttaaa

SEQ ID NO: 569947 - DNA, 19 bp, Mus musculus
  siRNA target sequence for 4732454E24 (NM_177772.2,688-706).
ccaagtggaacagttcaat

SEQ ID NO: 569948 - DNA, 19 bp, Mus musculus
  siRNA target sequence for 4732454E24 (NM_177772.2,715-733).
cagcgcactggaggtttta

SEQ ID NO: 569949 - DNA, 19 bp, Mus musculus
  siRNA target sequence for 4732454E24 (NM_177772.2,719-737).
gcactggaggttttaacca

SEQ ID NO: 569950 - DNA, 19 bp, Mus musculus
  siRNA target sequence for 4732454E24 (NM_177772.2,792-810).
ccgagaaccaccttgactt

SEQ ID NO: 569951 - DNA, 19 bp, Mus musculus
  siRNA target sequence for 4732454E24 (NM_177772.2,793-811).
cgagaaccaccttgacttt

SEQ ID NO: 569952 - DNA, 19 bp, Mus musculus
  siRNA target sequence for 4732454E24 (NM_177772.2,800-818).
caccttgactttaatttga

SEQ ID NO: 569953 - DNA, 19 bp, Mus musculus
  siRNA target sequence for 4732454E24 (NM_177772.2,894-912).
gagattccatgctctacat

SEQ ID NO: 569954 - DNA, 19 bp, Mus musculus
  siRNA target sequence for 4732454E24 (NM_177772.2,942-960).
cgtcatttgctcactatgt

SEQ ID NO: 569955 - DNA, 19 bp, Mus musculus
  siRNA target sequence for 4732454E24 (NM_177772.2,983-1001).
ctgtccactagggagattt

SEQ ID NO: 569956 - DNA, 19 bp, Mus musculus
  siRNA target sequence for 4732454E24 (NM_177772.2,987-1005).
ccactagggagatttccaa

SEQ ID NO: 569957 - DNA, 19 bp, Mus musculus
  siRNA target sequence for 4732454E24 (NM_177772.2,993-1011).
gggagatttccaactattt

SEQ ID NO: 569958 - DNA, 19 bp, Mus musculus
  siRNA target sequence for 4732454E24 (NM_177772.2,995-1013).
gagatttccaactatttca

SEQ ID NO: 569959 - DNA, 19 bp, Mus musculus
  siRNA target sequence for 4732454E24 (NM_177772.2,997-1015).
gatttccaactatttcagt

SEQ ID NO: 569960 - DNA, 19 bp, Mus musculus
  siRNA target sequence for 4732454E24 (NM_177772.2,1069-1087).
cttgtcccagccgttcata

SEQ ID NO: 569961 - DNA, 19 bp, Mus musculus
  siRNA target sequence for 4732454E24 (NM_177772.2,1108-1126).
gcctcctatggtcaactta

SEQ ID NO: 569962 - DNA, 19 bp, Mus musculus
  siRNA target sequence for 4732454E24 (NM_177772.2,1110-1128).
ctcctatggtcaacttaca

SEQ ID NO: 569963 - DNA, 19 bp, Mus musculus
  siRNA target sequence for 4732454E24 (NM_177772.2,1120-1138).
caacttacaacgaaacaat

SEQ ID NO: 569964 - DNA, 19 bp, Mus musculus
  siRNA target sequence for 4732454E24 (NM_177772.2,1172-1190).
ctcactcaactggataact

SEQ ID NO: 569965 - DNA, 19 bp, Mus musculus
  siRNA target sequence for 4732454E24 (NM_177772.2,1174-1192).
cactcaactggataactct

SEQ ID NO: 569966 - DNA, 19 bp, Mus musculus
  siRNA target sequence for 4732454E24 (NM_177772.2,1318-1336).
ccaacgagatgctaaggtt

SEQ ID NO: 569967 - DNA, 19 bp, Mus musculus
  siRNA target sequence for 4732454E24 (NM_177772.2,1386-1404).
cactggccaacacaaaact

SEQ ID NO: 569968 - DNA, 19 bp, Mus musculus
  siRNA target sequence for 4732454E24 (NM_177772.2,1426-1444).
caacccctacaatatctca

SEQ ID NO: 569969 - DNA, 19 bp, Mus musculus
  siRNA target sequence for 4732454E24 (NM_177772.2,1447-1465).
catcaattcggatattgaa

SEQ ID NO: 569970 - DNA, 19 bp, Mus musculus
  siRNA target sequence for 4732454E24 (NM_177772.2,1491-1509).
ctagtgacctggcatatga

SEQ ID NO: 569971 - DNA, 19 bp, Mus musculus
  siRNA target sequence for 4732454E24 (NM_177772.2,1518-1536).
caaagccacagccaaatct

SEQ ID NO: 569972 - DNA, 19 bp, Mus musculus
  siRNA target sequence for 4732454E24 (NM_177772.2,1548-1566).
gggatctgaacctagtaca

SEQ ID NO: 569973 - DNA, 19 bp, Mus musculus
  siRNA target sequence for 4732454E24 (NM_177772.2,1550-1568).
gatctgaacctagtacata

SEQ ID NO: 569974 - DNA, 19 bp, Mus musculus
  siRNA target sequence for 9230105K17 (NM_177850.2,72-90).
gacaacgtgcggaaatggt

SEQ ID NO: 569975 - DNA, 19 bp, Mus musculus
  siRNA target sequence for 9230105K17 (NM_177850.2,147-165).
ggcttcgtggccatgatct

SEQ ID NO: 569976 - DNA, 19 bp, Mus musculus
  siRNA target sequence for 9230105K17 (NM_177850.2,276-294).
ggaaagggttcctacgaat

SEQ ID NO: 569977 - DNA, 19 bp, Mus musculus
  siRNA target sequence for 9230105K17 (NM_177850.2,277-295).
gaaagggttcctacgaatt

SEQ ID NO: 569978 - DNA, 19 bp, Mus musculus
  siRNA target sequence for 9230105K17 (NM_177850.2,282-300).
ggttcctacgaattctaca

SEQ ID NO: 569979 - DNA, 19 bp, Mus musculus
  siRNA target sequence for 9230105K17 (NM_177850.2,307-325).
ctgtggatggatttcatat

SEQ ID NO: 569980 - DNA, 19 bp, Mus musculus
  siRNA target sequence for 9230105K17 (NM_177850.2,361-379).
gcctccgagtgttcatcaa

SEQ ID NO: 569981 - DNA, 19 bp, Mus musculus
  siRNA target sequence for 9230105K17 (NM_177850.2,362-380).
cctccgagtgttcatcaaa

SEQ ID NO: 569982 - DNA, 19 bp, Mus musculus
  siRNA target sequence for 9230105K17 (NM_177850.2,388-406).
gcatcaagatcaatggaaa

SEQ ID NO: 569983 - DNA, 19 bp, Mus musculus
  siRNA target sequence for 9230105K17 (NM_177850.2,434-452).
ggccggtggcaattttgaa

SEQ ID NO: 569984 - DNA, 19 bp, Mus musculus
  siRNA target sequence for 9230105K17 (NM_177850.2,436-454).
ccggtggcaattttgaact

SEQ ID NO: 569985 - DNA, 19 bp, Mus musculus
  siRNA target sequence for 9230105K17 (NM_177850.2,625-643).
cttccctgaaaaacatcat

SEQ ID NO: 569986 - DNA, 19 bp, Mus musculus
  siRNA target sequence for 9230105K17 (NM_177850.2,628-646).
ccctgaaaaacatcattta

SEQ ID NO: 569987 - DNA, 19 bp, Mus musculus
  siRNA target sequence for 9230105K17 (NM_177850.2,704-722).
gaagaccctttctgtgata

SEQ ID NO: 569988 - DNA, 19 bp, Mus musculus
  siRNA target sequence for 9230105K17 (NM_177850.2,804-822).
ctaaagggggagtttttct

SEQ ID NO: 569989 - DNA, 19 bp, Mus musculus
  siRNA target sequence for 9230105K17 (NM_177850.2,847-865).
ccattcacccgccagtaat

SEQ ID NO: 569990 - DNA, 19 bp, Mus musculus
  siRNA target sequence for 9230105K17 (NM_177850.2,883-901).
gtgcatacatggtatgcat

SEQ ID NO: 569991 - DNA, 19 bp, Mus musculus
  siRNA target sequence for 9230105K17 (NM_177850.2,1122-1140).
ccctcaggcctctcattca

SEQ ID NO: 569992 - DNA, 19 bp, Mus musculus
  siRNA target sequence for 9230105K17 (NM_177850.2,1304-1322).
ggaattgaaggaatccaaa

SEQ ID NO: 569993 - DNA, 19 bp, Mus musculus
  siRNA target sequence for 9230105K17 (NM_177850.2,1318-1336).
ccaaatttggcccctttaa

SEQ ID NO: 569994 - DNA, 19 bp, Mus musculus
  siRNA target sequence for 9230105K17 (NM_177850.2,1343-1361).
gtacctggaggatgtcata

SEQ ID NO: 569995 - DNA, 19 bp, Mus musculus
  siRNA target sequence for 9230105K17 (NM_177850.2,1487-1505).
gttgcttgaagcggattta

SEQ ID NO: 569996 - DNA, 19 bp, Mus musculus
  siRNA target sequence for 9230105K17 (NM_177850.2,1497-1515).
gcggatttacaccttatct

SEQ ID NO: 569997 - DNA, 19 bp, Mus musculus
  siRNA target sequence for Alb1 (NM_009654.1,125-143).
gatcgcccatcggtataat

SEQ ID NO: 569998 - DNA, 19 bp, Mus musculus
  siRNA target sequence for Alb1 (NM_009654.1,128-146).
cgcccatcggtataatgat

SEQ ID NO: 569999 - DNA, 19 bp, Mus musculus
  siRNA target sequence for Alb1 (NM_009654.1,129-147).
gcccatcggtataatgatt

SEQ ID NO: 570000 - DNA, 19 bp, Mus musculus
  siRNA target sequence for Alb1 (NM_009654.1,130-148).
cccatcggtataatgattt

SEQ ID NO: 570001 - DNA, 19 bp, Mus musculus
  siRNA target sequence for Alb1 (NM_009654.1,200-218).
ccagaaatgctcatacgat

SEQ ID NO: 570002 - DNA, 19 bp, Mus musculus
  siRNA target sequence for Alb1 (NM_009654.1,215-233).
cgatgagcatgccaaatta

SEQ ID NO: 570003 - DNA, 19 bp, Mus musculus
  siRNA target sequence for Alb1 (NM_009654.1,282-300).
gccgccaactgtgacaaat

SEQ ID NO: 570004 - DNA, 19 bp, Mus musculus
  siRNA target sequence for Alb1 (NM_009654.1,339-357).
ccaaacctccgtgaaaact

SEQ ID NO: 570005 - DNA, 19 bp, Mus musculus
  siRNA target sequence for Alb1 (NM_009654.1,340-358).
caaacctccgtgaaaacta

SEQ ID NO: 570006 - DNA, 19 bp, Mus musculus
  siRNA target sequence for Alb1 (NM_009654.1,390-408).
gagcccgaaagaaacgaat

SEQ ID NO: 570007 - DNA, 19 bp, Mus musculus
  siRNA target sequence for Alb1 (NM_009654.1,393-411).
cccgaaagaaacgaatgtt

SEQ ID NO: 570008 - DNA, 19 bp, Mus musculus
  siRNA target sequence for Alb1 (NM_009654.1,394-412).
ccgaaagaaacgaatgttt

SEQ ID NO: 570009 - DNA, 19 bp, Mus musculus
  siRNA target sequence for Alb1 (NM_009654.1,471-489).
gccatgtgcacctccttta

SEQ ID NO: 570010 - DNA, 19 bp, Mus musculus
  siRNA target sequence for Alb1 (NM_009654.1,476-494).
gtgcacctcctttaaggaa

SEQ ID NO: 570011 - DNA, 19 bp, Mus musculus
  siRNA target sequence for Alb1 (NM_009654.1,503-521).
cacctttatgggacactat

SEQ ID NO: 570012 - DNA, 19 bp, Mus musculus
  siRNA target sequence for Alb1 (NM_009654.1,514-532).
gacactatttgcatgaagt

SEQ ID NO: 570013 - DNA, 19 bp, Mus musculus
  siRNA target sequence for Alb1 (NM_009654.1,559-577).
ccccagaacttctttacta

SEQ ID NO: 570014 - DNA, 19 bp, Mus musculus
  siRNA target sequence for Alb1 (NM_009654.1,560-578).
cccagaacttctttactat

SEQ ID NO: 570015 - DNA, 19 bp, Mus musculus
  siRNA target sequence for Alb1 (NM_009654.1,579-597).
gctgagcagtacaatgaga

SEQ ID NO: 570016 - DNA, 19 bp, Mus musculus
  siRNA target sequence for Alb1 (NM_009654.1,585-603).
cagtacaatgagattctga

SEQ ID NO: 570017 - DNA, 19 bp, Mus musculus
  siRNA target sequence for Alb1 (NM_009654.1,687-705).
gtccgtcagagaatgaagt

SEQ ID NO: 570018 - DNA, 19 bp, Mus musculus
  siRNA target sequence for Alb1 (NM_009654.1,706-724).
gctccagtatgcagaagtt

SEQ ID NO: 570019 - DNA, 19 bp, Mus musculus
  siRNA target sequence for Alb1 (NM_009654.1,757-775).
ctcgtctgagccagacatt

SEQ ID NO: 570020 - DNA, 19 bp, Mus musculus
  siRNA target sequence for Alb1 (NM_009654.1,932-950).
gcagacttgctgcgataaa

SEQ ID NO: 570021 - DNA, 19 bp, Mus musculus
  siRNA target sequence for Alb1 (NM_009654.1,943-961).
gcgataaaccactgttgaa

SEQ ID NO: 570022 - DNA, 19 bp, Mus musculus
  siRNA target sequence for Alb1 (NM_009654.1,945-963).
gataaaccactgttgaaga

SEQ ID NO: 570023 - DNA, 19 bp, Mus musculus
  siRNA target sequence for Alb1 (NM_009654.1,1046-1064).
ggaagtgtgcaagaactat

SEQ ID NO: 570024 - DNA, 19 bp, Mus musculus
  siRNA target sequence for Alb1 (NM_009654.1,1085-1103).
cctgggcacgttcttgtat

SEQ ID NO: 570025 - DNA, 19 bp, Mus musculus
  siRNA target sequence for Alb1 (NM_009654.1,1091-1109).
cacgttcttgtatgaatat

SEQ ID NO: 570026 - DNA, 19 bp, Mus musculus
  siRNA target sequence for Alb1 (NM_009654.1,1094-1112).
gttcttgtatgaatattca

SEQ ID NO: 570027 - DNA, 19 bp, Mus musculus
  siRNA target sequence for Alb1 (NM_009654.1,1097-1115).
cttgtatgaatattcaaga

SEQ ID NO: 570028 - DNA, 19 bp, Mus musculus
  siRNA target sequence for Alb1 (NM_009654.1,1111-1129).
caagaagacaccctgatta

SEQ ID NO: 570029 - DNA, 19 bp, Mus musculus
  siRNA target sequence for Alb1 (NM_009654.1,1145-1163).
gctgagacttgctaagaaa

SEQ ID NO: 570030 - DNA, 19 bp, Mus musculus
  siRNA target sequence for Alb1 (NM_009654.1,1146-1164).
ctgagacttgctaagaaat

SEQ ID NO: 570031 - DNA, 19 bp, Mus musculus
  siRNA target sequence for Alb1 (NM_009654.1,1271-1289).
caaaaccaactgtgatctt

SEQ ID NO: 570032 - DNA, 19 bp, Mus musculus
  siRNA target sequence for Alb1 (NM_009654.1,1302-1320).
ggagaatatggattccaaa

SEQ ID NO: 570033 - DNA, 19 bp, Mus musculus
  siRNA target sequence for Alb1 (NM_009654.1,1409-1427).
caccaagtgttgtacactt

SEQ ID NO: 570034 - DNA, 19 bp, Mus musculus
  siRNA target sequence for Alb1 (NM_009654.1,1420-1438).
gtacacttcctgaagatca

SEQ ID NO: 570035 - DNA, 19 bp, Mus musculus
  siRNA target sequence for Alb1 (NM_009654.1,1447-1465).
cttgtgtggaagactatct

SEQ ID NO: 570036 - DNA, 19 bp, Mus musculus
  siRNA target sequence for Alb1 (NM_009654.1,1582-1600).
cagttgatgaaacatatgt

SEQ ID NO: 570037 - DNA, 19 bp, Mus musculus
  siRNA target sequence for Alb1 (NM_009654.1,1723-1741).
ctacagcggagcaactgaa

SEQ ID NO: 570038 - DNA, 19 bp, Mus musculus
  siRNA target sequence for Alb1 (NM_009654.1,1742-1760).
gactgtcatggatgacttt

SEQ ID NO: 570039 - DNA, 19 bp, Mus musculus
  siRNA target sequence for Alb1 (NM_009654.1,1761-1779).
gcacagttcctggatacat

SEQ ID NO: 570040 - DNA, 19 bp, Mus musculus
  siRNA target sequence for Alb1 (NM_009654.1,1824-1842).
ccaaaccttgtcactagat

SEQ ID NO: 570041 - DNA, 19 bp, Mus musculus
  siRNA target sequence for Apoa4 (NM_007468.1,215-233).
ctgatggggtgcacaacaa

SEQ ID NO: 570042 - DNA, 19 bp, Mus musculus
  siRNA target sequence for Apoa4 (NM_007468.1,336-354).
gatgccccatgccaacaaa

SEQ ID NO: 570043 - DNA, 19 bp, Mus musculus
  siRNA target sequence for Apoa4 (NM_007468.1,339-357).
gccccatgccaacaaagta

SEQ ID NO: 570044 - DNA, 19 bp, Mus musculus
  siRNA target sequence for Apoa4 (NM_007468.1,494-512).
ccacgatcaaggagaatgt

SEQ ID NO: 570045 - DNA, 19 bp, Mus musculus
  siRNA target sequence for Apoa4 (NM_007468.1,682-700).
ggcgtgcaggagaaactca

SEQ ID NO: 570046 - DNA, 19 bp, Mus musculus
  siRNA target sequence for Apod (NM_007470.1,220-238).
gaagatggtacgaaattga

SEQ ID NO: 570047 - DNA, 19 bp, Mus musculus
  siRNA target sequence for Apod (NM_007470.1,223-241).
gatggtacgaaattgagaa

SEQ ID NO: 570048 - DNA, 19 bp, Mus musculus
  siRNA target sequence for Apod (NM_007470.1,304-322).
gaaacatcgaagtgctaaa

SEQ ID NO: 570049 - DNA, 19 bp, Mus musculus
  siRNA target sequence for Apod (NM_007470.1,342-360).
ggaaccatgaaccaagtaa

SEQ ID NO: 570050 - DNA, 19 bp, Mus musculus
  siRNA target sequence for Apod (NM_007470.1,446-464).
gatcctggccaccgattat

SEQ ID NO: 570051 - DNA, 19 bp, Mus musculus
  siRNA target sequence for Apod (NM_007470.1,449-467).
cctggccaccgattatgaa

SEQ ID NO: 570052 - DNA, 19 bp, Mus musculus
  siRNA target sequence for Apod (NM_007470.1,450-468).
ctggccaccgattatgaaa

SEQ ID NO: 570053 - DNA, 19 bp, Mus musculus
  siRNA target sequence for Apod (NM_007470.1,505-523).
ggctcttccatgtggattt

SEQ ID NO: 570054 - DNA, 19 bp, Mus musculus
  siRNA target sequence for Apod (NM_007470.1,552-570).
ctccctccagaaacaataa

SEQ ID NO: 570055 - DNA, 19 bp, Mus musculus
  siRNA target sequence for Apod (NM_007470.1,561-579).
gaaacaataacctacctaa

SEQ ID NO: 570056 - DNA, 19 bp, Mus musculus
  siRNA target sequence for Apod (NM_007470.1,565-583).
caataacctacctaaaaga

SEQ ID NO: 570057 - DNA, 19 bp, Mus musculus
  siRNA target sequence for Apod (NM_007470.1,571-589).
cctacctaaaagatatcct

SEQ ID NO: 570058 - DNA, 19 bp, Mus musculus
  siRNA target sequence for Apod (NM_007470.1,572-590).
ctacctaaaagatatcctt

SEQ ID NO: 570059 - DNA, 19 bp, Mus musculus
  siRNA target sequence for Apod (NM_007470.1,576-594).
ctaaaagatatccttactt

SEQ ID NO: 570060 - DNA, 19 bp, Mus musculus
  siRNA target sequence for Apod (NM_007470.1,600-618).
ggcatcgacatcgaaaaaa

SEQ ID NO: 570061 - DNA, 19 bp, Mus musculus
  siRNA target sequence for Apod (NM_007470.1,601-619).
gcatcgacatcgaaaaaat

SEQ ID NO: 570062 - DNA, 19 bp, Mus musculus
  siRNA target sequence for Apod (NM_007470.1,605-623).
cgacatcgaaaaaatgaca

SEQ ID NO: 570063 - DNA, 19 bp, Mus musculus
  siRNA target sequence for Apoe (NM_009696.2,863-881).
gctggttcgagccaatagt

SEQ ID NO: 570064 - DNA, 19 bp, Mus musculus
  siRNA target sequence for Apoe (NM_009696.2,961-979).
gtggcccaggagaatcaat

SEQ ID NO: 570065 - DNA, 19 bp, Mus musculus
  siRNA target sequence for Atp5g3 (NM_175015.1,398-416).
gcagtcttatcattggtta

SEQ ID NO: 570066 - DNA, 19 bp, Mus musculus
  siRNA target sequence for Atp5g3 (NM_175015.1,481-499).
gaagctatgggtctctttt

SEQ ID NO: 570067 - DNA, 19 bp, Mus musculus
  siRNA target sequence for Atp5g3 (NM_175015.1,508-526).
gttgcgttcttgatcttgt

SEQ ID NO: 570068 - DNA, 19 bp, Mus musculus
  siRNA target sequence for Crabp1 (NM_013496.1,126-144).
gcagcagcgagaatttcga

SEQ ID NO: 570069 - DNA, 19 bp, Mus musculus
  siRNA target sequence for Crabp1 (NM_013496.1,228-246).
gccaagacggggatcagtt

SEQ ID NO: 570070 - DNA, 19 bp, Mus musculus
  siRNA target sequence for Crabp1 (NM_013496.1,398-416).
gagggggatggccctaaaa

SEQ ID NO: 570071 - DNA, 19 bp, Mus musculus
  siRNA target sequence for Crabp1 (NM_013496.1,400-418).
gggggatggccctaaaact

SEQ ID NO: 570072 - DNA, 19 bp, Mus musculus
  siRNA target sequence for Crabp1 (NM_013496.1,401-419).
ggggatggccctaaaactt

SEQ ID NO: 570073 - DNA, 19 bp, Mus musculus
  siRNA target sequence for Crabp1 (NM_013496.1,402-420).
gggatggccctaaaactta

SEQ ID NO: 570074 - DNA, 19 bp, Mus musculus
  siRNA target sequence for Crabp1 (NM_013496.1,404-422).
gatggccctaaaacttact

SEQ ID NO: 570075 - DNA, 19 bp, Mus musculus
  siRNA target sequence for Crabp1 (NM_013496.1,438-456).
ccaacgatgagctaatcct

SEQ ID NO: 570076 - DNA, 19 bp, Mus musculus
  siRNA target sequence for Crabp2 (NM_007759.1,267-285).
cagcagtcgagatcaaaca

SEQ ID NO: 570077 - DNA, 19 bp, Mus musculus
  siRNA target sequence for Crabp2 (NM_007759.1,481-499).
ccgagaactgaccaatgat

SEQ ID NO: 570078 - DNA, 19 bp, Mus musculus
  siRNA target sequence for Crabp2 (NM_007759.1,503-521).
gagctgatcctgacaatga

SEQ ID NO: 570079 - DNA, 19 bp, Mus musculus
  siRNA target sequence for Crabp2 (NM_007759.1,505-523).
gctgatcctgacaatgaca

SEQ ID NO: 570080 - DNA, 19 bp, Mus musculus
  siRNA target sequence for Fabp1 (NM_017399.1,162-180).
cgtgcatgaagggaagaaa

SEQ ID NO: 570081 - DNA, 19 bp, Mus musculus
  siRNA target sequence for Fabp1 (NM_017399.1,336-354).
gtccgtgactgaactcaat

SEQ ID NO: 570082 - DNA, 19 bp, Mus musculus
  siRNA target sequence for Fabp1 (NM_017399.1,380-398).
cattgggcgacattgtcta

SEQ ID NO: 570083 - DNA, 19 bp, Mus musculus
  siRNA target sequence for Fabp2 (NM_007980.2,30-48).
cgacggcacgtggaaagta

SEQ ID NO: 570084 - DNA, 19 bp, Mus musculus
  siRNA target sequence for Fabp2 (NM_007980.2,51-69).
ccggaacgagaactatgaa

SEQ ID NO: 570085 - DNA, 19 bp, Mus musculus
  siRNA target sequence for Fabp2 (NM_007980.2,52-70).
cggaacgagaactatgaaa

SEQ ID NO: 570086 - DNA, 19 bp, Mus musculus
  siRNA target sequence for Fabp2 (NM_007980.2,53-71).
ggaacgagaactatgaaaa

SEQ ID NO: 570087 - DNA, 19 bp, Mus musculus
  siRNA target sequence for Fabp2 (NM_007980.2,88-106).
ggcattaatgtgatgaaga

SEQ ID NO: 570088 - DNA, 19 bp, Mus musculus
  siRNA target sequence for Fabp2 (NM_007980.2,111-129).
gcttggagctcatgacaat

SEQ ID NO: 570089 - DNA, 19 bp, Mus musculus
  siRNA target sequence for Fabp2 (NM_007980.2,119-137).
ctcatgacaatctgaaact

SEQ ID NO: 570090 - DNA, 19 bp, Mus musculus
  siRNA target sequence for Fabp2 (NM_007980.2,182-200).
gcaacttcagaaacattga

SEQ ID NO: 570091 - DNA, 19 bp, Mus musculus
  siRNA target sequence for Fabp2 (NM_007980.2,191-209).
gaaacattgatgttgtgtt

SEQ ID NO: 570092 - DNA, 19 bp, Mus musculus
  siRNA target sequence for Fabp2 (NM_007980.2,270-288).
gaccattgagggaaataaa

SEQ ID NO: 570093 - DNA, 19 bp, Mus musculus
  siRNA target sequence for Fabp2 (NM_007980.2,394-412).
gccaagcgattctttaaga

SEQ ID NO: 570094 - DNA, 19 bp, Mus musculus
  siRNA target sequence for Fabp2 (NM_007980.2,395-413).
ccaagcgattctttaagaa

SEQ ID NO: 570095 - DNA, 19 bp, Mus musculus
  siRNA target sequence for Fabp2 (NM_007980.2,400-418).
cgattctttaagaaggaat

SEQ ID NO: 570096 - DNA, 19 bp, Mus musculus
  siRNA target sequence for Fabp3 (NM_010174.1,119-137).
ctaccatcatcgagaagaa

SEQ ID NO: 570097 - DNA, 19 bp, Mus musculus
  siRNA target sequence for Fabp3 (NM_010174.1,139-157).
ggggatactatcaccataa

SEQ ID NO: 570098 - DNA, 19 bp, Mus musculus
  siRNA target sequence for Fabp3 (NM_010174.1,142-160).
gatactatcaccataaaga

SEQ ID NO: 570099 - DNA, 19 bp, Mus musculus
  siRNA target sequence for Fabp3 (NM_010174.1,369-387).
ggtgagcactcggacttat

SEQ ID NO: 570100 - DNA, 19 bp, Mus musculus
  siRNA target sequence for Fabp3 (NM_010174.1,374-392).
gcactcggacttatgagaa

SEQ ID NO: 570101 - DNA, 19 bp, Mus musculus
  siRNA target sequence for Fabp4 (NM_024406.1,84-102).
gtgaaaacttcgatgatta

SEQ ID NO: 570102 - DNA, 19 bp, Mus musculus
  siRNA target sequence for Fabp4 (NM_024406.1,86-104).
gaaaacttcgatgattaca

SEQ ID NO: 570103 - DNA, 19 bp, Mus musculus
  siRNA target sequence for Fabp4 (NM_024406.1,174-192).
gcgtaaatggggatttggt

SEQ ID NO: 570104 - DNA, 19 bp, Mus musculus
  siRNA target sequence for Fabp4 (NM_024406.1,199-217).
ccggtcagagagtactttt

SEQ ID NO: 570105 - DNA, 19 bp, Mus musculus
  siRNA target sequence for Fabp4 (NM_024406.1,200-218).
cggtcagagagtactttta

SEQ ID NO: 570106 - DNA, 19 bp, Mus musculus
  siRNA target sequence for Fabp4 (NM_024406.1,225-243).
ccgagatttccttcaaact

SEQ ID NO: 570107 - DNA, 19 bp, Mus musculus
  siRNA target sequence for Fabp4 (NM_024406.1,341-359).
ggaaagtcgaccacaataa

SEQ ID NO: 570108 - DNA, 19 bp, Mus musculus
  siRNA target sequence for Fabp4 (NM_024406.1,342-360).
gaaagtcgaccacaataaa

SEQ ID NO: 570109 - DNA, 19 bp, Mus musculus
  siRNA target sequence for Fabp4 (NM_024406.1,346-364).
gtcgaccacaataaagaga

SEQ ID NO: 570110 - DNA, 19 bp, Mus musculus
  siRNA target sequence for Fabp4 (NM_024406.1,409-427).
cgtgacttccacaagagtt

SEQ ID NO: 570111 - DNA, 19 bp, Mus musculus
  siRNA target sequence for Fabp4 (NM_024406.1,410-428).
gtgacttccacaagagttt

SEQ ID NO: 570112 - DNA, 19 bp, Mus musculus
  siRNA target sequence for Fabp4 (NM_024406.1,412-430).
gacttccacaagagtttat

SEQ ID NO: 570113 - DNA, 19 bp, Mus musculus
  siRNA target sequence for Fabp6 (NM_008375.1,5-23).
ccttcagtggcaaatatga

SEQ ID NO: 570114 - DNA, 19 bp, Mus musculus
  siRNA target sequence for Fabp6 (NM_008375.1,30-48).
gagtgagaagaattacgat

SEQ ID NO: 570115 - DNA, 19 bp, Mus musculus
  siRNA target sequence for Fabp6 (NM_008375.1,92-110).
ggggacgtaacttcaagat

SEQ ID NO: 570116 - DNA, 19 bp, Mus musculus
  siRNA target sequence for Fabp6 (NM_008375.1,94-112).
ggacgtaacttcaagatca

SEQ ID NO: 570117 - DNA, 19 bp, Mus musculus
  siRNA target sequence for Fabp6 (NM_008375.1,95-113).
gacgtaacttcaagatcat

SEQ ID NO: 570118 - DNA, 19 bp, Mus musculus
  siRNA target sequence for Fabp7 (NM_021272.2,132-150).
gtcagaattttgatgagta

SEQ ID NO: 570119 - DNA, 19 bp, Mus musculus
  siRNA target sequence for Fabp7 (NM_021272.2,191-209).
ggaaacgtgaccaaaccaa

SEQ ID NO: 570120 - DNA, 19 bp, Mus musculus
  siRNA target sequence for Fabp7 (NM_021272.2,239-257).
gtggtgatccggacacaat

SEQ ID NO: 570121 - DNA, 19 bp, Mus musculus
  siRNA target sequence for Fabp7 (NM_021272.2,248-266).
cggacacaatgcacattca

SEQ ID NO: 570122 - DNA, 19 bp, Mus musculus
  siRNA target sequence for Fabp7 (NM_021272.2,249-267).
ggacacaatgcacattcaa

SEQ ID NO: 570123 - DNA, 19 bp, Mus musculus
  siRNA target sequence for Fabp7 (NM_021272.2,405-423).
gtaccagagaaattaagga

SEQ ID NO: 570124 - DNA, 19 bp, Mus musculus
  siRNA target sequence for Fabp7 (NM_021272.2,433-451).
ggtcgtgactcttaccttt

SEQ ID NO: 570125 - DNA, 19 bp, Mus musculus
  siRNA target sequence for Fabp7 (NM_021272.2,464-482).
gctgttcgctgttatgaaa

SEQ ID NO: 570126 - DNA, 19 bp, Mus musculus
  siRNA target sequence for Fabp7 (NM_021272.2,465-483).
ctgttcgctgttatgaaaa

SEQ ID NO: 570127 - DNA, 19 bp, Mus musculus
  siRNA target sequence for Fabp9 (NM_011598.2,89-107).
ctgatctccagcgaaaact

SEQ ID NO: 570128 - DNA, 19 bp, Mus musculus
  siRNA target sequence for Fabp9 (NM_011598.2,97-115).
cagcgaaaactttgagaat

SEQ ID NO: 570129 - DNA, 19 bp, Mus musculus
  siRNA target sequence for Fabp9 (NM_011598.2,148-166).
ccggaaagtcgcatgttta

SEQ ID NO: 570130 - DNA, 19 bp, Mus musculus
  siRNA target sequence for Fabp9 (NM_011598.2,149-167).
cggaaagtcgcatgtttaa

SEQ ID NO: 570131 - DNA, 19 bp, Mus musculus
  siRNA target sequence for Fabp9 (NM_011598.2,172-190).
gccaagcgttagtattagt

SEQ ID NO: 570132 - DNA, 19 bp, Mus musculus
  siRNA target sequence for Fabp9 (NM_011598.2,173-191).
ccaagcgttagtattagtt

SEQ ID NO: 570133 - DNA, 19 bp, Mus musculus
  siRNA target sequence for Fabp9 (NM_011598.2,178-196).
cgttagtattagtttcaat

SEQ ID NO: 570134 - DNA, 19 bp, Mus musculus
  siRNA target sequence for Fabp9 (NM_011598.2,234-252).
ggaacacggagatctcttt

SEQ ID NO: 570135 - DNA, 19 bp, Mus musculus
  siRNA target sequence for Fabp9 (NM_011598.2,299-317).
gtgaagagccttataacct

SEQ ID NO: 570136 - DNA, 19 bp, Mus musculus
  siRNA target sequence for Fabp9 (NM_011598.2,301-319).
gaagagccttataaccttt

SEQ ID NO: 570137 - DNA, 19 bp, Mus musculus
  siRNA target sequence for Fabp9 (NM_011598.2,304-322).
gagccttataacctttgaa

SEQ ID NO: 570138 - DNA, 19 bp, Mus musculus
  siRNA target sequence for Fabp9 (NM_011598.2,330-348).
caatgatccaggtccaaaa

SEQ ID NO: 570139 - DNA, 19 bp, Mus musculus
  siRNA target sequence for Fabp9 (NM_011598.2,356-374).
ggcaaacagacaacaatta

SEQ ID NO: 570140 - DNA, 19 bp, Mus musculus
  siRNA target sequence for Fabp9 (NM_011598.2,404-422).
gtggagtgcaccatgaaca

SEQ ID NO: 570141 - DNA, 19 bp, Mus musculus
  siRNA target sequence for Fabp9 (NM_011598.2,406-424).
ggagtgcaccatgaacaat

SEQ ID NO: 570142 - DNA, 19 bp, Mus musculus
  siRNA target sequence for Fabp9 (NM_011598.2,409-427).
gtgcaccatgaacaatgtt

SEQ ID NO: 570143 - DNA, 19 bp, Mus musculus
  siRNA target sequence for Lbp (NM_008489.1,315-333).
gcggggacttcaagatcaa

SEQ ID NO: 570144 - DNA, 19 bp, Mus musculus
  siRNA target sequence for Lbp (NM_008489.1,345-363).
gtgggcagtacgagtttca

SEQ ID NO: 570145 - DNA, 19 bp, Mus musculus
  siRNA target sequence for Lbp (NM_008489.1,347-365).
gggcagtacgagtttcata

SEQ ID NO: 570146 - DNA, 19 bp, Mus musculus
  siRNA target sequence for Lbp (NM_008489.1,458-476).
ggtgtccgaggcaaatgga

SEQ ID NO: 570147 - DNA, 19 bp, Mus musculus
  siRNA target sequence for Lbp (NM_008489.1,474-492).
ggaaggtgcgcaaatcctt

SEQ ID NO: 570148 - DNA, 19 bp, Mus musculus
  siRNA target sequence for Lbp (NM_008489.1,524-542).
gtcaaaggtgtcaccattt

SEQ ID NO: 570149 - DNA, 19 bp, Mus musculus
  siRNA target sequence for Lbp (NM_008489.1,601-619).
gtgcagcagccgcatttgt

SEQ ID NO: 570150 - DNA, 19 bp, Mus musculus
  siRNA target sequence for Lbp (NM_008489.1,604-622).
cagcagccgcatttgtgat

SEQ ID NO: 570151 - DNA, 19 bp, Mus musculus
  siRNA target sequence for Lbp (NM_008489.1,609-627).
gccgcatttgtgatttgga

SEQ ID NO: 570152 - DNA, 19 bp, Mus musculus
  siRNA target sequence for Lbp (NM_008489.1,610-628).
ccgcatttgtgatttggat

SEQ ID NO: 570153 - DNA, 19 bp, Mus musculus
  siRNA target sequence for Lbp (NM_008489.1,685-703).
gtcgaagctccagaaagta

SEQ ID NO: 570154 - DNA, 19 bp, Mus musculus
  siRNA target sequence for Lbp (NM_008489.1,687-705).
cgaagctccagaaagtact

SEQ ID NO: 570155 - DNA, 19 bp, Mus musculus
  siRNA target sequence for Lbp (NM_008489.1,701-719).
gtactggagaataaggttt

SEQ ID NO: 570156 - DNA, 19 bp, Mus musculus
  siRNA target sequence for Lbp (NM_008489.1,851-869).
gtgctggatgtcatgttta

SEQ ID NO: 570157 - DNA, 19 bp, Mus musculus
  siRNA target sequence for Lbp (NM_008489.1,865-883).
gtttaagggtgaaattttt

SEQ ID NO: 570158 - DNA, 19 bp, Mus musculus
  siRNA target sequence for Lbp (NM_008489.1,1032-1050).
ccatcacagatgacatgtt

SEQ ID NO: 570159 - DNA, 19 bp, Mus musculus
  siRNA target sequence for Lbp (NM_008489.1,1033-1051).
catcacagatgacatgtta

SEQ ID NO: 570160 - DNA, 19 bp, Mus musculus
  siRNA target sequence for Lbp (NM_008489.1,1094-1112).
cccttcactccccagatat

SEQ ID NO: 570161 - DNA, 19 bp, Mus musculus
  siRNA target sequence for Lbp (NM_008489.1,1095-1113).
ccttcactccccagatata

SEQ ID NO: 570162 - DNA, 19 bp, Mus musculus
  siRNA target sequence for Lbp (NM_008489.1,1099-1117).
cactccccagatatacaaa

SEQ ID NO: 570163 - DNA, 19 bp, Mus musculus
  siRNA target sequence for Lbp (NM_008489.1,1103-1121).
ccccagatatacaaaaagt

SEQ ID NO: 570164 - DNA, 19 bp, Mus musculus
  siRNA target sequence for Lbp (NM_008489.1,1161-1179).
ctgccccgattctgaatgt

SEQ ID NO: 570165 - DNA, 19 bp, Mus musculus
  siRNA target sequence for Lbp (NM_008489.1,1163-1181).
gccccgattctgaatgtca

SEQ ID NO: 570166 - DNA, 19 bp, Mus musculus
  siRNA target sequence for Lbp (NM_008489.1,1214-1232).
gagatcgaaggctttgtga

SEQ ID NO: 570167 - DNA, 19 bp, Mus musculus
  siRNA target sequence for Lbp (NM_008489.1,1272-1290).
gcgtggtcactaatgtatt

SEQ ID NO: 570168 - DNA, 19 bp, Mus musculus
  siRNA target sequence for Lbp (NM_008489.1,1273-1291).
cgtggtcactaatgtattt

SEQ ID NO: 570169 - DNA, 19 bp, Mus musculus
  siRNA target sequence for Lbp (NM_008489.1,1286-1304).
gtatttgcctcattaactt

SEQ ID NO: 570170 - DNA, 19 bp, Mus musculus
  siRNA target sequence for Lbp (NM_008489.1,1349-1367).
caagtgagactgatcgaat

SEQ ID NO: 570171 - DNA, 19 bp, Mus musculus
  siRNA target sequence for Lbp (NM_008489.1,1400-1418).
caggcattccttaactact

SEQ ID NO: 570172 - DNA, 19 bp, Mus musculus
  siRNA target sequence for Lbp (NM_008489.1,1479-1497).
ctctgccaaggcatattca

SEQ ID NO: 570173 - DNA, 19 bp, Mus musculus
  siRNA target sequence for Lbp (NM_008489.1,1544-1562).
ggtgccaatgtccagtata

SEQ ID NO: 570174 - DNA, 19 bp, Mus musculus
  siRNA target sequence for Lbp (NM_008489.1,1545-1563).
gtgccaatgtccagtatat

SEQ ID NO: 570175 - DNA, 19 bp, Mus musculus
  siRNA target sequence for Lipf (NM_026334.1,56-74).
gtggctgctattagtaaca

SEQ ID NO: 570176 - DNA, 19 bp, Mus musculus
  siRNA target sequence for Lipf (NM_026334.1,149-167).
gaatgttagtcagatgata

SEQ ID NO: 570177 - DNA, 19 bp, Mus musculus
  siRNA target sequence for Lipf (NM_026334.1,153-171).
gttagtcagatgataactt

SEQ ID NO: 570178 - DNA, 19 bp, Mus musculus
  siRNA target sequence for Lipf (NM_026334.1,191-209).
ggaatatgaagttgttact

SEQ ID NO: 570179 - DNA, 19 bp, Mus musculus
  siRNA target sequence for Lipf (NM_026334.1,221-239).
cattctgggggtctataga

SEQ ID NO: 570180 - DNA, 19 bp, Mus musculus
  siRNA target sequence for Lipf (NM_026334.1,289-307).
catatttgcagcatggttt

SEQ ID NO: 570181 - DNA, 19 bp, Mus musculus
  siRNA target sequence for Lipf (NM_026334.1,318-336).
gccacaaactggattacaa

SEQ ID NO: 570182 - DNA, 19 bp, Mus musculus
  siRNA target sequence for Lipf (NM_026334.1,319-337).
ccacaaactggattacaaa

SEQ ID NO: 570183 - DNA, 19 bp, Mus musculus
  siRNA target sequence for Lipf (NM_026334.1,398-416).
gaacagtcgagggaataca

SEQ ID NO: 570184 - DNA, 19 bp, Mus musculus
  siRNA target sequence for Lipf (NM_026334.1,418-436).
ggtcccggaaaaatgtata

SEQ ID NO: 570185 - DNA, 19 bp, Mus musculus
  siRNA target sequence for Lipf (NM_026334.1,421-439).
cccggaaaaatgtatacta

SEQ ID NO: 570186 - DNA, 19 bp, Mus musculus
  siRNA target sequence for Lipf (NM_026334.1,422-440).
ccggaaaaatgtatactat

SEQ ID NO: 570187 - DNA, 19 bp, Mus musculus
  siRNA target sequence for Lipf (NM_026334.1,423-441).
cggaaaaatgtatactatt

SEQ ID NO: 570188 - DNA, 19 bp, Mus musculus
  siRNA target sequence for Lipf (NM_026334.1,502-520).
cagccaccatagacttcat

SEQ ID NO: 570189 - DNA, 19 bp, Mus musculus
  siRNA target sequence for Lipf (NM_026334.1,505-523).
ccaccatagacttcattgt

SEQ ID NO: 570190 - DNA, 19 bp, Mus musculus
  siRNA target sequence for Lipf (NM_026334.1,508-526).
ccatagacttcattgtaca

SEQ ID NO: 570191 - DNA, 19 bp, Mus musculus
  siRNA target sequence for Lipf (NM_026334.1,534-552).
ggacaagagaagatacact

SEQ ID NO: 570192 - DNA, 19 bp, Mus musculus
  siRNA target sequence for Lipf (NM_026334.1,535-553).
gacaagagaagatacacta

SEQ ID NO: 570193 - DNA, 19 bp, Mus musculus
  siRNA target sequence for Lipf (NM_026334.1,570-588).
ggcaccactatcggtttta

SEQ ID NO: 570194 - DNA, 19 bp, Mus musculus
  siRNA target sequence for Lipf (NM_026334.1,571-589).
gcaccactatcggttttat

SEQ ID NO: 570195 - DNA, 19 bp, Mus musculus
  siRNA target sequence for Lipf (NM_026334.1,572-590).
caccactatcggttttatt

SEQ ID NO: 570196 - DNA, 19 bp, Mus musculus
  siRNA target sequence for Lipf (NM_026334.1,612-630).
ctggctaaaaaaatcaaga

SEQ ID NO: 570197 - DNA, 19 bp, Mus musculus
  siRNA target sequence for Lipf (NM_026334.1,651-669).
gttgctactgtgaagtata

SEQ ID NO: 570198 - DNA, 19 bp, Mus musculus
  siRNA target sequence for Lipf (NM_026334.1,743-761).
catgccccacaactactta

SEQ ID NO: 570199 - DNA, 19 bp, Mus musculus
  siRNA target sequence for Lipf (NM_026334.1,746-764).
gccccacaactacttagat

SEQ ID NO: 570200 - DNA, 19 bp, Mus musculus
  siRNA target sequence for Lipf (NM_026334.1,748-766).
cccacaactacttagatca

SEQ ID NO: 570201 - DNA, 19 bp, Mus musculus
  siRNA target sequence for Lipf (NM_026334.1,749-767).
ccacaactacttagatcaa

SEQ ID NO: 570202 - DNA, 19 bp, Mus musculus
  siRNA target sequence for Lipf (NM_026334.1,750-768).
cacaactacttagatcaat

SEQ ID NO: 570203 - DNA, 19 bp, Mus musculus
  siRNA target sequence for Lipf (NM_026334.1,814-832).
gcagcaacgctttattcat

SEQ ID NO: 570204 - DNA, 19 bp, Mus musculus
  siRNA target sequence for Lipf (NM_026334.1,817-835).
gcaacgctttattcatctt

SEQ ID NO: 570205 - DNA, 19 bp, Mus musculus
  siRNA target sequence for Lipf (NM_026334.1,929-947).
ctgggcacagcttgctaaa

SEQ ID NO: 570206 - DNA, 19 bp, Mus musculus
  siRNA target sequence for Lipf (NM_026334.1,989-1007).
gaacatgttacactacaat

SEQ ID NO: 570207 - DNA, 19 bp, Mus musculus
  siRNA target sequence for Lipf (NM_026334.1,995-1013).
gttacactacaatcagaaa

SEQ ID NO: 570208 - DNA, 19 bp, Mus musculus
  siRNA target sequence for Lipf (NM_026334.1,1015-1033).
cgcctccctactatgatgt

SEQ ID NO: 570209 - DNA, 19 bp, Mus musculus
  siRNA target sequence for Lipf (NM_026334.1,1040-1058).
catgaccgtgccaattgca

SEQ ID NO: 570210 - DNA, 19 bp, Mus musculus
  siRNA target sequence for Lipf (NM_026334.1,1063-1081).
ggaacggtggccatgacat

SEQ ID NO: 570211 - DNA, 19 bp, Mus musculus
  siRNA target sequence for Lipf (NM_026334.1,1136-1154).
gtaccataaggagattctt

SEQ ID NO: 570212 - DNA, 19 bp, Mus musculus
  siRNA target sequence for Lipf (NM_026334.1,1192-1210).
cgcctcaagaggtttacaa

SEQ ID NO: 570213 - DNA, 19 bp, Mus musculus
  siRNA target sequence for Lipf (NM_026334.1,1193-1211).
gcctcaagaggtttacaat

SEQ ID NO: 570214 - DNA, 19 bp, Mus musculus
  siRNA target sequence for Lipf (NM_026334.1,1195-1213).
ctcaagaggtttacaatga

SEQ ID NO: 570215 - DNA, 19 bp, Mus musculus
  siRNA target sequence for Lipf (NM_026334.1,1197-1215).
caagaggtttacaatgaga

SEQ ID NO: 570216 - DNA, 19 bp, Mus musculus
  siRNA target sequence for Lipf (NM_026334.1,1202-1220).
ggtttacaatgagatagtt

SEQ ID NO: 570217 - DNA, 19 bp, Mus musculus
  siRNA target sequence for Lipf (NM_026334.1,1203-1221).
gtttacaatgagatagtta

SEQ ID NO: 570218 - DNA, 19 bp, Mus musculus
  siRNA target sequence for Mttp (NM_008642.1,66-84).
ctactctgcttccgttaaa

SEQ ID NO: 570219 - DNA, 19 bp, Mus musculus
  siRNA target sequence for Mttp (NM_008642.1,92-110).
caactggcctctcattaaa

SEQ ID NO: 570220 - DNA, 19 bp, Mus musculus
  siRNA target sequence for Mttp (NM_008642.1,259-277).
gtgatccaagtcacgataa

SEQ ID NO: 570221 - DNA, 19 bp, Mus musculus
  siRNA target sequence for Mttp (NM_008642.1,261-279).
gatccaagtcacgataaca

SEQ ID NO: 570222 - DNA, 19 bp, Mus musculus
  siRNA target sequence for Mttp (NM_008642.1,272-290).
cgataacagctgttaacgt

SEQ ID NO: 570223 - DNA, 19 bp, Mus musculus
  siRNA target sequence for Mttp (NM_008642.1,273-291).
gataacagctgttaacgtt

SEQ ID NO: 570224 - DNA, 19 bp, Mus musculus
  siRNA target sequence for Mttp (NM_008642.1,278-296).
cagctgttaacgttgaaaa

SEQ ID NO: 570225 - DNA, 19 bp, Mus musculus
  siRNA target sequence for Mttp (NM_008642.1,327-345).
cttccagggcaaaagtaca

SEQ ID NO: 570226 - DNA, 19 bp, Mus musculus
  siRNA target sequence for Mttp (NM_008642.1,335-353).
gcaaaagtacacctaagat

SEQ ID NO: 570227 - DNA, 19 bp, Mus musculus
  siRNA target sequence for Mttp (NM_008642.1,384-402).
gagacccatgcttcttcat

SEQ ID NO: 570228 - DNA, 19 bp, Mus musculus
  siRNA target sequence for Mttp (NM_008642.1,386-404).
gacccatgcttcttcatct

SEQ ID NO: 570229 - DNA, 19 bp, Mus musculus
  siRNA target sequence for Mttp (NM_008642.1,423-441).
ggagttctactcctatgaa

SEQ ID NO: 570230 - DNA, 19 bp, Mus musculus
  siRNA target sequence for Mttp (NM_008642.1,424-442).
gagttctactcctatgaaa

SEQ ID NO: 570231 - DNA, 19 bp, Mus musculus
  siRNA target sequence for Mttp (NM_008642.1,444-462).
cgagccagtgggcatagaa

SEQ ID NO: 570232 - DNA, 19 bp, Mus musculus
  siRNA target sequence for Mttp (NM_008642.1,449-467).
cagtgggcatagaaaatct

SEQ ID NO: 570233 - DNA, 19 bp, Mus musculus
  siRNA target sequence for Mttp (NM_008642.1,451-469).
gtgggcatagaaaatctca

SEQ ID NO: 570234 - DNA, 19 bp, Mus musculus
  siRNA target sequence for Mttp (NM_008642.1,471-489).
gagaggcttggctagctta

SEQ ID NO: 570235 - DNA, 19 bp, Mus musculus
  siRNA target sequence for Mttp (NM_008642.1,473-491).
gaggcttggctagcttatt

SEQ ID NO: 570236 - DNA, 19 bp, Mus musculus
  siRNA target sequence for Mttp (NM_008642.1,515-533).
ctaccaacgaggtagatat

SEQ ID NO: 570237 - DNA, 19 bp, Mus musculus
  siRNA target sequence for Mttp (NM_008642.1,519-537).
caacgaggtagatatctct

SEQ ID NO: 570238 - DNA, 19 bp, Mus musculus
  siRNA target sequence for Mttp (NM_008642.1,591-609).
ggctctggatacatgcaaa

SEQ ID NO: 570239 - DNA, 19 bp, Mus musculus
  siRNA target sequence for Mttp (NM_008642.1,613-631).
gagcggtctggatttacaa

SEQ ID NO: 570240 - DNA, 19 bp, Mus musculus
  siRNA target sequence for Mttp (NM_008642.1,758-776).
ccatagcaggaaaaatagt

SEQ ID NO: 570241 - DNA, 19 bp, Mus musculus
  siRNA target sequence for Mttp (NM_008642.1,838-856).
caagtggcaggtgtaatta

SEQ ID NO: 570242 - DNA, 19 bp, Mus musculus
  siRNA target sequence for Mttp (NM_008642.1,843-861).
ggcaggtgtaattaaagca

SEQ ID NO: 570243 - DNA, 19 bp, Mus musculus
  siRNA target sequence for Mttp (NM_008642.1,1172-1190).
gtgacagcagtatcatact

SEQ ID NO: 570244 - DNA, 19 bp, Mus musculus
  siRNA target sequence for Mttp (NM_008642.1,1246-1264).
ctacgagccctccttagta

SEQ ID NO: 570245 - DNA, 19 bp, Mus musculus
  siRNA target sequence for Mttp (NM_008642.1,1249-1267).
cgagccctccttagtaagt

SEQ ID NO: 570246 - DNA, 19 bp, Mus musculus
  siRNA target sequence for Mttp (NM_008642.1,1252-1270).
gccctccttagtaagttca

SEQ ID NO: 570247 - DNA, 19 bp, Mus musculus
  siRNA target sequence for Mttp (NM_008642.1,1298-1316).
gagagtcggttatgatcat

SEQ ID NO: 570248 - DNA, 19 bp, Mus musculus
  siRNA target sequence for Mttp (NM_008642.1,1300-1318).
gagtcggttatgatcatca

SEQ ID NO: 570249 - DNA, 19 bp, Mus musculus
  siRNA target sequence for Mttp (NM_008642.1,1302-1320).
gtcggttatgatcatcatt

SEQ ID NO: 570250 - DNA, 19 bp, Mus musculus
  siRNA target sequence for Mttp (NM_008642.1,1392-1410).
gatcctgggaggacttgaa

SEQ ID NO: 570251 - DNA, 19 bp, Mus musculus
  siRNA target sequence for Mttp (NM_008642.1,1478-1496).
gcatcccgctccttctgaa

SEQ ID NO: 570252 - DNA, 19 bp, Mus musculus
  siRNA target sequence for Mttp (NM_008642.1,1482-1500).
cccgctccttctgaagtat

SEQ ID NO: 570253 - DNA, 19 bp, Mus musculus
  siRNA target sequence for Mttp (NM_008642.1,1538-1556).
ccactgttctccagagata

SEQ ID NO: 570254 - DNA, 19 bp, Mus musculus
  siRNA target sequence for Mttp (NM_008642.1,1608-1626).
ccaccagaatcgtaaggtt

SEQ ID NO: 570255 - DNA, 19 bp, Mus musculus
  siRNA target sequence for Mttp (NM_008642.1,1651-1669).
gccgctgctgtcatcttaa

SEQ ID NO: 570256 - DNA, 19 bp, Mus musculus
  siRNA target sequence for Mttp (NM_008642.1,1676-1694).
catcctacatggatgtgaa

SEQ ID NO: 570257 - DNA, 19 bp, Mus musculus
  siRNA target sequence for Mttp (NM_008642.1,1720-1738).
ctcccgaaagagatgaaca

SEQ ID NO: 570258 - DNA, 19 bp, Mus musculus
  siRNA target sequence for Mttp (NM_008642.1,1722-1740).
cccgaaagagatgaacaaa

SEQ ID NO: 570259 - DNA, 19 bp, Mus musculus
  siRNA target sequence for Mttp (NM_008642.1,1897-1915).
cgtgcagcgtccacataca

SEQ ID NO: 570260 - DNA, 19 bp, Mus musculus
  siRNA target sequence for Mttp (NM_008642.1,1942-1960).
ggcattctgaggagaagta

SEQ ID NO: 570261 - DNA, 19 bp, Mus musculus
  siRNA target sequence for Mttp (NM_008642.1,1943-1961).
gcattctgaggagaagtaa

SEQ ID NO: 570262 - DNA, 19 bp, Mus musculus
  siRNA target sequence for Mttp (NM_008642.1,2003-2021).
gtagtcaggtggtgattga

SEQ ID NO: 570263 - DNA, 19 bp, Mus musculus
  siRNA target sequence for Mttp (NM_008642.1,2031-2049).
gctggaaggcttaattgca

SEQ ID NO: 570264 - DNA, 19 bp, Mus musculus
  siRNA target sequence for Mttp (NM_008642.1,2070-2088).
ggagaaccttgactcttat

SEQ ID NO: 570265 - DNA, 19 bp, Mus musculus
  siRNA target sequence for Mttp (NM_008642.1,2121-2139).
gcttaggcctgtcacattt

SEQ ID NO: 570266 - DNA, 19 bp, Mus musculus
  siRNA target sequence for Mttp (NM_008642.1,2127-2145).
gcctgtcacattttttaat

SEQ ID NO: 570267 - DNA, 19 bp, Mus musculus
  siRNA target sequence for Mttp (NM_008642.1,2146-2164).
ggatacagtgatttgatgt

SEQ ID NO: 570268 - DNA, 19 bp, Mus musculus
  siRNA target sequence for Mttp (NM_008642.1,2153-2171).
gtgatttgatgtccaaaat

SEQ ID NO: 570269 - DNA, 19 bp, Mus musculus
  siRNA target sequence for Mttp (NM_008642.1,2199-2217).
cgtggtgaaagggcttatt

SEQ ID NO: 570270 - DNA, 19 bp, Mus musculus
  siRNA target sequence for Mttp (NM_008642.1,2205-2223).
gaaagggcttattctgtta

SEQ ID NO: 570271 - DNA, 19 bp, Mus musculus
  siRNA target sequence for Mttp (NM_008642.1,2255-2273).
ctggactaaaggccaatat

SEQ ID NO: 570272 - DNA, 19 bp, Mus musculus
  siRNA target sequence for Mttp (NM_008642.1,2280-2298).
ccagggtggtctagctatt

SEQ ID NO: 570273 - DNA, 19 bp, Mus musculus
  siRNA target sequence for Mttp (NM_008642.1,2283-2301).
gggtggtctagctattgat

SEQ ID NO: 570274 - DNA, 19 bp, Mus musculus
  siRNA target sequence for Mttp (NM_008642.1,2284-2302).
ggtggtctagctattgata

SEQ ID NO: 570275 - DNA, 19 bp, Mus musculus
  siRNA target sequence for Mttp (NM_008642.1,2285-2303).
gtggtctagctattgatat

SEQ ID NO: 570276 - DNA, 19 bp, Mus musculus
  siRNA target sequence for Mttp (NM_008642.1,2287-2305).
ggtctagctattgatattt

SEQ ID NO: 570277 - DNA, 19 bp, Mus musculus
  siRNA target sequence for Mttp (NM_008642.1,2342-2360).
ctaaaacccgagtgaaaaa

SEQ ID NO: 570278 - DNA, 19 bp, Mus musculus
  siRNA target sequence for Mttp (NM_008642.1,2362-2380).
cgggtggctgtggtgataa

SEQ ID NO: 570279 - DNA, 19 bp, Mus musculus
  siRNA target sequence for Mttp (NM_008642.1,2395-2413).
gtggatgcctcttttgtga

SEQ ID NO: 570280 - DNA, 19 bp, Mus musculus
  siRNA target sequence for Mttp (NM_008642.1,2525-2543).
ccccactcaggcaattcga

SEQ ID NO: 570281 - DNA, 19 bp, Mus musculus
  siRNA target sequence for Mttp (NM_008642.1,2534-2552).
ggcaattcgagacaaagta

SEQ ID NO: 570282 - DNA, 19 bp, Mus musculus
  siRNA target sequence for Mttp (NM_008642.1,2535-2553).
gcaattcgagacaaagtat

SEQ ID NO: 570283 - DNA, 19 bp, Mus musculus
  siRNA target sequence for Mttp (NM_008642.1,2604-2622).
cctagtggccggatgtgaa

SEQ ID NO: 570284 - DNA, 19 bp, Mus musculus
  siRNA target sequence for Pctp (NM_008796.1,172-190).
gactttatgagtataaggt

SEQ ID NO: 570285 - DNA, 19 bp, Mus musculus
  siRNA target sequence for Pctp (NM_008796.1,234-252).
gtttacatggacttagact

SEQ ID NO: 570286 - DNA, 19 bp, Mus musculus
  siRNA target sequence for Pctp (NM_008796.1,319-337).
catactgggaagtgaagta

SEQ ID NO: 570287 - DNA, 19 bp, Mus musculus
  siRNA target sequence for Pctp (NM_008796.1,525-543).
gggagcagagttttcatgt

SEQ ID NO: 570288 - DNA, 19 bp, Mus musculus
  siRNA target sequence for Pctp (NM_008796.1,532-550).
gagttttcatgtactactt

SEQ ID NO: 570289 - DNA, 19 bp, Mus musculus
  siRNA target sequence for Pctp (NM_008796.1,598-616).
ccaagaatggagttccaaa

SEQ ID NO: 570290 - DNA, 19 bp, Mus musculus
  siRNA target sequence for Pctp (NM_008796.1,602-620).
gaatggagttccaaacttt

SEQ ID NO: 570291 - DNA, 19 bp, Mus musculus
  siRNA target sequence for Pctp (NM_008796.1,643-661).
gtcagaactaccacaagaa

SEQ ID NO: 570292 - DNA, 19 bp, Mus musculus
  siRNA target sequence for Pitpn (NM_008850.1,264-282).
gtctgtagatgagtatcaa

SEQ ID NO: 570293 - DNA, 19 bp, Mus musculus
  siRNA target sequence for Pitpn (NM_008850.1,426-444).
caaagtacccacctttgtt

SEQ ID NO: 570294 - DNA, 19 bp, Mus musculus
  siRNA target sequence for Pitpn (NM_008850.1,590-608).
cccaggagaatgtgcataa

SEQ ID NO: 570295 - DNA, 19 bp, Mus musculus
  siRNA target sequence for Pitpn (NM_008850.1,591-609).
ccaggagaatgtgcataaa

SEQ ID NO: 570296 - DNA, 19 bp, Mus musculus
  siRNA target sequence for Pitpn (NM_008850.1,615-633).
gcctgaggcatggaaacat

SEQ ID NO: 570297 - DNA, 19 bp, Mus musculus
  siRNA target sequence for Pitpn (NM_008850.1,659-677).
ctgatcgaagccaagtact

SEQ ID NO: 570298 - DNA, 19 bp, Mus musculus
  siRNA target sequence for Pitpn (NM_008850.1,700-718).
gaagacccagcaaaattta

SEQ ID NO: 570299 - DNA, 19 bp, Mus musculus
  siRNA target sequence for Pitpn (NM_008850.1,703-721).
gacccagcaaaatttaaat

SEQ ID NO: 570300 - DNA, 19 bp, Mus musculus
  siRNA target sequence for Pitpn (NM_008850.1,833-851).
ggtggggcttgcagaacaa

SEQ ID NO: 570301 - DNA, 19 bp, Mus musculus
  siRNA target sequence for Pitpn (NM_008850.1,834-852).
gtggggcttgcagaacaaa

SEQ ID NO: 570302 - DNA, 19 bp, Mus musculus
  siRNA target sequence for Pitpn (NM_008850.1,873-891).
gcaagagaagcgtctgttt

SEQ ID NO: 570303 - DNA, 19 bp, Mus musculus
  siRNA target sequence for Pitpn (NM_008850.1,874-892).
caagagaagcgtctgttta

SEQ ID NO: 570304 - DNA, 19 bp, Mus musculus
  siRNA target sequence for Pitpn (NM_008850.1,882-900).
gcgtctgtttacaaacttt

SEQ ID NO: 570305 - DNA, 19 bp, Mus musculus
  siRNA target sequence for Pitpn (NM_008850.1,886-904).
ctgtttacaaactttcaca

SEQ ID NO: 570306 - DNA, 19 bp, Mus musculus
  siRNA target sequence for Pitpn (NM_008850.1,933-951).
ggttgatctgactatggat

SEQ ID NO: 570307 - DNA, 19 bp, Mus musculus
  siRNA target sequence for Pitpnb (NM_019640.2,128-146).
gttgcagaagcgagtaaga

SEQ ID NO: 570308 - DNA, 19 bp, Mus musculus
  siRNA target sequence for Pitpnb (NM_019640.2,238-256).
ccacctgaagagcaaagtt

SEQ ID NO: 570309 - DNA, 19 bp, Mus musculus
  siRNA target sequence for Pitpnb (NM_019640.2,404-422).
gacttgggaacattagaaa

SEQ ID NO: 570310 - DNA, 19 bp, Mus musculus
  siRNA target sequence for Pitpnb (NM_019640.2,478-496).
cattgcagatcgaagtcaa

SEQ ID NO: 570311 - DNA, 19 bp, Mus musculus
  siRNA target sequence for Pitpnb (NM_019640.2,527-545).
gaccctgcattattccatt

SEQ ID NO: 570312 - DNA, 19 bp, Mus musculus
  siRNA target sequence for Pitpnb (NM_019640.2,531-549).
ctgcattattccattcagt

SEQ ID NO: 570313 - DNA, 19 bp, Mus musculus
  siRNA target sequence for Pitpnb (NM_019640.2,615-633).
ctaggatgtgtgcctataa

SEQ ID NO: 570314 - DNA, 19 bp, Mus musculus
  siRNA target sequence for Pitpnb (NM_019640.2,701-719).
gaaaaacggatatttacga

SEQ ID NO: 570315 - DNA, 19 bp, Mus musculus
  siRNA target sequence for Pitpnb (NM_019640.2,709-727).
gatatttacgaacttacat

SEQ ID NO: 570316 - DNA, 19 bp, Mus musculus
  siRNA target sequence for Pltp (NM_011125.1,504-522).
cgaggcctctgtgtctaaa

SEQ ID NO: 570317 - DNA, 19 bp, Mus musculus
  siRNA target sequence for Pltp (NM_011125.1,697-715).
gatctcgtgggcatcgatt

SEQ ID NO: 570318 - DNA, 19 bp, Mus musculus
  siRNA target sequence for Pltp (NM_011125.1,743-761).
ccaacggcaacctggatat

SEQ ID NO: 570319 - DNA, 19 bp, Mus musculus
  siRNA target sequence for Pltp (NM_011125.1,747-765).
cggcaacctggatatggaa

SEQ ID NO: 570320 - DNA, 19 bp, Mus musculus
  siRNA target sequence for Pltp (NM_011125.1,1005-1023).
cctgagtccgacagtgatt

SEQ ID NO: 570321 - DNA, 19 bp, Mus musculus
  siRNA target sequence for Pltp (NM_011125.1,1178-1196).
gccgtctcagtgctaagtt

SEQ ID NO: 570322 - DNA, 19 bp, Mus musculus
  siRNA target sequence for Pltp (NM_011125.1,1180-1198).
cgtctcagtgctaagttga

SEQ ID NO: 570323 - DNA, 19 bp, Mus musculus
  siRNA target sequence for Pltp (NM_011125.1,1231-1249).
gaccttcgaaggtttcaaa

SEQ ID NO: 570324 - DNA, 19 bp, Mus musculus
  siRNA target sequence for Pltp (NM_011125.1,1234-1252).
cttcgaaggtttcaaatct

SEQ ID NO: 570325 - DNA, 19 bp, Mus musculus
  siRNA target sequence for Pltp (NM_011125.1,1237-1255).
cgaaggtttcaaatctact

SEQ ID NO: 570326 - DNA, 19 bp, Mus musculus
  siRNA target sequence for Pltp (NM_011125.1,1241-1259).
ggtttcaaatctactcaaa

SEQ ID NO: 570327 - DNA, 19 bp, Mus musculus
  siRNA target sequence for Pltp (NM_011125.1,1466-1484).
ggcttcgagaagtgattga

SEQ ID NO: 570328 - DNA, 19 bp, Mus musculus
  siRNA target sequence for Pltp (NM_011125.1,1468-1486).
cttcgagaagtgattgaca

SEQ ID NO: 570329 - DNA, 19 bp, Mus musculus
  siRNA target sequence for Ralgds (NM_009058.1,519-537).
gacctgctgttcaaaaggt

SEQ ID NO: 570330 - DNA, 19 bp, Mus musculus
  siRNA target sequence for Ralgds (NM_009058.1,530-548).
caaaaggtacggtagatgt

SEQ ID NO: 570331 - DNA, 19 bp, Mus musculus
  siRNA target sequence for Ralgds (NM_009058.1,555-573).
ctcacggcctcctctagat

SEQ ID NO: 570332 - DNA, 19 bp, Mus musculus
  siRNA target sequence for Ralgds (NM_009058.1,557-575).
cacggcctcctctagatat

SEQ ID NO: 570333 - DNA, 19 bp, Mus musculus
  siRNA target sequence for Ralgds (NM_009058.1,612-630).
ccgcaggaccaactcaaaa

SEQ ID NO: 570334 - DNA, 19 bp, Mus musculus
  siRNA target sequence for Ralgds (NM_009058.1,613-631).
cgcaggaccaactcaaaaa

SEQ ID NO: 570335 - DNA, 19 bp, Mus musculus
  siRNA target sequence for Ralgds (NM_009058.1,614-632).
gcaggaccaactcaaaaat

SEQ ID NO: 570336 - DNA, 19 bp, Mus musculus
  siRNA target sequence for Ralgds (NM_009058.1,656-674).
ctggctggaccaatactca

SEQ ID NO: 570337 - DNA, 19 bp, Mus musculus
  siRNA target sequence for Ralgds (NM_009058.1,724-742).
cttatgtacagctcaacat

SEQ ID NO: 570338 - DNA, 19 bp, Mus musculus
  siRNA target sequence for Ralgds (NM_009058.1,1190-1208).
cttggtggctgaacagttt

SEQ ID NO: 570339 - DNA, 19 bp, Mus musculus
  siRNA target sequence for Ralgds (NM_009058.1,1193-1211).
ggtggctgaacagtttact

SEQ ID NO: 570340 - DNA, 19 bp, Mus musculus
  siRNA target sequence for Ralgds (NM_009058.1,1324-1342).
ctgtcgcccagttcaacaa

SEQ ID NO: 570341 - DNA, 19 bp, Mus musculus
  siRNA target sequence for Ralgds (NM_009058.1,1343-1361).
cgtggccaactgtgtcatt

SEQ ID NO: 570342 - DNA, 19 bp, Mus musculus
  siRNA target sequence for Ralgds (NM_009058.1,1344-1362).
gtggccaactgtgtcatta

SEQ ID NO: 570343 - DNA, 19 bp, Mus musculus
  siRNA target sequence for Ralgds (NM_009058.1,1346-1364).
ggccaactgtgtcattact

SEQ ID NO: 570344 - DNA, 19 bp, Mus musculus
  siRNA target sequence for Ralgds (NM_009058.1,1347-1365).
gccaactgtgtcattacta

SEQ ID NO: 570345 - DNA, 19 bp, Mus musculus
  siRNA target sequence for Ralgds (NM_009058.1,1442-1460).
gtgcagagcgctcaagaat

SEQ ID NO: 570346 - DNA, 19 bp, Mus musculus
  siRNA target sequence for Ralgds (NM_009058.1,1444-1462).
gcagagcgctcaagaattt

SEQ ID NO: 570347 - DNA, 19 bp, Mus musculus
  siRNA target sequence for Ralgds (NM_009058.1,1503-1521).
gccatccaccgcctaaaga

SEQ ID NO: 570348 - DNA, 19 bp, Mus musculus
  siRNA target sequence for Ralgds (NM_009058.1,1504-1522).
ccatccaccgcctaaagaa

SEQ ID NO: 570349 - DNA, 19 bp, Mus musculus
  siRNA target sequence for Ralgds (NM_009058.1,1609-1627).
gcagagagctgctcatcaa

SEQ ID NO: 570350 - DNA, 19 bp, Mus musculus
  siRNA target sequence for Ralgds (NM_009058.1,1628-1646).
ggaaggaacctccaagttt

SEQ ID NO: 570351 - DNA, 19 bp, Mus musculus
  siRNA target sequence for Ralgds (NM_009058.1,1813-1831).
ggaaggagttcgaagtcat

SEQ ID NO: 570352 - DNA, 19 bp, Mus musculus
  siRNA target sequence for Ralgds (NM_009058.1,1873-1891).
gcattgctccggaagaaca

SEQ ID NO: 570353 - DNA, 19 bp, Mus musculus
  siRNA target sequence for Ralgds (NM_009058.1,1881-1899).
ccggaagaacactttggaa

SEQ ID NO: 570354 - DNA, 19 bp, Mus musculus
  siRNA target sequence for Ralgds (NM_009058.1,2448-2466).
gtggacaacggcaacatgt

SEQ ID NO: 570355 - DNA, 19 bp, Mus musculus
  siRNA target sequence for Ralgds (NM_009058.1,2622-2640).
gtgttctatgccatgaact

SEQ ID NO: 570356 - DNA, 19 bp, Mus musculus
  siRNA target sequence for Ralgds (NM_009058.1,2636-2654).
gaactctaccgccaactat

SEQ ID NO: 570357 - DNA, 19 bp, Mus musculus
  siRNA target sequence for Ralgds (NM_009058.1,2641-2659).
ctaccgccaactatgactt

SEQ ID NO: 570358 - DNA, 19 bp, Mus musculus
  siRNA target sequence for Ralgds (NM_009058.1,2644-2662).
ccgccaactatgacttcat

SEQ ID NO: 570359 - DNA, 19 bp, Mus musculus
  siRNA target sequence for Ralgds (NM_009058.1,2683-2701).
ctaagggggctaaagtcaa

SEQ ID NO: 570360 - DNA, 19 bp, Mus musculus
  siRNA target sequence for Ralgds (NM_009058.1,2716-2734).
ccaccctccctcgtatgaa

SEQ ID NO: 570361 - DNA, 19 bp, Mus musculus
  siRNA target sequence for Rbp1 (NM_011254.2,2278-2296).
gagctgggatggtgacaaa

SEQ ID NO: 570362 - DNA, 19 bp, Mus musculus
  siRNA target sequence for Rbp1 (NM_011254.2,2280-2298).
gctgggatggtgacaaact

SEQ ID NO: 570363 - DNA, 19 bp, Mus musculus
  siRNA target sequence for Rbp1 (NM_011254.2,2397-2415).
gcaagcaagtgtttaagaa

SEQ ID NO: 570364 - DNA, 19 bp, Mus musculus
  siRNA target sequence for Rbp2 (NM_009034.2,121-139).
gaaggccctagatattgat

SEQ ID NO: 570365 - DNA, 19 bp, Mus musculus
  siRNA target sequence for Rbp2 (NM_009034.2,167-185).
ctgactcagacgaagatca

SEQ ID NO: 570366 - DNA, 19 bp, Mus musculus
  siRNA target sequence for Rbp2 (NM_009034.2,189-207).
ctcaagacggtgataactt

SEQ ID NO: 570367 - DNA, 19 bp, Mus musculus
  siRNA target sequence for Rbp2 (NM_009034.2,191-209).
caagacggtgataacttca

SEQ ID NO: 570368 - DNA, 19 bp, Mus musculus
  siRNA target sequence for Rbp2 (NM_009034.2,255-273).
ccgtcggggtggagtttga

SEQ ID NO: 570369 - DNA, 19 bp, Mus musculus
  siRNA target sequence for Rbp2 (NM_009034.2,436-454).
gtgccgacaagtgttcaaa

SEQ ID NO: 570370 - DNA, 19 bp, Mus musculus
  siRNA target sequence for Rbp2 (NM_009034.2,440-458).
cgacaagtgttcaaaaaga

SEQ ID NO: 570371 - DNA, 19 bp, Mus musculus
  siRNA target sequence for Rbp7 (NM_022020.1,34-52).
cagcggtacctggaatctt

SEQ ID NO: 570372 - DNA, 19 bp, Mus musculus
  siRNA target sequence for Rbp7 (NM_022020.1,36-54).
gcggtacctggaatcttct

SEQ ID NO: 570373 - DNA, 19 bp, Mus musculus
  siRNA target sequence for Rbp7 (NM_022020.1,100-118).
ctttgcaactcgtaagatt

SEQ ID NO: 570374 - DNA, 19 bp, Mus musculus
  siRNA target sequence for Rbp7 (NM_022020.1,191-209).
ctcaggaactaccttgtaa

SEQ ID NO: 570375 - DNA, 19 bp, Mus musculus
  siRNA target sequence for Rbp7 (NM_022020.1,195-213).
ggaactaccttgtaaaatt

SEQ ID NO: 570376 - DNA, 19 bp, Mus musculus
  siRNA target sequence for Rbp7 (NM_022020.1,362-380).
cagctccacctggaaatgt

SEQ ID NO: 570377 - DNA, 19 bp, Mus musculus
  siRNA target sequence for Rgl1 (NM_016846.2,111-129).
ctttggcaagctaaaatga

SEQ ID NO: 570378 - DNA, 19 bp, Mus musculus
  siRNA target sequence for Rgl1 (NM_016846.2,349-367).
cggcttttggggacaatga

SEQ ID NO: 570379 - DNA, 19 bp, Mus musculus
  siRNA target sequence for Rgl1 (NM_016846.2,357-375).
ggggacaatgactttacct

SEQ ID NO: 570380 - DNA, 19 bp, Mus musculus
  siRNA target sequence for Rgl1 (NM_016846.2,373-391).
cctacatcagcatcttttt

SEQ ID NO: 570381 - DNA, 19 bp, Mus musculus
  siRNA target sequence for Rgl1 (NM_016846.2,386-404).
ctttttgtcgacatacaga

SEQ ID NO: 570382 - DNA, 19 bp, Mus musculus
  siRNA target sequence for Rgl1 (NM_016846.2,407-425).
ctttgcctcgactaaggaa

SEQ ID NO: 570383 - DNA, 19 bp, Mus musculus
  siRNA target sequence for Rgl1 (NM_016846.2,706-724).
ccgacaatggacttctcaa

SEQ ID NO: 570384 - DNA, 19 bp, Mus musculus
  siRNA target sequence for Rgl1 (NM_016846.2,766-784).
gcggagggtcagcagaatt

SEQ ID NO: 570385 - DNA, 19 bp, Mus musculus
  siRNA target sequence for Rgl1 (NM_016846.2,768-786).
ggagggtcagcagaattca

SEQ ID NO: 570386 - DNA, 19 bp, Mus musculus
  siRNA target sequence for Rgl1 (NM_016846.2,777-795).
gcagaattcacgaacttct

SEQ ID NO: 570387 - DNA, 19 bp, Mus musculus
  siRNA target sequence for Rgl1 (NM_016846.2,785-803).
cacgaacttctcagaagat

SEQ ID NO: 570388 - DNA, 19 bp, Mus musculus
  siRNA target sequence for Rgl1 (NM_016846.2,787-805).
cgaacttctcagaagatct

SEQ ID NO: 570389 - DNA, 19 bp, Mus musculus
  siRNA target sequence for Rgl1 (NM_016846.2,824-842).
ctacatggacgcacaacta

SEQ ID NO: 570390 - DNA, 19 bp, Mus musculus
  siRNA target sequence for Rgl1 (NM_016846.2,883-901).
ggtctcagcgggataaaaa

SEQ ID NO: 570391 - DNA, 19 bp, Mus musculus
  siRNA target sequence for Rgl1 (NM_016846.2,886-904).
ctcagcgggataaaaagga

SEQ ID NO: 570392 - DNA, 19 bp, Mus musculus
  siRNA target sequence for Rgl1 (NM_016846.2,1028-1046).
cgagaagtggatcaacatt

SEQ ID NO: 570393 - DNA, 19 bp, Mus musculus
  siRNA target sequence for Rgl1 (NM_016846.2,1043-1061).
cattgctcacgaatgtaga

SEQ ID NO: 570394 - DNA, 19 bp, Mus musculus
  siRNA target sequence for Rgl1 (NM_016846.2,1117-1135).
ccatctatcggttgaaaaa

SEQ ID NO: 570395 - DNA, 19 bp, Mus musculus
  siRNA target sequence for Rgl1 (NM_016846.2,1179-1197).
gaactttcagatatcttct

SEQ ID NO: 570396 - DNA, 19 bp, Mus musculus
  siRNA target sequence for Rgl1 (NM_016846.2,1196-1214).
ctctgatcacaataaccat

SEQ ID NO: 570397 - DNA, 19 bp, Mus musculus
  siRNA target sequence for Rgl1 (NM_016846.2,1200-1218).
gatcacaataaccatctaa

SEQ ID NO: 570398 - DNA, 19 bp, Mus musculus
  siRNA target sequence for Rgl1 (NM_016846.2,1219-1237).
ccagtcgggagctactaat

SEQ ID NO: 570399 - DNA, 19 bp, Mus musculus
  siRNA target sequence for Rgl1 (NM_016846.2,1273-1291).
gcagcgtgaaagaaaacca

SEQ ID NO: 570400 - DNA, 19 bp, Mus musculus
  siRNA target sequence for Rgl1 (NM_016846.2,1427-1445).
gatcaacttcgagaaaaga

SEQ ID NO: 570401 - DNA, 19 bp, Mus musculus
  siRNA target sequence for Rgl1 (NM_016846.2,1516-1534).
cagaccagaagtttatcca

SEQ ID NO: 570402 - DNA, 19 bp, Mus musculus
  siRNA target sequence for Rgl1 (NM_016846.2,1577-1595).
cgccctctcgtgtgagatt

SEQ ID NO: 570403 - DNA, 19 bp, Mus musculus
  siRNA target sequence for Rgl1 (NM_016846.2,1579-1597).
ccctctcgtgtgagattga

SEQ ID NO: 570404 - DNA, 19 bp, Mus musculus
  siRNA target sequence for Rgl1 (NM_016846.2,1580-1598).
cctctcgtgtgagattgaa

SEQ ID NO: 570405 - DNA, 19 bp, Mus musculus
  siRNA target sequence for Rgl1 (NM_016846.2,1626-1644).
cctaagcctcggaaaagca

SEQ ID NO: 570406 - DNA, 19 bp, Mus musculus
  siRNA target sequence for Rgl1 (NM_016846.2,1627-1645).
ctaagcctcggaaaagcat

SEQ ID NO: 570407 - DNA, 19 bp, Mus musculus
  siRNA target sequence for Rgl1 (NM_016846.2,1652-1670).
gaggctgagcctgctattt

SEQ ID NO: 570408 - DNA, 19 bp, Mus musculus
  siRNA target sequence for Rgl1 (NM_016846.2,1767-1785).
gtgtcgtcctgtgaatcaa

SEQ ID NO: 570409 - DNA, 19 bp, Mus musculus
  siRNA target sequence for Rgl1 (NM_016846.2,1873-1891).
gttcctccatccattccat

SEQ ID NO: 570410 - DNA, 19 bp, Mus musculus
  siRNA target sequence for Rgl1 (NM_016846.2,1884-1902).
cattccatggacacgaatt

SEQ ID NO: 570411 - DNA, 19 bp, Mus musculus
  siRNA target sequence for Rgl1 (NM_016846.2,1908-1926).
gggatgtcgtccctaatca

SEQ ID NO: 570412 - DNA, 19 bp, Mus musculus
  siRNA target sequence for Rgl1 (NM_016846.2,1909-1927).
ggatgtcgtccctaatcaa

SEQ ID NO: 570413 - DNA, 19 bp, Mus musculus
  siRNA target sequence for Rgl1 (NM_016846.2,1942-1960).
ctccaacgtgcaacaacaa

SEQ ID NO: 570414 - DNA, 19 bp, Mus musculus
  siRNA target sequence for Rgl1 (NM_016846.2,1982-2000).
cgtctccgtgacatccatt

SEQ ID NO: 570415 - DNA, 19 bp, Mus musculus
  siRNA target sequence for Rgl1 (NM_016846.2,1983-2001).
gtctccgtgacatccatta

SEQ ID NO: 570416 - DNA, 19 bp, Mus musculus
  siRNA target sequence for Rgl1 (NM_016846.2,2008-2026).
cagtactgcctcctgttta

SEQ ID NO: 570417 - DNA, 19 bp, Mus musculus
  siRNA target sequence for Rgl1 (NM_016846.2,2063-2081).
cagtgtagaagacaacaat

SEQ ID NO: 570418 - DNA, 19 bp, Mus musculus
  siRNA target sequence for Rgl1 (NM_016846.2,2207-2225).
ctcggaggacaaagaacta

SEQ ID NO: 570419 - DNA, 19 bp, Mus musculus
  siRNA target sequence for Rgl1 (NM_016846.2,2209-2227).
cggaggacaaagaactagt

SEQ ID NO: 570420 - DNA, 19 bp, Mus musculus
  siRNA target sequence for Rgl1 (NM_016846.2,2257-2275).
ccatgaatagccaagtgaa

SEQ ID NO: 570421 - DNA, 19 bp, Mus musculus
  siRNA target sequence for Rgl1 (NM_016846.2,2261-2279).
gaatagccaagtgaacttt

SEQ ID NO: 570422 - DNA, 19 bp, Mus musculus
  siRNA target sequence for Rgl1 (NM_016846.2,2332-2350).
gtcggaccagcctgacttt

SEQ ID NO: 570423 - DNA, 19 bp, Mus musculus
  siRNA target sequence for Rragc (NM_017475.1,286-304).
gagactctctttttggaaa

SEQ ID NO: 570424 - DNA, 19 bp, Mus musculus
  siRNA target sequence for Rragc (NM_017475.1,301-319).
gaaagtaccaacaagattt

SEQ ID NO: 570425 - DNA, 19 bp, Mus musculus
  siRNA target sequence for Rragc (NM_017475.1,397-415).
ccaacctttgactacgaaa

SEQ ID NO: 570426 - DNA, 19 bp, Mus musculus
  siRNA target sequence for Rragc (NM_017475.1,398-416).
caacctttgactacgaaat

SEQ ID NO: 570427 - DNA, 19 bp, Mus musculus
  siRNA target sequence for Rragc (NM_017475.1,406-424).
gactacgaaatgatcttca

SEQ ID NO: 570428 - DNA, 19 bp, Mus musculus
  siRNA target sequence for Rragc (NM_017475.1,426-444).
gggcacaggagcattgata

SEQ ID NO: 570429 - DNA, 19 bp, Mus musculus
  siRNA target sequence for Rragc (NM_017475.1,427-445).
ggcacaggagcattgatat

SEQ ID NO: 570430 - DNA, 19 bp, Mus musculus
  siRNA target sequence for Rragc (NM_017475.1,428-446).
gcacaggagcattgatata

SEQ ID NO: 570431 - DNA, 19 bp, Mus musculus
  siRNA target sequence for Rragc (NM_017475.1,429-447).
cacaggagcattgatatat

SEQ ID NO: 570432 - DNA, 19 bp, Mus musculus
  siRNA target sequence for Rragc (NM_017475.1,479-497).
ctttaacccgacttcacat

SEQ ID NO: 570433 - DNA, 19 bp, Mus musculus
  siRNA target sequence for Rragc (NM_017475.1,487-505).
cgacttcacatcactgttt

SEQ ID NO: 570434 - DNA, 19 bp, Mus musculus
  siRNA target sequence for Rragc (NM_017475.1,490-508).
cttcacatcactgtttcta

SEQ ID NO: 570435 - DNA, 19 bp, Mus musculus
  siRNA target sequence for Rragc (NM_017475.1,520-538).
gttaacccagacatgaatt

SEQ ID NO: 570436 - DNA, 19 bp, Mus musculus
  siRNA target sequence for Rragc (NM_017475.1,570-588).
gtctgatgatcacaaaata

SEQ ID NO: 570437 - DNA, 19 bp, Mus musculus
  siRNA target sequence for Rragc (NM_017475.1,572-590).
ctgatgatcacaaaataga

SEQ ID NO: 570438 - DNA, 19 bp, Mus musculus
  siRNA target sequence for Rragc (NM_017475.1,595-613).
cagagggacattcatcaaa

SEQ ID NO: 570439 - DNA, 19 bp, Mus musculus
  siRNA target sequence for Rragc (NM_017475.1,655-673).
catcttagcttttatttga

SEQ ID NO: 570440 - DNA, 19 bp, Mus musculus
  siRNA target sequence for Rragc (NM_017475.1,710-728).
gtaaggtggtacagaaact

SEQ ID NO: 570441 - DNA, 19 bp, Mus musculus
  siRNA target sequence for Rragc (NM_017475.1,842-860).
gctcccctgtggatatgca

SEQ ID NO: 570442 - DNA, 19 bp, Mus musculus
  siRNA target sequence for Rragc (NM_017475.1,852-870).
ggatatgcagtcttatgaa

SEQ ID NO: 570443 - DNA, 19 bp, Mus musculus
  siRNA target sequence for Rragc (NM_017475.1,906-924).
gtcttgtatatatggatta

SEQ ID NO: 570444 - DNA, 19 bp, Mus musculus
  siRNA target sequence for Rragc (NM_017475.1,947-965).
cttatgacaaagaatcgat

SEQ ID NO: 570445 - DNA, 19 bp, Mus musculus
  siRNA target sequence for Rragc (NM_017475.1,958-976).
gaatcgatggccattatca

SEQ ID NO: 570446 - DNA, 19 bp, Mus musculus
  siRNA target sequence for Rragc (NM_017475.1,1026-1044).
ggcactggtttgcattctt

SEQ ID NO: 570447 - DNA, 19 bp, Mus musculus
  siRNA target sequence for Rragc (NM_017475.1,1063-1081).
cgaaaagggttgatagact

SEQ ID NO: 570448 - DNA, 19 bp, Mus musculus
  siRNA target sequence for Rragc (NM_017475.1,1069-1087).
gggttgatagactacaact

SEQ ID NO: 570449 - DNA, 19 bp, Mus musculus
  siRNA target sequence for Rragc (NM_017475.1,1089-1107).
ccactgtttccgaaaagct

SEQ ID NO: 570450 - DNA, 19 bp, Mus musculus
  siRNA target sequence for Rya3 (NM_194357.1,220-238).
cgcttgctcggattgacaa

SEQ ID NO: 570451 - DNA, 19 bp, Mus musculus
  siRNA target sequence for Rya3 (NM_194357.1,280-298).
gccctattctgcaaaacgt

SEQ ID NO: 570452 - DNA, 19 bp, Mus musculus
  siRNA target sequence for Rya3 (NM_194357.1,377-395).
cggtggcatctttagtctt

SEQ ID NO: 570453 - DNA, 19 bp, Mus musculus
  siRNA target sequence for Rya3 (NM_194357.1,551-569).
ggtgaacgtgtcttcgaaa

SEQ ID NO: 570454 - DNA, 19 bp, Mus musculus
  siRNA target sequence for Rya3 (NM_194357.1,662-680).
gctgcccacgccaatcttt

SEQ ID NO: 570455 - DNA, 19 bp, Mus musculus
  siRNA target sequence for Rya3 (NM_194357.1,828-846).
gctacacttcccctaatct

SEQ ID NO: 570456 - DNA, 19 bp, Mus musculus
  siRNA target sequence for Rya3 (NM_194357.1,854-872).
gtacattgagctggatata

SEQ ID NO: 570457 - DNA, 19 bp, Mus musculus
  siRNA target sequence for Rya3 (NM_194357.1,1148-1166).
ctcgctgcgggtgacaaaa

SEQ ID NO: 570458 - DNA, 19 bp, Mus musculus
  siRNA target sequence for Rya3 (NM_194357.1,1269-1287).
cagttgaatggggttatga

SEQ ID NO: 570459 - DNA, 19 bp, Mus musculus
  siRNA target sequence for Rya3 (NM_194357.1,1318-1336).
ccaagctgcacatatctct

SEQ ID NO: 570460 - DNA, 19 bp, Mus musculus
  siRNA target sequence for Rya3 (NM_194357.1,1339-1357).
ccctggaacggctaagtgt

SEQ ID NO: 570461 - DNA, 19 bp, Mus musculus
  siRNA target sequence for Rya3 (NM_194357.1,1392-1410).
gcatcccgtctggaagaat

SEQ ID NO: 570462 - DNA, 19 bp, Mus musculus
  siRNA target sequence for Rya3 (NM_194357.1,1482-1500).
cctaagattctcaatgtca

SEQ ID NO: 570463 - DNA, 19 bp, Mus musculus
  siRNA target sequence for Rya3 (NM_194357.1,1483-1501).
ctaagattctcaatgtcaa

SEQ ID NO: 570464 - DNA, 19 bp, Mus musculus
  siRNA target sequence for Rya3 (NM_194357.1,1487-1505).
gattctcaatgtcaacttt

SEQ ID NO: 570465 - DNA, 19 bp, Mus musculus
  siRNA target sequence for Rya3 (NM_194357.1,1507-1525).
ccaattcagtggtcgatat

SEQ ID NO: 570466 - DNA, 19 bp, Mus musculus
  siRNA target sequence for Rya3 (NM_194357.1,1513-1531).
cagtggtcgatatcattga

SEQ ID NO: 570467 - DNA, 19 bp, Mus musculus
  siRNA target sequence for Rya3 (NM_194357.1,1515-1533).
gtggtcgatatcattgaga

SEQ ID NO: 570468 - DNA, 19 bp, Mus musculus
  siRNA target sequence for Rya3 (NM_194357.1,1517-1535).
ggtcgatatcattgagaat

SEQ ID NO: 570469 - DNA, 19 bp, Mus musculus
  siRNA target sequence for Sec14l4 (NM_146013.1,299-317).
gtgatccaactctatgact

SEQ ID NO: 570470 - DNA, 19 bp, Mus musculus
  siRNA target sequence for Sec14l4 (NM_146013.1,388-406).
caaaggcctttttatgtca

SEQ ID NO: 570471 - DNA, 19 bp, Mus musculus
  siRNA target sequence for Sec14l4 (NM_146013.1,408-426).
cctctaagcaggacatgat

SEQ ID NO: 570472 - DNA, 19 bp, Mus musculus
  siRNA target sequence for Sec14l4 (NM_146013.1,424-442).
gatccggaagcgtatcaaa

SEQ ID NO: 570473 - DNA, 19 bp, Mus musculus
  siRNA target sequence for Sec14l4 (NM_146013.1,428-446).
cggaagcgtatcaaagtct

SEQ ID NO: 570474 - DNA, 19 bp, Mus musculus
  siRNA target sequence for Sec14l4 (NM_146013.1,536-554).
ctgagtctgaggcacttat

SEQ ID NO: 570475 - DNA, 19 bp, Mus musculus
  siRNA target sequence for Sec14l4 (NM_146013.1,540-558).
gtctgaggcacttatggaa

SEQ ID NO: 570476 - DNA, 19 bp, Mus musculus
  siRNA target sequence for Sec14l4 (NM_146013.1,571-589).
ggtctaccagcagtttttt

SEQ ID NO: 570477 - DNA, 19 bp, Mus musculus
  siRNA target sequence for Sec14l4 (NM_146013.1,590-608).
gccatcttggaagcaaatt

SEQ ID NO: 570478 - DNA, 19 bp, Mus musculus
  siRNA target sequence for Sec14l4 (NM_146013.1,591-609).
ccatcttggaagcaaatta

SEQ ID NO: 570479 - DNA, 19 bp, Mus musculus
  siRNA target sequence for Sec14l4 (NM_146013.1,611-629).
cctgagacggtgaaaaatt

SEQ ID NO: 570480 - DNA, 19 bp, Mus musculus
  siRNA target sequence for Sec14l4 (NM_146013.1,612-630).
ctgagacggtgaaaaattt

SEQ ID NO: 570481 - DNA, 19 bp, Mus musculus
  siRNA target sequence for Sec14l4 (NM_146013.1,614-632).
gagacggtgaaaaatttaa

SEQ ID NO: 570482 - DNA, 19 bp, Mus musculus
  siRNA target sequence for Sec14l4 (NM_146013.1,618-636).
cggtgaaaaatttaatcat

SEQ ID NO: 570483 - DNA, 19 bp, Mus musculus
  siRNA target sequence for Sec14l4 (NM_146013.1,724-742).
gggaggtaactggaaacaa

SEQ ID NO: 570484 - DNA, 19 bp, Mus musculus
  siRNA target sequence for Sec14l4 (NM_146013.1,825-843).
gcctgaccaagatcaacta

SEQ ID NO: 570485 - DNA, 19 bp, Mus musculus
  siRNA target sequence for Star (NM_011485.3,87-105).
ggaagctcctatagacata

SEQ ID NO: 570486 - DNA, 19 bp, Mus musculus
  siRNA target sequence for Star (NM_011485.3,88-106).
gaagctcctatagacatat

SEQ ID NO: 570487 - DNA, 19 bp, Mus musculus
  siRNA target sequence for Star (NM_011485.3,100-118).
gacatatgcggaatatgaa

SEQ ID NO: 570488 - DNA, 19 bp, Mus musculus
  siRNA target sequence for Star (NM_011485.3,107-125).
gcggaatatgaaaggatta

SEQ ID NO: 570489 - DNA, 19 bp, Mus musculus
  siRNA target sequence for Star (NM_011485.3,108-126).
cggaatatgaaaggattaa

SEQ ID NO: 570490 - DNA, 19 bp, Mus musculus
  siRNA target sequence for Star (NM_011485.3,191-209).
cgggtggatgggtcaagtt

SEQ ID NO: 570491 - DNA, 19 bp, Mus musculus
  siRNA target sequence for Star (NM_011485.3,240-258).
ctggaagcaacactctata

SEQ ID NO: 570492 - DNA, 19 bp, Mus musculus
  siRNA target sequence for Star (NM_011485.3,242-260).
ggaagcaacactctatagt

SEQ ID NO: 570493 - DNA, 19 bp, Mus musculus
  siRNA target sequence for Star (NM_011485.3,366-384).
ggggacgaagtgctaagta

SEQ ID NO: 570494 - DNA, 19 bp, Mus musculus
  siRNA target sequence for Star (NM_011485.3,367-385).
gggacgaagtgctaagtaa

SEQ ID NO: 570495 - DNA, 19 bp, Mus musculus
  siRNA target sequence for Star (NM_011485.3,369-387).
gacgaagtgctaagtaaga

SEQ ID NO: 570496 - DNA, 19 bp, Mus musculus
  siRNA target sequence for Star (NM_011485.3,748-766).
gaagtccctccaagactaa

SEQ ID NO: 570497 - DNA, 19 bp, Mus musculus
  siRNA target sequence for Star (NM_011485.3,751-769).
gtccctccaagactaaact

SEQ ID NO: 570498 - DNA, 19 bp, Mus musculus
  siRNA target sequence for Star (NM_011485.3,753-771).
ccctccaagactaaactca

SEQ ID NO: 570499 - DNA, 19 bp, Mus musculus
  siRNA target sequence for Stard3 (NM_021547.1,380-398).
ctggatcatcgagctaaat

SEQ ID NO: 570500 - DNA, 19 bp, Mus musculus
  siRNA target sequence for Stard3 (NM_021547.1,457-475).
gctcgttcttcgacatctt

SEQ ID NO: 570501 - DNA, 19 bp, Mus musculus
  siRNA target sequence for Stard3 (NM_021547.1,458-476).
ctcgttcttcgacatcttt

SEQ ID NO: 570502 - DNA, 19 bp, Mus musculus
  siRNA target sequence for Stard3 (NM_021547.1,461-479).
gttcttcgacatctttgtt

SEQ ID NO: 570503 - DNA, 19 bp, Mus musculus
  siRNA target sequence for Stard3 (NM_021547.1,574-592).
gtgcattcctcattgtcaa

SEQ ID NO: 570504 - DNA, 19 bp, Mus musculus
  siRNA target sequence for Stard3 (NM_021547.1,826-844).
ggtctgacaatgaatcaga

SEQ ID NO: 570505 - DNA, 19 bp, Mus musculus
  siRNA target sequence for Stard3 (NM_021547.1,827-845).
gtctgacaatgaatcagat

SEQ ID NO: 570506 - DNA, 19 bp, Mus musculus
  siRNA target sequence for Stard3 (NM_021547.1,852-870).
gtcaccgggaagaaaagtt

SEQ ID NO: 570507 - DNA, 19 bp, Mus musculus
  siRNA target sequence for Stard3 (NM_021547.1,919-937).
cggtggtggatcagatctt

SEQ ID NO: 570508 - DNA, 19 bp, Mus musculus
  siRNA target sequence for Stard3 (NM_021547.1,988-1006).
ctgtgtacaccattgaagt

SEQ ID NO: 570509 - DNA, 19 bp, Mus musculus
  siRNA target sequence for Stard3 (NM_021547.1,1054-1072).
ctgctgagctggtgtatca

SEQ ID NO: 570510 - DNA, 19 bp, Mus musculus
  siRNA target sequence for Stard3 (NM_021547.1,1157-1175).
cacccttgtctcctatgat

SEQ ID NO: 570511 - DNA, 19 bp, Mus musculus
  siRNA target sequence for Stard3 (NM_021547.1,1299-1317).
cccacgcacaaatatgtca

SEQ ID NO: 570512 - DNA, 19 bp, Mus musculus
  siRNA target sequence for Stard3 (NM_021547.1,1381-1399).
ccttcgtctggattcttaa

SEQ ID NO: 570513 - DNA, 19 bp, Mus musculus
  siRNA target sequence for Stard3 (NM_021547.1,1385-1403).
cgtctggattcttaacaca

SEQ ID NO: 570514 - DNA, 19 bp, Mus musculus
  siRNA target sequence for Stard3 (NM_021547.1,1417-1435).
gcttgcctcggtaccttat

SEQ ID NO: 570515 - DNA, 19 bp, Mus musculus
  siRNA target sequence for Stard3 (NM_021547.1,1449-1467).
ggggccaccatgtttgaat

SEQ ID NO: 570516 - DNA, 19 bp, Mus musculus
  siRNA target sequence for Stard4 (NM_133774.2,161-179).
gagcccgtggtcacagatt

SEQ ID NO: 570517 - DNA, 19 bp, Mus musculus
  siRNA target sequence for Stard4 (NM_133774.2,206-224).
gtctgatgttgcctctatt

SEQ ID NO: 570518 - DNA, 19 bp, Mus musculus
  siRNA target sequence for Stard4 (NM_133774.2,210-228).
gatgttgcctctatttcaa

SEQ ID NO: 570519 - DNA, 19 bp, Mus musculus
  siRNA target sequence for Stard4 (NM_133774.2,217-235).
cctctatttcaactaaact

SEQ ID NO: 570520 - DNA, 19 bp, Mus musculus
  siRNA target sequence for Stard4 (NM_133774.2,218-236).
ctctatttcaactaaactt

SEQ ID NO: 570521 - DNA, 19 bp, Mus musculus
  siRNA target sequence for Stard4 (NM_133774.2,278-296).
gtggcgagttgccaaaaaa

SEQ ID NO: 570522 - DNA, 19 bp, Mus musculus
  siRNA target sequence for Stard4 (NM_133774.2,371-389).
ggatgacgtggtcaataat

SEQ ID NO: 570523 - DNA, 19 bp, Mus musculus
  siRNA target sequence for Stard4 (NM_133774.2,375-393).
gacgtggtcaataatgtaa

SEQ ID NO: 570524 - DNA, 19 bp, Mus musculus
  siRNA target sequence for Stard4 (NM_133774.2,377-395).
cgtggtcaataatgtaata

SEQ ID NO: 570525 - DNA, 19 bp, Mus musculus
  siRNA target sequence for Stard4 (NM_133774.2,426-444).
gactgggaccggttaatga

SEQ ID NO: 570526 - DNA, 19 bp, Mus musculus
  siRNA target sequence for Stard4 (NM_133774.2,529-547).
ccccgagagagtttgttga

SEQ ID NO: 570527 - DNA, 19 bp, Mus musculus
  siRNA target sequence for Stard4 (NM_133774.2,530-548).
cccgagagagtttgttgat

SEQ ID NO: 570528 - DNA, 19 bp, Mus musculus
  siRNA target sequence for Stard4 (NM_133774.2,531-549).
ccgagagagtttgttgatt

SEQ ID NO: 570529 - DNA, 19 bp, Mus musculus
  siRNA target sequence for Stard4 (NM_133774.2,532-550).
cgagagagtttgttgattt

SEQ ID NO: 570530 - DNA, 19 bp, Mus musculus
  siRNA target sequence for Stard4 (NM_133774.2,566-584).
ctatgaagaaggactttta

SEQ ID NO: 570531 - DNA, 19 bp, Mus musculus
  siRNA target sequence for Stard4 (NM_133774.2,659-677).
gttctgtgttccactcaaa

SEQ ID NO: 570532 - DNA, 19 bp, Mus musculus
  siRNA target sequence for Stard4 (NM_133774.2,684-702).
ccaagccagagtcttctta

SEQ ID NO: 570533 - DNA, 19 bp, Mus musculus
  siRNA target sequence for Stard4 (NM_133774.2,694-712).
gtcttcttacaggctatat

SEQ ID NO: 570534 - DNA, 19 bp, Mus musculus
  siRNA target sequence for Stard4 (NM_133774.2,738-756).
cctcagtctgccgtagata

SEQ ID NO: 570535 - DNA, 19 bp, Mus musculus
  siRNA target sequence for Stard4 (NM_133774.2,769-787).
gcacgttagccaacttcta

SEQ ID NO: 570536 - DNA, 19 bp, Mus musculus
  siRNA target sequence for Stard4 (NM_133774.2,777-795).
gccaacttctacagtgatt

SEQ ID NO: 570537 - DNA, 19 bp, Mus musculus
  siRNA target sequence for Stard4 (NM_133774.2,788-806).
cagtgatttgcgaaaaggt

SEQ ID NO: 570538 - DNA, 19 bp, Mus musculus
  siRNA target sequence for Stard5 (NM_023377.4,94-112).
gcgtcgggctggaagaagt

SEQ ID NO: 570539 - DNA, 19 bp, Mus musculus
  siRNA target sequence for Stard5 (NM_023377.4,211-229).
gaggtgtgggattgcataa

SEQ ID NO: 570540 - DNA, 19 bp, Mus musculus
  siRNA target sequence for Stard5 (NM_023377.4,250-268).
cgggagaagtgggatgata

SEQ ID NO: 570541 - DNA, 19 bp, Mus musculus
  siRNA target sequence for Stard5 (NM_023377.4,428-446).
cccatgtggaacatccatt

SEQ ID NO: 570542 - DNA, 19 bp, Mus musculus
  siRNA target sequence for Stard5 (NM_023377.4,452-470).
ccccaaagcccggttttgt

SEQ ID NO: 570543 - DNA, 19 bp, Mus musculus
  siRNA target sequence for Stard5 (NM_023377.4,454-472).
ccaaagcccggttttgtga

SEQ ID NO: 570544 - DNA, 19 bp, Mus musculus
  siRNA target sequence for Stard5 (NM_023377.4,462-480).
cggttttgtgagaggattt

SEQ ID NO: 570545 - DNA, 19 bp, Mus musculus
  siRNA target sequence for Stard5 (NM_023377.4,513-531).
gccaggggatcccaacaaa

SEQ ID NO: 570546 - DNA, 19 bp, Mus musculus
  siRNA target sequence for Stard5 (NM_023377.4,533-551).
ccaacctggtcacattctt

SEQ ID NO: 570547 - DNA, 19 bp, Mus musculus
  siRNA target sequence for Stard6 (NM_029019.2,511-529).
gtgatacacaagattgatt

SEQ ID NO: 570548 - DNA, 19 bp, Mus musculus
  siRNA target sequence for Stard6 (NM_029019.2,526-544).
gattcggacacactcatat

SEQ ID NO: 570549 - DNA, 19 bp, Mus musculus
  siRNA target sequence for Stard6 (NM_029019.2,538-556).
ctcatatgccacaccatta

SEQ ID NO: 570550 - DNA, 19 bp, Mus musculus
  siRNA target sequence for Stard6 (NM_029019.2,540-558).
catatgccacaccattaca

SEQ ID NO: 570551 - DNA, 19 bp, Mus musculus
  siRNA target sequence for Stard6 (NM_029019.2,549-567).
caccattacacaaagtttt

SEQ ID NO: 570552 - DNA, 19 bp, Mus musculus
  siRNA target sequence for Stard6 (NM_029019.2,584-602).
cccctagagactttatcga

SEQ ID NO: 570553 - DNA, 19 bp, Mus musculus
  siRNA target sequence for Stard6 (NM_029019.2,590-608).
gagactttatcgacttagt

SEQ ID NO: 570554 - DNA, 19 bp, Mus musculus
  siRNA target sequence for Stard6 (NM_029019.2,625-643).
gaaaggaacgtggacatta

SEQ ID NO: 570555 - DNA, 19 bp, Mus musculus
  siRNA target sequence for Stard6 (NM_029019.2,630-648).
gaacgtggacattatcagt

SEQ ID NO: 570556 - DNA, 19 bp, Mus musculus
  siRNA target sequence for Stard6 (NM_029019.2,634-652).
gtggacattatcagtacta

SEQ ID NO: 570557 - DNA, 19 bp, Mus musculus
  siRNA target sequence for Stard6 (NM_029019.2,676-694).
gctccaacttcgacttata

SEQ ID NO: 570558 - DNA, 19 bp, Mus musculus
  siRNA target sequence for Stard6 (NM_029019.2,677-695).
ctccaacttcgacttatat

SEQ ID NO: 570559 - DNA, 19 bp, Mus musculus
  siRNA target sequence for Stard6 (NM_029019.2,753-771).
ctattccaagctagtgatt

SEQ ID NO: 570560 - DNA, 19 bp, Mus musculus
  siRNA target sequence for Stard6 (NM_029019.2,801-819).
gcctgcatcggtaattgaa

SEQ ID NO: 570561 - DNA, 19 bp, Mus musculus
  siRNA target sequence for Stard6 (NM_029019.2,802-820).
cctgcatcggtaattgaaa

SEQ ID NO: 570562 - DNA, 19 bp, Mus musculus
  siRNA target sequence for Stard6 (NM_029019.2,805-823).
gcatcggtaattgaaaagt

SEQ ID NO: 570563 - DNA, 19 bp, Mus musculus
  siRNA target sequence for Stard6 (NM_029019.2,822-840).
gtctatgccttccaactta

SEQ ID NO: 570564 - DNA, 19 bp, Mus musculus
  siRNA target sequence for Stard6 (NM_029019.2,859-877).
gtgaaagatggcgtaaaga

SEQ ID NO: 570565 - DNA, 19 bp, Mus musculus
  siRNA target sequence for Stard6 (NM_029019.2,868-886).
ggcgtaaagacgtacagaa

SEQ ID NO: 570566 - DNA, 19 bp, Mus musculus
  siRNA target sequence for Stard6 (NM_029019.2,869-887).
gcgtaaagacgtacagaat

SEQ ID NO: 570567 - DNA, 19 bp, Mus musculus
  siRNA target sequence for Stard6 (NM_029019.2,870-888).
cgtaaagacgtacagaatt

SEQ ID NO: 570568 - DNA, 19 bp, Mus musculus
  siRNA target sequence for Stard6 (NM_029019.2,916-934).
cactcctctgtgcacaaaa

SEQ ID NO: 570569 - DNA, 19 bp, Mus musculus
  siRNA target sequence for U46068 (NM_153418.1,317-335).
gttctgagatacatcatat

SEQ ID NO: 570570 - DNA, 19 bp, Mus musculus
  siRNA target sequence for U46068 (NM_153418.1,320-338).
ctgagatacatcatatgga

SEQ ID NO: 570571 - DNA, 19 bp, Mus musculus
  siRNA target sequence for U46068 (NM_153418.1,370-388).
ggatgtgcagccttcaact

SEQ ID NO: 570572 - DNA, 19 bp, Mus musculus
  siRNA target sequence for U46068 (NM_153418.1,459-477).
ccatagtggagttccaaat

SEQ ID NO: 570573 - DNA, 19 bp, Mus musculus
  siRNA target sequence for U46068 (NM_153418.1,613-631).
ctccttggcaaagaatgtt

SEQ ID NO: 570574 - DNA, 19 bp, Mus musculus
  siRNA target sequence for U46068 (NM_153418.1,789-807).
ctgctatccaggacagtaa

SEQ ID NO: 570575 - DNA, 19 bp, Mus musculus
  siRNA target sequence for U46068 (NM_153418.1,791-809).
gctatccaggacagtaata

SEQ ID NO: 570576 - DNA, 19 bp, Mus musculus
  siRNA target sequence for U46068 (NM_153418.1,843-861).
cacaggcgagggtaaccaa

SEQ ID NO: 570577 - DNA, 19 bp, Mus musculus
  siRNA target sequence for U46068 (NM_153418.1,941-959).
ctggtgaatgccattgtga

SEQ ID NO: 570578 - DNA, 19 bp, Mus musculus
  siRNA target sequence for U46068 (NM_153418.1,1085-1103).
cagatgttgaagatcttca

SEQ ID NO: 570579 - DNA, 19 bp, Mus musculus
  siRNA target sequence for U46068 (NM_153418.1,1158-1176).
gtgtcgtgctggaagtgtt

SEQ ID NO: 570580 - DNA, 19 bp, Mus musculus
  siRNA target sequence for U46068 (NM_153418.1,1213-1231).
cggcattgaggccagttat

SEQ ID NO: 570581 - DNA, 19 bp, Mus musculus
  siRNA target sequence for U46068 (NM_153418.1,1215-1233).
gcattgaggccagttatga

SEQ ID NO: 570582 - DNA, 19 bp, Mus musculus
  siRNA target sequence for U46068 (NM_153418.1,1216-1234).
cattgaggccagttatgaa

SEQ ID NO: 570583 - DNA, 19 bp, Mus musculus
  siRNA target sequence for U46068 (NM_153418.1,1259-1277).
cggcttatgctcaacttca

SEQ ID NO: 570584 - DNA, 19 bp, Mus musculus
  siRNA target sequence for U46068 (NM_153418.1,1304-1322).
ctgatgatctcagatatca

SEQ ID NO: 570585 - DNA, 19 bp, Mus musculus
  siRNA target sequence for U46068 (NM_153418.1,1306-1324).
gatgatctcagatatcaaa

SEQ ID NO: 570586 - DNA, 19 bp, Mus musculus
  siRNA target sequence for U46068 (NM_153418.1,1314-1332).
cagatatcaaactattcga

SEQ ID NO: 570587 - DNA, 19 bp, Mus musculus
  siRNA target sequence for U46068 (NM_153418.1,1355-1373).
ctgaccaagatccttgaat

SEQ ID NO: 570588 - DNA, 19 bp, Mus musculus
  siRNA target sequence for U46068 (NM_153418.1,1412-1430).
ggagtccccatgtcaatgt

SEQ ID NO: 570589 - DNA, 19 bp, Mus musculus
  siRNA target sequence for Aplp1 (NM_007467.1,484-502).
gaggttgtgcccttccatt

SEQ ID NO: 570590 - DNA, 19 bp, Mus musculus
  siRNA target sequence for Aplp1 (NM_007467.1,503-521).
gcctgcctggcgaattcgt

SEQ ID NO: 570591 - DNA, 19 bp, Mus musculus
  siRNA target sequence for Aplp1 (NM_007467.1,833-851).
ctcagccagtagacgatta

SEQ ID NO: 570592 - DNA, 19 bp, Mus musculus
  siRNA target sequence for Aplp1 (NM_007467.1,922-940).
cacacccctgtcatggtta

SEQ ID NO: 570593 - DNA, 19 bp, Mus musculus
  siRNA target sequence for Aplp1 (NM_007467.1,1054-1072).
cgtaggatgcgccagatta

SEQ ID NO: 570594 - DNA, 19 bp, Mus musculus
  siRNA target sequence for Aplp1 (NM_007467.1,1055-1073).
gtaggatgcgccagattaa

SEQ ID NO: 570595 - DNA, 19 bp, Mus musculus
  siRNA target sequence for Aplp1 (NM_007467.1,1100-1118).
ctgacagccaatctaagaa

SEQ ID NO: 570596 - DNA, 19 bp, Mus musculus
  siRNA target sequence for Aplp1 (NM_007467.1,1232-1250).
gagtcatcgctctgatcaa

SEQ ID NO: 570597 - DNA, 19 bp, Mus musculus
  siRNA target sequence for Aplp1 (NM_007467.1,1996-2014).
cagaggcatggctatgaga

SEQ ID NO: 570598 - DNA, 19 bp, Mus musculus
  siRNA target sequence for Apoh (NM_013475.1,41-59).
ccggtgctcgccttgttct

SEQ ID NO: 570599 - DNA, 19 bp, Mus musculus
  siRNA target sequence for Apoh (NM_013475.1,67-85).
cctctgccatgttgctatt

SEQ ID NO: 570600 - DNA, 19 bp, Mus musculus
  siRNA target sequence for Apoh (NM_013475.1,70-88).
ctgccatgttgctattgca

SEQ ID NO: 570601 - DNA, 19 bp, Mus musculus
  siRNA target sequence for Apoh (NM_013475.1,106-124).
gccggatgacctaccattt

SEQ ID NO: 570602 - DNA, 19 bp, Mus musculus
  siRNA target sequence for Apoh (NM_013475.1,109-127).
ggatgacctaccatttgct

SEQ ID NO: 570603 - DNA, 19 bp, Mus musculus
  siRNA target sequence for Apoh (NM_013475.1,110-128).
gatgacctaccatttgcta

SEQ ID NO: 570604 - DNA, 19 bp, Mus musculus
  siRNA target sequence for Apoh (NM_013475.1,126-144).
ctacggttgtccccttaaa

SEQ ID NO: 570605 - DNA, 19 bp, Mus musculus
  siRNA target sequence for Apoh (NM_013475.1,130-148).
ggttgtccccttaaagaca

SEQ ID NO: 570606 - DNA, 19 bp, Mus musculus
  siRNA target sequence for Apoh (NM_013475.1,131-149).
gttgtccccttaaagacat

SEQ ID NO: 570607 - DNA, 19 bp, Mus musculus
  siRNA target sequence for Apoh (NM_013475.1,209-227).
gggatgagacggtttacct

SEQ ID NO: 570608 - DNA, 19 bp, Mus musculus
  siRNA target sequence for Apoh (NM_013475.1,282-300).
gtcctttcgctggaatctt

SEQ ID NO: 570609 - DNA, 19 bp, Mus musculus
  siRNA target sequence for Apoh (NM_013475.1,285-303).
ctttcgctggaatcttaga

SEQ ID NO: 570610 - DNA, 19 bp, Mus musculus
  siRNA target sequence for Apoh (NM_013475.1,289-307).
cgctggaatcttagaaaat

SEQ ID NO: 570611 - DNA, 19 bp, Mus musculus
  siRNA target sequence for Apoh (NM_013475.1,317-335).
cgctacacgagttttgaat

SEQ ID NO: 570612 - DNA, 19 bp, Mus musculus
  siRNA target sequence for Apoh (NM_013475.1,319-337).
ctacacgagttttgaatat

SEQ ID NO: 570613 - DNA, 19 bp, Mus musculus
  siRNA target sequence for Apoh (NM_013475.1,400-418).
gtgcacggaggaaggaaaa

SEQ ID NO: 570614 - DNA, 19 bp, Mus musculus
  siRNA target sequence for Apoh (NM_013475.1,478-496).
gtttgcactccttaaggat

SEQ ID NO: 570615 - DNA, 19 bp, Mus musculus
  siRNA target sequence for Apoh (NM_013475.1,482-500).
gcactccttaaggattata

SEQ ID NO: 570616 - DNA, 19 bp, Mus musculus
  siRNA target sequence for Apoh (NM_013475.1,689-707).
gcaaagccggtgcttctat

SEQ ID NO: 570617 - DNA, 19 bp, Mus musculus
  siRNA target sequence for Apoh (NM_013475.1,696-714).
cggtgcttctatataagga

SEQ ID NO: 570618 - DNA, 19 bp, Mus musculus
  siRNA target sequence for Apoh (NM_013475.1,697-715).
ggtgcttctatataaggat

SEQ ID NO: 570619 - DNA, 19 bp, Mus musculus
  siRNA target sequence for Apoh (NM_013475.1,698-716).
gtgcttctatataaggata

SEQ ID NO: 570620 - DNA, 19 bp, Mus musculus
  siRNA target sequence for Apoh (NM_013475.1,713-731).
gataaagccacatttggtt

SEQ ID NO: 570621 - DNA, 19 bp, Mus musculus
  siRNA target sequence for Apoh (NM_013475.1,758-776).
ccagaagaagcggaatgta

SEQ ID NO: 570622 - DNA, 19 bp, Mus musculus
  siRNA target sequence for Apoh (NM_013475.1,822-840).
gcaaactccccgttaagaa

SEQ ID NO: 570623 - DNA, 19 bp, Mus musculus
  siRNA target sequence for Apoh (NM_013475.1,823-841).
caaactccccgttaagaaa

SEQ ID NO: 570624 - DNA, 19 bp, Mus musculus
  siRNA target sequence for Apoh (NM_013475.1,901-919).
gatgcatggcgacaaaatt

SEQ ID NO: 570625 - DNA, 19 bp, Mus musculus
  siRNA target sequence for Apoh (NM_013475.1,905-923).
catggcgacaaaattcact

SEQ ID NO: 570626 - DNA, 19 bp, Mus musculus
  siRNA target sequence for Apoh (NM_013475.1,911-929).
gacaaaattcacttctact

SEQ ID NO: 570627 - DNA, 19 bp, Mus musculus
  siRNA target sequence for Apoh (NM_013475.1,1036-1054).
gaaaacggatgcatcagaa

SEQ ID NO: 570628 - DNA, 19 bp, Mus musculus
  siRNA target sequence for Lamc2 (NM_008485.2,116-134).
ggaagtctgtgattgcaat

SEQ ID NO: 570629 - DNA, 19 bp, Mus musculus
  siRNA target sequence for Lamc2 (NM_008485.2,136-154).
ggaagtccaggcaatgtgt

SEQ ID NO: 570630 - DNA, 19 bp, Mus musculus
  siRNA target sequence for Lamc2 (NM_008485.2,140-158).
gtccaggcaatgtgtcttt

SEQ ID NO: 570631 - DNA, 19 bp, Mus musculus
  siRNA target sequence for Lamc2 (NM_008485.2,199-217).
gcctcaactgcaatgacaa

SEQ ID NO: 570632 - DNA, 19 bp, Mus musculus
  siRNA target sequence for Lamc2 (NM_008485.2,200-218).
cctcaactgcaatgacaat

SEQ ID NO: 570633 - DNA, 19 bp, Mus musculus
  siRNA target sequence for Lamc2 (NM_008485.2,201-219).
ctcaactgcaatgacaata

SEQ ID NO: 570634 - DNA, 19 bp, Mus musculus
  siRNA target sequence for Lamc2 (NM_008485.2,432-450).
gaccaggggcaactagatt

SEQ ID NO: 570635 - DNA, 19 bp, Mus musculus
  siRNA target sequence for Lamc2 (NM_008485.2,547-565).
gccgaccaggctactatca

SEQ ID NO: 570636 - DNA, 19 bp, Mus musculus
  siRNA target sequence for Lamc2 (NM_008485.2,548-566).
ccgaccaggctactatcat

SEQ ID NO: 570637 - DNA, 19 bp, Mus musculus
  siRNA target sequence for Lamc2 (NM_008485.2,550-568).
gaccaggctactatcatct

SEQ ID NO: 570638 - DNA, 19 bp, Mus musculus
  siRNA target sequence for Lamc2 (NM_008485.2,651-669).
gtccacaaaatcacttcaa

SEQ ID NO: 570639 - DNA, 19 bp, Mus musculus
  siRNA target sequence for Lamc2 (NM_008485.2,744-762).
cgccatcgggacgtgttta

SEQ ID NO: 570640 - DNA, 19 bp, Mus musculus
  siRNA target sequence for Lamc2 (NM_008485.2,746-764).
ccatcgggacgtgtttagt

SEQ ID NO: 570641 - DNA, 19 bp, Mus musculus
  siRNA target sequence for Lamc2 (NM_008485.2,747-765).
catcgggacgtgtttagtt

SEQ ID NO: 570642 - DNA, 19 bp, Mus musculus
  siRNA target sequence for Lamc2 (NM_008485.2,775-793).
gatcagaccccgtctattt

SEQ ID NO: 570643 - DNA, 19 bp, Mus musculus
  siRNA target sequence for Lamc2 (NM_008485.2,778-796).
cagaccccgtctatttcgt

SEQ ID NO: 570644 - DNA, 19 bp, Mus musculus
  siRNA target sequence for Lamc2 (NM_008485.2,817-835).
gtaaccagcaagtgagtta

SEQ ID NO: 570645 - DNA, 19 bp, Mus musculus
  siRNA target sequence for Lamc2 (NM_008485.2,965-983).
ctgtgggatcacaaagact

SEQ ID NO: 570646 - DNA, 19 bp, Mus musculus
  siRNA target sequence for Lamc2 (NM_008485.2,967-985).
gtgggatcacaaagactta

SEQ ID NO: 570647 - DNA, 19 bp, Mus musculus
  siRNA target sequence for Lamc2 (NM_008485.2,971-989).
gatcacaaagacttacaca

SEQ ID NO: 570648 - DNA, 19 bp, Mus musculus
  siRNA target sequence for Lamc2 (NM_008485.2,1021-1039).
ggagtccccagctgagtta

SEQ ID NO: 570649 - DNA, 19 bp, Mus musculus
  siRNA target sequence for Lamc2 (NM_008485.2,1022-1040).
gagtccccagctgagttat

SEQ ID NO: 570650 - DNA, 19 bp, Mus musculus
  siRNA target sequence for Lamc2 (NM_008485.2,1024-1042).
gtccccagctgagttattt

SEQ ID NO: 570651 - DNA, 19 bp, Mus musculus
  siRNA target sequence for Lamc2 (NM_008485.2,1031-1049).
gctgagttatttcgaatat

SEQ ID NO: 570652 - DNA, 19 bp, Mus musculus
  siRNA target sequence for Lamc2 (NM_008485.2,1034-1052).
gagttatttcgaatatcga

SEQ ID NO: 570653 - DNA, 19 bp, Mus musculus
  siRNA target sequence for Lamc2 (NM_008485.2,1087-1105).
gagctacgtacggagaata

SEQ ID NO: 570654 - DNA, 19 bp, Mus musculus
  siRNA target sequence for Lamc2 (NM_008485.2,1089-1107).
gctacgtacggagaatata

SEQ ID NO: 570655 - DNA, 19 bp, Mus musculus
  siRNA target sequence for Lamc2 (NM_008485.2,1111-1129).
cagggtacattgataacgt

SEQ ID NO: 570656 - DNA, 19 bp, Mus musculus
  siRNA target sequence for Lamc2 (NM_008485.2,1198-1216).
ctgggtacaagggacaatt

SEQ ID NO: 570657 - DNA, 19 bp, Mus musculus
  siRNA target sequence for Lamc2 (NM_008485.2,1200-1218).
gggtacaagggacaattct

SEQ ID NO: 570658 - DNA, 19 bp, Mus musculus
  siRNA target sequence for Lamc2 (NM_008485.2,1231-1249).
cttctggttacaaaagaga

SEQ ID NO: 570659 - DNA, 19 bp, Mus musculus
  siRNA target sequence for Lamc2 (NM_008485.2,1318-1336).
cagacacgggagattgcta

SEQ ID NO: 570660 - DNA, 19 bp, Mus musculus
  siRNA target sequence for Lamc2 (NM_008485.2,1375-1393).
gtcccatcggtttctacaa

SEQ ID NO: 570661 - DNA, 19 bp, Mus musculus
  siRNA target sequence for Lamc2 (NM_008485.2,1421-1439).
gccatgtccctgtcacaat

SEQ ID NO: 570662 - DNA, 19 bp, Mus musculus
  siRNA target sequence for Lamc2 (NM_008485.2,1582-1600).
gtcaacgctgccaatgcaa

SEQ ID NO: 570663 - DNA, 19 bp, Mus musculus
  siRNA target sequence for Lamc2 (NM_008485.2,1587-1605).
cgctgccaatgcaacaaca

SEQ ID NO: 570664 - DNA, 19 bp, Mus musculus
  siRNA target sequence for Lamc2 (NM_008485.2,1643-1661).
gacaggcagatgcttgaaa

SEQ ID NO: 570665 - DNA, 19 bp, Mus musculus
  siRNA target sequence for Lamc2 (NM_008485.2,1651-1669).
gatgcttgaaatgtatcta

SEQ ID NO: 570666 - DNA, 19 bp, Mus musculus
  siRNA target sequence for Lamc2 (NM_008485.2,1654-1672).
gcttgaaatgtatctacaa

SEQ ID NO: 570667 - DNA, 19 bp, Mus musculus
  siRNA target sequence for Lamc2 (NM_008485.2,1876-1894).
cttgctacaatcaagtgaa

SEQ ID NO: 570668 - DNA, 19 bp, Mus musculus
  siRNA target sequence for Lamc2 (NM_008485.2,1880-1898).
ctacaatcaagtgaagatt

SEQ ID NO: 570669 - DNA, 19 bp, Mus musculus
  siRNA target sequence for Lamc2 (NM_008485.2,2037-2055).
ctgggagaagctcagattt

SEQ ID NO: 570670 - DNA, 19 bp, Mus musculus
  siRNA target sequence for Lamc2 (NM_008485.2,2039-2057).
gggagaagctcagatttca

SEQ ID NO: 570671 - DNA, 19 bp, Mus musculus
  siRNA target sequence for Lamc2 (NM_008485.2,2104-2122).
gccaagagaacgactacaa

SEQ ID NO: 570672 - DNA, 19 bp, Mus musculus
  siRNA target sequence for Lamc2 (NM_008485.2,2245-2263).
gcgaagctctcttggaaaa

SEQ ID NO: 570673 - DNA, 19 bp, Mus musculus
  siRNA target sequence for Lamc2 (NM_008485.2,2259-2277).
gaaaacactaatatccatt

SEQ ID NO: 570674 - DNA, 19 bp, Mus musculus
  siRNA target sequence for Lamc2 (NM_008485.2,2264-2282).
cactaatatccattcttct

SEQ ID NO: 570675 - DNA, 19 bp, Mus musculus
  siRNA target sequence for Lamc2 (NM_008485.2,2297-2315).
gccgaatgattttaaaagt

SEQ ID NO: 570676 - DNA, 19 bp, Mus musculus
  siRNA target sequence for Lamc2 (NM_008485.2,2319-2337).
gctcaggaggctacaagaa

SEQ ID NO: 570677 - DNA, 19 bp, Mus musculus
  siRNA target sequence for Lamc2 (NM_008485.2,2320-2338).
ctcaggaggctacaagaaa

SEQ ID NO: 570678 - DNA, 19 bp, Mus musculus
  siRNA target sequence for Lamc2 (NM_008485.2,2402-2420).
ctccaaacaagcactttca

SEQ ID NO: 570679 - DNA, 19 bp, Mus musculus
  siRNA target sequence for Lamc2 (NM_008485.2,2473-2491).
ccgtggtacaaggtcttat

SEQ ID NO: 570680 - DNA, 19 bp, Mus musculus
  siRNA target sequence for Lamc2 (NM_008485.2,2635-2653).
cctttcaggtggaagcaaa

SEQ ID NO: 570681 - DNA, 19 bp, Mus musculus
  siRNA target sequence for Lamc2 (NM_008485.2,2650-2668).
caaagaggatcagacaaaa

SEQ ID NO: 570682 - DNA, 19 bp, Mus musculus
  siRNA target sequence for Lamc2 (NM_008485.2,2695-2713).
ccagacaaacggatgcatt

SEQ ID NO: 570683 - DNA, 19 bp, Mus musculus
  siRNA target sequence for Lamc2 (NM_008485.2,2714-2732).
cacgcgtgtgcgaaacaat

SEQ ID NO: 570684 - DNA, 19 bp, Mus musculus
  siRNA target sequence for Lamc2 (NM_008485.2,2716-2734).
cgcgtgtgcgaaacaatct

SEQ ID NO: 570685 - DNA, 19 bp, Mus musculus
  siRNA target sequence for Lamc2 (NM_008485.2,2812-2830).
cccgtgccaaccttgctaa

SEQ ID NO: 570686 - DNA, 19 bp, Mus musculus
  siRNA target sequence for Lamc2 (NM_008485.2,2813-2831).
ccgtgccaaccttgctaaa

SEQ ID NO: 570687 - DNA, 19 bp, Mus musculus
  siRNA target sequence for Lamc2 (NM_008485.2,2814-2832).
cgtgccaaccttgctaaaa

SEQ ID NO: 570688 - DNA, 19 bp, Mus musculus
  siRNA target sequence for Lamc2 (NM_008485.2,2819-2837).
caaccttgctaaaaacaga

SEQ ID NO: 570689 - DNA, 19 bp, Mus musculus
  siRNA target sequence for Lamc2 (NM_008485.2,2838-2856).
gcccaagaagcgctaagta

SEQ ID NO: 570690 - DNA, 19 bp, Mus musculus
  siRNA target sequence for Lamc2 (NM_008485.2,2839-2857).
cccaagaagcgctaagtat

SEQ ID NO: 570691 - DNA, 19 bp, Mus musculus
  siRNA target sequence for Lamc2 (NM_008485.2,2858-2876).
gggcaatgccactttttat

SEQ ID NO: 570692 - DNA, 19 bp, Mus musculus
  siRNA target sequence for Lamc2 (NM_008485.2,2860-2878).
gcaatgccactttttatga

SEQ ID NO: 570693 - DNA, 19 bp, Mus musculus
  siRNA target sequence for Lamc2 (NM_008485.2,2897-2915).
gaacctccgagagtttgat

SEQ ID NO: 570694 - DNA, 19 bp, Mus musculus
  siRNA target sequence for Lamc2 (NM_008485.2,3301-3319).
cgagtgccggagttaccat

SEQ ID NO: 570695 - DNA, 19 bp, Mus musculus
  siRNA target sequence for Lamc2 (NM_008485.2,3346-3364).
gcatcctacacctcataga

SEQ ID NO: 570696 - DNA, 19 bp, Mus musculus
  siRNA target sequence for Lamc2 (NM_008485.2,3444-3462).
cgacttcggcccttgatgt

SEQ ID NO: 570697 - DNA, 19 bp, Mus musculus
  siRNA target sequence for Lamc2 (NM_008485.2,3517-3535).
ctagcatagatggaattct

SEQ ID NO: 570698 - DNA, 19 bp, Mus musculus
  siRNA target sequence for Lamc2 (NM_008485.2,3576-3594).
cccccaggctgctacaata

SEQ ID NO: 570699 - DNA, 19 bp, Mus musculus
  siRNA target sequence for Lipc (NM_008280.2,638-656).
ctacaccattgctgttcaa

SEQ ID NO: 570700 - DNA, 19 bp, Mus musculus
  siRNA target sequence for Lipc (NM_008280.2,704-722).
ggaggaatctgcgaagttt

SEQ ID NO: 570701 - DNA, 19 bp, Mus musculus
  siRNA target sequence for Lipc (NM_008280.2,705-723).
gaggaatctgcgaagtttt

SEQ ID NO: 570702 - DNA, 19 bp, Mus musculus
  siRNA target sequence for Lipc (NM_008280.2,707-725).
ggaatctgcgaagttttct

SEQ ID NO: 570703 - DNA, 19 bp, Mus musculus
  siRNA target sequence for Lipc (NM_008280.2,728-746).
gagcaaagttcacctaatt

SEQ ID NO: 570704 - DNA, 19 bp, Mus musculus
  siRNA target sequence for Lipc (NM_008280.2,806-824).
caagattggaagaatcaca

SEQ ID NO: 570705 - DNA, 19 bp, Mus musculus
  siRNA target sequence for Lipc (NM_008280.2,880-898).
ctcctgatgatgccaattt

SEQ ID NO: 570706 - DNA, 19 bp, Mus musculus
  siRNA target sequence for Lipc (NM_008280.2,903-921).
gacgccattcataccttta

SEQ ID NO: 570707 - DNA, 19 bp, Mus musculus
  siRNA target sequence for Lipc (NM_008280.2,1022-1040).
ggaactctacaaacacatt

SEQ ID NO: 570708 - DNA, 19 bp, Mus musculus
  siRNA target sequence for Lipc (NM_008280.2,1322-1340).
gatccagttcatcaatcaa

SEQ ID NO: 570709 - DNA, 19 bp, Mus musculus
  siRNA target sequence for Lipc (NM_008280.2,1325-1343).
ccagttcatcaatcaaatt

SEQ ID NO: 570710 - DNA, 19 bp, Mus musculus
  siRNA target sequence for Lipc (NM_008280.2,1353-1371).
gtagagcctacttttacca

SEQ ID NO: 570711 - DNA, 19 bp, Mus musculus
  siRNA target sequence for Lipc (NM_008280.2,1415-1433).
caccctgggcgaaggaatt

SEQ ID NO: 570712 - DNA, 19 bp, Mus musculus
  siRNA target sequence for Lipc (NM_008280.2,1419-1437).
ctgggcgaaggaattacca

SEQ ID NO: 570713 - DNA, 19 bp, Mus musculus
  siRNA target sequence for Lipc (NM_008280.2,1438-1456).
gcaataaaacctattcctt

SEQ ID NO: 570714 - DNA, 19 bp, Mus musculus
  siRNA target sequence for Lipc (NM_008280.2,1448-1466).
ctattccttccttatcaca

SEQ ID NO: 570715 - DNA, 19 bp, Mus musculus
  siRNA target sequence for Lipg (NM_010720.2,168-186).
ggcttttggagcgtctatt

SEQ ID NO: 570716 - DNA, 19 bp, Mus musculus
  siRNA target sequence for Lipg (NM_010720.2,170-188).
cttttggagcgtctattgt

SEQ ID NO: 570717 - DNA, 19 bp, Mus musculus
  siRNA target sequence for Lipg (NM_010720.2,421-439).
cgatgagtggcatgtttga

SEQ ID NO: 570718 - DNA, 19 bp, Mus musculus
  siRNA target sequence for Lipg (NM_010720.2,440-458).
gagctggctgcataaactt

SEQ ID NO: 570719 - DNA, 19 bp, Mus musculus
  siRNA target sequence for Lipg (NM_010720.2,446-464).
gctgcataaacttgtatca

SEQ ID NO: 570720 - DNA, 19 bp, Mus musculus
  siRNA target sequence for Lipg (NM_010720.2,619-637).
ctcttgggaacgttcactt

SEQ ID NO: 570721 - DNA, 19 bp, Mus musculus
  siRNA target sequence for Lipg (NM_010720.2,670-688).
gatacgctggcaactttgt

SEQ ID NO: 570722 - DNA, 19 bp, Mus musculus
  siRNA target sequence for Lipg (NM_010720.2,770-788).
cccggacgatgcagacttt

SEQ ID NO: 570723 - DNA, 19 bp, Mus musculus
  siRNA target sequence for Lipg (NM_010720.2,772-790).
cggacgatgcagactttgt

SEQ ID NO: 570724 - DNA, 19 bp, Mus musculus
  siRNA target sequence for Lipg (NM_010720.2,847-865).
ctgtgggtcacattgacat

SEQ ID NO: 570725 - DNA, 19 bp, Mus musculus
  siRNA target sequence for Lipg (NM_010720.2,914-932).
catcggatcttttgcatat

SEQ ID NO: 570726 - DNA, 19 bp, Mus musculus
  siRNA target sequence for Lipg (NM_010720.2,970-988).
gagccgtacacctctttgt

SEQ ID NO: 570727 - DNA, 19 bp, Mus musculus
  siRNA target sequence for Lipg (NM_010720.2,1075-1093).
gccggaagaaccgttgtaa

SEQ ID NO: 570728 - DNA, 19 bp, Mus musculus
  siRNA target sequence for Lipg (NM_010720.2,1076-1094).
ccggaagaaccgttgtaat

SEQ ID NO: 570729 - DNA, 19 bp, Mus musculus
  siRNA target sequence for Lipg (NM_010720.2,1077-1095).
cggaagaaccgttgtaata

SEQ ID NO: 570730 - DNA, 19 bp, Mus musculus
  siRNA target sequence for Lipg (NM_010720.2,1078-1096).
ggaagaaccgttgtaataa

SEQ ID NO: 570731 - DNA, 19 bp, Mus musculus
  siRNA target sequence for Lipg (NM_010720.2,1169-1187).
gcctttcaaagtttaccat

SEQ ID NO: 570732 - DNA, 19 bp, Mus musculus
  siRNA target sequence for Lipg (NM_010720.2,1200-1218).
gttcacatgttctcttaca

SEQ ID NO: 570733 - DNA, 19 bp, Mus musculus
  siRNA target sequence for Lipg (NM_010720.2,1203-1221).
cacatgttctcttacaata

SEQ ID NO: 570734 - DNA, 19 bp, Mus musculus
  siRNA target sequence for Lipg (NM_010720.2,1236-1254).
cagcccaccctctacatta

SEQ ID NO: 570735 - DNA, 19 bp, Mus musculus
  siRNA target sequence for Lipg (NM_010720.2,1475-1493).
gtacatccggcgaattcgt

SEQ ID NO: 570736 - DNA, 19 bp, Mus musculus
  siRNA target sequence for Lipg (NM_010720.2,1481-1499).
ccggcgaattcgtgtcaaa

SEQ ID NO: 570737 - DNA, 19 bp, Mus musculus
  siRNA target sequence for Lipg (NM_010720.2,1482-1500).
cggcgaattcgtgtcaaat

SEQ ID NO: 570738 - DNA, 19 bp, Mus musculus
  siRNA target sequence for Lipg (NM_010720.2,1506-1524).
gaaacccagcgcaaagtga

SEQ ID NO: 570739 - DNA, 19 bp, Mus musculus
  siRNA target sequence for Lipg (NM_010720.2,1510-1528).
cccagcgcaaagtgacatt

SEQ ID NO: 570740 - DNA, 19 bp, Mus musculus
  siRNA target sequence for Lipg (NM_010720.2,1511-1529).
ccagcgcaaagtgacattt

SEQ ID NO: 570741 - DNA, 19 bp, Mus musculus
  siRNA target sequence for Lipg (NM_010720.2,1515-1533).
cgcaaagtgacattttgca

SEQ ID NO: 570742 - DNA, 19 bp, Mus musculus
  siRNA target sequence for Lipg (NM_010720.2,1536-1554).
caagacccaacgaagagta

SEQ ID NO: 570743 - DNA, 19 bp, Mus musculus
  siRNA target sequence for Lipg (NM_010720.2,1621-1639).
ccagtccctttgtgaactt

SEQ ID NO: 570744 - DNA, 19 bp, Mus musculus
  siRNA target sequence for Lpl (NM_008509.1,444-462).
ggacggtaacgggaatgta

SEQ ID NO: 570745 - DNA, 19 bp, Mus musculus
  siRNA target sequence for Lpl (NM_008509.1,445-463).
gacggtaacgggaatgtat

SEQ ID NO: 570746 - DNA, 19 bp, Mus musculus
  siRNA target sequence for Lpl (NM_008509.1,447-465).
cggtaacgggaatgtatga

SEQ ID NO: 570747 - DNA, 19 bp, Mus musculus
  siRNA target sequence for Lpl (NM_008509.1,466-484).
gagttgggtgcccaaactt

SEQ ID NO: 570748 - DNA, 19 bp, Mus musculus
  siRNA target sequence for Lpl (NM_008509.1,510-528).
ctgactccaatgtcattgt

SEQ ID NO: 570749 - DNA, 19 bp, Mus musculus
  siRNA target sequence for Lpl (NM_008509.1,514-532).
ctccaatgtcattgtagta

SEQ ID NO: 570750 - DNA, 19 bp, Mus musculus
  siRNA target sequence for Lpl (NM_008509.1,516-534).
ccaatgtcattgtagtaga

SEQ ID NO: 570751 - DNA, 19 bp, Mus musculus
  siRNA target sequence for Lpl (NM_008509.1,582-600).
ccaagctggtgggaaatga

SEQ ID NO: 570752 - DNA, 19 bp, Mus musculus
  siRNA target sequence for Lpl (NM_008509.1,752-770).
gctgggcctaactttgagt

SEQ ID NO: 570753 - DNA, 19 bp, Mus musculus
  siRNA target sequence for Lpl (NM_008509.1,798-816).
ctgatgacgctgattttgt

SEQ ID NO: 570754 - DNA, 19 bp, Mus musculus
  siRNA target sequence for Lpl (NM_008509.1,844-862).
gtcacctggtcgaagtatt

SEQ ID NO: 570755 - DNA, 19 bp, Mus musculus
  siRNA target sequence for Lpl (NM_008509.1,1104-1122).
gcctgagttgtagaaagaa

SEQ ID NO: 570756 - DNA, 19 bp, Mus musculus
  siRNA target sequence for Lpl (NM_008509.1,1116-1134).
gaaagaatcgctgtaacaa

SEQ ID NO: 570757 - DNA, 19 bp, Mus musculus
  siRNA target sequence for Lpl (NM_008509.1,1213-1231).
caaagtgttccattaccaa

SEQ ID NO: 570758 - DNA, 19 bp, Mus musculus
  siRNA target sequence for Lpl (NM_008509.1,1340-1358).
cccgaggtttccacaaata

SEQ ID NO: 570759 - DNA, 19 bp, Mus musculus
  siRNA target sequence for Lpl (NM_008509.1,1341-1359).
ccgaggtttccacaaataa

SEQ ID NO: 570760 - DNA, 19 bp, Mus musculus
  siRNA target sequence for Lpl (NM_008509.1,1342-1360).
cgaggtttccacaaataaa

SEQ ID NO: 570761 - DNA, 19 bp, Mus musculus
  siRNA target sequence for Lpl (NM_008509.1,1362-1380).
cctactccttcttgattta

SEQ ID NO: 570762 - DNA, 19 bp, Mus musculus
  siRNA target sequence for Lpl (NM_008509.1,1397-1415).
ggagaactgctcatgatga

SEQ ID NO: 570763 - DNA, 19 bp, Mus musculus
  siRNA target sequence for Lpl (NM_008509.1,1403-1421).
ctgctcatgatgaagctta

SEQ ID NO: 570764 - DNA, 19 bp, Mus musculus
  siRNA target sequence for Lpl (NM_008509.1,1406-1424).
ctcatgatgaagcttaagt

SEQ ID NO: 570765 - DNA, 19 bp, Mus musculus
  siRNA target sequence for Lpl (NM_008509.1,1483-1501).
cgagaggatccgagtgaaa

SEQ ID NO: 570766 - DNA, 19 bp, Mus musculus
  siRNA target sequence for Lpl (NM_008509.1,1512-1530).
ctcagaaaaaggtcatctt

SEQ ID NO: 570767 - DNA, 19 bp, Mus musculus
  siRNA target sequence for Lrpap1 (NM_013587.1,106-124).
ggccatggcggcaagtact

SEQ ID NO: 570768 - DNA, 19 bp, Mus musculus
  siRNA target sequence for Lrpap1 (NM_013587.1,255-273).
gcattctgacctgaagata

SEQ ID NO: 570769 - DNA, 19 bp, Mus musculus
  siRNA target sequence for Lrpap1 (NM_013587.1,539-557).
gagagtttctgcattacaa

SEQ ID NO: 570770 - DNA, 19 bp, Mus musculus
  siRNA target sequence for Lrpap1 (NM_013587.1,694-712).
gacagactgcgcagtatca

SEQ ID NO: 570771 - DNA, 19 bp, Mus musculus
  siRNA target sequence for Lrpap1 (NM_013587.1,971-989).
gccgcaacaaggagaaata

SEQ ID NO: 570772 - DNA, 19 bp, Mus musculus
  siRNA target sequence for Lrpap1 (NM_013587.1,1067-1085).
caagggctcggcacaatga

SEQ ID NO: 570773 - DNA, 19 bp, Mus musculus
  siRNA target sequence for Ncam1 (NM_010875.2,177-195).
gatctcatctggactttgt

SEQ ID NO: 570774 - DNA, 19 bp, Mus musculus
  siRNA target sequence for Ncam1 (NM_010875.2,256-274).
gcgttggagagtccaaatt

SEQ ID NO: 570775 - DNA, 19 bp, Mus musculus
  siRNA target sequence for Ncam1 (NM_010875.2,291-309).
gcaggagatgccaaagata

SEQ ID NO: 570776 - DNA, 19 bp, Mus musculus
  siRNA target sequence for Ncam1 (NM_010875.2,397-415).
ctaccctcaccatctacaa

SEQ ID NO: 570777 - DNA, 19 bp, Mus musculus
  siRNA target sequence for Ncam1 (NM_010875.2,426-444).
gacgatgccggcatataca

SEQ ID NO: 570778 - DNA, 19 bp, Mus musculus
  siRNA target sequence for Ncam1 (NM_010875.2,532-550).
caaccccacaggagtttaa

SEQ ID NO: 570779 - DNA, 19 bp, Mus musculus
  siRNA target sequence for Ncam1 (NM_010875.2,536-554).
cccacaggagtttaaggaa

SEQ ID NO: 570780 - DNA, 19 bp, Mus musculus
  siRNA target sequence for Ncam1 (NM_010875.2,624-642).
ggccgagatgtcattctga

SEQ ID NO: 570781 - DNA, 19 bp, Mus musculus
  siRNA target sequence for Ncam1 (NM_010875.2,770-788).
cattcaggtcattgtgaat

SEQ ID NO: 570782 - DNA, 19 bp, Mus musculus
  siRNA target sequence for Ncam1 (NM_010875.2,1085-1103).
gcccaaaatcacctatgta

SEQ ID NO: 570783 - DNA, 19 bp, Mus musculus
  siRNA target sequence for Ncam1 (NM_010875.2,1087-1105).
ccaaaatcacctatgtaga

SEQ ID NO: 570784 - DNA, 19 bp, Mus musculus
  siRNA target sequence for Ncam1 (NM_010875.2,1504-1522).
gctccaactacagcaatat

SEQ ID NO: 570785 - DNA, 19 bp, Mus musculus
  siRNA target sequence for Ncam1 (NM_010875.2,1507-1525).
ccaactacagcaatatcaa

SEQ ID NO: 570786 - DNA, 19 bp, Mus musculus
  siRNA target sequence for Ncam1 (NM_010875.2,1516-1534).
gcaatatcaagatctacaa

SEQ ID NO: 570787 - DNA, 19 bp, Mus musculus
  siRNA target sequence for Ncam1 (NM_010875.2,1535-1553).
caccccatctgctagctat

SEQ ID NO: 570788 - DNA, 19 bp, Mus musculus
  siRNA target sequence for Ncam1 (NM_010875.2,1708-1726).
cgcaggtgcagtttgatga

SEQ ID NO: 570789 - DNA, 19 bp, Mus musculus
  siRNA target sequence for Ncam1 (NM_010875.2,1744-1762).
gcgtgcccattctcaagta

SEQ ID NO: 570790 - DNA, 19 bp, Mus musculus
  siRNA target sequence for Ncam1 (NM_010875.2,1746-1764).
gtgcccattctcaagtaca

SEQ ID NO: 570791 - DNA, 19 bp, Mus musculus
  siRNA target sequence for Ncam1 (NM_010875.2,1788-1806).
gaagaatcctggcatttca

SEQ ID NO: 570792 - DNA, 19 bp, Mus musculus
  siRNA target sequence for Ncam1 (NM_010875.2,2059-2077).
gacactatctggtcaagta

SEQ ID NO: 570793 - DNA, 19 bp, Mus musculus
  siRNA target sequence for Ncam1 (NM_010875.2,2061-2079).
cactatctggtcaagtaca

SEQ ID NO: 570794 - DNA, 19 bp, Mus musculus
  siRNA target sequence for Ncam1 (NM_010875.2,2156-2174).
ctggaacgcagagtatgaa

SEQ ID NO: 570795 - DNA, 19 bp, Mus musculus
  siRNA target sequence for Ncam1 (NM_010875.2,2158-2176).
ggaacgcagagtatgaagt

SEQ ID NO: 570796 - DNA, 19 bp, Mus musculus
  siRNA target sequence for Ncam1 (NM_010875.2,2162-2180).
cgcagagtatgaagtctat

SEQ ID NO: 570797 - DNA, 19 bp, Mus musculus
  siRNA target sequence for Ncam1 (NM_010875.2,2287-2305).
cctacaccttggtctcatt

SEQ ID NO: 570798 - DNA, 19 bp, Mus musculus
  siRNA target sequence for Ncam1 (NM_010875.2,2312-2330).
ctctgcggtgactcttctt

SEQ ID NO: 570799 - DNA, 19 bp, Mus musculus
  siRNA target sequence for Serpinc1 (NM_080844.2,322-340).
cgatttgccactaacttct

SEQ ID NO: 570800 - DNA, 19 bp, Mus musculus
  siRNA target sequence for Serpinc1 (NM_080844.2,323-341).
gatttgccactaacttcta

SEQ ID NO: 570801 - DNA, 19 bp, Mus musculus
  siRNA target sequence for Serpinc1 (NM_080844.2,454-472).
cagctgatggaggttttta

SEQ ID NO: 570802 - DNA, 19 bp, Mus musculus
  siRNA target sequence for Serpinc1 (NM_080844.2,456-474).
gctgatggaggtttttaaa

SEQ ID NO: 570803 - DNA, 19 bp, Mus musculus
  siRNA target sequence for Serpinc1 (NM_080844.2,500-518).
ccgaccagatccacttctt

SEQ ID NO: 570804 - DNA, 19 bp, Mus musculus
  siRNA target sequence for Serpinc1 (NM_080844.2,621-639).
gagctatcaagatgttagt

SEQ ID NO: 570805 - DNA, 19 bp, Mus musculus
  siRNA target sequence for Serpinc1 (NM_080844.2,711-729).
caacaactgggtagctaat

SEQ ID NO: 570806 - DNA, 19 bp, Mus musculus
  siRNA target sequence for Serpinc1 (NM_080844.2,717-735).
ctgggtagctaataagact

SEQ ID NO: 570807 - DNA, 19 bp, Mus musculus
  siRNA target sequence for Serpinc1 (NM_080844.2,785-803).
ctgccctggttctggttaa

SEQ ID NO: 570808 - DNA, 19 bp, Mus musculus
  siRNA target sequence for Serpinc1 (NM_080844.2,787-805).
gccctggttctggttaaca

SEQ ID NO: 570809 - DNA, 19 bp, Mus musculus
  siRNA target sequence for Serpinc1 (NM_080844.2,799-817).
gttaacaccatttacttca

SEQ ID NO: 570810 - DNA, 19 bp, Mus musculus
  siRNA target sequence for Serpinc1 (NM_080844.2,857-875).
ggaaggaaccgttctataa

SEQ ID NO: 570811 - DNA, 19 bp, Mus musculus
  siRNA target sequence for Serpinc1 (NM_080844.2,893-911).
gcccagtgcctatgatgta

SEQ ID NO: 570812 - DNA, 19 bp, Mus musculus
  siRNA target sequence for Serpinc1 (NM_080844.2,1249-1267).
gacgcattccacaaagcat

SEQ ID NO: 570813 - DNA, 19 bp, Mus musculus
  siRNA target sequence for Serpinc1 (NM_080844.2,1370-1388).
ggcccttcctggttcttat

SEQ ID NO: 570814 - DNA, 19 bp, Mus musculus
  siRNA target sequence for Serpinc1 (NM_080844.2,1396-1414).
gttgcactgaacactatta

SEQ ID NO: 570815 - DNA, 19 bp, Mus musculus
  siRNA target sequence for Serpinc1 (NM_080844.2,1422-1440).
ggggagagtggctaatcct

SEQ ID NO: 570816 - DNA, 19 bp, Mus musculus
  siRNA target sequence for Serpinc1 (NM_080844.2,1423-1441).
gggagagtggctaatcctt

SEQ ID NO: 570817 - DNA, 19 bp, Mus musculus
  siRNA target sequence for Serpind1 (NM_008223.1,154-172).
cttgctgagcagctaacta

SEQ ID NO: 570818 - DNA, 19 bp, Mus musculus
  siRNA target sequence for Serpind1 (NM_008223.1,200-218).
ctgctaacttccacaaaga

SEQ ID NO: 570819 - DNA, 19 bp, Mus musculus
  siRNA target sequence for Serpind1 (NM_008223.1,282-300).
gaagctgcttggtgaagat

SEQ ID NO: 570820 - DNA, 19 bp, Mus musculus
  siRNA target sequence for Serpind1 (NM_008223.1,333-351).
cccgacagactcagaatca

SEQ ID NO: 570821 - DNA, 19 bp, Mus musculus
  siRNA target sequence for Serpind1 (NM_008223.1,334-352).
ccgacagactcagaatcaa

SEQ ID NO: 570822 - DNA, 19 bp, Mus musculus
  siRNA target sequence for Serpind1 (NM_008223.1,389-407).
gccggatccagcgtcttaa

SEQ ID NO: 570823 - DNA, 19 bp, Mus musculus
  siRNA target sequence for Serpind1 (NM_008223.1,390-408).
ccggatccagcgtcttaat

SEQ ID NO: 570824 - DNA, 19 bp, Mus musculus
  siRNA target sequence for Serpind1 (NM_008223.1,391-409).
cggatccagcgtcttaata

SEQ ID NO: 570825 - DNA, 19 bp, Mus musculus
  siRNA target sequence for Serpind1 (NM_008223.1,392-410).
ggatccagcgtcttaatat

SEQ ID NO: 570826 - DNA, 19 bp, Mus musculus
  siRNA target sequence for Serpind1 (NM_008223.1,487-505).
gcacctgttggcatttcta

SEQ ID NO: 570827 - DNA, 19 bp, Mus musculus
  siRNA target sequence for Serpind1 (NM_008223.1,571-589).
cacttcagagactttgtca

SEQ ID NO: 570828 - DNA, 19 bp, Mus musculus
  siRNA target sequence for Serpind1 (NM_008223.1,614-632).
ccaccattcacaatctctt

SEQ ID NO: 570829 - DNA, 19 bp, Mus musculus
  siRNA target sequence for Serpind1 (NM_008223.1,640-658).
ctgacccatcgtctattca

SEQ ID NO: 570830 - DNA, 19 bp, Mus musculus
  siRNA target sequence for Serpind1 (NM_008223.1,675-693).
cacacttcggtcagttaat

SEQ ID NO: 570831 - DNA, 19 bp, Mus musculus
  siRNA target sequence for Serpind1 (NM_008223.1,684-702).
gtcagttaatggcctttat

SEQ ID NO: 570832 - DNA, 19 bp, Mus musculus
  siRNA target sequence for Serpind1 (NM_008223.1,720-738).
catacgggaggacttcaaa

SEQ ID NO: 570833 - DNA, 19 bp, Mus musculus
  siRNA target sequence for Serpind1 (NM_008223.1,739-757).
gctgctatgagagagtttt

SEQ ID NO: 570834 - DNA, 19 bp, Mus musculus
  siRNA target sequence for Serpind1 (NM_008223.1,740-758).
ctgctatgagagagtttta

SEQ ID NO: 570835 - DNA, 19 bp, Mus musculus
  siRNA target sequence for Serpind1 (NM_008223.1,790-808).
gatcctgccttcatatcaa

SEQ ID NO: 570836 - DNA, 19 bp, Mus musculus
  siRNA target sequence for Serpind1 (NM_008223.1,811-829).
gcaaacaaccacattctga

SEQ ID NO: 570837 - DNA, 19 bp, Mus musculus
  siRNA target sequence for Serpind1 (NM_008223.1,832-850).
ctcaccaagggccttataa

SEQ ID NO: 570838 - DNA, 19 bp, Mus musculus
  siRNA target sequence for Serpind1 (NM_008223.1,834-852).
caccaagggccttataaaa

SEQ ID NO: 570839 - DNA, 19 bp, Mus musculus
  siRNA target sequence for Serpind1 (NM_008223.1,836-854).
ccaagggccttataaaaga

SEQ ID NO: 570840 - DNA, 19 bp, Mus musculus
  siRNA target sequence for Serpind1 (NM_008223.1,969-987).
gctgaatgagagagaagta

SEQ ID NO: 570841 - DNA, 19 bp, Mus musculus
  siRNA target sequence for Serpind1 (NM_008223.1,1079-1097).
ggggcatcagcatgcttat

SEQ ID NO: 570842 - DNA, 19 bp, Mus musculus
  siRNA target sequence for Serpind1 (NM_008223.1,1080-1098).
gggcatcagcatgcttatt

SEQ ID NO: 570843 - DNA, 19 bp, Mus musculus
  siRNA target sequence for Serpind1 (NM_008223.1,1099-1117).
gtagttccacggaagctat

SEQ ID NO: 570844 - DNA, 19 bp, Mus musculus
  siRNA target sequence for Serpind1 (NM_008223.1,1109-1127).
ggaagctatcgggaatgaa

SEQ ID NO: 570845 - DNA, 19 bp, Mus musculus
  siRNA target sequence for Serpind1 (NM_008223.1,1265-1283).
gaatcacaaagctcttcaa

SEQ ID NO: 570846 - DNA, 19 bp, Mus musculus
  siRNA target sequence for Serpind1 (NM_008223.1,1333-1351).
ctgttcaagcaccaaagta

SEQ ID NO: 570847 - DNA, 19 bp, Mus musculus
  siRNA target sequence for Serpind1 (NM_008223.1,1349-1367).
gtaccatcacagtgaatga

SEQ ID NO: 570848 - DNA, 19 bp, Mus musculus
  siRNA target sequence for Serpind1 (NM_008223.1,1449-1467).
cttcctgttcctagtgtat

SEQ ID NO: 570849 - DNA, 19 bp, Mus musculus
  siRNA target sequence for Serpine2 (NM_009255.2,250-268).
cagggatccaggtcttcaa

SEQ ID NO: 570850 - DNA, 19 bp, Mus musculus
  siRNA target sequence for Serpine2 (NM_009255.2,289-307).
ctcatgagaacgttgttgt

SEQ ID NO: 570851 - DNA, 19 bp, Mus musculus
  siRNA target sequence for Serpine2 (NM_009255.2,354-372).
gctgacggcaagacaaaga

SEQ ID NO: 570852 - DNA, 19 bp, Mus musculus
  siRNA target sequence for Serpine2 (NM_009255.2,382-400).
ccacggtgatgcgatataa

SEQ ID NO: 570853 - DNA, 19 bp, Mus musculus
  siRNA target sequence for Serpine2 (NM_009255.2,383-401).
cacggtgatgcgatataat

SEQ ID NO: 570854 - DNA, 19 bp, Mus musculus
  siRNA target sequence for Serpine2 (NM_009255.2,385-403).
cggtgatgcgatataatgt

SEQ ID NO: 570855 - DNA, 19 bp, Mus musculus
  siRNA target sequence for Serpine2 (NM_009255.2,386-404).
ggtgatgcgatataatgta

SEQ ID NO: 570856 - DNA, 19 bp, Mus musculus
  siRNA target sequence for Serpine2 (NM_009255.2,689-707).
gctggtcctcgttaatgca

SEQ ID NO: 570857 - DNA, 19 bp, Mus musculus
  siRNA target sequence for Serpine2 (NM_009255.2,695-713).
cctcgttaatgcagtgtat

SEQ ID NO: 570858 - DNA, 19 bp, Mus musculus
  siRNA target sequence for Serpine2 (NM_009255.2,725-743).
gtggaagtctcggtttcaa

SEQ ID NO: 570859 - DNA, 19 bp, Mus musculus
  siRNA target sequence for Serpine2 (NM_009255.2,847-865).
ccccgaatggcttatggta

SEQ ID NO: 570860 - DNA, 19 bp, Mus musculus
  siRNA target sequence for Serpine2 (NM_009255.2,855-873).
ggcttatggtacaacttca

SEQ ID NO: 570861 - DNA, 19 bp, Mus musculus
  siRNA target sequence for Serpine2 (NM_009255.2,1037-1055).
cacagctgtggcacaaaca

SEQ ID NO: 570862 - DNA, 19 bp, Mus musculus
  siRNA target sequence for Serpine2 (NM_009255.2,1073-1091).
gaaagcccttggcattact

SEQ ID NO: 570863 - DNA, 19 bp, Mus musculus
  siRNA target sequence for Serpine2 (NM_009255.2,1101-1119).
gagccatcaaaggcaaatt

SEQ ID NO: 570864 - DNA, 19 bp, Mus musculus
  siRNA target sequence for Serpine2 (NM_009255.2,1135-1153).
ggtcagagagccttcatgt

SEQ ID NO: 570865 - DNA, 19 bp, Mus musculus
  siRNA target sequence for Serpine2 (NM_009255.2,1246-1264).
cacctccctggtttatagt

SEQ ID NO: 570866 - DNA, 19 bp, Mus musculus
  siRNA target sequence for Serpine2 (NM_009255.2,1300-1318).
ccacaggtgccatcttgtt

SEQ ID NO: 570867 - DNA, 19 bp, Mus musculus
  siRNA target sequence for Tnxb (NM_031176.1,470-488).
cagaccctacggacacaaa

SEQ ID NO: 570868 - DNA, 19 bp, Mus musculus
  siRNA target sequence for Tnxb (NM_031176.1,472-490).
gaccctacggacacaaaga

SEQ ID NO: 570869 - DNA, 19 bp, Mus musculus
  siRNA target sequence for Tnxb (NM_031176.1,942-960).
gtgcgatcccggctatagt

SEQ ID NO: 570870 - DNA, 19 bp, Mus musculus
  siRNA target sequence for Tnxb (NM_031176.1,952-970).
ggctatagtggcgaagatt

SEQ ID NO: 570871 - DNA, 19 bp, Mus musculus
  siRNA target sequence for Tnxb (NM_031176.1,1111-1129).
gaggacggggaatgtatct

SEQ ID NO: 570872 - DNA, 19 bp, Mus musculus
  siRNA target sequence for Tnxb (NM_031176.1,2190-2208).
cgactgcggggaagagata

SEQ ID NO: 570873 - DNA, 19 bp, Mus musculus
  siRNA target sequence for Tnxb (NM_031176.1,2293-2311).
gcctatgaaatccagttta

SEQ ID NO: 570874 - DNA, 19 bp, Mus musculus
  siRNA target sequence for Tnxb (NM_031176.1,2294-2312).
cctatgaaatccagtttat

SEQ ID NO: 570875 - DNA, 19 bp, Mus musculus
  siRNA target sequence for Tnxb (NM_031176.1,2639-2657).
ctcagctaaccgatctgat

SEQ ID NO: 570876 - DNA, 19 bp, Mus musculus
  siRNA target sequence for Tnxb (NM_031176.1,3028-3046).
ggagccccctacaagctat

SEQ ID NO: 570877 - DNA, 19 bp, Mus musculus
  siRNA target sequence for Tnxb (NM_031176.1,3032-3050).
ccccctacaagctattcct

SEQ ID NO: 570878 - DNA, 19 bp, Mus musculus
  siRNA target sequence for Tnxb (NM_031176.1,3071-3089).
gcaagatctctgttcctat

SEQ ID NO: 570879 - DNA, 19 bp, Mus musculus
  siRNA target sequence for Tnxb (NM_031176.1,3092-3110).
cctaccaaggcattatgga

SEQ ID NO: 570880 - DNA, 19 bp, Mus musculus
  siRNA target sequence for Tnxb (NM_031176.1,3319-3337).
gaaccaggacgcaagtaca

SEQ ID NO: 570881 - DNA, 19 bp, Mus musculus
  siRNA target sequence for Tnxb (NM_031176.1,3325-3343).
ggacgcaagtacaaattta

SEQ ID NO: 570882 - DNA, 19 bp, Mus musculus
  siRNA target sequence for Tnxb (NM_031176.1,3326-3344).
gacgcaagtacaaatttat

SEQ ID NO: 570883 - DNA, 19 bp, Mus musculus
  siRNA target sequence for Tnxb (NM_031176.1,3329-3347).
gcaagtacaaatttatcct

SEQ ID NO: 570884 - DNA, 19 bp, Mus musculus
  siRNA target sequence for Tnxb (NM_031176.1,3610-3628).
gaccccaatcgcaagtaca

SEQ ID NO: 570885 - DNA, 19 bp, Mus musculus
  siRNA target sequence for Tnxb (NM_031176.1,3802-3820).
cccttcgactcctttgtaa

SEQ ID NO: 570886 - DNA, 19 bp, Mus musculus
  siRNA target sequence for Tnxb (NM_031176.1,3803-3821).
ccttcgactcctttgtaat

SEQ ID NO: 570887 - DNA, 19 bp, Mus musculus
  siRNA target sequence for Tnxb (NM_031176.1,3807-3825).
cgactcctttgtaatcctt

SEQ ID NO: 570888 - DNA, 19 bp, Mus musculus
  siRNA target sequence for Tnxb (NM_031176.1,3808-3826).
gactcctttgtaatccttt

SEQ ID NO: 570889 - DNA, 19 bp, Mus musculus
  siRNA target sequence for Tnxb (NM_031176.1,3860-3878).
ccatcgaaggtgatgagaa

SEQ ID NO: 570890 - DNA, 19 bp, Mus musculus
  siRNA target sequence for Tnxb (NM_031176.1,3861-3879).
catcgaaggtgatgagaat

SEQ ID NO: 570891 - DNA, 19 bp, Mus musculus
  siRNA target sequence for Tnxb (NM_031176.1,3905-3923).
ccaacaggaagtataagat

SEQ ID NO: 570892 - DNA, 19 bp, Mus musculus
  siRNA target sequence for Tnxb (NM_031176.1,4632-4650).
gggcacaaccgacaaacaa

SEQ ID NO: 570893 - DNA, 19 bp, Mus musculus
  siRNA target sequence for Tnxb (NM_031176.1,4641-4659).
cgacaaacaaccagaagaa

SEQ ID NO: 570894 - DNA, 19 bp, Mus musculus
  siRNA target sequence for Tnxb (NM_031176.1,4703-4721).
gtgtaacccccaattctgt

SEQ ID NO: 570895 - DNA, 19 bp, Mus musculus
  siRNA target sequence for Tnxb (NM_031176.1,4722-4740).
gagcctctcgtggatagtt

SEQ ID NO: 570896 - DNA, 19 bp, Mus musculus
  siRNA target sequence for Tnxb (NM_031176.1,4851-4869).
ccctgcaagaatatacaaa

SEQ ID NO: 570897 - DNA, 19 bp, Mus musculus
  siRNA target sequence for Tnxb (NM_031176.1,4852-4870).
cctgcaagaatatacaaaa

SEQ ID NO: 570898 - DNA, 19 bp, Mus musculus
  siRNA target sequence for Tnxb (NM_031176.1,4855-4873).
gcaagaatatacaaaatga

SEQ ID NO: 570899 - DNA, 19 bp, Mus musculus
  siRNA target sequence for Tnxb (NM_031176.1,4975-4993).
ccacgactgggggaactaa

SEQ ID NO: 570900 - DNA, 19 bp, Mus musculus
  siRNA target sequence for Tnxb (NM_031176.1,5152-5170).
ccctctcgcaagtacaagt

SEQ ID NO: 570901 - DNA, 19 bp, Mus musculus
  siRNA target sequence for Tnxb (NM_031176.1,5384-5402).
ccagggtggtgccagtaaa

SEQ ID NO: 570902 - DNA, 19 bp, Mus musculus
  siRNA target sequence for Tnxb (NM_031176.1,5410-5428).
gagcggacagccactatca

SEQ ID NO: 570903 - DNA, 19 bp, Mus musculus
  siRNA target sequence for Tnxb (NM_031176.1,5440-5458).
gctggccgcaagtacagat

SEQ ID NO: 570904 - DNA, 19 bp, Mus musculus
  siRNA target sequence for Tnxb (NM_031176.1,5441-5459).
ctggccgcaagtacagatt

SEQ ID NO: 570905 - DNA, 19 bp, Mus musculus
  siRNA target sequence for Tnxb (NM_031176.1,5533-5551).
gctgcggaccacacaaaat

SEQ ID NO: 570906 - DNA, 19 bp, Mus musculus
  siRNA target sequence for Tnxb (NM_031176.1,5728-5746).
gacccaggtcgcaggtata

SEQ ID NO: 570907 - DNA, 19 bp, Mus musculus
  siRNA target sequence for Tnxb (NM_031176.1,5732-5750).
caggtcgcaggtataagct

SEQ ID NO: 570908 - DNA, 19 bp, Mus musculus
  siRNA target sequence for Tnxb (NM_031176.1,5741-5759).
ggtataagctgctactcta

SEQ ID NO: 570909 - DNA, 19 bp, Mus musculus
  siRNA target sequence for Tnxb (NM_031176.1,5780-5798).
gtgtgggtcccctttcagt

SEQ ID NO: 570910 - DNA, 19 bp, Mus musculus
  siRNA target sequence for Tnxb (NM_031176.1,5784-5802).
gggtcccctttcagtcatt

SEQ ID NO: 570911 - DNA, 19 bp, Mus musculus
  siRNA target sequence for Tnxb (NM_031176.1,5806-5824).
gtgaccgaccccagagaaa

SEQ ID NO: 570912 - DNA, 19 bp, Mus musculus
  siRNA target sequence for Tnxb (NM_031176.1,5811-5829).
cgaccccagagaaacaaca

SEQ ID NO: 570913 - DNA, 19 bp, Mus musculus
  siRNA target sequence for Tnxb (NM_031176.1,5814-5832).
ccccagagaaacaacagaa

SEQ ID NO: 570914 - DNA, 19 bp, Mus musculus
  siRNA target sequence for Tnxb (NM_031176.1,6016-6034).
ggtgaccagactgacatta

SEQ ID NO: 570915 - DNA, 19 bp, Mus musculus
  siRNA target sequence for Tnxb (NM_031176.1,6465-6483).
caaagaggagcctactgat

SEQ ID NO: 570916 - DNA, 19 bp, Mus musculus
  siRNA target sequence for Tnxb (NM_031176.1,7890-7908).
ggtcccggaggcacacttt

SEQ ID NO: 570917 - DNA, 19 bp, Mus musculus
  siRNA target sequence for Tnxb (NM_031176.1,7901-7919).
cacactttgaccaattcgt

SEQ ID NO: 570918 - DNA, 19 bp, Mus musculus
  siRNA target sequence for Tnxb (NM_031176.1,9259-9277).
gagccagcccgaaagtaca

SEQ ID NO: 570919 - DNA, 19 bp, Mus musculus
  siRNA target sequence for Tnxb (NM_031176.1,9263-9281).
cagcccgaaagtacaagtt

SEQ ID NO: 570920 - DNA, 19 bp, Mus musculus
  siRNA target sequence for Tnxb (NM_031176.1,9266-9284).
cccgaaagtacaagtttct

SEQ ID NO: 570921 - DNA, 19 bp, Mus musculus
  siRNA target sequence for Tnxb (NM_031176.1,9267-9285).
ccgaaagtacaagtttcta

SEQ ID NO: 570922 - DNA, 19 bp, Mus musculus
  siRNA target sequence for Tnxb (NM_031176.1,9449-9467).
ctttcttagtccagtacaa

SEQ ID NO: 570923 - DNA, 19 bp, Mus musculus
  siRNA target sequence for Tnxb (NM_031176.1,9531-9549).
cagcctggagcccaataga

SEQ ID NO: 570924 - DNA, 19 bp, Mus musculus
  siRNA target sequence for Tnxb (NM_031176.1,9817-9835).
ctacagccaggcaggaaat

SEQ ID NO: 570925 - DNA, 19 bp, Mus musculus
  siRNA target sequence for Tnxb (NM_031176.1,9820-9838).
cagccaggcaggaaataca

SEQ ID NO: 570926 - DNA, 19 bp, Mus musculus
  siRNA target sequence for Tnxb (NM_031176.1,9904-9922).
gcctcagaagttgacatat

SEQ ID NO: 570927 - DNA, 19 bp, Mus musculus
  siRNA target sequence for Tnxb (NM_031176.1,10053-10071).
gtaccaggacacagagaat

SEQ ID NO: 570928 - DNA, 19 bp, Mus musculus
  siRNA target sequence for Tnxb (NM_031176.1,10077-10095).
ccaggccctgcttgttgat

SEQ ID NO: 570929 - DNA, 19 bp, Mus musculus
  siRNA target sequence for Tnxb (NM_031176.1,10132-10150).
cccaaaacttcctacaagt

SEQ ID NO: 570930 - DNA, 19 bp, Mus musculus
  siRNA target sequence for Tnxb (NM_031176.1,10318-10336).
ccgcttggggcctttgact

SEQ ID NO: 570931 - DNA, 19 bp, Mus musculus
  siRNA target sequence for Tnxb (NM_031176.1,10456-10474).
cgtcctgggaccctgtata

SEQ ID NO: 570932 - DNA, 19 bp, Mus musculus
  siRNA target sequence for Tnxb (NM_031176.1,10466-10484).
ccctgtatagccttactct

SEQ ID NO: 570933 - DNA, 19 bp, Mus musculus
  siRNA target sequence for Tnxb (NM_031176.1,10581-10599).
cgacatcggggaaacatca

SEQ ID NO: 570934 - DNA, 19 bp, Mus musculus
  siRNA target sequence for Tnxb (NM_031176.1,10837-10855).
ctacgggcattgaacttga

SEQ ID NO: 570935 - DNA, 19 bp, Mus musculus
  siRNA target sequence for Tnxb (NM_031176.1,11030-11048).
gtctccggggtcctaactt

SEQ ID NO: 570936 - DNA, 19 bp, Mus musculus
  siRNA target sequence for Tnxb (NM_031176.1,11032-11050).
ctccggggtcctaacttca

SEQ ID NO: 570937 - DNA, 19 bp, Mus musculus
  siRNA target sequence for Tnxb (NM_031176.1,11054-11072).
ccccagccagcataacctt

SEQ ID NO: 570938 - DNA, 19 bp, Mus musculus
  siRNA target sequence for Tnxb (NM_031176.1,11320-11338).
cccgtgctcacttccttta

SEQ ID NO: 570939 - DNA, 19 bp, Mus musculus
  siRNA target sequence for Tnxb (NM_031176.1,11439-11457).
ccgtgagcggcctttggat

SEQ ID NO: 570940 - DNA, 19 bp, Mus musculus
  siRNA target sequence for Tnxb (NM_031176.1,11547-11565).
ggagtacgcccatggtttt

SEQ ID NO: 570941 - DNA, 19 bp, Mus musculus
  siRNA target sequence for Tnxb (NM_031176.1,11669-11687).
ccgtgttcgcccagtatga

SEQ ID NO: 570942 - DNA, 19 bp, Mus musculus
  siRNA target sequence for Tnxb (NM_031176.1,11800-11818).
gatcgagaccccaacaact

SEQ ID NO: 570943 - DNA, 19 bp, Mus musculus
  siRNA target sequence for Tnxb (NM_031176.1,11826-11844).
ctcttgcgctgtctcttat

SEQ ID NO: 570944 - DNA, 19 bp, Mus musculus
  siRNA target sequence for Tnxb (NM_031176.1,11959-11977).
gtgcccttcacggaaatga

SEQ ID NO: 570945 - DNA, 19 bp, Mus musculus
  siRNA target sequence for Vtn (NM_011707.1,183-201).
gacgagctttgcacttact

SEQ ID NO: 570946 - DNA, 19 bp, Mus musculus
  siRNA target sequence for Vtn (NM_011707.1,185-203).
cgagctttgcacttactat

SEQ ID NO: 570947 - DNA, 19 bp, Mus musculus
  siRNA target sequence for Vtn (NM_011707.1,208-226).
gctgctgtgccgactacat

SEQ ID NO: 570948 - DNA, 19 bp, Mus musculus
  siRNA target sequence for Vtn (NM_011707.1,268-286).
ctatgccagaggatgatta

SEQ ID NO: 570949 - DNA, 19 bp, Mus musculus
  siRNA target sequence for Vtn (NM_011707.1,273-291).
ccagaggatgattattgga

SEQ ID NO: 570950 - DNA, 19 bp, Mus musculus
  siRNA target sequence for Vtn (NM_011707.1,378-396).
cggacggacggcactctaa

SEQ ID NO: 570951 - DNA, 19 bp, Mus musculus
  siRNA target sequence for Vtn (NM_011707.1,379-397).
ggacggacggcactctaaa

SEQ ID NO: 570952 - DNA, 19 bp, Mus musculus
  siRNA target sequence for Vtn (NM_011707.1,476-494).
gcccgacaccactgatcaa

SEQ ID NO: 570953 - DNA, 19 bp, Mus musculus
  siRNA target sequence for Vtn (NM_011707.1,632-650).
gtaccccaaacttatccaa

SEQ ID NO: 570954 - DNA, 19 bp, Mus musculus
  siRNA target sequence for Vtn (NM_011707.1,684-702).
gccttcactcgcatcaact

SEQ ID NO: 570955 - DNA, 19 bp, Mus musculus
  siRNA target sequence for Vtn (NM_011707.1,705-723).
caggggaagacctacttgt

SEQ ID NO: 570956 - DNA, 19 bp, Mus musculus
  siRNA target sequence for Vtn (NM_011707.1,769-787).
ctggttatccccgaaacat

SEQ ID NO: 570957 - DNA, 19 bp, Mus musculus
  siRNA target sequence for Vtn (NM_011707.1,771-789).
ggttatccccgaaacatct

SEQ ID NO: 570958 - DNA, 19 bp, Mus musculus
  siRNA target sequence for Vtn (NM_011707.1,891-909).
cagtactgggagtacgaat

SEQ ID NO: 570959 - DNA, 19 bp, Mus musculus
  siRNA target sequence for Vtn (NM_011707.1,893-911).
gtactgggagtacgaattt

SEQ ID NO: 570960 - DNA, 19 bp, Mus musculus
  siRNA target sequence for Vtn (NM_011707.1,1238-1256).
gaactcccgtcgttcatca

SEQ ID NO: 570961 - DNA, 19 bp, Mus musculus
  siRNA target sequence for Vtn (NM_011707.1,1246-1264).
gtcgttcatcacgttcaat

SEQ ID NO: 570962 - DNA, 19 bp, Mus musculus
  siRNA target sequence for Vtn (NM_011707.1,1248-1266).
cgttcatcacgttcaatct

SEQ ID NO: 570963 - DNA, 19 bp, Mus musculus
  siRNA target sequence for Vtn (NM_011707.1,1257-1275).
cgttcaatctggttctctt

SEQ ID NO: 570964 - DNA, 19 bp, Mus musculus
  siRNA target sequence for Vtn (NM_011707.1,1303-1321).
gaacctacaacaactatga

SEQ ID NO: 570965 - DNA, 19 bp, Mus musculus
  siRNA target sequence for Vtn (NM_011707.1,1359-1377).
cccattcagagcgtctatt

SEQ ID NO: 570966 - DNA, 19 bp, Mus musculus
  siRNA target sequence for Vtn (NM_011707.1,1360-1378).
ccattcagagcgtctattt

SEQ ID NO: 570967 - DNA, 19 bp, Mus musculus
  siRNA target sequence for Vtn (NM_011707.1,1421-1439).
gcgagtggactctgtgaat

SEQ ID NO: 570968 - DNA, 19 bp, Mus musculus
  siRNA target sequence for Bral2 (NM_177900.3,209-227).
ccaccgcggtggtaccatt

SEQ ID NO: 570969 - DNA, 19 bp, Mus musculus
  siRNA target sequence for Bral2 (NM_177900.3,213-231).
cgcggtggtaccattgtct

SEQ ID NO: 570970 - DNA, 19 bp, Mus musculus
  siRNA target sequence for Bral2 (NM_177900.3,214-232).
gcggtggtaccattgtctt

SEQ ID NO: 570971 - DNA, 19 bp, Mus musculus
  siRNA target sequence for Bral2 (NM_177900.3,417-435).
ctggtcctccgaaatgtca

SEQ ID NO: 570972 - DNA, 19 bp, Mus musculus
  siRNA target sequence for Bral2 (NM_177900.3,544-562).
gcggaggtcgctacaagat

SEQ ID NO: 570973 - DNA, 19 bp, Mus musculus
  siRNA target sequence for Bral2 (NM_177900.3,546-564).
ggaggtcgctacaagatga

SEQ ID NO: 570974 - DNA, 19 bp, Mus musculus
  siRNA target sequence for Bral2 (NM_177900.3,549-567).
ggtcgctacaagatgactt

SEQ ID NO: 570975 - DNA, 19 bp, Mus musculus
  siRNA target sequence for Bral2 (NM_177900.3,592-610).
ccgaacaggatggcatttt

SEQ ID NO: 570976 - DNA, 19 bp, Mus musculus
  siRNA target sequence for Bral2 (NM_177900.3,768-786).
ggcgtgcgcaactatggat

SEQ ID NO: 570977 - DNA, 19 bp, Mus musculus
  siRNA target sequence for Bral2 (NM_177900.3,769-787).
gcgtgcgcaactatggata

SEQ ID NO: 570978 - DNA, 19 bp, Mus musculus
  siRNA target sequence for Bral2 (NM_177900.3,770-788).
cgtgcgcaactatggatat

SEQ ID NO: 570979 - DNA, 19 bp, Mus musculus
  siRNA target sequence for Bral2 (NM_177900.3,773-791).
gcgcaactatggatatcgt

SEQ ID NO: 570980 - DNA, 19 bp, Mus musculus
  siRNA target sequence for Crtl1 (NM_013500.2,368-386).
ctacactcctccagatcaa

SEQ ID NO: 570981 - DNA, 19 bp, Mus musculus
  siRNA target sequence for Crtl1 (NM_013500.2,378-396).
ccagatcaagacagagtta

SEQ ID NO: 570982 - DNA, 19 bp, Mus musculus
  siRNA target sequence for Crtl1 (NM_013500.2,476-494).
cgtgacactgccatgcaaa

SEQ ID NO: 570983 - DNA, 19 bp, Mus musculus
  siRNA target sequence for Crtl1 (NM_013500.2,481-499).
cactgccatgcaaatttta

SEQ ID NO: 570984 - DNA, 19 bp, Mus musculus
  siRNA target sequence for Crtl1 (NM_013500.2,485-503).
gccatgcaaattttatcga

SEQ ID NO: 570985 - DNA, 19 bp, Mus musculus
  siRNA target sequence for Crtl1 (NM_013500.2,520-538).
gctcaggaatccacaaaat

SEQ ID NO: 570986 - DNA, 19 bp, Mus musculus
  siRNA target sequence for Crtl1 (NM_013500.2,531-549).
cacaaaatccgcatcaagt

SEQ ID NO: 570987 - DNA, 19 bp, Mus musculus
  siRNA target sequence for Crtl1 (NM_013500.2,594-612).
gtttccatgggctatcaca

SEQ ID NO: 570988 - DNA, 19 bp, Mus musculus
  siRNA target sequence for Crtl1 (NM_013500.2,629-647).
ctatcaaggtcgagtgttt

SEQ ID NO: 570989 - DNA, 19 bp, Mus musculus
  siRNA target sequence for Crtl1 (NM_013500.2,633-651).
caaggtcgagtgtttctga

SEQ ID NO: 570990 - DNA, 19 bp, Mus musculus
  siRNA target sequence for Crtl1 (NM_013500.2,650-668).
gaagggaggcagtgataat

SEQ ID NO: 570991 - DNA, 19 bp, Mus musculus
  siRNA target sequence for Crtl1 (NM_013500.2,678-696).
ctggtcatcacggatctta

SEQ ID NO: 570992 - DNA, 19 bp, Mus musculus
  siRNA target sequence for Crtl1 (NM_013500.2,761-779).
ggtggcattggagttacaa

SEQ ID NO: 570993 - DNA, 19 bp, Mus musculus
  siRNA target sequence for Crtl1 (NM_013500.2,781-799).
gtgtggtgttcccttactt

SEQ ID NO: 570994 - DNA, 19 bp, Mus musculus
  siRNA target sequence for Crtl1 (NM_013500.2,807-825).
ctgggacgctacaatctta

SEQ ID NO: 570995 - DNA, 19 bp, Mus musculus
  siRNA target sequence for Crtl1 (NM_013500.2,810-828).
ggacgctacaatcttaact

SEQ ID NO: 570996 - DNA, 19 bp, Mus musculus
  siRNA target sequence for Crtl1 (NM_013500.2,1023-1041).
gggttttgggacaaggata

SEQ ID NO: 570997 - DNA, 19 bp, Mus musculus
  siRNA target sequence for Crtl1 (NM_013500.2,1024-1042).
ggttttgggacaaggataa

SEQ ID NO: 570998 - DNA, 19 bp, Mus musculus
  siRNA target sequence for Crtl1 (NM_013500.2,1046-1064).
cagatatgacgttttctgt

SEQ ID NO: 570999 - DNA, 19 bp, Mus musculus
  siRNA target sequence for Crtl1 (NM_013500.2,1048-1066).
gatatgacgttttctgttt

SEQ ID NO: 571000 - DNA, 19 bp, Mus musculus
  siRNA target sequence for Crtl1 (NM_013500.2,1133-1151).
ggtgcaagcttgtctcaat

SEQ ID NO: 571001 - DNA, 19 bp, Mus musculus
  siRNA target sequence for Crtl1 (NM_013500.2,1167-1185).
gcgaaagtgggccagatat

SEQ ID NO: 571002 - DNA, 19 bp, Mus musculus
  siRNA target sequence for Crtl1 (NM_013500.2,1168-1186).
cgaaagtgggccagatatt

SEQ ID NO: 571003 - DNA, 19 bp, Mus musculus
  siRNA target sequence for Crtl1 (NM_013500.2,1244-1262).
cagcgtccgctatcctatt

SEQ ID NO: 571004 - DNA, 19 bp, Mus musculus
  siRNA target sequence for Crtl1 (NM_013500.2,1247-1265).
cgtccgctatcctatttct

SEQ ID NO: 571005 - DNA, 19 bp, Mus musculus
  siRNA target sequence for Crtl1 (NM_013500.2,1295-1313).
ggctgcagtgcgctttgta

SEQ ID NO: 571006 - DNA, 19 bp, Mus musculus
  siRNA target sequence for Crtl1 (NM_013500.2,1311-1329).
gtaggtttcccagataaaa

SEQ ID NO: 571007 - DNA, 19 bp, Mus musculus
  siRNA target sequence for Crtl1 (NM_013500.2,1338-1356).
ctatacggggtctattgct

SEQ ID NO: 571008 - DNA, 19 bp, Mus musculus
  siRNA target sequence for Hmmr (NM_013552.1,163-181).
ggaccagtgtcttttcaga

SEQ ID NO: 571009 - DNA, 19 bp, Mus musculus
  siRNA target sequence for Hmmr (NM_013552.1,208-226).
gagtctcaacaaaatctta

SEQ ID NO: 571010 - DNA, 19 bp, Mus musculus
  siRNA target sequence for Hmmr (NM_013552.1,253-271).
gcttcggctaaaaaagcaa

SEQ ID NO: 571011 - DNA, 19 bp, Mus musculus
  siRNA target sequence for Hmmr (NM_013552.1,254-272).
cttcggctaaaaaagcaaa

SEQ ID NO: 571012 - DNA, 19 bp, Mus musculus
  siRNA target sequence for Hmmr (NM_013552.1,336-354).
gattcgcgctcttttgcaa

SEQ ID NO: 571013 - DNA, 19 bp, Mus musculus
  siRNA target sequence for Hmmr (NM_013552.1,376-394).
cggatccaggacatggaat

SEQ ID NO: 571014 - DNA, 19 bp, Mus musculus
  siRNA target sequence for Hmmr (NM_013552.1,451-469).
ctctctgcgagtaatgctt

SEQ ID NO: 571015 - DNA, 19 bp, Mus musculus
  siRNA target sequence for Hmmr (NM_013552.1,475-493).
gaaaaacggcttactgaat

SEQ ID NO: 571016 - DNA, 19 bp, Mus musculus
  siRNA target sequence for Hmmr (NM_013552.1,481-499).
cggcttactgaattaacca

SEQ ID NO: 571017 - DNA, 19 bp, Mus musculus
  siRNA target sequence for Hmmr (NM_013552.1,500-518).
gagccaacgagctactaaa

SEQ ID NO: 571018 - DNA, 19 bp, Mus musculus
  siRNA target sequence for Hmmr (NM_013552.1,538-556).
ggtcaccaaaagaatatga

SEQ ID NO: 571019 - DNA, 19 bp, Mus musculus
  siRNA target sequence for Hmmr (NM_013552.1,674-692).
cggagtctaagggaaaaat

SEQ ID NO: 571020 - DNA, 19 bp, Mus musculus
  siRNA target sequence for Hmmr (NM_013552.1,675-693).
ggagtctaagggaaaaata

SEQ ID NO: 571021 - DNA, 19 bp, Mus musculus
  siRNA target sequence for Hmmr (NM_013552.1,735-753).
gatcgatgaaaaatgtgaa

SEQ ID NO: 571022 - DNA, 19 bp, Mus musculus
  siRNA target sequence for Hmmr (NM_013552.1,755-773).
cagaaaaactcttagaata

SEQ ID NO: 571023 - DNA, 19 bp, Mus musculus
  siRNA target sequence for Hmmr (NM_013552.1,855-873).
gaaggatcgtgagatttta

SEQ ID NO: 571024 - DNA, 19 bp, Mus musculus
  siRNA target sequence for Hmmr (NM_013552.1,858-876).
ggatcgtgagattttaagt

SEQ ID NO: 571025 - DNA, 19 bp, Mus musculus
  siRNA target sequence for Hmmr (NM_013552.1,862-880).
cgtgagattttaagtctta

SEQ ID NO: 571026 - DNA, 19 bp, Mus musculus
  siRNA target sequence for Hmmr (NM_013552.1,863-881).
gtgagattttaagtcttaa

SEQ ID NO: 571027 - DNA, 19 bp, Mus musculus
  siRNA target sequence for Hmmr (NM_013552.1,973-991).
gtcagcaaggatagagaaa

SEQ ID NO: 571028 - DNA, 19 bp, Mus musculus
  siRNA target sequence for Hmmr (NM_013552.1,1245-1263).
gagtgaaaggctggttaaa

SEQ ID NO: 571029 - DNA, 19 bp, Mus musculus
  siRNA target sequence for Hmmr (NM_013552.1,1247-1265).
gtgaaaggctggttaaaca

SEQ ID NO: 571030 - DNA, 19 bp, Mus musculus
  siRNA target sequence for Hmmr (NM_013552.1,1365-1383).
cgcccaagccatcttgatt

SEQ ID NO: 571031 - DNA, 19 bp, Mus musculus
  siRNA target sequence for Hmmr (NM_013552.1,1380-1398).
gattgcacaagagaagtat

SEQ ID NO: 571032 - DNA, 19 bp, Mus musculus
  siRNA target sequence for Hmmr (NM_013552.1,1684-1702).
gctcagttggaaagctata

SEQ ID NO: 571033 - DNA, 19 bp, Mus musculus
  siRNA target sequence for Hmmr (NM_013552.1,1685-1703).
ctcagttggaaagctataa

SEQ ID NO: 571034 - DNA, 19 bp, Mus musculus
  siRNA target sequence for Hmmr (NM_013552.1,1689-1707).
gttggaaagctataagtca

SEQ ID NO: 571035 - DNA, 19 bp, Mus musculus
  siRNA target sequence for Hmmr (NM_013552.1,1693-1711).
gaaagctataagtcatcaa

SEQ ID NO: 571036 - DNA, 19 bp, Mus musculus
  siRNA target sequence for Hmmr (NM_013552.1,1698-1716).
ctataagtcatcaacactt

SEQ ID NO: 571037 - DNA, 19 bp, Mus musculus
  siRNA target sequence for Hmmr (NM_013552.1,1740-1758).
ggagaatttgactctacaa

SEQ ID NO: 571038 - DNA, 19 bp, Mus musculus
  siRNA target sequence for Hmmr (NM_013552.1,1749-1767).
gactctacaagaaaaagta

SEQ ID NO: 571039 - DNA, 19 bp, Mus musculus
  siRNA target sequence for Hmmr (NM_013552.1,1819-1837).
gagagcacaaatcaagaat

SEQ ID NO: 571040 - DNA, 19 bp, Mus musculus
  siRNA target sequence for Hmmr (NM_013552.1,1840-1858).
gcaaggatggttcaagatt

SEQ ID NO: 571041 - DNA, 19 bp, Mus musculus
  siRNA target sequence for Hmmr (NM_013552.1,1844-1862).
ggatggttcaagatttgca

SEQ ID NO: 571042 - DNA, 19 bp, Mus musculus
  siRNA target sequence for Hmmr (NM_013552.1,1852-1870).
caagatttgcagaacagat

SEQ ID NO: 571043 - DNA, 19 bp, Mus musculus
  siRNA target sequence for Hmmr (NM_013552.1,1860-1878).
gcagaacagatcaacctta

SEQ ID NO: 571044 - DNA, 19 bp, Mus musculus
  siRNA target sequence for Hmmr (NM_013552.1,1954-1972).
caagatgaagactttagga

SEQ ID NO: 571045 - DNA, 19 bp, Mus musculus
  siRNA target sequence for Hmmr (NM_013552.1,2052-2070).
gcgtctcctatatgaagaa

SEQ ID NO: 571046 - DNA, 19 bp, Mus musculus
  siRNA target sequence for Hmmr (NM_013552.1,2056-2074).
ctcctatatgaagaactat

SEQ ID NO: 571047 - DNA, 19 bp, Mus musculus
  siRNA target sequence for Hmmr (NM_013552.1,2068-2086).
gaactatatgaaaaaacta

SEQ ID NO: 571048 - DNA, 19 bp, Mus musculus
  siRNA target sequence for Hmmr (NM_013552.1,2120-2138).
ccgagaaacaggcattgtt

SEQ ID NO: 571049 - DNA, 19 bp, Mus musculus
  siRNA target sequence for Hmmr (NM_013552.1,2153-2171).
caactcaggagcagctaaa

SEQ ID NO: 571050 - DNA, 19 bp, Mus musculus
  siRNA target sequence for Hmmr (NM_013552.1,2204-2222).
gtcaccagaacctaaagca

SEQ ID NO: 571051 - DNA, 19 bp, Mus musculus
  siRNA target sequence for Hmmr (NM_013552.1,2268-2286).
caaatcggaggtgtcaaaa

SEQ ID NO: 571052 - DNA, 19 bp, Mus musculus
  siRNA target sequence for Hmmr (NM_013552.1,2287-2305).
ctccgatctcagcttgtta

SEQ ID NO: 571053 - DNA, 19 bp, Mus musculus
  siRNA target sequence for Hmmr (NM_013552.1,2289-2307).
ccgatctcagcttgttaaa

SEQ ID NO: 571054 - DNA, 19 bp, Mus musculus
  siRNA target sequence for Hmmr (NM_013552.1,2290-2308).
cgatctcagcttgttaaaa

SEQ ID NO: 571055 - DNA, 19 bp, Mus musculus
  siRNA target sequence for Hmmr (NM_013552.1,2375-2393).
cttccaaggctttttgtca

SEQ ID NO: 571056 - DNA, 19 bp, Mus musculus
  siRNA target sequence for Hmmr (NM_013552.1,2392-2410).
catgcatctaaggagaatt

SEQ ID NO: 571057 - DNA, 19 bp, Mus musculus
  siRNA target sequence for Hmmr (NM_013552.1,2395-2413).
gcatctaaggagaatttta

SEQ ID NO: 571058 - DNA, 19 bp, Mus musculus
  siRNA target sequence for Hmmr (NM_013552.1,2403-2421).
ggagaattttactccatta

SEQ ID NO: 571059 - DNA, 19 bp, Mus musculus
  siRNA target sequence for Stab1 (NM_138672.1,155-173).
gcagacggtacggtctaaa

SEQ ID NO: 571060 - DNA, 19 bp, Mus musculus
  siRNA target sequence for Stab1 (NM_138672.1,158-176).
gacggtacggtctaaacgt

SEQ ID NO: 571061 - DNA, 19 bp, Mus musculus
  siRNA target sequence for Stab1 (NM_138672.1,179-197).
cgacatccacaccaagttt

SEQ ID NO: 571062 - DNA, 19 bp, Mus musculus
  siRNA target sequence for Stab1 (NM_138672.1,228-246).
gctatcaggaggcaactat

SEQ ID NO: 571063 - DNA, 19 bp, Mus musculus
  siRNA target sequence for Stab1 (NM_138672.1,253-271).
ggggctggtctcggaattt

SEQ ID NO: 571064 - DNA, 19 bp, Mus musculus
  siRNA target sequence for Stab1 (NM_138672.1,358-376).
ggaaggatgtggttcagaa

SEQ ID NO: 571065 - DNA, 19 bp, Mus musculus
  siRNA target sequence for Stab1 (NM_138672.1,532-550).
gccgagaccccaacagatt

SEQ ID NO: 571066 - DNA, 19 bp, Mus musculus
  siRNA target sequence for Stab1 (NM_138672.1,533-551).
ccgagaccccaacagattt

SEQ ID NO: 571067 - DNA, 19 bp, Mus musculus
  siRNA target sequence for Stab1 (NM_138672.1,553-571).
ggcctgactgccaatcagt

SEQ ID NO: 571068 - DNA, 19 bp, Mus musculus
  siRNA target sequence for Stab1 (NM_138672.1,737-755).
gtgcctgcccggatacact

SEQ ID NO: 571069 - DNA, 19 bp, Mus musculus
  siRNA target sequence for Stab1 (NM_138672.1,851-869).
gtgccagtgcccagagaat

SEQ ID NO: 571070 - DNA, 19 bp, Mus musculus
  siRNA target sequence for Stab1 (NM_138672.1,986-1004).
gtgccgaccaggtatgaca

SEQ ID NO: 571071 - DNA, 19 bp, Mus musculus
  siRNA target sequence for Stab1 (NM_138672.1,993-1011).
ccaggtatgacaagcatta

SEQ ID NO: 571072 - DNA, 19 bp, Mus musculus
  siRNA target sequence for Stab1 (NM_138672.1,994-1012).
caggtatgacaagcattaa

SEQ ID NO: 571073 - DNA, 19 bp, Mus musculus
  siRNA target sequence for Stab1 (NM_138672.1,1102-1120).
ccagctgcgtgtgcaaaaa

SEQ ID NO: 571074 - DNA, 19 bp, Mus musculus
  siRNA target sequence for Stab1 (NM_138672.1,1105-1123).
gctgcgtgtgcaaaaacga

SEQ ID NO: 571075 - DNA, 19 bp, Mus musculus
  siRNA target sequence for Stab1 (NM_138672.1,1144-1162).
cctgctatggacatctact

SEQ ID NO: 571076 - DNA, 19 bp, Mus musculus
  siRNA target sequence for Stab1 (NM_138672.1,1196-1214).
ggtgttcctgcggttaaga

SEQ ID NO: 571077 - DNA, 19 bp, Mus musculus
  siRNA target sequence for Stab1 (NM_138672.1,1239-1257).
ggctgccaggagattctta

SEQ ID NO: 571078 - DNA, 19 bp, Mus musculus
  siRNA target sequence for Stab1 (NM_138672.1,1437-1455).
gaggtcaccatcactttca

SEQ ID NO: 571079 - DNA, 19 bp, Mus musculus
  siRNA target sequence for Stab1 (NM_138672.1,1471-1489).
cctacaagtacgaagatca

SEQ ID NO: 571080 - DNA, 19 bp, Mus musculus
  siRNA target sequence for Stab1 (NM_138672.1,1517-1535).
caactacatcgcagctaat

SEQ ID NO: 571081 - DNA, 19 bp, Mus musculus
  siRNA target sequence for Stab1 (NM_138672.1,1616-1634).
gatacttgcttctacagaa

SEQ ID NO: 571082 - DNA, 19 bp, Mus musculus
  siRNA target sequence for Stab1 (NM_138672.1,1620-1638).
cttgcttctacagaagttt

SEQ ID NO: 571083 - DNA, 19 bp, Mus musculus
  siRNA target sequence for Stab1 (NM_138672.1,1747-1765).
gagatggccgactgatcta

SEQ ID NO: 571084 - DNA, 19 bp, Mus musculus
  siRNA target sequence for Stab1 (NM_138672.1,1752-1770).
ggccgactgatctaccttt

SEQ ID NO: 571085 - DNA, 19 bp, Mus musculus
  siRNA target sequence for Stab1 (NM_138672.1,1753-1771).
gccgactgatctacctttt

SEQ ID NO: 571086 - DNA, 19 bp, Mus musculus
  siRNA target sequence for Stab1 (NM_138672.1,1755-1773).
cgactgatctaccttttca

SEQ ID NO: 571087 - DNA, 19 bp, Mus musculus
  siRNA target sequence for Stab1 (NM_138672.1,1839-1857).
gttgagaagctcatctcta

SEQ ID NO: 571088 - DNA, 19 bp, Mus musculus
  siRNA target sequence for Stab1 (NM_138672.1,1883-1901).
ccaggtcctgactgtgaat

SEQ ID NO: 571089 - DNA, 19 bp, Mus musculus
  siRNA target sequence for Stab1 (NM_138672.1,1889-1907).
cctgactgtgaatatctct

SEQ ID NO: 571090 - DNA, 19 bp, Mus musculus
  siRNA target sequence for Stab1 (NM_138672.1,2015-2033).
caccattttgcctatctta

SEQ ID NO: 571091 - DNA, 19 bp, Mus musculus
  siRNA target sequence for Stab1 (NM_138672.1,2035-2053).
ctaagcactgtgatgaaga

SEQ ID NO: 571092 - DNA, 19 bp, Mus musculus
  siRNA target sequence for Stab1 (NM_138672.1,2116-2134).
ccccaaacagcgtgaaaat

SEQ ID NO: 571093 - DNA, 19 bp, Mus musculus
  siRNA target sequence for Stab1 (NM_138672.1,2119-2137).
caaacagcgtgaaaatgga

SEQ ID NO: 571094 - DNA, 19 bp, Mus musculus
  siRNA target sequence for Stab1 (NM_138672.1,2125-2143).
gcgtgaaaatggatatctt

SEQ ID NO: 571095 - DNA, 19 bp, Mus musculus
  siRNA target sequence for Stab1 (NM_138672.1,2144-2162).
ccccaaggagtgcgtttat

SEQ ID NO: 571096 - DNA, 19 bp, Mus musculus
  siRNA target sequence for Stab1 (NM_138672.1,2145-2163).
cccaaggagtgcgtttata

SEQ ID NO: 571097 - DNA, 19 bp, Mus musculus
  siRNA target sequence for Stab1 (NM_138672.1,2146-2164).
ccaaggagtgcgtttatat

SEQ ID NO: 571098 - DNA, 19 bp, Mus musculus
  siRNA target sequence for Stab1 (NM_138672.1,2179-2197).
ggctcaacgttctgaagaa

SEQ ID NO: 571099 - DNA, 19 bp, Mus musculus
  siRNA target sequence for Stab1 (NM_138672.1,2215-2233).
gcaaccagaccatcacaaa

SEQ ID NO: 571100 - DNA, 19 bp, Mus musculus
  siRNA target sequence for Stab1 (NM_138672.1,2216-2234).
caaccagaccatcacaaaa

SEQ ID NO: 571101 - DNA, 19 bp, Mus musculus
  siRNA target sequence for Stab1 (NM_138672.1,2235-2253).
cgcggttgctgcaaaggat

SEQ ID NO: 571102 - DNA, 19 bp, Mus musculus
  siRNA target sequence for Stab1 (NM_138672.1,2236-2254).
gcggttgctgcaaaggatt

SEQ ID NO: 571103 - DNA, 19 bp, Mus musculus
  siRNA target sequence for Stab1 (NM_138672.1,2237-2255).
cggttgctgcaaaggattt

SEQ ID NO: 571104 - DNA, 19 bp, Mus musculus
  siRNA target sequence for Stab1 (NM_138672.1,2239-2257).
gttgctgcaaaggattttt

SEQ ID NO: 571105 - DNA, 19 bp, Mus musculus
  siRNA target sequence for Stab1 (NM_138672.1,2373-2391).
ggtatcgcctgtcatatct

SEQ ID NO: 571106 - DNA, 19 bp, Mus musculus
  siRNA target sequence for Stab1 (NM_138672.1,2483-2501).
gtgccagcagggtacatgt

SEQ ID NO: 571107 - DNA, 19 bp, Mus musculus
  siRNA target sequence for Stab1 (NM_138672.1,2517-2535).
ggccgattctgcaatgaat

SEQ ID NO: 571108 - DNA, 19 bp, Mus musculus
  siRNA target sequence for Stab1 (NM_138672.1,2620-2638).
gcgtctgccatgatggttt

SEQ ID NO: 571109 - DNA, 19 bp, Mus musculus
  siRNA target sequence for Stab1 (NM_138672.1,2621-2639).
cgtctgccatgatggtttt

SEQ ID NO: 571110 - DNA, 19 bp, Mus musculus
  siRNA target sequence for Stab1 (NM_138672.1,2704-2722).
cagagaacgctgaatgtgt

SEQ ID NO: 571111 - DNA, 19 bp, Mus musculus
  siRNA target sequence for Stab1 (NM_138672.1,3004-3022).
gcacatgccctcctcattt

SEQ ID NO: 571112 - DNA, 19 bp, Mus musculus
  siRNA target sequence for Stab1 (NM_138672.1,3284-3302).
ccggttaaatggtcaacaa

SEQ ID NO: 571113 - DNA, 19 bp, Mus musculus
  siRNA target sequence for Stab1 (NM_138672.1,3286-3304).
ggttaaatggtcaacaagt

SEQ ID NO: 571114 - DNA, 19 bp, Mus musculus
  siRNA target sequence for Stab1 (NM_138672.1,3322-3340).
cgacacgctggcagataca

SEQ ID NO: 571115 - DNA, 19 bp, Mus musculus
  siRNA target sequence for Stab1 (NM_138672.1,3328-3346).
gctggcagatacacaacat

SEQ ID NO: 571116 - DNA, 19 bp, Mus musculus
  siRNA target sequence for Stab1 (NM_138672.1,3403-3421).
ccaatggcatcctacacat

SEQ ID NO: 571117 - DNA, 19 bp, Mus musculus
  siRNA target sequence for Stab1 (NM_138672.1,3473-3491).
gttgctgcagcaactagat

SEQ ID NO: 571118 - DNA, 19 bp, Mus musculus
  siRNA target sequence for Stab1 (NM_138672.1,3476-3494).
gctgcagcaactagatagt

SEQ ID NO: 571119 - DNA, 19 bp, Mus musculus
  siRNA target sequence for Stab1 (NM_138672.1,3575-3593).
catctttgtgcccacaaat

SEQ ID NO: 571120 - DNA, 19 bp, Mus musculus
  siRNA target sequence for Stab1 (NM_138672.1,3603-3621).
gagacccagggcaacaaca

SEQ ID NO: 571121 - DNA, 19 bp, Mus musculus
  siRNA target sequence for Stab1 (NM_138672.1,3733-3751).
ggctggtcttctacaatca

SEQ ID NO: 571122 - DNA, 19 bp, Mus musculus
  siRNA target sequence for Stab1 (NM_138672.1,3759-3777).
cagcctgaggtgaatcaca

SEQ ID NO: 571123 - DNA, 19 bp, Mus musculus
  siRNA target sequence for Stab1 (NM_138672.1,3879-3897).
gaggctcttcgggagaaat

SEQ ID NO: 571124 - DNA, 19 bp, Mus musculus
  siRNA target sequence for Stab1 (NM_138672.1,3882-3900).
gctcttcgggagaaatgca

SEQ ID NO: 571125 - DNA, 19 bp, Mus musculus
  siRNA target sequence for Stab1 (NM_138672.1,3883-3901).
ctcttcgggagaaatgcat

SEQ ID NO: 571126 - DNA, 19 bp, Mus musculus
  siRNA target sequence for Stab1 (NM_138672.1,3885-3903).
cttcgggagaaatgcataa

SEQ ID NO: 571127 - DNA, 19 bp, Mus musculus
  siRNA target sequence for Stab1 (NM_138672.1,3914-3932).
gaaattccgctgtactcaa

SEQ ID NO: 571128 - DNA, 19 bp, Mus musculus
  siRNA target sequence for Stab1 (NM_138672.1,3971-3989).
ctacagatctggattgtct

SEQ ID NO: 571129 - DNA, 19 bp, Mus musculus
  siRNA target sequence for Stab1 (NM_138672.1,4114-4132).
ggcagtgccaagacagatt

SEQ ID NO: 571130 - DNA, 19 bp, Mus musculus
  siRNA target sequence for Stab1 (NM_138672.1,4311-4329).
cgctgtgaccagaaaatca

SEQ ID NO: 571131 - DNA, 19 bp, Mus musculus
  siRNA target sequence for Stab1 (NM_138672.1,4313-4331).
ctgtgaccagaaaatcact

SEQ ID NO: 571132 - DNA, 19 bp, Mus musculus
  siRNA target sequence for Stab1 (NM_138672.1,4335-4353).
catcaatgtcccaagaagt

SEQ ID NO: 571133 - DNA, 19 bp, Mus musculus
  siRNA target sequence for Stab1 (NM_138672.1,4558-4576).
gagagctatgccaggaaat

SEQ ID NO: 571134 - DNA, 19 bp, Mus musculus
  siRNA target sequence for Stab1 (NM_138672.1,4740-4758).
ccttatgctgtgtgcaaaa

SEQ ID NO: 571135 - DNA, 19 bp, Mus musculus
  siRNA target sequence for Stab1 (NM_138672.1,4789-4807).
gtgacgcaacacatactgt

SEQ ID NO: 571136 - DNA, 19 bp, Mus musculus
  siRNA target sequence for Stab1 (NM_138672.1,4845-4863).
gagctcctacggaacaagt

SEQ ID NO: 571137 - DNA, 19 bp, Mus musculus
  siRNA target sequence for Stab1 (NM_138672.1,4847-4865).
gctcctacggaacaagtat

SEQ ID NO: 571138 - DNA, 19 bp, Mus musculus
  siRNA target sequence for Stab1 (NM_138672.1,4910-4928).
gggtgacggacctttcact

SEQ ID NO: 571139 - DNA, 19 bp, Mus musculus
  siRNA target sequence for Stab1 (NM_138672.1,4916-4934).
cggacctttcactgtcttt

SEQ ID NO: 571140 - DNA, 19 bp, Mus musculus
  siRNA target sequence for Stab1 (NM_138672.1,4937-4955).
gccacatgctgacttaata

SEQ ID NO: 571141 - DNA, 19 bp, Mus musculus
  siRNA target sequence for Stab1 (NM_138672.1,4938-4956).
ccacatgctgacttaataa

SEQ ID NO: 571142 - DNA, 19 bp, Mus musculus
  siRNA target sequence for Stab1 (NM_138672.1,4941-4959).
catgctgacttaataagca

SEQ ID NO: 571143 - DNA, 19 bp, Mus musculus
  siRNA target sequence for Stab1 (NM_138672.1,4947-4965).
gacttaataagcaacatgt

SEQ ID NO: 571144 - DNA, 19 bp, Mus musculus
  siRNA target sequence for Stab1 (NM_138672.1,4993-5011).
cccatcgccagcttgtgtt

SEQ ID NO: 571145 - DNA, 19 bp, Mus musculus
  siRNA target sequence for Stab1 (NM_138672.1,4994-5012).
ccatcgccagcttgtgttt

SEQ ID NO: 571146 - DNA, 19 bp, Mus musculus
  siRNA target sequence for Stab1 (NM_138672.1,5058-5076).
ctggaccagggctatatca

SEQ ID NO: 571147 - DNA, 19 bp, Mus musculus
  siRNA target sequence for Stab1 (NM_138672.1,5060-5078).
ggaccagggctatatcact

SEQ ID NO: 571148 - DNA, 19 bp, Mus musculus
  siRNA target sequence for Stab1 (NM_138672.1,5061-5079).
gaccagggctatatcacta

SEQ ID NO: 571149 - DNA, 19 bp, Mus musculus
  siRNA target sequence for Stab1 (NM_138672.1,5113-5131).
gggagggcagcatttatct

SEQ ID NO: 571150 - DNA, 19 bp, Mus musculus
  siRNA target sequence for Stab1 (NM_138672.1,5117-5135).
gggcagcatttatctcaat

SEQ ID NO: 571151 - DNA, 19 bp, Mus musculus
  siRNA target sequence for Stab1 (NM_138672.1,5177-5195).
cggtgtcctgcacttcatt

SEQ ID NO: 571152 - DNA, 19 bp, Mus musculus
  siRNA target sequence for Stab1 (NM_138672.1,5246-5264).
cccaatccctcagagaaat

SEQ ID NO: 571153 - DNA, 19 bp, Mus musculus
  siRNA target sequence for Stab1 (NM_138672.1,5269-5287).
ctgccgctgctgaaagctt

SEQ ID NO: 571154 - DNA, 19 bp, Mus musculus
  siRNA target sequence for Stab1 (NM_138672.1,5284-5302).
gcttcggctacaagatctt

SEQ ID NO: 571155 - DNA, 19 bp, Mus musculus
  siRNA target sequence for Stab1 (NM_138672.1,5400-5418).
gccttgcctcctgatagaa

SEQ ID NO: 571156 - DNA, 19 bp, Mus musculus
  siRNA target sequence for Stab1 (NM_138672.1,5401-5419).
ccttgcctcctgatagaaa

SEQ ID NO: 571157 - DNA, 19 bp, Mus musculus
  siRNA target sequence for Stab1 (NM_138672.1,5461-5479).
ccattttgcggggtcatat

SEQ ID NO: 571158 - DNA, 19 bp, Mus musculus
  siRNA target sequence for Stab1 (NM_138672.1,5578-5596).
ggcctggtgagctcatagt

SEQ ID NO: 571159 - DNA, 19 bp, Mus musculus
  siRNA target sequence for Stab1 (NM_138672.1,5579-5597).
gcctggtgagctcatagta

SEQ ID NO: 571160 - DNA, 19 bp, Mus musculus
  siRNA target sequence for Stab1 (NM_138672.1,5811-5829).
cgtcactactccaagttct

SEQ ID NO: 571161 - DNA, 19 bp, Mus musculus
  siRNA target sequence for Stab1 (NM_138672.1,5839-5857).
cattgcactccatctcaat

SEQ ID NO: 571162 - DNA, 19 bp, Mus musculus
  siRNA target sequence for Stab1 (NM_138672.1,5870-5888).
ctggataccgtctagtttt

SEQ ID NO: 571163 - DNA, 19 bp, Mus musculus
  siRNA target sequence for Stab1 (NM_138672.1,5881-5899).
ctagtttttggaatcgtaa

SEQ ID NO: 571164 - DNA, 19 bp, Mus musculus
  siRNA target sequence for Stab1 (NM_138672.1,5962-5980).
ctggtcactatggcattaa

SEQ ID NO: 571165 - DNA, 19 bp, Mus musculus
  siRNA target sequence for Stab1 (NM_138672.1,5964-5982).
ggtcactatggcattaact

SEQ ID NO: 571166 - DNA, 19 bp, Mus musculus
  siRNA target sequence for Stab1 (NM_138672.1,6028-6046).
gcgtgtgcctggatggtat

SEQ ID NO: 571167 - DNA, 19 bp, Mus musculus
  siRNA target sequence for Stab1 (NM_138672.1,6029-6047).
cgtgtgcctggatggtata

SEQ ID NO: 571168 - DNA, 19 bp, Mus musculus
  siRNA target sequence for Stab1 (NM_138672.1,6032-6050).
gtgcctggatggtatacgt

SEQ ID NO: 571169 - DNA, 19 bp, Mus musculus
  siRNA target sequence for Stab1 (NM_138672.1,6152-6170).
ccaacatggccgttgtgat

SEQ ID NO: 571170 - DNA, 19 bp, Mus musculus
  siRNA target sequence for Stab1 (NM_138672.1,6519-6537).
cacgctgactgcctcaata

SEQ ID NO: 571171 - DNA, 19 bp, Mus musculus
  siRNA target sequence for Stab1 (NM_138672.1,6649-6667).
cttgccacactgatgcttt

SEQ ID NO: 571172 - DNA, 19 bp, Mus musculus
  siRNA target sequence for Stab1 (NM_138672.1,6722-6740).
caccagtggcccttatggt

SEQ ID NO: 571173 - DNA, 19 bp, Mus musculus
  siRNA target sequence for Stab1 (NM_138672.1,6895-6913).
cggcagactgtggtaataa

SEQ ID NO: 571174 - DNA, 19 bp, Mus musculus
  siRNA target sequence for Stab1 (NM_138672.1,6896-6914).
ggcagactgtggtaataat

SEQ ID NO: 571175 - DNA, 19 bp, Mus musculus
  siRNA target sequence for Stab1 (NM_138672.1,6931-6949).
gccttggggtccgtaagaa

SEQ ID NO: 571176 - DNA, 19 bp, Mus musculus
  siRNA target sequence for Stab1 (NM_138672.1,7226-7244).
gagtggcccagatctagaa

SEQ ID NO: 571177 - DNA, 19 bp, Mus musculus
  siRNA target sequence for Stab1 (NM_138672.1,7260-7278).
gccacctttctgagtatca

SEQ ID NO: 571178 - DNA, 19 bp, Mus musculus
  siRNA target sequence for Stab1 (NM_138672.1,7314-7332).
ggtcttagcctcttcataa

SEQ ID NO: 571179 - DNA, 19 bp, Mus musculus
  siRNA target sequence for Stab1 (NM_138672.1,7418-7436).
ggctttcaacggcatcatt

SEQ ID NO: 571180 - DNA, 19 bp, Mus musculus
  siRNA target sequence for Stab1 (NM_138672.1,7500-7518).
ccacctgtggcattaagct

SEQ ID NO: 571181 - DNA, 19 bp, Mus musculus
  siRNA target sequence for Stab1 (NM_138672.1,7520-7538).
gggggttgtggtaacttct

SEQ ID NO: 571182 - DNA, 19 bp, Mus musculus
  siRNA target sequence for Stab1 (NM_138672.1,7616-7634).
ctttcaggcagaagataat

SEQ ID NO: 571183 - DNA, 19 bp, Mus musculus
  siRNA target sequence for Stab1 (NM_138672.1,7707-7725).
ggcagcagtgacatctttt

SEQ ID NO: 571184 - DNA, 19 bp, Mus musculus
  siRNA target sequence for Stab1 (NM_138672.1,7711-7729).
gcagtgacatcttttgtga

SEQ ID NO: 571185 - DNA, 19 bp, Mus musculus
  siRNA target sequence for Tnfaip6 (NM_009398.1,107-125).
ctcacggatggggattcaa

SEQ ID NO: 571186 - DNA, 19 bp, Mus musculus
  siRNA target sequence for Tnfaip6 (NM_009398.1,109-127).
cacggatggggattcaaga

SEQ ID NO: 571187 - DNA, 19 bp, Mus musculus
  siRNA target sequence for Tnfaip6 (NM_009398.1,123-141).
caagaacgggatctttcat

SEQ ID NO: 571188 - DNA, 19 bp, Mus musculus
  siRNA target sequence for Tnfaip6 (NM_009398.1,144-162).
ctccatatggcttgaacaa

SEQ ID NO: 571189 - DNA, 19 bp, Mus musculus
  siRNA target sequence for Tnfaip6 (NM_009398.1,223-241).
gccaaggccgtatgtgaat

SEQ ID NO: 571190 - DNA, 19 bp, Mus musculus
  siRNA target sequence for Tnfaip6 (NM_009398.1,224-242).
ccaaggccgtatgtgaatt

SEQ ID NO: 571191 - DNA, 19 bp, Mus musculus
  siRNA target sequence for Tnfaip6 (NM_009398.1,225-243).
caaggccgtatgtgaattt

SEQ ID NO: 571192 - DNA, 19 bp, Mus musculus
  siRNA target sequence for Tnfaip6 (NM_009398.1,228-246).
ggccgtatgtgaatttgaa

SEQ ID NO: 571193 - DNA, 19 bp, Mus musculus
  siRNA target sequence for Tnfaip6 (NM_009398.1,339-357).
cggataccccattgtgaaa

SEQ ID NO: 571194 - DNA, 19 bp, Mus musculus
  siRNA target sequence for Tnfaip6 (NM_009398.1,389-407).
gtatcatcgattatggaat

SEQ ID NO: 571195 - DNA, 19 bp, Mus musculus
  siRNA target sequence for Tnfaip6 (NM_009398.1,482-500).
cagatccgaagcgaatttt

SEQ ID NO: 571196 - DNA, 19 bp, Mus musculus
  siRNA target sequence for Tnfaip6 (NM_009398.1,484-502).
gatccgaagcgaattttta

SEQ ID NO: 571197 - DNA, 19 bp, Mus musculus
  siRNA target sequence for Tnfaip6 (NM_009398.1,551-569).
ggcacattcggctcaagta

SEQ ID NO: 571198 - DNA, 19 bp, Mus musculus
  siRNA target sequence for Tnfaip6 (NM_009398.1,623-641).
gctgcttggctgactatgt

SEQ ID NO: 571199 - DNA, 19 bp, Mus musculus
  siRNA target sequence for Tnfaip6 (NM_009398.1,626-644).
gcttggctgactatgtaga

SEQ ID NO: 571200 - DNA, 19 bp, Mus musculus
  siRNA target sequence for Tnfaip6 (NM_009398.1,675-693).
ctttgtaggaagatactgt

SEQ ID NO: 571201 - DNA, 19 bp, Mus musculus
  siRNA target sequence for Tnfaip6 (NM_009398.1,714-732).
catcattagcacaggaaat

SEQ ID NO: 571202 - DNA, 19 bp, Mus musculus
  siRNA target sequence for Tnfaip6 (NM_009398.1,779-797).
gcttccagattaaatacgt

SEQ ID NO: 571203 - DNA, 19 bp, Mus musculus
  siRNA target sequence for Tnfaip6 (NM_009398.1,805-823).
gatcctgcatctaaatcca

SEQ ID NO: 571204 - DNA, 19 bp, Mus musculus
  siRNA target sequence for Tnfaip6 (NM_009398.1,822-840).
cagtcaagccaaaaataca

SEQ ID NO: 571205 - DNA, 19 bp, Mus musculus
  siRNA target sequence for Tnfaip6 (NM_009398.1,829-847).
gccaaaaatacaagtacta

SEQ ID NO: 571206 - DNA, 19 bp, Mus musculus
  siRNA target sequence for Tnfaip6 (NM_009398.1,842-860).
gtactactggaaataagaa

SEQ ID NO: 571207 - DNA, 19 bp, Mus musculus
  siRNA target sequence for Tnfaip6 (NM_009398.1,848-866).
ctggaaataagaagttctt

SEQ ID NO: 571208 - DNA, 19 bp, Mus musculus
  siRNA target sequence for Tnfaip6 (NM_009398.1,861-879).
gttcttacctggaaggttt

SEQ ID NO: 571209 - DNA, 19 bp, Mus musculus
  siRNA target sequence for Tnfaip6 (NM_009398.1,871-889).
ggaaggtttagccatctat

SEQ ID NO: 571210 - DNA, 19 bp, Mus musculus
  siRNA target sequence for Xlkd1 (NM_053247.3,109-127).
gttactcctcgcctctatt

SEQ ID NO: 571211 - DNA, 19 bp, Mus musculus
  siRNA target sequence for Xlkd1 (NM_053247.3,113-131).
ctcctcgcctctatttgga

SEQ ID NO: 571212 - DNA, 19 bp, Mus musculus
  siRNA target sequence for Xlkd1 (NM_053247.3,163-181).
cgtgcaagacctttccatt

SEQ ID NO: 571213 - DNA, 19 bp, Mus musculus
  siRNA target sequence for Xlkd1 (NM_053247.3,164-182).
gtgcaagacctttccattt

SEQ ID NO: 571214 - DNA, 19 bp, Mus musculus
  siRNA target sequence for Xlkd1 (NM_053247.3,170-188).
gacctttccatttctacat

SEQ ID NO: 571215 - DNA, 19 bp, Mus musculus
  siRNA target sequence for Xlkd1 (NM_053247.3,302-320).
gtagagtcagcgcagaaat

SEQ ID NO: 571216 - DNA, 19 bp, Mus musculus
  siRNA target sequence for Xlkd1 (NM_053247.3,329-347).
gagacttgcagctatggat

SEQ ID NO: 571217 - DNA, 19 bp, Mus musculus
  siRNA target sequence for Xlkd1 (NM_053247.3,366-384).
ctgtcatccctcggatttt

SEQ ID NO: 571218 - DNA, 19 bp, Mus musculus
  siRNA target sequence for Xlkd1 (NM_053247.3,368-386).
gtcatccctcggattttct

SEQ ID NO: 571219 - DNA, 19 bp, Mus musculus
  siRNA target sequence for Xlkd1 (NM_053247.3,370-388).
catccctcggattttctca

SEQ ID NO: 571220 - DNA, 19 bp, Mus musculus
  siRNA target sequence for Xlkd1 (NM_053247.3,391-409).
ccccaggtgtgggaagaat

SEQ ID NO: 571221 - DNA, 19 bp, Mus musculus
  siRNA target sequence for Xlkd1 (NM_053247.3,437-455).
ccctccagccaaaagttca

SEQ ID NO: 571222 - DNA, 19 bp, Mus musculus
  siRNA target sequence for Xlkd1 (NM_053247.3,458-476).
gcctattgccacaactcat

SEQ ID NO: 571223 - DNA, 19 bp, Mus musculus
  siRNA target sequence for Xlkd1 (NM_053247.3,495-513).
cctgcattccagaaatcgt

SEQ ID NO: 571224 - DNA, 19 bp, Mus musculus
  siRNA target sequence for Xlkd1 (NM_053247.3,527-545).
cccgtgttggacactcaaa

SEQ ID NO: 571225 - DNA, 19 bp, Mus musculus
  siRNA target sequence for Xlkd1 (NM_053247.3,529-547).
cgtgttggacactcaaaca

SEQ ID NO: 571226 - DNA, 19 bp, Mus musculus
  siRNA target sequence for Xlkd1 (NM_053247.3,648-666).
ccatggcacggaagacaaa

SEQ ID NO: 571227 - DNA, 19 bp, Mus musculus
  siRNA target sequence for Xlkd1 (NM_053247.3,649-667).
catggcacggaagacaaaa

SEQ ID NO: 571228 - DNA, 19 bp, Mus musculus
  siRNA target sequence for Xlkd1 (NM_053247.3,654-672).
cacggaagacaaaaaagat

SEQ ID NO: 571229 - DNA, 19 bp, Mus musculus
  siRNA target sequence for Xlkd1 (NM_053247.3,735-753).
caagtggagcagcattcaa

SEQ ID NO: 571230 - DNA, 19 bp, Mus musculus
  siRNA target sequence for Xlkd1 (NM_053247.3,839-857).
gtttgctacgtgaaaaggt

SEQ ID NO: 571231 - DNA, 19 bp, Mus musculus
  siRNA target sequence for Xlkd1 (NM_053247.3,862-880).
gaaggccttccctttcaca

SEQ ID NO: 571232 - DNA, 19 bp, Mus musculus
  siRNA target sequence for Xlkd1 (NM_053247.3,893-911).
cagaaggaaatgatcgaaa

SEQ ID NO: 571233 - DNA, 19 bp, Mus musculus
  siRNA target sequence for Xlkd1 (NM_053247.3,946-964).
caacgctaatgaagaatca

SEQ ID NO: 571234 - DNA, 19 bp, Mus musculus
  siRNA target sequence for Npy1r (NM_010934.1,128-146).
ctataatgcctcagagaat

SEQ ID NO: 571235 - DNA, 19 bp, Mus musculus
  siRNA target sequence for Npy1r (NM_010934.1,255-273).
ctggcattgatcataatca

SEQ ID NO: 571236 - DNA, 19 bp, Mus musculus
  siRNA target sequence for Npy1r (NM_010934.1,360-378).
ctcccgttcacttttgtat

SEQ ID NO: 571237 - DNA, 19 bp, Mus musculus
  siRNA target sequence for Npy1r (NM_010934.1,410-428).
gaccatgtgcaaactgaat

SEQ ID NO: 571238 - DNA, 19 bp, Mus musculus
  siRNA target sequence for Npy1r (NM_010934.1,419-437).
caaactgaatccctttgta

SEQ ID NO: 571239 - DNA, 19 bp, Mus musculus
  siRNA target sequence for Npy1r (NM_010934.1,446-464).
ctccatcacagtatccatt

SEQ ID NO: 571240 - DNA, 19 bp, Mus musculus
  siRNA target sequence for Npy1r (NM_010934.1,489-507).
gaacggcatcagctaatca

SEQ ID NO: 571241 - DNA, 19 bp, Mus musculus
  siRNA target sequence for Npy1r (NM_010934.1,521-539).
gtggagaccaaacaataga

SEQ ID NO: 571242 - DNA, 19 bp, Mus musculus
  siRNA target sequence for Npy1r (NM_010934.1,523-541).
ggagaccaaacaatagaca

SEQ ID NO: 571243 - DNA, 19 bp, Mus musculus
  siRNA target sequence for Npy1r (NM_010934.1,544-562).
cttacataggcattactgt

SEQ ID NO: 571244 - DNA, 19 bp, Mus musculus
  siRNA target sequence for Npy1r (NM_010934.1,594-612).
ccctttgtgatctatcaaa

SEQ ID NO: 571245 - DNA, 19 bp, Mus musculus
  siRNA target sequence for Npy1r (NM_010934.1,619-637).
ccgacgagcccttccaaaa

SEQ ID NO: 571246 - DNA, 19 bp, Mus musculus
  siRNA target sequence for Npy1r (NM_010934.1,620-638).
cgacgagcccttccaaaat

SEQ ID NO: 571247 - DNA, 19 bp, Mus musculus
  siRNA target sequence for Npy1r (NM_010934.1,743-761).
cggcccactctgctttata

SEQ ID NO: 571248 - DNA, 19 bp, Mus musculus
  siRNA target sequence for Npy1r (NM_010934.1,745-763).
gcccactctgctttatatt

SEQ ID NO: 571249 - DNA, 19 bp, Mus musculus
  siRNA target sequence for Npy1r (NM_010934.1,748-766).
cactctgctttatattcat

SEQ ID NO: 571250 - DNA, 19 bp, Mus musculus
  siRNA target sequence for Npy1r (NM_010934.1,764-782).
catatgctacttcaagata

SEQ ID NO: 571251 - DNA, 19 bp, Mus musculus
  siRNA target sequence for Npy1r (NM_010934.1,770-788).
ctacttcaagatatacatt

SEQ ID NO: 571252 - DNA, 19 bp, Mus musculus
  siRNA target sequence for Npy1r (NM_010934.1,779-797).
gatatacattcgcttgaaa

SEQ ID NO: 571253 - DNA, 19 bp, Mus musculus
  siRNA target sequence for Npy1r (NM_010934.1,912-930).
ccccttaccatcttcaaca

SEQ ID NO: 571254 - DNA, 19 bp, Mus musculus
  siRNA target sequence for Npy1r (NM_010934.1,941-959).
ctggaaccaccagatcatt

SEQ ID NO: 571255 - DNA, 19 bp, Mus musculus
  siRNA target sequence for Npy1r (NM_010934.1,961-979).
ccacctgcaaccacaatct

SEQ ID NO: 571256 - DNA, 19 bp, Mus musculus
  siRNA target sequence for Npy1r (NM_010934.1,996-1014).
cacctcaccgccatgatct

SEQ ID NO: 571257 - DNA, 19 bp, Mus musculus
  siRNA target sequence for Npy1r (NM_010934.1,1102-1120).
ggtctcgagacgatgacta

SEQ ID NO: 571258 - DNA, 19 bp, Mus musculus
  siRNA target sequence for Npy1r (NM_010934.1,1122-1140).
gagaccatagccatgtcta

SEQ ID NO: 571259 - DNA, 19 bp, Mus musculus
  siRNA target sequence for Npy1r (NM_010934.1,1179-1197).
gctagcccagtcgcattta

SEQ ID NO: 571260 - DNA, 19 bp, Mus musculus
  siRNA target sequence for Npy1r (NM_010934.1,1180-1198).
ctagcccagtcgcatttaa

SEQ ID NO: 571261 - DNA, 19 bp, Mus musculus
  siRNA target sequence for Npy2r (NM_008731.1,307-325).
gaggcagatgagaatcaaa

SEQ ID NO: 571262 - DNA, 19 bp, Mus musculus
  siRNA target sequence for Npy2r (NM_008731.1,397-415).
gagccggagctcatagaca

SEQ ID NO: 571263 - DNA, 19 bp, Mus musculus
  siRNA target sequence for Npy2r (NM_008731.1,499-517).
gtaatccatgtggtaatca

SEQ ID NO: 571264 - DNA, 19 bp, Mus musculus
  siRNA target sequence for Npy2r (NM_008731.1,508-526).
gtggtaatcaaattcaaga

SEQ ID NO: 571265 - DNA, 19 bp, Mus musculus
  siRNA target sequence for Npy2r (NM_008731.1,531-549).
gcgcacagtaaccaacttt

SEQ ID NO: 571266 - DNA, 19 bp, Mus musculus
  siRNA target sequence for Npy2r (NM_008731.1,532-550).
cgcacagtaaccaactttt

SEQ ID NO: 571267 - DNA, 19 bp, Mus musculus
  siRNA target sequence for Npy2r (NM_008731.1,536-554).
cagtaaccaacttttttat

SEQ ID NO: 571268 - DNA, 19 bp, Mus musculus
  siRNA target sequence for Npy2r (NM_008731.1,562-580).
ctggctgtggcggatcttt

SEQ ID NO: 571269 - DNA, 19 bp, Mus musculus
  siRNA target sequence for Npy2r (NM_008731.1,647-665).
cggtcttgtgccatttggt

SEQ ID NO: 571270 - DNA, 19 bp, Mus musculus
  siRNA target sequence for Npy2r (NM_008731.1,687-705).
ggtacaagtgtccacaata

SEQ ID NO: 571271 - DNA, 19 bp, Mus musculus
  siRNA target sequence for Npy2r (NM_008731.1,688-706).
gtacaagtgtccacaataa

SEQ ID NO: 571272 - DNA, 19 bp, Mus musculus
  siRNA target sequence for Npy2r (NM_008731.1,694-712).
gtgtccacaataactttga

SEQ ID NO: 571273 - DNA, 19 bp, Mus musculus
  siRNA target sequence for Npy2r (NM_008731.1,696-714).
gtccacaataactttgaca

SEQ ID NO: 571274 - DNA, 19 bp, Mus musculus
  siRNA target sequence for Npy2r (NM_008731.1,726-744).
ggaccgccatcgttgcatt

SEQ ID NO: 571275 - DNA, 19 bp, Mus musculus
  siRNA target sequence for Npy2r (NM_008731.1,730-748).
cgccatcgttgcattgtct

SEQ ID NO: 571276 - DNA, 19 bp, Mus musculus
  siRNA target sequence for Npy2r (NM_008731.1,731-749).
gccatcgttgcattgtcta

SEQ ID NO: 571277 - DNA, 19 bp, Mus musculus
  siRNA target sequence for Npy2r (NM_008731.1,850-868).
gaatactccctgattgaga

SEQ ID NO: 571278 - DNA, 19 bp, Mus musculus
  siRNA target sequence for Npy2r (NM_008731.1,958-976).
ctgctcatcctgtacgttt

SEQ ID NO: 571279 - DNA, 19 bp, Mus musculus
  siRNA target sequence for Npy2r (NM_008731.1,978-996).
gcctctgggcatcatatct

SEQ ID NO: 571280 - DNA, 19 bp, Mus musculus
  siRNA target sequence for Npy2r (NM_008731.1,979-997).
cctctgggcatcatatctt

SEQ ID NO: 571281 - DNA, 19 bp, Mus musculus
  siRNA target sequence for Npy2r (NM_008731.1,1046-1064).
gagctgcaagtgaccatta

SEQ ID NO: 571282 - DNA, 19 bp, Mus musculus
  siRNA target sequence for Npy2r (NM_008731.1,1066-1084).
catcagcgaaggcacaaaa

SEQ ID NO: 571283 - DNA, 19 bp, Mus musculus
  siRNA target sequence for Npy2r (NM_008731.1,1069-1087).
cagcgaaggcacaaaatga

SEQ ID NO: 571284 - DNA, 19 bp, Mus musculus
  siRNA target sequence for Npy2r (NM_008731.1,1336-1354).
cactcggaggtgtctatga

SEQ ID NO: 571285 - DNA, 19 bp, Mus musculus
  siRNA target sequence for Npy2r (NM_008731.1,1377-1395).
ggaagtcaaaaagaacaat

SEQ ID NO: 571286 - DNA, 19 bp, Mus musculus
  siRNA target sequence for Npy5r (NM_016708.1,161-179).
gagcattttaacaagacat

SEQ ID NO: 571287 - DNA, 19 bp, Mus musculus
  siRNA target sequence for Npy5r (NM_016708.1,287-305).
ccagtctgggaggactata

SEQ ID NO: 571288 - DNA, 19 bp, Mus musculus
  siRNA target sequence for Npy5r (NM_016708.1,309-327).
gcagcgtagacgacttaca

SEQ ID NO: 571289 - DNA, 19 bp, Mus musculus
  siRNA target sequence for Npy5r (NM_016708.1,310-328).
cagcgtagacgacttacaa

SEQ ID NO: 571290 - DNA, 19 bp, Mus musculus
  siRNA target sequence for Npy5r (NM_016708.1,312-330).
gcgtagacgacttacaata

SEQ ID NO: 571291 - DNA, 19 bp, Mus musculus
  siRNA target sequence for Npy5r (NM_016708.1,314-332).
gtagacgacttacaatact

SEQ ID NO: 571292 - DNA, 19 bp, Mus musculus
  siRNA target sequence for Npy5r (NM_016708.1,334-352).
cctgattgggctctataca

SEQ ID NO: 571293 - DNA, 19 bp, Mus musculus
  siRNA target sequence for Npy5r (NM_016708.1,335-353).
ctgattgggctctatacat

SEQ ID NO: 571294 - DNA, 19 bp, Mus musculus
  siRNA target sequence for Npy5r (NM_016708.1,346-364).
ctatacatttgtaagtctt

SEQ ID NO: 571295 - DNA, 19 bp, Mus musculus
  siRNA target sequence for Npy5r (NM_016708.1,369-387).
gttttatgggaaatctact

SEQ ID NO: 571296 - DNA, 19 bp, Mus musculus
  siRNA target sequence for Npy5r (NM_016708.1,377-395).
ggaaatctacttatcttaa

SEQ ID NO: 571297 - DNA, 19 bp, Mus musculus
  siRNA target sequence for Npy5r (NM_016708.1,391-409).
cttaatggctgttatgaaa

SEQ ID NO: 571298 - DNA, 19 bp, Mus musculus
  siRNA target sequence for Npy5r (NM_016708.1,456-474).
ccttctccgacattttggt

SEQ ID NO: 571299 - DNA, 19 bp, Mus musculus
  siRNA target sequence for Npy5r (NM_016708.1,457-475).
cttctccgacattttggtt

SEQ ID NO: 571300 - DNA, 19 bp, Mus musculus
  siRNA target sequence for Npy5r (NM_016708.1,498-516).
ccctgacctctgtcttgtt

SEQ ID NO: 571301 - DNA, 19 bp, Mus musculus
  siRNA target sequence for Npy5r (NM_016708.1,547-565).
ccatatcatgccattcctt

SEQ ID NO: 571302 - DNA, 19 bp, Mus musculus
  siRNA target sequence for Npy5r (NM_016708.1,572-590).
gtatcagttctggtttcaa

SEQ ID NO: 571303 - DNA, 19 bp, Mus musculus
  siRNA target sequence for Npy5r (NM_016708.1,591-609).
ctctgattttaatatcgat

SEQ ID NO: 571304 - DNA, 19 bp, Mus musculus
  siRNA target sequence for Npy5r (NM_016708.1,621-639).
ggtatcatatgataaagca

SEQ ID NO: 571305 - DNA, 19 bp, Mus musculus
  siRNA target sequence for Npy5r (NM_016708.1,631-649).
gataaagcaccctatatct

SEQ ID NO: 571306 - DNA, 19 bp, Mus musculus
  siRNA target sequence for Npy5r (NM_016708.1,637-655).
gcaccctatatctaacaat

SEQ ID NO: 571307 - DNA, 19 bp, Mus musculus
  siRNA target sequence for Npy5r (NM_016708.1,652-670).
caatttaacagcaaaccat

SEQ ID NO: 571308 - DNA, 19 bp, Mus musculus
  siRNA target sequence for Npy5r (NM_016708.1,671-689).
ggctacttcctgatagcta

SEQ ID NO: 571309 - DNA, 19 bp, Mus musculus
  siRNA target sequence for Npy5r (NM_016708.1,763-781).
ctttggctcagcattgcta

SEQ ID NO: 571310 - DNA, 19 bp, Mus musculus
  siRNA target sequence for Npy5r (NM_016708.1,805-823).
gtcatggccctctgattca

SEQ ID NO: 571311 - DNA, 19 bp, Mus musculus
  siRNA target sequence for Npy5r (NM_016708.1,812-830).
ccctctgattcatacagaa

SEQ ID NO: 571312 - DNA, 19 bp, Mus musculus
  siRNA target sequence for Npy5r (NM_016708.1,862-880).
gtatatcctgcctctagta

SEQ ID NO: 571313 - DNA, 19 bp, Mus musculus
  siRNA target sequence for Npy5r (NM_016708.1,871-889).
gcctctagtatgtttaaca

SEQ ID NO: 571314 - DNA, 19 bp, Mus musculus
  siRNA target sequence for Npy5r (NM_016708.1,926-944).
ggattgtcccacaaagaaa

SEQ ID NO: 571315 - DNA, 19 bp, Mus musculus
  siRNA target sequence for Npy5r (NM_016708.1,927-945).
gattgtcccacaaagaaaa

SEQ ID NO: 571316 - DNA, 19 bp, Mus musculus
  siRNA target sequence for Npy5r (NM_016708.1,967-985).
gatcaacttaactctacat

SEQ ID NO: 571317 - DNA, 19 bp, Mus musculus
  siRNA target sequence for Npy5r (NM_016708.1,1016-1034).
ccccccagcactcaaaagt

SEQ ID NO: 571318 - DNA, 19 bp, Mus musculus
  siRNA target sequence for Npy5r (NM_016708.1,1171-1189).
gtcaccatccagtaaggtt

SEQ ID NO: 571319 - DNA, 19 bp, Mus musculus
  siRNA target sequence for Npy5r (NM_016708.1,1173-1191).
caccatccagtaaggttat

SEQ ID NO: 571320 - DNA, 19 bp, Mus musculus
  siRNA target sequence for Npy5r (NM_016708.1,1261-1279).
gcgttccctcacgagaata

SEQ ID NO: 571321 - DNA, 19 bp, Mus musculus
  siRNA target sequence for Npy5r (NM_016708.1,1262-1280).
cgttccctcacgagaataa

SEQ ID NO: 571322 - DNA, 19 bp, Mus musculus
  siRNA target sequence for Npy5r (NM_016708.1,1266-1284).
ccctcacgagaataaagaa

SEQ ID NO: 571323 - DNA, 19 bp, Mus musculus
  siRNA target sequence for Npy5r (NM_016708.1,1287-1305).
gatctcgcagtgttttcta

SEQ ID NO: 571324 - DNA, 19 bp, Mus musculus
  siRNA target sequence for Npy5r (NM_016708.1,1364-1382).
cacgtggtgaccgatttca

SEQ ID NO: 571325 - DNA, 19 bp, Mus musculus
  siRNA target sequence for Npy5r (NM_016708.1,1366-1384).
cgtggtgaccgatttcaat

SEQ ID NO: 571326 - DNA, 19 bp, Mus musculus
  siRNA target sequence for Npy5r (NM_016708.1,1374-1392).
ccgatttcaatgataacct

SEQ ID NO: 571327 - DNA, 19 bp, Mus musculus
  siRNA target sequence for Npy5r (NM_016708.1,1423-1441).
ctgcatctgtcacttgtta

SEQ ID NO: 571328 - DNA, 19 bp, Mus musculus
  siRNA target sequence for Npy5r (NM_016708.1,1433-1451).
cacttgttaggcatgatgt

SEQ ID NO: 571329 - DNA, 19 bp, Mus musculus
  siRNA target sequence for Npy5r (NM_016708.1,1468-1486).
gatcttatatggattcctt

SEQ ID NO: 571330 - DNA, 19 bp, Mus musculus
  siRNA target sequence for Npy5r (NM_016708.1,1471-1489).
cttatatggattccttaat

SEQ ID NO: 571331 - DNA, 19 bp, Mus musculus
  siRNA target sequence for Npy5r (NM_016708.1,1478-1496).
ggattccttaataatggta

SEQ ID NO: 571332 - DNA, 19 bp, Mus musculus
  siRNA target sequence for Npy5r (NM_016708.1,1479-1497).
gattccttaataatggtat

SEQ ID NO: 571333 - DNA, 19 bp, Mus musculus
  siRNA target sequence for Npy5r (NM_016708.1,1483-1501).
ccttaataatggtatcaaa

SEQ ID NO: 571334 - DNA, 19 bp, Mus musculus
  siRNA target sequence for Npy6r (NM_010935.2,400-418).
ccagccaacacctaataaa

SEQ ID NO: 571335 - DNA, 19 bp, Mus musculus
  siRNA target sequence for Npy6r (NM_010935.2,401-419).
cagccaacacctaataaaa

SEQ ID NO: 571336 - DNA, 19 bp, Mus musculus
  siRNA target sequence for Npy6r (NM_010935.2,404-422).
ccaacacctaataaaacca

SEQ ID NO: 571337 - DNA, 19 bp, Mus musculus
  siRNA target sequence for Npy6r (NM_010935.2,432-450).
gcaacaactcggcattttt

SEQ ID NO: 571338 - DNA, 19 bp, Mus musculus
  siRNA target sequence for Npy6r (NM_010935.2,473-491).
ccttttctagccatactct

SEQ ID NO: 571339 - DNA, 19 bp, Mus musculus
  siRNA target sequence for Npy6r (NM_010935.2,484-502).
catactcttgctactcata

SEQ ID NO: 571340 - DNA, 19 bp, Mus musculus
  siRNA target sequence for Npy6r (NM_010935.2,488-506).
ctcttgctactcatagcat

SEQ ID NO: 571341 - DNA, 19 bp, Mus musculus
  siRNA target sequence for Npy6r (NM_010935.2,490-508).
cttgctactcatagcatat

SEQ ID NO: 571342 - DNA, 19 bp, Mus musculus
  siRNA target sequence for Npy6r (NM_010935.2,504-522).
catatactgtgatcctaat

SEQ ID NO: 571343 - DNA, 19 bp, Mus musculus
  siRNA target sequence for Npy6r (NM_010935.2,536-554).
ggaaacctctctcttatca

SEQ ID NO: 571344 - DNA, 19 bp, Mus musculus
  siRNA target sequence for Npy6r (NM_010935.2,717-735).
cttcctacgtgcaaagtgt

SEQ ID NO: 571345 - DNA, 19 bp, Mus musculus
  siRNA target sequence for Npy6r (NM_010935.2,769-787).
gattgctattgaacgatat

SEQ ID NO: 571346 - DNA, 19 bp, Mus musculus
  siRNA target sequence for Npy6r (NM_010935.2,782-800).
cgatatcagctgattgtga

SEQ ID NO: 571347 - DNA, 19 bp, Mus musculus
  siRNA target sequence for Npy6r (NM_010935.2,783-801).
gatatcagctgattgtgaa

SEQ ID NO: 571348 - DNA, 19 bp, Mus musculus
  siRNA target sequence for Npy6r (NM_010935.2,933-951).
ctctccctactgacatcta

SEQ ID NO: 571349 - DNA, 19 bp, Mus musculus
  siRNA target sequence for Npy6r (NM_010935.2,935-953).
ctccctactgacatctaca

SEQ ID NO: 571350 - DNA, 19 bp, Mus musculus
  siRNA target sequence for Npy6r (NM_010935.2,992-1010).
ctgaaccaactcctctttt

SEQ ID NO: 571351 - DNA, 19 bp, Mus musculus
  siRNA target sequence for Npy6r (NM_010935.2,1003-1021).
cctcttttctacatcatta

SEQ ID NO: 571352 - DNA, 19 bp, Mus musculus
  siRNA target sequence for Npy6r (NM_010935.2,1011-1029).
ctacatcattatttatgct

SEQ ID NO: 571353 - DNA, 19 bp, Mus musculus
  siRNA target sequence for Npy6r (NM_010935.2,1046-1064).
ctgggtttcattcttatct

SEQ ID NO: 571354 - DNA, 19 bp, Mus musculus
  siRNA target sequence for Npy6r (NM_010935.2,1082-1100).
ctctgcctccgaaaaagaa

SEQ ID NO: 571355 - DNA, 19 bp, Mus musculus
  siRNA target sequence for Npy6r (NM_010935.2,1155-1173).
gggtaaatgtgatgttgat

SEQ ID NO: 571356 - DNA, 19 bp, Mus musculus
  siRNA target sequence for Npy6r (NM_010935.2,1156-1174).
ggtaaatgtgatgttgatt

SEQ ID NO: 571357 - DNA, 19 bp, Mus musculus
  siRNA target sequence for Npy6r (NM_010935.2,1177-1195).
catcgtagtgacttttgga

SEQ ID NO: 571358 - DNA, 19 bp, Mus musculus
  siRNA target sequence for Npy6r (NM_010935.2,1228-1246).
catcttcgactggtatcat

SEQ ID NO: 571359 - DNA, 19 bp, Mus musculus
  siRNA target sequence for Npy6r (NM_010935.2,1263-1281).
gccaccacgacctggtatt

SEQ ID NO: 571360 - DNA, 19 bp, Mus musculus
  siRNA target sequence for Npy6r (NM_010935.2,1291-1309).
ccacttgattgctatggtt

SEQ ID NO: 571361 - DNA, 19 bp, Mus musculus
  siRNA target sequence for Npy6r (NM_010935.2,1337-1355).
ggatttctcaacaaaaact

SEQ ID NO: 571362 - DNA, 19 bp, Mus musculus
  siRNA target sequence for Npy6r (NM_010935.2,1363-1381).
ggatctaatgatgcttatt

SEQ ID NO: 571363 - DNA, 19 bp, Mus musculus
  siRNA target sequence for Npy6r (NM_010935.2,1455-1473).
ccaagggatcattaaaact

SEQ ID NO: 571364 - DNA, 19 bp, Mus musculus
  siRNA target sequence for Ppyr1 (NM_008919.2,328-346).
gatccctacagggtaagaa

SEQ ID NO: 571365 - DNA, 19 bp, Mus musculus
  siRNA target sequence for Ppyr1 (NM_008919.2,358-376).
cattggattccccctataa

SEQ ID NO: 571366 - DNA, 19 bp, Mus musculus
  siRNA target sequence for Ppyr1 (NM_008919.2,463-481).
gaaacctctgcttgatatt

SEQ ID NO: 571367 - DNA, 19 bp, Mus musculus
  siRNA target sequence for Ppyr1 (NM_008919.2,589-607).
cctacaccatcatggatta

SEQ ID NO: 571368 - DNA, 19 bp, Mus musculus
  siRNA target sequence for Ppyr1 (NM_008919.2,707-725).
gcaccagctcattatcaat

SEQ ID NO: 571369 - DNA, 19 bp, Mus musculus
  siRNA target sequence for Ppyr1 (NM_008919.2,711-729).
cagctcattatcaatccaa

SEQ ID NO: 571370 - DNA, 19 bp, Mus musculus
  siRNA target sequence for Ppyr1 (NM_008919.2,782-800).
gttcgtctcttgtttcctt

SEQ ID NO: 571371 - DNA, 19 bp, Mus musculus
  siRNA target sequence for Ppyr1 (NM_008919.2,845-863).
ctacaaccactctaaggtt

SEQ ID NO: 571372 - DNA, 19 bp, Mus musculus
  siRNA target sequence for Ppyr1 (NM_008919.2,915-933).
caccaccgtctcatctata

SEQ ID NO: 571373 - DNA, 19 bp, Mus musculus
  siRNA target sequence for Ppyr1 (NM_008919.2,918-936).
caccgtctcatctatacca

SEQ ID NO: 571374 - DNA, 19 bp, Mus musculus
  siRNA target sequence for Ppyr1 (NM_008919.2,1390-1408).
ggatgggtagcaagtctaa

SEQ ID NO: 571375 - DNA, 19 bp, Mus musculus
  siRNA target sequence for Ppyr1 (NM_008919.2,1395-1413).
ggtagcaagtctaacttca

SEQ ID NO: 571376 - DNA, 19 bp, Mus musculus
  siRNA target sequence for Gpr66 (NM_010341.1,8-26).
gcaatatcagtgagttcaa

SEQ ID NO: 571377 - DNA, 19 bp, Mus musculus
  siRNA target sequence for Gpr66 (NM_010341.1,21-39).
gttcaagtggccctatcaa

SEQ ID NO: 571378 - DNA, 19 bp, Mus musculus
  siRNA target sequence for Gpr66 (NM_010341.1,206-224).
gcacgcccaccaacttcta

SEQ ID NO: 571379 - DNA, 19 bp, Mus musculus
  siRNA target sequence for Gpr66 (NM_010341.1,340-358).
cgaatactgctcttagaga

SEQ ID NO: 571380 - DNA, 19 bp, Mus musculus
  siRNA target sequence for Gpr66 (NM_010341.1,528-546).
gcatggcctcagtcaacta

SEQ ID NO: 571381 - DNA, 19 bp, Mus musculus
  siRNA target sequence for Gpr66 (NM_010341.1,529-547).
catggcctcagtcaactaa

SEQ ID NO: 571382 - DNA, 19 bp, Mus musculus
  siRNA target sequence for Gpr66 (NM_010341.1,567-585).
ggtgcccgactcagctata

SEQ ID NO: 571383 - DNA, 19 bp, Mus musculus
  siRNA target sequence for Gpr66 (NM_010341.1,570-588).
gcccgactcagctatatgt

SEQ ID NO: 571384 - DNA, 19 bp, Mus musculus
  siRNA target sequence for Gpr66 (NM_010341.1,571-589).
cccgactcagctatatgtt

SEQ ID NO: 571385 - DNA, 19 bp, Mus musculus
  siRNA target sequence for Gpr66 (NM_010341.1,598-616).
ggtcccatggacttctaca

SEQ ID NO: 571386 - DNA, 19 bp, Mus musculus
  siRNA target sequence for Gpr66 (NM_010341.1,599-617).
gtcccatggacttctacaa

SEQ ID NO: 571387 - DNA, 19 bp, Mus musculus
  siRNA target sequence for Gpr66 (NM_010341.1,632-650).
ctaccgcactgctcttctt

SEQ ID NO: 571388 - DNA, 19 bp, Mus musculus
  siRNA target sequence for Gpr66 (NM_010341.1,768-786).
gacctcccacagaaggatt

SEQ ID NO: 571389 - DNA, 19 bp, Mus musculus
  siRNA target sequence for Gpr66 (NM_010341.1,871-889).
catgctgaccgtatcatgt

SEQ ID NO: 571390 - DNA, 19 bp, Mus musculus
  siRNA target sequence for Gpr66 (NM_010341.1,1161-1179).
cgaacctctggctgtgaat

SEQ ID NO: 571391 - DNA, 19 bp, Mus musculus
  siRNA target sequence for Nmu2r (NM_153079.2,139-157).
gattctctcatgaagtact

SEQ ID NO: 571392 - DNA, 19 bp, Mus musculus
  siRNA target sequence for Nmu2r (NM_153079.2,145-163).
ctcatgaagtacttgaaca

SEQ ID NO: 571393 - DNA, 19 bp, Mus musculus
  siRNA target sequence for Nmu2r (NM_153079.2,255-273).
gggggtgataggcaatctt

SEQ ID NO: 571394 - DNA, 19 bp, Mus musculus
  siRNA target sequence for Nmu2r (NM_153079.2,257-275).
gggtgataggcaatcttct

SEQ ID NO: 571395 - DNA, 19 bp, Mus musculus
  siRNA target sequence for Nmu2r (NM_153079.2,285-303).
ggtgattgcccgacatcaa

SEQ ID NO: 571396 - DNA, 19 bp, Mus musculus
  siRNA target sequence for Nmu2r (NM_153079.2,286-304).
gtgattgcccgacatcaaa

SEQ ID NO: 571397 - DNA, 19 bp, Mus musculus
  siRNA target sequence for Nmu2r (NM_153079.2,288-306).
gattgcccgacatcaaact

SEQ ID NO: 571398 - DNA, 19 bp, Mus musculus
  siRNA target sequence for Nmu2r (NM_153079.2,292-310).
gcccgacatcaaactttga

SEQ ID NO: 571399 - DNA, 19 bp, Mus musculus
  siRNA target sequence for Nmu2r (NM_153079.2,358-376).
ctggtcctgctcttaggta

SEQ ID NO: 571400 - DNA, 19 bp, Mus musculus
  siRNA target sequence for Nmu2r (NM_153079.2,393-411).
cgagttgtggcacaattat

SEQ ID NO: 571401 - DNA, 19 bp, Mus musculus
  siRNA target sequence for Nmu2r (NM_153079.2,427-445).
ccggtgggatgctacttca

SEQ ID NO: 571402 - DNA, 19 bp, Mus musculus
  siRNA target sequence for Nmu2r (NM_153079.2,428-446).
cggtgggatgctacttcaa

SEQ ID NO: 571403 - DNA, 19 bp, Mus musculus
  siRNA target sequence for Nmu2r (NM_153079.2,488-506).
gtgtcaccacggttagcat

SEQ ID NO: 571404 - DNA, 19 bp, Mus musculus
  siRNA target sequence for Nmu2r (NM_153079.2,706-724).
cccatatgggtgtataact

SEQ ID NO: 571405 - DNA, 19 bp, Mus musculus
  siRNA target sequence for Nmu2r (NM_153079.2,713-731).
gggtgtataacttcatcat

SEQ ID NO: 571406 - DNA, 19 bp, Mus musculus
  siRNA target sequence for Nmu2r (NM_153079.2,774-792).
catcagcgtcctctactat

SEQ ID NO: 571407 - DNA, 19 bp, Mus musculus
  siRNA target sequence for Nmu2r (NM_153079.2,779-797).
gcgtcctctactatctcat

SEQ ID NO: 571408 - DNA, 19 bp, Mus musculus
  siRNA target sequence for Nmu2r (NM_153079.2,810-828).
gaagagagatgaatctctt

SEQ ID NO: 571409 - DNA, 19 bp, Mus musculus
  siRNA target sequence for Nmu2r (NM_153079.2,826-844).
cttgaggcagacaaagtga

SEQ ID NO: 571410 - DNA, 19 bp, Mus musculus
  siRNA target sequence for Nmu2r (NM_153079.2,841-859).
gtgactgtgaatattcaca

SEQ ID NO: 571411 - DNA, 19 bp, Mus musculus
  siRNA target sequence for Nmu2r (NM_153079.2,1008-1026).
cgtggtatcaggtgtcttt

SEQ ID NO: 571412 - DNA, 19 bp, Mus musculus
  siRNA target sequence for Nmu2r (NM_153079.2,1041-1059).
cgctgtcaaccccattata

SEQ ID NO: 571413 - DNA, 19 bp, Mus musculus
  siRNA target sequence for Nmu2r (NM_153079.2,1042-1060).
gctgtcaaccccattatat

SEQ ID NO: 571414 - DNA, 19 bp, Mus musculus
  siRNA target sequence for Nmu2r (NM_153079.2,1156-1174).
ccagcccagaaggttatct

SEQ ID NO: 571415 - DNA, 19 bp, Mus musculus
  siRNA target sequence for Nmu2r (NM_153079.2,1162-1180).
cagaaggttatcttcttga

SEQ ID NO: 571416 - DNA, 19 bp, Mus musculus
  siRNA target sequence for Nmu2r (NM_153079.2,1265-1283).
ccgtcccctgtgttgaaga

SEQ ID NO: 571417 - DNA, 19 bp, Mus musculus
  siRNA target sequence for Gpr74 (NM_133192.2,121-139).
gcgagaaatgggactcaaa

SEQ ID NO: 571418 - DNA, 19 bp, Mus musculus
  siRNA target sequence for Gpr74 (NM_133192.2,161-179).
catctggagtggcaatgat

SEQ ID NO: 571419 - DNA, 19 bp, Mus musculus
  siRNA target sequence for Gpr74 (NM_133192.2,164-182).
ctggagtggcaatgataca

SEQ ID NO: 571420 - DNA, 19 bp, Mus musculus
  siRNA target sequence for Gpr74 (NM_133192.2,186-204).
catcactggtattcagata

SEQ ID NO: 571421 - DNA, 19 bp, Mus musculus
  siRNA target sequence for Gpr74 (NM_133192.2,301-319).
gaaatactgtcgtttgctt

SEQ ID NO: 571422 - DNA, 19 bp, Mus musculus
  siRNA target sequence for Gpr74 (NM_133192.2,311-329).
cgtttgctttattgtgata

SEQ ID NO: 571423 - DNA, 19 bp, Mus musculus
  siRNA target sequence for Gpr74 (NM_133192.2,312-330).
gtttgctttattgtgataa

SEQ ID NO: 571424 - DNA, 19 bp, Mus musculus
  siRNA target sequence for Gpr74 (NM_133192.2,316-334).
gctttattgtgataaggaa

SEQ ID NO: 571425 - DNA, 19 bp, Mus musculus
  siRNA target sequence for Gpr74 (NM_133192.2,317-335).
ctttattgtgataaggaat

SEQ ID NO: 571426 - DNA, 19 bp, Mus musculus
  siRNA target sequence for Gpr74 (NM_133192.2,345-363).
cacacagtcactaatttct

SEQ ID NO: 571427 - DNA, 19 bp, Mus musculus
  siRNA target sequence for Gpr74 (NM_133192.2,393-411).
ctggttggaatattctgta

SEQ ID NO: 571428 - DNA, 19 bp, Mus musculus
  siRNA target sequence for Gpr74 (NM_133192.2,482-500).
gctggtgcaagggatatca

SEQ ID NO: 571429 - DNA, 19 bp, Mus musculus
  siRNA target sequence for Gpr74 (NM_133192.2,485-503).
ggtgcaagggatatcagtt

SEQ ID NO: 571430 - DNA, 19 bp, Mus musculus
  siRNA target sequence for Gpr74 (NM_133192.2,594-612).
gcctttgtcacgattgtga

SEQ ID NO: 571431 - DNA, 19 bp, Mus musculus
  siRNA target sequence for Gpr74 (NM_133192.2,595-613).
cctttgtcacgattgtgat

SEQ ID NO: 571432 - DNA, 19 bp, Mus musculus
  siRNA target sequence for Gpr74 (NM_133192.2,646-664).
catctgcaataatgttaca

SEQ ID NO: 571433 - DNA, 19 bp, Mus musculus
  siRNA target sequence for Gpr74 (NM_133192.2,652-670).
caataatgttacatgtaca

SEQ ID NO: 571434 - DNA, 19 bp, Mus musculus
  siRNA target sequence for Gpr74 (NM_133192.2,659-677).
gttacatgtacaagaagaa

SEQ ID NO: 571435 - DNA, 19 bp, Mus musculus
  siRNA target sequence for Gpr74 (NM_133192.2,756-774).
gaaatgaggaggatctata

SEQ ID NO: 571436 - DNA, 19 bp, Mus musculus
  siRNA target sequence for Gpr74 (NM_133192.2,770-788).
ctataccacggtgctattt

SEQ ID NO: 571437 - DNA, 19 bp, Mus musculus
  siRNA target sequence for Gpr74 (NM_133192.2,810-828).
ctctcactcattgttatca

SEQ ID NO: 571438 - DNA, 19 bp, Mus musculus
  siRNA target sequence for Gpr74 (NM_133192.2,995-1013).
gatgctctcagactatact

SEQ ID NO: 571439 - DNA, 19 bp, Mus musculus
  siRNA target sequence for Gpr74 (NM_133192.2,1024-1042).
ctaacaaactgcgtatcat

SEQ ID NO: 571440 - DNA, 19 bp, Mus musculus
  siRNA target sequence for Gpr74 (NM_133192.2,1090-1108).
gcagtgtcaaccctattat

SEQ ID NO: 571441 - DNA, 19 bp, Mus musculus
  siRNA target sequence for Gpr74 (NM_133192.2,1091-1109).
cagtgtcaaccctattatt

SEQ ID NO: 571442 - DNA, 19 bp, Mus musculus
  siRNA target sequence for Gpr74 (NM_133192.2,1102-1120).
ctattatttatggattctt

SEQ ID NO: 571443 - DNA, 19 bp, Mus musculus
  siRNA target sequence for Gpr74 (NM_133192.2,1125-1143).
gaaaattttcgcaatggtt

SEQ ID NO: 571444 - DNA, 19 bp, Mus musculus
  siRNA target sequence for Gpr74 (NM_133192.2,1202-1220).
gagagcgaaacgcaacata

SEQ ID NO: 571445 - DNA, 19 bp, Mus musculus
  siRNA target sequence for Gpr74 (NM_133192.2,1204-1222).
gagcgaaacgcaacatagt

SEQ ID NO: 571446 - DNA, 19 bp, Mus musculus
  siRNA target sequence for Gpr74 (NM_133192.2,1206-1224).
gcgaaacgcaacatagtca

SEQ ID NO: 571447 - DNA, 19 bp, Mus musculus
  siRNA target sequence for Gpr74 (NM_133192.2,1207-1225).
cgaaacgcaacatagtcat

SEQ ID NO: 571448 - DNA, 19 bp, Mus musculus
  siRNA target sequence for Gpr74 (NM_133192.2,1208-1226).
gaaacgcaacatagtcata

SEQ ID NO: 571449 - DNA, 19 bp, Mus musculus
  siRNA target sequence for Gpr74 (NM_133192.2,1313-1331).
cacacaggaatccttgata

SEQ ID NO: 571450 - DNA, 19 bp, Mus musculus
  siRNA target sequence for Gpr74 (NM_133192.2,1340-1358).
gggagaagctactaacagt

SEQ ID NO: 571451 - DNA, 19 bp, Mus musculus
  siRNA target sequence for Gpr74 (NM_133192.2,1341-1359).
ggagaagctactaacagta

SEQ ID NO: 571452 - DNA, 19 bp, Mus musculus
  siRNA target sequence for Sstr1 (NM_009216.2,588-606).
cagggtagcgccattctca

SEQ ID NO: 571453 - DNA, 19 bp, Mus musculus
  siRNA target sequence for Sstr1 (NM_009216.2,603-621).
ctcatctctttcatctact

SEQ ID NO: 571454 - DNA, 19 bp, Mus musculus
  siRNA target sequence for Sstr1 (NM_009216.2,639-657).
ggactgtgtgggaactcta

SEQ ID NO: 571455 - DNA, 19 bp, Mus musculus
  siRNA target sequence for Sstr1 (NM_009216.2,829-847).
gcgtggatgcggtcaacat

SEQ ID NO: 571456 - DNA, 19 bp, Mus musculus
  siRNA target sequence for Sstr1 (NM_009216.2,831-849).
gtggatgcggtcaacatgt

SEQ ID NO: 571457 - DNA, 19 bp, Mus musculus
  siRNA target sequence for Sstr1 (NM_009216.2,834-852).
gatgcggtcaacatgttca

SEQ ID NO: 571458 - DNA, 19 bp, Mus musculus
  siRNA target sequence for Sstr1 (NM_009216.2,865-883).
gtctgactgtgcttagtgt

SEQ ID NO: 571459 - DNA, 19 bp, Mus musculus
  siRNA target sequence for Sstr1 (NM_009216.2,940-958).
ctgtggccaaagtagtgaa

SEQ ID NO: 571460 - DNA, 19 bp, Mus musculus
  siRNA target sequence for Sstr1 (NM_009216.2,964-982).
gcgtgtgggtcctgtcatt

SEQ ID NO: 571461 - DNA, 19 bp, Mus musculus
  siRNA target sequence for Sstr1 (NM_009216.2,965-983).
cgtgtgggtcctgtcatta

SEQ ID NO: 571462 - DNA, 19 bp, Mus musculus
  siRNA target sequence for Sstr1 (NM_009216.2,1088-1106).
gggcttcgtcttatacaca

SEQ ID NO: 571463 - DNA, 19 bp, Mus musculus
  siRNA target sequence for Sstr1 (NM_009216.2,1089-1107).
ggcttcgtcttatacacat

SEQ ID NO: 571464 - DNA, 19 bp, Mus musculus
  siRNA target sequence for Sstr1 (NM_009216.2,1090-1108).
gcttcgtcttatacacatt

SEQ ID NO: 571465 - DNA, 19 bp, Mus musculus
  siRNA target sequence for Sstr1 (NM_009216.2,1091-1109).
cttcgtcttatacacattt

SEQ ID NO: 571466 - DNA, 19 bp, Mus musculus
  siRNA target sequence for Sstr1 (NM_009216.2,1138-1156).
ccatttgcctgtgttatgt

SEQ ID NO: 571467 - DNA, 19 bp, Mus musculus
  siRNA target sequence for Sstr1 (NM_009216.2,1441-1459).
gcctcagctggatggataa

SEQ ID NO: 571468 - DNA, 19 bp, Mus musculus
  siRNA target sequence for Sstr1 (NM_009216.2,1469-1487).
ggaaccagtcgactactat

SEQ ID NO: 571469 - DNA, 19 bp, Mus musculus
  siRNA target sequence for Sstr2 (NM_009217.1,774-792).
gcaacacgctggtcattta

SEQ ID NO: 571470 - DNA, 19 bp, Mus musculus
  siRNA target sequence for Sstr2 (NM_009217.1,1027-1045).
ggtgcaccccattaagtca

SEQ ID NO: 571471 - DNA, 19 bp, Mus musculus
  siRNA target sequence for Sstr2 (NM_009217.1,1061-1079).
ccccggacagccaagatga

SEQ ID NO: 571472 - DNA, 19 bp, Mus musculus
  siRNA target sequence for Sstr2 (NM_009217.1,1062-1080).
cccggacagccaagatgat

SEQ ID NO: 571473 - DNA, 19 bp, Mus musculus
  siRNA target sequence for Sstr2 (NM_009217.1,1064-1082).
cggacagccaagatgatca

SEQ ID NO: 571474 - DNA, 19 bp, Mus musculus
  siRNA target sequence for Sstr2 (NM_009217.1,1065-1083).
ggacagccaagatgatcaa

SEQ ID NO: 571475 - DNA, 19 bp, Mus musculus
  siRNA target sequence for Sstr2 (NM_009217.1,1066-1084).
gacagccaagatgatcaat

SEQ ID NO: 571476 - DNA, 19 bp, Mus musculus
  siRNA target sequence for Sstr2 (NM_009217.1,1249-1267).
ggtaccccttaccatcatt

SEQ ID NO: 571477 - DNA, 19 bp, Mus musculus
  siRNA target sequence for Sstr2 (NM_009217.1,1250-1268).
gtaccccttaccatcattt

SEQ ID NO: 571478 - DNA, 19 bp, Mus musculus
  siRNA target sequence for Sstr2 (NM_009217.1,1579-1597).
cttggtcaaggcagacaat

SEQ ID NO: 571479 - DNA, 19 bp, Mus musculus
  siRNA target sequence for Sstr2 (NM_009217.1,1605-1623).
ccggagcggaagacatcat

SEQ ID NO: 571480 - DNA, 19 bp, Mus musculus
  siRNA target sequence for Sstr2 (NM_009217.1,1606-1624).
cggagcggaagacatcatt

SEQ ID NO: 571481 - DNA, 19 bp, Mus musculus
  siRNA target sequence for Oprm (NM_011013.1,276-294).
catcatggccctctattct

SEQ ID NO: 571482 - DNA, 19 bp, Mus musculus
  siRNA target sequence for Oprm (NM_011013.1,330-348).
ggtcatgtatgtgattgta

SEQ ID NO: 571483 - DNA, 19 bp, Mus musculus
  siRNA target sequence for Oprm (NM_011013.1,340-358).
gtgattgtaagatatacca

SEQ ID NO: 571484 - DNA, 19 bp, Mus musculus
  siRNA target sequence for Oprm (NM_011013.1,342-360).
gattgtaagatataccaaa

SEQ ID NO: 571485 - DNA, 19 bp, Mus musculus
  siRNA target sequence for Oprm (NM_011013.1,427-445).
ctgccctttcagagtgtta

SEQ ID NO: 571486 - DNA, 19 bp, Mus musculus
  siRNA target sequence for Oprm (NM_011013.1,430-448).
ccctttcagagtgttaact

SEQ ID NO: 571487 - DNA, 19 bp, Mus musculus
  siRNA target sequence for Oprm (NM_011013.1,431-449).
cctttcagagtgttaacta

SEQ ID NO: 571488 - DNA, 19 bp, Mus musculus
  siRNA target sequence for Oprm (NM_011013.1,458-476).
gaacgtggccctttggaaa

SEQ ID NO: 571489 - DNA, 19 bp, Mus musculus
  siRNA target sequence for Oprm (NM_011013.1,461-479).
cgtggccctttggaaacat

SEQ ID NO: 571490 - DNA, 19 bp, Mus musculus
  siRNA target sequence for Oprm (NM_011013.1,485-503).
gcaagatcgtgatctcaat

SEQ ID NO: 571491 - DNA, 19 bp, Mus musculus
  siRNA target sequence for Oprm (NM_011013.1,486-504).
caagatcgtgatctcaata

SEQ ID NO: 571492 - DNA, 19 bp, Mus musculus
  siRNA target sequence for Oprm (NM_011013.1,616-634).
gccaaaattgtcaatgtct

SEQ ID NO: 571493 - DNA, 19 bp, Mus musculus
  siRNA target sequence for Oprm (NM_011013.1,661-679).
ggtctgcccgtaatgttca

SEQ ID NO: 571494 - DNA, 19 bp, Mus musculus
  siRNA target sequence for Oprm (NM_011013.1,662-680).
gtctgcccgtaatgttcat

SEQ ID NO: 571495 - DNA, 19 bp, Mus musculus
  siRNA target sequence for Oprm (NM_011013.1,749-767).
gggagaacctgctcaaaat

SEQ ID NO: 571496 - DNA, 19 bp, Mus musculus
  siRNA target sequence for Oprm (NM_011013.1,751-769).
gagaacctgctcaaaatct

SEQ ID NO: 571497 - DNA, 19 bp, Mus musculus
  siRNA target sequence for Oprm (NM_011013.1,753-771).
gaacctgctcaaaatctgt

SEQ ID NO: 571498 - DNA, 19 bp, Mus musculus
  siRNA target sequence for Oprm (NM_011013.1,807-825).
catcactgtgtgttatgga

SEQ ID NO: 571499 - DNA, 19 bp, Mus musculus
  siRNA target sequence for Oprm (NM_011013.1,818-836).
gttatggactgatgatctt

SEQ ID NO: 571500 - DNA, 19 bp, Mus musculus
  siRNA target sequence for Oprm (NM_011013.1,859-877).
ctgtcgggctccaaagaaa

SEQ ID NO: 571501 - DNA, 19 bp, Mus musculus
  siRNA target sequence for Oprm (NM_011013.1,1156-1174).
gctcgaatccgtcaaaaca

SEQ ID NO: 571502 - DNA, 19 bp, Mus musculus
  siRNA target sequence for Oprm (NM_011013.1,1159-1177).
cgaatccgtcaaaacacta

SEQ ID NO: 571503 - DNA, 19 bp, Mus musculus
  siRNA target sequence for Oprm (NM_011013.1,1183-1201).
cacccctccacggctaata

SEQ ID NO: 571504 - DNA, 19 bp, Mus musculus
  siRNA target sequence for Oprm (NM_011013.1,1185-1203).
cccctccacggctaataca

SEQ ID NO: 571505 - DNA, 19 bp, Mus musculus
  siRNA target sequence for Oprm (NM_011013.1,1187-1205).
cctccacggctaatacagt

SEQ ID NO: 571506 - DNA, 19 bp, Mus musculus
  siRNA target sequence for Oprd1 (NM_013622.2,299-317).
gcaacgtgctcgtcatgtt

SEQ ID NO: 571507 - DNA, 19 bp, Mus musculus
  siRNA target sequence for Oprd1 (NM_013622.2,300-318).
caacgtgctcgtcatgttt

SEQ ID NO: 571508 - DNA, 19 bp, Mus musculus
  siRNA target sequence for Oprd1 (NM_013622.2,325-343).
gtccggtacaccaaattga

SEQ ID NO: 571509 - DNA, 19 bp, Mus musculus
  siRNA target sequence for Oprd1 (NM_013622.2,415-433).
cagagcgccaagtacttga

SEQ ID NO: 571510 - DNA, 19 bp, Mus musculus
  siRNA target sequence for Oprd1 (NM_013622.2,953-971).
ggacgctggtggacatcaa

SEQ ID NO: 571511 - DNA, 19 bp, Mus musculus
  siRNA target sequence for Oprd1 (NM_013622.2,954-972).
gacgctggtggacatcaat

SEQ ID NO: 571512 - DNA, 19 bp, Mus musculus
  siRNA target sequence for Hcrtr1 (NM_198959.1,343-361).
cctggagtccccactagta

SEQ ID NO: 571513 - DNA, 19 bp, Mus musculus
  siRNA target sequence for Hcrtr1 (NM_198959.1,415-433).
ctgtggcgcgattatctct

SEQ ID NO: 571514 - DNA, 19 bp, Mus musculus
  siRNA target sequence for Hcrtr1 (NM_198959.1,444-462).
gtacgagtgggttctcatt

SEQ ID NO: 571515 - DNA, 19 bp, Mus musculus
  siRNA target sequence for Hcrtr1 (NM_198959.1,937-955).
gaactctaccccaagatct

SEQ ID NO: 571516 - DNA, 19 bp, Mus musculus
  siRNA target sequence for Hcrtr1 (NM_198959.1,1215-1233).
ggtagtcctgctggttttt

SEQ ID NO: 571517 - DNA, 19 bp, Mus musculus
  siRNA target sequence for Ntsr (NM_018766.1,543-561).
ctcagcttgagcaatggtt

SEQ ID NO: 571518 - DNA, 19 bp, Mus musculus
  siRNA target sequence for Ntsr (NM_018766.1,565-583).
gcaattcctcagaatccat

SEQ ID NO: 571519 - DNA, 19 bp, Mus musculus
  siRNA target sequence for Ntsr (NM_018766.1,605-623).
ggacgtgaacactgacatt

SEQ ID NO: 571520 - DNA, 19 bp, Mus musculus
  siRNA target sequence for Ntsr (NM_018766.1,608-626).
cgtgaacactgacatttat

SEQ ID NO: 571521 - DNA, 19 bp, Mus musculus
  siRNA target sequence for Ntsr (NM_018766.1,609-627).
gtgaacactgacatttatt

SEQ ID NO: 571522 - DNA, 19 bp, Mus musculus
  siRNA target sequence for Ntsr (NM_018766.1,865-883).
gccgtggctactatttcct

SEQ ID NO: 571523 - DNA, 19 bp, Mus musculus
  siRNA target sequence for Ntsr (NM_018766.1,987-1005).
cgcagccgcaccaagaaat

SEQ ID NO: 571524 - DNA, 19 bp, Mus musculus
  siRNA target sequence for Ntsr (NM_018766.1,988-1006).
gcagccgcaccaagaaatt

SEQ ID NO: 571525 - DNA, 19 bp, Mus musculus
  siRNA target sequence for Ntsr (NM_018766.1,993-1011).
cgcaccaagaaattcatca

SEQ ID NO: 571526 - DNA, 19 bp, Mus musculus
  siRNA target sequence for Ntsr (NM_018766.1,1146-1164).
gtcgtcatccaggttaaca

SEQ ID NO: 571527 - DNA, 19 bp, Mus musculus
  siRNA target sequence for Ntsr (NM_018766.1,1425-1443).
cgcctcatgttctgctata

SEQ ID NO: 571528 - DNA, 19 bp, Mus musculus
  siRNA target sequence for Ntsr (NM_018766.1,1426-1444).
gcctcatgttctgctatat

SEQ ID NO: 571529 - DNA, 19 bp, Mus musculus
  siRNA target sequence for Ntsr (NM_018766.1,1436-1454).
ctgctatatctcagatgaa

SEQ ID NO: 571530 - DNA, 19 bp, Mus musculus
  siRNA target sequence for Ntsr (NM_018766.1,1438-1456).
gctatatctcagatgaaca

SEQ ID NO: 571531 - DNA, 19 bp, Mus musculus
  siRNA target sequence for Ntsr (NM_018766.1,1465-1483).
cgttcctcttcgacttcta

SEQ ID NO: 571532 - DNA, 19 bp, Mus musculus
  siRNA target sequence for Agtrap (NM_009642.3,121-139).
ccgtgaacttgaaggttat

SEQ ID NO: 571533 - DNA, 19 bp, Mus musculus
  siRNA target sequence for Agtrap (NM_009642.3,198-216).
gcttggggcaacttcacta

SEQ ID NO: 571534 - DNA, 19 bp, Mus musculus
  siRNA target sequence for Agtrap (NM_009642.3,242-260).
ggcccagcgggactctata

SEQ ID NO: 571535 - DNA, 19 bp, Mus musculus
  siRNA target sequence for Agtrap (NM_009642.3,245-263).
ccagcgggactctatagat

SEQ ID NO: 571536 - DNA, 19 bp, Mus musculus
  siRNA target sequence for Agtrap (NM_009642.3,305-323).
cctggacattatctacatt

SEQ ID NO: 571537 - DNA, 19 bp, Mus musculus
  siRNA target sequence for Agtrap (NM_009642.3,309-327).
gacattatctacattagca

SEQ ID NO: 571538 - DNA, 19 bp, Mus musculus
  siRNA target sequence for Agtrap (NM_009642.3,499-517).
gtgcctaccagacaattga

SEQ ID NO: 571539 - DNA, 19 bp, Mus musculus
  siRNA target sequence for Agtrap (NM_009642.3,501-519).
gcctaccagacaattgact

SEQ ID NO: 571540 - DNA, 19 bp, Mus musculus
  siRNA target sequence for Agtrap (NM_009642.3,509-527).
gacaattgactcatcatca

SEQ ID NO: 571541 - DNA, 19 bp, Mus musculus
  siRNA target sequence for Gpr54 (NM_053244.2,1870-1888).
gggctggtcggaaactcat

SEQ ID NO: 571542 - DNA, 19 bp, Mus musculus
  siRNA target sequence for Gpr54 (NM_053244.2,1871-1889).
ggctggtcggaaactcatt

SEQ ID NO: 571543 - DNA, 19 bp, Mus musculus
  siRNA target sequence for Gpr54 (NM_053244.2,1886-1904).
cattggtcatctacgttat

SEQ ID NO: 571544 - DNA, 19 bp, Mus musculus
  siRNA target sequence for Gpr54 (NM_053244.2,1928-1946).
cagttaccaacttctacat

SEQ ID NO: 571545 - DNA, 19 bp, Mus musculus
  siRNA target sequence for Gpr54 (NM_053244.2,2048-2066).
gcaaattcgtcaactacat

SEQ ID NO: 571546 - DNA, 19 bp, Mus musculus
  siRNA target sequence for Npr3 (NM_008728.1,124-142).
gcgctggcggctcaaaaga

SEQ ID NO: 571547 - DNA, 19 bp, Mus musculus
  siRNA target sequence for Npr3 (NM_008728.1,125-143).
cgctggcggctcaaaagat

SEQ ID NO: 571548 - DNA, 19 bp, Mus musculus
  siRNA target sequence for Npr3 (NM_008728.1,141-159).
gatcgaggtgcttgttcta

SEQ ID NO: 571549 - DNA, 19 bp, Mus musculus
  siRNA target sequence for Npr3 (NM_008728.1,481-499).
cacaaggacacggaatact

SEQ ID NO: 571550 - DNA, 19 bp, Mus musculus
  siRNA target sequence for Npr3 (NM_008728.1,613-631).
gagaggaactgttatttca

SEQ ID NO: 571551 - DNA, 19 bp, Mus musculus
  siRNA target sequence for Npr3 (NM_008728.1,639-657).
gggggtccacgaggttttt

SEQ ID NO: 571552 - DNA, 19 bp, Mus musculus
  siRNA target sequence for Npr3 (NM_008728.1,673-691).
cacacgtctgcctacaatt

SEQ ID NO: 571553 - DNA, 19 bp, Mus musculus
  siRNA target sequence for Npr3 (NM_008728.1,677-695).
cgtctgcctacaatttcga

SEQ ID NO: 571554 - DNA, 19 bp, Mus musculus
  siRNA target sequence for Npr3 (NM_008728.1,746-764).
gcgagcgagtggtgatcat

SEQ ID NO: 571555 - DNA, 19 bp, Mus musculus
  siRNA target sequence for Npr3 (NM_008728.1,748-766).
gagcgagtggtgatcatgt

SEQ ID NO: 571556 - DNA, 19 bp, Mus musculus
  siRNA target sequence for Npr3 (NM_008728.1,778-796).
gacaccattcggagaatca

SEQ ID NO: 571557 - DNA, 19 bp, Mus musculus
  siRNA target sequence for Npr3 (NM_008728.1,827-845).
gtggagactacgctttctt

SEQ ID NO: 571558 - DNA, 19 bp, Mus musculus
  siRNA target sequence for Npr3 (NM_008728.1,834-852).
ctacgctttcttcaacatt

SEQ ID NO: 571559 - DNA, 19 bp, Mus musculus
  siRNA target sequence for Npr3 (NM_008728.1,837-855).
cgctttcttcaacattgaa

SEQ ID NO: 571560 - DNA, 19 bp, Mus musculus
  siRNA target sequence for Npr3 (NM_008728.1,914-932).
ctgaagctaaacaagcata

SEQ ID NO: 571561 - DNA, 19 bp, Mus musculus
  siRNA target sequence for Npr3 (NM_008728.1,965-983).
ccgtgaaacctgagtttga

SEQ ID NO: 571562 - DNA, 19 bp, Mus musculus
  siRNA target sequence for Npr3 (NM_008728.1,993-1011).
catggaggtgaaaagttct

SEQ ID NO: 571563 - DNA, 19 bp, Mus musculus
  siRNA target sequence for Npr3 (NM_008728.1,1002-1020).
gaaaagttctgttgagaaa

SEQ ID NO: 571564 - DNA, 19 bp, Mus musculus
  siRNA target sequence for Npr3 (NM_008728.1,1025-1043).
ggctcaatgaggaggatta

SEQ ID NO: 571565 - DNA, 19 bp, Mus musculus
  siRNA target sequence for Npr3 (NM_008728.1,1038-1056).
ggattacgtgaacatgttt

SEQ ID NO: 571566 - DNA, 19 bp, Mus musculus
  siRNA target sequence for Npr3 (NM_008728.1,1086-1104).
ctacgttctggctttacat

SEQ ID NO: 571567 - DNA, 19 bp, Mus musculus
  siRNA target sequence for Npr3 (NM_008728.1,1308-1326).
gttccaaatgcgatcgaat

SEQ ID NO: 571568 - DNA, 19 bp, Mus musculus
  siRNA target sequence for Npr3 (NM_008728.1,1312-1330).
caaatgcgatcgaatgtca

SEQ ID NO: 571569 - DNA, 19 bp, Mus musculus
  siRNA target sequence for Npr3 (NM_008728.1,1317-1335).
gcgatcgaatgtcaaatat

SEQ ID NO: 571570 - DNA, 19 bp, Mus musculus
  siRNA target sequence for Npr3 (NM_008728.1,1373-1391).
gaatcgtggagcataccaa

SEQ ID NO: 571571 - DNA, 19 bp, Mus musculus
  siRNA target sequence for Npr3 (NM_008728.1,1476-1494).
gctaatggccttctacttt

SEQ ID NO: 571572 - DNA, 19 bp, Mus musculus
  siRNA target sequence for Npr3 (NM_008728.1,1517-1535).
ccattgagaggcgaaatca

SEQ ID NO: 571573 - DNA, 19 bp, Mus musculus
  siRNA target sequence for Npr3 (NM_008728.1,1564-1582).
cgagagctgcgagaagatt

SEQ ID NO: 571574 - DNA, 19 bp, Mus musculus
  siRNA target sequence for Gabra1 (NM_010250.2,816-834).
gggcctggaccctcattct

SEQ ID NO: 571575 - DNA, 19 bp, Mus musculus
  siRNA target sequence for Gabra1 (NM_010250.2,861-879).
gacagccctcccaagatga

SEQ ID NO: 571576 - DNA, 19 bp, Mus musculus
  siRNA target sequence for Gabra1 (NM_010250.2,961-979).
gggagagcgtgtaactgaa

SEQ ID NO: 571577 - DNA, 19 bp, Mus musculus
  siRNA target sequence for Gabra1 (NM_010250.2,1005-1023).
gtttcggaccagtttcaga

SEQ ID NO: 571578 - DNA, 19 bp, Mus musculus
  siRNA target sequence for Gabra1 (NM_010250.2,1014-1032).
cagtttcagaccacgatat

SEQ ID NO: 571579 - DNA, 19 bp, Mus musculus
  siRNA target sequence for Gabra1 (NM_010250.2,1022-1040).
gaccacgatatggagtata

SEQ ID NO: 571580 - DNA, 19 bp, Mus musculus
  siRNA target sequence for Gabra1 (NM_010250.2,1024-1042).
ccacgatatggagtataca

SEQ ID NO: 571581 - DNA, 19 bp, Mus musculus
  siRNA target sequence for Gabra1 (NM_010250.2,1025-1043).
cacgatatggagtatacaa

SEQ ID NO: 571582 - DNA, 19 bp, Mus musculus
  siRNA target sequence for Gabra1 (NM_010250.2,1104-1122).
cagtgctccggctaaacaa

SEQ ID NO: 571583 - DNA, 19 bp, Mus musculus
  siRNA target sequence for Gabra1 (NM_010250.2,1109-1127).
ctccggctaaacaacctta

SEQ ID NO: 571584 - DNA, 19 bp, Mus musculus
  siRNA target sequence for Gabra1 (NM_010250.2,1124-1142).
cttatggccagtaaaatct

SEQ ID NO: 571585 - DNA, 19 bp, Mus musculus
  siRNA target sequence for Gabra1 (NM_010250.2,1330-1348).
cggaagctatgcttataca

SEQ ID NO: 571586 - DNA, 19 bp, Mus musculus
  siRNA target sequence for Gabra1 (NM_010250.2,1350-1368).
gagcagaagttgtctatga

SEQ ID NO: 571587 - DNA, 19 bp, Mus musculus
  siRNA target sequence for Gabra1 (NM_010250.2,1416-1434).
cacgtttaaaccagtatga

SEQ ID NO: 571588 - DNA, 19 bp, Mus musculus
  siRNA target sequence for Gabra1 (NM_010250.2,1435-1453).
ccttcttggacaaacagtt

SEQ ID NO: 571589 - DNA, 19 bp, Mus musculus
  siRNA target sequence for Gabra1 (NM_010250.2,1500-1518).
cgactcacttccacttgaa

SEQ ID NO: 571590 - DNA, 19 bp, Mus musculus
  siRNA target sequence for Gabra1 (NM_010250.2,1531-1549).
ctactttgttattcaaaca

SEQ ID NO: 571591 - DNA, 19 bp, Mus musculus
  siRNA target sequence for Gabra1 (NM_010250.2,1723-1741).
gtttattgcagtatgctat

SEQ ID NO: 571592 - DNA, 19 bp, Mus musculus
  siRNA target sequence for Gabra1 (NM_010250.2,1897-1915).
cagctatacccctaactta

SEQ ID NO: 571593 - DNA, 19 bp, Mus musculus
  siRNA target sequence for Gabra1 (NM_010250.2,1930-1948).
cggcttggcaactattgct

SEQ ID NO: 571594 - DNA, 19 bp, Mus musculus
  siRNA target sequence for Gabra1 (NM_010250.2,1931-1949).
ggcttggcaactattgcta

SEQ ID NO: 571595 - DNA, 19 bp, Mus musculus
  siRNA target sequence for Gabra1 (NM_010250.2,1932-1950).
gcttggcaactattgctaa

SEQ ID NO: 571596 - DNA, 19 bp, Mus musculus
  siRNA target sequence for Gabra1 (NM_010250.2,1933-1951).
cttggcaactattgctaaa

SEQ ID NO: 571597 - DNA, 19 bp, Mus musculus
  siRNA target sequence for Gabra1 (NM_010250.2,1936-1954).
ggcaactattgctaaaagt

SEQ ID NO: 571598 - DNA, 19 bp, Mus musculus
  siRNA target sequence for Gabra1 (NM_010250.2,1959-1977).
ccatagaaccgaaagaagt

SEQ ID NO: 571599 - DNA, 19 bp, Mus musculus
  siRNA target sequence for Gabra1 (NM_010250.2,2035-2053).
cgaccgactgtcaagaata

SEQ ID NO: 571600 - DNA, 19 bp, Mus musculus
  siRNA target sequence for Gabra1 (NM_010250.2,2066-2084).
ctatttggaatctttaact

SEQ ID NO: 571601 - DNA, 19 bp, Mus musculus
  siRNA target sequence for Gabra1 (NM_010250.2,2072-2090).
ggaatctttaacttagtct

SEQ ID NO: 571602 - DNA, 19 bp, Mus musculus
  siRNA target sequence for Gabra1 (NM_010250.2,2073-2091).
gaatctttaacttagtcta

SEQ ID NO: 571603 - DNA, 19 bp, Mus musculus
  siRNA target sequence for Gabra1 (NM_010250.2,2087-2105).
gtctattgggccacgtatt

SEQ ID NO: 571604 - DNA, 19 bp, Mus musculus
  siRNA target sequence for Gabra1 (NM_010250.2,2089-2107).
ctattgggccacgtattta

SEQ ID NO: 571605 - DNA, 19 bp, Mus musculus
  siRNA target sequence for Gabra1 (NM_010250.2,2110-2128).
cagagagcctcagctaaaa

SEQ ID NO: 571606 - DNA, 19 bp, Mus musculus
  siRNA target sequence for Gabra2 (NM_008066.2,363-381).
ggttggtgctggctaacat

SEQ ID NO: 571607 - DNA, 19 bp, Mus musculus
  siRNA target sequence for Gabra2 (NM_008066.2,406-424).
catcaccatctttacaaga

SEQ ID NO: 571608 - DNA, 19 bp, Mus musculus
  siRNA target sequence for Gabra2 (NM_008066.2,409-427).
caccatctttacaagaatt

SEQ ID NO: 571609 - DNA, 19 bp, Mus musculus
  siRNA target sequence for Gabra2 (NM_008066.2,475-493).
gggagacagtattactgaa

SEQ ID NO: 571610 - DNA, 19 bp, Mus musculus
  siRNA target sequence for Gabra2 (NM_008066.2,528-546).
ctgtctcagatacagatat

SEQ ID NO: 571611 - DNA, 19 bp, Mus musculus
  siRNA target sequence for Gabra2 (NM_008066.2,622-640).
ccttcgacttaacaattta

SEQ ID NO: 571612 - DNA, 19 bp, Mus musculus
  siRNA target sequence for Gabra2 (NM_008066.2,717-735).
caaacaagctgcttcgaat

SEQ ID NO: 571613 - DNA, 19 bp, Mus musculus
  siRNA target sequence for Gabra2 (NM_008066.2,739-757).
ggatgatggaacattgcta

SEQ ID NO: 571614 - DNA, 19 bp, Mus musculus
  siRNA target sequence for Gabra2 (NM_008066.2,740-758).
gatgatggaacattgctat

SEQ ID NO: 571615 - DNA, 19 bp, Mus musculus
  siRNA target sequence for Gabra2 (NM_008066.2,743-761).
gatggaacattgctatata

SEQ ID NO: 571616 - DNA, 19 bp, Mus musculus
  siRNA target sequence for Gabra2 (NM_008066.2,747-765).
gaacattgctatataccat

SEQ ID NO: 571617 - DNA, 19 bp, Mus musculus
  siRNA target sequence for Gabra2 (NM_008066.2,792-810).
ccatgcacctggaggattt

SEQ ID NO: 571618 - DNA, 19 bp, Mus musculus
  siRNA target sequence for Gabra2 (NM_008066.2,812-830).
ccgatggatgctcattcat

SEQ ID NO: 571619 - DNA, 19 bp, Mus musculus
  siRNA target sequence for Gabra2 (NM_008066.2,824-842).
cattcatgcccactgaaat

SEQ ID NO: 571620 - DNA, 19 bp, Mus musculus
  siRNA target sequence for Gabra2 (NM_008066.2,869-887).
gaagtcacatatatttgga

SEQ ID NO: 571621 - DNA, 19 bp, Mus musculus
  siRNA target sequence for Gabra2 (NM_008066.2,920-938).
cccgatggctccaggttaa

SEQ ID NO: 571622 - DNA, 19 bp, Mus musculus
  siRNA target sequence for Gabra2 (NM_008066.2,921-939).
ccgatggctccaggttaaa

SEQ ID NO: 571623 - DNA, 19 bp, Mus musculus
  siRNA target sequence for Gabra2 (NM_008066.2,922-940).
cgatggctccaggttaaat

SEQ ID NO: 571624 - DNA, 19 bp, Mus musculus
  siRNA target sequence for Gabra2 (NM_008066.2,926-944).
ggctccaggttaaatcagt

SEQ ID NO: 571625 - DNA, 19 bp, Mus musculus
  siRNA target sequence for Gabra2 (NM_008066.2,927-945).
gctccaggttaaatcagta

SEQ ID NO: 571626 - DNA, 19 bp, Mus musculus
  siRNA target sequence for Gabra2 (NM_008066.2,928-946).
ctccaggttaaatcagtat

SEQ ID NO: 571627 - DNA, 19 bp, Mus musculus
  siRNA target sequence for Gabra2 (NM_008066.2,930-948).
ccaggttaaatcagtatga

SEQ ID NO: 571628 - DNA, 19 bp, Mus musculus
  siRNA target sequence for Gabra2 (NM_008066.2,931-949).
caggttaaatcagtatgat

SEQ ID NO: 571629 - DNA, 19 bp, Mus musculus
  siRNA target sequence for Gabra2 (NM_008066.2,933-951).
ggttaaatcagtatgattt

SEQ ID NO: 571630 - DNA, 19 bp, Mus musculus
  siRNA target sequence for Gabra2 (NM_008066.2,995-1013).
ggtgaatatactgtaatga

SEQ ID NO: 571631 - DNA, 19 bp, Mus musculus
  siRNA target sequence for Gabra2 (NM_008066.2,1043-1061).
gggtattttgtgattcaga

SEQ ID NO: 571632 - DNA, 19 bp, Mus musculus
  siRNA target sequence for Gabra2 (NM_008066.2,1234-1252).
ctggtttatagctgtttgt

SEQ ID NO: 571633 - DNA, 19 bp, Mus musculus
  siRNA target sequence for Gabra2 (NM_008066.2,1327-1345).
cgggaagagtgtagtcaat

SEQ ID NO: 571634 - DNA, 19 bp, Mus musculus
  siRNA target sequence for Gabra2 (NM_008066.2,1329-1347).
ggaagagtgtagtcaatga

SEQ ID NO: 571635 - DNA, 19 bp, Mus musculus
  siRNA target sequence for Gabra2 (NM_008066.2,1360-1378).
gaaaggctccgtcatgata

SEQ ID NO: 571636 - DNA, 19 bp, Mus musculus
  siRNA target sequence for Gabra2 (NM_008066.2,1365-1383).
gctccgtcatgatacagaa

SEQ ID NO: 571637 - DNA, 19 bp, Mus musculus
  siRNA target sequence for Gabra2 (NM_008066.2,1368-1386).
ccgtcatgatacagaacaa

SEQ ID NO: 571638 - DNA, 19 bp, Mus musculus
  siRNA target sequence for Gabra2 (NM_008066.2,1396-1414).
ggtagctgttgccaactat

SEQ ID NO: 571639 - DNA, 19 bp, Mus musculus
  siRNA target sequence for Gabra2 (NM_008066.2,1408-1426).
caactatgccccgaatctt

SEQ ID NO: 571640 - DNA, 19 bp, Mus musculus
  siRNA target sequence for Gabra2 (NM_008066.2,1439-1457).
gtcctctctaccatttcca

SEQ ID NO: 571641 - DNA, 19 bp, Mus musculus
  siRNA target sequence for Gabra2 (NM_008066.2,1441-1459).
cctctctaccatttccaaa

SEQ ID NO: 571642 - DNA, 19 bp, Mus musculus
  siRNA target sequence for Gabra2 (NM_008066.2,1444-1462).
ctctaccatttccaaaagt

SEQ ID NO: 571643 - DNA, 19 bp, Mus musculus
  siRNA target sequence for Gabra2 (NM_008066.2,1543-1561).
cgacaggatgtctagaata

SEQ ID NO: 571644 - DNA, 19 bp, Mus musculus
  siRNA target sequence for Gabra2 (NM_008066.2,1595-1613).
gtttattgggctacctatt

SEQ ID NO: 571645 - DNA, 19 bp, Mus musculus
  siRNA target sequence for Gabra3 (NM_008067.2,306-324).
ggaatcaagacgacaagaa

SEQ ID NO: 571646 - DNA, 19 bp, Mus musculus
  siRNA target sequence for Gabra3 (NM_008067.2,331-349).
gactttgtgaaacaagata

SEQ ID NO: 571647 - DNA, 19 bp, Mus musculus
  siRNA target sequence for Gabra3 (NM_008067.2,333-351).
ctttgtgaaacaagatatt

SEQ ID NO: 571648 - DNA, 19 bp, Mus musculus
  siRNA target sequence for Gabra3 (NM_008067.2,365-383).
ccaagcatgccccagatat

SEQ ID NO: 571649 - DNA, 19 bp, Mus musculus
  siRNA target sequence for Gabra3 (NM_008067.2,379-397).
gatattcctgacgatagta

SEQ ID NO: 571650 - DNA, 19 bp, Mus musculus
  siRNA target sequence for Gabra3 (NM_008067.2,385-403).
cctgacgatagtacagata

SEQ ID NO: 571651 - DNA, 19 bp, Mus musculus
  siRNA target sequence for Gabra3 (NM_008067.2,386-404).
ctgacgatagtacagataa

SEQ ID NO: 571652 - DNA, 19 bp, Mus musculus
  siRNA target sequence for Gabra3 (NM_008067.2,388-406).
gacgatagtacagataata

SEQ ID NO: 571653 - DNA, 19 bp, Mus musculus
  siRNA target sequence for Gabra3 (NM_008067.2,400-418).
gataatatcactatcttca

SEQ ID NO: 571654 - DNA, 19 bp, Mus musculus
  siRNA target sequence for Gabra3 (NM_008067.2,410-428).
ctatcttcactagaatctt

SEQ ID NO: 571655 - DNA, 19 bp, Mus musculus
  siRNA target sequence for Gabra3 (NM_008067.2,539-557).
ctgatatggaatatactat

SEQ ID NO: 571656 - DNA, 19 bp, Mus musculus
  siRNA target sequence for Gabra3 (NM_008067.2,546-564).
ggaatatactattgatgta

SEQ ID NO: 571657 - DNA, 19 bp, Mus musculus
  siRNA target sequence for Gabra3 (NM_008067.2,572-590).
gacagacatggcatgatga

SEQ ID NO: 571658 - DNA, 19 bp, Mus musculus
  siRNA target sequence for Gabra3 (NM_008067.2,576-594).
gacatggcatgatgaaaga

SEQ ID NO: 571659 - DNA, 19 bp, Mus musculus
  siRNA target sequence for Gabra3 (NM_008067.2,583-601).
catgatgaaagactgaaat

SEQ ID NO: 571660 - DNA, 19 bp, Mus musculus
  siRNA target sequence for Gabra3 (NM_008067.2,618-636).
gatccttccactgaacaat

SEQ ID NO: 571661 - DNA, 19 bp, Mus musculus
  siRNA target sequence for Gabra3 (NM_008067.2,637-655).
cttctggctagtaagatat

SEQ ID NO: 571662 - DNA, 19 bp, Mus musculus
  siRNA target sequence for Gabra3 (NM_008067.2,724-742).
ctgctcagactggtagata

SEQ ID NO: 571663 - DNA, 19 bp, Mus musculus
  siRNA target sequence for Gabra3 (NM_008067.2,745-763).
gggaccctcctctatacaa

SEQ ID NO: 571664 - DNA, 19 bp, Mus musculus
  siRNA target sequence for Gabra3 (NM_008067.2,746-764).
ggaccctcctctatacaat

SEQ ID NO: 571665 - DNA, 19 bp, Mus musculus
  siRNA target sequence for Gabra3 (NM_008067.2,761-779).
caatgaggttaacaataca

SEQ ID NO: 571666 - DNA, 19 bp, Mus musculus
  siRNA target sequence for Gabra3 (NM_008067.2,865-883).
gctgaagtaatttattctt

SEQ ID NO: 571667 - DNA, 19 bp, Mus musculus
  siRNA target sequence for Gabra3 (NM_008067.2,927-945).
ctcacgcctgaatcagtat

SEQ ID NO: 571668 - DNA, 19 bp, Mus musculus
  siRNA target sequence for Gabra3 (NM_008067.2,929-947).
cacgcctgaatcagtatga

SEQ ID NO: 571669 - DNA, 19 bp, Mus musculus
  siRNA target sequence for Gabra3 (NM_008067.2,931-949).
cgcctgaatcagtatgact

SEQ ID NO: 571670 - DNA, 19 bp, Mus musculus
  siRNA target sequence for Gabra3 (NM_008067.2,961-979).
gttgttgggacagagataa

SEQ ID NO: 571671 - DNA, 19 bp, Mus musculus
  siRNA target sequence for Gabra3 (NM_008067.2,973-991).
gagataatccggtctagta

SEQ ID NO: 571672 - DNA, 19 bp, Mus musculus
  siRNA target sequence for Gabra3 (NM_008067.2,975-993).
gataatccggtctagtaca

SEQ ID NO: 571673 - DNA, 19 bp, Mus musculus
  siRNA target sequence for Gabra3 (NM_008067.2,983-1001).
ggtctagtacaggagaata

SEQ ID NO: 571674 - DNA, 19 bp, Mus musculus
  siRNA target sequence for Gabra3 (NM_008067.2,997-1015).
gaatatgtcgtcatgacaa

SEQ ID NO: 571675 - DNA, 19 bp, Mus musculus
  siRNA target sequence for Gabra3 (NM_008067.2,1008-1026).
catgacaacccactttcat

SEQ ID NO: 571676 - DNA, 19 bp, Mus musculus
  siRNA target sequence for Gabra3 (NM_008067.2,1013-1031).
caacccactttcatctgaa

SEQ ID NO: 571677 - DNA, 19 bp, Mus musculus
  siRNA target sequence for Gabra3 (NM_008067.2,1101-1119).
gtctttctggcttaataga

SEQ ID NO: 571678 - DNA, 19 bp, Mus musculus
  siRNA target sequence for Gabra3 (NM_008067.2,1128-1146).
ccctgcccgcacagtcttt

SEQ ID NO: 571679 - DNA, 19 bp, Mus musculus
  siRNA target sequence for Gabra3 (NM_008067.2,1191-1209).
cagaaactctttacctaaa

SEQ ID NO: 571680 - DNA, 19 bp, Mus musculus
  siRNA target sequence for Gabra3 (NM_008067.2,1245-1263).
cgtctgttatgcctttgta

SEQ ID NO: 571681 - DNA, 19 bp, Mus musculus
  siRNA target sequence for Gabra3 (NM_008067.2,1408-1426).
gtgggtaccacctatccta

SEQ ID NO: 571682 - DNA, 19 bp, Mus musculus
  siRNA target sequence for Gabra3 (NM_008067.2,1412-1430).
gtaccacctatcctatcaa

SEQ ID NO: 571683 - DNA, 19 bp, Mus musculus
  siRNA target sequence for Gabra3 (NM_008067.2,1514-1532).
cacccaaggctacttatgt

SEQ ID NO: 571684 - DNA, 19 bp, Mus musculus
  siRNA target sequence for Gabra3 (NM_008067.2,1549-1567).
gagaccaagacctacaaca

SEQ ID NO: 571685 - DNA, 19 bp, Mus musculus
  siRNA target sequence for Gabra3 (NM_008067.2,1570-1588).
gtcagcaaggttgacaaaa

SEQ ID NO: 571686 - DNA, 19 bp, Mus musculus
  siRNA target sequence for Gabra3 (NM_008067.2,1572-1590).
cagcaaggttgacaaaatt

SEQ ID NO: 571687 - DNA, 19 bp, Mus musculus
  siRNA target sequence for Gabra3 (NM_008067.2,1675-1693).
ggcatgatccgcaaacagt

SEQ ID NO: 571688 - DNA, 19 bp, Mus musculus
  siRNA target sequence for Gabra4 (NM_010251.1,572-590).
gtgcctggcggcttgttta

SEQ ID NO: 571689 - DNA, 19 bp, Mus musculus
  siRNA target sequence for Gabra4 (NM_010251.1,574-592).
gcctggcggcttgtttaaa

SEQ ID NO: 571690 - DNA, 19 bp, Mus musculus
  siRNA target sequence for Gabra4 (NM_010251.1,578-596).
ggcggcttgtttaaacgaa

SEQ ID NO: 571691 - DNA, 19 bp, Mus musculus
  siRNA target sequence for Gabra4 (NM_010251.1,579-597).
gcggcttgtttaaacgaat

SEQ ID NO: 571692 - DNA, 19 bp, Mus musculus
  siRNA target sequence for Gabra4 (NM_010251.1,683-701).
caggctgcgtcctggattt

SEQ ID NO: 571693 - DNA, 19 bp, Mus musculus
  siRNA target sequence for Gabra4 (NM_010251.1,753-771).
cccgtttctgatgttgaaa

SEQ ID NO: 571694 - DNA, 19 bp, Mus musculus
  siRNA target sequence for Gabra4 (NM_010251.1,754-772).
ccgtttctgatgttgaaat

SEQ ID NO: 571695 - DNA, 19 bp, Mus musculus
  siRNA target sequence for Gabra4 (NM_010251.1,801-819).
cagacatggattgacaaaa

SEQ ID NO: 571696 - DNA, 19 bp, Mus musculus
  siRNA target sequence for Gabra4 (NM_010251.1,834-852).
ggcccaattgaaatcttga

SEQ ID NO: 571697 - DNA, 19 bp, Mus musculus
  siRNA target sequence for Gabra4 (NM_010251.1,843-861).
gaaatcttgaggctgaata

SEQ ID NO: 571698 - DNA, 19 bp, Mus musculus
  siRNA target sequence for Gabra4 (NM_010251.1,937-955).
cagctccaaataagctttt

SEQ ID NO: 571699 - DNA, 19 bp, Mus musculus
  siRNA target sequence for Gabra4 (NM_010251.1,942-960).
ccaaataagctttttagaa

SEQ ID NO: 571700 - DNA, 19 bp, Mus musculus
  siRNA target sequence for Gabra4 (NM_010251.1,1048-1066).
gtcatgcctgccctttgaa

SEQ ID NO: 571701 - DNA, 19 bp, Mus musculus
  siRNA target sequence for Gabra4 (NM_010251.1,1050-1068).
catgcctgccctttgaaat

SEQ ID NO: 571702 - DNA, 19 bp, Mus musculus
  siRNA target sequence for Gabra4 (NM_010251.1,1148-1166).
ggagtcttctagcttagtt

SEQ ID NO: 571703 - DNA, 19 bp, Mus musculus
  siRNA target sequence for Gabra4 (NM_010251.1,1151-1169).
gtcttctagcttagttcaa

SEQ ID NO: 571704 - DNA, 19 bp, Mus musculus
  siRNA target sequence for Gabra4 (NM_010251.1,1153-1171).
cttctagcttagttcaata

SEQ ID NO: 571705 - DNA, 19 bp, Mus musculus
  siRNA target sequence for Gabra4 (NM_010251.1,1156-1174).
ctagcttagttcaatatga

SEQ ID NO: 571706 - DNA, 19 bp, Mus musculus
  siRNA target sequence for Gabra4 (NM_010251.1,1178-1196).
cattgggcagactgtatca

SEQ ID NO: 571707 - DNA, 19 bp, Mus musculus
  siRNA target sequence for Gabra4 (NM_010251.1,1189-1207).
ctgtatcaagcgagactat

SEQ ID NO: 571708 - DNA, 19 bp, Mus musculus
  siRNA target sequence for Gabra4 (NM_010251.1,1202-1220).
gactatcaaatctattaca

SEQ ID NO: 571709 - DNA, 19 bp, Mus musculus
  siRNA target sequence for Gabra4 (NM_010251.1,1213-1231).
ctattacaggtgaatacat

SEQ ID NO: 571710 - DNA, 19 bp, Mus musculus
  siRNA target sequence for Gabra4 (NM_010251.1,1269-1287).
ggctactttatgattcaga

SEQ ID NO: 571711 - DNA, 19 bp, Mus musculus
  siRNA target sequence for Gabra4 (NM_010251.1,1422-1440).
cattctttgcccaaagtgt

SEQ ID NO: 571712 - DNA, 19 bp, Mus musculus
  siRNA target sequence for Gabra4 (NM_010251.1,1520-1538).
caactatttcaccaacatt

SEQ ID NO: 571713 - DNA, 19 bp, Mus musculus
  siRNA target sequence for Gabra4 (NM_010251.1,1618-1636).
cagaaacatcccttcagaa

SEQ ID NO: 571714 - DNA, 19 bp, Mus musculus
  siRNA target sequence for Gabra4 (NM_010251.1,1689-1707).
gaatcggatgtcaaaagca

SEQ ID NO: 571715 - DNA, 19 bp, Mus musculus
  siRNA target sequence for Gabra4 (NM_010251.1,1708-1726).
gaactgaggtgggaaatca

SEQ ID NO: 571716 - DNA, 19 bp, Mus musculus
  siRNA target sequence for Gabra4 (NM_010251.1,1766-1784).
cacgcctaaggctcactta

SEQ ID NO: 571717 - DNA, 19 bp, Mus musculus
  siRNA target sequence for Gabra4 (NM_010251.1,1785-1803).
gcttccagtccaaatccat

SEQ ID NO: 571718 - DNA, 19 bp, Mus musculus
  siRNA target sequence for Gabra4 (NM_010251.1,1786-1804).
cttccagtccaaatccatt

SEQ ID NO: 571719 - DNA, 19 bp, Mus musculus
  siRNA target sequence for Gabra4 (NM_010251.1,1839-1857).
gcagccagaggtctttcat

SEQ ID NO: 571720 - DNA, 19 bp, Mus musculus
  siRNA target sequence for Gabra4 (NM_010251.1,1885-1903).
cattgcggccagcttcttt

SEQ ID NO: 571721 - DNA, 19 bp, Mus musculus
  siRNA target sequence for Gabra4 (NM_010251.1,1916-1934).
cactcgccctgcatttgga

SEQ ID NO: 571722 - DNA, 19 bp, Mus musculus
  siRNA target sequence for Gabra4 (NM_010251.1,1922-1940).
ccctgcatttggatctaga

SEQ ID NO: 571723 - DNA, 19 bp, Mus musculus
  siRNA target sequence for Gabra4 (NM_010251.1,1936-1954).
ctagacttgggcgaattaa

SEQ ID NO: 571724 - DNA, 19 bp, Mus musculus
  siRNA target sequence for Gabra4 (NM_010251.1,1941-1959).
cttgggcgaattaagacaa

SEQ ID NO: 571725 - DNA, 19 bp, Mus musculus
  siRNA target sequence for Gabra4 (NM_010251.1,1946-1964).
gcgaattaagacaacagtt

SEQ ID NO: 571726 - DNA, 19 bp, Mus musculus
  siRNA target sequence for Gabra4 (NM_010251.1,2028-2046).
ggatctggcacaagtaaaa

SEQ ID NO: 571727 - DNA, 19 bp, Mus musculus
  siRNA target sequence for Gabra4 (NM_010251.1,2032-2050).
ctggcacaagtaaaataga

SEQ ID NO: 571728 - DNA, 19 bp, Mus musculus
  siRNA target sequence for Gabra4 (NM_010251.1,2035-2053).
gcacaagtaaaatagacaa

SEQ ID NO: 571729 - DNA, 19 bp, Mus musculus
  siRNA target sequence for Gabra4 (NM_010251.1,2069-2087).
ctttccagtcacatttgga

SEQ ID NO: 571730 - DNA, 19 bp, Mus musculus
  siRNA target sequence for Gabra4 (NM_010251.1,2076-2094).
gtcacatttggagcattta

SEQ ID NO: 571731 - DNA, 19 bp, Mus musculus
  siRNA target sequence for Gabra4 (NM_010251.1,2099-2117).
ggtctactgggttgtttat

SEQ ID NO: 571732 - DNA, 19 bp, Mus musculus
  siRNA target sequence for Gabra4 (NM_010251.1,2100-2118).
gtctactgggttgtttatt

SEQ ID NO: 571733 - DNA, 19 bp, Mus musculus
  siRNA target sequence for Gabra4 (NM_010251.1,2102-2120).
ctactgggttgtttattta

SEQ ID NO: 571734 - DNA, 19 bp, Mus musculus
  siRNA target sequence for Gabra5 (NM_176942.2,412-430).
gaccttatccagtcacttt

SEQ ID NO: 571735 - DNA, 19 bp, Mus musculus
  siRNA target sequence for Gabra5 (NM_176942.2,445-463).
gccaactagttctgtacaa

SEQ ID NO: 571736 - DNA, 19 bp, Mus musculus
  siRNA target sequence for Gabra5 (NM_176942.2,471-489).
ccaatgacaacatcacaat

SEQ ID NO: 571737 - DNA, 19 bp, Mus musculus
  siRNA target sequence for Gabra5 (NM_176942.2,472-490).
caatgacaacatcacaata

SEQ ID NO: 571738 - DNA, 19 bp, Mus musculus
  siRNA target sequence for Gabra5 (NM_176942.2,571-589).
gcgaacagacatctatgtt

SEQ ID NO: 571739 - DNA, 19 bp, Mus musculus
  siRNA target sequence for Gabra5 (NM_176942.2,572-590).
cgaacagacatctatgtta

SEQ ID NO: 571740 - DNA, 19 bp, Mus musculus
  siRNA target sequence for Gabra5 (NM_176942.2,910-928).
cctgaaatttggcagttat

SEQ ID NO: 571741 - DNA, 19 bp, Mus musculus
  siRNA target sequence for Gabra5 (NM_176942.2,1059-1077).
gcaccagcacaggtgaata

SEQ ID NO: 571742 - DNA, 19 bp, Mus musculus
  siRNA target sequence for Gabra5 (NM_176942.2,1065-1083).
gcacaggtgaatatacgat

SEQ ID NO: 571743 - DNA, 19 bp, Mus musculus
  siRNA target sequence for Gabra5 (NM_176942.2,1070-1088).
ggtgaatatacgatcatga

SEQ ID NO: 571744 - DNA, 19 bp, Mus musculus
  siRNA target sequence for Gabra5 (NM_176942.2,1174-1192).
ggtgtccttttggctaaat

SEQ ID NO: 571745 - DNA, 19 bp, Mus musculus
  siRNA target sequence for Gabra5 (NM_176942.2,1177-1195).
gtccttttggctaaatcga

SEQ ID NO: 571746 - DNA, 19 bp, Mus musculus
  siRNA target sequence for Gabra5 (NM_176942.2,1202-1220).
gtcccagctaggacagttt

SEQ ID NO: 571747 - DNA, 19 bp, Mus musculus
  siRNA target sequence for Gabra5 (NM_176942.2,1204-1222).
cccagctaggacagttttt

SEQ ID NO: 571748 - DNA, 19 bp, Mus musculus
  siRNA target sequence for Gabra5 (NM_176942.2,1361-1379).
gccacagtcaactacttta

SEQ ID NO: 571749 - DNA, 19 bp, Mus musculus
  siRNA target sequence for Gabra5 (NM_176942.2,1363-1381).
cacagtcaactactttaca

SEQ ID NO: 571750 - DNA, 19 bp, Mus musculus
  siRNA target sequence for Gabra5 (NM_176942.2,1367-1385).
gtcaactactttacaaaga

SEQ ID NO: 571751 - DNA, 19 bp, Mus musculus
  siRNA target sequence for Gabra5 (NM_176942.2,1442-1460).
gaacgcgaactcatactaa

SEQ ID NO: 571752 - DNA, 19 bp, Mus musculus
  siRNA target sequence for Gabra5 (NM_176942.2,1445-1463).
cgcgaactcatactaaata

SEQ ID NO: 571753 - DNA, 19 bp, Mus musculus
  siRNA target sequence for Gabra5 (NM_176942.2,1446-1464).
gcgaactcatactaaataa

SEQ ID NO: 571754 - DNA, 19 bp, Mus musculus
  siRNA target sequence for Gabra5 (NM_176942.2,1448-1466).
gaactcatactaaataagt

SEQ ID NO: 571755 - DNA, 19 bp, Mus musculus
  siRNA target sequence for Gabra5 (NM_176942.2,1586-1604).
gcggagagtaaaaagacat

SEQ ID NO: 571756 - DNA, 19 bp, Mus musculus
  siRNA target sequence for Gabra5 (NM_176942.2,1587-1605).
cggagagtaaaaagacata

SEQ ID NO: 571757 - DNA, 19 bp, Mus musculus
  siRNA target sequence for Gabra5 (NM_176942.2,1657-1675).
gtttggcactttcaactta

SEQ ID NO: 571758 - DNA, 19 bp, Mus musculus
  siRNA target sequence for Gabra5 (NM_176942.2,1661-1679).
ggcactttcaacttagttt

SEQ ID NO: 571759 - DNA, 19 bp, Mus musculus
  siRNA target sequence for Gabra5 (NM_176942.2,1662-1680).
gcactttcaacttagttta

SEQ ID NO: 571760 - DNA, 19 bp, Mus musculus
  siRNA target sequence for Gabra5 (NM_176942.2,1676-1694).
gtttactgggcaacatatt

SEQ ID NO: 571761 - DNA, 19 bp, Mus musculus
  siRNA target sequence for Gabra6 (NM_008068.1,253-271).
ctcccctggctcttcatta

SEQ ID NO: 571762 - DNA, 19 bp, Mus musculus
  siRNA target sequence for Gabra6 (NM_008068.1,257-275).
cctggctcttcattattct

SEQ ID NO: 571763 - DNA, 19 bp, Mus musculus
  siRNA target sequence for Gabra6 (NM_008068.1,290-308).
cccaagctcaacttgaaga

SEQ ID NO: 571764 - DNA, 19 bp, Mus musculus
  siRNA target sequence for Gabra6 (NM_008068.1,313-331).
ggcaacttctactctgaaa

SEQ ID NO: 571765 - DNA, 19 bp, Mus musculus
  siRNA target sequence for Gabra6 (NM_008068.1,314-332).
gcaacttctactctgaaaa

SEQ ID NO: 571766 - DNA, 19 bp, Mus musculus
  siRNA target sequence for Gabra6 (NM_008068.1,315-333).
caacttctactctgaaaat

SEQ ID NO: 571767 - DNA, 19 bp, Mus musculus
  siRNA target sequence for Gabra6 (NM_008068.1,338-356).
gtcggattcttgacaactt

SEQ ID NO: 571768 - DNA, 19 bp, Mus musculus
  siRNA target sequence for Gabra6 (NM_008068.1,375-393).
ccgtctacggccaggattt

SEQ ID NO: 571769 - DNA, 19 bp, Mus musculus
  siRNA target sequence for Gabra6 (NM_008068.1,400-418).
gctgtaacagaagtcaaaa

SEQ ID NO: 571770 - DNA, 19 bp, Mus musculus
  siRNA target sequence for Gabra6 (NM_008068.1,471-489).
gactgatgagagactgaaa

SEQ ID NO: 571771 - DNA, 19 bp, Mus musculus
  siRNA target sequence for Gabra6 (NM_008068.1,545-563).
ggactcctgacactttttt

SEQ ID NO: 571772 - DNA, 19 bp, Mus musculus
  siRNA target sequence for Gabra6 (NM_008068.1,565-583).
cggaatgggaaaaagtcaa

SEQ ID NO: 571773 - DNA, 19 bp, Mus musculus
  siRNA target sequence for Gabra6 (NM_008068.1,619-637).
cgattaatgcagaatggaa

SEQ ID NO: 571774 - DNA, 19 bp, Mus musculus
  siRNA target sequence for Gabra6 (NM_008068.1,634-652).
ggaacaatcctctatacca

SEQ ID NO: 571775 - DNA, 19 bp, Mus musculus
  siRNA target sequence for Gabra6 (NM_008068.1,635-653).
gaacaatcctctataccat

SEQ ID NO: 571776 - DNA, 19 bp, Mus musculus
  siRNA target sequence for Gabra6 (NM_008068.1,670-688).
gctgattgccccatgagat

SEQ ID NO: 571777 - DNA, 19 bp, Mus musculus
  siRNA target sequence for Gabra6 (NM_008068.1,671-689).
ctgattgccccatgagatt

SEQ ID NO: 571778 - DNA, 19 bp, Mus musculus
  siRNA target sequence for Gabra6 (NM_008068.1,677-695).
gccccatgagattggttaa

SEQ ID NO: 571779 - DNA, 19 bp, Mus musculus
  siRNA target sequence for Gabra6 (NM_008068.1,679-697).
cccatgagattggttaact

SEQ ID NO: 571780 - DNA, 19 bp, Mus musculus
  siRNA target sequence for Gabra6 (NM_008068.1,680-698).
ccatgagattggttaactt

SEQ ID NO: 571781 - DNA, 19 bp, Mus musculus
  siRNA target sequence for Gabra6 (NM_008068.1,714-732).
cgcttgtccactcaagttt

SEQ ID NO: 571782 - DNA, 19 bp, Mus musculus
  siRNA target sequence for Gabra6 (NM_008068.1,785-803).
cactttactcagtagaagt

SEQ ID NO: 571783 - DNA, 19 bp, Mus musculus
  siRNA target sequence for Gabra6 (NM_008068.1,823-841).
ctcctccagtatgatttga

SEQ ID NO: 571784 - DNA, 19 bp, Mus musculus
  siRNA target sequence for Gabra6 (NM_008068.1,825-843).
cctccagtatgatttgatt

SEQ ID NO: 571785 - DNA, 19 bp, Mus musculus
  siRNA target sequence for Gabra6 (NM_008068.1,840-858).
gattgggcaaacagtttct

SEQ ID NO: 571786 - DNA, 19 bp, Mus musculus
  siRNA target sequence for Gabra6 (NM_008068.1,851-869).
cagtttctagtgagacaat

SEQ ID NO: 571787 - DNA, 19 bp, Mus musculus
  siRNA target sequence for Gabra6 (NM_008068.1,853-871).
gtttctagtgagacaatta

SEQ ID NO: 571788 - DNA, 19 bp, Mus musculus
  siRNA target sequence for Gabra6 (NM_008068.1,864-882).
gacaattaaatctaacact

SEQ ID NO: 571789 - DNA, 19 bp, Mus musculus
  siRNA target sequence for Gabra6 (NM_008068.1,902-920).
cagtctatttccacttaca

SEQ ID NO: 571790 - DNA, 19 bp, Mus musculus
  siRNA target sequence for Gabra6 (NM_008068.1,904-922).
gtctatttccacttacaaa

SEQ ID NO: 571791 - DNA, 19 bp, Mus musculus
  siRNA target sequence for Gabra6 (NM_008068.1,939-957).
catgatccagatatacact

SEQ ID NO: 571792 - DNA, 19 bp, Mus musculus
  siRNA target sequence for Gabra6 (NM_008068.1,1244-1262).
cccctgtggcaaagtcaaa

SEQ ID NO: 571793 - DNA, 19 bp, Mus musculus
  siRNA target sequence for Gabra6 (NM_008068.1,1385-1403).
gtagaacgcccatcttaaa

SEQ ID NO: 571794 - DNA, 19 bp, Mus musculus
  siRNA target sequence for Gabra6 (NM_008068.1,1446-1464).
gggcaccagcaaaatagat

SEQ ID NO: 571795 - DNA, 19 bp, Mus musculus
  siRNA target sequence for Gabra6 (NM_008068.1,1515-1533).
gtactggatagtttacctt

SEQ ID NO: 571796 - DNA, 19 bp, Mus musculus
  siRNA target sequence for Gabra6 (NM_008068.1,1521-1539).
gatagtttacctttccaaa

SEQ ID NO: 571797 - DNA, 19 bp, Mus musculus
  siRNA target sequence for Gabra6 (NM_008068.1,1525-1543).
gtttacctttccaaagata

SEQ ID NO: 571798 - DNA, 19 bp, Mus musculus
  siRNA target sequence for Gabrd (NM_008072.1,162-180).
gcgccagggcaatgaatga

SEQ ID NO: 571799 - DNA, 19 bp, Mus musculus
  siRNA target sequence for Gabrd (NM_008072.1,164-182).
gccagggcaatgaatgaca

SEQ ID NO: 571800 - DNA, 19 bp, Mus musculus
  siRNA target sequence for Gabrd (NM_008072.1,225-243).
ccaacctggatggcttaat

SEQ ID NO: 571801 - DNA, 19 bp, Mus musculus
  siRNA target sequence for Gabrd (NM_008072.1,317-335).
gccagcattgaccatatct

SEQ ID NO: 571802 - DNA, 19 bp, Mus musculus
  siRNA target sequence for Gabrd (NM_008072.1,319-337).
cagcattgaccatatctca

SEQ ID NO: 571803 - DNA, 19 bp, Mus musculus
  siRNA target sequence for Gabrd (NM_008072.1,440-458).
cgctttgtggacaagctat

SEQ ID NO: 571804 - DNA, 19 bp, Mus musculus
  siRNA target sequence for Gabrd (NM_008072.1,513-531).
ctgtggaaaacaagcttat

SEQ ID NO: 571805 - DNA, 19 bp, Mus musculus
  siRNA target sequence for Gabrd (NM_008072.1,543-561).
ctgatggggtgattttata

SEQ ID NO: 571806 - DNA, 19 bp, Mus musculus
  siRNA target sequence for Gabrd (NM_008072.1,545-563).
gatggggtgattttataca

SEQ ID NO: 571807 - DNA, 19 bp, Mus musculus
  siRNA target sequence for Gabrd (NM_008072.1,671-689).
gacattgtctattattggt

SEQ ID NO: 571808 - DNA, 19 bp, Mus musculus
  siRNA target sequence for Gabrd (NM_008072.1,728-746).
cagctggcccagttcacta

SEQ ID NO: 571809 - DNA, 19 bp, Mus musculus
  siRNA target sequence for Gabrd (NM_008072.1,731-749).
ctggcccagttcactatca

SEQ ID NO: 571810 - DNA, 19 bp, Mus musculus
  siRNA target sequence for Gabrd (NM_008072.1,804-822).
cacggctcagcttacactt

SEQ ID NO: 571811 - DNA, 19 bp, Mus musculus
  siRNA target sequence for Gabrd (NM_008072.1,928-946).
gcctgccagagtatctcta

SEQ ID NO: 571812 - DNA, 19 bp, Mus musculus
  siRNA target sequence for Gabrd (NM_008072.1,1005-1023).
cacgggcttcagctatcaa

SEQ ID NO: 571813 - DNA, 19 bp, Mus musculus
  siRNA target sequence for Gabrd (NM_008072.1,1028-1046).
ctggatgtgtatttttgga

SEQ ID NO: 571814 - DNA, 19 bp, Mus musculus
  siRNA target sequence for Gabrd (NM_008072.1,1044-1062).
ggatctgctacgtctttgt

SEQ ID NO: 571815 - DNA, 19 bp, Mus musculus
  siRNA target sequence for Gabrd (NM_008072.1,1048-1066).
ctgctacgtctttgtgttt

SEQ ID NO: 571816 - DNA, 19 bp, Mus musculus
  siRNA target sequence for Gabrd (NM_008072.1,1255-1273).
gaacctcatgggttcctat

SEQ ID NO: 571817 - DNA, 19 bp, Mus musculus
  siRNA target sequence for Gabrd (NM_008072.1,1259-1277).
ctcatgggttcctataggt

SEQ ID NO: 571818 - DNA, 19 bp, Mus musculus
  siRNA target sequence for Gabrd (NM_008072.1,1390-1408).
cgtcttcccggcagctttt

SEQ ID NO: 571819 - DNA, 19 bp, Mus musculus
  siRNA target sequence for Gabrd (NM_008072.1,1404-1422).
cttttgcagcggtcaacat

SEQ ID NO: 571820 - DNA, 19 bp, Mus musculus
  siRNA target sequence for Gabrd (NM_008072.1,1410-1428).
cagcggtcaacatcatcta

SEQ ID NO: 571821 - DNA, 19 bp, Mus musculus
  siRNA target sequence for Gabre (NM_017369.1,39-57).
ctgatgcttctcaacatgt

SEQ ID NO: 571822 - DNA, 19 bp, Mus musculus
  siRNA target sequence for Gabre (NM_017369.1,187-205).
ctggagatactgtagtctt

SEQ ID NO: 571823 - DNA, 19 bp, Mus musculus
  siRNA target sequence for Gabre (NM_017369.1,236-254).
ccctggccatgatgatgta

SEQ ID NO: 571824 - DNA, 19 bp, Mus musculus
  siRNA target sequence for Gabre (NM_017369.1,242-260).
ccatgatgatgtagtcttt

SEQ ID NO: 571825 - DNA, 19 bp, Mus musculus
  siRNA target sequence for Gabre (NM_017369.1,1428-1446).
cgcccaggtgggaaactga

SEQ ID NO: 571826 - DNA, 19 bp, Mus musculus
  siRNA target sequence for Gabre (NM_017369.1,1450-1468).
gagcttctcgaatccttaa

SEQ ID NO: 571827 - DNA, 19 bp, Mus musculus
  siRNA target sequence for Gabre (NM_017369.1,1452-1470).
gcttctcgaatccttaaca

SEQ ID NO: 571828 - DNA, 19 bp, Mus musculus
  siRNA target sequence for Gabre (NM_017369.1,1478-1496).
gagcaactatgaccataaa

SEQ ID NO: 571829 - DNA, 19 bp, Mus musculus
  siRNA target sequence for Gabre (NM_017369.1,1534-1552).
ctgttgaagtcattgtcaa

SEQ ID NO: 571830 - DNA, 19 bp, Mus musculus
  siRNA target sequence for Gabre (NM_017369.1,1629-1647).
cgtcttcgttacaatgaca

SEQ ID NO: 571831 - DNA, 19 bp, Mus musculus
  siRNA target sequence for Gabre (NM_017369.1,1691-1709).
gtggatcccggataccttt

SEQ ID NO: 571832 - DNA, 19 bp, Mus musculus
  siRNA target sequence for Gabre (NM_017369.1,1693-1711).
ggatcccggataccttttt

SEQ ID NO: 571833 - DNA, 19 bp, Mus musculus
  siRNA target sequence for Gabre (NM_017369.1,1694-1712).
gatcccggatacctttttt

SEQ ID NO: 571834 - DNA, 19 bp, Mus musculus
  siRNA target sequence for Gabre (NM_017369.1,1698-1716).
ccggataccttttttagga

SEQ ID NO: 571835 - DNA, 19 bp, Mus musculus
  siRNA target sequence for Gabre (NM_017369.1,1699-1717).
cggataccttttttaggaa

SEQ ID NO: 571836 - DNA, 19 bp, Mus musculus
  siRNA target sequence for Gabre (NM_017369.1,1700-1718).
ggataccttttttaggaat

SEQ ID NO: 571837 - DNA, 19 bp, Mus musculus
  siRNA target sequence for Gabre (NM_017369.1,1701-1719).
gataccttttttaggaatt

SEQ ID NO: 571838 - DNA, 19 bp, Mus musculus
  siRNA target sequence for Gabre (NM_017369.1,1705-1723).
ccttttttaggaattctaa

SEQ ID NO: 571839 - DNA, 19 bp, Mus musculus
  siRNA target sequence for Gabre (NM_017369.1,1720-1738).
ctaagaggacccaagagta

SEQ ID NO: 571840 - DNA, 19 bp, Mus musculus
  siRNA target sequence for Gabre (NM_017369.1,1724-1742).
gaggacccaagagtatgat

SEQ ID NO: 571841 - DNA, 19 bp, Mus musculus
  siRNA target sequence for Gabre (NM_017369.1,1987-2005).
gcgtgaacaacaaaactga

SEQ ID NO: 571842 - DNA, 19 bp, Mus musculus
  siRNA target sequence for Gabre (NM_017369.1,1988-2006).
cgtgaacaacaaaactgaa

SEQ ID NO: 571843 - DNA, 19 bp, Mus musculus
  siRNA target sequence for Gabre (NM_017369.1,2042-2060).
gacattcttcttcaatgta

SEQ ID NO: 571844 - DNA, 19 bp, Mus musculus
  siRNA target sequence for Gabre (NM_017369.1,2063-2081).
caggcggtttggcttcatt

SEQ ID NO: 571845 - DNA, 19 bp, Mus musculus
  siRNA target sequence for Gabre (NM_017369.1,2211-2229).
ggtaccttgtcctgtaaga

SEQ ID NO: 571846 - DNA, 19 bp, Mus musculus
  siRNA target sequence for Gabre (NM_017369.1,2235-2253).
cctcgtgtctcctatctca

SEQ ID NO: 571847 - DNA, 19 bp, Mus musculus
  siRNA target sequence for Gabre (NM_017369.1,2252-2270).
cacggctttggacttctat

SEQ ID NO: 571848 - DNA, 19 bp, Mus musculus
  siRNA target sequence for Gabre (NM_017369.1,2254-2272).
cggctttggacttctatat

SEQ ID NO: 571849 - DNA, 19 bp, Mus musculus
  siRNA target sequence for Gabre (NM_017369.1,2261-2279).
ggacttctatattgcaatt

SEQ ID NO: 571850 - DNA, 19 bp, Mus musculus
  siRNA target sequence for Gabre (NM_017369.1,2297-2315).
ctgcactctgctagagttt

SEQ ID NO: 571851 - DNA, 19 bp, Mus musculus
  siRNA target sequence for Gabre (NM_017369.1,2330-2348).
cctgacctacaataatatt

SEQ ID NO: 571852 - DNA, 19 bp, Mus musculus
  siRNA target sequence for Gabre (NM_017369.1,2333-2351).
gacctacaataatattaaa

SEQ ID NO: 571853 - DNA, 19 bp, Mus musculus
  siRNA target sequence for Gabre (NM_017369.1,2372-2390).
ctaccaacttccaaccaat

SEQ ID NO: 571854 - DNA, 19 bp, Mus musculus
  siRNA target sequence for Gabre (NM_017369.1,2387-2405).
caatagccgtgctaatgca

SEQ ID NO: 571855 - DNA, 19 bp, Mus musculus
  siRNA target sequence for Gabre (NM_017369.1,2505-2523).
gctgaagaggggtatcaat

SEQ ID NO: 571856 - DNA, 19 bp, Mus musculus
  siRNA target sequence for Gabre (NM_017369.1,2590-2608).
gggttctcaggaagtattt

SEQ ID NO: 571857 - DNA, 19 bp, Mus musculus
  siRNA target sequence for Gabre (NM_017369.1,2652-2670).
cgcatctgcatccatgttt

SEQ ID NO: 571858 - DNA, 19 bp, Mus musculus
  siRNA target sequence for Gabre (NM_017369.1,2657-2675).
ctgcatccatgtttatcgt

SEQ ID NO: 571859 - DNA, 19 bp, Mus musculus
  siRNA target sequence for Gabre (NM_017369.1,2667-2685).
gtttatcgtctggataact

SEQ ID NO: 571860 - DNA, 19 bp, Mus musculus
  siRNA target sequence for Gabre (NM_017369.1,2684-2702).
ctattcgcgggtgcttttt

SEQ ID NO: 571861 - DNA, 19 bp, Mus musculus
  siRNA target sequence for Gabre (NM_017369.1,2693-2711).
ggtgctttttcccattaca

SEQ ID NO: 571862 - DNA, 19 bp, Mus musculus
  siRNA target sequence for Gabre (NM_017369.1,2694-2712).
gtgctttttcccattacat

SEQ ID NO: 571863 - DNA, 19 bp, Mus musculus
  siRNA target sequence for Gabre (NM_017369.1,2727-2745).
gtgctctactggctgattt

SEQ ID NO: 571864 - DNA, 19 bp, Mus musculus
  siRNA target sequence for Gabre (NM_017369.1,2737-2755).
ggctgatttgccttaacct

SEQ ID NO: 571865 - DNA, 19 bp, Mus musculus
  siRNA target sequence for Gabrg1 (NM_010252.3,455-473).
gaggagtgaggttgatatt

SEQ ID NO: 571866 - DNA, 19 bp, Mus musculus
  siRNA target sequence for Gabrg1 (NM_010252.3,457-475).
ggagtgaggttgatattct

SEQ ID NO: 571867 - DNA, 19 bp, Mus musculus
  siRNA target sequence for Gabrg1 (NM_010252.3,458-476).
gagtgaggttgatattctt

SEQ ID NO: 571868 - DNA, 19 bp, Mus musculus
  siRNA target sequence for Gabrg1 (NM_010252.3,462-480).
gaggttgatattcttgtta

SEQ ID NO: 571869 - DNA, 19 bp, Mus musculus
  siRNA target sequence for Gabrg1 (NM_010252.3,561-579).
cttggcaccaaaaattcat

SEQ ID NO: 571870 - DNA, 19 bp, Mus musculus
  siRNA target sequence for Gabrg1 (NM_010252.3,564-582).
ggcaccaaaaattcatgaa

SEQ ID NO: 571871 - DNA, 19 bp, Mus musculus
  siRNA target sequence for Gabrg1 (NM_010252.3,584-602).
gagatatcacacaaatcct

SEQ ID NO: 571872 - DNA, 19 bp, Mus musculus
  siRNA target sequence for Gabrg1 (NM_010252.3,593-611).
cacaaatcctcaactcttt

SEQ ID NO: 571873 - DNA, 19 bp, Mus musculus
  siRNA target sequence for Gabrg1 (NM_010252.3,630-648).
caaacttcgtccagatata

SEQ ID NO: 571874 - DNA, 19 bp, Mus musculus
  siRNA target sequence for Gabrg1 (NM_010252.3,651-669).
cgtgagacccacagtgatt

SEQ ID NO: 571875 - DNA, 19 bp, Mus musculus
  siRNA target sequence for Gabrg1 (NM_010252.3,664-682).
gtgattgaaacagatgttt

SEQ ID NO: 571876 - DNA, 19 bp, Mus musculus
  siRNA target sequence for Gabrg1 (NM_010252.3,709-727).
cccataaacatggagtata

SEQ ID NO: 571877 - DNA, 19 bp, Mus musculus
  siRNA target sequence for Gabrg1 (NM_010252.3,721-739).
gagtatacaatagacataa

SEQ ID NO: 571878 - DNA, 19 bp, Mus musculus
  siRNA target sequence for Gabrg1 (NM_010252.3,762-780).
cagccgtttaaagttcaat

SEQ ID NO: 571879 - DNA, 19 bp, Mus musculus
  siRNA target sequence for Gabrg1 (NM_010252.3,766-784).
cgtttaaagttcaatagca

SEQ ID NO: 571880 - DNA, 19 bp, Mus musculus
  siRNA target sequence for Gabrg1 (NM_010252.3,867-885).
ggatgcacactggataaca

SEQ ID NO: 571881 - DNA, 19 bp, Mus musculus
  siRNA target sequence for Gabrg1 (NM_010252.3,868-886).
gatgcacactggataacaa

SEQ ID NO: 571882 - DNA, 19 bp, Mus musculus
  siRNA target sequence for Gabrg1 (NM_010252.3,895-913).
cgcctgctgcggatttgga

SEQ ID NO: 571883 - DNA, 19 bp, Mus musculus
  siRNA target sequence for Gabrg1 (NM_010252.3,920-938).
gaagggttctctatactct

SEQ ID NO: 571884 - DNA, 19 bp, Mus musculus
  siRNA target sequence for Gabrg1 (NM_010252.3,928-946).
ctctatactcttcgattaa

SEQ ID NO: 571885 - DNA, 19 bp, Mus musculus
  siRNA target sequence for Gabrg1 (NM_010252.3,935-953).
ctcttcgattaacaattaa

SEQ ID NO: 571886 - DNA, 19 bp, Mus musculus
  siRNA target sequence for Gabrg1 (NM_010252.3,963-981).
ctaccttcaacttcataat

SEQ ID NO: 571887 - DNA, 19 bp, Mus musculus
  siRNA target sequence for Gabrg1 (NM_010252.3,1027-1045).
ggataccctaaaaatgaaa

SEQ ID NO: 571888 - DNA, 19 bp, Mus musculus
  siRNA target sequence for Gabrg1 (NM_010252.3,1078-1096).
gtagctgatcctaagtact

SEQ ID NO: 571889 - DNA, 19 bp, Mus musculus
  siRNA target sequence for Gabrg1 (NM_010252.3,1087-1105).
cctaagtactggagattat

SEQ ID NO: 571890 - DNA, 19 bp, Mus musculus
  siRNA target sequence for Gabrg1 (NM_010252.3,1114-1132).
gcatttgtagggttacgaa

SEQ ID NO: 571891 - DNA, 19 bp, Mus musculus
  siRNA target sequence for Gabrg1 (NM_010252.3,1115-1133).
catttgtagggttacgaaa

SEQ ID NO: 571892 - DNA, 19 bp, Mus musculus
  siRNA target sequence for Gabrg1 (NM_010252.3,1120-1138).
gtagggttacgaaattcta

SEQ ID NO: 571893 - DNA, 19 bp, Mus musculus
  siRNA target sequence for Gabrg1 (NM_010252.3,1162-1180).
ggagattatattatcatga

SEQ ID NO: 571894 - DNA, 19 bp, Mus musculus
  siRNA target sequence for Gabrg1 (NM_010252.3,1199-1217).
gcagacggatgggctattt

SEQ ID NO: 571895 - DNA, 19 bp, Mus musculus
  siRNA target sequence for Gabrg1 (NM_010252.3,1227-1245).
gacatacattccgtgtatt

SEQ ID NO: 571896 - DNA, 19 bp, Mus musculus
  siRNA target sequence for Gabrg1 (NM_010252.3,1229-1247).
catacattccgtgtattct

SEQ ID NO: 571897 - DNA, 19 bp, Mus musculus
  siRNA target sequence for Gabrg1 (NM_010252.3,1233-1251).
cattccgtgtattctaaca

SEQ ID NO: 571898 - DNA, 19 bp, Mus musculus
  siRNA target sequence for Gabrg1 (NM_010252.3,1291-1309).
gcagtacctgctagaacat

SEQ ID NO: 571899 - DNA, 19 bp, Mus musculus
  siRNA target sequence for Gabrg1 (NM_010252.3,1315-1333).
ggtatcactacggttttga

SEQ ID NO: 571900 - DNA, 19 bp, Mus musculus
  siRNA target sequence for Gabrg1 (NM_010252.3,1338-1356).
gacaaccctcagtacaatt

SEQ ID NO: 571901 - DNA, 19 bp, Mus musculus
  siRNA target sequence for Gabrg1 (NM_010252.3,1452-1470).
cggaaccttgcattatttt

SEQ ID NO: 571902 - DNA, 19 bp, Mus musculus
  siRNA target sequence for Gabrg1 (NM_010252.3,1586-1604).
cacaaggggaagatgatta

SEQ ID NO: 571903 - DNA, 19 bp, Mus musculus
  siRNA target sequence for Gabrg1 (NM_010252.3,1630-1648).
gactgtactagctttttct

SEQ ID NO: 571904 - DNA, 19 bp, Mus musculus
  siRNA target sequence for Gabrg1 (NM_010252.3,1682-1700).
gggaagggcggatacacat

SEQ ID NO: 571905 - DNA, 19 bp, Mus musculus
  siRNA target sequence for Gabrg1 (NM_010252.3,1683-1701).
ggaagggcggatacacata

SEQ ID NO: 571906 - DNA, 19 bp, Mus musculus
  siRNA target sequence for Gabrg1 (NM_010252.3,1696-1714).
cacatacgcattgcaaaaa

SEQ ID NO: 571907 - DNA, 19 bp, Mus musculus
  siRNA target sequence for Gabrg1 (NM_010252.3,1698-1716).
catacgcattgcaaaaatt

SEQ ID NO: 571908 - DNA, 19 bp, Mus musculus
  siRNA target sequence for Gabrg1 (NM_010252.3,1748-1766).
cttttgccttgttcaatct

SEQ ID NO: 571909 - DNA, 19 bp, Mus musculus
  siRNA target sequence for Gabrg1 (NM_010252.3,1775-1793).
gggttgggtatctatactt

SEQ ID NO: 571910 - DNA, 19 bp, Mus musculus
  siRNA target sequence for Gabrg1 (NM_010252.3,1776-1794).
ggttgggtatctatactta

SEQ ID NO: 571911 - DNA, 19 bp, Mus musculus
  siRNA target sequence for Gabrg1 (NM_010252.3,1777-1795).
gttgggtatctatacttat

SEQ ID NO: 571912 - DNA, 19 bp, Mus musculus
  siRNA target sequence for Gabrg2 (NM_008073.1,441-459).
ctctacccaggcttcacaa

SEQ ID NO: 571913 - DNA, 19 bp, Mus musculus
  siRNA target sequence for Gabrg2 (NM_008073.1,450-468).
ggcttcacaagccaaaagt

SEQ ID NO: 571914 - DNA, 19 bp, Mus musculus
  siRNA target sequence for Gabrg2 (NM_008073.1,452-470).
cttcacaagccaaaagtca

SEQ ID NO: 571915 - DNA, 19 bp, Mus musculus
  siRNA target sequence for Gabrg2 (NM_008073.1,486-504).
gattacgcttctaataaaa

SEQ ID NO: 571916 - DNA, 19 bp, Mus musculus
  siRNA target sequence for Gabrg2 (NM_008073.1,566-584).
ggaagggtatgacaacaaa

SEQ ID NO: 571917 - DNA, 19 bp, Mus musculus
  siRNA target sequence for Gabrg2 (NM_008073.1,594-612).
gacatcggagtgaaaccaa

SEQ ID NO: 571918 - DNA, 19 bp, Mus musculus
  siRNA target sequence for Gabrg2 (NM_008073.1,601-619).
gagtgaaaccaacattaat

SEQ ID NO: 571919 - DNA, 19 bp, Mus musculus
  siRNA target sequence for Gabrg2 (NM_008073.1,649-667).
gtccagtgaatgctatcaa

SEQ ID NO: 571920 - DNA, 19 bp, Mus musculus
  siRNA target sequence for Gabrg2 (NM_008073.1,651-669).
ccagtgaatgctatcaata

SEQ ID NO: 571921 - DNA, 19 bp, Mus musculus
  siRNA target sequence for Gabrg2 (NM_008073.1,652-670).
cagtgaatgctatcaatat

SEQ ID NO: 571922 - DNA, 19 bp, Mus musculus
  siRNA target sequence for Gabrg2 (NM_008073.1,656-674).
gaatgctatcaatatggaa

SEQ ID NO: 571923 - DNA, 19 bp, Mus musculus
  siRNA target sequence for Gabrg2 (NM_008073.1,671-689).
ggaatatacaattgatatt

SEQ ID NO: 571924 - DNA, 19 bp, Mus musculus
  siRNA target sequence for Gabrg2 (NM_008073.1,672-690).
gaatatacaattgatattt

SEQ ID NO: 571925 - DNA, 19 bp, Mus musculus
  siRNA target sequence for Gabrg2 (NM_008073.1,706-724).
ggtatgacagacgtttgaa

SEQ ID NO: 571926 - DNA, 19 bp, Mus musculus
  siRNA target sequence for Gabrg2 (NM_008073.1,707-725).
gtatgacagacgtttgaaa

SEQ ID NO: 571927 - DNA, 19 bp, Mus musculus
  siRNA target sequence for Gabrg2 (NM_008073.1,711-729).
gacagacgtttgaaattta

SEQ ID NO: 571928 - DNA, 19 bp, Mus musculus
  siRNA target sequence for Gabrg2 (NM_008073.1,744-762).
gttctccggttgaatagca

SEQ ID NO: 571929 - DNA, 19 bp, Mus musculus
  siRNA target sequence for Gabrg2 (NM_008073.1,747-765).
ctccggttgaatagcaata

SEQ ID NO: 571930 - DNA, 19 bp, Mus musculus
  siRNA target sequence for Gabrg2 (NM_008073.1,751-769).
ggttgaatagcaatatggt

SEQ ID NO: 571931 - DNA, 19 bp, Mus musculus
  siRNA target sequence for Gabrg2 (NM_008073.1,841-859).
ccaacaggatgctgagaat

SEQ ID NO: 571932 - DNA, 19 bp, Mus musculus
  siRNA target sequence for Gabrg2 (NM_008073.1,851-869).
gctgagaatttggaatgat

SEQ ID NO: 571933 - DNA, 19 bp, Mus musculus
  siRNA target sequence for Gabrg2 (NM_008073.1,884-902).
caccttaaggctaacaatt

SEQ ID NO: 571934 - DNA, 19 bp, Mus musculus
  siRNA target sequence for Gabrg2 (NM_008073.1,886-904).
ccttaaggctaacaattga

SEQ ID NO: 571935 - DNA, 19 bp, Mus musculus
  siRNA target sequence for Gabrg2 (NM_008073.1,887-905).
cttaaggctaacaattgat

SEQ ID NO: 571936 - DNA, 19 bp, Mus musculus
  siRNA target sequence for Gabrg2 (NM_008073.1,906-924).
gctgagtgccagttgcaat

SEQ ID NO: 571937 - DNA, 19 bp, Mus musculus
  siRNA target sequence for Gabrg2 (NM_008073.1,913-931).
gccagttgcaattacacaa

SEQ ID NO: 571938 - DNA, 19 bp, Mus musculus
  siRNA target sequence for Gabrg2 (NM_008073.1,968-986).
ctccagttatggatatcct

SEQ ID NO: 571939 - DNA, 19 bp, Mus musculus
  siRNA target sequence for Gabrg2 (NM_008073.1,978-996).
ggatatcctcgtgaagaaa

SEQ ID NO: 571940 - DNA, 19 bp, Mus musculus
  siRNA target sequence for Gabrg2 (NM_008073.1,979-997).
gatatcctcgtgaagaaat

SEQ ID NO: 571941 - DNA, 19 bp, Mus musculus
  siRNA target sequence for Gabrg2 (NM_008073.1,984-1002).
cctcgtgaagaaattgttt

SEQ ID NO: 571942 - DNA, 19 bp, Mus musculus
  siRNA target sequence for Gabrg2 (NM_008073.1,985-1003).
ctcgtgaagaaattgttta

SEQ ID NO: 571943 - DNA, 19 bp, Mus musculus
  siRNA target sequence for Gabrg2 (NM_008073.1,1010-1028).
gaagcgcagttctgttgaa

SEQ ID NO: 571944 - DNA, 19 bp, Mus musculus
  siRNA target sequence for Gabrg2 (NM_008073.1,1026-1044).
gaagtgggtgacacaagat

SEQ ID NO: 571945 - DNA, 19 bp, Mus musculus
  siRNA target sequence for Gabrg2 (NM_008073.1,1051-1069).
ggctgtatcaattttcctt

SEQ ID NO: 571946 - DNA, 19 bp, Mus musculus
  siRNA target sequence for Gabrg2 (NM_008073.1,1071-1089).
gttggattgaggaatacaa

SEQ ID NO: 571947 - DNA, 19 bp, Mus musculus
  siRNA target sequence for Gabrg2 (NM_008073.1,1079-1097).
gaggaatacaactgaagta

SEQ ID NO: 571948 - DNA, 19 bp, Mus musculus
  siRNA target sequence for Gabrg2 (NM_008073.1,1081-1099).
ggaatacaactgaagtagt

SEQ ID NO: 571949 - DNA, 19 bp, Mus musculus
  siRNA target sequence for Gabrg2 (NM_008073.1,1105-1123).
caacttctggtgactatgt

SEQ ID NO: 571950 - DNA, 19 bp, Mus musculus
  siRNA target sequence for Gabrg2 (NM_008073.1,1169-1187).
caccatccagacttacatt

SEQ ID NO: 571951 - DNA, 19 bp, Mus musculus
  siRNA target sequence for Gabrg2 (NM_008073.1,1251-1269).
gccagaacatctttaggaa

SEQ ID NO: 571952 - DNA, 19 bp, Mus musculus
  siRNA target sequence for Gabrg2 (NM_008073.1,1252-1270).
ccagaacatctttaggaat

SEQ ID NO: 571953 - DNA, 19 bp, Mus musculus
  siRNA target sequence for Gabrg2 (NM_008073.1,1280-1298).
cctgaccatgacaacttta

SEQ ID NO: 571954 - DNA, 19 bp, Mus musculus
  siRNA target sequence for Gabrg2 (NM_008073.1,1303-1321).
ccatagccagaaaatctct

SEQ ID NO: 571955 - DNA, 19 bp, Mus musculus
  siRNA target sequence for Gabrg2 (NM_008073.1,1431-1449).
cggaagccaagcaaggata

SEQ ID NO: 571956 - DNA, 19 bp, Mus musculus
  siRNA target sequence for Gabrg2 (NM_008073.1,1469-1487).
ccctcttcttcggatgttt

SEQ ID NO: 571957 - DNA, 19 bp, Mus musculus
  siRNA target sequence for Gabrg2 (NM_008073.1,1490-1508).
cttcaaggcccctaccatt

SEQ ID NO: 571958 - DNA, 19 bp, Mus musculus
  siRNA target sequence for Gabrg2 (NM_008073.1,1493-1511).
caaggcccctaccattgat

SEQ ID NO: 571959 - DNA, 19 bp, Mus musculus
  siRNA target sequence for Gabrg2 (NM_008073.1,1499-1517).
ccctaccattgatattcgt

SEQ ID NO: 571960 - DNA, 19 bp, Mus musculus
  siRNA target sequence for Gabrg2 (NM_008073.1,1520-1538).
cagatcagcaaccattcaa

SEQ ID NO: 571961 - DNA, 19 bp, Mus musculus
  siRNA target sequence for Gabrg2 (NM_008073.1,1522-1540).
gatcagcaaccattcaaat

SEQ ID NO: 571962 - DNA, 19 bp, Mus musculus
  siRNA target sequence for Gabrg2 (NM_008073.1,1657-1675).
gacatgggaggatacatat

SEQ ID NO: 571963 - DNA, 19 bp, Mus musculus
  siRNA target sequence for Gabrg2 (NM_008073.1,1696-1714).
cctatgctcggatcttctt

SEQ ID NO: 571964 - DNA, 19 bp, Mus musculus
  siRNA target sequence for Gabrg2 (NM_008073.1,1720-1738).
ccgccttttgcttgttcaa

SEQ ID NO: 571965 - DNA, 19 bp, Mus musculus
  siRNA target sequence for Gabrg2 (NM_008073.1,1721-1739).
cgccttttgcttgttcaat

SEQ ID NO: 571966 - DNA, 19 bp, Mus musculus
  siRNA target sequence for Gabrg2 (NM_008073.1,1723-1741).
ccttttgcttgttcaatct

SEQ ID NO: 571967 - DNA, 19 bp, Mus musculus
  siRNA target sequence for Gabrg2 (NM_008073.1,1748-1766).
ctgggtctcctatctttat

SEQ ID NO: 571968 - DNA, 19 bp, Mus musculus
  siRNA target sequence for Gabrg2 (NM_008073.1,1750-1768).
gggtctcctatctttatct

SEQ ID NO: 571969 - DNA, 19 bp, Mus musculus
  siRNA target sequence for Gabrg2 (NM_177408.2,1140-1158).
gaagaaaaaccctgtatgt

SEQ ID NO: 571970 - DNA, 19 bp, Mus musculus
  siRNA target sequence for Gabrg3 (NM_008074.1,248-266).
gatgtggacatttatgtta

SEQ ID NO: 571971 - DNA, 19 bp, Mus musculus
  siRNA target sequence for Gabrg3 (NM_008074.1,336-354).
cagacagtcgccttcgatt

SEQ ID NO: 571972 - DNA, 19 bp, Mus musculus
  siRNA target sequence for Gabrg3 (NM_008074.1,394-412).
ggtgggcttgatatggatt

SEQ ID NO: 571973 - DNA, 19 bp, Mus musculus
  siRNA target sequence for Gabrg3 (NM_008074.1,413-431).
ccagacaccatctttcgaa

SEQ ID NO: 571974 - DNA, 19 bp, Mus musculus
  siRNA target sequence for Gabrg3 (NM_008074.1,416-434).
gacaccatctttcgaaatt

SEQ ID NO: 571975 - DNA, 19 bp, Mus musculus
  siRNA target sequence for Gabrg3 (NM_008074.1,418-436).
caccatctttcgaaattct

SEQ ID NO: 571976 - DNA, 19 bp, Mus musculus
  siRNA target sequence for Gabrg3 (NM_008074.1,420-438).
ccatctttcgaaattctaa

SEQ ID NO: 571977 - DNA, 19 bp, Mus musculus
  siRNA target sequence for Gabrg3 (NM_008074.1,421-439).
catctttcgaaattctaaa

SEQ ID NO: 571978 - DNA, 19 bp, Mus musculus
  siRNA target sequence for Gabrg3 (NM_008074.1,513-531).
cattaaggctcactatcaa

SEQ ID NO: 571979 - DNA, 19 bp, Mus musculus
  siRNA target sequence for Gabrg3 (NM_008074.1,678-696).
ggctctatcagtttgactt

SEQ ID NO: 571980 - DNA, 19 bp, Mus musculus
  siRNA target sequence for Gabrg3 (NM_008074.1,729-747).
caacatctgcaggtgatta

SEQ ID NO: 571981 - DNA, 19 bp, Mus musculus
  siRNA target sequence for Gabrg3 (NM_008074.1,754-772).
catgactatctattttgaa

SEQ ID NO: 571982 - DNA, 19 bp, Mus musculus
  siRNA target sequence for Gabrg3 (NM_008074.1,777-795).
gtcgaagaatgggatactt

SEQ ID NO: 571983 - DNA, 19 bp, Mus musculus
  siRNA target sequence for Gabrg3 (NM_008074.1,971-989).
gccatggacctctttgtga

SEQ ID NO: 571984 - DNA, 19 bp, Mus musculus
  siRNA target sequence for Gabrg3 (NM_008074.1,1031-1049).
gctacactcaactactatt

SEQ ID NO: 571985 - DNA, 19 bp, Mus musculus
  siRNA target sequence for Gabrg3 (NM_008074.1,1078-1096).
gaaaaaaacttcgttatta

SEQ ID NO: 571986 - DNA, 19 bp, Mus musculus
  siRNA target sequence for Gabrg3 (NM_008074.1,1113-1131).
gatggattcctgatcgaat

SEQ ID NO: 571987 - DNA, 19 bp, Mus musculus
  siRNA target sequence for Gabrg3 (NM_008074.1,1135-1153).
ccttcaagcaccctctaat

SEQ ID NO: 571988 - DNA, 19 bp, Mus musculus
  siRNA target sequence for Gabrg3 (NM_008074.1,1136-1154).
cttcaagcaccctctaatt

SEQ ID NO: 571989 - DNA, 19 bp, Mus musculus
  siRNA target sequence for Gabrg3 (NM_008074.1,1139-1157).
caagcaccctctaattact

SEQ ID NO: 571990 - DNA, 19 bp, Mus musculus
  siRNA target sequence for Gabrg3 (NM_008074.1,1184-1202).
cctgtgatgatcacgttaa

SEQ ID NO: 571991 - DNA, 19 bp, Mus musculus
  siRNA target sequence for Gabrg3 (NM_008074.1,1185-1203).
ctgtgatgatcacgttaaa

SEQ ID NO: 571992 - DNA, 19 bp, Mus musculus
  siRNA target sequence for Gabrg3 (NM_008074.1,1187-1205).
gtgatgatcacgttaaaca

SEQ ID NO: 571993 - DNA, 19 bp, Mus musculus
  siRNA target sequence for Gabrg3 (NM_008074.1,1189-1207).
gatgatcacgttaaacaat

SEQ ID NO: 571994 - DNA, 19 bp, Mus musculus
  siRNA target sequence for Gabrg3 (NM_008074.1,1210-1228).
catgtactggcaggaattt

SEQ ID NO: 571995 - DNA, 19 bp, Mus musculus
  siRNA target sequence for Gabrg3 (NM_008074.1,1323-1341).
gccgcatccacattgatgt

SEQ ID NO: 571996 - DNA, 19 bp, Mus musculus
  siRNA target sequence for Gabrg3 (NM_008074.1,1356-1374).
cctactctcgggtcttctt

SEQ ID NO: 571997 - DNA, 19 bp, Mus musculus
  siRNA target sequence for Gabrg3 (NM_008074.1,1391-1409).
ctgttcaacctggtctatt

SEQ ID NO: 571998 - DNA, 19 bp, Mus musculus
  siRNA target sequence for Gabrg3 (NM_008074.1,1410-1428).
gggttggatacctgtatct

SEQ ID NO: 571999 - DNA, 19 bp, Mus musculus
  siRNA target sequence for Gabrp (NM_146017.2,328-346).
ctcactgcaggatataaca

SEQ ID NO: 572000 - DNA, 19 bp, Mus musculus
  siRNA target sequence for Gabrp (NM_146017.2,330-348).
cactgcaggatataacaaa

SEQ ID NO: 572001 - DNA, 19 bp, Mus musculus
  siRNA target sequence for Gabrp (NM_146017.2,332-350).
ctgcaggatataacaaatt

SEQ ID NO: 572002 - DNA, 19 bp, Mus musculus
  siRNA target sequence for Gabrp (NM_146017.2,438-456).
ggactacacagccactata

SEQ ID NO: 572003 - DNA, 19 bp, Mus musculus
  siRNA target sequence for Gabrp (NM_146017.2,501-519).
caacaagagctttactcta

SEQ ID NO: 572004 - DNA, 19 bp, Mus musculus
  siRNA target sequence for Gabrp (NM_146017.2,545-563).
gggtgccagacacttacat

SEQ ID NO: 572005 - DNA, 19 bp, Mus musculus
  siRNA target sequence for Gabrp (NM_146017.2,546-564).
ggtgccagacacttacatt

SEQ ID NO: 572006 - DNA, 19 bp, Mus musculus
  siRNA target sequence for Gabrp (NM_146017.2,551-569).
cagacacttacattgtaga

SEQ ID NO: 572007 - DNA, 19 bp, Mus musculus
  siRNA target sequence for Gabrp (NM_146017.2,640-658).
gtcctgtacgcacttagaa

SEQ ID NO: 572008 - DNA, 19 bp, Mus musculus
  siRNA target sequence for Gabrp (NM_146017.2,643-661).
ctgtacgcacttagaatca

SEQ ID NO: 572009 - DNA, 19 bp, Mus musculus
  siRNA target sequence for Gabrp (NM_146017.2,645-663).
gtacgcacttagaatcaca

SEQ ID NO: 572010 - DNA, 19 bp, Mus musculus
  siRNA target sequence for Gabrp (NM_146017.2,649-667).
gcacttagaatcacaacaa

SEQ ID NO: 572011 - DNA, 19 bp, Mus musculus
  siRNA target sequence for Gabrp (NM_146017.2,665-683).
caacagttacatgtaacat

SEQ ID NO: 572012 - DNA, 19 bp, Mus musculus
  siRNA target sequence for Gabrp (NM_146017.2,677-695).
gtaacatggatctgtctaa

SEQ ID NO: 572013 - DNA, 19 bp, Mus musculus
  siRNA target sequence for Gabrp (NM_146017.2,741-759).
gggatacgatggcaatgat

SEQ ID NO: 572014 - DNA, 19 bp, Mus musculus
  siRNA target sequence for Gabrp (NM_146017.2,743-761).
gatacgatggcaatgatgt

SEQ ID NO: 572015 - DNA, 19 bp, Mus musculus
  siRNA target sequence for Gabrp (NM_146017.2,789-807).
ctcggtgcgtggacttgaa

SEQ ID NO: 572016 - DNA, 19 bp, Mus musculus
  siRNA target sequence for Gabrp (NM_146017.2,791-809).
cggtgcgtggacttgaaaa

SEQ ID NO: 572017 - DNA, 19 bp, Mus musculus
  siRNA target sequence for Gabrp (NM_146017.2,814-832).
cgccttgctcagtacacaa

SEQ ID NO: 572018 - DNA, 19 bp, Mus musculus
  siRNA target sequence for Gabrp (NM_146017.2,825-843).
gtacacaatccaacagtat

SEQ ID NO: 572019 - DNA, 19 bp, Mus musculus
  siRNA target sequence for Gabrp (NM_146017.2,868-886).
caggagacaggaaactata

SEQ ID NO: 572020 - DNA, 19 bp, Mus musculus
  siRNA target sequence for Gabrp (NM_146017.2,871-889).
gagacaggaaactatacga

SEQ ID NO: 572021 - DNA, 19 bp, Mus musculus
  siRNA target sequence for Gabrp (NM_146017.2,890-908).
gattggttttgcaatttga

SEQ ID NO: 572022 - DNA, 19 bp, Mus musculus
  siRNA target sequence for Gabrp (NM_146017.2,913-931).
cggaggaacgtcctgtatt

SEQ ID NO: 572023 - DNA, 19 bp, Mus musculus
  siRNA target sequence for Gabrp (NM_146017.2,914-932).
ggaggaacgtcctgtattt

SEQ ID NO: 572024 - DNA, 19 bp, Mus musculus
  siRNA target sequence for Gabrp (NM_146017.2,992-1010).
ggatctccctcgattcagt

SEQ ID NO: 572025 - DNA, 19 bp, Mus musculus
  siRNA target sequence for Gabrp (NM_146017.2,993-1011).
gatctccctcgattcagtt

SEQ ID NO: 572026 - DNA, 19 bp, Mus musculus
  siRNA target sequence for Gabrp (NM_146017.2,1030-1048).
ggagtgacaacggtgttat

SEQ ID NO: 572027 - DNA, 19 bp, Mus musculus
  siRNA target sequence for Gabrp (NM_146017.2,1033-1051).
gtgacaacggtgttatcca

SEQ ID NO: 572028 - DNA, 19 bp, Mus musculus
  siRNA target sequence for Gabrp (NM_146017.2,1197-1215).
gcagatggcagtcaaagat

SEQ ID NO: 572029 - DNA, 19 bp, Mus musculus
  siRNA target sequence for Gabrp (NM_146017.2,1226-1244).
cgaaggactcggaagaagt

SEQ ID NO: 572030 - DNA, 19 bp, Mus musculus
  siRNA target sequence for Gabrp (NM_146017.2,1230-1248).
ggactcggaagaagtcaat

SEQ ID NO: 572031 - DNA, 19 bp, Mus musculus
  siRNA target sequence for Gabrp (NM_146017.2,1278-1296).
cagctttaaacggaagatt

SEQ ID NO: 572032 - DNA, 19 bp, Mus musculus
  siRNA target sequence for Gabrp (NM_146017.2,1321-1339).
ggtgacaatgtcaactata

SEQ ID NO: 572033 - DNA, 19 bp, Mus musculus
  siRNA target sequence for Gabrp (NM_146017.2,1353-1371).
gaaagccagcgacaagttt

SEQ ID NO: 572034 - DNA, 19 bp, Mus musculus
  siRNA target sequence for Gabrp (NM_146017.2,1357-1375).
gccagcgacaagtttaagt

SEQ ID NO: 572035 - DNA, 19 bp, Mus musculus
  siRNA target sequence for Gabrp (NM_146017.2,1358-1376).
ccagcgacaagtttaagtt

SEQ ID NO: 572036 - DNA, 19 bp, Mus musculus
  siRNA target sequence for Gabrp (NM_146017.2,1389-1407).
gaagatcagcagaatcatt

SEQ ID NO: 572037 - DNA, 19 bp, Mus musculus
  siRNA target sequence for Gabrp (NM_146017.2,1392-1410).
gatcagcagaatcattgat

SEQ ID NO: 572038 - DNA, 19 bp, Mus musculus
  siRNA target sequence for Gabrp (NM_146017.2,1440-1458).
ggatcgatactccaaacta

SEQ ID NO: 572039 - DNA, 19 bp, Mus musculus
  siRNA target sequence for Gabrp (NM_146017.2,1444-1462).
cgatactccaaactactat

SEQ ID NO: 572040 - DNA, 19 bp, Mus musculus
  siRNA target sequence for Gabrp (NM_146017.2,1497-1515).
ctgggcatactacatgtat

SEQ ID NO: 572041 - DNA, 19 bp, Mus musculus
  siRNA target sequence for Gabrp (NM_146017.2,1499-1517).
gggcatactacatgtattt

SEQ ID NO: 572042 - DNA, 19 bp, Mus musculus
  siRNA target sequence for Gabrq (NM_020488.1,73-91).
cttggctggcagagagtaa

SEQ ID NO: 572043 - DNA, 19 bp, Mus musculus
  siRNA target sequence for Gabrq (NM_020488.1,97-115).
ccagtcccaccccgaaatt

SEQ ID NO: 572044 - DNA, 19 bp, Mus musculus
  siRNA target sequence for Gabrq (NM_020488.1,100-118).
gtcccaccccgaaattcca

SEQ ID NO: 572045 - DNA, 19 bp, Mus musculus
  siRNA target sequence for Gabrq (NM_020488.1,133-151).
ccagcacgcctgaagtcat

SEQ ID NO: 572046 - DNA, 19 bp, Mus musculus
  siRNA target sequence for Gabrq (NM_020488.1,215-233).
ggtgctgtcaacatatgat

SEQ ID NO: 572047 - DNA, 19 bp, Mus musculus
  siRNA target sequence for Gabrq (NM_020488.1,236-254).
ccgacttagaccaaatttt

SEQ ID NO: 572048 - DNA, 19 bp, Mus musculus
  siRNA target sequence for Gabrq (NM_020488.1,270-288).
cctgtgtcagtatctatct

SEQ ID NO: 572049 - DNA, 19 bp, Mus musculus
  siRNA target sequence for Gabrq (NM_020488.1,287-305).
ctatgtgtccagtattgaa

SEQ ID NO: 572050 - DNA, 19 bp, Mus musculus
  siRNA target sequence for Gabrq (NM_020488.1,368-386).
cacacgcttagcttactat

SEQ ID NO: 572051 - DNA, 19 bp, Mus musculus
  siRNA target sequence for Gabrq (NM_020488.1,370-388).
cacgcttagcttactatga

SEQ ID NO: 572052 - DNA, 19 bp, Mus musculus
  siRNA target sequence for Gabrq (NM_020488.1,372-390).
cgcttagcttactatgaaa

SEQ ID NO: 572053 - DNA, 19 bp, Mus musculus
  siRNA target sequence for Gabrq (NM_020488.1,437-455).
ggttcctgactgctacttt

SEQ ID NO: 572054 - DNA, 19 bp, Mus musculus
  siRNA target sequence for Gabrq (NM_020488.1,448-466).
gctactttgtgaatagcaa

SEQ ID NO: 572055 - DNA, 19 bp, Mus musculus
  siRNA target sequence for Gabrq (NM_020488.1,494-512).
ggagaatcgtgtatttcaa

SEQ ID NO: 572056 - DNA, 19 bp, Mus musculus
  siRNA target sequence for Gabrq (NM_020488.1,497-515).
gaatcgtgtatttcaactt

SEQ ID NO: 572057 - DNA, 19 bp, Mus musculus
  siRNA target sequence for Gabrq (NM_020488.1,568-586).
gttccctggatctgcaaaa

SEQ ID NO: 572058 - DNA, 19 bp, Mus musculus
  siRNA target sequence for Gabrq (NM_020488.1,672-690).
gataatgccatccacatta

SEQ ID NO: 572059 - DNA, 19 bp, Mus musculus
  siRNA target sequence for Gabrq (NM_020488.1,719-737).
gtacctggggagaacaatt

SEQ ID NO: 572060 - DNA, 19 bp, Mus musculus
  siRNA target sequence for Gabrq (NM_020488.1,769-787).
cctacatgcgcctgatagt

SEQ ID NO: 572061 - DNA, 19 bp, Mus musculus
  siRNA target sequence for Gabrq (NM_020488.1,806-824).
ggaagtccgcagttacctt

SEQ ID NO: 572062 - DNA, 19 bp, Mus musculus
  siRNA target sequence for Gabrq (NM_020488.1,943-961).
ctaccatcgactcacatat

SEQ ID NO: 572063 - DNA, 19 bp, Mus musculus
  siRNA target sequence for Gabrq (NM_020488.1,953-971).
ctcacatatgcgggataaa

SEQ ID NO: 572064 - DNA, 19 bp, Mus musculus
  siRNA target sequence for Gabrq (NM_020488.1,955-973).
cacatatgcgggataaact

SEQ ID NO: 572065 - DNA, 19 bp, Mus musculus
  siRNA target sequence for Gabrq (NM_020488.1,975-993).
ccccatatttcctgtatca

SEQ ID NO: 572066 - DNA, 19 bp, Mus musculus
  siRNA target sequence for Gabrq (NM_020488.1,1021-1039).
gcctattcttcgttttcct

SEQ ID NO: 572067 - DNA, 19 bp, Mus musculus
  siRNA target sequence for Gabrq (NM_020488.1,1042-1060).
cactgctggagtatgtcta

SEQ ID NO: 572068 - DNA, 19 bp, Mus musculus
  siRNA target sequence for Gabrq (NM_020488.1,1086-1104).
gtacctcggcgtaatcaca

SEQ ID NO: 572069 - DNA, 19 bp, Mus musculus
  siRNA target sequence for Gabrq (NM_020488.1,1092-1110).
cggcgtaatcacagaagat

SEQ ID NO: 572070 - DNA, 19 bp, Mus musculus
  siRNA target sequence for Gabrq (NM_020488.1,1138-1156).
gataccgctaccaagaagt

SEQ ID NO: 572071 - DNA, 19 bp, Mus musculus
  siRNA target sequence for Gabrq (NM_020488.1,1170-1188).
gtgcaggatggcctgatta

SEQ ID NO: 572072 - DNA, 19 bp, Mus musculus
  siRNA target sequence for Gabrq (NM_020488.1,1414-1432).
ctgagtgtaccattcactt

SEQ ID NO: 572073 - DNA, 19 bp, Mus musculus
  siRNA target sequence for Gabrq (NM_020488.1,1437-1455).
ggctttcttactaatgaca

SEQ ID NO: 572074 - DNA, 19 bp, Mus musculus
  siRNA target sequence for Gabrq (NM_020488.1,1606-1624).
caagttgggaccttgataa

SEQ ID NO: 572075 - DNA, 19 bp, Mus musculus
  siRNA target sequence for Gabrq (NM_020488.1,1609-1627).
gttgggaccttgataaaat

SEQ ID NO: 572076 - DNA, 19 bp, Mus musculus
  siRNA target sequence for Gabrq (NM_020488.1,1612-1630).
gggaccttgataaaattga

SEQ ID NO: 572077 - DNA, 19 bp, Mus musculus
  siRNA target sequence for Gabrq (NM_020488.1,1638-1656).
caggatgacatcagtatca

SEQ ID NO: 572078 - DNA, 19 bp, Mus musculus
  siRNA target sequence for Gabrq (NM_020488.1,1847-1865).
ggtccccaaggttgataga

SEQ ID NO: 572079 - DNA, 19 bp, Mus musculus
  siRNA target sequence for Gabrq (NM_020488.1,1848-1866).
gtccccaaggttgatagat

SEQ ID NO: 572080 - DNA, 19 bp, Mus musculus
  siRNA target sequence for Gabrq (NM_020488.1,1897-1915).
ggctgttcaatgtggttta

SEQ ID NO: 572081 - DNA, 19 bp, Mus musculus
  siRNA target sequence for Gabrq (NM_020488.1,1910-1928).
ggtttactggttataccat

SEQ ID NO: 572082 - DNA, 19 bp, Mus musculus
  siRNA target sequence for Gabrr1 (NM_008075.1,182-200).
gccaggaagagaagttcat

SEQ ID NO: 572083 - DNA, 19 bp, Mus musculus
  siRNA target sequence for Gabrr1 (NM_008075.1,288-306).
cgaagctctgacataacca

SEQ ID NO: 572084 - DNA, 19 bp, Mus musculus
  siRNA target sequence for Gabrr1 (NM_008075.1,340-358).
ggatagacgaccatgattt

SEQ ID NO: 572085 - DNA, 19 bp, Mus musculus
  siRNA target sequence for Gabrr1 (NM_008075.1,537-555).
gatggccgacttgtaaaga

SEQ ID NO: 572086 - DNA, 19 bp, Mus musculus
  siRNA target sequence for Gabrr1 (NM_008075.1,562-580).
gggttcccgacatgttctt

SEQ ID NO: 572087 - DNA, 19 bp, Mus musculus
  siRNA target sequence for Gabrr1 (NM_008075.1,563-581).
ggttcccgacatgttcttt

SEQ ID NO: 572088 - DNA, 19 bp, Mus musculus
  siRNA target sequence for Gabrr1 (NM_008075.1,766-784).
cggaagacgacctaatgct

SEQ ID NO: 572089 - DNA, 19 bp, Mus musculus
  siRNA target sequence for Gabrr1 (NM_008075.1,838-856).
ctcagttcctcattcaaga

SEQ ID NO: 572090 - DNA, 19 bp, Mus musculus
  siRNA target sequence for Gabrr1 (NM_008075.1,1109-1127).
ccgagtgtcctacatcaaa

SEQ ID NO: 572091 - DNA, 19 bp, Mus musculus
  siRNA target sequence for Gabrr1 (NM_008075.1,1451-1469).
caacactcacgccattgat

SEQ ID NO: 572092 - DNA, 19 bp, Mus musculus
  siRNA target sequence for Gabrr1 (NM_008075.1,1454-1472).
cactcacgccattgataaa

SEQ ID NO: 572093 - DNA, 19 bp, Mus musculus
  siRNA target sequence for Gabrr1 (NM_008075.1,1456-1474).
ctcacgccattgataaata

SEQ ID NO: 572094 - DNA, 19 bp, Mus musculus
  siRNA target sequence for Gabrr1 (NM_008075.1,1494-1512).
gccgcttacattttattca

SEQ ID NO: 572095 - DNA, 19 bp, Mus musculus
  siRNA target sequence for Gabrr1 (NM_008075.1,1495-1513).
ccgcttacattttattcaa

SEQ ID NO: 572096 - DNA, 19 bp, Mus musculus
  siRNA target sequence for Gabrr1 (NM_008075.1,1515-1533).
ctgatatactggtcaattt

SEQ ID NO: 572097 - DNA, 19 bp, Mus musculus
  siRNA target sequence for Gabrr2 (NM_008076.2,740-758).
ccgatggccatgtgctata

SEQ ID NO: 572098 - DNA, 19 bp, Mus musculus
  siRNA target sequence for Gabrr2 (NM_008076.2,754-772).
ctatacagcatgaggatta

SEQ ID NO: 572099 - DNA, 19 bp, Mus musculus
  siRNA target sequence for Gabrr2 (NM_008076.2,849-867).
ctatgcgtacacagatgaa

SEQ ID NO: 572100 - DNA, 19 bp, Mus musculus
  siRNA target sequence for Gabrr2 (NM_008076.2,1489-1507).
gccctcaacagtgaattga

SEQ ID NO: 572101 - DNA, 19 bp, Mus musculus
  siRNA target sequence for Gabrr2 (NM_008076.2,1568-1586).
cccatgccattgacaaata

SEQ ID NO: 572102 - DNA, 19 bp, Mus musculus
  siRNA target sequence for Gabrr2 (NM_008076.2,1587-1605).
ctccaggttgatatttcct

SEQ ID NO: 572103 - DNA, 19 bp, Mus musculus
  siRNA target sequence for Gabrr2 (NM_008076.2,1606-1624).
gccttctacatagttttca

SEQ ID NO: 572104 - DNA, 19 bp, Mus musculus
  siRNA target sequence for Gabrr2 (NM_008076.2,1607-1625).
ccttctacatagttttcaa

SEQ ID NO: 572105 - DNA, 19 bp, Mus musculus
  siRNA target sequence for Chrna1 (NM_007389.2,58-76).
gctccgctggccttgttct

SEQ ID NO: 572106 - DNA, 19 bp, Mus musculus
  siRNA target sequence for Chrna1 (NM_007389.2,146-164).
ggaggaccaccgtgagatt

SEQ ID NO: 572107 - DNA, 19 bp, Mus musculus
  siRNA target sequence for Chrna1 (NM_007389.2,149-167).
ggaccaccgtgagattgta

SEQ ID NO: 572108 - DNA, 19 bp, Mus musculus
  siRNA target sequence for Chrna1 (NM_007389.2,152-170).
ccaccgtgagattgtacaa

SEQ ID NO: 572109 - DNA, 19 bp, Mus musculus
  siRNA target sequence for Chrna1 (NM_007389.2,224-242).
gattgtgacaaccaatgta

SEQ ID NO: 572110 - DNA, 19 bp, Mus musculus
  siRNA target sequence for Chrna1 (NM_007389.2,235-253).
ccaatgtacgtctgaaaca

SEQ ID NO: 572111 - DNA, 19 bp, Mus musculus
  siRNA target sequence for Chrna1 (NM_007389.2,252-270).
cagcaatgggtcgattaca

SEQ ID NO: 572112 - DNA, 19 bp, Mus musculus
  siRNA target sequence for Chrna1 (NM_007389.2,255-273).
caatgggtcgattacaact

SEQ ID NO: 572113 - DNA, 19 bp, Mus musculus
  siRNA target sequence for Chrna1 (NM_007389.2,259-277).
gggtcgattacaacttgaa

SEQ ID NO: 572114 - DNA, 19 bp, Mus musculus
  siRNA target sequence for Chrna1 (NM_007389.2,260-278).
ggtcgattacaacttgaaa

SEQ ID NO: 572115 - DNA, 19 bp, Mus musculus
  siRNA target sequence for Chrna1 (NM_007389.2,261-279).
gtcgattacaacttgaaat

SEQ ID NO: 572116 - DNA, 19 bp, Mus musculus
  siRNA target sequence for Chrna1 (NM_007389.2,293-311).
ctatggaggagtgaaaaaa

SEQ ID NO: 572117 - DNA, 19 bp, Mus musculus
  siRNA target sequence for Chrna1 (NM_007389.2,300-318).
ggagtgaaaaaaattcaca

SEQ ID NO: 572118 - DNA, 19 bp, Mus musculus
  siRNA target sequence for Chrna1 (NM_007389.2,342-360).
ccggacgtcgttctctata

SEQ ID NO: 572119 - DNA, 19 bp, Mus musculus
  siRNA target sequence for Chrna1 (NM_007389.2,343-361).
cggacgtcgttctctataa

SEQ ID NO: 572120 - DNA, 19 bp, Mus musculus
  siRNA target sequence for Chrna1 (NM_007389.2,372-390).
ggcgactttgccattgtca

SEQ ID NO: 572121 - DNA, 19 bp, Mus musculus
  siRNA target sequence for Chrna1 (NM_007389.2,374-392).
cgactttgccattgtcaaa

SEQ ID NO: 572122 - DNA, 19 bp, Mus musculus
  siRNA target sequence for Chrna1 (NM_007389.2,375-393).
gactttgccattgtcaaat

SEQ ID NO: 572123 - DNA, 19 bp, Mus musculus
  siRNA target sequence for Chrna1 (NM_007389.2,457-475).
gctactgtgagatcattgt

SEQ ID NO: 572124 - DNA, 19 bp, Mus musculus
  siRNA target sequence for Chrna1 (NM_007389.2,467-485).
gatcattgtcactcacttt

SEQ ID NO: 572125 - DNA, 19 bp, Mus musculus
  siRNA target sequence for Chrna1 (NM_007389.2,550-568).
ccattaacccggaaagtga

SEQ ID NO: 572126 - DNA, 19 bp, Mus musculus
  siRNA target sequence for Chrna1 (NM_007389.2,598-616).
gcggggagtgggtgatcaa

SEQ ID NO: 572127 - DNA, 19 bp, Mus musculus
  siRNA target sequence for Chrna1 (NM_007389.2,750-768).
ctcttctccttcttaacca

SEQ ID NO: 572128 - DNA, 19 bp, Mus musculus
  siRNA target sequence for Chrna1 (NM_007389.2,893-911).
gcccctgatcgggaagtat

SEQ ID NO: 572129 - DNA, 19 bp, Mus musculus
  siRNA target sequence for Chrna1 (NM_007389.2,894-912).
cccctgatcgggaagtata

SEQ ID NO: 572130 - DNA, 19 bp, Mus musculus
  siRNA target sequence for Chrna1 (NM_007389.2,895-913).
ccctgatcgggaagtatat

SEQ ID NO: 572131 - DNA, 19 bp, Mus musculus
  siRNA target sequence for Chrna1 (NM_007389.2,897-915).
ctgatcgggaagtatatgt

SEQ ID NO: 572132 - DNA, 19 bp, Mus musculus
  siRNA target sequence for Chrna1 (NM_007389.2,903-921).
gggaagtatatgttgttca

SEQ ID NO: 572133 - DNA, 19 bp, Mus musculus
  siRNA target sequence for Chrna1 (NM_007389.2,933-951).
gtcattgcgtccatcatca

SEQ ID NO: 572134 - DNA, 19 bp, Mus musculus
  siRNA target sequence for Chrna1 (NM_007389.2,1010-1028).
gtgggtgcggaaggttttt

SEQ ID NO: 572135 - DNA, 19 bp, Mus musculus
  siRNA target sequence for Chrna1 (NM_007389.2,1012-1030).
gggtgcggaaggtttttat

SEQ ID NO: 572136 - DNA, 19 bp, Mus musculus
  siRNA target sequence for Chrna1 (NM_007389.2,1032-1050).
gacactatcccaaacatca

SEQ ID NO: 572137 - DNA, 19 bp, Mus musculus
  siRNA target sequence for Chrna1 (NM_007389.2,1041-1059).
ccaaacatcatgtttttct

SEQ ID NO: 572138 - DNA, 19 bp, Mus musculus
  siRNA target sequence for Chrna1 (NM_007389.2,1204-1222).
ccatcgagggcgtgaagta

SEQ ID NO: 572139 - DNA, 19 bp, Mus musculus
  siRNA target sequence for Chrna1 (NM_007389.2,1208-1226).
cgagggcgtgaagtacatt

SEQ ID NO: 572140 - DNA, 19 bp, Mus musculus
  siRNA target sequence for Chrna1 (NM_007389.2,1265-1283).
cgctgaggaatggaagtat

SEQ ID NO: 572141 - DNA, 19 bp, Mus musculus
  siRNA target sequence for Chrna1 (NM_007389.2,1340-1358).
cgggacgctggctgtgttt

SEQ ID NO: 572142 - DNA, 19 bp, Mus musculus
  siRNA target sequence for Chrna1 (NM_007389.2,1359-1377).
gcaggtcggctcattgagt

SEQ ID NO: 572143 - DNA, 19 bp, Mus musculus
  siRNA target sequence for Chrna1 (NM_007389.2,1360-1378).
caggtcggctcattgagtt

SEQ ID NO: 572144 - DNA, 19 bp, Mus musculus
  siRNA target sequence for Chrna1 (NM_007389.2,1363-1381).
gtcggctcattgagttaca

SEQ ID NO: 572145 - DNA, 19 bp, Mus musculus
  siRNA target sequence for Chrna1 (NM_007389.2,1366-1384).
ggctcattgagttacatca

SEQ ID NO: 572146 - DNA, 19 bp, Mus musculus
  siRNA target sequence for Chrna1 (NM_007389.2,1367-1385).
gctcattgagttacatcaa

SEQ ID NO: 572147 - DNA, 19 bp, Mus musculus
  siRNA target sequence for Chrna2 (NM_144803.1,140-158).
ccagttctggatacatctt

SEQ ID NO: 572148 - DNA, 19 bp, Mus musculus
  siRNA target sequence for Chrna2 (NM_144803.1,143-161).
gttctggatacatctttat

SEQ ID NO: 572149 - DNA, 19 bp, Mus musculus
  siRNA target sequence for Chrna2 (NM_144803.1,270-288).
cggccagtgcccaacactt

SEQ ID NO: 572150 - DNA, 19 bp, Mus musculus
  siRNA target sequence for Chrna2 (NM_144803.1,305-323).
gcgctttggactatccatt

SEQ ID NO: 572151 - DNA, 19 bp, Mus musculus
  siRNA target sequence for Chrna2 (NM_144803.1,448-466).
gcgtcccctcagagatgat

SEQ ID NO: 572152 - DNA, 19 bp, Mus musculus
  siRNA target sequence for Chrna2 (NM_144803.1,469-487).
ggatcccagacattgttct

SEQ ID NO: 572153 - DNA, 19 bp, Mus musculus
  siRNA target sequence for Chrna2 (NM_144803.1,749-767).
caacgccaccggaacctat

SEQ ID NO: 572154 - DNA, 19 bp, Mus musculus
  siRNA target sequence for Chrna2 (NM_144803.1,753-771).
gccaccggaacctataaca

SEQ ID NO: 572155 - DNA, 19 bp, Mus musculus
  siRNA target sequence for Chrna2 (NM_144803.1,1114-1132).
cccctagcacgcacaacat

SEQ ID NO: 572156 - DNA, 19 bp, Mus musculus
  siRNA target sequence for Chrna2 (NM_144803.1,1172-1190).
ccggtggctgatgatgaat

SEQ ID NO: 572157 - DNA, 19 bp, Mus musculus
  siRNA target sequence for Chrna2 (NM_144803.1,1235-1253).
gctcagccccacttatcat

SEQ ID NO: 572158 - DNA, 19 bp, Mus musculus
  siRNA target sequence for Chrna2 (NM_144803.1,1236-1254).
ctcagccccacttatcatt

SEQ ID NO: 572159 - DNA, 19 bp, Mus musculus
  siRNA target sequence for Chrna2 (NM_144803.1,1451-1469).
gtcacctcaaatacagaaa

SEQ ID NO: 572160 - DNA, 19 bp, Mus musculus
  siRNA target sequence for Chrna2 (NM_144803.1,1471-1489).
cactagaaggtgtacacta

SEQ ID NO: 572161 - DNA, 19 bp, Mus musculus
  siRNA target sequence for Chrna3 (NM_145129.1,296-314).
ctgtcatcatccagtttga

SEQ ID NO: 572162 - DNA, 19 bp, Mus musculus
  siRNA target sequence for Chrna3 (NM_145129.1,333-351).
ggtgaaggtggatgaagta

SEQ ID NO: 572163 - DNA, 19 bp, Mus musculus
  siRNA target sequence for Chrna3 (NM_145129.1,397-415).
gactacaagctgaaatgga

SEQ ID NO: 572164 - DNA, 19 bp, Mus musculus
  siRNA target sequence for Chrna3 (NM_145129.1,498-516).
cgccgatggggatttccaa

SEQ ID NO: 572165 - DNA, 19 bp, Mus musculus
  siRNA target sequence for Chrna3 (NM_145129.1,582-600).
ctttaagagctcatgcaaa

SEQ ID NO: 572166 - DNA, 19 bp, Mus musculus
  siRNA target sequence for Chrna3 (NM_145129.1,588-606).
gagctcatgcaaaatcgat

SEQ ID NO: 572167 - DNA, 19 bp, Mus musculus
  siRNA target sequence for Chrna3 (NM_145129.1,735-753).
cgagtgggccatcattaaa

SEQ ID NO: 572168 - DNA, 19 bp, Mus musculus
  siRNA target sequence for Chrna3 (NM_145129.1,813-831).
cacgtactcgctatacatt

SEQ ID NO: 572169 - DNA, 19 bp, Mus musculus
  siRNA target sequence for Chrna3 (NM_145129.1,1171-1189).
cccagggtcatgtttatga

SEQ ID NO: 572170 - DNA, 19 bp, Mus musculus
  siRNA target sequence for Chrna3 (NM_145129.1,1219-1237).
ccaaagacgaggaacttct

SEQ ID NO: 572171 - DNA, 19 bp, Mus musculus
  siRNA target sequence for Chrna3 (NM_145129.1,1220-1238).
caaagacgaggaacttcta

SEQ ID NO: 572172 - DNA, 19 bp, Mus musculus
  siRNA target sequence for Chrna3 (NM_145129.1,1339-1357).
caccgtagggtaaaaatct

SEQ ID NO: 572173 - DNA, 19 bp, Mus musculus
  siRNA target sequence for Chrna3 (NM_145129.1,1341-1359).
ccgtagggtaaaaatctca

SEQ ID NO: 572174 - DNA, 19 bp, Mus musculus
  siRNA target sequence for Chrna3 (NM_145129.1,1342-1360).
cgtagggtaaaaatctcaa

SEQ ID NO: 572175 - DNA, 19 bp, Mus musculus
  siRNA target sequence for Chrna3 (NM_145129.1,1427-1445).
ctctgtcaccagaaatcaa

SEQ ID NO: 572176 - DNA, 19 bp, Mus musculus
  siRNA target sequence for Chrna3 (NM_145129.1,1451-1469).
ccatccaaagtgtgaagta

SEQ ID NO: 572177 - DNA, 19 bp, Mus musculus
  siRNA target sequence for Chrna3 (NM_145129.1,1539-1557).
ggtgattgatcgcattttt

SEQ ID NO: 572178 - DNA, 19 bp, Mus musculus
  siRNA target sequence for Chrna3 (NM_145129.1,1573-1591).
ctggtgtgcattttaggaa

SEQ ID NO: 572179 - DNA, 19 bp, Mus musculus
  siRNA target sequence for Chrna4 (NM_015730.4,184-202).
ctgctagcagccacataga

SEQ ID NO: 572180 - DNA, 19 bp, Mus musculus
  siRNA target sequence for Chrna4 (NM_015730.4,186-204).
gctagcagccacatagaga

SEQ ID NO: 572181 - DNA, 19 bp, Mus musculus
  siRNA target sequence for Chrna4 (NM_015730.4,267-285).
cggccagtagccaatatct

SEQ ID NO: 572182 - DNA, 19 bp, Mus musculus
  siRNA target sequence for Chrna4 (NM_015730.4,269-287).
gccagtagccaatatctca

SEQ ID NO: 572183 - DNA, 19 bp, Mus musculus
  siRNA target sequence for Chrna4 (NM_015730.4,415-433).
ctggtgactacgagaatgt

SEQ ID NO: 572184 - DNA, 19 bp, Mus musculus
  siRNA target sequence for Chrna4 (NM_015730.4,440-458).
catccgcatcccatctgaa

SEQ ID NO: 572185 - DNA, 19 bp, Mus musculus
  siRNA target sequence for Chrna4 (NM_015730.4,526-544).
ccaaagcccacctgttcta

SEQ ID NO: 572186 - DNA, 19 bp, Mus musculus
  siRNA target sequence for Chrna4 (NM_015730.4,764-782).
caacaccaggaagtatgaa

SEQ ID NO: 572187 - DNA, 19 bp, Mus musculus
  siRNA target sequence for Chrna4 (NM_015730.4,890-908).
caccgtgctggtcttctat

SEQ ID NO: 572188 - DNA, 19 bp, Mus musculus
  siRNA target sequence for Chrna4 (NM_015730.4,1167-1185).
ccccgtctcctcttcatga

SEQ ID NO: 572189 - DNA, 19 bp, Mus musculus
  siRNA target sequence for Chrna4 (NM_015730.4,1168-1186).
cccgtctcctcttcatgaa

SEQ ID NO: 572190 - DNA, 19 bp, Mus musculus
  siRNA target sequence for Chrna4 (NM_015730.4,1216-1234).
ggagacttatcgaatccat

SEQ ID NO: 572191 - DNA, 19 bp, Mus musculus
  siRNA target sequence for Chrna5 (NM_176844.2,180-198).
cgctgcgcctgctcttgat

SEQ ID NO: 572192 - DNA, 19 bp, Mus musculus
  siRNA target sequence for Chrna5 (NM_176844.2,253-271).
gggagacggacgtttcgaa

SEQ ID NO: 572193 - DNA, 19 bp, Mus musculus
  siRNA target sequence for Chrna5 (NM_176844.2,268-286).
cgaaggggccagtacgaaa

SEQ ID NO: 572194 - DNA, 19 bp, Mus musculus
  siRNA target sequence for Chrna5 (NM_176844.2,269-287).
gaaggggccagtacgaaaa

SEQ ID NO: 572195 - DNA, 19 bp, Mus musculus
  siRNA target sequence for Chrna5 (NM_176844.2,273-291).
gggccagtacgaaaacagt

SEQ ID NO: 572196 - DNA, 19 bp, Mus musculus
  siRNA target sequence for Chrna5 (NM_176844.2,274-292).
ggccagtacgaaaacagtt

SEQ ID NO: 572197 - DNA, 19 bp, Mus musculus
  siRNA target sequence for Chrna5 (NM_176844.2,318-336).
ggacgcagccagcaaacta

SEQ ID NO: 572198 - DNA, 19 bp, Mus musculus
  siRNA target sequence for Chrna5 (NM_176844.2,321-339).
cgcagccagcaaactacaa

SEQ ID NO: 572199 - DNA, 19 bp, Mus musculus
  siRNA target sequence for Chrna5 (NM_176844.2,329-347).
gcaaactacaaaagttctt

SEQ ID NO: 572200 - DNA, 19 bp, Mus musculus
  siRNA target sequence for Chrna5 (NM_176844.2,337-355).
caaaagttcttgcactata

SEQ ID NO: 572201 - DNA, 19 bp, Mus musculus
  siRNA target sequence for Chrna5 (NM_176844.2,342-360).
gttcttgcactatagatgt

SEQ ID NO: 572202 - DNA, 19 bp, Mus musculus
  siRNA target sequence for Chrna5 (NM_176844.2,403-421).
cggctcatggacgtatgat

SEQ ID NO: 572203 - DNA, 19 bp, Mus musculus
  siRNA target sequence for Chrna5 (NM_176844.2,458-476).
gtcgacagaacagactttt

SEQ ID NO: 572204 - DNA, 19 bp, Mus musculus
  siRNA target sequence for Chrna5 (NM_176844.2,740-758).
gaaattataccgtcatctt

SEQ ID NO: 572205 - DNA, 19 bp, Mus musculus
  siRNA target sequence for Chrna5 (NM_176844.2,771-789).
ctctgatcggggagtactt

SEQ ID NO: 572206 - DNA, 19 bp, Mus musculus
  siRNA target sequence for Chrna5 (NM_176844.2,886-904).
gccgtgggttcgtaagata

SEQ ID NO: 572207 - DNA, 19 bp, Mus musculus
  siRNA target sequence for Chrna5 (NM_176844.2,887-905).
ccgtgggttcgtaagatat

SEQ ID NO: 572208 - DNA, 19 bp, Mus musculus
  siRNA target sequence for Chrna5 (NM_176844.2,888-906).
cgtgggttcgtaagatatt

SEQ ID NO: 572209 - DNA, 19 bp, Mus musculus
  siRNA target sequence for Chrna5 (NM_176844.2,889-907).
gtgggttcgtaagatattt

SEQ ID NO: 572210 - DNA, 19 bp, Mus musculus
  siRNA target sequence for Chrna5 (NM_176844.2,891-909).
gggttcgtaagatatttct

SEQ ID NO: 572211 - DNA, 19 bp, Mus musculus
  siRNA target sequence for Chrna5 (NM_176844.2,939-957).
gaagtcatgccgataggta

SEQ ID NO: 572212 - DNA, 19 bp, Mus musculus
  siRNA target sequence for Chrna5 (NM_176844.2,944-962).
catgccgataggtacttca

SEQ ID NO: 572213 - DNA, 19 bp, Mus musculus
  siRNA target sequence for Chrna5 (NM_176844.2,982-1000).
gaaagacggtggacctaaa

SEQ ID NO: 572214 - DNA, 19 bp, Mus musculus
  siRNA target sequence for Chrna5 (NM_176844.2,996-1014).
ctaaatctcggaatacttt

SEQ ID NO: 572215 - DNA, 19 bp, Mus musculus
  siRNA target sequence for Chrna5 (NM_176844.2,1028-1046).
gattgcattcgctacatca

SEQ ID NO: 572216 - DNA, 19 bp, Mus musculus
  siRNA target sequence for Chrna5 (NM_176844.2,1045-1063).
cacgagacacgtagtgaaa

SEQ ID NO: 572217 - DNA, 19 bp, Mus musculus
  siRNA target sequence for Chrna5 (NM_176844.2,1047-1065).
cgagacacgtagtgaaaga

SEQ ID NO: 572218 - DNA, 19 bp, Mus musculus
  siRNA target sequence for Chrna5 (NM_176844.2,1072-1090).
cgtccgcgaggttgttgaa

SEQ ID NO: 572219 - DNA, 19 bp, Mus musculus
  siRNA target sequence for Chrna5 (NM_176844.2,1075-1093).
ccgcgaggttgttgaagat

SEQ ID NO: 572220 - DNA, 19 bp, Mus musculus
  siRNA target sequence for Chrna5 (NM_176844.2,1076-1094).
cgcgaggttgttgaagatt

SEQ ID NO: 572221 - DNA, 19 bp, Mus musculus
  siRNA target sequence for Chrna5 (NM_176844.2,1126-1144).
gtttctatggacgtttctt

SEQ ID NO: 572222 - DNA, 19 bp, Mus musculus
  siRNA target sequence for Chrna5 (NM_176844.2,1161-1179).
ggacgctagggctttttgt

SEQ ID NO: 572223 - DNA, 19 bp, Mus musculus
  siRNA target sequence for Chrna5 (NM_176844.2,1162-1180).
gacgctagggctttttgtt

SEQ ID NO: 572224 - DNA, 19 bp, Mus musculus
  siRNA target sequence for Chrna5 (NM_176844.2,1211-1229).
gtcccagttcacattggaa

SEQ ID NO: 572225 - DNA, 19 bp, Mus musculus
  siRNA target sequence for Chrna5 (NM_176844.2,1220-1238).
cacattggaaacacaatta

SEQ ID NO: 572226 - DNA, 19 bp, Mus musculus
  siRNA target sequence for Chrna6 (NM_021369.2,415-433).
ccgtcacggtgcattttga

SEQ ID NO: 572227 - DNA, 19 bp, Mus musculus
  siRNA target sequence for Chrna6 (NM_021369.2,416-434).
cgtcacggtgcattttgaa

SEQ ID NO: 572228 - DNA, 19 bp, Mus musculus
  siRNA target sequence for Chrna6 (NM_021369.2,417-435).
gtcacggtgcattttgaat

SEQ ID NO: 572229 - DNA, 19 bp, Mus musculus
  siRNA target sequence for Chrna6 (NM_021369.2,594-612).
cctgacatcgttctgtata

SEQ ID NO: 572230 - DNA, 19 bp, Mus musculus
  siRNA target sequence for Chrna6 (NM_021369.2,599-617).
catcgttctgtataacaat

SEQ ID NO: 572231 - DNA, 19 bp, Mus musculus
  siRNA target sequence for Chrna6 (NM_021369.2,767-785).
gtttggttcctggacttat

SEQ ID NO: 572232 - DNA, 19 bp, Mus musculus
  siRNA target sequence for Chrna6 (NM_021369.2,793-811).
cagaaatcgaccttctcat

SEQ ID NO: 572233 - DNA, 19 bp, Mus musculus
  siRNA target sequence for Chrna6 (NM_021369.2,877-895).
ctggctataagcatgacat

SEQ ID NO: 572234 - DNA, 19 bp, Mus musculus
  siRNA target sequence for Chrna6 (NM_021369.2,915-933).
gagatttacacggacataa

SEQ ID NO: 572235 - DNA, 19 bp, Mus musculus
  siRNA target sequence for Chrna6 (NM_021369.2,952-970).
ggaggttgcccatgtttta

SEQ ID NO: 572236 - DNA, 19 bp, Mus musculus
  siRNA target sequence for Chrna6 (NM_021369.2,1142-1160).
cccactggtgggtgagtat

SEQ ID NO: 572237 - DNA, 19 bp, Mus musculus
  siRNA target sequence for Chrna6 (NM_021369.2,1205-1223).
cgtgttcgtgctgaacata

SEQ ID NO: 572238 - DNA, 19 bp, Mus musculus
  siRNA target sequence for Chrna6 (NM_021369.2,1284-1302).
gccttcccctcgattctga

SEQ ID NO: 572239 - DNA, 19 bp, Mus musculus
  siRNA target sequence for Chrna6 (NM_021369.2,1285-1303).
ccttcccctcgattctgat

SEQ ID NO: 572240 - DNA, 19 bp, Mus musculus
  siRNA target sequence for Chrna6 (NM_021369.2,1373-1391).
gcctgccaaggtcaaattt

SEQ ID NO: 572241 - DNA, 19 bp, Mus musculus
  siRNA target sequence for Chrna6 (NM_021369.2,1374-1392).
cctgccaaggtcaaattta

SEQ ID NO: 572242 - DNA, 19 bp, Mus musculus
  siRNA target sequence for Chrna6 (NM_021369.2,1378-1396).
ccaaggtcaaatttactca

SEQ ID NO: 572243 - DNA, 19 bp, Mus musculus
  siRNA target sequence for Chrna6 (NM_021369.2,1379-1397).
caaggtcaaatttactcat

SEQ ID NO: 572244 - DNA, 19 bp, Mus musculus
  siRNA target sequence for Chrna6 (NM_021369.2,1393-1411).
ctcatcgaggagaatccaa

SEQ ID NO: 572245 - DNA, 19 bp, Mus musculus
  siRNA target sequence for Chrna6 (NM_021369.2,1402-1420).
gagaatccaaacttctaaa

SEQ ID NO: 572246 - DNA, 19 bp, Mus musculus
  siRNA target sequence for Chrna6 (NM_021369.2,1451-1469).
catagcacctggaaagaga

SEQ ID NO: 572247 - DNA, 19 bp, Mus musculus
  siRNA target sequence for Chrna6 (NM_021369.2,1493-1511).
gtgggtggcagagaattca

SEQ ID NO: 572248 - DNA, 19 bp, Mus musculus
  siRNA target sequence for Chrna6 (NM_021369.2,1514-1532).
gcactcgtccgatgttgaa

SEQ ID NO: 572249 - DNA, 19 bp, Mus musculus
  siRNA target sequence for Chrna6 (NM_021369.2,1517-1535).
ctcgtccgatgttgaagat

SEQ ID NO: 572250 - DNA, 19 bp, Mus musculus
  siRNA target sequence for Chrna6 (NM_021369.2,1519-1537).
cgtccgatgttgaagatgt

SEQ ID NO: 572251 - DNA, 19 bp, Mus musculus
  siRNA target sequence for Chrna6 (NM_021369.2,1522-1540).
ccgatgttgaagatgtcat

SEQ ID NO: 572252 - DNA, 19 bp, Mus musculus
  siRNA target sequence for Chrna6 (NM_021369.2,1541-1559).
cgagagtgttcaattcata

SEQ ID NO: 572253 - DNA, 19 bp, Mus musculus
  siRNA target sequence for Chrna6 (NM_021369.2,1596-1614).
gtagaagacgactggaaat

SEQ ID NO: 572254 - DNA, 19 bp, Mus musculus
  siRNA target sequence for Chrna6 (NM_021369.2,1643-1661).
cctttgggtatttataatt

SEQ ID NO: 572255 - DNA, 19 bp, Mus musculus
  siRNA target sequence for Chrna6 (NM_021369.2,1675-1693).
gaactgtggggctatttct

SEQ ID NO: 572256 - DNA, 19 bp, Mus musculus
  siRNA target sequence for Chrna7 (NM_007390.2,251-269).
gttttaaccaccaacattt

SEQ ID NO: 572257 - DNA, 19 bp, Mus musculus
  siRNA target sequence for Chrna7 (NM_007390.2,280-298).
gtcttggacagatcactat

SEQ ID NO: 572258 - DNA, 19 bp, Mus musculus
  siRNA target sequence for Chrna7 (NM_007390.2,317-335).
gagtaccccggagtgaaaa

SEQ ID NO: 572259 - DNA, 19 bp, Mus musculus
  siRNA target sequence for Chrna7 (NM_007390.2,319-337).
gtaccccggagtgaaaaat

SEQ ID NO: 572260 - DNA, 19 bp, Mus musculus
  siRNA target sequence for Chrna7 (NM_007390.2,322-340).
ccccggagtgaaaaatgtt

SEQ ID NO: 572261 - DNA, 19 bp, Mus musculus
  siRNA target sequence for Chrna7 (NM_007390.2,369-387).
cagacattctcctctataa

SEQ ID NO: 572262 - DNA, 19 bp, Mus musculus
  siRNA target sequence for Chrna7 (NM_007390.2,373-391).
cattctcctctataacagt

SEQ ID NO: 572263 - DNA, 19 bp, Mus musculus
  siRNA target sequence for Chrna7 (NM_007390.2,444-462).
ctgggcattgccagtatct

SEQ ID NO: 572264 - DNA, 19 bp, Mus musculus
  siRNA target sequence for Chrna7 (NM_007390.2,461-479).
ctccctccaggcatattca

SEQ ID NO: 572265 - DNA, 19 bp, Mus musculus
  siRNA target sequence for Chrna7 (NM_007390.2,504-522).
gctggttcccttttgatgt

SEQ ID NO: 572266 - DNA, 19 bp, Mus musculus
  siRNA target sequence for Chrna7 (NM_007390.2,521-539).
gtgcagcagtgcaaactga

SEQ ID NO: 572267 - DNA, 19 bp, Mus musculus
  siRNA target sequence for Chrna7 (NM_007390.2,593-611).
gcagatatcagcagctata

SEQ ID NO: 572268 - DNA, 19 bp, Mus musculus
  siRNA target sequence for Chrna7 (NM_007390.2,594-612).
cagatatcagcagctatat

SEQ ID NO: 572269 - DNA, 19 bp, Mus musculus
  siRNA target sequence for Chrna7 (NM_007390.2,654-672).
ggaatgagaagttctatga

SEQ ID NO: 572270 - DNA, 19 bp, Mus musculus
  siRNA target sequence for Chrna7 (NM_007390.2,695-713).
gatgtcacctacacagtaa

SEQ ID NO: 572271 - DNA, 19 bp, Mus musculus
  siRNA target sequence for Chrna7 (NM_007390.2,720-738).
gccgtaggacactctacta

SEQ ID NO: 572272 - DNA, 19 bp, Mus musculus
  siRNA target sequence for Chrna7 (NM_007390.2,721-739).
ccgtaggacactctactat

SEQ ID NO: 572273 - DNA, 19 bp, Mus musculus
  siRNA target sequence for Chrna7 (NM_007390.2,809-827).
gactctggagagaaaatct

SEQ ID NO: 572274 - DNA, 19 bp, Mus musculus
  siRNA target sequence for Chrna7 (NM_007390.2,886-904).
catgccagcaacatctgat

SEQ ID NO: 572275 - DNA, 19 bp, Mus musculus
  siRNA target sequence for Chrna7 (NM_007390.2,1027-1045).
gtggaccaggatcattctt

SEQ ID NO: 572276 - DNA, 19 bp, Mus musculus
  siRNA target sequence for Chrna7 (NM_007390.2,1029-1047).
ggaccaggatcattcttct

SEQ ID NO: 572277 - DNA, 19 bp, Mus musculus
  siRNA target sequence for Chrna7 (NM_007390.2,1273-1291).
ctgctccccaacacatgat

SEQ ID NO: 572278 - DNA, 19 bp, Mus musculus
  siRNA target sequence for Chrna7 (NM_007390.2,1460-1478).
gccttttcggtttttacca

SEQ ID NO: 572279 - DNA, 19 bp, Mus musculus
  siRNA target sequence for Chrnb1 (NM_009601.3,140-158).
gccgaaggccaactgatta

SEQ ID NO: 572280 - DNA, 19 bp, Mus musculus
  siRNA target sequence for Chrnb1 (NM_009601.3,141-159).
ccgaaggccaactgattaa

SEQ ID NO: 572281 - DNA, 19 bp, Mus musculus
  siRNA target sequence for Chrnb1 (NM_009601.3,160-178).
gaaacttttctccaactat

SEQ ID NO: 572282 - DNA, 19 bp, Mus musculus
  siRNA target sequence for Chrnb1 (NM_009601.3,334-352).
ggaccccgcagaacatgat

SEQ ID NO: 572283 - DNA, 19 bp, Mus musculus
  siRNA target sequence for Chrnb1 (NM_009601.3,344-362).
gaacatgatggcatcgatt

SEQ ID NO: 572284 - DNA, 19 bp, Mus musculus
  siRNA target sequence for Chrnb1 (NM_009601.3,436-454).
cgttgccctggacatcaat

SEQ ID NO: 572285 - DNA, 19 bp, Mus musculus
  siRNA target sequence for Chrnb1 (NM_009601.3,640-658).
gcaggaagtctacattcat

SEQ ID NO: 572286 - DNA, 19 bp, Mus musculus
  siRNA target sequence for Chrnb1 (NM_009601.3,681-699).
gccaatgggagattatcca

SEQ ID NO: 572287 - DNA, 19 bp, Mus musculus
  siRNA target sequence for Chrnb1 (NM_009601.3,697-715).
ccacaaaccttctaggtta

SEQ ID NO: 572288 - DNA, 19 bp, Mus musculus
  siRNA target sequence for Chrnb1 (NM_009601.3,752-770).
gggcatcatgaggaagtta

SEQ ID NO: 572289 - DNA, 19 bp, Mus musculus
  siRNA target sequence for Chrnb1 (NM_009601.3,971-989).
ctggcggtgcccatcatta

SEQ ID NO: 572290 - DNA, 19 bp, Mus musculus
  siRNA target sequence for Chrnb1 (NM_009601.3,974-992).
gcggtgcccatcattatca

SEQ ID NO: 572291 - DNA, 19 bp, Mus musculus
  siRNA target sequence for Chrnb1 (NM_009601.3,975-993).
cggtgcccatcattatcaa

SEQ ID NO: 572292 - DNA, 19 bp, Mus musculus
  siRNA target sequence for Chrnb1 (NM_009601.3,977-995).
gtgcccatcattatcaagt

SEQ ID NO: 572293 - DNA, 19 bp, Mus musculus
  siRNA target sequence for Chrnb1 (NM_009601.3,1098-1116).
gggtccgccagatcttcat

SEQ ID NO: 572294 - DNA, 19 bp, Mus musculus
  siRNA target sequence for Chrnb1 (NM_009601.3,1103-1121).
cgccagatcttcattcaca

SEQ ID NO: 572295 - DNA, 19 bp, Mus musculus
  siRNA target sequence for Chrnb1 (NM_009601.3,1178-1196).
gaaccacatcactctcttt

SEQ ID NO: 572296 - DNA, 19 bp, Mus musculus
  siRNA target sequence for Chrnb1 (NM_009601.3,1241-1259).
cggaagcctccaagtgatt

SEQ ID NO: 572297 - DNA, 19 bp, Mus musculus
  siRNA target sequence for Chrnb1 (NM_009601.3,1242-1260).
ggaagcctccaagtgattt

SEQ ID NO: 572298 - DNA, 19 bp, Mus musculus
  siRNA target sequence for Chrnb1 (NM_009601.3,1243-1261).
gaagcctccaagtgatttt

SEQ ID NO: 572299 - DNA, 19 bp, Mus musculus
  siRNA target sequence for Chrnb1 (NM_009601.3,1247-1265).
cctccaagtgattttcttt

SEQ ID NO: 572300 - DNA, 19 bp, Mus musculus
  siRNA target sequence for Chrnb1 (NM_009601.3,1279-1297).
caggtttcagcctgaatca

SEQ ID NO: 572301 - DNA, 19 bp, Mus musculus
  siRNA target sequence for Chrnb1 (NM_009601.3,1282-1300).
gtttcagcctgaatcatct

SEQ ID NO: 572302 - DNA, 19 bp, Mus musculus
  siRNA target sequence for Chrnb1 (NM_009601.3,1304-1322).
ccggacctgcgacgattta

SEQ ID NO: 572303 - DNA, 19 bp, Mus musculus
  siRNA target sequence for Chrnb1 (NM_009601.3,1305-1323).
cggacctgcgacgatttat

SEQ ID NO: 572304 - DNA, 19 bp, Mus musculus
  siRNA target sequence for Chrnb1 (NM_009601.3,1309-1327).
cctgcgacgatttatcgat

SEQ ID NO: 572305 - DNA, 19 bp, Mus musculus
  siRNA target sequence for Chrnb1 (NM_009601.3,1358-1376).
gagctacgagaggtcattt

SEQ ID NO: 572306 - DNA, 19 bp, Mus musculus
  siRNA target sequence for Chrnb1 (NM_009601.3,1361-1379).
ctacgagaggtcatttcct

SEQ ID NO: 572307 - DNA, 19 bp, Mus musculus
  siRNA target sequence for Chrnb1 (NM_009601.3,1367-1385).
gaggtcatttcctcaatca

SEQ ID NO: 572308 - DNA, 19 bp, Mus musculus
  siRNA target sequence for Chrnb1 (NM_009601.3,1459-1477).
ggttgtggaccgtcttttt

SEQ ID NO: 572309 - DNA, 19 bp, Mus musculus
  siRNA target sequence for Chrnb1 (NM_009601.3,1463-1481).
gtggaccgtctttttctgt

SEQ ID NO: 572310 - DNA, 19 bp, Mus musculus
  siRNA target sequence for Chrnb1 (NM_009601.3,1503-1521).
gcgtcgggaccctagtcat

SEQ ID NO: 572311 - DNA, 19 bp, Mus musculus
  siRNA target sequence for Chrnb1 (NM_009601.3,1504-1522).
cgtcgggaccctagtcatt

SEQ ID NO: 572312 - DNA, 19 bp, Mus musculus
  siRNA target sequence for Chrnb1 (NM_009601.3,1505-1523).
gtcgggaccctagtcattt

SEQ ID NO: 572313 - DNA, 19 bp, Mus musculus
  siRNA target sequence for Chrnb1 (NM_009601.3,1509-1527).
ggaccctagtcattttcct

SEQ ID NO: 572314 - DNA, 19 bp, Mus musculus
  siRNA target sequence for Chrnb1 (NM_009601.3,1526-1544).
ctagatgccacgtaccatt

SEQ ID NO: 572315 - DNA, 19 bp, Mus musculus
  siRNA target sequence for Chrnb2 (NM_009602.3,291-309).
gatccttcccgctataaca

SEQ ID NO: 572316 - DNA, 19 bp, Mus musculus
  siRNA target sequence for Chrnb2 (NM_009602.3,314-332).
gatccgtccagctactaat

SEQ ID NO: 572317 - DNA, 19 bp, Mus musculus
  siRNA target sequence for Chrnb2 (NM_009602.3,351-369).
gtacagctcatggtatcat

SEQ ID NO: 572318 - DNA, 19 bp, Mus musculus
  siRNA target sequence for Chrnb2 (NM_009602.3,457-475).
catggaagcctgaggattt

SEQ ID NO: 572319 - DNA, 19 bp, Mus musculus
  siRNA target sequence for Chrnb2 (NM_009602.3,460-478).
ggaagcctgaggatttcga

SEQ ID NO: 572320 - DNA, 19 bp, Mus musculus
  siRNA target sequence for Chrnb2 (NM_009602.3,468-486).
gaggatttcgacaatatga

SEQ ID NO: 572321 - DNA, 19 bp, Mus musculus
  siRNA target sequence for Chrnb2 (NM_009602.3,471-489).
gatttcgacaatatgaaga

SEQ ID NO: 572322 - DNA, 19 bp, Mus musculus
  siRNA target sequence for Chrnb2 (NM_009602.3,519-537).
ctcccagatgtggttctat

SEQ ID NO: 572323 - DNA, 19 bp, Mus musculus
  siRNA target sequence for Chrnb2 (NM_009602.3,525-543).
gatgtggttctatacaaca

SEQ ID NO: 572324 - DNA, 19 bp, Mus musculus
  siRNA target sequence for Chrnb2 (NM_009602.3,557-575).
gtacgaagtctccttctat

SEQ ID NO: 572325 - DNA, 19 bp, Mus musculus
  siRNA target sequence for Chrnb2 (NM_009602.3,710-728).
ctacgaccgcactgagatt

SEQ ID NO: 572326 - DNA, 19 bp, Mus musculus
  siRNA target sequence for Chrnb2 (NM_009602.3,1293-1311).
ggggcaggcacactattct

SEQ ID NO: 572327 - DNA, 19 bp, Mus musculus
  siRNA target sequence for Chrnb2 (NM_009602.3,1460-1478).
ggacggtgtacgcttcatt

SEQ ID NO: 572328 - DNA, 19 bp, Mus musculus
  siRNA target sequence for Chrnb2 (NM_009602.3,1471-1489).
gcttcattgcggaccatat

SEQ ID NO: 572329 - DNA, 19 bp, Mus musculus
  siRNA target sequence for Chrnb2 (NM_009602.3,1481-1499).
ggaccatatgcgaagtgaa

SEQ ID NO: 572330 - DNA, 19 bp, Mus musculus
  siRNA target sequence for Chrnb3 (NM_027454.1,307-325).
gacatttgttccaaggtta

SEQ ID NO: 572331 - DNA, 19 bp, Mus musculus
  siRNA target sequence for Chrnb3 (NM_027454.1,314-332).
gttccaaggttatcagaaa

SEQ ID NO: 572332 - DNA, 19 bp, Mus musculus
  siRNA target sequence for Chrnb3 (NM_027454.1,317-335).
ccaaggttatcagaaatgt

SEQ ID NO: 572333 - DNA, 19 bp, Mus musculus
  siRNA target sequence for Chrnb3 (NM_027454.1,334-352).
gtgtccgccctgtgttgaa

SEQ ID NO: 572334 - DNA, 19 bp, Mus musculus
  siRNA target sequence for Chrnb3 (NM_027454.1,336-354).
gtccgccctgtgttgaatt

SEQ ID NO: 572335 - DNA, 19 bp, Mus musculus
  siRNA target sequence for Chrnb3 (NM_027454.1,339-357).
cgccctgtgttgaattcca

SEQ ID NO: 572336 - DNA, 19 bp, Mus musculus
  siRNA target sequence for Chrnb3 (NM_027454.1,355-373).
ccagtgacatcataaaagt

SEQ ID NO: 572337 - DNA, 19 bp, Mus musculus
  siRNA target sequence for Chrnb3 (NM_027454.1,443-461).
cgaagactatggtggaatt

SEQ ID NO: 572338 - DNA, 19 bp, Mus musculus
  siRNA target sequence for Chrnb3 (NM_027454.1,447-465).
gactatggtggaattaatt

SEQ ID NO: 572339 - DNA, 19 bp, Mus musculus
  siRNA target sequence for Chrnb3 (NM_027454.1,454-472).
gtggaattaattcgataaa

SEQ ID NO: 572340 - DNA, 19 bp, Mus musculus
  siRNA target sequence for Chrnb3 (NM_027454.1,457-475).
gaattaattcgataaaggt

SEQ ID NO: 572341 - DNA, 19 bp, Mus musculus
  siRNA target sequence for Chrnb3 (NM_027454.1,491-509).
ctggctgcctgacatagtt

SEQ ID NO: 572342 - DNA, 19 bp, Mus musculus
  siRNA target sequence for Chrnb3 (NM_027454.1,674-692).
cggatcctggacttacgat

SEQ ID NO: 572343 - DNA, 19 bp, Mus musculus
  siRNA target sequence for Chrnb3 (NM_027454.1,704-722).
cgacctcattctgatcaat

SEQ ID NO: 572344 - DNA, 19 bp, Mus musculus
  siRNA target sequence for Chrnb3 (NM_027454.1,729-747).
gttgaccggaaagactttt

SEQ ID NO: 572345 - DNA, 19 bp, Mus musculus
  siRNA target sequence for Chrnb3 (NM_027454.1,755-773).
cggagagtgggagatacta

SEQ ID NO: 572346 - DNA, 19 bp, Mus musculus
  siRNA target sequence for Chrnb3 (NM_027454.1,756-774).
ggagagtgggagatactaa

SEQ ID NO: 572347 - DNA, 19 bp, Mus musculus
  siRNA target sequence for Chrnb3 (NM_027454.1,761-779).
gtgggagatactaaatgca

SEQ ID NO: 572348 - DNA, 19 bp, Mus musculus
  siRNA target sequence for Chrnb3 (NM_027454.1,817-835).
cctatccgtttgttaccta

SEQ ID NO: 572349 - DNA, 19 bp, Mus musculus
  siRNA target sequence for Chrnb3 (NM_027454.1,823-841).
cgtttgttacctactcttt

SEQ ID NO: 572350 - DNA, 19 bp, Mus musculus
  siRNA target sequence for Chrnb3 (NM_027454.1,850-868).
gacgcctgcccctgtttta

SEQ ID NO: 572351 - DNA, 19 bp, Mus musculus
  siRNA target sequence for Chrnb3 (NM_027454.1,935-953).
ctccgacgaaggggaaaaa

SEQ ID NO: 572352 - DNA, 19 bp, Mus musculus
  siRNA target sequence for Chrnb3 (NM_027454.1,937-955).
ccgacgaaggggaaaaact

SEQ ID NO: 572353 - DNA, 19 bp, Mus musculus
  siRNA target sequence for Chrnb3 (NM_027454.1,992-1010).
gtttcttttagtaatcgaa

SEQ ID NO: 572354 - DNA, 19 bp, Mus musculus
  siRNA target sequence for Chrnb3 (NM_027454.1,996-1014).
cttttagtaatcgaagaaa

SEQ ID NO: 572355 - DNA, 19 bp, Mus musculus
  siRNA target sequence for Chrnb3 (NM_027454.1,1098-1116).
gtcacggtttttgtaatta

SEQ ID NO: 572356 - DNA, 19 bp, Mus musculus
  siRNA target sequence for Chrnb3 (NM_027454.1,1100-1118).
cacggtttttgtaattaat

SEQ ID NO: 572357 - DNA, 19 bp, Mus musculus
  siRNA target sequence for Chrnb3 (NM_027454.1,1237-1255).
ccgatggaacggagagtaa

SEQ ID NO: 572358 - DNA, 19 bp, Mus musculus
  siRNA target sequence for Chrnb3 (NM_027454.1,1262-1280).
cgtgagggggaaatttcca

SEQ ID NO: 572359 - DNA, 19 bp, Mus musculus
  siRNA target sequence for Chrnb3 (NM_027454.1,1345-1363).
cctctgagtccatcagata

SEQ ID NO: 572360 - DNA, 19 bp, Mus musculus
  siRNA target sequence for Chrnb3 (NM_027454.1,1348-1366).
ctgagtccatcagatacat

SEQ ID NO: 572361 - DNA, 19 bp, Mus musculus
  siRNA target sequence for Chrnb3 (NM_027454.1,1517-1535).
gtggatacatcgtttccat

SEQ ID NO: 572362 - DNA, 19 bp, Mus musculus
  siRNA target sequence for Chrnb4 (NM_148944.1,124-142).
ggatgatctcctgaacaaa

SEQ ID NO: 572363 - DNA, 19 bp, Mus musculus
  siRNA target sequence for Chrnb4 (NM_148944.1,318-336).
gctatgaaggggtgaacat

SEQ ID NO: 572364 - DNA, 19 bp, Mus musculus
  siRNA target sequence for Chrnb4 (NM_148944.1,319-337).
ctatgaaggggtgaacatt

SEQ ID NO: 572365 - DNA, 19 bp, Mus musculus
  siRNA target sequence for Chrnb4 (NM_148944.1,368-386).
cctgacatcgtgttgtaca

SEQ ID NO: 572366 - DNA, 19 bp, Mus musculus
  siRNA target sequence for Chrnb4 (NM_148944.1,373-391).
catcgtgttgtacaacaat

SEQ ID NO: 572367 - DNA, 19 bp, Mus musculus
  siRNA target sequence for Chrnb4 (NM_148944.1,569-587).
gagattgacatggttctta

SEQ ID NO: 572368 - DNA, 19 bp, Mus musculus
  siRNA target sequence for Chrnb4 (NM_148944.1,624-642).
gcggtgaatgggacattgt

SEQ ID NO: 572369 - DNA, 19 bp, Mus musculus
  siRNA target sequence for Chrnb4 (NM_148944.1,1194-1212).
ggaattccatgtactttgt

SEQ ID NO: 572370 - DNA, 19 bp, Mus musculus
  siRNA target sequence for Chrnb4 (NM_148944.1,1296-1314).
ggaggttccggcaagatct

SEQ ID NO: 572371 - DNA, 19 bp, Mus musculus
  siRNA target sequence for Chrnb4 (NM_148944.1,1297-1315).
gaggttccggcaagatcta

SEQ ID NO: 572372 - DNA, 19 bp, Mus musculus
  siRNA target sequence for Chrnb4 (NM_148944.1,1338-1356).
gcttcatcgcacagcattt

SEQ ID NO: 572373 - DNA, 19 bp, Mus musculus
  siRNA target sequence for Chrnb4 (NM_148944.1,1351-1369).
gcatttggagagtgatgat

SEQ ID NO: 572374 - DNA, 19 bp, Mus musculus
  siRNA target sequence for Chrnb4 (NM_148944.1,1438-1456).
gttcgtgattgtgtgtatt

SEQ ID NO: 572375 - DNA, 19 bp, Mus musculus
  siRNA target sequence for Chrnd (NM_021600.1,116-134).
gcagttggggcctgaatga

SEQ ID NO: 572376 - DNA, 19 bp, Mus musculus
  siRNA target sequence for Chrnd (NM_021600.1,151-169).
cagcacctattcaatgaga

SEQ ID NO: 572377 - DNA, 19 bp, Mus musculus
  siRNA target sequence for Chrnd (NM_021600.1,285-303).
caccaacgtgtggatagat

SEQ ID NO: 572378 - DNA, 19 bp, Mus musculus
  siRNA target sequence for Chrnd (NM_021600.1,387-405).
gtggctaccagagattgta

SEQ ID NO: 572379 - DNA, 19 bp, Mus musculus
  siRNA target sequence for Chrnd (NM_021600.1,421-439).
gatggctcgttccagattt

SEQ ID NO: 572380 - DNA, 19 bp, Mus musculus
  siRNA target sequence for Chrnd (NM_021600.1,424-442).
ggctcgttccagatttctt

SEQ ID NO: 572381 - DNA, 19 bp, Mus musculus
  siRNA target sequence for Chrnd (NM_021600.1,425-443).
gctcgttccagatttctta

SEQ ID NO: 572382 - DNA, 19 bp, Mus musculus
  siRNA target sequence for Chrnd (NM_021600.1,446-464).
cctgcaatgtgcttgtcta

SEQ ID NO: 572383 - DNA, 19 bp, Mus musculus
  siRNA target sequence for Chrnd (NM_021600.1,570-588).
cagttcactcaagtataca

SEQ ID NO: 572384 - DNA, 19 bp, Mus musculus
  siRNA target sequence for Chrnd (NM_021600.1,1043-1061).
gtgtcatcgtactgaacat

SEQ ID NO: 572385 - DNA, 19 bp, Mus musculus
  siRNA target sequence for Chrnd (NM_021600.1,1228-1246).
gagtatttctcacttaagt

SEQ ID NO: 572386 - DNA, 19 bp, Mus musculus
  siRNA target sequence for Chrnd (NM_021600.1,1247-1265).
cccgcagtgacctcatgtt

SEQ ID NO: 572387 - DNA, 19 bp, Mus musculus
  siRNA target sequence for Chrnd (NM_021600.1,1376-1394).
ctgtggatggggcaaactt

SEQ ID NO: 572388 - DNA, 19 bp, Mus musculus
  siRNA target sequence for Chrne (NM_009603.1,104-122).
caccatctcttcgacaatt

SEQ ID NO: 572389 - DNA, 19 bp, Mus musculus
  siRNA target sequence for Chrne (NM_009603.1,106-124).
ccatctcttcgacaattat

SEQ ID NO: 572390 - DNA, 19 bp, Mus musculus
  siRNA target sequence for Chrne (NM_009603.1,263-281).
gactatcggctcaactaca

SEQ ID NO: 572391 - DNA, 19 bp, Mus musculus
  siRNA target sequence for Chrne (NM_009603.1,313-331).
ccgggtcccttcagaacat

SEQ ID NO: 572392 - DNA, 19 bp, Mus musculus
  siRNA target sequence for Chrne (NM_009603.1,316-334).
ggtcccttcagaacatgta

SEQ ID NO: 572393 - DNA, 19 bp, Mus musculus
  siRNA target sequence for Chrne (NM_009603.1,317-335).
gtcccttcagaacatgtat

SEQ ID NO: 572394 - DNA, 19 bp, Mus musculus
  siRNA target sequence for Chrne (NM_009603.1,337-355).
gctgccagagattgttcta

SEQ ID NO: 572395 - DNA, 19 bp, Mus musculus
  siRNA target sequence for Chrne (NM_009603.1,385-403).
ggcctacgacagcaatgtt

SEQ ID NO: 572396 - DNA, 19 bp, Mus musculus
  siRNA target sequence for Chrne (NM_009603.1,387-405).
cctacgacagcaatgttct

SEQ ID NO: 572397 - DNA, 19 bp, Mus musculus
  siRNA target sequence for Chrne (NM_009603.1,388-406).
ctacgacagcaatgttcta

SEQ ID NO: 572398 - DNA, 19 bp, Mus musculus
  siRNA target sequence for Chrne (NM_009603.1,394-412).
cagcaatgttctagtctat

SEQ ID NO: 572399 - DNA, 19 bp, Mus musculus
  siRNA target sequence for Chrne (NM_009603.1,566-584).
gatgacgacggcaatacca

SEQ ID NO: 572400 - DNA, 19 bp, Mus musculus
  siRNA target sequence for Chrne (NM_009603.1,572-590).
gacggcaataccatcaaca

SEQ ID NO: 572401 - DNA, 19 bp, Mus musculus
  siRNA target sequence for Chrne (NM_009603.1,696-714).
gagaaactgacgtcatcta

SEQ ID NO: 572402 - DNA, 19 bp, Mus musculus
  siRNA target sequence for Chrne (NM_009603.1,732-750).
ggaagccgcttttttacgt

SEQ ID NO: 572403 - DNA, 19 bp, Mus musculus
  siRNA target sequence for Chrne (NM_009603.1,737-755).
ccgcttttttacgtcatta

SEQ ID NO: 572404 - DNA, 19 bp, Mus musculus
  siRNA target sequence for Chrne (NM_009603.1,738-756).
cgcttttttacgtcattaa

SEQ ID NO: 572405 - DNA, 19 bp, Mus musculus
  siRNA target sequence for Chrne (NM_009603.1,740-758).
cttttttacgtcattaaca

SEQ ID NO: 572406 - DNA, 19 bp, Mus musculus
  siRNA target sequence for Chrne (NM_009603.1,766-784).
gccttgcgtgctcatttct

SEQ ID NO: 572407 - DNA, 19 bp, Mus musculus
  siRNA target sequence for Chrne (NM_009603.1,868-886).
gactgtcttcttgtttcta

SEQ ID NO: 572408 - DNA, 19 bp, Mus musculus
  siRNA target sequence for Chrne (NM_009603.1,926-944).
ctgctgggcaggtatctta

SEQ ID NO: 572409 - DNA, 19 bp, Mus musculus
  siRNA target sequence for Chrne (NM_009603.1,929-947).
ctgggcaggtatcttatat

SEQ ID NO: 572410 - DNA, 19 bp, Mus musculus
  siRNA target sequence for Chrne (NM_009603.1,933-951).
gcaggtatcttatattcgt

SEQ ID NO: 572411 - DNA, 19 bp, Mus musculus
  siRNA target sequence for Chrne (NM_009603.1,959-977).
gttgccacgctcattgtca

SEQ ID NO: 572412 - DNA, 19 bp, Mus musculus
  siRNA target sequence for Chrne (NM_009603.1,963-981).
ccacgctcattgtcatgaa

SEQ ID NO: 572413 - DNA, 19 bp, Mus musculus
  siRNA target sequence for Chrne (NM_009603.1,964-982).
cacgctcattgtcatgaat

SEQ ID NO: 572414 - DNA, 19 bp, Mus musculus
  siRNA target sequence for Chrne (NM_009603.1,986-1004).
gtcatcgtgctcaacgtat

SEQ ID NO: 572415 - DNA, 19 bp, Mus musculus
  siRNA target sequence for Chrne (NM_009603.1,992-1010).
gtgctcaacgtatctttga

SEQ ID NO: 572416 - DNA, 19 bp, Mus musculus
  siRNA target sequence for Chrne (NM_009603.1,1037-1055).
cctcggctgcgccagattt

SEQ ID NO: 572417 - DNA, 19 bp, Mus musculus
  siRNA target sequence for Chrne (NM_009603.1,1038-1056).
ctcggctgcgccagatttt

SEQ ID NO: 572418 - DNA, 19 bp, Mus musculus
  siRNA target sequence for Chrne (NM_009603.1,1040-1058).
cggctgcgccagattttat

SEQ ID NO: 572419 - DNA, 19 bp, Mus musculus
  siRNA target sequence for Chrne (NM_009603.1,1041-1059).
ggctgcgccagattttatt

SEQ ID NO: 572420 - DNA, 19 bp, Mus musculus
  siRNA target sequence for Chrne (NM_009603.1,1042-1060).
gctgcgccagattttatta

SEQ ID NO: 572421 - DNA, 19 bp, Mus musculus
  siRNA target sequence for Chrne (NM_009603.1,1188-1206).
ggagcgaactcgtgtttga

SEQ ID NO: 572422 - DNA, 19 bp, Mus musculus
  siRNA target sequence for Chrne (NM_009603.1,1379-1397).
ctggacaatgtctgttttt

SEQ ID NO: 572423 - DNA, 19 bp, Mus musculus
  siRNA target sequence for Chrne (NM_009603.1,1414-1432).
cttcagcgttggttctact

SEQ ID NO: 572424 - DNA, 19 bp, Mus musculus
  siRNA target sequence for Chrng (NM_009604.2,147-165).
cggacctgatgcgaaacta

SEQ ID NO: 572425 - DNA, 19 bp, Mus musculus
  siRNA target sequence for Chrng (NM_009604.2,276-294).
ctaacgtctggatagagat

SEQ ID NO: 572426 - DNA, 19 bp, Mus musculus
  siRNA target sequence for Chrng (NM_009604.2,281-299).
gtctggatagagatgcaat

SEQ ID NO: 572427 - DNA, 19 bp, Mus musculus
  siRNA target sequence for Chrng (NM_009604.2,317-335).
cgctgggacccaaaagact

SEQ ID NO: 572428 - DNA, 19 bp, Mus musculus
  siRNA target sequence for Chrng (NM_009604.2,338-356).
gaaggcctgtggatattga

SEQ ID NO: 572429 - DNA, 19 bp, Mus musculus
  siRNA target sequence for Chrng (NM_009604.2,453-471).
cccccgacggttgtatcta

SEQ ID NO: 572430 - DNA, 19 bp, Mus musculus
  siRNA target sequence for Chrng (NM_009604.2,455-473).
cccgacggttgtatctact

SEQ ID NO: 572431 - DNA, 19 bp, Mus musculus
  siRNA target sequence for Chrng (NM_009604.2,646-664).
ggaggctttcacagagaat

SEQ ID NO: 572432 - DNA, 19 bp, Mus musculus
  siRNA target sequence for Chrng (NM_009604.2,680-698).
cggcaccgaccggctaaaa

SEQ ID NO: 572433 - DNA, 19 bp, Mus musculus
  siRNA target sequence for Chrng (NM_009604.2,681-699).
ggcaccgaccggctaaaat

SEQ ID NO: 572434 - DNA, 19 bp, Mus musculus
  siRNA target sequence for Chrng (NM_009604.2,1023-1041).
ctgtggtcgtgctcaatgt

SEQ ID NO: 572435 - DNA, 19 bp, Mus musculus
  siRNA target sequence for Chrng (NM_009604.2,1025-1043).
gtggtcgtgctcaatgtgt

SEQ ID NO: 572436 - DNA, 19 bp, Mus musculus
  siRNA target sequence for Chrng (NM_009604.2,1266-1284).
ggcagcgcaatggattagt

SEQ ID NO: 572437 - DNA, 19 bp, Mus musculus
  siRNA target sequence for Chrng (NM_009604.2,1278-1296).
gattagtgcaggcagtatt

SEQ ID NO: 572438 - DNA, 19 bp, Mus musculus
  siRNA target sequence for Chrng (NM_009604.2,1419-1437).
gtcagcagagtcactttga

SEQ ID NO: 572439 - DNA, 19 bp, Mus musculus
  siRNA target sequence for Gabrb1 (NM_008069.2,380-398).
cgtgatggttgctatggtt

SEQ ID NO: 572440 - DNA, 19 bp, Mus musculus
  siRNA target sequence for Gabrb1 (NM_008069.2,460-478).
gactgctcaaaggatatga

SEQ ID NO: 572441 - DNA, 19 bp, Mus musculus
  siRNA target sequence for Gabrb1 (NM_008069.2,462-480).
ctgctcaaaggatatgaca

SEQ ID NO: 572442 - DNA, 19 bp, Mus musculus
  siRNA target sequence for Gabrb1 (NM_008069.2,464-482).
gctcaaaggatatgacatt

SEQ ID NO: 572443 - DNA, 19 bp, Mus musculus
  siRNA target sequence for Gabrb1 (NM_008069.2,534-552).
gatgtcgccagcatagaca

SEQ ID NO: 572444 - DNA, 19 bp, Mus musculus
  siRNA target sequence for Gabrb1 (NM_008069.2,551-569).
catggtctcggaagtgaat

SEQ ID NO: 572445 - DNA, 19 bp, Mus musculus
  siRNA target sequence for Gabrb1 (NM_008069.2,580-598).
cactcaccatgtatttcca

SEQ ID NO: 572446 - DNA, 19 bp, Mus musculus
  siRNA target sequence for Gabrb1 (NM_008069.2,633-651).
ggaatcccattaaatctga

SEQ ID NO: 572447 - DNA, 19 bp, Mus musculus
  siRNA target sequence for Gabrb1 (NM_008069.2,687-705).
ccagacacctactttctca

SEQ ID NO: 572448 - DNA, 19 bp, Mus musculus
  siRNA target sequence for Gabrb1 (NM_008069.2,688-706).
cagacacctactttctcaa

SEQ ID NO: 572449 - DNA, 19 bp, Mus musculus
  siRNA target sequence for Gabrb1 (NM_008069.2,704-722).
caatgacaagaaatcattt

SEQ ID NO: 572450 - DNA, 19 bp, Mus musculus
  siRNA target sequence for Gabrb1 (NM_008069.2,859-877).
ccctggagattgaaagtta

SEQ ID NO: 572451 - DNA, 19 bp, Mus musculus
  siRNA target sequence for Gabrb1 (NM_008069.2,927-945).
gcagtaactggggtcaata

SEQ ID NO: 572452 - DNA, 19 bp, Mus musculus
  siRNA target sequence for Gabrb1 (NM_008069.2,928-946).
cagtaactggggtcaataa

SEQ ID NO: 572453 - DNA, 19 bp, Mus musculus
  siRNA target sequence for Gabrb1 (NM_008069.2,930-948).
gtaactggggtcaataaaa

SEQ ID NO: 572454 - DNA, 19 bp, Mus musculus
  siRNA target sequence for Gabrb1 (NM_008069.2,934-952).
ctggggtcaataaaattga

SEQ ID NO: 572455 - DNA, 19 bp, Mus musculus
  siRNA target sequence for Gabrb1 (NM_008069.2,1016-1034).
ggcatatccacgactatca

SEQ ID NO: 572456 - DNA, 19 bp, Mus musculus
  siRNA target sequence for Gabrb1 (NM_008069.2,1018-1036).
catatccacgactatcact

SEQ ID NO: 572457 - DNA, 19 bp, Mus musculus
  siRNA target sequence for Gabrb1 (NM_008069.2,1023-1041).
ccacgactatcactaagtt

SEQ ID NO: 572458 - DNA, 19 bp, Mus musculus
  siRNA target sequence for Gabrb1 (NM_008069.2,1024-1042).
cacgactatcactaagttt

SEQ ID NO: 572459 - DNA, 19 bp, Mus musculus
  siRNA target sequence for Gabrb1 (NM_008069.2,1033-1051).
cactaagttttcgtctaaa

SEQ ID NO: 572460 - DNA, 19 bp, Mus musculus
  siRNA target sequence for Gabrb1 (NM_008069.2,1035-1053).
ctaagttttcgtctaaaga

SEQ ID NO: 572461 - DNA, 19 bp, Mus musculus
  siRNA target sequence for Gabrb1 (NM_008069.2,1088-1106).
gccttccacactgattaca

SEQ ID NO: 572462 - DNA, 19 bp, Mus musculus
  siRNA target sequence for Gabrb1 (NM_008069.2,1119-1137).
gtgtcgttttggatcaact

SEQ ID NO: 572463 - DNA, 19 bp, Mus musculus
  siRNA target sequence for Gabrb1 (NM_008069.2,1121-1139).
gtcgttttggatcaactat

SEQ ID NO: 572464 - DNA, 19 bp, Mus musculus
  siRNA target sequence for Gabrb1 (NM_008069.2,1153-1171).
ccagagtcgcactaggaat

SEQ ID NO: 572465 - DNA, 19 bp, Mus musculus
  siRNA target sequence for Gabrb1 (NM_008069.2,1158-1176).
gtcgcactaggaatcacta

SEQ ID NO: 572466 - DNA, 19 bp, Mus musculus
  siRNA target sequence for Gabrb1 (NM_008069.2,1245-1263).
gcgattgacatctatctca

SEQ ID NO: 572467 - DNA, 19 bp, Mus musculus
  siRNA target sequence for Gabrb1 (NM_008069.2,1246-1264).
cgattgacatctatctcat

SEQ ID NO: 572468 - DNA, 19 bp, Mus musculus
  siRNA target sequence for Gabrb1 (NM_008069.2,1256-1274).
ctatctcatgggctgtttt

SEQ ID NO: 572469 - DNA, 19 bp, Mus musculus
  siRNA target sequence for Gabrb1 (NM_008069.2,1260-1278).
ctcatgggctgttttgtgt

SEQ ID NO: 572470 - DNA, 19 bp, Mus musculus
  siRNA target sequence for Gabrb1 (NM_008069.2,1289-1307).
ggctctactggaatatgct

SEQ ID NO: 572471 - DNA, 19 bp, Mus musculus
  siRNA target sequence for Gabrb1 (NM_008069.2,1290-1308).
gctctactggaatatgctt

SEQ ID NO: 572472 - DNA, 19 bp, Mus musculus
  siRNA target sequence for Gabrb1 (NM_008069.2,1330-1348).
gaaaaggccctcagaaaaa

SEQ ID NO: 572473 - DNA, 19 bp, Mus musculus
  siRNA target sequence for Gabrb1 (NM_008069.2,1390-1408).
gactggagatgaacaaagt

SEQ ID NO: 572474 - DNA, 19 bp, Mus musculus
  siRNA target sequence for Gabrb1 (NM_008069.2,1400-1418).
gaacaaagtccaagttgat

SEQ ID NO: 572475 - DNA, 19 bp, Mus musculus
  siRNA target sequence for Gabrb1 (NM_008069.2,1629-1647).
gcctcgcagctcaaagtga

SEQ ID NO: 572476 - DNA, 19 bp, Mus musculus
  siRNA target sequence for Gabrb1 (NM_008069.2,1630-1648).
cctcgcagctcaaagtgaa

SEQ ID NO: 572477 - DNA, 19 bp, Mus musculus
  siRNA target sequence for Gabrb1 (NM_008069.2,1665-1683).
gacgtgaactccatagaca

SEQ ID NO: 572478 - DNA, 19 bp, Mus musculus
  siRNA target sequence for Gabrb1 (NM_008069.2,1728-1746).
gtcgtttattggctttact

SEQ ID NO: 572479 - DNA, 19 bp, Mus musculus
  siRNA target sequence for Gabrb2 (NM_008070.2,450-468).
ggctactttgggatttggt

SEQ ID NO: 572480 - DNA, 19 bp, Mus musculus
  siRNA target sequence for Gabrb2 (NM_008070.2,466-484).
ggtcatttcccttaataat

SEQ ID NO: 572481 - DNA, 19 bp, Mus musculus
  siRNA target sequence for Gabrb2 (NM_008070.2,505-523).
gtgtcaatgaccctagtaa

SEQ ID NO: 572482 - DNA, 19 bp, Mus musculus
  siRNA target sequence for Gabrb2 (NM_008070.2,507-525).
gtcaatgaccctagtaata

SEQ ID NO: 572483 - DNA, 19 bp, Mus musculus
  siRNA target sequence for Gabrb2 (NM_008070.2,520-538).
gtaatatgtcgctggttaa

SEQ ID NO: 572484 - DNA, 19 bp, Mus musculus
  siRNA target sequence for Gabrb2 (NM_008070.2,601-619).
cccctgtggccgtaggaat

SEQ ID NO: 572485 - DNA, 19 bp, Mus musculus
  siRNA target sequence for Gabrb2 (NM_008070.2,604-622).
ctgtggccgtaggaatgaa

SEQ ID NO: 572486 - DNA, 19 bp, Mus musculus
  siRNA target sequence for Gabrb2 (NM_008070.2,608-626).
ggccgtaggaatgaacatt

SEQ ID NO: 572487 - DNA, 19 bp, Mus musculus
  siRNA target sequence for Gabrb2 (NM_008070.2,610-628).
ccgtaggaatgaacattga

SEQ ID NO: 572488 - DNA, 19 bp, Mus musculus
  siRNA target sequence for Gabrb2 (NM_008070.2,611-629).
cgtaggaatgaacattgat

SEQ ID NO: 572489 - DNA, 19 bp, Mus musculus
  siRNA target sequence for Gabrb2 (NM_008070.2,707-725).
caagaggctgtcttacaat

SEQ ID NO: 572490 - DNA, 19 bp, Mus musculus
  siRNA target sequence for Gabrb2 (NM_008070.2,712-730).
ggctgtcttacaatgtaat

SEQ ID NO: 572491 - DNA, 19 bp, Mus musculus
  siRNA target sequence for Gabrb2 (NM_008070.2,713-731).
gctgtcttacaatgtaatt

SEQ ID NO: 572492 - DNA, 19 bp, Mus musculus
  siRNA target sequence for Gabrb2 (NM_008070.2,726-744).
gtaattcctttaaacttga

SEQ ID NO: 572493 - DNA, 19 bp, Mus musculus
  siRNA target sequence for Gabrb2 (NM_008070.2,829-847).
ctgtcaaaaaccgtatgat

SEQ ID NO: 572494 - DNA, 19 bp, Mus musculus
  siRNA target sequence for Gabrb2 (NM_008070.2,839-857).
ccgtatgattcgattgcat

SEQ ID NO: 572495 - DNA, 19 bp, Mus musculus
  siRNA target sequence for Gabrb2 (NM_008070.2,925-943).
ggtatccactggatgaaca

SEQ ID NO: 572496 - DNA, 19 bp, Mus musculus
  siRNA target sequence for Gabrb2 (NM_008070.2,1021-1039).
cagtcacaggagtgacaaa

SEQ ID NO: 572497 - DNA, 19 bp, Mus musculus
  siRNA target sequence for Gabrb2 (NM_008070.2,1053-1071).
cagttctccatcgtagatt

SEQ ID NO: 572498 - DNA, 19 bp, Mus musculus
  siRNA target sequence for Gabrb2 (NM_008070.2,1055-1073).
gttctccatcgtagattat

SEQ ID NO: 572499 - DNA, 19 bp, Mus musculus
  siRNA target sequence for Gabrb2 (NM_008070.2,1120-1138).
gattgtccctaagctttaa

SEQ ID NO: 572500 - DNA, 19 bp, Mus musculus
  siRNA target sequence for Gabrb2 (NM_008070.2,1183-1201).
catcaattctgattaccat

SEQ ID NO: 572501 - DNA, 19 bp, Mus musculus
  siRNA target sequence for Gabrb2 (NM_008070.2,1214-1232).
ctccttttggattaactat

SEQ ID NO: 572502 - DNA, 19 bp, Mus musculus
  siRNA target sequence for Gabrb2 (NM_008070.2,1240-1258).
ctgctgcacgggttgcatt

SEQ ID NO: 572503 - DNA, 19 bp, Mus musculus
  siRNA target sequence for Gabrb2 (NM_008070.2,1245-1263).
gcacgggttgcattaggaa

SEQ ID NO: 572504 - DNA, 19 bp, Mus musculus
  siRNA target sequence for Gabrb2 (NM_008070.2,1246-1264).
cacgggttgcattaggaat

SEQ ID NO: 572505 - DNA, 19 bp, Mus musculus
  siRNA target sequence for Gabrb2 (NM_008070.2,1248-1266).
cgggttgcattaggaatta

SEQ ID NO: 572506 - DNA, 19 bp, Mus musculus
  siRNA target sequence for Gabrb2 (NM_008070.2,1251-1269).
gttgcattaggaattacaa

SEQ ID NO: 572507 - DNA, 19 bp, Mus musculus
  siRNA target sequence for Gabrb2 (NM_008070.2,1398-1416).
gctttggtcaactacatct

SEQ ID NO: 572508 - DNA, 19 bp, Mus musculus
  siRNA target sequence for Gabrb2 (NM_008070.2,1511-1529).
cccccatgagaacatctta

SEQ ID NO: 572509 - DNA, 19 bp, Mus musculus
  siRNA target sequence for Gabrb2 (NM_008070.2,1513-1531).
cccatgagaacatcttact

SEQ ID NO: 572510 - DNA, 19 bp, Mus musculus
  siRNA target sequence for Gabrb2 (NM_008070.2,1515-1533).
catgagaacatcttactca

SEQ ID NO: 572511 - DNA, 19 bp, Mus musculus
  siRNA target sequence for Gabrb2 (NM_008070.2,1530-1548).
ctcagcacgcttgagataa

SEQ ID NO: 572512 - DNA, 19 bp, Mus musculus
  siRNA target sequence for Gabrb2 (NM_008070.2,1532-1550).
cagcacgcttgagataaaa

SEQ ID NO: 572513 - DNA, 19 bp, Mus musculus
  siRNA target sequence for Gabrb2 (NM_008070.2,1537-1555).
cgcttgagataaaaaacga

SEQ ID NO: 572514 - DNA, 19 bp, Mus musculus
  siRNA target sequence for Gabrb2 (NM_008070.2,1561-1579).
ccacatccgaagcagtaat

SEQ ID NO: 572515 - DNA, 19 bp, Mus musculus
  siRNA target sequence for Gabrb2 (NM_008070.2,1628-1646).
catccagtatcgaaaagct

SEQ ID NO: 572516 - DNA, 19 bp, Mus musculus
  siRNA target sequence for Gabrb2 (NM_008070.2,1649-1667).
gctgcctaggcatagtttt

SEQ ID NO: 572517 - DNA, 19 bp, Mus musculus
  siRNA target sequence for Gabrb2 (NM_008070.2,1686-1704).
cgacatgtggcacaaaaga

SEQ ID NO: 572518 - DNA, 19 bp, Mus musculus
  siRNA target sequence for Gabrb2 (NM_008070.2,1687-1705).
gacatgtggcacaaaagaa

SEQ ID NO: 572519 - DNA, 19 bp, Mus musculus
  siRNA target sequence for Gabrb2 (NM_008070.2,1722-1740).
cgtgcctctcaactgaaaa

SEQ ID NO: 572520 - DNA, 19 bp, Mus musculus
  siRNA target sequence for Gabrb2 (NM_008070.2,1723-1741).
gtgcctctcaactgaaaat

SEQ ID NO: 572521 - DNA, 19 bp, Mus musculus
  siRNA target sequence for Gabrb2 (NM_008070.2,1823-1841).
catcgtctattggctttat

SEQ ID NO: 572522 - DNA, 19 bp, Mus musculus
  siRNA target sequence for Gabrb3 (NM_008071.2,144-162).
gcgctcagagcgtaaacga

SEQ ID NO: 572523 - DNA, 19 bp, Mus musculus
  siRNA target sequence for Gabrb3 (NM_008071.2,192-210).
cggtcgacaagctgttgaa

SEQ ID NO: 572524 - DNA, 19 bp, Mus musculus
  siRNA target sequence for Gabrb3 (NM_008071.2,314-332).
gattataccttaactatgt

SEQ ID NO: 572525 - DNA, 19 bp, Mus musculus
  siRNA target sequence for Gabrb3 (NM_008071.2,385-403).
caacctcacgcttgacaat

SEQ ID NO: 572526 - DNA, 19 bp, Mus musculus
  siRNA target sequence for Gabrb3 (NM_008071.2,421-439).
ctgggtgcccgacacatat

SEQ ID NO: 572527 - DNA, 19 bp, Mus musculus
  siRNA target sequence for Gabrb3 (NM_008071.2,423-441).
gggtgcccgacacatattt

SEQ ID NO: 572528 - DNA, 19 bp, Mus musculus
  siRNA target sequence for Gabrb3 (NM_008071.2,425-443).
gtgcccgacacatatttct

SEQ ID NO: 572529 - DNA, 19 bp, Mus musculus
  siRNA target sequence for Gabrb3 (NM_008071.2,429-447).
ccgacacatatttcttaaa

SEQ ID NO: 572530 - DNA, 19 bp, Mus musculus
  siRNA target sequence for Gabrb3 (NM_008071.2,430-448).
cgacacatatttcttaaat

SEQ ID NO: 572531 - DNA, 19 bp, Mus musculus
  siRNA target sequence for Gabrb3 (NM_008071.2,466-484).
ccacggagtgacagtgaaa

SEQ ID NO: 572532 - DNA, 19 bp, Mus musculus
  siRNA target sequence for Gabrb3 (NM_008071.2,467-485).
cacggagtgacagtgaaaa

SEQ ID NO: 572533 - DNA, 19 bp, Mus musculus
  siRNA target sequence for Gabrb3 (NM_008071.2,758-776).
gcctatcctcgactttcat

SEQ ID NO: 572534 - DNA, 19 bp, Mus musculus
  siRNA target sequence for Gabrb3 (NM_008071.2,764-782).
cctcgactttcattgagtt

SEQ ID NO: 572535 - DNA, 19 bp, Mus musculus
  siRNA target sequence for Gabrb3 (NM_008071.2,765-783).
ctcgactttcattgagttt

SEQ ID NO: 572536 - DNA, 19 bp, Mus musculus
  siRNA target sequence for Gabrb3 (NM_008071.2,780-798).
gttttcggttgaagagaaa

SEQ ID NO: 572537 - DNA, 19 bp, Mus musculus
  siRNA target sequence for Gabrb3 (NM_008071.2,795-813).
gaaatatcgggtacttcat

SEQ ID NO: 572538 - DNA, 19 bp, Mus musculus
  siRNA target sequence for Gabrb3 (NM_008071.2,830-848).
ccctcaatcctgatcacaa

SEQ ID NO: 572539 - DNA, 19 bp, Mus musculus
  siRNA target sequence for Gabrb3 (NM_008071.2,831-849).
cctcaatcctgatcacaat

SEQ ID NO: 572540 - DNA, 19 bp, Mus musculus
  siRNA target sequence for Gabrb3 (NM_008071.2,1003-1021).
gatgggctgctttgtcttt

SEQ ID NO: 572541 - DNA, 19 bp, Mus musculus
  siRNA target sequence for Gabrb3 (NM_008071.2,1037-1055).
ctggagtacgcctttgtca

SEQ ID NO: 572542 - DNA, 19 bp, Mus musculus
  siRNA target sequence for Gabrb3 (NM_008071.2,1045-1063).
cgcctttgtcaactacatt

SEQ ID NO: 572543 - DNA, 19 bp, Mus musculus
  siRNA target sequence for Gabrb3 (NM_008071.2,1123-1141).
gaatgatcgttctaagagt

SEQ ID NO: 572544 - DNA, 19 bp, Mus musculus
  siRNA target sequence for Gabrb3 (NM_008071.2,1130-1148).
cgttctaagagtgaaataa

SEQ ID NO: 572545 - DNA, 19 bp, Mus musculus
  siRNA target sequence for Gabrb3 (NM_008071.2,1161-1179).
ctcacgggaatatcctatt

SEQ ID NO: 572546 - DNA, 19 bp, Mus musculus
  siRNA target sequence for Gabrb3 (NM_008071.2,1165-1183).
cgggaatatcctattagca

SEQ ID NO: 572547 - DNA, 19 bp, Mus musculus
  siRNA target sequence for Gabrb3 (NM_008071.2,1182-1200).
caccgatggatgttcacaa

SEQ ID NO: 572548 - DNA, 19 bp, Mus musculus
  siRNA target sequence for Gabrb3 (NM_008071.2,1185-1203).
cgatggatgttcacaatga

SEQ ID NO: 572549 - DNA, 19 bp, Mus musculus
  siRNA target sequence for Gabrb3 (NM_008071.2,1186-1204).
gatggatgttcacaatgaa

SEQ ID NO: 572550 - DNA, 19 bp, Mus musculus
  siRNA target sequence for Gabrb3 (NM_008071.2,1234-1252).
caccaggaattcagcaata

SEQ ID NO: 572551 - DNA, 19 bp, Mus musculus
  siRNA target sequence for Gabrb3 (NM_008071.2,1239-1257).
ggaattcagcaatatcctt

SEQ ID NO: 572552 - DNA, 19 bp, Mus musculus
  siRNA target sequence for Gabrb3 (NM_008071.2,1245-1263).
cagcaatatcctttgacaa

SEQ ID NO: 572553 - DNA, 19 bp, Mus musculus
  siRNA target sequence for Gabrb3 (NM_008071.2,1266-1284).
caggaatccagtataggaa

SEQ ID NO: 572554 - DNA, 19 bp, Mus musculus
  siRNA target sequence for Gabrb3 (NM_008071.2,1392-1410).
ctgatctaaccgatgtgaa

SEQ ID NO: 572555 - DNA, 19 bp, Mus musculus
  siRNA target sequence for Gabrb3 (NM_008071.2,1428-1446).
cccgcatcgtgtttccatt

SEQ ID NO: 572556 - DNA, 19 bp, Mus musculus
  siRNA target sequence for Gabrb3 (NM_008071.2,1436-1454).
gtgtttccattcacctttt

SEQ ID NO: 572557 - DNA, 19 bp, Mus musculus
  siRNA target sequence for Glra1 (NM_020492.2,88-106).
ctttgggagaccattgtat

SEQ ID NO: 572558 - DNA, 19 bp, Mus musculus
  siRNA target sequence for Glra1 (NM_020492.2,92-110).
gggagaccattgtattctt

SEQ ID NO: 572559 - DNA, 19 bp, Mus musculus
  siRNA target sequence for Glra1 (NM_020492.2,150-168).
cgcacccaagcctatgtca

SEQ ID NO: 572560 - DNA, 19 bp, Mus musculus
  siRNA target sequence for Glra1 (NM_020492.2,221-239).
ggatcaggcccaactttaa

SEQ ID NO: 572561 - DNA, 19 bp, Mus musculus
  siRNA target sequence for Glra1 (NM_020492.2,256-274).
gtaagttgcaacatcttca

SEQ ID NO: 572562 - DNA, 19 bp, Mus musculus
  siRNA target sequence for Glra1 (NM_020492.2,310-328).
gactatagggtcaacatct

SEQ ID NO: 572563 - DNA, 19 bp, Mus musculus
  siRNA target sequence for Glra1 (NM_020492.2,351-369).
cccccgtctggcctacaat

SEQ ID NO: 572564 - DNA, 19 bp, Mus musculus
  siRNA target sequence for Glra1 (NM_020492.2,354-372).
ccgtctggcctacaatgaa

SEQ ID NO: 572565 - DNA, 19 bp, Mus musculus
  siRNA target sequence for Glra1 (NM_020492.2,355-373).
cgtctggcctacaatgaat

SEQ ID NO: 572566 - DNA, 19 bp, Mus musculus
  siRNA target sequence for Glra1 (NM_020492.2,457-475).
gcccacttccacgaaatca

SEQ ID NO: 572567 - DNA, 19 bp, Mus musculus
  siRNA target sequence for Glra1 (NM_020492.2,970-988).
gtgtcctacgtgaaagcta

SEQ ID NO: 572568 - DNA, 19 bp, Mus musculus
  siRNA target sequence for Glra1 (NM_020492.2,972-990).
gtcctacgtgaaagctatt

SEQ ID NO: 572569 - DNA, 19 bp, Mus musculus
  siRNA target sequence for Glra1 (NM_020492.2,1097-1115).
ggaagaggcgacatcacaa

SEQ ID NO: 572570 - DNA, 19 bp, Mus musculus
  siRNA target sequence for Glra1 (NM_020492.2,1130-1148).
gagaaggccgcttcaactt

SEQ ID NO: 572571 - DNA, 19 bp, Mus musculus
  siRNA target sequence for Glra1 (NM_020492.2,1296-1314).
gaagatcgacaagatatct

SEQ ID NO: 572572 - DNA, 19 bp, Mus musculus
  siRNA target sequence for Glra1 (NM_020492.2,1387-1405).
gaggatgtccacaacaagt

SEQ ID NO: 572573 - DNA, 19 bp, Mus musculus
  siRNA target sequence for Glra3 (NM_080438.1,16-34).
cactttcggacactagttt

SEQ ID NO: 572574 - DNA, 19 bp, Mus musculus
  siRNA target sequence for Glra3 (NM_080438.1,48-66).
ctgggaagccgcactgtta

SEQ ID NO: 572575 - DNA, 19 bp, Mus musculus
  siRNA target sequence for Glra3 (NM_080438.1,50-68).
gggaagccgcactgttact

SEQ ID NO: 572576 - DNA, 19 bp, Mus musculus
  siRNA target sequence for Glra3 (NM_080438.1,52-70).
gaagccgcactgttactga

SEQ ID NO: 572577 - DNA, 19 bp, Mus musculus
  siRNA target sequence for Glra3 (NM_080438.1,131-149).
ctgattttctggacaaact

SEQ ID NO: 572578 - DNA, 19 bp, Mus musculus
  siRNA target sequence for Glra3 (NM_080438.1,156-174).
gaggacatcggggtatgat

SEQ ID NO: 572579 - DNA, 19 bp, Mus musculus
  siRNA target sequence for Glra3 (NM_080438.1,253-271).
gcagagacgactatggatt

SEQ ID NO: 572580 - DNA, 19 bp, Mus musculus
  siRNA target sequence for Glra3 (NM_080438.1,254-272).
cagagacgactatggatta

SEQ ID NO: 572581 - DNA, 19 bp, Mus musculus
  siRNA target sequence for Glra3 (NM_080438.1,256-274).
gagacgactatggattaca

SEQ ID NO: 572582 - DNA, 19 bp, Mus musculus
  siRNA target sequence for Glra3 (NM_080438.1,258-276).
gacgactatggattacaga

SEQ ID NO: 572583 - DNA, 19 bp, Mus musculus
  siRNA target sequence for Glra3 (NM_080438.1,263-281).
ctatggattacagagtaaa

SEQ ID NO: 572584 - DNA, 19 bp, Mus musculus
  siRNA target sequence for Glra3 (NM_080438.1,268-286).
gattacagagtaaacattt

SEQ ID NO: 572585 - DNA, 19 bp, Mus musculus
  siRNA target sequence for Glra3 (NM_080438.1,531-549).
cccaatggatgtacaaaca

SEQ ID NO: 572586 - DNA, 19 bp, Mus musculus
  siRNA target sequence for Glra3 (NM_080438.1,532-550).
ccaatggatgtacaaacat

SEQ ID NO: 572587 - DNA, 19 bp, Mus musculus
  siRNA target sequence for Glra3 (NM_080438.1,548-566).
catgcataatgcaacttga

SEQ ID NO: 572588 - DNA, 19 bp, Mus musculus
  siRNA target sequence for Glra3 (NM_080438.1,581-599).
caatgaatgatctcatttt

SEQ ID NO: 572589 - DNA, 19 bp, Mus musculus
  siRNA target sequence for Glra3 (NM_080438.1,678-696).
cttgcggtactgcactaaa

SEQ ID NO: 572590 - DNA, 19 bp, Mus musculus
  siRNA target sequence for Glra3 (NM_080438.1,682-700).
cggtactgcactaaacact

SEQ ID NO: 572591 - DNA, 19 bp, Mus musculus
  siRNA target sequence for Glra3 (NM_080438.1,683-701).
ggtactgcactaaacacta

SEQ ID NO: 572592 - DNA, 19 bp, Mus musculus
  siRNA target sequence for Glra3 (NM_080438.1,690-708).
cactaaacactacaataca

SEQ ID NO: 572593 - DNA, 19 bp, Mus musculus
  siRNA target sequence for Glra3 (NM_080438.1,723-741).
catagaagtgcgattccat

SEQ ID NO: 572594 - DNA, 19 bp, Mus musculus
  siRNA target sequence for Glra3 (NM_080438.1,748-766).
cgtcagatgggctattact

SEQ ID NO: 572595 - DNA, 19 bp, Mus musculus
  siRNA target sequence for Glra3 (NM_080438.1,749-767).
gtcagatgggctattactt

SEQ ID NO: 572596 - DNA, 19 bp, Mus musculus
  siRNA target sequence for Glra3 (NM_080438.1,785-803).
ccagcctcctgatcgttat

SEQ ID NO: 572597 - DNA, 19 bp, Mus musculus
  siRNA target sequence for Glra3 (NM_080438.1,786-804).
cagcctcctgatcgttatt

SEQ ID NO: 572598 - DNA, 19 bp, Mus musculus
  siRNA target sequence for Glra3 (NM_080438.1,789-807).
cctcctgatcgttattcta

SEQ ID NO: 572599 - DNA, 19 bp, Mus musculus
  siRNA target sequence for Glra3 (NM_080438.1,790-808).
ctcctgatcgttattctat

SEQ ID NO: 572600 - DNA, 19 bp, Mus musculus
  siRNA target sequence for Glra3 (NM_080438.1,914-932).
ccttaccaaaggtgtcata

SEQ ID NO: 572601 - DNA, 19 bp, Mus musculus
  siRNA target sequence for Glra3 (NM_080438.1,929-947).
catacgtcaaggctattga

SEQ ID NO: 572602 - DNA, 19 bp, Mus musculus
  siRNA target sequence for Glra3 (NM_080438.1,957-975).
ggcggtgtgcctccttttt

SEQ ID NO: 572603 - DNA, 19 bp, Mus musculus
  siRNA target sequence for Glra3 (NM_080438.1,996-1014).
gtatgcagccgtgaatttt

SEQ ID NO: 572604 - DNA, 19 bp, Mus musculus
  siRNA target sequence for Glra3 (NM_080438.1,1041-1059).
gaggtttcggcgaaagaga

SEQ ID NO: 572605 - DNA, 19 bp, Mus musculus
  siRNA target sequence for Glra3 (NM_080438.1,1043-1061).
ggtttcggcgaaagagaaa

SEQ ID NO: 572606 - DNA, 19 bp, Mus musculus
  siRNA target sequence for Glra3 (NM_080438.1,1048-1066).
cggcgaaagagaaagaata

SEQ ID NO: 572607 - DNA, 19 bp, Mus musculus
  siRNA target sequence for Glra3 (NM_080438.1,1062-1080).
gaataagacggaagctttt

SEQ ID NO: 572608 - DNA, 19 bp, Mus musculus
  siRNA target sequence for Glra3 (NM_080438.1,1089-1107).
gaagttttaccgtttctca

SEQ ID NO: 572609 - DNA, 19 bp, Mus musculus
  siRNA target sequence for Glra3 (NM_080438.1,1263-1281).
cgacagggctaagaagatt

SEQ ID NO: 572610 - DNA, 19 bp, Mus musculus
  siRNA target sequence for Glra3 (NM_080438.1,1340-1358).
gggttatctataaaatcct

SEQ ID NO: 572611 - DNA, 19 bp, Mus musculus
  siRNA target sequence for Glra3 (NM_080438.1,1341-1359).
ggttatctataaaatcctt

SEQ ID NO: 572612 - DNA, 19 bp, Mus musculus
  siRNA target sequence for Glra3 (NM_080438.1,1342-1360).
gttatctataaaatcctta

SEQ ID NO: 572613 - DNA, 19 bp, Mus musculus
  siRNA target sequence for Glra4 (NM_010297.1,27-45).
gcttatgggacgaacatct

SEQ ID NO: 572614 - DNA, 19 bp, Mus musculus
  siRNA target sequence for Glra4 (NM_010297.1,46-64).
ggatatgatgctaggatta

SEQ ID NO: 572615 - DNA, 19 bp, Mus musculus
  siRNA target sequence for Glra4 (NM_010297.1,56-74).
ctaggattaggcccaattt

SEQ ID NO: 572616 - DNA, 19 bp, Mus musculus
  siRNA target sequence for Glra4 (NM_010297.1,59-77).
ggattaggcccaatttcaa

SEQ ID NO: 572617 - DNA, 19 bp, Mus musculus
  siRNA target sequence for Glra4 (NM_010297.1,94-112).
gtgacctgcaacatcttca

SEQ ID NO: 572618 - DNA, 19 bp, Mus musculus
  siRNA target sequence for Glra4 (NM_010297.1,148-166).
gactaccgggtaaatgtct

SEQ ID NO: 572619 - DNA, 19 bp, Mus musculus
  siRNA target sequence for Glra4 (NM_010297.1,198-216).
ggcctaccgagaatatcca

SEQ ID NO: 572620 - DNA, 19 bp, Mus musculus
  siRNA target sequence for Glra4 (NM_010297.1,334-352).
cgcatcttcaagaatggaa

SEQ ID NO: 572621 - DNA, 19 bp, Mus musculus
  siRNA target sequence for Glra4 (NM_010297.1,480-498).
gtttgagtggctagaagat

SEQ ID NO: 572622 - DNA, 19 bp, Mus musculus
  siRNA target sequence for Glra4 (NM_010297.1,525-543).
gttgactctaccccaattt

SEQ ID NO: 572623 - DNA, 19 bp, Mus musculus
  siRNA target sequence for Glra4 (NM_010297.1,528-546).
gactctaccccaatttatt

SEQ ID NO: 572624 - DNA, 19 bp, Mus musculus
  siRNA target sequence for Glra4 (NM_010297.1,558-576).
gaaggatctagggtattgt

SEQ ID NO: 572625 - DNA, 19 bp, Mus musculus
  siRNA target sequence for Glra4 (NM_010297.1,642-660).
gggctactatctgattcaa

SEQ ID NO: 572626 - DNA, 19 bp, Mus musculus
  siRNA target sequence for Glra4 (NM_010297.1,643-661).
ggctactatctgattcaaa

SEQ ID NO: 572627 - DNA, 19 bp, Mus musculus
  siRNA target sequence for Glra4 (NM_010297.1,644-662).
gctactatctgattcaaat

SEQ ID NO: 572628 - DNA, 19 bp, Mus musculus
  siRNA target sequence for Glra4 (NM_010297.1,880-898).
gagtatgctgcagtcaatt

SEQ ID NO: 572629 - DNA, 19 bp, Mus musculus
  siRNA target sequence for Glra4 (NM_010297.1,882-900).
gtatgctgcagtcaatttt

SEQ ID NO: 572630 - DNA, 19 bp, Mus musculus
  siRNA target sequence for Glra4 (NM_010297.1,908-926).
gtcagcataaggaatttat

SEQ ID NO: 572631 - DNA, 19 bp, Mus musculus
  siRNA target sequence for Glra4 (NM_010297.1,945-963).
gagacgtcagcgtatggaa

SEQ ID NO: 572632 - DNA, 19 bp, Mus musculus
  siRNA target sequence for Glra4 (NM_010297.1,977-995).
gagagagccgcttctattt

SEQ ID NO: 572633 - DNA, 19 bp, Mus musculus
  siRNA target sequence for Glra4 (NM_010297.1,981-999).
gagccgcttctattttcgt

SEQ ID NO: 572634 - DNA, 19 bp, Mus musculus
  siRNA target sequence for Glra4 (NM_010297.1,1032-1050).
ggatggaggtccaatggaa

SEQ ID NO: 572635 - DNA, 19 bp, Mus musculus
  siRNA target sequence for Glra4 (NM_010297.1,1048-1066).
gaaggttccagcatttata

SEQ ID NO: 572636 - DNA, 19 bp, Mus musculus
  siRNA target sequence for Glra4 (NM_010297.1,1079-1097).
caacccctcttctaaagga

SEQ ID NO: 572637 - DNA, 19 bp, Mus musculus
  siRNA target sequence for Glra4 (NM_010297.1,1123-1141).
gtggaccgagccaagagaa

SEQ ID NO: 572638 - DNA, 19 bp, Mus musculus
  siRNA target sequence for Glra4 (NM_010297.1,1180-1198).
cttgtcttcaatatcttct

SEQ ID NO: 572639 - DNA, 19 bp, Mus musculus
  siRNA target sequence for Glra4 (NM_010297.1,1194-1212).
cttctattgggttgtctat

SEQ ID NO: 572640 - DNA, 19 bp, Mus musculus
  siRNA target sequence for Glra4 (NM_010297.1,1202-1220).
gggttgtctataaagtact

SEQ ID NO: 572641 - DNA, 19 bp, Mus musculus
  siRNA target sequence for Glra4 (NM_010297.1,1203-1221).
ggttgtctataaagtacta

SEQ ID NO: 572642 - DNA, 19 bp, Mus musculus
  siRNA target sequence for Glra4 (NM_010297.1,1204-1222).
gttgtctataaagtactaa

SEQ ID NO: 572643 - DNA, 19 bp, Mus musculus
  siRNA target sequence for Glra4 (NM_010297.1,1216-1234).
gtactaaggtcagaagata

SEQ ID NO: 572644 - DNA, 19 bp, Mus musculus
  siRNA target sequence for Glrb (NM_010298.2,38-56).
cgttggcaatctccttttt

SEQ ID NO: 572645 - DNA, 19 bp, Mus musculus
  siRNA target sequence for Glrb (NM_010298.2,39-57).
gttggcaatctcctttttt

SEQ ID NO: 572646 - DNA, 19 bp, Mus musculus
  siRNA target sequence for Glrb (NM_010298.2,184-202).
cccaactccaccagcaata

SEQ ID NO: 572647 - DNA, 19 bp, Mus musculus
  siRNA target sequence for Glrb (NM_010298.2,191-209).
ccaccagcaatatcttgaa

SEQ ID NO: 572648 - DNA, 19 bp, Mus musculus
  siRNA target sequence for Glrb (NM_010298.2,252-270).
caaaggcattcctgttgat

SEQ ID NO: 572649 - DNA, 19 bp, Mus musculus
  siRNA target sequence for Glrb (NM_010298.2,415-433).
gttgaccccaccatgtata

SEQ ID NO: 572650 - DNA, 19 bp, Mus musculus
  siRNA target sequence for Glrb (NM_010298.2,418-436).
gaccccaccatgtataagt

SEQ ID NO: 572651 - DNA, 19 bp, Mus musculus
  siRNA target sequence for Glrb (NM_010298.2,438-456).
cttgtggaaacctgactta

SEQ ID NO: 572652 - DNA, 19 bp, Mus musculus
  siRNA target sequence for Glrb (NM_010298.2,487-505).
catgatgtgacccaagaaa

SEQ ID NO: 572653 - DNA, 19 bp, Mus musculus
  siRNA target sequence for Glrb (NM_010298.2,546-564).
gagcatgaggttgtctatt

SEQ ID NO: 572654 - DNA, 19 bp, Mus musculus
  siRNA target sequence for Glrb (NM_010298.2,549-567).
catgaggttgtctattaca

SEQ ID NO: 572655 - DNA, 19 bp, Mus musculus
  siRNA target sequence for Glrb (NM_010298.2,552-570).
gaggttgtctattacactt

SEQ ID NO: 572656 - DNA, 19 bp, Mus musculus
  siRNA target sequence for Glrb (NM_010298.2,558-576).
gtctattacactttcatgt

SEQ ID NO: 572657 - DNA, 19 bp, Mus musculus
  siRNA target sequence for Glrb (NM_010298.2,575-593).
gtcctctagacttaactct

SEQ ID NO: 572658 - DNA, 19 bp, Mus musculus
  siRNA target sequence for Glrb (NM_010298.2,608-626).
cacaacgctgcaaaatgca

SEQ ID NO: 572659 - DNA, 19 bp, Mus musculus
  siRNA target sequence for Glrb (NM_010298.2,640-658).
ggatatacaaccgatgatt

SEQ ID NO: 572660 - DNA, 19 bp, Mus musculus
  siRNA target sequence for Glrb (NM_010298.2,641-659).
gatatacaaccgatgattt

SEQ ID NO: 572661 - DNA, 19 bp, Mus musculus
  siRNA target sequence for Glrb (NM_010298.2,647-665).
caaccgatgatttaagatt

SEQ ID NO: 572662 - DNA, 19 bp, Mus musculus
  siRNA target sequence for Glrb (NM_010298.2,650-668).
ccgatgatttaagattcat

SEQ ID NO: 572663 - DNA, 19 bp, Mus musculus
  siRNA target sequence for Glrb (NM_010298.2,686-704).
ctgttcagttggaaaaaat

SEQ ID NO: 572664 - DNA, 19 bp, Mus musculus
  siRNA target sequence for Glrb (NM_010298.2,693-711).
gttggaaaaaattgcttta

SEQ ID NO: 572665 - DNA, 19 bp, Mus musculus
  siRNA target sequence for Glrb (NM_010298.2,706-724).
gctttacctcaatttgata

SEQ ID NO: 572666 - DNA, 19 bp, Mus musculus
  siRNA target sequence for Glrb (NM_010298.2,742-760).
gaatatggcaactgtacaa

SEQ ID NO: 572667 - DNA, 19 bp, Mus musculus
  siRNA target sequence for Glrb (NM_010298.2,748-766).
ggcaactgtacaaaatact

SEQ ID NO: 572668 - DNA, 19 bp, Mus musculus
  siRNA target sequence for Glrb (NM_010298.2,772-790).
ggcactggttactacactt

SEQ ID NO: 572669 - DNA, 19 bp, Mus musculus
  siRNA target sequence for Glrb (NM_010298.2,820-838).
caggttgggttctacatga

SEQ ID NO: 572670 - DNA, 19 bp, Mus musculus
  siRNA target sequence for Glrb (NM_010298.2,831-849).
ctacatgatgggcgtatat

SEQ ID NO: 572671 - DNA, 19 bp, Mus musculus
  siRNA target sequence for Glrb (NM_010298.2,834-852).
catgatgggcgtatatgca

SEQ ID NO: 572672 - DNA, 19 bp, Mus musculus
  siRNA target sequence for Glrb (NM_010298.2,975-993).
cgcagccgagcttcctaaa

SEQ ID NO: 572673 - DNA, 19 bp, Mus musculus
  siRNA target sequence for Glrb (NM_010298.2,979-997).
gccgagcttcctaaagtgt

SEQ ID NO: 572674 - DNA, 19 bp, Mus musculus
  siRNA target sequence for Glrb (NM_010298.2,1077-1095).
ccaggtgatgctgaacaat

SEQ ID NO: 572675 - DNA, 19 bp, Mus musculus
  siRNA target sequence for Glrb (NM_010298.2,1164-1182).
cgcagctaagaagaatact

SEQ ID NO: 572676 - DNA, 19 bp, Mus musculus
  siRNA target sequence for Glrb (NM_010298.2,1168-1186).
gctaagaagaatactgtaa

SEQ ID NO: 572677 - DNA, 19 bp, Mus musculus
  siRNA target sequence for Glrb (NM_010298.2,1169-1187).
ctaagaagaatactgtaaa

SEQ ID NO: 572678 - DNA, 19 bp, Mus musculus
  siRNA target sequence for Glrb (NM_010298.2,1193-1211).
cggggacccctgttcatat

SEQ ID NO: 572679 - DNA, 19 bp, Mus musculus
  siRNA target sequence for Glrb (NM_010298.2,1195-1213).
gggacccctgttcatatca

SEQ ID NO: 572680 - DNA, 19 bp, Mus musculus
  siRNA target sequence for Glrb (NM_010298.2,1229-1247).
gtgagaccagatgcaaaaa

SEQ ID NO: 572681 - DNA, 19 bp, Mus musculus
  siRNA target sequence for Glrb (NM_010298.2,1267-1285).
gatttgagatccaatgact

SEQ ID NO: 572682 - DNA, 19 bp, Mus musculus
  siRNA target sequence for Glrb (NM_010298.2,1287-1305).
cagcattgttggaagctta

SEQ ID NO: 572683 - DNA, 19 bp, Mus musculus
  siRNA target sequence for Glrb (NM_010298.2,1297-1315).
ggaagcttaccaagagatt

SEQ ID NO: 572684 - DNA, 19 bp, Mus musculus
  siRNA target sequence for Glrb (NM_010298.2,1310-1328).
gagattttgaattatccaa

SEQ ID NO: 572685 - DNA, 19 bp, Mus musculus
  siRNA target sequence for Glrb (NM_010298.2,1343-1361).
ggaaacccatcgaagtcaa

SEQ ID NO: 572686 - DNA, 19 bp, Mus musculus
  siRNA target sequence for Glrb (NM_010298.2,1433-1451).
ccaagcgcatcgaccttta

SEQ ID NO: 572687 - DNA, 19 bp, Mus musculus
  siRNA target sequence for Glrb (NM_010298.2,1434-1452).
caagcgcatcgacctttat

SEQ ID NO: 572688 - DNA, 19 bp, Mus musculus
  siRNA target sequence for Glrb (NM_010298.2,1437-1455).
gcgcatcgacctttatgca

SEQ ID NO: 572689 - DNA, 19 bp, Mus musculus
  siRNA target sequence for Glrb (NM_010298.2,1438-1456).
cgcatcgacctttatgcaa

SEQ ID NO: 572690 - DNA, 19 bp, Mus musculus
  siRNA target sequence for Glrb (NM_010298.2,1453-1471).
gcaagagcattatttcctt

SEQ ID NO: 572691 - DNA, 19 bp, Mus musculus
  siRNA target sequence for Glrb (NM_010298.2,1476-1494).
cttcttgttcttcaatgtt

SEQ ID NO: 572692 - DNA, 19 bp, Mus musculus
  siRNA target sequence for Htr3a (NM_013561.1,190-208).
cacctcctggctaactaca

SEQ ID NO: 572693 - DNA, 19 bp, Mus musculus
  siRNA target sequence for Htr3a (NM_013561.1,310-328).
ctgaccacctacatatggt

SEQ ID NO: 572694 - DNA, 19 bp, Mus musculus
  siRNA target sequence for Htr3a (NM_013561.1,379-397).
gacaatgtcaccaaattgt

SEQ ID NO: 572695 - DNA, 19 bp, Mus musculus
  siRNA target sequence for Htr3a (NM_013561.1,456-474).
ggggaagtctccgaacatt

SEQ ID NO: 572696 - DNA, 19 bp, Mus musculus
  siRNA target sequence for Htr3a (NM_013561.1,462-480).
gtctccgaacattccttat

SEQ ID NO: 572697 - DNA, 19 bp, Mus musculus
  siRNA target sequence for Htr3a (NM_013561.1,464-482).
ctccgaacattccttatgt

SEQ ID NO: 572698 - DNA, 19 bp, Mus musculus
  siRNA target sequence for Htr3a (NM_013561.1,466-484).
ccgaacattccttatgtgt

SEQ ID NO: 572699 - DNA, 19 bp, Mus musculus
  siRNA target sequence for Htr3a (NM_013561.1,497-515).
gaggtgaagttcagaacta

SEQ ID NO: 572700 - DNA, 19 bp, Mus musculus
  siRNA target sequence for Htr3a (NM_013561.1,499-517).
ggtgaagttcagaactaca

SEQ ID NO: 572701 - DNA, 19 bp, Mus musculus
  siRNA target sequence for Htr3a (NM_013561.1,500-518).
gtgaagttcagaactacaa

SEQ ID NO: 572702 - DNA, 19 bp, Mus musculus
  siRNA target sequence for Htr3a (NM_013561.1,536-554).
ccgcctgtagccttgacat

SEQ ID NO: 572703 - DNA, 19 bp, Mus musculus
  siRNA target sequence for Htr3a (NM_013561.1,542-560).
gtagccttgacatctacaa

SEQ ID NO: 572704 - DNA, 19 bp, Mus musculus
  siRNA target sequence for Htr3a (NM_013561.1,641-659).
ggcgatcaccggaagaagt

SEQ ID NO: 572705 - DNA, 19 bp, Mus musculus
  siRNA target sequence for Htr3a (NM_013561.1,667-685).
gacaagagcatcttcataa

SEQ ID NO: 572706 - DNA, 19 bp, Mus musculus
  siRNA target sequence for Htr3a (NM_013561.1,726-744).
caaggagttcagcatagat

SEQ ID NO: 572707 - DNA, 19 bp, Mus musculus
  siRNA target sequence for Htr3a (NM_013561.1,730-748).
gagttcagcatagatatca

SEQ ID NO: 572708 - DNA, 19 bp, Mus musculus
  siRNA target sequence for Htr3a (NM_013561.1,732-750).
gttcagcatagatatcagt

SEQ ID NO: 572709 - DNA, 19 bp, Mus musculus
  siRNA target sequence for Htr3a (NM_013561.1,883-901).
ggtgagagagtctctttca

SEQ ID NO: 572710 - DNA, 19 bp, Mus musculus
  siRNA target sequence for Htr3a (NM_013561.1,1004-1022).
gcatggctctgctagtgat

SEQ ID NO: 572711 - DNA, 19 bp, Mus musculus
  siRNA target sequence for Htr3a (NM_013561.1,1005-1023).
catggctctgctagtgata

SEQ ID NO: 572712 - DNA, 19 bp, Mus musculus
  siRNA target sequence for Htr3a (NM_013561.1,1500-1518).
ctggtccatttggcattat

SEQ ID NO: 572713 - DNA, 19 bp, Mus musculus
  siRNA target sequence for Htr3a (NM_013561.1,1503-1521).
gtccatttggcattattct

SEQ ID NO: 572714 - DNA, 19 bp, Mus musculus
  siRNA target sequence for Htr3b (NM_020274.2,304-322).
ggcagctcttacaacagta

SEQ ID NO: 572715 - DNA, 19 bp, Mus musculus
  siRNA target sequence for Htr3b (NM_020274.2,385-403).
gcgtccatgctgtattgga

SEQ ID NO: 572716 - DNA, 19 bp, Mus musculus
  siRNA target sequence for Htr3b (NM_020274.2,386-404).
cgtccatgctgtattggat

SEQ ID NO: 572717 - DNA, 19 bp, Mus musculus
  siRNA target sequence for Htr3b (NM_020274.2,442-460).
ggtaccgagaggtttggaa

SEQ ID NO: 572718 - DNA, 19 bp, Mus musculus
  siRNA target sequence for Htr3b (NM_020274.2,452-470).
ggtttggaacgatgagttt

SEQ ID NO: 572719 - DNA, 19 bp, Mus musculus
  siRNA target sequence for Htr3b (NM_020274.2,453-471).
gtttggaacgatgagtttt

SEQ ID NO: 572720 - DNA, 19 bp, Mus musculus
  siRNA target sequence for Htr3b (NM_020274.2,487-505).
gtctgttcgatgagattca

SEQ ID NO: 572721 - DNA, 19 bp, Mus musculus
  siRNA target sequence for Htr3b (NM_020274.2,538-556).
cccctgatatcatcattaa

SEQ ID NO: 572722 - DNA, 19 bp, Mus musculus
  siRNA target sequence for Htr3b (NM_020274.2,541-559).
ctgatatcatcattaatga

SEQ ID NO: 572723 - DNA, 19 bp, Mus musculus
  siRNA target sequence for Htr3b (NM_020274.2,582-600).
cctgacctgccctatgtat

SEQ ID NO: 572724 - DNA, 19 bp, Mus musculus
  siRNA target sequence for Htr3b (NM_020274.2,608-626).
ctcttctggcaccattaga

SEQ ID NO: 572725 - DNA, 19 bp, Mus musculus
  siRNA target sequence for Htr3b (NM_020274.2,704-722).
cctcacctttaatagcatt

SEQ ID NO: 572726 - DNA, 19 bp, Mus musculus
  siRNA target sequence for Htr3b (NM_020274.2,768-786).
gaagacatcgagaatgaca

SEQ ID NO: 572727 - DNA, 19 bp, Mus musculus
  siRNA target sequence for Htr3b (NM_020274.2,924-942).
gtgagcctcttgataccta

SEQ ID NO: 572728 - DNA, 19 bp, Mus musculus
  siRNA target sequence for Htr3b (NM_020274.2,963-981).
gacctgggaagcttctact

SEQ ID NO: 572729 - DNA, 19 bp, Mus musculus
  siRNA target sequence for Htr3b (NM_020274.2,1039-1057).
cggtcttcagggtcaacat

SEQ ID NO: 572730 - DNA, 19 bp, Mus musculus
  siRNA target sequence for Htr3b (NM_020274.2,1127-1145).
cctcttggttctcagttta

SEQ ID NO: 572731 - DNA, 19 bp, Mus musculus
  siRNA target sequence for Htr3b (NM_020274.2,1153-1171).
ccatcttgctgatcaaatt

SEQ ID NO: 572732 - DNA, 19 bp, Mus musculus
  siRNA target sequence for Htr3b (NM_020274.2,1195-1213).
ggcaagaacggcctcttat

SEQ ID NO: 572733 - DNA, 19 bp, Mus musculus
  siRNA target sequence for Htr3b (NM_020274.2,1236-1254).
gccgaggagtctagattgt

SEQ ID NO: 572734 - DNA, 19 bp, Mus musculus
  siRNA target sequence for Htr3b (NM_020274.2,1237-1255).
ccgaggagtctagattgta

SEQ ID NO: 572735 - DNA, 19 bp, Mus musculus
  siRNA target sequence for Htr3b (NM_020274.2,1305-1323).
catcgggtcccatcagata

SEQ ID NO: 572736 - DNA, 19 bp, Mus musculus
  siRNA target sequence for Htr3b (NM_020274.2,1309-1327).
gggtcccatcagatactct

SEQ ID NO: 572737 - DNA, 19 bp, Mus musculus
  siRNA target sequence for Htr3b (NM_020274.2,1415-1433).
catcctgtatcgctttgat

SEQ ID NO: 572738 - DNA, 19 bp, Mus musculus
  siRNA target sequence for Htr3b (NM_020274.2,1458-1476).
gccgtgctggggctctata

SEQ ID NO: 572739 - DNA, 19 bp, Mus musculus
  siRNA target sequence for Htr3b (NM_020274.2,1470-1488).
ctctataccgtcaccttat

SEQ ID NO: 572740 - DNA, 19 bp, Mus musculus
  siRNA target sequence for 1700010M22Rik (NM_025490.1,253-271).
gagcccaactggtaaagaa

SEQ ID NO: 572741 - DNA, 19 bp, Mus musculus
  siRNA target sequence for 2610207I16Rik (NM_024255.1,91-109).
ctagcgggatgcacagttt

SEQ ID NO: 572742 - DNA, 19 bp, Mus musculus
  siRNA target sequence for 2610207I16Rik (NM_024255.1,94-112).
gcgggatgcacagttttta

SEQ ID NO: 572743 - DNA, 19 bp, Mus musculus
  siRNA target sequence for 2610207I16Rik (NM_024255.1,150-168).
cttgaaagccgcaaaggat

SEQ ID NO: 572744 - DNA, 19 bp, Mus musculus
  siRNA target sequence for 2610207I16Rik (NM_024255.1,217-235).
ctcctcggcacaatctaca

SEQ ID NO: 572745 - DNA, 19 bp, Mus musculus
  siRNA target sequence for 2610207I16Rik (NM_024255.1,234-252).
cacggctgctgaagaaatt

SEQ ID NO: 572746 - DNA, 19 bp, Mus musculus
  siRNA target sequence for 2610207I16Rik (NM_024255.1,267-285).
gacggccttgccttgtgtt

SEQ ID NO: 572747 - DNA, 19 bp, Mus musculus
  siRNA target sequence for 2610207I16Rik (NM_024255.1,273-291).
cttgccttgtgttgttgat

SEQ ID NO: 572748 - DNA, 19 bp, Mus musculus
  siRNA target sequence for 2610207I16Rik (NM_024255.1,336-354).
ggagaaatttggaggaatt

SEQ ID NO: 572749 - DNA, 19 bp, Mus musculus
  siRNA target sequence for 2610207I16Rik (NM_024255.1,366-384).
gaacaatgccagtgctatt

SEQ ID NO: 572750 - DNA, 19 bp, Mus musculus
  siRNA target sequence for 2610207I16Rik (NM_024255.1,413-431).
ccaagagagtggacttgat

SEQ ID NO: 572751 - DNA, 19 bp, Mus musculus
  siRNA target sequence for 2610207I16Rik (NM_024255.1,453-471).
cacctaccttacatccaaa

SEQ ID NO: 572752 - DNA, 19 bp, Mus musculus
  siRNA target sequence for 2610207I16Rik (NM_024255.1,497-515).
gcaaagtaggtcatattct

SEQ ID NO: 572753 - DNA, 19 bp, Mus musculus
  siRNA target sequence for 2610207I16Rik (NM_024255.1,524-542).
gcccacccctgaacctaaa

SEQ ID NO: 572754 - DNA, 19 bp, Mus musculus
  siRNA target sequence for 2610207I16Rik (NM_024255.1,561-579).
gcactgtgcttataccatt

SEQ ID NO: 572755 - DNA, 19 bp, Mus musculus
  siRNA target sequence for 2610207I16Rik (NM_024255.1,580-598).
gccaaatatggcatgtcta

SEQ ID NO: 572756 - DNA, 19 bp, Mus musculus
  siRNA target sequence for 2610207I16Rik (NM_024255.1,581-599).
ccaaatatggcatgtctat

SEQ ID NO: 572757 - DNA, 19 bp, Mus musculus
  siRNA target sequence for 2610207I16Rik (NM_024255.1,701-719).
gatctggtgttgaaaacca

SEQ ID NO: 572758 - DNA, 19 bp, Mus musculus
  siRNA target sequence for 2610207I16Rik (NM_024255.1,709-727).
gttgaaaaccaatgtagaa

SEQ ID NO: 572759 - DNA, 19 bp, Mus musculus
  siRNA target sequence for 2610207I16Rik (NM_024255.1,742-760).
gcggacgctgcatattcca

SEQ ID NO: 572760 - DNA, 19 bp, Mus musculus
  siRNA target sequence for 2610207I16Rik (NM_024255.1,743-761).
cggacgctgcatattccat

SEQ ID NO: 572761 - DNA, 19 bp, Mus musculus
  siRNA target sequence for 2610207I16Rik (NM_024255.1,788-806).
gcaactttattattgatga

SEQ ID NO: 572762 - DNA, 19 bp, Mus musculus
  siRNA target sequence for 2610207I16Rik (NM_024255.1,868-886).
cccttgttaccggatttct

SEQ ID NO: 572763 - DNA, 19 bp, Mus musculus
  siRNA target sequence for 2610207I16Rik (NM_024255.1,869-887).
ccttgttaccggatttctt

SEQ ID NO: 572764 - DNA, 19 bp, Mus musculus
  siRNA target sequence for 2610207I16Rik (NM_024255.1,878-896).
cggatttcttcttagatga

SEQ ID NO: 572765 - DNA, 19 bp, Mus musculus
  siRNA target sequence for 2610207I16Rik (NM_024255.1,1228-1246).
gctgtggaagaaacattta

SEQ ID NO: 572766 - DNA, 19 bp, Mus musculus
  siRNA target sequence for 2610207I16Rik (NM_024255.1,1328-1346).
gtggtacgtggtttcttga

SEQ ID NO: 572767 - DNA, 19 bp, Mus musculus
  siRNA target sequence for 2610207I16Rik (NM_024255.1,1331-1349).
gtacgtggtttcttgatct

SEQ ID NO: 572768 - DNA, 19 bp, Mus musculus
  siRNA target sequence for 2610207I16Rik (NM_024255.1,1334-1352).
cgtggtttcttgatctaaa

SEQ ID NO: 572769 - DNA, 19 bp, Mus musculus
  siRNA target sequence for 2610207I16Rik (NM_024255.1,1396-1414).
gcagacgtggtgatgagta

SEQ ID NO: 572770 - DNA, 19 bp, Mus musculus
  siRNA target sequence for 2610207I16Rik (NM_024255.1,1397-1415).
cagacgtggtgatgagtat

SEQ ID NO: 572771 - DNA, 19 bp, Mus musculus
  siRNA target sequence for 2610207I16Rik (NM_024255.1,1412-1430).
gtatggccactgatgattt

SEQ ID NO: 572772 - DNA, 19 bp, Mus musculus
  siRNA target sequence for 2610207I16Rik (NM_024255.1,1418-1436).
ccactgatgattttgtcaa

SEQ ID NO: 572773 - DNA, 19 bp, Mus musculus
  siRNA target sequence for 2610207I16Rik (NM_024255.1,1423-1441).
gatgattttgtcaaaatgt

SEQ ID NO: 572774 - DNA, 19 bp, Mus musculus
  siRNA target sequence for 2610207I16Rik (NM_024255.1,1476-1494).
gtcaggaaagttgaagatt

SEQ ID NO: 572775 - DNA, 19 bp, Mus musculus
  siRNA target sequence for 2610207I16Rik (NM_024255.1,1499-1517).
gaaacatagccctagcaat

SEQ ID NO: 572776 - DNA, 19 bp, Mus musculus
  siRNA target sequence for 2610207I16Rik (NM_024255.1,1531-1549).
ctaatgacccagatgaatt

SEQ ID NO: 572777 - DNA, 19 bp, Mus musculus
  siRNA target sequence for 2610207I16Rik (NM_024255.1,1536-1554).
gacccagatgaattctaga

SEQ ID NO: 572778 - DNA, 19 bp, Mus musculus
  siRNA target sequence for 2610207I16Rik (NM_024255.1,1540-1558).
cagatgaattctagactat

SEQ ID NO: 572779 - DNA, 19 bp, Mus musculus
  siRNA target sequence for Hsd17b4 (NM_008292.2,115-133).
gaaagaggagcattagtca

SEQ ID NO: 572780 - DNA, 19 bp, Mus musculus
  siRNA target sequence for Hsd17b4 (NM_008292.2,153-171).
ggacttcaagggaattggt

SEQ ID NO: 572781 - DNA, 19 bp, Mus musculus
  siRNA target sequence for Hsd17b4 (NM_008292.2,156-174).
cttcaagggaattggtaaa

SEQ ID NO: 572782 - DNA, 19 bp, Mus musculus
  siRNA target sequence for Hsd17b4 (NM_008292.2,229-247).
gcagtggccaattacgatt

SEQ ID NO: 572783 - DNA, 19 bp, Mus musculus
  siRNA target sequence for Hsd17b4 (NM_008292.2,234-252).
ggccaattacgattcagtt

SEQ ID NO: 572784 - DNA, 19 bp, Mus musculus
  siRNA target sequence for Hsd17b4 (NM_008292.2,237-255).
caattacgattcagttgaa

SEQ ID NO: 572785 - DNA, 19 bp, Mus musculus
  siRNA target sequence for Hsd17b4 (NM_008292.2,257-275).
caggcgagaagcttgtgaa

SEQ ID NO: 572786 - DNA, 19 bp, Mus musculus
  siRNA target sequence for Hsd17b4 (NM_008292.2,276-294).
gacggcactggacacattt

SEQ ID NO: 572787 - DNA, 19 bp, Mus musculus
  siRNA target sequence for Hsd17b4 (NM_008292.2,348-366).
ctccaggataagtgatgaa

SEQ ID NO: 572788 - DNA, 19 bp, Mus musculus
  siRNA target sequence for Hsd17b4 (NM_008292.2,372-390).
ggatataattcatagagtt

SEQ ID NO: 572789 - DNA, 19 bp, Mus musculus
  siRNA target sequence for Hsd17b4 (NM_008292.2,421-439).
gcagcatgggaccatatga

SEQ ID NO: 572790 - DNA, 19 bp, Mus musculus
  siRNA target sequence for Hsd17b4 (NM_008292.2,422-440).
cagcatgggaccatatgaa

SEQ ID NO: 572791 - DNA, 19 bp, Mus musculus
  siRNA target sequence for Hsd17b4 (NM_008292.2,424-442).
gcatgggaccatatgaaga

SEQ ID NO: 572792 - DNA, 19 bp, Mus musculus
  siRNA target sequence for Hsd17b4 (NM_008292.2,430-448).
gaccatatgaagaaacaga

SEQ ID NO: 572793 - DNA, 19 bp, Mus musculus
  siRNA target sequence for Hsd17b4 (NM_008292.2,447-465).
gaattatggaagaatcctt

SEQ ID NO: 572794 - DNA, 19 bp, Mus musculus
  siRNA target sequence for Hsd17b4 (NM_008292.2,454-472).
ggaagaatccttatgactt

SEQ ID NO: 572795 - DNA, 19 bp, Mus musculus
  siRNA target sequence for Hsd17b4 (NM_008292.2,498-516).
ctttggccaggcgaattat

SEQ ID NO: 572796 - DNA, 19 bp, Mus musculus
  siRNA target sequence for Hsd17b4 (NM_008292.2,549-567).
caatactctcgccattgaa

SEQ ID NO: 572797 - DNA, 19 bp, Mus musculus
  siRNA target sequence for Hsd17b4 (NM_008292.2,632-650).
ctgtgttgccggaagatct

SEQ ID NO: 572798 - DNA, 19 bp, Mus musculus
  siRNA target sequence for Hsd17b4 (NM_008292.2,717-735).
ggaaaatggtggcctattt

SEQ ID NO: 572799 - DNA, 19 bp, Mus musculus
  siRNA target sequence for Hsd17b4 (NM_008292.2,745-763).
gcaggatggattggaaaat

SEQ ID NO: 572800 - DNA, 19 bp, Mus musculus
  siRNA target sequence for Hsd17b4 (NM_008292.2,746-764).
caggatggattggaaaatt

SEQ ID NO: 572801 - DNA, 19 bp, Mus musculus
  siRNA target sequence for Hsd17b4 (NM_008292.2,873-891).
caagccgcagaccattcaa

SEQ ID NO: 572802 - DNA, 19 bp, Mus musculus
  siRNA target sequence for Hsd17b4 (NM_008292.2,876-894).
gccgcagaccattcaagaa

SEQ ID NO: 572803 - DNA, 19 bp, Mus musculus
  siRNA target sequence for Hsd17b4 (NM_008292.2,877-895).
ccgcagaccattcaagaat

SEQ ID NO: 572804 - DNA, 19 bp, Mus musculus
  siRNA target sequence for Hsd17b4 (NM_008292.2,879-897).
gcagaccattcaagaatca

SEQ ID NO: 572805 - DNA, 19 bp, Mus musculus
  siRNA target sequence for Hsd17b4 (NM_008292.2,880-898).
cagaccattcaagaatcaa

SEQ ID NO: 572806 - DNA, 19 bp, Mus musculus
  siRNA target sequence for Hsd17b4 (NM_008292.2,901-919).
ggtggtatagtcgaagttt

SEQ ID NO: 572807 - DNA, 19 bp, Mus musculus
  siRNA target sequence for Hsd17b4 (NM_008292.2,902-920).
gtggtatagtcgaagtttt

SEQ ID NO: 572808 - DNA, 19 bp, Mus musculus
  siRNA target sequence for Hsd17b4 (NM_008292.2,912-930).
cgaagttttacataaggta

SEQ ID NO: 572809 - DNA, 19 bp, Mus musculus
  siRNA target sequence for Hsd17b4 (NM_008292.2,998-1016).
gtgctgttggccataaact

SEQ ID NO: 572810 - DNA, 19 bp, Mus musculus
  siRNA target sequence for Hsd17b4 (NM_008292.2,1007-1025).
gccataaacttccttcatt

SEQ ID NO: 572811 - DNA, 19 bp, Mus musculus
  siRNA target sequence for Hsd17b4 (NM_008292.2,1008-1026).
ccataaacttccttcattt

SEQ ID NO: 572812 - DNA, 19 bp, Mus musculus
  siRNA target sequence for Hsd17b4 (NM_008292.2,1009-1027).
cataaacttccttcatttt

SEQ ID NO: 572813 - DNA, 19 bp, Mus musculus
  siRNA target sequence for Hsd17b4 (NM_008292.2,1072-1090).
gtgggagcgtcagtcaaaa

SEQ ID NO: 572814 - DNA, 19 bp, Mus musculus
  siRNA target sequence for Hsd17b4 (NM_008292.2,1074-1092).
gggagcgtcagtcaaaaat

SEQ ID NO: 572815 - DNA, 19 bp, Mus musculus
  siRNA target sequence for Hsd17b4 (NM_008292.2,1078-1096).
gcgtcagtcaaaaatccaa

SEQ ID NO: 572816 - DNA, 19 bp, Mus musculus
  siRNA target sequence for Hsd17b4 (NM_008292.2,1079-1097).
cgtcagtcaaaaatccaaa

SEQ ID NO: 572817 - DNA, 19 bp, Mus musculus
  siRNA target sequence for Hsd17b4 (NM_008292.2,1143-1161).
gcccaccttcggagtcatt

SEQ ID NO: 572818 - DNA, 19 bp, Mus musculus
  siRNA target sequence for Hsd17b4 (NM_008292.2,1145-1163).
ccaccttcggagtcattgt

SEQ ID NO: 572819 - DNA, 19 bp, Mus musculus
  siRNA target sequence for Hsd17b4 (NM_008292.2,1276-1294).
cgatcaggagaattaaaat

SEQ ID NO: 572820 - DNA, 19 bp, Mus musculus
  siRNA target sequence for Hsd17b4 (NM_008292.2,1280-1298).
caggagaattaaaatgtga

SEQ ID NO: 572821 - DNA, 19 bp, Mus musculus
  siRNA target sequence for Hsd17b4 (NM_008292.2,1328-1346).
gctctggcgtagtgattgt

SEQ ID NO: 572822 - DNA, 19 bp, Mus musculus
  siRNA target sequence for Hsd17b4 (NM_008292.2,1329-1347).
ctctggcgtagtgattgtt

SEQ ID NO: 572823 - DNA, 19 bp, Mus musculus
  siRNA target sequence for Hsd17b4 (NM_008292.2,1331-1349).
ctggcgtagtgattgttat

SEQ ID NO: 572824 - DNA, 19 bp, Mus musculus
  siRNA target sequence for Hsd17b4 (NM_008292.2,1334-1352).
gcgtagtgattgttatgga

SEQ ID NO: 572825 - DNA, 19 bp, Mus musculus
  siRNA target sequence for Hsd17b4 (NM_008292.2,1345-1363).
gttatggacgtctattctt

SEQ ID NO: 572826 - DNA, 19 bp, Mus musculus
  siRNA target sequence for Hsd17b4 (NM_008292.2,1350-1368).
ggacgtctattcttattct

SEQ ID NO: 572827 - DNA, 19 bp, Mus musculus
  siRNA target sequence for Hsd17b4 (NM_008292.2,1370-1388).
ggaaggaacttatatgcta

SEQ ID NO: 572828 - DNA, 19 bp, Mus musculus
  siRNA target sequence for Hsd17b4 (NM_008292.2,1371-1389).
gaaggaacttatatgctat

SEQ ID NO: 572829 - DNA, 19 bp, Mus musculus
  siRNA target sequence for Hsd17b4 (NM_008292.2,1378-1396).
cttatatgctataatcagt

SEQ ID NO: 572830 - DNA, 19 bp, Mus musculus
  siRNA target sequence for Hsd17b4 (NM_008292.2,1460-1478).
cagctgtagctgtaccaaa

SEQ ID NO: 572831 - DNA, 19 bp, Mus musculus
  siRNA target sequence for Hsd17b4 (NM_008292.2,1553-1571).
ggaatcctctacacattga

SEQ ID NO: 572832 - DNA, 19 bp, Mus musculus
  siRNA target sequence for Hsd17b4 (NM_008292.2,1583-1601).
cgagcgttgccggttttga

SEQ ID NO: 572833 - DNA, 19 bp, Mus musculus
  siRNA target sequence for Hsd17b4 (NM_008292.2,1586-1604).
gcgttgccggttttgagaa

SEQ ID NO: 572834 - DNA, 19 bp, Mus musculus
  siRNA target sequence for Hsd17b4 (NM_008292.2,1618-1636).
ggactatgtacctttggat

SEQ ID NO: 572835 - DNA, 19 bp, Mus musculus
  siRNA target sequence for Hsd17b4 (NM_008292.2,1619-1637).
gactatgtacctttggatt

SEQ ID NO: 572836 - DNA, 19 bp, Mus musculus
  siRNA target sequence for Hsd17b4 (NM_008292.2,1669-1687).
gataatgatgtatcaagat

SEQ ID NO: 572837 - DNA, 19 bp, Mus musculus
  siRNA target sequence for Hsd17b4 (NM_008292.2,1682-1700).
caagattcaaggcgattaa

SEQ ID NO: 572838 - DNA, 19 bp, Mus musculus
  siRNA target sequence for Hsd17b4 (NM_008292.2,1692-1710).
ggcgattaaggttcgtttt

SEQ ID NO: 572839 - DNA, 19 bp, Mus musculus
  siRNA target sequence for Hsd17b4 (NM_008292.2,1801-1819).
ggagatgttgtcatttcaa

SEQ ID NO: 572840 - DNA, 19 bp, Mus musculus
  siRNA target sequence for Hsd17b4 (NM_008292.2,1936-1954).
ggccgtgaggtggtaaaga

SEQ ID NO: 572841 - DNA, 19 bp, Mus musculus
  siRNA target sequence for Hsd17b4 (NM_008292.2,1953-1971).
gaaagcgaatgctgtgttt

SEQ ID NO: 572842 - DNA, 19 bp, Mus musculus
  siRNA target sequence for Hsd17b4 (NM_008292.2,1957-1975).
gcgaatgctgtgtttgaat

SEQ ID NO: 572843 - DNA, 19 bp, Mus musculus
  siRNA target sequence for Hsd17b4 (NM_008292.2,1966-1984).
gtgtttgaatggcatatca

SEQ ID NO: 572844 - DNA, 19 bp, Mus musculus
  siRNA target sequence for Hsd17b4 (NM_008292.2,2074-2092).
gatgtgaccatcatcattt

SEQ ID NO: 572845 - DNA, 19 bp, Mus musculus
  siRNA target sequence for Hsd17b4 (NM_008292.2,2189-2207).
gccagaaactacagatgat

SEQ ID NO: 572846 - DNA, 19 bp, Mus musculus
  siRNA target sequence for Stoml1 (NM_026942.2,105-123).
gcccttaggggattttgat

SEQ ID NO: 572847 - DNA, 19 bp, Mus musculus
  siRNA target sequence for Stoml1 (NM_026942.2,300-318).
ctggtttgctctgaagatt

SEQ ID NO: 572848 - DNA, 19 bp, Mus musculus
  siRNA target sequence for Stoml1 (NM_026942.2,584-602).
cccacaacgccatgactaa

SEQ ID NO: 572849 - DNA, 19 bp, Mus musculus
  siRNA target sequence for Stoml1 (NM_026942.2,814-832).
ctagggggaagtatgaact

SEQ ID NO: 572850 - DNA, 19 bp, Mus musculus
  siRNA target sequence for Stoml1 (NM_026942.2,831-849).
ctcagcggtcggacatgtt

SEQ ID NO: 572851 - DNA, 19 bp, Mus musculus
  siRNA target sequence for Stoml1 (NM_026942.2,865-883).
gacaccttggagatgataa

SEQ ID NO: 572852 - DNA, 19 bp, Mus musculus
  siRNA target sequence for Stoml1 (NM_026942.2,1011-1029).
ggcctgctaccagttcaat

SEQ ID NO: 572853 - DNA, 19 bp, Mus musculus
  siRNA target sequence for Stoml1 (NM_026942.2,1013-1031).
cctgctaccagttcaatgt

SEQ ID NO: 572854 - DNA, 19 bp, Mus musculus
  siRNA target sequence for Stoml1 (NM_026942.2,1150-1168).
gacttgcaggccttgttga

SEQ ID NO: 572855 - DNA, 19 bp, Mus musculus
  siRNA target sequence for Stoml1 (NM_026942.2,1183-1201).
cccttaggggcctacatga

SEQ ID NO: 572856 - DNA, 19 bp, Mus musculus
  siRNA target sequence for Stoml1 (NM_026942.2,1255-1273).
gtactcaaggccttgaagt

SEQ ID NO: 572857 - DNA, 19 bp, Mus musculus
  siRNA target sequence for Osbpl5 (NM_024289.1,351-369).
gtgtccaccagcttctact

SEQ ID NO: 572858 - DNA, 19 bp, Mus musculus
  siRNA target sequence for Osbpl5 (NM_024289.1,462-480).
gtccaacggcccatcacaa

SEQ ID NO: 572859 - DNA, 19 bp, Mus musculus
  siRNA target sequence for Osbpl5 (NM_024289.1,533-551).
ctgagtacaggctatgcaa

SEQ ID NO: 572860 - DNA, 19 bp, Mus musculus
  siRNA target sequence for Osbpl5 (NM_024289.1,553-571).
ggatctgacaaggaatgta

SEQ ID NO: 572861 - DNA, 19 bp, Mus musculus
  siRNA target sequence for Osbpl5 (NM_024289.1,764-782).
caggggtgctgctcattta

SEQ ID NO: 572862 - DNA, 19 bp, Mus musculus
  siRNA target sequence for Osbpl5 (NM_024289.1,825-843).
gcactgctgcgagcttatt

SEQ ID NO: 572863 - DNA, 19 bp, Mus musculus
  siRNA target sequence for Osbpl5 (NM_024289.1,861-879).
ggacggcttctgcttcaaa

SEQ ID NO: 572864 - DNA, 19 bp, Mus musculus
  siRNA target sequence for Osbpl5 (NM_024289.1,1190-1208).
ccttggagaacgatgcatt

SEQ ID NO: 572865 - DNA, 19 bp, Mus musculus
  siRNA target sequence for Osbpl5 (NM_024289.1,1194-1212).
ggagaacgatgcattctca

SEQ ID NO: 572866 - DNA, 19 bp, Mus musculus
  siRNA target sequence for Osbpl5 (NM_024289.1,1510-1528).
ggcaagctctctgattact

SEQ ID NO: 572867 - DNA, 19 bp, Mus musculus
  siRNA target sequence for Osbpl5 (NM_024289.1,1511-1529).
gcaagctctctgattacta

SEQ ID NO: 572868 - DNA, 19 bp, Mus musculus
  siRNA target sequence for Osbpl5 (NM_024289.1,1753-1771).
gtgtctgccttctatgtca

SEQ ID NO: 572869 - DNA, 19 bp, Mus musculus
  siRNA target sequence for Osbpl5 (NM_024289.1,1855-1873).
gacggcaaggctaaactca

SEQ ID NO: 572870 - DNA, 19 bp, Mus musculus
  siRNA target sequence for Osbpl5 (NM_024289.1,1864-1882).
gctaaactcaccttcctta

SEQ ID NO: 572871 - DNA, 19 bp, Mus musculus
  siRNA target sequence for Osbpl5 (NM_024289.1,2115-2133).
ctgggacagagatgtattt

SEQ ID NO: 572872 - DNA, 19 bp, Mus musculus
  siRNA target sequence for Osbpl5 (NM_024289.1,2117-2135).
gggacagagatgtatttat

SEQ ID NO: 572873 - DNA, 19 bp, Mus musculus
  siRNA target sequence for Osbpl5 (NM_024289.1,2523-2541).
gtctggccagacaaccttt

SEQ ID NO: 572874 - DNA, 19 bp, Mus musculus
  siRNA target sequence for Osbpl5 (NM_024289.1,2728-2746).
gaggtacaccggctaaaga

SEQ ID NO: 572875 - DNA, 19 bp, Mus musculus
  siRNA target sequence for Osbpl5 (NM_024289.1,2799-2817).
gcacctttcgaccatgtta

SEQ ID NO: 572876 - DNA, 19 bp, Mus musculus
  siRNA target sequence for Osbpl5 (NM_024289.1,2800-2818).
cacctttcgaccatgttaa

SEQ ID NO: 572877 - DNA, 19 bp, Mus musculus
  siRNA target sequence for Osbpl5 (NM_024289.1,2803-2821).
ctttcgaccatgttaagct

SEQ ID NO: 572878 - DNA, 19 bp, Mus musculus
  siRNA target sequence for Osbpl5 (NM_024289.1,2899-2917).
ctgacgtgtcagctattca

SEQ ID NO: 572879 - DNA, 19 bp, Mus musculus
  siRNA target sequence for Cyp21a1 (NM_009995.1,205-223).
gtggtggtgctaaattcta

SEQ ID NO: 572880 - DNA, 19 bp, Mus musculus
  siRNA target sequence for Cyp21a1 (NM_009995.1,208-226).
gtggtgctaaattctaaca

SEQ ID NO: 572881 - DNA, 19 bp, Mus musculus
  siRNA target sequence for Cyp21a1 (NM_009995.1,210-228).
ggtgctaaattctaacaga

SEQ ID NO: 572882 - DNA, 19 bp, Mus musculus
  siRNA target sequence for Cyp21a1 (NM_009995.1,211-229).
gtgctaaattctaacagaa

SEQ ID NO: 572883 - DNA, 19 bp, Mus musculus
  siRNA target sequence for Cyp21a1 (NM_009995.1,271-289).
ggccgaccccatatgctaa

SEQ ID NO: 572884 - DNA, 19 bp, Mus musculus
  siRNA target sequence for Cyp21a1 (NM_009995.1,272-290).
gccgaccccatatgctaaa

SEQ ID NO: 572885 - DNA, 19 bp, Mus musculus
  siRNA target sequence for Cyp21a1 (NM_009995.1,273-291).
ccgaccccatatgctaaat

SEQ ID NO: 572886 - DNA, 19 bp, Mus musculus
  siRNA target sequence for Cyp21a1 (NM_009995.1,277-295).
ccccatatgctaaatggaa

SEQ ID NO: 572887 - DNA, 19 bp, Mus musculus
  siRNA target sequence for Cyp21a1 (NM_009995.1,278-296).
cccatatgctaaatggaaa

SEQ ID NO: 572888 - DNA, 19 bp, Mus musculus
  siRNA target sequence for Cyp21a1 (NM_009995.1,310-328).
ctgtccctgggggattact

SEQ ID NO: 572889 - DNA, 19 bp, Mus musculus
  siRNA target sequence for Cyp21a1 (NM_009995.1,336-354).
gtggaaggcccacaagaaa

SEQ ID NO: 572890 - DNA, 19 bp, Mus musculus
  siRNA target sequence for Cyp21a1 (NM_009995.1,390-408).
ctccatggagcctctgata

SEQ ID NO: 572891 - DNA, 19 bp, Mus musculus
  siRNA target sequence for Cyp21a1 (NM_009995.1,458-476).
cccccgtggccatccataa

SEQ ID NO: 572892 - DNA, 19 bp, Mus musculus
  siRNA target sequence for Cyp21a1 (NM_009995.1,461-479).
ccgtggccatccataagga

SEQ ID NO: 572893 - DNA, 19 bp, Mus musculus
  siRNA target sequence for Cyp21a1 (NM_009995.1,466-484).
gccatccataaggaattct

SEQ ID NO: 572894 - DNA, 19 bp, Mus musculus
  siRNA target sequence for Cyp21a1 (NM_009995.1,592-610).
cactggtccatccaaatct

SEQ ID NO: 572895 - DNA, 19 bp, Mus musculus
  siRNA target sequence for Cyp21a1 (NM_009995.1,603-621).
ccaaatcttgacgataatt

SEQ ID NO: 572896 - DNA, 19 bp, Mus musculus
  siRNA target sequence for Cyp21a1 (NM_009995.1,680-698).
gtcgggaccatattgtcaa

SEQ ID NO: 572897 - DNA, 19 bp, Mus musculus
  siRNA target sequence for Cyp21a1 (NM_009995.1,733-751).
gcaggccaatggaaagaca

SEQ ID NO: 572898 - DNA, 19 bp, Mus musculus
  siRNA target sequence for Cyp21a1 (NM_009995.1,734-752).
caggccaatggaaagacat

SEQ ID NO: 572899 - DNA, 19 bp, Mus musculus
  siRNA target sequence for Cyp21a1 (NM_009995.1,743-761).
ggaaagacatgattgacta

SEQ ID NO: 572900 - DNA, 19 bp, Mus musculus
  siRNA target sequence for Cyp21a1 (NM_009995.1,1091-1109).
gcatctccggctatgacat

SEQ ID NO: 572901 - DNA, 19 bp, Mus musculus
  siRNA target sequence for Pgrmc1 (NM_016783.2,123-141).
ctgctgcacgagattttca

SEQ ID NO: 572902 - DNA, 19 bp, Mus musculus
  siRNA target sequence for Pgrmc1 (NM_016783.2,290-308).
cgagctgaggcgtttcgat

SEQ ID NO: 572903 - DNA, 19 bp, Mus musculus
  siRNA target sequence for Pgrmc1 (NM_016783.2,535-553).
ctcagttcactttcaagta

SEQ ID NO: 572904 - DNA, 19 bp, Mus musculus
  siRNA target sequence for Pgrmc1 (NM_016783.2,539-557).
gttcactttcaagtatcat

SEQ ID NO: 572905 - DNA, 19 bp, Mus musculus
  siRNA target sequence for Pgrmc1 (NM_016783.2,626-644).
cgagacagctcggaagaat

SEQ ID NO: 572906 - DNA, 19 bp, Mus musculus
  siRNA target sequence for Scgb1a1 (NM_011681.1,189-207).
ggaatcagagtctggttat

SEQ ID NO: 572907 - DNA, 19 bp, Mus musculus
  siRNA target sequence for Scgb1a1 (NM_011681.1,295-313).
gagaccaggataaacatca

SEQ ID NO: 572908 - DNA, 19 bp, Mus musculus
  siRNA target sequence for Scgb1a1 (NM_011681.1,299-317).
ccaggataaacatcatgaa

SEQ ID NO: 572909 - DNA, 19 bp, Mus musculus
  siRNA target sequence for Scgb1a1 (NM_011681.1,318-336).
gctcacggagaaaatccta

SEQ ID NO: 572910 - DNA, 19 bp, Mus musculus
  siRNA target sequence for Scgb1a1 (NM_011681.1,319-337).
ctcacggagaaaatcctaa

SEQ ID NO: 572911 - DNA, 19 bp, Mus musculus
  siRNA target sequence for Scgb1a1 (NM_011681.1,343-361).
cctctgtgtaagcaagatt

SEQ ID NO: 572912 - DNA, 19 bp, Mus musculus
  siRNA target sequence for Serpina6 (NM_007618.1,196-214).
cgcctagtggccctgaatt

SEQ ID NO: 572913 - DNA, 19 bp, Mus musculus
  siRNA target sequence for Serpina6 (NM_007618.1,217-235).
gacaagaataccttaatct

SEQ ID NO: 572914 - DNA, 19 bp, Mus musculus
  siRNA target sequence for Serpina6 (NM_007618.1,310-328).
ctgggcttcaacatgtcaa

SEQ ID NO: 572915 - DNA, 19 bp, Mus musculus
  siRNA target sequence for Serpina6 (NM_007618.1,314-332).
gcttcaacatgtcaaagat

SEQ ID NO: 572916 - DNA, 19 bp, Mus musculus
  siRNA target sequence for Serpina6 (NM_007618.1,355-373).
ggtttccagtacctcaatt

SEQ ID NO: 572917 - DNA, 19 bp, Mus musculus
  siRNA target sequence for Serpina6 (NM_007618.1,589-607).
gtctcagacctggatagtt

SEQ ID NO: 572918 - DNA, 19 bp, Mus musculus
  siRNA target sequence for Serpina6 (NM_007618.1,680-698).
ctagagaggaggacttcta

SEQ ID NO: 572919 - DNA, 19 bp, Mus musculus
  siRNA target sequence for Serpina6 (NM_007618.1,683-701).
gagaggaggacttctatgt

SEQ ID NO: 572920 - DNA, 19 bp, Mus musculus
  siRNA target sequence for Serpina6 (NM_007618.1,736-754).
gtccagtcaggcaacatta

SEQ ID NO: 572921 - DNA, 19 bp, Mus musculus
  siRNA target sequence for Serpina6 (NM_007618.1,739-757).
cagtcaggcaacattagtt

SEQ ID NO: 572922 - DNA, 19 bp, Mus musculus
  siRNA target sequence for Serpina6 (NM_007618.1,784-802).
cagatggtacagatgaatt

SEQ ID NO: 572923 - DNA, 19 bp, Mus musculus
  siRNA target sequence for Serpina6 (NM_007618.1,786-804).
gatggtacagatgaattat

SEQ ID NO: 572924 - DNA, 19 bp, Mus musculus
  siRNA target sequence for Serpina6 (NM_007618.1,857-875).
ctgtcgtcgctgcacttaa

SEQ ID NO: 572925 - DNA, 19 bp, Mus musculus
  siRNA target sequence for Serpina6 (NM_007618.1,869-887).
cacttaatcgggacacaat

SEQ ID NO: 572926 - DNA, 19 bp, Mus musculus
  siRNA target sequence for Serpina6 (NM_007618.1,898-916).
ggcaagcttatgattccaa

SEQ ID NO: 572927 - DNA, 19 bp, Mus musculus
  siRNA target sequence for Serpina6 (NM_007618.1,928-946).
ctgtacatccccaaattct

SEQ ID NO: 572928 - DNA, 19 bp, Mus musculus
  siRNA target sequence for Serpina6 (NM_007618.1,985-1003).
gatgtgggcattaaggatt

SEQ ID NO: 572929 - DNA, 19 bp, Mus musculus
  siRNA target sequence for Serpina6 (NM_007618.1,991-1009).
ggcattaaggatttgttca

SEQ ID NO: 572930 - DNA, 19 bp, Mus musculus
  siRNA target sequence for Serpina6 (NM_007618.1,1005-1023).
gttcaccaaccaatctgat

SEQ ID NO: 572931 - DNA, 19 bp, Mus musculus
  siRNA target sequence for Serpina6 (NM_007618.1,1135-1153).
cacctgccctccgaatcat

SEQ ID NO: 572932 - DNA, 19 bp, Mus musculus
  siRNA target sequence for Serpina6 (NM_007618.1,1221-1239).
gatgagccaagtcatgaat

SEQ ID NO: 572933 - DNA, 19 bp, Mus musculus
  siRNA target sequence for Shbg (NM_011367.1,166-184).
caagagcctgtcatggtta

SEQ ID NO: 572934 - DNA, 19 bp, Mus musculus
  siRNA target sequence for Shbg (NM_011367.1,310-328).
cgagctggccagcttgaaa

SEQ ID NO: 572935 - DNA, 19 bp, Mus musculus
  siRNA target sequence for Shbg (NM_011367.1,460-478).
ctatgcctgagacaaatct

SEQ ID NO: 572936 - DNA, 19 bp, Mus musculus
  siRNA target sequence for Shbg (NM_011367.1,537-555).
cctccctacttccaaactt

SEQ ID NO: 572937 - DNA, 19 bp, Mus musculus
  siRNA target sequence for Shbg (NM_011367.1,584-602).
gctgtattcggcgagatat

SEQ ID NO: 572938 - DNA, 19 bp, Mus musculus
  siRNA target sequence for Shbg (NM_011367.1,642-660).
cactagcctgggaaactgt

SEQ ID NO: 572939 - DNA, 19 bp, Mus musculus
  siRNA target sequence for Shbg (NM_011367.1,695-713).
cagggacccacgcagaatt

SEQ ID NO: 572940 - DNA, 19 bp, Mus musculus
  siRNA target sequence for Shbg (NM_011367.1,697-715).
gggacccacgcagaattca

SEQ ID NO: 572941 - DNA, 19 bp, Mus musculus
  siRNA target sequence for Shbg (NM_011367.1,699-717).
gacccacgcagaattcagt

SEQ ID NO: 572942 - DNA, 19 bp, Mus musculus
  siRNA target sequence for Shbg (NM_011367.1,879-897).
cgaggcagaacctaaggta

SEQ ID NO: 572943 - DNA, 19 bp, Mus musculus
  siRNA target sequence for Shbg (NM_011367.1,883-901).
gcagaacctaaggtagttt

SEQ ID NO: 572944 - DNA, 19 bp, Mus musculus
  siRNA target sequence for Shbg (NM_011367.1,884-902).
cagaacctaaggtagtttt

SEQ ID NO: 572945 - DNA, 19 bp, Mus musculus
  siRNA target sequence for Shbg (NM_011367.1,933-951).
gacgctggatagagtcaaa

SEQ ID NO: 572946 - DNA, 19 bp, Mus musculus
  siRNA target sequence for Shbg (NM_011367.1,935-953).
cgctggatagagtcaaagt

SEQ ID NO: 572947 - DNA, 19 bp, Mus musculus
  siRNA target sequence for Shbg (NM_011367.1,1050-1068).
ctcccttggggctttacca

SEQ ID NO: 572948 - DNA, 19 bp, Mus musculus
  siRNA target sequence for Shbg (NM_011367.1,1118-1136).
gacagagactggacataga

SEQ ID NO: 572949 - DNA, 19 bp, Mus musculus
  siRNA target sequence for Shbg (NM_011367.1,1183-1201).
cagagacctagcaacgata

SEQ ID NO: 572950 - DNA, 19 bp, Mus musculus
  siRNA target sequence for Ttr (NM_013697.1,55-73).
gcctcgctggactggtatt

SEQ ID NO: 572951 - DNA, 19 bp, Mus musculus
  siRNA target sequence for Ttr (NM_013697.1,56-74).
cctcgctggactggtattt

SEQ ID NO: 572952 - DNA, 19 bp, Mus musculus
  siRNA target sequence for Ttr (NM_013697.1,165-183).
gacgtggctgtaaaagtgt

SEQ ID NO: 572953 - DNA, 19 bp, Mus musculus
  siRNA target sequence for Ttr (NM_013697.1,356-374).
cgcggatgtggttttcaca

SEQ ID NO: 572954 - DNA, 19 bp, Mus musculus
  siRNA target sequence for Folr1 (NM_008034.2,465-483).
ccaggactgaacttctcaa

SEQ ID NO: 572955 - DNA, 19 bp, Mus musculus
  siRNA target sequence for Folr1 (NM_008034.2,466-484).
caggactgaacttctcaat

SEQ ID NO: 572956 - DNA, 19 bp, Mus musculus
  siRNA target sequence for Folr1 (NM_008034.2,554-572).
ccctggaagacgaattcct

SEQ ID NO: 572957 - DNA, 19 bp, Mus musculus
  siRNA target sequence for Folr1 (NM_008034.2,596-614).
gaagcacataaggacattt

SEQ ID NO: 572958 - DNA, 19 bp, Mus musculus
  siRNA target sequence for Folr1 (NM_008034.2,636-654).
ggaaccactgcggaactat

SEQ ID NO: 572959 - DNA, 19 bp, Mus musculus
  siRNA target sequence for Folr1 (NM_008034.2,640-658).
ccactgcggaactatgaca

SEQ ID NO: 572960 - DNA, 19 bp, Mus musculus
  siRNA target sequence for Folr1 (NM_008034.2,651-669).
ctatgacatcggaatgcaa

SEQ ID NO: 572961 - DNA, 19 bp, Mus musculus
  siRNA target sequence for Folr1 (NM_008034.2,662-680).
gaatgcaaacggcacttta

SEQ ID NO: 572962 - DNA, 19 bp, Mus musculus
  siRNA target sequence for Folr1 (NM_008034.2,666-684).
gcaaacggcactttatcca

SEQ ID NO: 572963 - DNA, 19 bp, Mus musculus
  siRNA target sequence for Folr1 (NM_008034.2,667-685).
caaacggcactttatccaa

SEQ ID NO: 572964 - DNA, 19 bp, Mus musculus
  siRNA target sequence for Folr1 (NM_008034.2,938-956).
gctctgtgtgaggaaatct

SEQ ID NO: 572965 - DNA, 19 bp, Mus musculus
  siRNA target sequence for Folr1 (NM_008034.2,1048-1066).
ggaagtggcgaggttctat

SEQ ID NO: 572966 - DNA, 19 bp, Mus musculus
  siRNA target sequence for Folr2 (NM_008035.1,366-384).
gatgccaaacaccataaga

SEQ ID NO: 572967 - DNA, 19 bp, Mus musculus
  siRNA target sequence for Folr2 (NM_008035.1,481-499).
ctgactcccgtctgtactt

SEQ ID NO: 572968 - DNA, 19 bp, Mus musculus
  siRNA target sequence for Folr2 (NM_008035.1,532-550).
cctgtaagagtcacttcat

SEQ ID NO: 572969 - DNA, 19 bp, Mus musculus
  siRNA target sequence for Folr2 (NM_008035.1,638-656).
ggatgtgcccttatgcaaa

SEQ ID NO: 572970 - DNA, 19 bp, Mus musculus
  siRNA target sequence for Folr2 (NM_008035.1,768-786).
ccctgtcacacgtttgagt

SEQ ID NO: 572971 - DNA, 19 bp, Mus musculus
  siRNA target sequence for Folr2 (NM_008035.1,769-787).
cctgtcacacgtttgagta

SEQ ID NO: 572972 - DNA, 19 bp, Mus musculus
  siRNA target sequence for Folr2 (NM_008035.1,774-792).
cacacgtttgagtactact

SEQ ID NO: 572973 - DNA, 19 bp, Mus musculus
  siRNA target sequence for Folr2 (NM_008035.1,917-935).
ggacgtggtgaagttttat

SEQ ID NO: 572974 - DNA, 19 bp, Mus musculus
  siRNA target sequence for Folr2 (NM_008035.1,920-938).
cgtggtgaagttttatgct

SEQ ID NO: 572975 - DNA, 19 bp, Mus musculus
  siRNA target sequence for Ftcd (NM_080845.1,36-54).
gaatgtgtccccaacttct

SEQ ID NO: 572976 - DNA, 19 bp, Mus musculus
  siRNA target sequence for Ftcd (NM_080845.1,555-573).
cggaagttcctcattgcat

SEQ ID NO: 572977 - DNA, 19 bp, Mus musculus
  siRNA target sequence for Ftcd (NM_080845.1,564-582).
ctcattgcattcaatatca

SEQ ID NO: 572978 - DNA, 19 bp, Mus musculus
  siRNA target sequence for Ftcd (NM_080845.1,602-620).
gcaggcccaccgtattgct

SEQ ID NO: 572979 - DNA, 19 bp, Mus musculus
  siRNA target sequence for Ftcd (NM_080845.1,607-625).
cccaccgtattgctcttaa

SEQ ID NO: 572980 - DNA, 19 bp, Mus musculus
  siRNA target sequence for Ftcd (NM_080845.1,653-671).
ccagcctggacgtctgaaa

SEQ ID NO: 572981 - DNA, 19 bp, Mus musculus
  siRNA target sequence for Ftcd (NM_080845.1,654-672).
cagcctggacgtctgaaaa

SEQ ID NO: 572982 - DNA, 19 bp, Mus musculus
  siRNA target sequence for Ftcd (NM_080845.1,1276-1294).
gtttggaggcaataaagct

SEQ ID NO: 572983 - DNA, 19 bp, Mus musculus
  siRNA target sequence for Ftcd (NM_080845.1,1529-1547).
ggacatgacggatgatgta

SEQ ID NO: 572984 - DNA, 19 bp, Mus musculus
  siRNA target sequence for Ftcd (NM_080845.1,1532-1550).
catgacggatgatgtattt

SEQ ID NO: 572985 - DNA, 19 bp, Mus musculus
  siRNA target sequence for Slc19a1 (NM_031196.1,889-907).
ggtgcgcatgctaagtgaa

SEQ ID NO: 572986 - DNA, 19 bp, Mus musculus
  siRNA target sequence for Slc19a1 (NM_031196.1,1258-1276).
cattgccacttttcagatt

SEQ ID NO: 572987 - DNA, 19 bp, Mus musculus
  siRNA target sequence for Slc19a1 (NM_031196.1,1278-1296).
cgtcttccctgtctaaaga

SEQ ID NO: 572988 - DNA, 19 bp, Mus musculus
  siRNA target sequence for Slc19a1 (NM_031196.1,1340-1358).
gcgcttaagacctgtatca

SEQ ID NO: 572989 - DNA, 19 bp, Mus musculus
  siRNA target sequence for Slc19a1 (NM_031196.1,1342-1360).
gcttaagacctgtatcaca

SEQ ID NO: 572990 - DNA, 19 bp, Mus musculus
  siRNA target sequence for Slc19a1 (NM_031196.1,1401-1419).
gtgatcagttccgtatcta

SEQ ID NO: 572991 - DNA, 19 bp, Mus musculus
  siRNA target sequence for Slc19a1 (NM_031196.1,1412-1430).
cgtatctacttcatatact

SEQ ID NO: 572992 - DNA, 19 bp, Mus musculus
  siRNA target sequence for Slc19a1 (NM_031196.1,1466-1484).
gggctggatggcttaaggt

SEQ ID NO: 572993 - DNA, 19 bp, Mus musculus
  siRNA target sequence for Slc19a1 (NM_031196.1,1636-1654).
ggacgacaggggagactta

SEQ ID NO: 572994 - DNA, 19 bp, Mus musculus
  siRNA target sequence for Slc19a1 (NM_031196.1,1637-1655).
gacgacaggggagacttaa

SEQ ID NO: 572995 - DNA, 19 bp, Mus musculus
  siRNA target sequence for Slc19a1 (NM_031196.1,1639-1657).
cgacaggggagacttaaga

SEQ ID NO: 572996 - DNA, 19 bp, Mus musculus
  siRNA target sequence for Slc19a2 (NM_054087.1,370-388).
ctgggacccgacaagaact

SEQ ID NO: 572997 - DNA, 19 bp, Mus musculus
  siRNA target sequence for Slc19a2 (NM_054087.1,373-391).
ggacccgacaagaacttga

SEQ ID NO: 572998 - DNA, 19 bp, Mus musculus
  siRNA target sequence for Slc19a2 (NM_054087.1,393-411).
cgagagacaggtctacaat

SEQ ID NO: 572999 - DNA, 19 bp, Mus musculus
  siRNA target sequence for Slc19a2 (NM_054087.1,398-416).
gacaggtctacaatgaaat

SEQ ID NO: 573000 - DNA, 19 bp, Mus musculus
  siRNA target sequence for Slc19a2 (NM_054087.1,402-420).
ggtctacaatgaaatttat

SEQ ID NO: 573001 - DNA, 19 bp, Mus musculus
  siRNA target sequence for Slc19a2 (NM_054087.1,556-574).
ggactgctggccattcagt

SEQ ID NO: 573002 - DNA, 19 bp, Mus musculus
  siRNA target sequence for Slc19a2 (NM_054087.1,557-575).
gactgctggccattcagtt

SEQ ID NO: 573003 - DNA, 19 bp, Mus musculus
  siRNA target sequence for Slc19a2 (NM_054087.1,617-635).
cctactactcctatatcta

SEQ ID NO: 573004 - DNA, 19 bp, Mus musculus
  siRNA target sequence for Slc19a2 (NM_054087.1,618-636).
ctactactcctatatctat

SEQ ID NO: 573005 - DNA, 19 bp, Mus musculus
  siRNA target sequence for Slc19a2 (NM_054087.1,652-670).
ggcatgtaccagaaagtca

SEQ ID NO: 573006 - DNA, 19 bp, Mus musculus
  siRNA target sequence for Slc19a2 (NM_054087.1,690-708).
caccttggtgggctttaca

SEQ ID NO: 573007 - DNA, 19 bp, Mus musculus
  siRNA target sequence for Slc19a2 (NM_054087.1,900-918).
cggtggcatcgttactgat

SEQ ID NO: 573008 - DNA, 19 bp, Mus musculus
  siRNA target sequence for Slc19a2 (NM_054087.1,901-919).
ggtggcatcgttactgata

SEQ ID NO: 573009 - DNA, 19 bp, Mus musculus
  siRNA target sequence for Slc19a2 (NM_054087.1,943-961).
ggatgggaggacattgagt

SEQ ID NO: 573010 - DNA, 19 bp, Mus musculus
  siRNA target sequence for Slc19a2 (NM_054087.1,1040-1058).
gagtcctgtggaatgactt

SEQ ID NO: 573011 - DNA, 19 bp, Mus musculus
  siRNA target sequence for Slc19a2 (NM_054087.1,1054-1072).
gacttcctgatgtgttatt

SEQ ID NO: 573012 - DNA, 19 bp, Mus musculus
  siRNA target sequence for Slc19a2 (NM_054087.1,1115-1133).
ccacctgcggctatttcca

SEQ ID NO: 573013 - DNA, 19 bp, Mus musculus
  siRNA target sequence for Slc19a2 (NM_054087.1,1116-1134).
cacctgcggctatttccaa

SEQ ID NO: 573014 - DNA, 19 bp, Mus musculus
  siRNA target sequence for Slc19a2 (NM_054087.1,1178-1196).
ctcagaatgctgacatcta

SEQ ID NO: 573015 - DNA, 19 bp, Mus musculus
  siRNA target sequence for Slc19a2 (NM_054087.1,1180-1198).
cagaatgctgacatctaca

SEQ ID NO: 573016 - DNA, 19 bp, Mus musculus
  siRNA target sequence for Slc19a2 (NM_054087.1,1245-1263).
gtttgcagttggctatata

SEQ ID NO: 573017 - DNA, 19 bp, Mus musculus
  siRNA target sequence for Slc19a2 (NM_054087.1,1250-1268).
cagttggctatataaagct

SEQ ID NO: 573018 - DNA, 19 bp, Mus musculus
  siRNA target sequence for Slc19a2 (NM_054087.1,1317-1335).
gattgctgctgcagtgtat

SEQ ID NO: 573019 - DNA, 19 bp, Mus musculus
  siRNA target sequence for Slc19a2 (NM_054087.1,1362-1380).
ggtgtgctatgcatcctat

SEQ ID NO: 573020 - DNA, 19 bp, Mus musculus
  siRNA target sequence for Slc19a2 (NM_054087.1,1506-1524).
gactctgctcactctgatt

SEQ ID NO: 573021 - DNA, 19 bp, Mus musculus
  siRNA target sequence for Slc19a2 (NM_054087.1,1536-1554).
caggggccttggcttatgt

SEQ ID NO: 573022 - DNA, 19 bp, Mus musculus
  siRNA target sequence for Slc19a2 (NM_054087.1,1538-1556).
ggggccttggcttatgtat

SEQ ID NO: 573023 - DNA, 19 bp, Mus musculus
  siRNA target sequence for Slc19a2 (NM_054087.1,1540-1558).
ggccttggcttatgtatca

SEQ ID NO: 573024 - DNA, 19 bp, Mus musculus
  siRNA target sequence for Slc19a2 (NM_054087.1,1612-1630).
ctggcgaatggcatagtca

SEQ ID NO: 573025 - DNA, 19 bp, Mus musculus
  siRNA target sequence for Slc19a2 (NM_054087.1,1616-1634).
cgaatggcatagtcagtat

SEQ ID NO: 573026 - DNA, 19 bp, Mus musculus
  siRNA target sequence for Slc19a2 (NM_054087.1,1621-1639).
ggcatagtcagtattataa

SEQ ID NO: 573027 - DNA, 19 bp, Mus musculus
  siRNA target sequence for Slc19a2 (NM_054087.1,1622-1640).
gcatagtcagtattataaa

SEQ ID NO: 573028 - DNA, 19 bp, Mus musculus
  siRNA target sequence for Slc19a3 (NM_030556.1,379-397).
ccttcctgtttggacatat

SEQ ID NO: 573029 - DNA, 19 bp, Mus musculus
  siRNA target sequence for Slc19a3 (NM_030556.1,447-465).
gctacaaaccagtcatcat

SEQ ID NO: 573030 - DNA, 19 bp, Mus musculus
  siRNA target sequence for Slc19a3 (NM_030556.1,568-586).
cacagagatagcctacttt

SEQ ID NO: 573031 - DNA, 19 bp, Mus musculus
  siRNA target sequence for Slc19a3 (NM_030556.1,610-628).
cccagaacactatcagaaa

SEQ ID NO: 573032 - DNA, 19 bp, Mus musculus
  siRNA target sequence for Slc19a3 (NM_030556.1,612-630).
cagaacactatcagaaagt

SEQ ID NO: 573033 - DNA, 19 bp, Mus musculus
  siRNA target sequence for Slc19a3 (NM_030556.1,637-655).
ctactgtcggagtatcaca

SEQ ID NO: 573034 - DNA, 19 bp, Mus musculus
  siRNA target sequence for Slc19a3 (NM_030556.1,667-685).
cacagcaggctcagtgtta

SEQ ID NO: 573035 - DNA, 19 bp, Mus musculus
  siRNA target sequence for Slc19a3 (NM_030556.1,706-724).
gacgaacctgccatactct

SEQ ID NO: 573036 - DNA, 19 bp, Mus musculus
  siRNA target sequence for Slc19a3 (NM_030556.1,715-733).
gccatactctagccttttt

SEQ ID NO: 573037 - DNA, 19 bp, Mus musculus
  siRNA target sequence for Slc19a3 (NM_030556.1,717-735).
catactctagcctttttta

SEQ ID NO: 573038 - DNA, 19 bp, Mus musculus
  siRNA target sequence for Slc19a3 (NM_030556.1,782-800).
ctaccaatgcctaagaaga

SEQ ID NO: 573039 - DNA, 19 bp, Mus musculus
  siRNA target sequence for Slc19a3 (NM_030556.1,791-809).
cctaagaagagcatgtttt

SEQ ID NO: 573040 - DNA, 19 bp, Mus musculus
  siRNA target sequence for Slc19a3 (NM_030556.1,801-819).
gcatgtttttccatgcaaa

SEQ ID NO: 573041 - DNA, 19 bp, Mus musculus
  siRNA target sequence for Slc19a3 (NM_030556.1,909-927).
ccaattcaaagaatctaga

SEQ ID NO: 573042 - DNA, 19 bp, Mus musculus
  siRNA target sequence for Slc19a3 (NM_030556.1,972-990).
gacactttgcgcattggtt

SEQ ID NO: 573043 - DNA, 19 bp, Mus musculus
  siRNA target sequence for Slc19a3 (NM_030556.1,1059-1077).
cagcaggttataaccaaat

SEQ ID NO: 573044 - DNA, 19 bp, Mus musculus
  siRNA target sequence for Slc19a3 (NM_030556.1,1064-1082).
ggttataaccaaatcttga

SEQ ID NO: 573045 - DNA, 19 bp, Mus musculus
  siRNA target sequence for Slc19a3 (NM_030556.1,1065-1083).
gttataaccaaatcttgaa

SEQ ID NO: 573046 - DNA, 19 bp, Mus musculus
  siRNA target sequence for Slc19a3 (NM_030556.1,1072-1090).
ccaaatcttgaactatgtt

SEQ ID NO: 573047 - DNA, 19 bp, Mus musculus
  siRNA target sequence for Slc19a3 (NM_030556.1,1111-1129).
ggcaccctcccaagattct

SEQ ID NO: 573048 - DNA, 19 bp, Mus musculus
  siRNA target sequence for Slc19a3 (NM_030556.1,1112-1130).
gcaccctcccaagattctt

SEQ ID NO: 573049 - DNA, 19 bp, Mus musculus
  siRNA target sequence for Slc19a3 (NM_030556.1,1120-1138).
ccaagattcttccatctat

SEQ ID NO: 573050 - DNA, 19 bp, Mus musculus
  siRNA target sequence for Slc19a3 (NM_030556.1,1121-1139).
caagattcttccatctata

SEQ ID NO: 573051 - DNA, 19 bp, Mus musculus
  siRNA target sequence for Slc19a3 (NM_030556.1,1172-1190).
ggagctttggcttcattct

SEQ ID NO: 573052 - DNA, 19 bp, Mus musculus
  siRNA target sequence for Slc19a3 (NM_030556.1,1306-1324).
gtgctatgctgggtatcta

SEQ ID NO: 573053 - DNA, 19 bp, Mus musculus
  siRNA target sequence for Slc19a3 (NM_030556.1,1325-1343).
ctggtcaagtcgagctatt

SEQ ID NO: 573054 - DNA, 19 bp, Mus musculus
  siRNA target sequence for Slc19a3 (NM_030556.1,1328-1346).
gtcaagtcgagctattcgt

SEQ ID NO: 573055 - DNA, 19 bp, Mus musculus
  siRNA target sequence for Slc19a3 (NM_030556.1,1330-1348).
caagtcgagctattcgttt

SEQ ID NO: 573056 - DNA, 19 bp, Mus musculus
  siRNA target sequence for Slc19a3 (NM_030556.1,1333-1351).
gtcgagctattcgtttctt

SEQ ID NO: 573057 - DNA, 19 bp, Mus musculus
  siRNA target sequence for Slc19a3 (NM_030556.1,1335-1353).
cgagctattcgtttcttat

SEQ ID NO: 573058 - DNA, 19 bp, Mus musculus
  siRNA target sequence for Slc19a3 (NM_030556.1,1336-1354).
gagctattcgtttcttata

SEQ ID NO: 573059 - DNA, 19 bp, Mus musculus
  siRNA target sequence for Slc19a3 (NM_030556.1,1384-1402).
cctgagcttagaacgttat

SEQ ID NO: 573060 - DNA, 19 bp, Mus musculus
  siRNA target sequence for Slc19a3 (NM_030556.1,1439-1457).
gtgattcagaccatcatga

SEQ ID NO: 573061 - DNA, 19 bp, Mus musculus
  siRNA target sequence for Slc19a3 (NM_030556.1,1449-1467).
ccatcatgactatgattgt

SEQ ID NO: 573062 - DNA, 19 bp, Mus musculus
  siRNA target sequence for Slc19a3 (NM_030556.1,1458-1476).
ctatgattgtggtagatca

SEQ ID NO: 573063 - DNA, 19 bp, Mus musculus
  siRNA target sequence for Slc19a3 (NM_030556.1,1492-1510).
gccagtcactactcagttt

SEQ ID NO: 573064 - DNA, 19 bp, Mus musculus
  siRNA target sequence for Slc19a3 (NM_030556.1,1493-1511).
ccagtcactactcagtttt

SEQ ID NO: 573065 - DNA, 19 bp, Mus musculus
  siRNA target sequence for Slc19a3 (NM_030556.1,1494-1512).
cagtcactactcagttttt

SEQ ID NO: 573066 - DNA, 19 bp, Mus musculus
  siRNA target sequence for Slc19a3 (NM_030556.1,1549-1567).
cttcctaatgagaagcata

SEQ ID NO: 573067 - DNA, 19 bp, Mus musculus
  siRNA target sequence for Slc19a3 (NM_030556.1,1553-1571).
ctaatgagaagcatataca

SEQ ID NO: 573068 - DNA, 19 bp, Mus musculus
  siRNA target sequence for Slc19a3 (NM_030556.1,1590-1608).
gccgaaaggaagtacagaa

SEQ ID NO: 573069 - DNA, 19 bp, Mus musculus
  siRNA target sequence for Slc19a3 (NM_030556.1,1642-1660).
cccacaagagccaagcaat

SEQ ID NO: 573070 - DNA, 19 bp, Mus musculus
  siRNA target sequence for Slc19a3 (NM_030556.1,1652-1670).
ccaagcaatgtgtcaacaa

SEQ ID NO: 573071 - DNA, 19 bp, Mus musculus
  siRNA target sequence for Slc19a3 (NM_030556.1,1653-1671).
caagcaatgtgtcaacaaa

SEQ ID NO: 573072 - DNA, 19 bp, Mus musculus
  siRNA target sequence for Rbp4 (NM_011255.1,619-637).
cagatggattgaacacaat

SEQ ID NO: 573073 - DNA, 19 bp, Mus musculus
  siRNA target sequence for Rbp4 (NM_011255.1,624-642).
ggattgaacacaatggtta

SEQ ID NO: 573074 - DNA, 19 bp, Mus musculus
  siRNA target sequence for Rbp4 (NM_011255.1,632-650).
cacaatggttactgtcaaa

SEQ ID NO: 573075 - DNA, 19 bp, Mus musculus
  siRNA target sequence for Rlbp1 (NM_020599.1,447-465).
cagcttctggcgaggaatt

SEQ ID NO: 573076 - DNA, 19 bp, Mus musculus
  siRNA target sequence for Rlbp1 (NM_020599.1,541-559).
cgatgtgggtcgtgcttat

SEQ ID NO: 573077 - DNA, 19 bp, Mus musculus
  siRNA target sequence for Rlbp1 (NM_020599.1,751-769).
gatcttacaggcatattgt

SEQ ID NO: 573078 - DNA, 19 bp, Mus musculus
  siRNA target sequence for Rlbp1 (NM_020599.1,806-824).
caaatcaacggcttctgta

SEQ ID NO: 573079 - DNA, 19 bp, Mus musculus
  siRNA target sequence for Rlbp1 (NM_020599.1,816-834).
gcttctgtattgttgagaa

SEQ ID NO: 573080 - DNA, 19 bp, Mus musculus
  siRNA target sequence for Rlbp1 (NM_020599.1,876-894).
cctcggatctcaagaagat

SEQ ID NO: 573081 - DNA, 19 bp, Mus musculus
  siRNA target sequence for Rlbp1 (NM_020599.1,964-982).
cttcaccaccacctataat

SEQ ID NO: 573082 - DNA, 19 bp, Mus musculus
  siRNA target sequence for Rlbp1 (NM_020599.1,983-1001).
gtggtcaagcccttcttga

SEQ ID NO: 573083 - DNA, 19 bp, Mus musculus
  siRNA target sequence for Rlbp1 (NM_020599.1,1012-1030).
gctacagagggtctttgtt

SEQ ID NO: 573084 - DNA, 19 bp, Mus musculus
  siRNA target sequence for Rlbp1 (NM_020599.1,1051-1069).
cttcttccaggagattgat

SEQ ID NO: 573085 - DNA, 19 bp, Mus musculus
  siRNA target sequence for Rlbp1 (NM_020599.1,1108-1126).
caagtacgacggcaaagtt

SEQ ID NO: 573086 - DNA, 19 bp, Mus musculus
  siRNA target sequence for Rlbp1 (NM_020599.1,1111-1129).
gtacgacggcaaagttgtt

SEQ ID NO: 573087 - DNA, 19 bp, Mus musculus
  siRNA target sequence for Lcn3 (NM_010694.1,146-164).
gaagacgacatcccaataa

SEQ ID NO: 573088 - DNA, 19 bp, Mus musculus
  siRNA target sequence for Lcn3 (NM_010694.1,149-167).
gacgacatcccaataaaca

SEQ ID NO: 573089 - DNA, 19 bp, Mus musculus
  siRNA target sequence for Lcn3 (NM_010694.1,166-184).
caaggtctctcccatgtta

SEQ ID NO: 573090 - DNA, 19 bp, Mus musculus
  siRNA target sequence for Lcn3 (NM_010694.1,170-188).
gtctctcccatgttaatct

SEQ ID NO: 573091 - DNA, 19 bp, Mus musculus
  siRNA target sequence for Lcn3 (NM_010694.1,203-221).
ggggacatagagctttcta

SEQ ID NO: 573092 - DNA, 19 bp, Mus musculus
  siRNA target sequence for Lcn3 (NM_010694.1,204-222).
gggacatagagctttctat

SEQ ID NO: 573093 - DNA, 19 bp, Mus musculus
  siRNA target sequence for Lcn3 (NM_010694.1,206-224).
gacatagagctttctatca

SEQ ID NO: 573094 - DNA, 19 bp, Mus musculus
  siRNA target sequence for Lcn3 (NM_010694.1,215-233).
ctttctatcacacatatga

SEQ ID NO: 573095 - DNA, 19 bp, Mus musculus
  siRNA target sequence for Lcn3 (NM_010694.1,219-237).
ctatcacacatatgatcta

SEQ ID NO: 573096 - DNA, 19 bp, Mus musculus
  siRNA target sequence for Lcn3 (NM_010694.1,225-243).
cacatatgatctatgatca

SEQ ID NO: 573097 - DNA, 19 bp, Mus musculus
  siRNA target sequence for Lcn3 (NM_010694.1,235-253).
ctatgatcagtgtcttgaa

SEQ ID NO: 573098 - DNA, 19 bp, Mus musculus
  siRNA target sequence for Lcn3 (NM_010694.1,361-379).
ctactgtgatggagagata

SEQ ID NO: 573099 - DNA, 19 bp, Mus musculus
  siRNA target sequence for Lcn3 (NM_010694.1,374-392).
gagatagaggggatgagat

SEQ ID NO: 573100 - DNA, 19 bp, Mus musculus
  siRNA target sequence for Lcn3 (NM_010694.1,380-398).
gaggggatgagattcttga

SEQ ID NO: 573101 - DNA, 19 bp, Mus musculus
  siRNA target sequence for Lcn3 (NM_010694.1,522-540).
gtgaaccagagagtttcta

SEQ ID NO: 573102 - DNA, 19 bp, Mus musculus
  siRNA target sequence for Lcn4 (NM_010695.1,164-182).
gggagactctggttgcatt

SEQ ID NO: 573103 - DNA, 19 bp, Mus musculus
  siRNA target sequence for Lcn4 (NM_010695.1,170-188).
ctctggttgcatttcctat

SEQ ID NO: 573104 - DNA, 19 bp, Mus musculus
  siRNA target sequence for Lcn4 (NM_010695.1,227-245).
ggcacactctcgcatctaa

SEQ ID NO: 573105 - DNA, 19 bp, Mus musculus
  siRNA target sequence for Lcn4 (NM_010695.1,242-260).
ctaagggagagtgcattaa

SEQ ID NO: 573106 - DNA, 19 bp, Mus musculus
  siRNA target sequence for Lcn4 (NM_010695.1,246-264).
gggagagtgcattaatgta

SEQ ID NO: 573107 - DNA, 19 bp, Mus musculus
  siRNA target sequence for Lcn4 (NM_010695.1,252-270).
gtgcattaatgtaggaatt

SEQ ID NO: 573108 - DNA, 19 bp, Mus musculus
  siRNA target sequence for Lcn4 (NM_010695.1,255-273).
cattaatgtaggaattcgt

SEQ ID NO: 573109 - DNA, 19 bp, Mus musculus
  siRNA target sequence for Lcn4 (NM_010695.1,284-302).
cagaggagcctggtcaata

SEQ ID NO: 573110 - DNA, 19 bp, Mus musculus
  siRNA target sequence for Lcn4 (NM_010695.1,286-304).
gaggagcctggtcaataca

SEQ ID NO: 573111 - DNA, 19 bp, Mus musculus
  siRNA target sequence for Lcn4 (NM_010695.1,308-326).
ccttttggggccatactct

SEQ ID NO: 573112 - DNA, 19 bp, Mus musculus
  siRNA target sequence for Lcn4 (NM_010695.1,314-332).
ggggccatactctcttcta

SEQ ID NO: 573113 - DNA, 19 bp, Mus musculus
  siRNA target sequence for Lcn4 (NM_010695.1,315-333).
gggccatactctcttctat

SEQ ID NO: 573114 - DNA, 19 bp, Mus musculus
  siRNA target sequence for Lcn4 (NM_010695.1,316-334).
ggccatactctcttctata

SEQ ID NO: 573115 - DNA, 19 bp, Mus musculus
  siRNA target sequence for Lcn4 (NM_010695.1,323-341).
ctctcttctatatatatga

SEQ ID NO: 573116 - DNA, 19 bp, Mus musculus
  siRNA target sequence for Lcn4 (NM_010695.1,355-373).
gaccactacatcatatact

SEQ ID NO: 573117 - DNA, 19 bp, Mus musculus
  siRNA target sequence for Lcn4 (NM_010695.1,357-375).
ccactacatcatatactgt

SEQ ID NO: 573118 - DNA, 19 bp, Mus musculus
  siRNA target sequence for Lcn4 (NM_010695.1,401-419).
cccaatttggatatctcat

SEQ ID NO: 573119 - DNA, 19 bp, Mus musculus
  siRNA target sequence for Lcn4 (NM_010695.1,442-460).
caggataccttggaagtat

SEQ ID NO: 573120 - DNA, 19 bp, Mus musculus
  siRNA target sequence for Lcn4 (NM_010695.1,444-462).
ggataccttggaagtattt

SEQ ID NO: 573121 - DNA, 19 bp, Mus musculus
  siRNA target sequence for Lcn4 (NM_010695.1,527-545).
ggtgtattcccatacatga

SEQ ID NO: 573122 - DNA, 19 bp, Mus musculus
  siRNA target sequence for Lcn4 (NM_010695.1,553-571).
caccaggaccacaaatgct

SEQ ID NO: 573123 - DNA, 19 bp, Mus musculus
  siRNA target sequence for Mup3 (NM_010845.1,297-315).
gactgcgattggtgaacaa

SEQ ID NO: 573124 - DNA, 19 bp, Mus musculus
  siRNA target sequence for Obp1a (NM_008754.1,68-86).
gctgcttgctttgacattt

SEQ ID NO: 573125 - DNA, 19 bp, Mus musculus
  siRNA target sequence for Obp1a (NM_008754.1,107-125).
ggaaggaccatggaaaact

SEQ ID NO: 573126 - DNA, 19 bp, Mus musculus
  siRNA target sequence for Obp1a (NM_008754.1,130-148).
ctattgctgctgatagagt

SEQ ID NO: 573127 - DNA, 19 bp, Mus musculus
  siRNA target sequence for Obp1a (NM_008754.1,139-157).
ctgatagagtagacaagat

SEQ ID NO: 573128 - DNA, 19 bp, Mus musculus
  siRNA target sequence for Obp1a (NM_008754.1,317-335).
gtttcaagggaataatcgt

SEQ ID NO: 573129 - DNA, 19 bp, Mus musculus
  siRNA target sequence for Obp1a (NM_008754.1,321-339).
caagggaataatcgttata

SEQ ID NO: 573130 - DNA, 19 bp, Mus musculus
  siRNA target sequence for Obp1a (NM_008754.1,326-344).
gaataatcgttataaactt

SEQ ID NO: 573131 - DNA, 19 bp, Mus musculus
  siRNA target sequence for Obp1a (NM_008754.1,353-371).
gtcacctgagaacttaaca

SEQ ID NO: 573132 - DNA, 19 bp, Mus musculus
  siRNA target sequence for Obp1a (NM_008754.1,431-449).
ccatggccctttaacttct

SEQ ID NO: 573133 - DNA, 19 bp, Mus musculus
  siRNA target sequence for Obp1a (NM_008754.1,437-455).
ccctttaacttctgaacaa

SEQ ID NO: 573134 - DNA, 19 bp, Mus musculus
  siRNA target sequence for Obp1a (NM_008754.1,518-536).
cctgattacagattactgt

SEQ ID NO: 573135 - DNA, 19 bp, Mus musculus
  siRNA target sequence for Olfr73 (NM_054090.1,58-76).
gattatccagaattgacaa

SEQ ID NO: 573136 - DNA, 19 bp, Mus musculus
  siRNA target sequence for Olfr73 (NM_054090.1,243-261).
gatgctggtaaatctagtt

SEQ ID NO: 573137 - DNA, 19 bp, Mus musculus
  siRNA target sequence for Olfr73 (NM_054090.1,246-264).
gctggtaaatctagttaca

SEQ ID NO: 573138 - DNA, 19 bp, Mus musculus
  siRNA target sequence for Olfr73 (NM_054090.1,250-268).
gtaaatctagttacaatga

SEQ ID NO: 573139 - DNA, 19 bp, Mus musculus
  siRNA target sequence for Olfr73 (NM_054090.1,270-288).
cagaggcatatcatttgta

SEQ ID NO: 573140 - DNA, 19 bp, Mus musculus
  siRNA target sequence for Olfr73 (NM_054090.1,289-307).
ggatgcttagtgcaattct

SEQ ID NO: 573141 - DNA, 19 bp, Mus musculus
  siRNA target sequence for Olfr73 (NM_054090.1,293-311).
gcttagtgcaattcttttt

SEQ ID NO: 573142 - DNA, 19 bp, Mus musculus
  siRNA target sequence for Olfr73 (NM_054090.1,294-312).
cttagtgcaattctttttt

SEQ ID NO: 573143 - DNA, 19 bp, Mus musculus
  siRNA target sequence for Olfr73 (NM_054090.1,317-335).
gtactttcgtggtaactga

SEQ ID NO: 573144 - DNA, 19 bp, Mus musculus
  siRNA target sequence for Olfr73 (NM_054090.1,436-454).
gtattgggatcctatgctt

SEQ ID NO: 573145 - DNA, 19 bp, Mus musculus
  siRNA target sequence for Olfr73 (NM_054090.1,463-481).
gtatgctccttgatactga

SEQ ID NO: 573146 - DNA, 19 bp, Mus musculus
  siRNA target sequence for Olfr73 (NM_054090.1,480-498).
gacctgctctgccttgaat

SEQ ID NO: 573147 - DNA, 19 bp, Mus musculus
  siRNA target sequence for Olfr73 (NM_054090.1,587-605).
gtcaactgttgcttttcgt

SEQ ID NO: 573148 - DNA, 19 bp, Mus musculus
  siRNA target sequence for Olfr73 (NM_054090.1,660-678).
gctcattgttgttactatt

SEQ ID NO: 573149 - DNA, 19 bp, Mus musculus
  siRNA target sequence for Olfr73 (NM_054090.1,733-751).
catctgacagctataacca

SEQ ID NO: 573150 - DNA, 19 bp, Mus musculus
  siRNA target sequence for Olfr74 (NM_054091.1,138-156).
gatcctcgtgatcagaatt

SEQ ID NO: 573151 - DNA, 19 bp, Mus musculus
  siRNA target sequence for Olfr74 (NM_054091.1,259-277).
gttgcaaaagacataacca

SEQ ID NO: 573152 - DNA, 19 bp, Mus musculus
  siRNA target sequence for Olfr74 (NM_054091.1,262-280).
gcaaaagacataaccattt

SEQ ID NO: 573153 - DNA, 19 bp, Mus musculus
  siRNA target sequence for Olfr74 (NM_054091.1,270-288).
cataaccatttcatttgta

SEQ ID NO: 573154 - DNA, 19 bp, Mus musculus
  siRNA target sequence for Olfr74 (NM_054091.1,474-492).
gacactgacgtgttctact

SEQ ID NO: 573155 - DNA, 19 bp, Mus musculus
  siRNA target sequence for Olfr74 (NM_054091.1,488-506).
ctactgtgcaattatcttt

SEQ ID NO: 573156 - DNA, 19 bp, Mus musculus
  siRNA target sequence for Olfr74 (NM_054091.1,578-596).
ctctcatcagtcaattact

SEQ ID NO: 573157 - DNA, 19 bp, Mus musculus
  siRNA target sequence for Olfr74 (NM_054091.1,587-605).
gtcaattactgctgtttgt

SEQ ID NO: 573158 - DNA, 19 bp, Mus musculus
  siRNA target sequence for Olfr74 (NM_054091.1,627-645).
cagcacattactccttatt

SEQ ID NO: 573159 - DNA, 19 bp, Mus musculus
  siRNA target sequence for Olfr74 (NM_054091.1,629-647).
gcacattactccttattct

SEQ ID NO: 573160 - DNA, 19 bp, Mus musculus
  siRNA target sequence for Ptgds (NM_008963.1,143-161).
cacagtgcagcccaacttt

SEQ ID NO: 573161 - DNA, 19 bp, Mus musculus
  siRNA target sequence for Ptgds (NM_008963.1,145-163).
cagtgcagcccaactttca

SEQ ID NO: 573162 - DNA, 19 bp, Mus musculus
  siRNA target sequence for Ptgds (NM_008963.1,149-167).
gcagcccaactttcaacaa

SEQ ID NO: 573163 - DNA, 19 bp, Mus musculus
  siRNA target sequence for Ptgds (NM_008963.1,439-457).
gagtacgctctgctattca

SEQ ID NO: 573164 - DNA, 19 bp, Mus musculus
  siRNA target sequence for Ptgds (NM_008963.1,598-616).
ctgccccaaccggataagt

SEQ ID NO: 573165 - DNA, 19 bp, Mus musculus
  siRNA target sequence for Ptgds (NM_008963.1,608-626).
cggataagtgcattcaaga

SEQ ID NO: 573166 - DNA, 19 bp, Mus musculus
  siRNA target sequence for Lrp10 (NM_022993.2,412-430).
cggccctccctcttctttt

SEQ ID NO: 573167 - DNA, 19 bp, Mus musculus
  siRNA target sequence for Lrp10 (NM_022993.2,519-537).
gtacaaggcactttacaga

SEQ ID NO: 573168 - DNA, 19 bp, Mus musculus
  siRNA target sequence for Lrp10 (NM_022993.2,732-750).
gggggcaatgtcaccatta

SEQ ID NO: 573169 - DNA, 19 bp, Mus musculus
  siRNA target sequence for Lrp10 (NM_022993.2,826-844).
gcctgcaagaagaattcca

SEQ ID NO: 573170 - DNA, 19 bp, Mus musculus
  siRNA target sequence for Lrp10 (NM_022993.2,878-896).
gcgctgtgatgggattgat

SEQ ID NO: 573171 - DNA, 19 bp, Mus musculus
  siRNA target sequence for Lrp10 (NM_022993.2,925-943).
gctgcagctcagatccatt

SEQ ID NO: 573172 - DNA, 19 bp, Mus musculus
  siRNA target sequence for Lrp10 (NM_022993.2,999-1017).
gacttttatggggtctttt

SEQ ID NO: 573173 - DNA, 19 bp, Mus musculus
  siRNA target sequence for Lrp10 (NM_022993.2,1117-1135).
cagccctggacttgagtta

SEQ ID NO: 573174 - DNA, 19 bp, Mus musculus
  siRNA target sequence for Lrp10 (NM_022993.2,1385-1403).
cctaggtgagcgttgctat

SEQ ID NO: 573175 - DNA, 19 bp, Mus musculus
  siRNA target sequence for Lrp10 (NM_022993.2,1386-1404).
ctaggtgagcgttgctata

SEQ ID NO: 573176 - DNA, 19 bp, Mus musculus
  siRNA target sequence for Lrp10 (NM_022993.2,1713-1731).
gccctgccccgaaaagtca

SEQ ID NO: 573177 - DNA, 19 bp, Mus musculus
  siRNA target sequence for Lrp10 (NM_022993.2,1810-1828).
ccatccgcacccaggaata

SEQ ID NO: 573178 - DNA, 19 bp, Mus musculus
  siRNA target sequence for Lrp10 (NM_022993.2,1943-1961).
cacagagaaccctaacgat

SEQ ID NO: 573179 - DNA, 19 bp, Mus musculus
  siRNA target sequence for Lrp10 (NM_022993.2,1945-1963).
cagagaaccctaacgataa

SEQ ID NO: 573180 - DNA, 19 bp, Mus musculus
  siRNA target sequence for Lrp10 (NM_022993.2,1947-1965).
gagaaccctaacgataact

SEQ ID NO: 573181 - DNA, 19 bp, Mus musculus
  siRNA target sequence for Lrp10 (NM_022993.2,1949-1967).
gaaccctaacgataactct

SEQ ID NO: 573182 - DNA, 19 bp, Mus musculus
  siRNA target sequence for Otc (NM_008769.2,106-124).
caacaatgcagctcttaga

SEQ ID NO: 573183 - DNA, 19 bp, Mus musculus
  siRNA target sequence for Otc (NM_008769.2,140-158).
gtggttcgacatttttggt

SEQ ID NO: 573184 - DNA, 19 bp, Mus musculus
  siRNA target sequence for Otc (NM_008769.2,163-181).
gaagccagtccaaagtcaa

SEQ ID NO: 573185 - DNA, 19 bp, Mus musculus
  siRNA target sequence for Otc (NM_008769.2,166-184).
gccagtccaaagtcaagta

SEQ ID NO: 573186 - DNA, 19 bp, Mus musculus
  siRNA target sequence for Otc (NM_008769.2,168-186).
cagtccaaagtcaagtaca

SEQ ID NO: 573187 - DNA, 19 bp, Mus musculus
  siRNA target sequence for Otc (NM_008769.2,233-251).
gagattcagtacatgctat

SEQ ID NO: 573188 - DNA, 19 bp, Mus musculus
  siRNA target sequence for Otc (NM_008769.2,252-270).
ggctctctgcagatctgaa

SEQ ID NO: 573189 - DNA, 19 bp, Mus musculus
  siRNA target sequence for Otc (NM_008769.2,283-301).
gcagaaaggagaatattta

SEQ ID NO: 573190 - DNA, 19 bp, Mus musculus
  siRNA target sequence for Otc (NM_008769.2,290-308).
ggagaatatttacctttat

SEQ ID NO: 573191 - DNA, 19 bp, Mus musculus
  siRNA target sequence for Otc (NM_008769.2,311-329).
caagggaaatccttaggaa

SEQ ID NO: 573192 - DNA, 19 bp, Mus musculus
  siRNA target sequence for Otc (NM_008769.2,321-339).
ccttaggaatgatttttga

SEQ ID NO: 573193 - DNA, 19 bp, Mus musculus
  siRNA target sequence for Otc (NM_008769.2,391-409).
gggaggacacccttccttt

SEQ ID NO: 573194 - DNA, 19 bp, Mus musculus
  siRNA target sequence for Otc (NM_008769.2,428-446).
cacttgggtgtgaatgaaa

SEQ ID NO: 573195 - DNA, 19 bp, Mus musculus
  siRNA target sequence for Otc (NM_008769.2,430-448).
cttgggtgtgaatgaaagt

SEQ ID NO: 573196 - DNA, 19 bp, Mus musculus
  siRNA target sequence for Otc (NM_008769.2,455-473).
gacaccgctcgtgtcttat

SEQ ID NO: 573197 - DNA, 19 bp, Mus musculus
  siRNA target sequence for Otc (NM_008769.2,457-475).
caccgctcgtgtcttatct

SEQ ID NO: 573198 - DNA, 19 bp, Mus musculus
  siRNA target sequence for Otc (NM_008769.2,491-509).
gtgttagctcgagtgtata

SEQ ID NO: 573199 - DNA, 19 bp, Mus musculus
  siRNA target sequence for Otc (NM_008769.2,493-511).
gttagctcgagtgtataaa

SEQ ID NO: 573200 - DNA, 19 bp, Mus musculus
  siRNA target sequence for Otc (NM_008769.2,497-515).
gctcgagtgtataaacaat

SEQ ID NO: 573201 - DNA, 19 bp, Mus musculus
  siRNA target sequence for Otc (NM_008769.2,542-560).
gcatccatcccaattgtca

SEQ ID NO: 573202 - DNA, 19 bp, Mus musculus
  siRNA target sequence for Otc (NM_008769.2,543-561).
catccatcccaattgtcaa

SEQ ID NO: 573203 - DNA, 19 bp, Mus musculus
  siRNA target sequence for Otc (NM_008769.2,662-680).
ggggatgggaacaatatct

SEQ ID NO: 573204 - DNA, 19 bp, Mus musculus
  siRNA target sequence for Otc (NM_008769.2,663-681).
gggatgggaacaatatctt

SEQ ID NO: 573205 - DNA, 19 bp, Mus musculus
  siRNA target sequence for Otc (NM_008769.2,691-709).
catgatgagtgctgcaaaa

SEQ ID NO: 573206 - DNA, 19 bp, Mus musculus
  siRNA target sequence for Otc (NM_008769.2,732-750).
ctactccaaagggttatga

SEQ ID NO: 573207 - DNA, 19 bp, Mus musculus
  siRNA target sequence for Otc (NM_008769.2,744-762).
gttatgagccagatcctaa

SEQ ID NO: 573208 - DNA, 19 bp, Mus musculus
  siRNA target sequence for Otc (NM_008769.2,752-770).
ccagatcctaatatagtca

SEQ ID NO: 573209 - DNA, 19 bp, Mus musculus
  siRNA target sequence for Otc (NM_008769.2,753-771).
cagatcctaatatagtcaa

SEQ ID NO: 573210 - DNA, 19 bp, Mus musculus
  siRNA target sequence for Otc (NM_008769.2,804-822).
ccaagttgtcaatgacaaa

SEQ ID NO: 573211 - DNA, 19 bp, Mus musculus
  siRNA target sequence for Otc (NM_008769.2,805-823).
caagttgtcaatgacaaat

SEQ ID NO: 573212 - DNA, 19 bp, Mus musculus
  siRNA target sequence for Otc (NM_008769.2,808-826).
gttgtcaatgacaaatgat

SEQ ID NO: 573213 - DNA, 19 bp, Mus musculus
  siRNA target sequence for Otc (NM_008769.2,840-858).
cacgtggaggcaatgtatt

SEQ ID NO: 573214 - DNA, 19 bp, Mus musculus
  siRNA target sequence for Otc (NM_008769.2,842-860).
cgtggaggcaatgtattaa

SEQ ID NO: 573215 - DNA, 19 bp, Mus musculus
  siRNA target sequence for Otc (NM_008769.2,843-861).
gtggaggcaatgtattaat

SEQ ID NO: 573216 - DNA, 19 bp, Mus musculus
  siRNA target sequence for Otc (NM_008769.2,845-863).
ggaggcaatgtattaatta

SEQ ID NO: 573217 - DNA, 19 bp, Mus musculus
  siRNA target sequence for Otc (NM_008769.2,864-882).
cagatacttggataagcat

SEQ ID NO: 573218 - DNA, 19 bp, Mus musculus
  siRNA target sequence for Otc (NM_008769.2,1007-1025).
gaagtggatgatgaagtat

SEQ ID NO: 573219 - DNA, 19 bp, Mus musculus
  siRNA target sequence for Otc (NM_008769.2,1032-1050).
ctccacggtcattagtgtt

SEQ ID NO: 573220 - DNA, 19 bp, Mus musculus
  siRNA target sequence for Plunc (NM_011126.1,252-270).
caaatcccacagatcttct

SEQ ID NO: 573221 - DNA, 19 bp, Mus musculus
  siRNA target sequence for Plunc (NM_011126.1,266-284).
cttcttgctggaaaattca

SEQ ID NO: 573222 - DNA, 19 bp, Mus musculus
  siRNA target sequence for Plunc (NM_011126.1,345-363).
cactcctggatgttataaa

SEQ ID NO: 573223 - DNA, 19 bp, Mus musculus
  siRNA target sequence for Plunc (NM_011126.1,445-463).
cctcgacataaaaatcact

SEQ ID NO: 573224 - DNA, 19 bp, Mus musculus
  siRNA target sequence for Plunc (NM_011126.1,506-524).
ggccatcgtctctatgtca

SEQ ID NO: 573225 - DNA, 19 bp, Mus musculus
  siRNA target sequence for Plunc (NM_011126.1,538-556).
cttgacactcaacgtaaat

SEQ ID NO: 573226 - DNA, 19 bp, Mus musculus
  siRNA target sequence for Plunc (NM_011126.1,559-577).
gcccgtagttggaagtctt

SEQ ID NO: 573227 - DNA, 19 bp, Mus musculus
  siRNA target sequence for Plunc (NM_011126.1,560-578).
cccgtagttggaagtcttt

SEQ ID NO: 573228 - DNA, 19 bp, Mus musculus
  siRNA target sequence for Plunc (NM_011126.1,566-584).
gttggaagtcttttgcaat

SEQ ID NO: 573229 - DNA, 19 bp, Mus musculus
  siRNA target sequence for Plunc (NM_011126.1,614-632).
gtcttagccgtgaaagaca

SEQ ID NO: 573230 - DNA, 19 bp, Mus musculus
  siRNA target sequence for Plunc (NM_011126.1,616-634).
cttagccgtgaaagacaat

SEQ ID NO: 573231 - DNA, 19 bp, Mus musculus
  siRNA target sequence for Plunc (NM_011126.1,742-760).
cacagggatattgactaaa

SEQ ID NO: 573232 - DNA, 19 bp, Mus musculus
  siRNA target sequence for Plunc (NM_011126.1,859-877).
gatccatggactacagttt

SEQ ID NO: 573233 - DNA, 19 bp, Mus musculus
  siRNA target sequence for Tlr4 (NM_021297.1,81-99).
gacaccaggaagcttgaat

SEQ ID NO: 573234 - DNA, 19 bp, Mus musculus
  siRNA target sequence for Tlr4 (NM_021297.1,104-122).
gcatagaggtagttcctaa

SEQ ID NO: 573235 - DNA, 19 bp, Mus musculus
  siRNA target sequence for Tlr4 (NM_021297.1,105-123).
catagaggtagttcctaat

SEQ ID NO: 573236 - DNA, 19 bp, Mus musculus
  siRNA target sequence for Tlr4 (NM_021297.1,109-127).
gaggtagttcctaatatta

SEQ ID NO: 573237 - DNA, 19 bp, Mus musculus
  siRNA target sequence for Tlr4 (NM_021297.1,118-136).
cctaatattacctaccaat

SEQ ID NO: 573238 - DNA, 19 bp, Mus musculus
  siRNA target sequence for Tlr4 (NM_021297.1,132-150).
ccaatgcatggatcagaaa

SEQ ID NO: 573239 - DNA, 19 bp, Mus musculus
  siRNA target sequence for Tlr4 (NM_021297.1,160-178).
gtccctgatgacattcctt

SEQ ID NO: 573240 - DNA, 19 bp, Mus musculus
  siRNA target sequence for Tlr4 (NM_021297.1,175-193).
ccttcttcaaccaagaaca

SEQ ID NO: 573241 - DNA, 19 bp, Mus musculus
  siRNA target sequence for Tlr4 (NM_021297.1,176-194).
cttcttcaaccaagaacat

SEQ ID NO: 573242 - DNA, 19 bp, Mus musculus
  siRNA target sequence for Tlr4 (NM_021297.1,203-221).
gcttcaaccccttgaagat

SEQ ID NO: 573243 - DNA, 19 bp, Mus musculus
  siRNA target sequence for Tlr4 (NM_021297.1,216-234).
gaagatcttaaaaagctat

SEQ ID NO: 573244 - DNA, 19 bp, Mus musculus
  siRNA target sequence for Tlr4 (NM_021297.1,230-248).
gctatagcttctccaattt

SEQ ID NO: 573245 - DNA, 19 bp, Mus musculus
  siRNA target sequence for Tlr4 (NM_021297.1,231-249).
ctatagcttctccaatttt

SEQ ID NO: 573246 - DNA, 19 bp, Mus musculus
  siRNA target sequence for Tlr4 (NM_021297.1,242-260).
ccaatttttcagaacttca

SEQ ID NO: 573247 - DNA, 19 bp, Mus musculus
  siRNA target sequence for Tlr4 (NM_021297.1,279-297).
gtgtgaaattgaaacaatt

SEQ ID NO: 573248 - DNA, 19 bp, Mus musculus
  siRNA target sequence for Tlr4 (NM_021297.1,386-404).
ctggactaacaagtttaga

SEQ ID NO: 573249 - DNA, 19 bp, Mus musculus
  siRNA target sequence for Tlr4 (NM_021297.1,388-406).
ggactaacaagtttagaga

SEQ ID NO: 573250 - DNA, 19 bp, Mus musculus
  siRNA target sequence for Tlr4 (NM_021297.1,389-407).
gactaacaagtttagagaa

SEQ ID NO: 573251 - DNA, 19 bp, Mus musculus
  siRNA target sequence for Tlr4 (NM_021297.1,450-468).
ccctattggacagcttata

SEQ ID NO: 573252 - DNA, 19 bp, Mus musculus
  siRNA target sequence for Tlr4 (NM_021297.1,458-476).
gacagcttataaccttaaa

SEQ ID NO: 573253 - DNA, 19 bp, Mus musculus
  siRNA target sequence for Tlr4 (NM_021297.1,460-478).
cagcttataaccttaaaga

SEQ ID NO: 573254 - DNA, 19 bp, Mus musculus
  siRNA target sequence for Tlr4 (NM_021297.1,489-507).
ggctcacaattttatacat

SEQ ID NO: 573255 - DNA, 19 bp, Mus musculus
  siRNA target sequence for Tlr4 (NM_021297.1,490-508).
gctcacaattttatacatt

SEQ ID NO: 573256 - DNA, 19 bp, Mus musculus
  siRNA target sequence for Tlr4 (NM_021297.1,556-574).
gtggatctttcttataact

SEQ ID NO: 573257 - DNA, 19 bp, Mus musculus
  siRNA target sequence for Tlr4 (NM_021297.1,558-576).
ggatctttcttataactat

SEQ ID NO: 573258 - DNA, 19 bp, Mus musculus
  siRNA target sequence for Tlr4 (NM_021297.1,590-608).
ctgtcaacgacttacagtt

SEQ ID NO: 573259 - DNA, 19 bp, Mus musculus
  siRNA target sequence for Tlr4 (NM_021297.1,606-624).
gtttctacgtgaaaatcca

SEQ ID NO: 573260 - DNA, 19 bp, Mus musculus
  siRNA target sequence for Tlr4 (NM_021297.1,628-646).
gtcaatctctctttagaca

SEQ ID NO: 573261 - DNA, 19 bp, Mus musculus
  siRNA target sequence for Tlr4 (NM_021297.1,778-796).
cacgtccatcggttgatct

SEQ ID NO: 573262 - DNA, 19 bp, Mus musculus
  siRNA target sequence for Tlr4 (NM_021297.1,788-806).
ggttgatcttgggagaatt

SEQ ID NO: 573263 - DNA, 19 bp, Mus musculus
  siRNA target sequence for Tlr4 (NM_021297.1,874-892).
gatgagttcaggttaacat

SEQ ID NO: 573264 - DNA, 19 bp, Mus musculus
  siRNA target sequence for Tlr4 (NM_021297.1,877-895).
gagttcaggttaacatata

SEQ ID NO: 573265 - DNA, 19 bp, Mus musculus
  siRNA target sequence for Tlr4 (NM_021297.1,913-931).
gatattgttaagttccatt

SEQ ID NO: 573266 - DNA, 19 bp, Mus musculus
  siRNA target sequence for Tlr4 (NM_021297.1,927-945).
ccattgcttggcgaatgtt

SEQ ID NO: 573267 - DNA, 19 bp, Mus musculus
  siRNA target sequence for Tlr4 (NM_021297.1,928-946).
cattgcttggcgaatgttt

SEQ ID NO: 573268 - DNA, 19 bp, Mus musculus
  siRNA target sequence for Tlr4 (NM_021297.1,958-976).
ctggcaggtgtatctataa

SEQ ID NO: 573269 - DNA, 19 bp, Mus musculus
  siRNA target sequence for Tlr4 (NM_021297.1,985-1003).
gaagatgttcctaaacatt

SEQ ID NO: 573270 - DNA, 19 bp, Mus musculus
  siRNA target sequence for Tlr4 (NM_021297.1,1017-1035).
cttatcaatcattagatgt

SEQ ID NO: 573271 - DNA, 19 bp, Mus musculus
  siRNA target sequence for Tlr4 (NM_021297.1,1036-1054).
caacttaagcagtttccaa

SEQ ID NO: 573272 - DNA, 19 bp, Mus musculus
  siRNA target sequence for Tlr4 (NM_021297.1,1057-1075).
ctggatctaccctttctta

SEQ ID NO: 573273 - DNA, 19 bp, Mus musculus
  siRNA target sequence for Tlr4 (NM_021297.1,1066-1084).
ccctttcttaaaagtttga

SEQ ID NO: 573274 - DNA, 19 bp, Mus musculus
  siRNA target sequence for Tlr4 (NM_021297.1,1095-1113).
gaacaaagggtctatcagt

SEQ ID NO: 573275 - DNA, 19 bp, Mus musculus
  siRNA target sequence for Tlr4 (NM_021297.1,1098-1116).
caaagggtctatcagtttt

SEQ ID NO: 573276 - DNA, 19 bp, Mus musculus
  siRNA target sequence for Tlr4 (NM_021297.1,1102-1120).
gggtctatcagttttaaaa

SEQ ID NO: 573277 - DNA, 19 bp, Mus musculus
  siRNA target sequence for Tlr4 (NM_021297.1,1103-1121).
ggtctatcagttttaaaaa

SEQ ID NO: 573278 - DNA, 19 bp, Mus musculus
  siRNA target sequence for Tlr4 (NM_021297.1,1138-1156).
ctcagctatctagatctta

SEQ ID NO: 573279 - DNA, 19 bp, Mus musculus
  siRNA target sequence for Tlr4 (NM_021297.1,1143-1161).
ctatctagatcttagtaga

SEQ ID NO: 573280 - DNA, 19 bp, Mus musculus
  siRNA target sequence for Tlr4 (NM_021297.1,1330-1348).
gaattctcagcgttcttat

SEQ ID NO: 573281 - DNA, 19 bp, Mus musculus
  siRNA target sequence for Tlr4 (NM_021297.1,1339-1357).
gcgttcttatcccttgaaa

SEQ ID NO: 573282 - DNA, 19 bp, Mus musculus
  siRNA target sequence for Tlr4 (NM_021297.1,1368-1386).
ccttgacatctcttatact

SEQ ID NO: 573283 - DNA, 19 bp, Mus musculus
  siRNA target sequence for Tlr4 (NM_021297.1,1369-1387).
cttgacatctcttatacta

SEQ ID NO: 573284 - DNA, 19 bp, Mus musculus
  siRNA target sequence for Tlr4 (NM_021297.1,1379-1397).
cttatactaacaccaaaat

SEQ ID NO: 573285 - DNA, 19 bp, Mus musculus
  siRNA target sequence for Tlr4 (NM_021297.1,1401-1419).
cttcgatggtatatttctt

SEQ ID NO: 573286 - DNA, 19 bp, Mus musculus
  siRNA target sequence for Tlr4 (NM_021297.1,1430-1448).
gtctcaacacattaaaaat

SEQ ID NO: 573287 - DNA, 19 bp, Mus musculus
  siRNA target sequence for Tlr4 (NM_021297.1,1486-1504).
gtctttgcaaacacaacaa

SEQ ID NO: 573288 - DNA, 19 bp, Mus musculus
  siRNA target sequence for Tlr4 (NM_021297.1,1509-1527).
gacattcctggatctttct

SEQ ID NO: 573289 - DNA, 19 bp, Mus musculus
  siRNA target sequence for Tlr4 (NM_021297.1,1515-1533).
cctggatctttctaaatgt

SEQ ID NO: 573290 - DNA, 19 bp, Mus musculus
  siRNA target sequence for Tlr4 (NM_021297.1,1534-1552).
caattggaacaaatatctt

SEQ ID NO: 573291 - DNA, 19 bp, Mus musculus
  siRNA target sequence for Tlr4 (NM_021297.1,1566-1584).
caccctccatagacttcaa

SEQ ID NO: 573292 - DNA, 19 bp, Mus musculus
  siRNA target sequence for Tlr4 (NM_021297.1,1568-1586).
ccctccatagacttcaatt

SEQ ID NO: 573293 - DNA, 19 bp, Mus musculus
  siRNA target sequence for Tlr4 (NM_021297.1,1569-1587).
cctccatagacttcaatta

SEQ ID NO: 573294 - DNA, 19 bp, Mus musculus
  siRNA target sequence for Tlr4 (NM_021297.1,1598-1616).
gtcacaacaatctattgtt

SEQ ID NO: 573295 - DNA, 19 bp, Mus musculus
  siRNA target sequence for Tlr4 (NM_021297.1,1600-1618).
cacaacaatctattgtttt

SEQ ID NO: 573296 - DNA, 19 bp, Mus musculus
  siRNA target sequence for Tlr4 (NM_021297.1,1605-1623).
caatctattgtttttggat

SEQ ID NO: 573297 - DNA, 19 bp, Mus musculus
  siRNA target sequence for Tlr4 (NM_021297.1,1630-1648).
cattataaccagctgtatt

SEQ ID NO: 573298 - DNA, 19 bp, Mus musculus
  siRNA target sequence for Tlr4 (NM_021297.1,1658-1676).
ctcttgattgcagtttcaa

SEQ ID NO: 573299 - DNA, 19 bp, Mus musculus
  siRNA target sequence for Tlr4 (NM_021297.1,1680-1698).
catagagacatctaaagga

SEQ ID NO: 573300 - DNA, 19 bp, Mus musculus
  siRNA target sequence for Tlr4 (NM_021297.1,1719-1737).
gagtctagccttcttcaat

SEQ ID NO: 573301 - DNA, 19 bp, Mus musculus
  siRNA target sequence for Tlr4 (NM_021297.1,1721-1739).
gtctagccttcttcaatct

SEQ ID NO: 573302 - DNA, 19 bp, Mus musculus
  siRNA target sequence for Tlr4 (NM_021297.1,1727-1745).
ccttcttcaatcttactaa

SEQ ID NO: 573303 - DNA, 19 bp, Mus musculus
  siRNA target sequence for Tlr4 (NM_021297.1,1734-1752).
caatcttactaacaattct

SEQ ID NO: 573304 - DNA, 19 bp, Mus musculus
  siRNA target sequence for Tlr4 (NM_021297.1,1757-1775).
cttgtatatgtgaacatca

SEQ ID NO: 573305 - DNA, 19 bp, Mus musculus
  siRNA target sequence for Tlr4 (NM_021297.1,1812-1830).
cttggtgaatgttgaacaa

SEQ ID NO: 573306 - DNA, 19 bp, Mus musculus
  siRNA target sequence for Tlr4 (NM_021297.1,1838-1856).
gtgcaacacctgtagagat

SEQ ID NO: 573307 - DNA, 19 bp, Mus musculus
  siRNA target sequence for Tlr4 (NM_021297.1,1841-1859).
caacacctgtagagatgaa

SEQ ID NO: 573308 - DNA, 19 bp, Mus musculus
  siRNA target sequence for Tlr4 (NM_021297.1,1865-1883).
ccttagtgttggattttaa

SEQ ID NO: 573309 - DNA, 19 bp, Mus musculus
  siRNA target sequence for Tlr4 (NM_021297.1,1866-1884).
cttagtgttggattttaat

SEQ ID NO: 573310 - DNA, 19 bp, Mus musculus
  siRNA target sequence for Tlr4 (NM_021297.1,1895-1913).
gttatatgtacaagacaat

SEQ ID NO: 573311 - DNA, 19 bp, Mus musculus
  siRNA target sequence for Tlr4 (NM_021297.1,1999-2017).
gctggctgtaaaaagtaca

SEQ ID NO: 573312 - DNA, 19 bp, Mus musculus
  siRNA target sequence for Tlr4 (NM_021297.1,2030-2048).
gcatctatgatgcatttgt

SEQ ID NO: 573313 - DNA, 19 bp, Mus musculus
  siRNA target sequence for Tlr4 (NM_021297.1,2049-2067).
gatctactcgagtcagaat

SEQ ID NO: 573314 - DNA, 19 bp, Mus musculus
  siRNA target sequence for Tlr4 (NM_021297.1,2081-2099).
gaaatgagctggtaaagaa

SEQ ID NO: 573315 - DNA, 19 bp, Mus musculus
  siRNA target sequence for Tlr4 (NM_021297.1,2088-2106).
gctggtaaagaatttagaa

SEQ ID NO: 573316 - DNA, 19 bp, Mus musculus
  siRNA target sequence for Tlr4 (NM_021297.1,2199-2217).
caagagccggaaggttatt

SEQ ID NO: 573317 - DNA, 19 bp, Mus musculus
  siRNA target sequence for Tlr4 (NM_021297.1,2221-2239).
gtagtgtctagacacttta

SEQ ID NO: 573318 - DNA, 19 bp, Mus musculus
  siRNA target sequence for Tlr4 (NM_021297.1,2242-2260).
cagagccgttggtgtatct

SEQ ID NO: 573319 - DNA, 19 bp, Mus musculus
  siRNA target sequence for Tlr4 (NM_021297.1,2244-2262).
gagccgttggtgtatcttt

SEQ ID NO: 573320 - DNA, 19 bp, Mus musculus
  siRNA target sequence for Tlr4 (NM_021297.1,2246-2264).
gccgttggtgtatctttga

SEQ ID NO: 573321 - DNA, 19 bp, Mus musculus
  siRNA target sequence for Tlr4 (NM_021297.1,2247-2265).
ccgttggtgtatctttgaa

SEQ ID NO: 573322 - DNA, 19 bp, Mus musculus
  siRNA target sequence for Tlr4 (NM_021297.1,2248-2266).
cgttggtgtatctttgaat

SEQ ID NO: 573323 - DNA, 19 bp, Mus musculus
  siRNA target sequence for Tlr4 (NM_021297.1,2249-2267).
gttggtgtatctttgaata

SEQ ID NO: 573324 - DNA, 19 bp, Mus musculus
  siRNA target sequence for Tlr4 (NM_021297.1,2365-2383).
gaattgtatcgccttctta

SEQ ID NO: 573325 - DNA, 19 bp, Mus musculus
  siRNA target sequence for Tlr4 (NM_021297.1,2374-2392).
cgccttcttagcagaaaca

SEQ ID NO: 573326 - DNA, 19 bp, Mus musculus
  siRNA target sequence for Hebp1 (NM_013546.1,162-180).
ctgtgaagggggcaagttt

SEQ ID NO: 573327 - DNA, 19 bp, Mus musculus
  siRNA target sequence for Hebp1 (NM_013546.1,253-271).
gtgggtggcaccaatgaca

SEQ ID NO: 573328 - DNA, 19 bp, Mus musculus
  siRNA target sequence for Hebp1 (NM_013546.1,255-273).
gggtggcaccaatgacaaa

SEQ ID NO: 573329 - DNA, 19 bp, Mus musculus
  siRNA target sequence for Hebp1 (NM_013546.1,363-381).
ccggattccgaaccaattt

SEQ ID NO: 573330 - DNA, 19 bp, Mus musculus
  siRNA target sequence for Hebp1 (NM_013546.1,365-383).
ggattccgaaccaatttca

SEQ ID NO: 573331 - DNA, 19 bp, Mus musculus
  siRNA target sequence for Hebp1 (NM_013546.1,366-384).
gattccgaaccaatttcaa

SEQ ID NO: 573332 - DNA, 19 bp, Mus musculus
  siRNA target sequence for Hebp1 (NM_013546.1,447-465).
ctattccacgcaatttgga

SEQ ID NO: 573333 - DNA, 19 bp, Mus musculus
  siRNA target sequence for Hebp1 (NM_013546.1,539-557).
cctaccagggtgatgtcta

SEQ ID NO: 573334 - DNA, 19 bp, Mus musculus
  siRNA target sequence for Eraf (NM_133245.1,110-128).
gataaaggagtttaatgtt

SEQ ID NO: 573335 - DNA, 19 bp, Mus musculus
  siRNA target sequence for Eraf (NM_133245.1,192-210).
catgactgggtgaacttgt

SEQ ID NO: 573336 - DNA, 19 bp, Mus musculus
  siRNA target sequence for Eraf (NM_133245.1,258-276).
gacagggccatgacagaat

SEQ ID NO: 573337 - DNA, 19 bp, Mus musculus
  siRNA target sequence for Eraf (NM_133245.1,304-322).
gccagtttctagccaaata

SEQ ID NO: 573338 - DNA, 19 bp, Mus musculus
  siRNA target sequence for Eraf (NM_133245.1,306-324).
cagtttctagccaaataca

SEQ ID NO: 573339 - DNA, 19 bp, Mus musculus
  siRNA target sequence for Fkbp6 (NM_033571.1,62-80).
cctatgagcgactaagtca

SEQ ID NO: 573340 - DNA, 19 bp, Mus musculus
  siRNA target sequence for Fkbp6 (NM_033571.1,63-81).
ctatgagcgactaagtcaa

SEQ ID NO: 573341 - DNA, 19 bp, Mus musculus
  siRNA target sequence for Fkbp6 (NM_033571.1,163-181).
gcttctgtgctggtgaaat

SEQ ID NO: 573342 - DNA, 19 bp, Mus musculus
  siRNA target sequence for Fkbp6 (NM_033571.1,201-219).
catggacaagcctttcgat

SEQ ID NO: 573343 - DNA, 19 bp, Mus musculus
  siRNA target sequence for Fkbp6 (NM_033571.1,205-223).
gacaagcctttcgattcta

SEQ ID NO: 573344 - DNA, 19 bp, Mus musculus
  siRNA target sequence for Fkbp6 (NM_033571.1,211-229).
cctttcgattctaattgct

SEQ ID NO: 573345 - DNA, 19 bp, Mus musculus
  siRNA target sequence for Fkbp6 (NM_033571.1,392-410).
ccaccgtcctgtttgagat

SEQ ID NO: 573346 - DNA, 19 bp, Mus musculus
  siRNA target sequence for Fkbp6 (NM_033571.1,563-581).
gtgatgccaaagtgagata

SEQ ID NO: 573347 - DNA, 19 bp, Mus musculus
  siRNA target sequence for Fkbp6 (NM_033571.1,789-807).
cctcctcctaactgagtat

SEQ ID NO: 573348 - DNA, 19 bp, Mus musculus
  siRNA target sequence for Fkbp6 (NM_033571.1,851-869).
cctgcaaccatgacatcaa

SEQ ID NO: 573349 - DNA, 19 bp, Mus musculus
  siRNA target sequence for Fkbp6 (NM_033571.1,852-870).
ctgcaaccatgacatcaat

SEQ ID NO: 573350 - DNA, 19 bp, Mus musculus
  siRNA target sequence for Fkbp6 (NM_033571.1,854-872).
gcaaccatgacatcaataa

SEQ ID NO: 573351 - DNA, 19 bp, Mus musculus
  siRNA target sequence for Fkbp6 (NM_033571.1,927-945).
gatgtgtcaccgcatgttt

SEQ ID NO: 573352 - DNA, 19 bp, Mus musculus
  siRNA target sequence for 1200007B05Rik (NM_026165.2,763-781).
cagtacagagtgagataat

SEQ ID NO: 573353 - DNA, 19 bp, Mus musculus
  siRNA target sequence for 1200007B05Rik (NM_026165.2,772-790).
gtgagataatccgagataa

SEQ ID NO: 573354 - DNA, 19 bp, Mus musculus
  siRNA target sequence for 1200007B05Rik (NM_026165.2,774-792).
gagataatccgagataaca

SEQ ID NO: 573355 - DNA, 19 bp, Mus musculus
  siRNA target sequence for 1200007B05Rik (NM_026165.2,776-794).
gataatccgagataacact

SEQ ID NO: 573356 - DNA, 19 bp, Mus musculus
  siRNA target sequence for 1200007B05Rik (NM_026165.2,795-813).
ggcattctggaatgtgtta

SEQ ID NO: 573357 - DNA, 19 bp, Mus musculus
  siRNA target sequence for 1200007B05Rik (NM_026165.2,796-814).
gcattctggaatgtgttaa

SEQ ID NO: 573358 - DNA, 19 bp, Mus musculus
  siRNA target sequence for 1200007B05Rik (NM_026165.2,903-921).
catggagttcttcattaca

SEQ ID NO: 573359 - DNA, 19 bp, Mus musculus
  siRNA target sequence for 1200007B05Rik (NM_026165.2,960-978).
ctgaagagaaagacctata

SEQ ID NO: 573360 - DNA, 19 bp, Mus musculus
  siRNA target sequence for 1200007B05Rik (NM_026165.2,1000-1018).
ctagccccatgcagaatat

SEQ ID NO: 573361 - DNA, 19 bp, Mus musculus
  siRNA target sequence for 1200007B05Rik (NM_026165.2,1003-1021).
gccccatgcagaatatgtt

SEQ ID NO: 573362 - DNA, 19 bp, Mus musculus
  siRNA target sequence for 1200007B05Rik (NM_026165.2,1063-1081).
gcctttgttctgacgttat

SEQ ID NO: 573363 - DNA, 19 bp, Mus musculus
  siRNA target sequence for 1200007B05Rik (NM_026165.2,1064-1082).
cctttgttctgacgttata

SEQ ID NO: 573364 - DNA, 19 bp, Mus musculus
  siRNA target sequence for 1200007B05Rik (NM_026165.2,1069-1087).
gttctgacgttatacttta

SEQ ID NO: 573365 - DNA, 19 bp, Mus musculus
  siRNA target sequence for 1200007B05Rik (NM_026165.2,1101-1119).
gttctgcatcgtcttcata

SEQ ID NO: 573366 - DNA, 19 bp, Mus musculus
  siRNA target sequence for 1200007B05Rik (NM_026165.2,1106-1124).
gcatcgtcttcatattcaa

SEQ ID NO: 573367 - DNA, 19 bp, Mus musculus
  siRNA target sequence for 1200007B05Rik (NM_026165.2,1122-1140).
caaggaacacgcacaatta

SEQ ID NO: 573368 - DNA, 19 bp, Mus musculus
  siRNA target sequence for 1200007B05Rik (NM_026165.2,1126-1144).
gaacacgcacaattattga

SEQ ID NO: 573369 - DNA, 19 bp, Mus musculus
  siRNA target sequence for 1200007B05Rik (NM_026165.2,1129-1147).
cacgcacaattattgacaa

SEQ ID NO: 573370 - DNA, 19 bp, Mus musculus
  siRNA target sequence for 1200007B05Rik (NM_026165.2,1164-1182).
gaagtacttccaattaata

SEQ ID NO: 573371 - DNA, 19 bp, Mus musculus
  siRNA target sequence for 1200007B05Rik (NM_026165.2,1174-1192).
caattaatacgcagtatga

SEQ ID NO: 573372 - DNA, 19 bp, Mus musculus
  siRNA target sequence for 1200007B05Rik (NM_026165.2,1184-1202).
gcagtatgagggaatgaga

SEQ ID NO: 573373 - DNA, 19 bp, Mus musculus
  siRNA target sequence for 1200007B05Rik (NM_026165.2,1201-1219).
gagactgtataaataccat

SEQ ID NO: 573374 - DNA, 19 bp, Mus musculus
  siRNA target sequence for 1200007B05Rik (NM_026165.2,1203-1221).
gactgtataaataccataa

SEQ ID NO: 573375 - DNA, 19 bp, Mus musculus
  siRNA target sequence for 1200007B05Rik (NM_026165.2,1207-1225).
gtataaataccataaagca

SEQ ID NO: 573376 - DNA, 19 bp, Mus musculus
  siRNA target sequence for 1200007B05Rik (NM_026165.2,1255-1273).
ggtttggtgctgttataat

SEQ ID NO: 573377 - DNA, 19 bp, Mus musculus
  siRNA target sequence for 1200007B05Rik (NM_026165.2,1256-1274).
gtttggtgctgttataata

SEQ ID NO: 573378 - DNA, 19 bp, Mus musculus
  siRNA target sequence for 1200007B05Rik (NM_026165.2,1327-1345).
cacttcttcagaatagcat

SEQ ID NO: 573379 - DNA, 19 bp, Mus musculus
  siRNA target sequence for 1200013F24Rik (NM_025822.2,963-981).
ctatcaagtaccaagatga

SEQ ID NO: 573380 - DNA, 19 bp, Mus musculus
  siRNA target sequence for 1200013F24Rik (NM_025822.2,989-1007).
ctagctcatccaaatctat

SEQ ID NO: 573381 - DNA, 19 bp, Mus musculus
  siRNA target sequence for 1200013F24Rik (NM_025822.2,993-1011).
ctcatccaaatctatttat

SEQ ID NO: 573382 - DNA, 19 bp, Mus musculus
  siRNA target sequence for 1200013F24Rik (NM_025822.2,998-1016).
ccaaatctatttattgaaa

SEQ ID NO: 573383 - DNA, 19 bp, Mus musculus
  siRNA target sequence for 1200013F24Rik (NM_025822.2,1019-1037).
gccgaggctgaagaaaagt

SEQ ID NO: 573384 - DNA, 19 bp, Mus musculus
  siRNA target sequence for 1300006L01Rik (NM_026646.1,290-308).
catcgacctggctaagaca

SEQ ID NO: 573385 - DNA, 19 bp, Mus musculus
  siRNA target sequence for 1300006L01Rik (NM_026646.1,326-344).
gaatggccagcgcatgtat

SEQ ID NO: 573386 - DNA, 19 bp, Mus musculus
  siRNA target sequence for 1300006L01Rik (NM_026646.1,386-404).
gggctacttcggcatgtat

SEQ ID NO: 573387 - DNA, 19 bp, Mus musculus
  siRNA target sequence for 1300006L01Rik (NM_026646.1,387-405).
ggctacttcggcatgtata

SEQ ID NO: 573388 - DNA, 19 bp, Mus musculus
  siRNA target sequence for 1300006L01Rik (NM_026646.1,459-477).
gcagctaatgacttcttca

SEQ ID NO: 573389 - DNA, 19 bp, Mus musculus
  siRNA target sequence for 1300006L01Rik (NM_026646.1,866-884).
ggagaagtcgcctttctat

SEQ ID NO: 573390 - DNA, 19 bp, Mus musculus
  siRNA target sequence for 1300006L01Rik (NM_026646.1,929-947).
ggccgtcaacccttgtgat

SEQ ID NO: 573391 - DNA, 19 bp, Mus musculus
  siRNA target sequence for 1300006L01Rik (NM_026646.1,1109-1127).
cgcccaggtggtctacttt

SEQ ID NO: 573392 - DNA, 19 bp, Mus musculus
  siRNA target sequence for 1700034J06Rik (NM_178386.2,217-235).
gcgtcctccaagcagataa

SEQ ID NO: 573393 - DNA, 19 bp, Mus musculus
  siRNA target sequence for 1700034J06Rik (NM_178386.2,286-304).
cgtgagcaaggatttttaa

SEQ ID NO: 573394 - DNA, 19 bp, Mus musculus
  siRNA target sequence for 1700034J06Rik (NM_178386.2,291-309).
gcaaggatttttaagttat

SEQ ID NO: 573395 - DNA, 19 bp, Mus musculus
  siRNA target sequence for 1700034J06Rik (NM_178386.2,305-323).
gttattggcgtggcaattt

SEQ ID NO: 573396 - DNA, 19 bp, Mus musculus
  siRNA target sequence for 1700034J06Rik (NM_178386.2,314-332).
gtggcaatttggcaaatgt

SEQ ID NO: 573397 - DNA, 19 bp, Mus musculus
  siRNA target sequence for 1700034J06Rik (NM_178386.2,316-334).
ggcaatttggcaaatgtta

SEQ ID NO: 573398 - DNA, 19 bp, Mus musculus
  siRNA target sequence for 1700034J06Rik (NM_178386.2,331-349).
gttattcgatactttccaa

SEQ ID NO: 573399 - DNA, 19 bp, Mus musculus
  siRNA target sequence for 1700034J06Rik (NM_178386.2,346-364).
ccaacacaagccttaaact

SEQ ID NO: 573400 - DNA, 19 bp, Mus musculus
  siRNA target sequence for 1700034J06Rik (NM_178386.2,347-365).
caacacaagccttaaactt

SEQ ID NO: 573401 - DNA, 19 bp, Mus musculus
  siRNA target sequence for 1700034J06Rik (NM_178386.2,367-385).
gcttttaaggacaaataca

SEQ ID NO: 573402 - DNA, 19 bp, Mus musculus
  siRNA target sequence for 1700034J06Rik (NM_178386.2,375-393).
ggacaaatacaaagaactt

SEQ ID NO: 573403 - DNA, 19 bp, Mus musculus
  siRNA target sequence for 1700034J06Rik (NM_178386.2,396-414).
catgtctggtgttaataaa

SEQ ID NO: 573404 - DNA, 19 bp, Mus musculus
  siRNA target sequence for 1700034J06Rik (NM_178386.2,476-494).
catccttgtgtgtagtata

SEQ ID NO: 573405 - DNA, 19 bp, Mus musculus
  siRNA target sequence for 1700034J06Rik (NM_178386.2,487-505).
gtagtatacccactagatt

SEQ ID NO: 573406 - DNA, 19 bp, Mus musculus
  siRNA target sequence for 1700034J06Rik (NM_178386.2,515-533).
cccgattaggtgttgatat

SEQ ID NO: 573407 - DNA, 19 bp, Mus musculus
  siRNA target sequence for 1700034J06Rik (NM_178386.2,516-534).
ccgattaggtgttgatatt

SEQ ID NO: 573408 - DNA, 19 bp, Mus musculus
  siRNA target sequence for 1700034J06Rik (NM_178386.2,570-588).
gggtgactgcattatgaaa

SEQ ID NO: 573409 - DNA, 19 bp, Mus musculus
  siRNA target sequence for 1700034J06Rik (NM_178386.2,605-623).
gactgattggtctatacca

SEQ ID NO: 573410 - DNA, 19 bp, Mus musculus
  siRNA target sequence for 1700034J06Rik (NM_178386.2,636-654).
ctctgttcagggtatcatt

SEQ ID NO: 573411 - DNA, 19 bp, Mus musculus
  siRNA target sequence for 1700034J06Rik (NM_178386.2,638-656).
ctgttcagggtatcattgt

SEQ ID NO: 573412 - DNA, 19 bp, Mus musculus
  siRNA target sequence for 1700034J06Rik (NM_178386.2,655-673).
gtttaccgagcctcttact

SEQ ID NO: 573413 - DNA, 19 bp, Mus musculus
  siRNA target sequence for 1700034J06Rik (NM_178386.2,761-779).
ctacctgttctggaatact

SEQ ID NO: 573414 - DNA, 19 bp, Mus musculus
  siRNA target sequence for 1700034J06Rik (NM_178386.2,799-817).
gttagaagacgtatgatga

SEQ ID NO: 573415 - DNA, 19 bp, Mus musculus
  siRNA target sequence for 1700034J06Rik (NM_178386.2,829-847).
gaatctgatcggcaatata

SEQ ID NO: 573416 - DNA, 19 bp, Mus musculus
  siRNA target sequence for 1700034J06Rik (NM_178386.2,854-872).
ccatagactgctttctgaa

SEQ ID NO: 573417 - DNA, 19 bp, Mus musculus
  siRNA target sequence for 1700034J06Rik (NM_178386.2,859-877).
gactgctttctgaaaatct

SEQ ID NO: 573418 - DNA, 19 bp, Mus musculus
  siRNA target sequence for 1700034J06Rik (NM_178386.2,870-888).
gaaaatctaccgtcatgaa

SEQ ID NO: 573419 - DNA, 19 bp, Mus musculus
  siRNA target sequence for 1700034J06Rik (NM_178386.2,981-999).
gttcctcaacattgatgtt

SEQ ID NO: 573420 - DNA, 19 bp, Mus musculus
  siRNA target sequence for 1810012H11Rik (NM_028048.1,601-619).
gtgaagaccagaatgcaat

SEQ ID NO: 573421 - DNA, 19 bp, Mus musculus
  siRNA target sequence for 1810012H11Rik (NM_028048.1,742-760).
ctcttgtaccagttcttga

SEQ ID NO: 573422 - DNA, 19 bp, Mus musculus
  siRNA target sequence for 1810012H11Rik (NM_028048.1,872-890).
gggtcatgggagcatatct

SEQ ID NO: 573423 - DNA, 19 bp, Mus musculus
  siRNA target sequence for 1810012H11Rik (NM_028048.1,949-967).
gctgtagggcaccagtata

SEQ ID NO: 573424 - DNA, 19 bp, Mus musculus
  siRNA target sequence for 1810012H11Rik (NM_028048.1,1197-1215).
ggcaatgacaccctttgat

SEQ ID NO: 573425 - DNA, 19 bp, Mus musculus
  siRNA target sequence for 1810012H11Rik (NM_028048.1,1224-1242).
cacaagactttataaccaa

SEQ ID NO: 573426 - DNA, 19 bp, Mus musculus
  siRNA target sequence for 1810012H11Rik (NM_028048.1,1307-1325).
cgcggacagagggcttttt

SEQ ID NO: 573427 - DNA, 19 bp, Mus musculus
  siRNA target sequence for 1810012H11Rik (NM_028048.1,1318-1336).
ggcttttttggcatgtaca

SEQ ID NO: 573428 - DNA, 19 bp, Mus musculus
  siRNA target sequence for 1810012H11Rik (NM_028048.1,1329-1347).
catgtacaagggtataggt

SEQ ID NO: 573429 - DNA, 19 bp, Mus musculus
  siRNA target sequence for 1810012H11Rik (NM_028048.1,1339-1357).
ggtataggtgcctcctatt

SEQ ID NO: 573430 - DNA, 19 bp, Mus musculus
  siRNA target sequence for 2810413N20Rik (NM_134141.2,167-185).
ggctagactgcaagagtta

SEQ ID NO: 573431 - DNA, 19 bp, Mus musculus
  siRNA target sequence for 2810413N20Rik (NM_134141.2,233-251).
gcagtcttcgcataaggaa

SEQ ID NO: 573432 - DNA, 19 bp, Mus musculus
  siRNA target sequence for 2810413N20Rik (NM_134141.2,234-252).
cagtcttcgcataaggaat

SEQ ID NO: 573433 - DNA, 19 bp, Mus musculus
  siRNA target sequence for 2810413N20Rik (NM_134141.2,342-360).
cggccagggggctgtcttt

SEQ ID NO: 573434 - DNA, 19 bp, Mus musculus
  siRNA target sequence for 2810413N20Rik (NM_134141.2,346-364).
cagggggctgtctttttct

SEQ ID NO: 573435 - DNA, 19 bp, Mus musculus
  siRNA target sequence for 2810413N20Rik (NM_134141.2,384-402).
gctgaagttaacaatgaca

SEQ ID NO: 573436 - DNA, 19 bp, Mus musculus
  siRNA target sequence for 2810413N20Rik (NM_134141.2,407-425).
gaagacggcctctaagcta

SEQ ID NO: 573437 - DNA, 19 bp, Mus musculus
  siRNA target sequence for 2810413N20Rik (NM_134141.2,450-468).
ctcgtggaaataaaagagt

SEQ ID NO: 573438 - DNA, 19 bp, Mus musculus
  siRNA target sequence for 2810413N20Rik (NM_134141.2,586-604).
gttcttctagccagctaaa

SEQ ID NO: 573439 - DNA, 19 bp, Mus musculus
  siRNA target sequence for 2810413N20Rik (NM_134141.2,589-607).
cttctagccagctaaagct

SEQ ID NO: 573440 - DNA, 19 bp, Mus musculus
  siRNA target sequence for 2810413N20Rik (NM_134141.2,600-618).
ctaaagcttcccaacaaga

SEQ ID NO: 573441 - DNA, 19 bp, Mus musculus
  siRNA target sequence for 2810413N20Rik (NM_134141.2,886-904).
cagcctgtggaaattgcta

SEQ ID NO: 573442 - DNA, 19 bp, Mus musculus
  siRNA target sequence for 2810413N20Rik (NM_134141.2,977-995).
gctcctgagcaatagcaat

SEQ ID NO: 573443 - DNA, 19 bp, Mus musculus
  siRNA target sequence for 3010027G13Rik (NM_026542.1,126-144).
gcccccttcagcaaatggt

SEQ ID NO: 573444 - DNA, 19 bp, Mus musculus
  siRNA target sequence for 3010027G13Rik (NM_026542.1,309-327).
cagggaagtgcctcctata

SEQ ID NO: 573445 - DNA, 19 bp, Mus musculus
  siRNA target sequence for 3010027G13Rik (NM_026542.1,421-439).
ggatgcctttgtgaagatt

SEQ ID NO: 573446 - DNA, 19 bp, Mus musculus
  siRNA target sequence for 3010027G13Rik (NM_026542.1,503-521).
ccagctactgctatctact

SEQ ID NO: 573447 - DNA, 19 bp, Mus musculus
  siRNA target sequence for 3010027G13Rik (NM_026542.1,504-522).
cagctactgctatctactt

SEQ ID NO: 573448 - DNA, 19 bp, Mus musculus
  siRNA target sequence for 3010027G13Rik (NM_026542.1,525-543).
ctgcttacgaccaactcaa

SEQ ID NO: 573449 - DNA, 19 bp, Mus musculus
  siRNA target sequence for 3010027G13Rik (NM_026542.1,788-806).
gctctgtactggttcaact

SEQ ID NO: 573450 - DNA, 19 bp, Mus musculus
  siRNA target sequence for 3632410G24Rik (NM_028711.1,107-125).
ggccgagctagcaaccttt

SEQ ID NO: 573451 - DNA, 19 bp, Mus musculus
  siRNA target sequence for 3632410G24Rik (NM_028711.1,126-144).
cccctcgatctcacaaaaa

SEQ ID NO: 573452 - DNA, 19 bp, Mus musculus
  siRNA target sequence for 3632410G24Rik (NM_028711.1,325-343).
ggatggtcacctatgaaca

SEQ ID NO: 573453 - DNA, 19 bp, Mus musculus
  siRNA target sequence for 3632410G24Rik (NM_028711.1,326-344).
gatggtcacctatgaacat

SEQ ID NO: 573454 - DNA, 19 bp, Mus musculus
  siRNA target sequence for 3632410G24Rik (NM_028711.1,356-374).
cgtgtttggcaaaagtgaa

SEQ ID NO: 573455 - DNA, 19 bp, Mus musculus
  siRNA target sequence for 3632410G24Rik (NM_028711.1,423-441).
ggtgtcatcggacagtttt

SEQ ID NO: 573456 - DNA, 19 bp, Mus musculus
  siRNA target sequence for 3632410G24Rik (NM_028711.1,424-442).
gtgtcatcggacagttttt

SEQ ID NO: 573457 - DNA, 19 bp, Mus musculus
  siRNA target sequence for 3632410G24Rik (NM_028711.1,467-485).
ggtccagatgcaaatggaa

SEQ ID NO: 573458 - DNA, 19 bp, Mus musculus
  siRNA target sequence for 3632410G24Rik (NM_028711.1,534-552).
catgcatttgcaaaaatct

SEQ ID NO: 573459 - DNA, 19 bp, Mus musculus
  siRNA target sequence for 3632410G24Rik (NM_028711.1,607-625).
gagcagcgcttgtgaacat

SEQ ID NO: 573460 - DNA, 19 bp, Mus musculus
  siRNA target sequence for 3632410G24Rik (NM_028711.1,638-656).
cacttacgacacagtgaaa

SEQ ID NO: 573461 - DNA, 19 bp, Mus musculus
  siRNA target sequence for 3632410G24Rik (NM_028711.1,640-658).
cttacgacacagtgaaaca

SEQ ID NO: 573462 - DNA, 19 bp, Mus musculus
  siRNA target sequence for 3632410G24Rik (NM_028711.1,657-675).
cactacctggtattgaaca

SEQ ID NO: 573463 - DNA, 19 bp, Mus musculus
  siRNA target sequence for 3632410G24Rik (NM_028711.1,674-692).
cacaccgcttgaagacaat

SEQ ID NO: 573464 - DNA, 19 bp, Mus musculus
  siRNA target sequence for 3632410G24Rik (NM_028711.1,676-694).
caccgcttgaagacaatat

SEQ ID NO: 573465 - DNA, 19 bp, Mus musculus
  siRNA target sequence for 3632410G24Rik (NM_028711.1,678-696).
ccgcttgaagacaatattt

SEQ ID NO: 573466 - DNA, 19 bp, Mus musculus
  siRNA target sequence for 3632410G24Rik (NM_028711.1,702-720).
cacggcttatccagtttgt

SEQ ID NO: 573467 - DNA, 19 bp, Mus musculus
  siRNA target sequence for 3632410G24Rik (NM_028711.1,704-722).
cggcttatccagtttgtgt

SEQ ID NO: 573468 - DNA, 19 bp, Mus musculus
  siRNA target sequence for 3632410G24Rik (NM_028711.1,727-745).
gacttgtggcttctattct

SEQ ID NO: 573469 - DNA, 19 bp, Mus musculus
  siRNA target sequence for 3632410G24Rik (NM_028711.1,748-766).
gaacaccagccgatgtcat

SEQ ID NO: 573470 - DNA, 19 bp, Mus musculus
  siRNA target sequence for 3632410G24Rik (NM_028711.1,762-780).
gtcatcaaaagccgaataa

SEQ ID NO: 573471 - DNA, 19 bp, Mus musculus
  siRNA target sequence for 3632410G24Rik (NM_028711.1,782-800).
gaaccaacctcgagacaaa

SEQ ID NO: 573472 - DNA, 19 bp, Mus musculus
  siRNA target sequence for 3632410G24Rik (NM_028711.1,809-827).
gggacttttgtataagtca

SEQ ID NO: 573473 - DNA, 19 bp, Mus musculus
  siRNA target sequence for 3632410G24Rik (NM_028711.1,839-857).
cttgatccaggctgttcaa

SEQ ID NO: 573474 - DNA, 19 bp, Mus musculus
  siRNA target sequence for 3632410G24Rik (NM_028711.1,875-893).
cctgtataaaggctttcta

SEQ ID NO: 573475 - DNA, 19 bp, Mus musculus
  siRNA target sequence for 3632410G24Rik (NM_028711.1,926-944).
ggtgttctggctcacttat

SEQ ID NO: 573476 - DNA, 19 bp, Mus musculus
  siRNA target sequence for 3632410G24Rik (NM_028711.1,929-947).
gttctggctcacttatgaa

SEQ ID NO: 573477 - DNA, 19 bp, Mus musculus
  siRNA target sequence for 4933406J04Rik (NM_175333.2,142-160).
ggggaccctgtggaagttt

SEQ ID NO: 573478 - DNA, 19 bp, Mus musculus
  siRNA target sequence for 4933406J04Rik (NM_175333.2,354-372).
ccccagagtatgctatcaa

SEQ ID NO: 573479 - DNA, 19 bp, Mus musculus
  siRNA target sequence for 4933406J04Rik (NM_175333.2,356-374).
ccagagtatgctatcaagt

SEQ ID NO: 573480 - DNA, 19 bp, Mus musculus
  siRNA target sequence for 4933406J04Rik (NM_175333.2,386-404).
gagcagtctaagaatttct

SEQ ID NO: 573481 - DNA, 19 bp, Mus musculus
  siRNA target sequence for 4933406J04Rik (NM_175333.2,470-488).
gtctcccagacgctcataa

SEQ ID NO: 573482 - DNA, 19 bp, Mus musculus
  siRNA target sequence for 4933406J04Rik (NM_175333.2,525-543).
gcttcactggccagtataa

SEQ ID NO: 573483 - DNA, 19 bp, Mus musculus
  siRNA target sequence for 4933406J04Rik (NM_175333.2,526-544).
cttcactggccagtataaa

SEQ ID NO: 573484 - DNA, 19 bp, Mus musculus
  siRNA target sequence for 4933406J04Rik (NM_175333.2,729-747).
gcctgtcatctgtaacact

SEQ ID NO: 573485 - DNA, 19 bp, Mus musculus
  siRNA target sequence for 4933406J04Rik (NM_175333.2,771-789).
ccagttacccactgacttt

SEQ ID NO: 573486 - DNA, 19 bp, Mus musculus
  siRNA target sequence for 4933433D23Rik (NM_026232.1,239-257).
gaatgcggcacatttccaa

SEQ ID NO: 573487 - DNA, 19 bp, Mus musculus
  siRNA target sequence for 4933433D23Rik (NM_026232.1,243-261).
gcggcacatttccaattga

SEQ ID NO: 573488 - DNA, 19 bp, Mus musculus
  siRNA target sequence for 4933433D23Rik (NM_026232.1,247-265).
cacatttccaattgattta

SEQ ID NO: 573489 - DNA, 19 bp, Mus musculus
  siRNA target sequence for 4933433D23Rik (NM_026232.1,254-272).
ccaattgatttaactaaga

SEQ ID NO: 573490 - DNA, 19 bp, Mus musculus
  siRNA target sequence for 4933433D23Rik (NM_026232.1,352-370).
gaggataggccgagaagaa

SEQ ID NO: 573491 - DNA, 19 bp, Mus musculus
  siRNA target sequence for 4933433D23Rik (NM_026232.1,371-389).
ggcctgaaggcgctgtatt

SEQ ID NO: 573492 - DNA, 19 bp, Mus musculus
  siRNA target sequence for 4933433D23Rik (NM_026232.1,524-542).
ctgtctggagtcatatcct

SEQ ID NO: 573493 - DNA, 19 bp, Mus musculus
  siRNA target sequence for 4933433D23Rik (NM_026232.1,551-569).
gctaatccgactgatgttt

SEQ ID NO: 573494 - DNA, 19 bp, Mus musculus
  siRNA target sequence for 4933433D23Rik (NM_026232.1,552-570).
ctaatccgactgatgtttt

SEQ ID NO: 573495 - DNA, 19 bp, Mus musculus
  siRNA target sequence for 4933433D23Rik (NM_026232.1,620-638).
gacagcttcatgagcattt

SEQ ID NO: 573496 - DNA, 19 bp, Mus musculus
  siRNA target sequence for 4933433D23Rik (NM_026232.1,624-642).
gcttcatgagcatttacca

SEQ ID NO: 573497 - DNA, 19 bp, Mus musculus
  siRNA target sequence for 4933433D23Rik (NM_026232.1,712-730).
cgtggagcttccagtctat

SEQ ID NO: 573498 - DNA, 19 bp, Mus musculus
  siRNA target sequence for 4933433D23Rik (NM_026232.1,716-734).
gagcttccagtctatgaca

SEQ ID NO: 573499 - DNA, 19 bp, Mus musculus
  siRNA target sequence for 4933433D23Rik (NM_026232.1,777-795).
ctgtcgcaacgcattttct

SEQ ID NO: 573500 - DNA, 19 bp, Mus musculus
  siRNA target sequence for 4933433D23Rik (NM_026232.1,779-797).
gtcgcaacgcattttctct

SEQ ID NO: 573501 - DNA, 19 bp, Mus musculus
  siRNA target sequence for 4933433D23Rik (NM_026232.1,891-909).
gcagatgtgcgggctataa

SEQ ID NO: 573502 - DNA, 19 bp, Mus musculus
  siRNA target sequence for 4933433D23Rik (NM_026232.1,915-933).
ccttggattgcctattgca

SEQ ID NO: 573503 - DNA, 19 bp, Mus musculus
  siRNA target sequence for 4933433D23Rik (NM_026232.1,950-968).
gggttttttgctctatata

SEQ ID NO: 573504 - DNA, 19 bp, Mus musculus
  siRNA target sequence for 4933433D23Rik (NM_026232.1,991-1009).
gcgccttggtccttggaat

SEQ ID NO: 573505 - DNA, 19 bp, Mus musculus
  siRNA target sequence for 4933433D23Rik (NM_026232.1,992-1010).
cgccttggtccttggaata

SEQ ID NO: 573506 - DNA, 19 bp, Mus musculus
  siRNA target sequence for 4933433D23Rik (NM_026232.1,995-1013).
cttggtccttggaatatca

SEQ ID NO: 573507 - DNA, 19 bp, Mus musculus
  siRNA target sequence for 4933433D23Rik (NM_026232.1,998-1016).
ggtccttggaatatcattt

SEQ ID NO: 573508 - DNA, 19 bp, Mus musculus
  siRNA target sequence for 4933433D23Rik (NM_026232.1,1026-1044).
cttacgaacaactgaagaa

SEQ ID NO: 573509 - DNA, 19 bp, Mus musculus
  siRNA target sequence for 5430428G01Rik (NM_024178.1,60-78).
cagccgcagggctagtgat

SEQ ID NO: 573510 - DNA, 19 bp, Mus musculus
  siRNA target sequence for 5430428G01Rik (NM_024178.1,63-81).
ccgcagggctagtgatctt

SEQ ID NO: 573511 - DNA, 19 bp, Mus musculus
  siRNA target sequence for 5430428G01Rik (NM_024178.1,69-87).
ggctagtgatcttgctatt

SEQ ID NO: 573512 - DNA, 19 bp, Mus musculus
  siRNA target sequence for 5430428G01Rik (NM_024178.1,217-235).
ctattcaccaaggcattat

SEQ ID NO: 573513 - DNA, 19 bp, Mus musculus
  siRNA target sequence for 5430428G01Rik (NM_024178.1,301-319).
ccagaatgactctactact

SEQ ID NO: 573514 - DNA, 19 bp, Mus musculus
  siRNA target sequence for 5430428G01Rik (NM_024178.1,425-443).
ccactggttctccgaataa

SEQ ID NO: 573515 - DNA, 19 bp, Mus musculus
  siRNA target sequence for 5430428G01Rik (NM_024178.1,426-444).
cactggttctccgaataaa

SEQ ID NO: 573516 - DNA, 19 bp, Mus musculus
  siRNA target sequence for 5430428G01Rik (NM_024178.1,607-625).
ctccgactacttcattgtt

SEQ ID NO: 573517 - DNA, 19 bp, Mus musculus
  siRNA target sequence for 5430428G01Rik (NM_024178.1,609-627).
ccgactacttcattgttca

SEQ ID NO: 573518 - DNA, 19 bp, Mus musculus
  siRNA target sequence for 5430428G01Rik (NM_024178.1,633-651).
ccactctcaaggagaagta

SEQ ID NO: 573519 - DNA, 19 bp, Mus musculus
  siRNA target sequence for 5430428G01Rik (NM_024178.1,664-682).
gtacctggggcgaattgtt

SEQ ID NO: 573520 - DNA, 19 bp, Mus musculus
  siRNA target sequence for 5730438N18Rik (NM_027460.1,188-206).
ggcacagttggtgctattt

SEQ ID NO: 573521 - DNA, 19 bp, Mus musculus
  siRNA target sequence for 5730438N18Rik (NM_027460.1,189-207).
gcacagttggtgctatttt

SEQ ID NO: 573522 - DNA, 19 bp, Mus musculus
  siRNA target sequence for 5730438N18Rik (NM_027460.1,257-275).
gctcttcggacggtgtatt

SEQ ID NO: 573523 - DNA, 19 bp, Mus musculus
  siRNA target sequence for 5730438N18Rik (NM_027460.1,258-276).
ctcttcggacggtgtatta

SEQ ID NO: 573524 - DNA, 19 bp, Mus musculus
  siRNA target sequence for 5730438N18Rik (NM_027460.1,284-302).
gttcatctggggaccatta

SEQ ID NO: 573525 - DNA, 19 bp, Mus musculus
  siRNA target sequence for 5730438N18Rik (NM_027460.1,342-360).
gactcctacaggttctgaa

SEQ ID NO: 573526 - DNA, 19 bp, Mus musculus
  siRNA target sequence for 5730438N18Rik (NM_027460.1,379-397).
gggaccaaagtcactcttt

SEQ ID NO: 573527 - DNA, 19 bp, Mus musculus
  siRNA target sequence for 5730438N18Rik (NM_027460.1,380-398).
ggaccaaagtcactcttta

SEQ ID NO: 573528 - DNA, 19 bp, Mus musculus
  siRNA target sequence for 5730438N18Rik (NM_027460.1,399-417).
gaggcctgggtccaaattt

SEQ ID NO: 573529 - DNA, 19 bp, Mus musculus
  siRNA target sequence for 5730438N18Rik (NM_027460.1,403-421).
cctgggtccaaatttggtt

SEQ ID NO: 573530 - DNA, 19 bp, Mus musculus
  siRNA target sequence for 5730438N18Rik (NM_027460.1,441-459).
ctgtgtactttgcatgtta

SEQ ID NO: 573531 - DNA, 19 bp, Mus musculus
  siRNA target sequence for 5730438N18Rik (NM_027460.1,485-503).
ggcatcttcgtgcctaata

SEQ ID NO: 573532 - DNA, 19 bp, Mus musculus
  siRNA target sequence for 5730438N18Rik (NM_027460.1,490-508).
cttcgtgcctaatagcaat

SEQ ID NO: 573533 - DNA, 19 bp, Mus musculus
  siRNA target sequence for 5730438N18Rik (NM_027460.1,528-546).
ctggctctgcagcttttgt

SEQ ID NO: 573534 - DNA, 19 bp, Mus musculus
  siRNA target sequence for 5730438N18Rik (NM_027460.1,536-554).
gcagcttttgtcacaaata

SEQ ID NO: 573535 - DNA, 19 bp, Mus musculus
  siRNA target sequence for 5730438N18Rik (NM_027460.1,545-563).
gtcacaaataccttaatga

SEQ ID NO: 573536 - DNA, 19 bp, Mus musculus
  siRNA target sequence for 5730438N18Rik (NM_027460.1,566-584).
cctatttggatggttaaaa

SEQ ID NO: 573537 - DNA, 19 bp, Mus musculus
  siRNA target sequence for 5730438N18Rik (NM_027460.1,708-726).
ctgggatctcggagacaat

SEQ ID NO: 573538 - DNA, 19 bp, Mus musculus
  siRNA target sequence for 5730438N18Rik (NM_027460.1,710-728).
gggatctcggagacaatca

SEQ ID NO: 573539 - DNA, 19 bp, Mus musculus
  siRNA target sequence for 5730438N18Rik (NM_027460.1,711-729).
ggatctcggagacaatcat

SEQ ID NO: 573540 - DNA, 19 bp, Mus musculus
  siRNA target sequence for 5730438N18Rik (NM_027460.1,723-741).
caatcatctgctttgctat

SEQ ID NO: 573541 - DNA, 19 bp, Mus musculus
  siRNA target sequence for 5730438N18Rik (NM_027460.1,737-755).
gctatttatgagagcttaa

SEQ ID NO: 573542 - DNA, 19 bp, Mus musculus
  siRNA target sequence for 5730438N18Rik (NM_027460.1,738-756).
ctatttatgagagcttaaa

SEQ ID NO: 573543 - DNA, 19 bp, Mus musculus
  siRNA target sequence for 5730438N18Rik (NM_027460.1,746-764).
gagagcttaaagaagtgtt

SEQ ID NO: 573544 - DNA, 19 bp, Mus musculus
  siRNA target sequence for 5730438N18Rik (NM_027460.1,794-812).
gatggagctgagaaaagtt

SEQ ID NO: 573545 - DNA, 19 bp, Mus musculus
  siRNA target sequence for 5730438N18Rik (NM_027460.1,1107-1125).
gctctagaagaataaaact

SEQ ID NO: 573546 - DNA, 19 bp, Mus musculus
  siRNA target sequence for 6330416G13Rik (NM_144905.2,318-336).
gggggcaagagctacacaa

SEQ ID NO: 573547 - DNA, 19 bp, Mus musculus
  siRNA target sequence for 6330416G13Rik (NM_144905.2,353-371).
gtcctccggatcgacaata

SEQ ID NO: 573548 - DNA, 19 bp, Mus musculus
  siRNA target sequence for 6330416G13Rik (NM_144905.2,488-506).
caagtgaggaggtacatca

SEQ ID NO: 573549 - DNA, 19 bp, Mus musculus
  siRNA target sequence for 6330416G13Rik (NM_144905.2,560-578).
gtgtgggccaacatctact

SEQ ID NO: 573550 - DNA, 19 bp, Mus musculus
  siRNA target sequence for 6330416G13Rik (NM_144905.2,577-595).
ctccaccagccaaatgttt

SEQ ID NO: 573551 - DNA, 19 bp, Mus musculus
  siRNA target sequence for 6330416G13Rik (NM_144905.2,686-704).
cagaggaaggccaacacta

SEQ ID NO: 573552 - DNA, 19 bp, Mus musculus
  siRNA target sequence for 6330416G13Rik (NM_144905.2,852-870).
ccgaccatgttcaagagat

SEQ ID NO: 573553 - DNA, 19 bp, Mus musculus
  siRNA target sequence for 6330416G13Rik (NM_144905.2,909-927).
gccagctgtgcgttgtcat

SEQ ID NO: 573554 - DNA, 19 bp, Mus musculus
  siRNA target sequence for 6330416G13Rik (NM_144905.2,1091-1109).
gtgtttggtggctactaca

SEQ ID NO: 573555 - DNA, 19 bp, Mus musculus
  siRNA target sequence for 6330416G13Rik (NM_144905.2,1185-1203).
cctgccagctcatagaagt

SEQ ID NO: 573556 - DNA, 19 bp, Mus musculus
  siRNA target sequence for Aatf (NM_019816.1,269-287).
ggcagtgagtagcattaga

SEQ ID NO: 573557 - DNA, 19 bp, Mus musculus
  siRNA target sequence for Aatf (NM_019816.1,270-288).
gcagtgagtagcattagaa

SEQ ID NO: 573558 - DNA, 19 bp, Mus musculus
  siRNA target sequence for Aatf (NM_019816.1,271-289).
cagtgagtagcattagaaa

SEQ ID NO: 573559 - DNA, 19 bp, Mus musculus
  siRNA target sequence for Aatf (NM_019816.1,306-324).
ctcttggacaccgacaaaa

SEQ ID NO: 573560 - DNA, 19 bp, Mus musculus
  siRNA target sequence for Aatf (NM_019816.1,384-402).
ctgccaagttcatctgata

SEQ ID NO: 573561 - DNA, 19 bp, Mus musculus
  siRNA target sequence for Aatf (NM_019816.1,656-674).
ctccagtgtcaaagtttct

SEQ ID NO: 573562 - DNA, 19 bp, Mus musculus
  siRNA target sequence for Aatf (NM_019816.1,694-712).
gagctgtgaagaatcagat

SEQ ID NO: 573563 - DNA, 19 bp, Mus musculus
  siRNA target sequence for Aatf (NM_019816.1,864-882).
cttaaagccttgttaaggt

SEQ ID NO: 573564 - DNA, 19 bp, Mus musculus
  siRNA target sequence for Aatf (NM_019816.1,920-938).
cccagacacgagacatata

SEQ ID NO: 573565 - DNA, 19 bp, Mus musculus
  siRNA target sequence for Aatf (NM_019816.1,922-940).
cagacacgagacatatagt

SEQ ID NO: 573566 - DNA, 19 bp, Mus musculus
  siRNA target sequence for Aatf (NM_019816.1,924-942).
gacacgagacatatagtaa

SEQ ID NO: 573567 - DNA, 19 bp, Mus musculus
  siRNA target sequence for Aatf (NM_019816.1,926-944).
cacgagacatatagtaaat

SEQ ID NO: 573568 - DNA, 19 bp, Mus musculus
  siRNA target sequence for Aatf (NM_019816.1,946-964).
gggcgaaacccaatacaga

SEQ ID NO: 573569 - DNA, 19 bp, Mus musculus
  siRNA target sequence for Aatf (NM_019816.1,1089-1107).
gacttcaccatctatagga

SEQ ID NO: 573570 - DNA, 19 bp, Mus musculus
  siRNA target sequence for Aatf (NM_019816.1,1198-1216).
ctcagatcgatcatatcat

SEQ ID NO: 573571 - DNA, 19 bp, Mus musculus
  siRNA target sequence for Aatf (NM_019816.1,1200-1218).
cagatcgatcatatcatga

SEQ ID NO: 573572 - DNA, 19 bp, Mus musculus
  siRNA target sequence for Aatf (NM_019816.1,1371-1389).
gacttggatgaggagatat

SEQ ID NO: 573573 - DNA, 19 bp, Mus musculus
  siRNA target sequence for Aatf (NM_019816.1,1415-1433).
gctccttcgagaactcata

SEQ ID NO: 573574 - DNA, 19 bp, Mus musculus
  siRNA target sequence for Aatf (NM_019816.1,1428-1446).
ctcatagagcggaaaacca

SEQ ID NO: 573575 - DNA, 19 bp, Mus musculus
  siRNA target sequence for Aatf (NM_019816.1,1520-1538).
ccgcaagaaggtagataga

SEQ ID NO: 573576 - DNA, 19 bp, Mus musculus
  siRNA target sequence for Aatf (NM_019816.1,1589-1607).
gagtttcatggcacctatt

SEQ ID NO: 573577 - DNA, 19 bp, Mus musculus
  siRNA target sequence for Aatf (NM_019816.1,1613-1631).
caccgcaatgagtgatgat

SEQ ID NO: 573578 - DNA, 19 bp, Mus musculus
  siRNA target sequence for AW491445 (NM_134154.1,254-272).
cacccattcgacactgtaa

SEQ ID NO: 573579 - DNA, 19 bp, Mus musculus
  siRNA target sequence for AW491445 (NM_134154.1,269-287).
gtaaaggtgcggttacaga

SEQ ID NO: 573580 - DNA, 19 bp, Mus musculus
  siRNA target sequence for AW491445 (NM_134154.1,314-332).
gactgcgtagtcaagactt

SEQ ID NO: 573581 - DNA, 19 bp, Mus musculus
  siRNA target sequence for AW491445 (NM_134154.1,482-500).
cccagctacacaaacatct

SEQ ID NO: 573582 - DNA, 19 bp, Mus musculus
  siRNA target sequence for AW491445 (NM_134154.1,499-517).
ctttatagcaggttgtact

SEQ ID NO: 573583 - DNA, 19 bp, Mus musculus
  siRNA target sequence for AW491445 (NM_134154.1,559-577).
catcaaagtccgtctacaa

SEQ ID NO: 573584 - DNA, 19 bp, Mus musculus
  siRNA target sequence for AW491445 (NM_134154.1,709-727).
gagagacactcctacgtta

SEQ ID NO: 573585 - DNA, 19 bp, Mus musculus
  siRNA target sequence for AW491445 (NM_134154.1,713-731).
gacactcctacgttaggaa

SEQ ID NO: 573586 - DNA, 19 bp, Mus musculus
  siRNA target sequence for AW491445 (NM_134154.1,717-735).
ctcctacgttaggaatgta

SEQ ID NO: 573587 - DNA, 19 bp, Mus musculus
  siRNA target sequence for AW491445 (NM_134154.1,719-737).
cctacgttaggaatgtact

SEQ ID NO: 573588 - DNA, 19 bp, Mus musculus
  siRNA target sequence for AW491445 (NM_134154.1,720-738).
ctacgttaggaatgtactt

SEQ ID NO: 573589 - DNA, 19 bp, Mus musculus
  siRNA target sequence for AW491445 (NM_134154.1,723-741).
cgttaggaatgtactttgt

SEQ ID NO: 573590 - DNA, 19 bp, Mus musculus
  siRNA target sequence for AW491445 (NM_134154.1,841-859).
gatcacagccactcctttt

SEQ ID NO: 573591 - DNA, 19 bp, Mus musculus
  siRNA target sequence for AW491445 (NM_134154.1,844-862).
cacagccactccttttgat

SEQ ID NO: 573592 - DNA, 19 bp, Mus musculus
  siRNA target sequence for AW491445 (NM_134154.1,953-971).
ggaataggggtctttttca

SEQ ID NO: 573593 - DNA, 19 bp, Mus musculus
  siRNA target sequence for AW491445 (NM_134154.1,954-972).
gaataggggtctttttcaa

SEQ ID NO: 573594 - DNA, 19 bp, Mus musculus
  siRNA target sequence for AW491445 (NM_134154.1,1014-1032).
ctgccaccttccttagcta

SEQ ID NO: 573595 - DNA, 19 bp, Mus musculus
  siRNA target sequence for B230315F11Rik (NM_178766.2,884-902).
ggctcctacgattcttaga

SEQ ID NO: 573596 - DNA, 19 bp, Mus musculus
  siRNA target sequence for B230315F11Rik (NM_178766.2,886-904).
ctcctacgattcttagaga

SEQ ID NO: 573597 - DNA, 19 bp, Mus musculus
  siRNA target sequence for B230315F11Rik (NM_178766.2,1036-1054).
ctgttgcaactttaccatt

SEQ ID NO: 573598 - DNA, 19 bp, Mus musculus
  siRNA target sequence for B230315F11Rik (NM_178766.2,1082-1100).
gcaactgtggacgaatgaa

SEQ ID NO: 573599 - DNA, 19 bp, Mus musculus
  siRNA target sequence for B230315F11Rik (NM_178766.2,1086-1104).
ctgtggacgaatgaatatt

SEQ ID NO: 573600 - DNA, 19 bp, Mus musculus
  siRNA target sequence for B230315F11Rik (NM_178766.2,1088-1106).
gtggacgaatgaatattgt

SEQ ID NO: 573601 - DNA, 19 bp, Mus musculus
  siRNA target sequence for B230315F11Rik (NM_178766.2,1090-1108).
ggacgaatgaatattgtaa

SEQ ID NO: 573602 - DNA, 19 bp, Mus musculus
  siRNA target sequence for B230315F11Rik (NM_178766.2,1091-1109).
gacgaatgaatattgtaaa

SEQ ID NO: 573603 - DNA, 19 bp, Mus musculus
  siRNA target sequence for B230315F11Rik (NM_178766.2,1151-1169).
gaacattgttgctgacaaa

SEQ ID NO: 573604 - DNA, 19 bp, Mus musculus
  siRNA target sequence for B230315F11Rik (NM_178766.2,1180-1198).
ggttatttacaggtctaat

SEQ ID NO: 573605 - DNA, 19 bp, Mus musculus
  siRNA target sequence for B230315F11Rik (NM_178766.2,1181-1199).
gttatttacaggtctaatt

SEQ ID NO: 573606 - DNA, 19 bp, Mus musculus
  siRNA target sequence for B230315F11Rik (NM_178766.2,1192-1210).
gtctaattcctcgattagt

SEQ ID NO: 573607 - DNA, 19 bp, Mus musculus
  siRNA target sequence for B230315F11Rik (NM_178766.2,1194-1212).
ctaattcctcgattagtta

SEQ ID NO: 573608 - DNA, 19 bp, Mus musculus
  siRNA target sequence for B230315F11Rik (NM_178766.2,1221-1239).
cctgcttgtgccattatga

SEQ ID NO: 573609 - DNA, 19 bp, Mus musculus
  siRNA target sequence for B230315F11Rik (NM_178766.2,1222-1240).
ctgcttgtgccattatgat

SEQ ID NO: 573610 - DNA, 19 bp, Mus musculus
  siRNA target sequence for B230315F11Rik (NM_178766.2,1224-1242).
gcttgtgccattatgatca

SEQ ID NO: 573611 - DNA, 19 bp, Mus musculus
  siRNA target sequence for B230315F11Rik (NM_178766.2,1230-1248).
gccattatgatcagttcat

SEQ ID NO: 573612 - DNA, 19 bp, Mus musculus
  siRNA target sequence for B230315F11Rik (NM_178766.2,1231-1249).
ccattatgatcagttcata

SEQ ID NO: 573613 - DNA, 19 bp, Mus musculus
  siRNA target sequence for B230315F11Rik (NM_178766.2,1264-1282).
cgttcttccagaagcaaaa

SEQ ID NO: 573614 - DNA, 19 bp, Mus musculus
  siRNA target sequence for B230315F11Rik (NM_178766.2,1265-1283).
gttcttccagaagcaaaat

SEQ ID NO: 573615 - DNA, 19 bp, Mus musculus
  siRNA target sequence for B230315F11Rik (NM_178766.2,1271-1289).
ccagaagcaaaatgttgaa

SEQ ID NO: 573616 - DNA, 19 bp, Mus musculus
  siRNA target sequence for B230315F11Rik (NM_178766.2,1272-1290).
cagaagcaaaatgttgaaa

SEQ ID NO: 573617 - DNA, 19 bp, Mus musculus
  siRNA target sequence for B430110G05Rik (NM_178696.2,481-499).
gctatgacaatgatgatca

SEQ ID NO: 573618 - DNA, 19 bp, Mus musculus
  siRNA target sequence for B430110G05Rik (NM_178696.2,687-705).
cgagctcacccggaagttt

SEQ ID NO: 573619 - DNA, 19 bp, Mus musculus
  siRNA target sequence for B430110G05Rik (NM_178696.2,723-741).
gagtaacacagtcaaatca

SEQ ID NO: 573620 - DNA, 19 bp, Mus musculus
  siRNA target sequence for B430110G05Rik (NM_178696.2,785-803).
cggtgccgatcgatgttgt

SEQ ID NO: 573621 - DNA, 19 bp, Mus musculus
  siRNA target sequence for B430110G05Rik (NM_178696.2,822-840).
gcagcggaagggtgagaaa

SEQ ID NO: 573622 - DNA, 19 bp, Mus musculus
  siRNA target sequence for B430110G05Rik (NM_178696.2,1007-1025).
ggcccttctaccacttcta

SEQ ID NO: 573623 - DNA, 19 bp, Mus musculus
  siRNA target sequence for B430110G05Rik (NM_178696.2,1008-1026).
gcccttctaccacttctat

SEQ ID NO: 573624 - DNA, 19 bp, Mus musculus
  siRNA target sequence for B430110G05Rik (NM_178696.2,1057-1075).
gagtgccctcacattgtct

SEQ ID NO: 573625 - DNA, 19 bp, Mus musculus
  siRNA target sequence for B430110G05Rik (NM_178696.2,1059-1077).
gtgccctcacattgtcttt

SEQ ID NO: 573626 - DNA, 19 bp, Mus musculus
  siRNA target sequence for B430110G05Rik (NM_178696.2,1214-1232).
ggccttggggcctcatgaa

SEQ ID NO: 573627 - DNA, 19 bp, Mus musculus
  siRNA target sequence for B430110G05Rik (NM_178696.2,1234-1252).
ggcctctcggcaagaatca

SEQ ID NO: 573628 - DNA, 19 bp, Mus musculus
  siRNA target sequence for B430110G05Rik (NM_178696.2,1235-1253).
gcctctcggcaagaatcat

SEQ ID NO: 573629 - DNA, 19 bp, Mus musculus
  siRNA target sequence for B430110G05Rik (NM_178696.2,1237-1255).
ctctcggcaagaatcatct

SEQ ID NO: 573630 - DNA, 19 bp, Mus musculus
  siRNA target sequence for BC010801 (NM_144793.1,159-177).
ggtggagacgctcatgtta

SEQ ID NO: 573631 - DNA, 19 bp, Mus musculus
  siRNA target sequence for BC010801 (NM_144793.1,400-418).
cctggagtggggatctact

SEQ ID NO: 573632 - DNA, 19 bp, Mus musculus
  siRNA target sequence for BC010801 (NM_144793.1,401-419).
ctggagtggggatctactt

SEQ ID NO: 573633 - DNA, 19 bp, Mus musculus
  siRNA target sequence for BC010801 (NM_144793.1,565-583).
gggacttacagctatgaga

SEQ ID NO: 573634 - DNA, 19 bp, Mus musculus
  siRNA target sequence for BC010801 (NM_144793.1,682-700).
gggctctacctgatgtttt

SEQ ID NO: 573635 - DNA, 19 bp, Mus musculus
  siRNA target sequence for BC010801 (NM_144793.1,683-701).
ggctctacctgatgtttta

SEQ ID NO: 573636 - DNA, 19 bp, Mus musculus
  siRNA target sequence for BC010801 (NM_144793.1,751-769).
gctctgataccccttatta

SEQ ID NO: 573637 - DNA, 19 bp, Mus musculus
  siRNA target sequence for BC010801 (NM_144793.1,752-770).
ctctgataccccttattaa

SEQ ID NO: 573638 - DNA, 19 bp, Mus musculus
  siRNA target sequence for BC010801 (NM_144793.1,886-904).
gccactctcatcttcaaga

SEQ ID NO: 573639 - DNA, 19 bp, Mus musculus
  siRNA target sequence for BC010801 (NM_144793.1,975-993).
ggcgtggaccgtctatgaa

SEQ ID NO: 573640 - DNA, 19 bp, Mus musculus
  siRNA target sequence for BC010801 (NM_144793.1,977-995).
cgtggaccgtctatgaaga

SEQ ID NO: 573641 - DNA, 19 bp, Mus musculus
  siRNA target sequence for C330005L02Rik (NM_138756.2,106-124).
cacgctggtgcatctgttt

SEQ ID NO: 573642 - DNA, 19 bp, Mus musculus
  siRNA target sequence for C330005L02Rik (NM_138756.2,271-289).
gtcccctggacctcttcat

SEQ ID NO: 573643 - DNA, 19 bp, Mus musculus
  siRNA target sequence for C330005L02Rik (NM_138756.2,317-335).
ggccctcgctcgttgttta

SEQ ID NO: 573644 - DNA, 19 bp, Mus musculus
  siRNA target sequence for C330005L02Rik (NM_138756.2,319-337).
ccctcgctcgttgtttaga

SEQ ID NO: 573645 - DNA, 19 bp, Mus musculus
  siRNA target sequence for C330005L02Rik (NM_138756.2,403-421).
ctgcaaggaaaagttgaat

SEQ ID NO: 573646 - DNA, 19 bp, Mus musculus
  siRNA target sequence for C330005L02Rik (NM_138756.2,415-433).
gttgaatggtgtttttgat

SEQ ID NO: 573647 - DNA, 19 bp, Mus musculus
  siRNA target sequence for Cnk2 (NM_177751.2,286-304).
gaaccggtgagcaaatggt

SEQ ID NO: 573648 - DNA, 19 bp, Mus musculus
  siRNA target sequence for Cnk2 (NM_177751.2,302-320).
ggtctccgagtcaagtagt

SEQ ID NO: 573649 - DNA, 19 bp, Mus musculus
  siRNA target sequence for Cnk2 (NM_177751.2,396-414).
ccagctgctacgcattaca

SEQ ID NO: 573650 - DNA, 19 bp, Mus musculus
  siRNA target sequence for Cnk2 (NM_177751.2,399-417).
gctgctacgcattacacat

SEQ ID NO: 573651 - DNA, 19 bp, Mus musculus
  siRNA target sequence for Cnk2 (NM_177751.2,452-470).
gccatcaggagctgatctt

SEQ ID NO: 573652 - DNA, 19 bp, Mus musculus
  siRNA target sequence for Cnk2 (NM_177751.2,498-516).
gaattatggcttagaaaca

SEQ ID NO: 573653 - DNA, 19 bp, Mus musculus
  siRNA target sequence for Cnk2 (NM_177751.2,546-564).
gaatgcatctgccaaaaat

SEQ ID NO: 573654 - DNA, 19 bp, Mus musculus
  siRNA target sequence for Cnk2 (NM_177751.2,556-574).
gccaaaaatctacaaaact

SEQ ID NO: 573655 - DNA, 19 bp, Mus musculus
  siRNA target sequence for Cnk2 (NM_177751.2,588-606).
gagaaggagcggccattat

SEQ ID NO: 573656 - DNA, 19 bp, Mus musculus
  siRNA target sequence for Cnk2 (NM_177751.2,610-628).
gggaggaccagccgaaaat

SEQ ID NO: 573657 - DNA, 19 bp, Mus musculus
  siRNA target sequence for Cnk2 (NM_177751.2,611-629).
ggaggaccagccgaaaatt

SEQ ID NO: 573658 - DNA, 19 bp, Mus musculus
  siRNA target sequence for Cnk2 (NM_177751.2,612-630).
gaggaccagccgaaaatta

SEQ ID NO: 573659 - DNA, 19 bp, Mus musculus
  siRNA target sequence for Cnk2 (NM_177751.2,618-636).
cagccgaaaattaccaaat

SEQ ID NO: 573660 - DNA, 19 bp, Mus musculus
  siRNA target sequence for Cnk2 (NM_177751.2,620-638).
gccgaaaattaccaaatga

SEQ ID NO: 573661 - DNA, 19 bp, Mus musculus
  siRNA target sequence for Cnk2 (NM_177751.2,622-640).
cgaaaattaccaaatgact

SEQ ID NO: 573662 - DNA, 19 bp, Mus musculus
  siRNA target sequence for Cnk2 (NM_177751.2,623-641).
gaaaattaccaaatgactt

SEQ ID NO: 573663 - DNA, 19 bp, Mus musculus
  siRNA target sequence for Cnk2 (NM_177751.2,696-714).
ggacaggtcaccatttgct

SEQ ID NO: 573664 - DNA, 19 bp, Mus musculus
  siRNA target sequence for Cnk2 (NM_177751.2,726-744).
ctattcagtcacaagaaat

SEQ ID NO: 573665 - DNA, 19 bp, Mus musculus
  siRNA target sequence for Cnk2 (NM_177751.2,731-749).
cagtcacaagaaataacgt

SEQ ID NO: 573666 - DNA, 19 bp, Mus musculus
  siRNA target sequence for Cnk2 (NM_177751.2,737-755).
caagaaataacgtcataca

SEQ ID NO: 573667 - DNA, 19 bp, Mus musculus
  siRNA target sequence for Cnk2 (NM_177751.2,756-774).
gctctgcttggaattaaca

SEQ ID NO: 573668 - DNA, 19 bp, Mus musculus
  siRNA target sequence for Cnk2 (NM_177751.2,757-775).
ctctgcttggaattaacaa

SEQ ID NO: 573669 - DNA, 19 bp, Mus musculus
  siRNA target sequence for Cnk2 (NM_177751.2,761-779).
gcttggaattaacaacaat

SEQ ID NO: 573670 - DNA, 19 bp, Mus musculus
  siRNA target sequence for Cnk2 (NM_177751.2,784-802).
caacaggattgcactgtat

SEQ ID NO: 573671 - DNA, 19 bp, Mus musculus
  siRNA target sequence for Cnk2 (NM_177751.2,790-808).
gattgcactgtatatgaaa

SEQ ID NO: 573672 - DNA, 19 bp, Mus musculus
  siRNA target sequence for Cnk2 (NM_177751.2,848-866).
gagtctgtgaccacatcat

SEQ ID NO: 573673 - DNA, 19 bp, Mus musculus
  siRNA target sequence for Cnk2 (NM_177751.2,850-868).
gtctgtgaccacatcatat

SEQ ID NO: 573674 - DNA, 19 bp, Mus musculus
  siRNA target sequence for Cnk2 (NM_177751.2,864-882).
catatccctgtcatcagat

SEQ ID NO: 573675 - DNA, 19 bp, Mus musculus
  siRNA target sequence for Cnk2 (NM_177751.2,913-931).
gtgattcagctggcaaata

SEQ ID NO: 573676 - DNA, 19 bp, Mus musculus
  siRNA target sequence for Cnk2 (NM_177751.2,947-965).
ggctgggtatgtatattaa

SEQ ID NO: 573677 - DNA, 19 bp, Mus musculus
  siRNA target sequence for Cnk2 (NM_177751.2,948-966).
gctgggtatgtatattaaa

SEQ ID NO: 573678 - DNA, 19 bp, Mus musculus
  siRNA target sequence for Cnk2 (NM_177751.2,952-970).
ggtatgtatattaaatcca

SEQ ID NO: 573679 - DNA, 19 bp, Mus musculus
  siRNA target sequence for Cnk2 (NM_177751.2,1015-1033).
cctgcagatcgctgtaaga

SEQ ID NO: 573680 - DNA, 19 bp, Mus musculus
  siRNA target sequence for Cnk2 (NM_177751.2,1016-1034).
ctgcagatcgctgtaagaa

SEQ ID NO: 573681 - DNA, 19 bp, Mus musculus
  siRNA target sequence for Cnk2 (NM_177751.2,1018-1036).
gcagatcgctgtaagaaaa

SEQ ID NO: 573682 - DNA, 19 bp, Mus musculus
  siRNA target sequence for Cnk2 (NM_177751.2,1019-1037).
cagatcgctgtaagaaaat

SEQ ID NO: 573683 - DNA, 19 bp, Mus musculus
  siRNA target sequence for Cnk2 (NM_177751.2,1038-1056).
ccatgctggtgatgaagta

SEQ ID NO: 573684 - DNA, 19 bp, Mus musculus
  siRNA target sequence for Cnk2 (NM_177751.2,1123-1141).
gacccgagtggtgttatct

SEQ ID NO: 573685 - DNA, 19 bp, Mus musculus
  siRNA target sequence for Cnk2 (NM_177751.2,1125-1143).
cccgagtggtgttatctta

SEQ ID NO: 573686 - DNA, 19 bp, Mus musculus
  siRNA target sequence for Cnk2 (NM_177751.2,1126-1144).
ccgagtggtgttatcttaa

SEQ ID NO: 573687 - DNA, 19 bp, Mus musculus
  siRNA target sequence for Cnk2 (NM_177751.2,1133-1151).
gtgttatcttaactttgaa

SEQ ID NO: 573688 - DNA, 19 bp, Mus musculus
  siRNA target sequence for Cnk2 (NM_177751.2,1156-1174).
cgacctcagagcatgctta

SEQ ID NO: 573689 - DNA, 19 bp, Mus musculus
  siRNA target sequence for Cnk2 (NM_177751.2,1222-1240).
ctgcagcctcttataccta

SEQ ID NO: 573690 - DNA, 19 bp, Mus musculus
  siRNA target sequence for Cnk2 (NM_177751.2,1227-1245).
gcctcttatacctagaagt

SEQ ID NO: 573691 - DNA, 19 bp, Mus musculus
  siRNA target sequence for Cnk2 (NM_177751.2,1283-1301).
gtacacccaccaaaagaga

SEQ ID NO: 573692 - DNA, 19 bp, Mus musculus
  siRNA target sequence for Cnk2 (NM_177751.2,1337-1355).
ctcctgcagaaccatatat

SEQ ID NO: 573693 - DNA, 19 bp, Mus musculus
  siRNA target sequence for Cnk2 (NM_177751.2,1453-1471).
ctggaccaagaatatcgaa

SEQ ID NO: 573694 - DNA, 19 bp, Mus musculus
  siRNA target sequence for Cnk2 (NM_177751.2,1469-1487).
gaaagaggtttaacattgt

SEQ ID NO: 573695 - DNA, 19 bp, Mus musculus
  siRNA target sequence for Cnk2 (NM_177751.2,1476-1494).
gtttaacattgttgaagaa

SEQ ID NO: 573696 - DNA, 19 bp, Mus musculus
  siRNA target sequence for Cnk2 (NM_177751.2,1492-1510).
gaagatactgtcttatatt

SEQ ID NO: 573697 - DNA, 19 bp, Mus musculus
  siRNA target sequence for Cnk2 (NM_177751.2,1522-1540).
gaaaagggacgatcaagta

SEQ ID NO: 573698 - DNA, 19 bp, Mus musculus
  siRNA target sequence for Cnk2 (NM_177751.2,1554-1572).
ggaaagcacaccaacctat

SEQ ID NO: 573699 - DNA, 19 bp, Mus musculus
  siRNA target sequence for Cnk2 (NM_177751.2,1573-1591).
ggcaagctacgacctatat

SEQ ID NO: 573700 - DNA, 19 bp, Mus musculus
  siRNA target sequence for Cnk2 (NM_177751.2,1575-1593).
caagctacgacctatatct

SEQ ID NO: 573701 - DNA, 19 bp, Mus musculus
  siRNA target sequence for Cnk2 (NM_177751.2,1592-1610).
ctatgccagtggaatataa

SEQ ID NO: 573702 - DNA, 19 bp, Mus musculus
  siRNA target sequence for Cnk2 (NM_177751.2,1614-1632).
ggtgggggactatgaagat

SEQ ID NO: 573703 - DNA, 19 bp, Mus musculus
  siRNA target sequence for Cnk2 (NM_177751.2,1619-1637).
gggactatgaagatccaaa

SEQ ID NO: 573704 - DNA, 19 bp, Mus musculus
  siRNA target sequence for Cnk2 (NM_177751.2,1620-1638).
ggactatgaagatccaaat

SEQ ID NO: 573705 - DNA, 19 bp, Mus musculus
  siRNA target sequence for Cnk2 (NM_177751.2,1621-1639).
gactatgaagatccaaata

SEQ ID NO: 573706 - DNA, 19 bp, Mus musculus
  siRNA target sequence for Cnk2 (NM_177751.2,1764-1782).
gaagggtgataagagtaat

SEQ ID NO: 573707 - DNA, 19 bp, Mus musculus
  siRNA target sequence for Cnk2 (NM_177751.2,1806-1824).
gcctagtttgcaaatggat

SEQ ID NO: 573708 - DNA, 19 bp, Mus musculus
  siRNA target sequence for Cnk2 (NM_177751.2,1811-1829).
gtttgcaaatggatgcatt

SEQ ID NO: 573709 - DNA, 19 bp, Mus musculus
  siRNA target sequence for Cnk2 (NM_177751.2,1865-1883).
ccacactgtaccatacatt

SEQ ID NO: 573710 - DNA, 19 bp, Mus musculus
  siRNA target sequence for Cnk2 (NM_177751.2,1895-1913).
ctctgcagcacaaatcaaa

SEQ ID NO: 573711 - DNA, 19 bp, Mus musculus
  siRNA target sequence for Cnk2 (NM_177751.2,2071-2089).
gcatccctatactggtata

SEQ ID NO: 573712 - DNA, 19 bp, Mus musculus
  siRNA target sequence for Cnk2 (NM_177751.2,2072-2090).
catccctatactggtatat

SEQ ID NO: 573713 - DNA, 19 bp, Mus musculus
  siRNA target sequence for Cnk2 (NM_177751.2,2075-2093).
ccctatactggtatattaa

SEQ ID NO: 573714 - DNA, 19 bp, Mus musculus
  siRNA target sequence for Cnk2 (NM_177751.2,2076-2094).
cctatactggtatattaat

SEQ ID NO: 573715 - DNA, 19 bp, Mus musculus
  siRNA target sequence for Cnk2 (NM_177751.2,2154-2172).
cagtgaatgccgcaagaaa

SEQ ID NO: 573716 - DNA, 19 bp, Mus musculus
  siRNA target sequence for Cnk2 (NM_177751.2,2156-2174).
gtgaatgccgcaagaaata

SEQ ID NO: 573717 - DNA, 19 bp, Mus musculus
  siRNA target sequence for Cnk2 (NM_177751.2,2162-2180).
gccgcaagaaatatgcatt

SEQ ID NO: 573718 - DNA, 19 bp, Mus musculus
  siRNA target sequence for Cnk2 (NM_177751.2,2185-2203).
gcctgccatcctaaaatca

SEQ ID NO: 573719 - DNA, 19 bp, Mus musculus
  siRNA target sequence for Cnk2 (NM_177751.2,2246-2264).
ggtggcttaacagaattaa

SEQ ID NO: 573720 - DNA, 19 bp, Mus musculus
  siRNA target sequence for Cnk2 (NM_177751.2,2249-2267).
ggcttaacagaattaacat

SEQ ID NO: 573721 - DNA, 19 bp, Mus musculus
  siRNA target sequence for Cnk2 (NM_177751.2,2268-2286).
gctgactgcaggatatgca

SEQ ID NO: 573722 - DNA, 19 bp, Mus musculus
  siRNA target sequence for Cnk2 (NM_177751.2,2319-2337).
ctggagcgagagtgacaaa

SEQ ID NO: 573723 - DNA, 19 bp, Mus musculus
  siRNA target sequence for Cnk2 (NM_177751.2,2321-2339).
ggagcgagagtgacaaaga

SEQ ID NO: 573724 - DNA, 19 bp, Mus musculus
  siRNA target sequence for Cnk2 (NM_177751.2,2325-2343).
cgagagtgacaaagaagaa

SEQ ID NO: 573725 - DNA, 19 bp, Mus musculus
  siRNA target sequence for Cnk2 (NM_177751.2,2404-2422).
cggcctccctctatgagtt

SEQ ID NO: 573726 - DNA, 19 bp, Mus musculus
  siRNA target sequence for Cnk2 (NM_177751.2,2565-2583).
ccgctcctggcaggattta

SEQ ID NO: 573727 - DNA, 19 bp, Mus musculus
  siRNA target sequence for Cnk2 (NM_177751.2,2566-2584).
cgctcctggcaggatttaa

SEQ ID NO: 573728 - DNA, 19 bp, Mus musculus
  siRNA target sequence for Cnk2 (NM_177751.2,2567-2585).
gctcctggcaggatttaat

SEQ ID NO: 573729 - DNA, 19 bp, Mus musculus
  siRNA target sequence for Cnk2 (NM_177751.2,2603-2621).
gctcaggcttacactatct

SEQ ID NO: 573730 - DNA, 19 bp, Mus musculus
  siRNA target sequence for Cnk2 (NM_177751.2,2604-2622).
ctcaggcttacactatctt

SEQ ID NO: 573731 - DNA, 19 bp, Mus musculus
  siRNA target sequence for Cnk2 (NM_177751.2,2714-2732).
gccacctccaggatcatta

SEQ ID NO: 573732 - DNA, 19 bp, Mus musculus
  siRNA target sequence for Cnk2 (NM_177751.2,2715-2733).
ccacctccaggatcattat

SEQ ID NO: 573733 - DNA, 19 bp, Mus musculus
  siRNA target sequence for Cnk2 (NM_177751.2,2756-2774).
gcgagaggatgcaagtgtt

SEQ ID NO: 573734 - DNA, 19 bp, Mus musculus
  siRNA target sequence for Cnk2 (NM_177751.2,2757-2775).
cgagaggatgcaagtgtta

SEQ ID NO: 573735 - DNA, 19 bp, Mus musculus
  siRNA target sequence for Cnk2 (NM_177751.2,2758-2776).
gagaggatgcaagtgttaa

SEQ ID NO: 573736 - DNA, 19 bp, Mus musculus
  siRNA target sequence for Cnk2 (NM_177751.2,2787-2805).
gggcaagcctcgaagtttt

SEQ ID NO: 573737 - DNA, 19 bp, Mus musculus
  siRNA target sequence for Cnk2 (NM_177751.2,2788-2806).
ggcaagcctcgaagtttta

SEQ ID NO: 573738 - DNA, 19 bp, Mus musculus
  siRNA target sequence for Cnk2 (NM_177751.2,2790-2808).
caagcctcgaagttttact

SEQ ID NO: 573739 - DNA, 19 bp, Mus musculus
  siRNA target sequence for Cnk2 (NM_177751.2,2818-2836).
gatagcgggttcaaccatt

SEQ ID NO: 573740 - DNA, 19 bp, Mus musculus
  siRNA target sequence for Cnk2 (NM_177751.2,3027-3045).
gtcaccactaggagaacat

SEQ ID NO: 573741 - DNA, 19 bp, Mus musculus
  siRNA target sequence for Cnk2 (NM_177751.2,3037-3055).
ggagaacatcgcatttcaa

SEQ ID NO: 573742 - DNA, 19 bp, Mus musculus
  siRNA target sequence for Cnk2 (NM_177751.2,3060-3078).
gatggaatacaaactatca

SEQ ID NO: 573743 - DNA, 19 bp, Mus musculus
  siRNA target sequence for Cnk2 (NM_177751.2,3081-3099).
cataaaacggtgtaatgat

SEQ ID NO: 573744 - DNA, 19 bp, Mus musculus
  siRNA target sequence for Cnk2 (NM_177751.2,3121-3139).
cacaggctgagaattctta

SEQ ID NO: 573745 - DNA, 19 bp, Mus musculus
  siRNA target sequence for Cnk2 (NM_177751.2,3164-3182).
gggaagtagccattattga

SEQ ID NO: 573746 - DNA, 19 bp, Mus musculus
  siRNA target sequence for Cnk2 (NM_177751.2,3193-3211).
gacaatccagacttgactt

SEQ ID NO: 573747 - DNA, 19 bp, Mus musculus
  siRNA target sequence for Cnk2 (NM_177751.2,3202-3220).
gacttgacttctaaagaat

SEQ ID NO: 573748 - DNA, 19 bp, Mus musculus
  siRNA target sequence for Cnk2 (NM_177751.2,3279-3297).
ctcaaatgacccactaagt

SEQ ID NO: 573749 - DNA, 19 bp, Mus musculus
  siRNA target sequence for Cnk2 (NM_177751.2,3281-3299).
caaatgacccactaagtat

SEQ ID NO: 573750 - DNA, 19 bp, Mus musculus
  siRNA target sequence for Cnk2 (NM_177751.2,3286-3304).
gacccactaagtatctctt

SEQ ID NO: 573751 - DNA, 19 bp, Mus musculus
  siRNA target sequence for Cnk2 (NM_177751.2,3316-3334).
gttctcacttcctctctaa

SEQ ID NO: 573752 - DNA, 19 bp, Mus musculus
  siRNA target sequence for Cpne7 (NM_170684.1,376-394).
gtgtaccctgggtcaaatt

SEQ ID NO: 573753 - DNA, 19 bp, Mus musculus
  siRNA target sequence for Cpne7 (NM_170684.1,378-396).
gtaccctgggtcaaattgt

SEQ ID NO: 573754 - DNA, 19 bp, Mus musculus
  siRNA target sequence for Cpne7 (NM_170684.1,625-643).
ggtagtgaagaacaatctt

SEQ ID NO: 573755 - DNA, 19 bp, Mus musculus
  siRNA target sequence for Cpne7 (NM_170684.1,626-644).
gtagtgaagaacaatctta

SEQ ID NO: 573756 - DNA, 19 bp, Mus musculus
  siRNA target sequence for Cpne7 (NM_170684.1,664-682).
caaggtgtccctgaattca

SEQ ID NO: 573757 - DNA, 19 bp, Mus musculus
  siRNA target sequence for Cpne7 (NM_170684.1,851-869).
cagaagaagcgcaattaca

SEQ ID NO: 573758 - DNA, 19 bp, Mus musculus
  siRNA target sequence for Cpne7 (NM_170684.1,856-874).
gaagcgcaattacaagaat

SEQ ID NO: 573759 - DNA, 19 bp, Mus musculus
  siRNA target sequence for Cpne7 (NM_170684.1,1074-1092).
gcgaggtctgccaggatta

SEQ ID NO: 573760 - DNA, 19 bp, Mus musculus
  siRNA target sequence for Cpne7 (NM_170684.1,1075-1093).
cgaggtctgccaggattat

SEQ ID NO: 573761 - DNA, 19 bp, Mus musculus
  siRNA target sequence for Cpne7 (NM_170684.1,1132-1150).
ccggatccctcccaagtat

SEQ ID NO: 573762 - DNA, 19 bp, Mus musculus
  siRNA target sequence for Cpne7 (NM_170684.1,1160-1178).
cacgactttgccatcaatt

SEQ ID NO: 573763 - DNA, 19 bp, Mus musculus
  siRNA target sequence for Cpne7 (NM_170684.1,1328-1346).
ggagaggcttctcaatatt

SEQ ID NO: 573764 - DNA, 19 bp, Mus musculus
  siRNA target sequence for Cpne7 (NM_170684.1,1329-1347).
gagaggcttctcaatatta

SEQ ID NO: 573765 - DNA, 19 bp, Mus musculus
  siRNA target sequence for Cpne7 (NM_170684.1,1333-1351).
ggcttctcaatattacata

SEQ ID NO: 573766 - DNA, 19 bp, Mus musculus
  siRNA target sequence for Cpne7 (NM_170684.1,1461-1479).
ctgacttcacagatatgca

SEQ ID NO: 573767 - DNA, 19 bp, Mus musculus
  siRNA target sequence for Cpne7 (NM_170684.1,1468-1486).
cacagatatgcaaatctta

SEQ ID NO: 573768 - DNA, 19 bp, Mus musculus
  siRNA target sequence for Cpne7 (NM_170684.1,1470-1488).
cagatatgcaaatcttaga

SEQ ID NO: 573769 - DNA, 19 bp, Mus musculus
  siRNA target sequence for Cpne7 (NM_170684.1,1556-1574).
cccttccgtgagctaaaga

SEQ ID NO: 573770 - DNA, 19 bp, Mus musculus
  siRNA target sequence for Cpne7 (NM_170684.1,1557-1575).
ccttccgtgagctaaagaa

SEQ ID NO: 573771 - DNA, 19 bp, Mus musculus
  siRNA target sequence for Cpne7 (NM_170684.1,1620-1638).
caaagcaggtggttgaata

SEQ ID NO: 573772 - DNA, 19 bp, Mus musculus
  siRNA target sequence for D330014H01Rik (NM_177617.2,617-635).
gaactgcggagatacaact

SEQ ID NO: 573773 - DNA, 19 bp, Mus musculus
  siRNA target sequence for D330014H01Rik (NM_177617.2,623-641).
cggagatacaactatgtca

SEQ ID NO: 573774 - DNA, 19 bp, Mus musculus
  siRNA target sequence for D330014H01Rik (NM_177617.2,658-676).
ggagctcgtgtctggatat

SEQ ID NO: 573775 - DNA, 19 bp, Mus musculus
  siRNA target sequence for D330014H01Rik (NM_177617.2,667-685).
gtctggatataaaaagctt

SEQ ID NO: 573776 - DNA, 19 bp, Mus musculus
  siRNA target sequence for D330014H01Rik (NM_177617.2,731-749).
cgaactggattgtttaaga

SEQ ID NO: 573777 - DNA, 19 bp, Mus musculus
  siRNA target sequence for D330014H01Rik (NM_177617.2,762-780).
gggagaaagtcgaagtgat

SEQ ID NO: 573778 - DNA, 19 bp, Mus musculus
  siRNA target sequence for D330014H01Rik (NM_177617.2,894-912).
ccgtcactgccaatagtga

SEQ ID NO: 573779 - DNA, 19 bp, Mus musculus
  siRNA target sequence for D330014H01Rik (NM_177617.2,900-918).
ctgccaatagtgagaagat

SEQ ID NO: 573780 - DNA, 19 bp, Mus musculus
  siRNA target sequence for D330014H01Rik (NM_177617.2,1068-1086).
ctgcgcaggtggaaattgt

SEQ ID NO: 573781 - DNA, 19 bp, Mus musculus
  siRNA target sequence for D330014H01Rik (NM_177617.2,1070-1088).
gcgcaggtggaaattgtaa

SEQ ID NO: 573782 - DNA, 19 bp, Mus musculus
  siRNA target sequence for D330014H01Rik (NM_177617.2,1071-1089).
cgcaggtggaaattgtaat

SEQ ID NO: 573783 - DNA, 19 bp, Mus musculus
  siRNA target sequence for D330014H01Rik (NM_177617.2,1203-1221).
cagataaggtattgaagaa

SEQ ID NO: 573784 - DNA, 19 bp, Mus musculus
  siRNA target sequence for D330014H01Rik (NM_177617.2,1205-1223).
gataaggtattgaagaaga

SEQ ID NO: 573785 - DNA, 19 bp, Mus musculus
  siRNA target sequence for D330014H01Rik (NM_177617.2,1245-1263).
ccgacttccagcctgatat

SEQ ID NO: 573786 - DNA, 19 bp, Mus musculus
  siRNA target sequence for D330014H01Rik (NM_177617.2,1321-1339).
gttgtacgggcgtctgtat

SEQ ID NO: 573787 - DNA, 19 bp, Mus musculus
  siRNA target sequence for D330014H01Rik (NM_177617.2,1353-1371).
ctaagcggatccgaatgaa

SEQ ID NO: 573788 - DNA, 19 bp, Mus musculus
  siRNA target sequence for D330014H01Rik (NM_177617.2,1630-1648).
ggtgggcgactgtctgatt

SEQ ID NO: 573789 - DNA, 19 bp, Mus musculus
  siRNA target sequence for D330014H01Rik (NM_177617.2,1673-1691).
ggaccctttctgaccaatt

SEQ ID NO: 573790 - DNA, 19 bp, Mus musculus
  siRNA target sequence for D330014H01Rik (NM_177617.2,1674-1692).
gaccctttctgaccaatta

SEQ ID NO: 573791 - DNA, 19 bp, Mus musculus
  siRNA target sequence for D330014H01Rik (NM_177617.2,1693-1711).
ccgggatgagattatcaat

SEQ ID NO: 573792 - DNA, 19 bp, Mus musculus
  siRNA target sequence for D330014H01Rik (NM_177617.2,1695-1713).
gggatgagattatcaatca

SEQ ID NO: 573793 - DNA, 19 bp, Mus musculus
  siRNA target sequence for D330014H01Rik (NM_177617.2,1696-1714).
ggatgagattatcaatcaa

SEQ ID NO: 573794 - DNA, 19 bp, Mus musculus
  siRNA target sequence for D330014H01Rik (NM_177617.2,1697-1715).
gatgagattatcaatcaaa

SEQ ID NO: 573795 - DNA, 19 bp, Mus musculus
  siRNA target sequence for D330014H01Rik (NM_177617.2,1700-1718).
gagattatcaatcaaatct

SEQ ID NO: 573796 - DNA, 19 bp, Mus musculus
  siRNA target sequence for D330014H01Rik (NM_177617.2,1758-1776).
ctcgctttgccattgataa

SEQ ID NO: 573797 - DNA, 19 bp, Mus musculus
  siRNA target sequence for D330014H01Rik (NM_177617.2,1760-1778).
cgctttgccattgataact

SEQ ID NO: 573798 - DNA, 19 bp, Mus musculus
  siRNA target sequence for D330014H01Rik (NM_177617.2,1761-1779).
gctttgccattgataactt

SEQ ID NO: 573799 - DNA, 19 bp, Mus musculus
  siRNA target sequence for D330014H01Rik (NM_177617.2,1978-1996).
ctaccttcgagttctagaa

SEQ ID NO: 573800 - DNA, 19 bp, Mus musculus
  siRNA target sequence for D330014H01Rik (NM_177617.2,1981-1999).
ccttcgagttctagaacat

SEQ ID NO: 573801 - DNA, 19 bp, Mus musculus
  siRNA target sequence for D330014H01Rik (NM_177617.2,1997-2015).
catgccatccagtttggat

SEQ ID NO: 573802 - DNA, 19 bp, Mus musculus
  siRNA target sequence for D330014H01Rik (NM_177617.2,2002-2020).
catccagtttggatttcca

SEQ ID NO: 573803 - DNA, 19 bp, Mus musculus
  siRNA target sequence for D330014H01Rik (NM_177617.2,2077-2095).
caaatctgtagctcgaatt

SEQ ID NO: 573804 - DNA, 19 bp, Mus musculus
  siRNA target sequence for D330014H01Rik (NM_177617.2,2099-2117).
ggtcggatgctgattcgaa

SEQ ID NO: 573805 - DNA, 19 bp, Mus musculus
  siRNA target sequence for D330014H01Rik (NM_177617.2,2100-2118).
gtcggatgctgattcgaat

SEQ ID NO: 573806 - DNA, 19 bp, Mus musculus
  siRNA target sequence for D330014H01Rik (NM_177617.2,2176-2194).
ctccaatccccactataat

SEQ ID NO: 573807 - DNA, 19 bp, Mus musculus
  siRNA target sequence for D330014H01Rik (NM_177617.2,2208-2226).
ctaagaccaccattgtcaa

SEQ ID NO: 573808 - DNA, 19 bp, Mus musculus
  siRNA target sequence for D330014H01Rik (NM_177617.2,2369-2387).
gagatcctgcgcttgttga

SEQ ID NO: 573809 - DNA, 19 bp, Mus musculus
  siRNA target sequence for D330014H01Rik (NM_177617.2,2371-2389).
gatcctgcgcttgttgaat

SEQ ID NO: 573810 - DNA, 19 bp, Mus musculus
  siRNA target sequence for D330014H01Rik (NM_177617.2,2548-2566).
ggcctcggtgctgttcttt

SEQ ID NO: 573811 - DNA, 19 bp, Mus musculus
  siRNA target sequence for D330014H01Rik (NM_177617.2,2618-2636).
gcctacatcggcctcttta

SEQ ID NO: 573812 - DNA, 19 bp, Mus musculus
  siRNA target sequence for D330014H01Rik (NM_177617.2,2619-2637).
cctacatcggcctctttat

SEQ ID NO: 573813 - DNA, 19 bp, Mus musculus
  siRNA target sequence for D330014H01Rik (NM_177617.2,2655-2673).
gccaccgcagcaataagct

SEQ ID NO: 573814 - DNA, 19 bp, Mus musculus
  siRNA target sequence for D330014H01Rik (NM_177617.2,2728-2746).
cacctgccgaacccttttt

SEQ ID NO: 573815 - DNA, 19 bp, Mus musculus
  siRNA target sequence for D330014H01Rik (NM_177617.2,2730-2748).
cctgccgaaccctttttga

SEQ ID NO: 573816 - DNA, 19 bp, Mus musculus
  siRNA target sequence for D330014H01Rik (NM_177617.2,2753-2771).
cacaagcttctgttcagtt

SEQ ID NO: 573817 - DNA, 19 bp, Mus musculus
  siRNA target sequence for D330014H01Rik (NM_177617.2,2799-2817).
cgtccggcaagctcaacat

SEQ ID NO: 573818 - DNA, 19 bp, Mus musculus
  siRNA target sequence for D330014H01Rik (NM_177617.2,2908-2926).
ctactgggataatatcaca

SEQ ID NO: 573819 - DNA, 19 bp, Mus musculus
  siRNA target sequence for D330014H01Rik (NM_177617.2,3104-3122).
cgagtggcattctgtgtta

SEQ ID NO: 573820 - DNA, 19 bp, Mus musculus
  siRNA target sequence for D330014H01Rik (NM_177617.2,3142-3160).
ccttggctctcgattcatt

SEQ ID NO: 573821 - DNA, 19 bp, Mus musculus
  siRNA target sequence for D330014H01Rik (NM_177617.2,3161-3179).
gaaccgcctgtgctaaaca

SEQ ID NO: 573822 - DNA, 19 bp, Mus musculus
  siRNA target sequence for D330014H01Rik (NM_177617.2,3164-3182).
ccgcctgtgctaaacatga

SEQ ID NO: 573823 - DNA, 19 bp, Mus musculus
  siRNA target sequence for D330014H01Rik (NM_177617.2,3166-3184).
gcctgtgctaaacatgaaa

SEQ ID NO: 573824 - DNA, 19 bp, Mus musculus
  siRNA target sequence for D330014H01Rik (NM_177617.2,3167-3185).
cctgtgctaaacatgaaat

SEQ ID NO: 573825 - DNA, 19 bp, Mus musculus
  siRNA target sequence for D330014H01Rik (NM_177617.2,3210-3228).
gatccccactggtattcat

SEQ ID NO: 573826 - DNA, 19 bp, Mus musculus
  siRNA target sequence for D330014H01Rik (NM_177617.2,3573-3591).
ccaacatgacacgtcttta

SEQ ID NO: 573827 - DNA, 19 bp, Mus musculus
  siRNA target sequence for D330014H01Rik (NM_177617.2,3574-3592).
caacatgacacgtctttat

SEQ ID NO: 573828 - DNA, 19 bp, Mus musculus
  siRNA target sequence for D330014H01Rik (NM_177617.2,3664-3682).
ctgcttcttccattccata

SEQ ID NO: 573829 - DNA, 19 bp, Mus musculus
  siRNA target sequence for D330014H01Rik (NM_177617.2,3688-3706).
cgagcgcaaaaaattttta

SEQ ID NO: 573830 - DNA, 19 bp, Mus musculus
  siRNA target sequence for D330014H01Rik (NM_177617.2,3803-3821).
ccctgggacgcgctcaaat

SEQ ID NO: 573831 - DNA, 19 bp, Mus musculus
  siRNA target sequence for D330014H01Rik (NM_177617.2,3804-3822).
cctgggacgcgctcaaata

SEQ ID NO: 573832 - DNA, 19 bp, Mus musculus
  siRNA target sequence for D330014H01Rik (NM_177617.2,3807-3825).
gggacgcgctcaaatacct

SEQ ID NO: 573833 - DNA, 19 bp, Mus musculus
  siRNA target sequence for D330014H01Rik (NM_177617.2,3875-3893).
cgtctgctcaccacctata

SEQ ID NO: 573834 - DNA, 19 bp, Mus musculus
  siRNA target sequence for D330014H01Rik (NM_177617.2,3876-3894).
gtctgctcaccacctatat

SEQ ID NO: 573835 - DNA, 19 bp, Mus musculus
  siRNA target sequence for D330014H01Rik (NM_177617.2,3880-3898).
gctcaccacctatatcaat

SEQ ID NO: 573836 - DNA, 19 bp, Mus musculus
  siRNA target sequence for D330014H01Rik (NM_177617.2,3886-3904).
cacctatatcaatgattat

SEQ ID NO: 573837 - DNA, 19 bp, Mus musculus
  siRNA target sequence for D330014H01Rik (NM_177617.2,3888-3906).
cctatatcaatgattattt

SEQ ID NO: 573838 - DNA, 19 bp, Mus musculus
  siRNA target sequence for D330014H01Rik (NM_177617.2,3943-3961).
gtctgtactggacacttat

SEQ ID NO: 573839 - DNA, 19 bp, Mus musculus
  siRNA target sequence for D330014H01Rik (NM_177617.2,3947-3965).
gtactggacacttattaca

SEQ ID NO: 573840 - DNA, 19 bp, Mus musculus
  siRNA target sequence for D330014H01Rik (NM_177617.2,3977-3995).
gggagcttggcctcttaca

SEQ ID NO: 573841 - DNA, 19 bp, Mus musculus
  siRNA target sequence for D330014H01Rik (NM_177617.2,3978-3996).
ggagcttggcctcttacaa

SEQ ID NO: 573842 - DNA, 19 bp, Mus musculus
  siRNA target sequence for D330014H01Rik (NM_177617.2,3985-4003).
ggcctcttacaaagaatat

SEQ ID NO: 573843 - DNA, 19 bp, Mus musculus
  siRNA target sequence for D330014H01Rik (NM_177617.2,4206-4224).
ccgagatgatcgactatga

SEQ ID NO: 573844 - DNA, 19 bp, Mus musculus
  siRNA target sequence for D330014H01Rik (NM_177617.2,4283-4301).
gagatccagagatataaca

SEQ ID NO: 573845 - DNA, 19 bp, Mus musculus
  siRNA target sequence for D330014H01Rik (NM_177617.2,4355-4373).
ggcctcatcgtcatgtcaa

SEQ ID NO: 573846 - DNA, 19 bp, Mus musculus
  siRNA target sequence for D330014H01Rik (NM_177617.2,4358-4376).
ctcatcgtcatgtcaacaa

SEQ ID NO: 573847 - DNA, 19 bp, Mus musculus
  siRNA target sequence for D330014H01Rik (NM_177617.2,4482-4500).
ctgtgcgtgtggaacagtt

SEQ ID NO: 573848 - DNA, 19 bp, Mus musculus
  siRNA target sequence for D330014H01Rik (NM_177617.2,4593-4611).
ctgccgctcgccaaaacaa

SEQ ID NO: 573849 - DNA, 19 bp, Mus musculus
  siRNA target sequence for D330014H01Rik (NM_177617.2,4595-4613).
gccgctcgccaaaacaaca

SEQ ID NO: 573850 - DNA, 19 bp, Mus musculus
  siRNA target sequence for D330014H01Rik (NM_177617.2,4596-4614).
ccgctcgccaaaacaacat

SEQ ID NO: 573851 - DNA, 19 bp, Mus musculus
  siRNA target sequence for D330014H01Rik (NM_177617.2,4727-4745).
ggctgggaccgaaagaatt

SEQ ID NO: 573852 - DNA, 19 bp, Mus musculus
  siRNA target sequence for D330014H01Rik (NM_177617.2,4849-4867).
ctgtccctgctattattat

SEQ ID NO: 573853 - DNA, 19 bp, Mus musculus
  siRNA target sequence for D330014H01Rik (NM_177617.2,4922-4940).
cgatctggatccatgacat

SEQ ID NO: 573854 - DNA, 19 bp, Mus musculus
  siRNA target sequence for E230025K15 (NM_177809.2,144-162).
gcttccagctggaagactt

SEQ ID NO: 573855 - DNA, 19 bp, Mus musculus
  siRNA target sequence for E230025K15 (NM_177809.2,245-263).
gtcggctatgcgaacacat

SEQ ID NO: 573856 - DNA, 19 bp, Mus musculus
  siRNA target sequence for E230025K15 (NM_177809.2,249-267).
gctatgcgaacacattcaa

SEQ ID NO: 573857 - DNA, 19 bp, Mus musculus
  siRNA target sequence for E230025K15 (NM_177809.2,270-288).
gcatccgcatggtgtacaa

SEQ ID NO: 573858 - DNA, 19 bp, Mus musculus
  siRNA target sequence for E230025K15 (NM_177809.2,286-304).
caagagggagcgtgtgttt

SEQ ID NO: 573859 - DNA, 19 bp, Mus musculus
  siRNA target sequence for E230025K15 (NM_177809.2,335-353).
gccagcatcgccatctata

SEQ ID NO: 573860 - DNA, 19 bp, Mus musculus
  siRNA target sequence for E230025K15 (NM_177809.2,552-570).
gggaagctagccatggatt

SEQ ID NO: 573861 - DNA, 19 bp, Mus musculus
  siRNA target sequence for E230025K15 (NM_177809.2,557-575).
gctagccatggattgaagt

SEQ ID NO: 573862 - DNA, 19 bp, Mus musculus
  siRNA target sequence for E230025K15 (NM_177809.2,607-625).
gcactgcattgcaaccatt

SEQ ID NO: 573863 - DNA, 19 bp, Mus musculus
  siRNA target sequence for E230025K15 (NM_177809.2,683-701).
gacatcccgggatattgct

SEQ ID NO: 573864 - DNA, 19 bp, Mus musculus
  siRNA target sequence for E230025K15 (NM_177809.2,791-809).
ggcattgcaggggcaattt

SEQ ID NO: 573865 - DNA, 19 bp, Mus musculus
  siRNA target sequence for E230025K15 (NM_177809.2,817-835).
gacagcaactccaatggat

SEQ ID NO: 573866 - DNA, 19 bp, Mus musculus
  siRNA target sequence for E230025K15 (NM_177809.2,827-845).
ccaatggatgtcgtgaaaa

SEQ ID NO: 573867 - DNA, 19 bp, Mus musculus
  siRNA target sequence for E230025K15 (NM_177809.2,838-856).
cgtgaaaagtcgaatccaa

SEQ ID NO: 573868 - DNA, 19 bp, Mus musculus
  siRNA target sequence for E230025K15 (NM_177809.2,854-872).
caagcagatggggtctatt

SEQ ID NO: 573869 - DNA, 19 bp, Mus musculus
  siRNA target sequence for E230025K15 (NM_177809.2,857-875).
gcagatggggtctatttaa

SEQ ID NO: 573870 - DNA, 19 bp, Mus musculus
  siRNA target sequence for Ehhadh (NM_023737.2,51-69).
cccactccctggctatgat

SEQ ID NO: 573871 - DNA, 19 bp, Mus musculus
  siRNA target sequence for Ehhadh (NM_023737.2,95-113).
gccatcagtccaactgtaa

SEQ ID NO: 573872 - DNA, 19 bp, Mus musculus
  siRNA target sequence for Ehhadh (NM_023737.2,96-114).
ccatcagtccaactgtaat

SEQ ID NO: 573873 - DNA, 19 bp, Mus musculus
  siRNA target sequence for Ehhadh (NM_023737.2,100-118).
cagtccaactgtaatcaca

SEQ ID NO: 573874 - DNA, 19 bp, Mus musculus
  siRNA target sequence for Ehhadh (NM_023737.2,159-177).
cggttagagccatagtgat

SEQ ID NO: 573875 - DNA, 19 bp, Mus musculus
  siRNA target sequence for Ehhadh (NM_023737.2,180-198).
gtggagcaaatgacaactt

SEQ ID NO: 573876 - DNA, 19 bp, Mus musculus
  siRNA target sequence for Ehhadh (NM_023737.2,255-273).
gcttggtagatgaaataca

SEQ ID NO: 573877 - DNA, 19 bp, Mus musculus
  siRNA target sequence for Ehhadh (NM_023737.2,461-479).
gttgctcttgacttaatta

SEQ ID NO: 573878 - DNA, 19 bp, Mus musculus
  siRNA target sequence for Ehhadh (NM_023737.2,464-482).
gctcttgacttaattacct

SEQ ID NO: 573879 - DNA, 19 bp, Mus musculus
  siRNA target sequence for Ehhadh (NM_023737.2,522-540).
gaattctggatgtagttgt

SEQ ID NO: 573880 - DNA, 19 bp, Mus musculus
  siRNA target sequence for Ehhadh (NM_023737.2,527-545).
ctggatgtagttgtaaagt

SEQ ID NO: 573881 - DNA, 19 bp, Mus musculus
  siRNA target sequence for Ehhadh (NM_023737.2,529-547).
ggatgtagttgtaaagtca

SEQ ID NO: 573882 - DNA, 19 bp, Mus musculus
  siRNA target sequence for Ehhadh (NM_023737.2,544-562).
gtcagacccagttgaagaa

SEQ ID NO: 573883 - DNA, 19 bp, Mus musculus
  siRNA target sequence for Ehhadh (NM_023737.2,575-593).
gctcagacggttataggta

SEQ ID NO: 573884 - DNA, 19 bp, Mus musculus
  siRNA target sequence for Ehhadh (NM_023737.2,576-594).
ctcagacggttataggtaa

SEQ ID NO: 573885 - DNA, 19 bp, Mus musculus
  siRNA target sequence for Ehhadh (NM_023737.2,602-620).
gaaccccgcaggatcctaa

SEQ ID NO: 573886 - DNA, 19 bp, Mus musculus
  siRNA target sequence for Ehhadh (NM_023737.2,605-623).
ccccgcaggatcctaaaca

SEQ ID NO: 573887 - DNA, 19 bp, Mus musculus
  siRNA target sequence for Ehhadh (NM_023737.2,741-759).
ccgtgaagcatccatatga

SEQ ID NO: 573888 - DNA, 19 bp, Mus musculus
  siRNA target sequence for Ehhadh (NM_023737.2,742-760).
cgtgaagcatccatatgaa

SEQ ID NO: 573889 - DNA, 19 bp, Mus musculus
  siRNA target sequence for Ehhadh (NM_023737.2,822-840).
ccctgcagtacgccttttt

SEQ ID NO: 573890 - DNA, 19 bp, Mus musculus
  siRNA target sequence for Ehhadh (NM_023737.2,823-841).
cctgcagtacgcctttttt

SEQ ID NO: 573891 - DNA, 19 bp, Mus musculus
  siRNA target sequence for Ehhadh (NM_023737.2,826-844).
gcagtacgccttttttgct

SEQ ID NO: 573892 - DNA, 19 bp, Mus musculus
  siRNA target sequence for Ehhadh (NM_023737.2,950-968).
cgaggcatcgccatctctt

SEQ ID NO: 573893 - DNA, 19 bp, Mus musculus
  siRNA target sequence for Ehhadh (NM_023737.2,1126-1144).
gctttcgagtgtggattta

SEQ ID NO: 573894 - DNA, 19 bp, Mus musculus
  siRNA target sequence for Ehhadh (NM_023737.2,1131-1149).
cgagtgtggatttagtgat

SEQ ID NO: 573895 - DNA, 19 bp, Mus musculus
  siRNA target sequence for Ehhadh (NM_023737.2,1132-1150).
gagtgtggatttagtgatt

SEQ ID NO: 573896 - DNA, 19 bp, Mus musculus
  siRNA target sequence for Ehhadh (NM_023737.2,1154-1172).
gcagtgttcgaagatatga

SEQ ID NO: 573897 - DNA, 19 bp, Mus musculus
  siRNA target sequence for Ehhadh (NM_023737.2,1155-1173).
cagtgttcgaagatatgaa

SEQ ID NO: 573898 - DNA, 19 bp, Mus musculus
  siRNA target sequence for Ehhadh (NM_023737.2,1223-1241).
gcctttctgtgcaccaata

SEQ ID NO: 573899 - DNA, 19 bp, Mus musculus
  siRNA target sequence for Ehhadh (NM_023737.2,1348-1366).
cattcctagccgatactct

SEQ ID NO: 573900 - DNA, 19 bp, Mus musculus
  siRNA target sequence for Ehhadh (NM_023737.2,1386-1404).
cagtcatgagcttatccaa

SEQ ID NO: 573901 - DNA, 19 bp, Mus musculus
  siRNA target sequence for Ehhadh (NM_023737.2,1388-1406).
gtcatgagcttatccaaaa

SEQ ID NO: 573902 - DNA, 19 bp, Mus musculus
  siRNA target sequence for Ehhadh (NM_023737.2,1393-1411).
gagcttatccaaaaggatt

SEQ ID NO: 573903 - DNA, 19 bp, Mus musculus
  siRNA target sequence for Ehhadh (NM_023737.2,1430-1448).
gttggtaactgctatggat

SEQ ID NO: 573904 - DNA, 19 bp, Mus musculus
  siRNA target sequence for Ehhadh (NM_023737.2,1483-1501).
ccagggctatttcttgata

SEQ ID NO: 573905 - DNA, 19 bp, Mus musculus
  siRNA target sequence for Ehhadh (NM_023737.2,1664-1682).
cgaaagaggggcaatacca

SEQ ID NO: 573906 - DNA, 19 bp, Mus musculus
  siRNA target sequence for Ehhadh (NM_023737.2,1681-1699).
caggtactccccaattgct

SEQ ID NO: 573907 - DNA, 19 bp, Mus musculus
  siRNA target sequence for Ehhadh (NM_023737.2,1739-1757).
ggtaagggctggtatcagt

SEQ ID NO: 573908 - DNA, 19 bp, Mus musculus
  siRNA target sequence for Ehhadh (NM_023737.2,1740-1758).
gtaagggctggtatcagta

SEQ ID NO: 573909 - DNA, 19 bp, Mus musculus
  siRNA target sequence for Ehhadh (NM_023737.2,1811-1829).
ctgtcacagtatagagaaa

SEQ ID NO: 573910 - DNA, 19 bp, Mus musculus
  siRNA target sequence for Ehhadh (NM_023737.2,1870-1888).
cctggagcgttgcttatat

SEQ ID NO: 573911 - DNA, 19 bp, Mus musculus
  siRNA target sequence for Ehhadh (NM_023737.2,1871-1889).
ctggagcgttgcttatatt

SEQ ID NO: 573912 - DNA, 19 bp, Mus musculus
  siRNA target sequence for Ehhadh (NM_023737.2,1935-1953).
ctagcccagagcacattga

SEQ ID NO: 573913 - DNA, 19 bp, Mus musculus
  siRNA target sequence for Ehhadh (NM_023737.2,2165-2183).
ccccatagcagcaaactgt

SEQ ID NO: 573914 - DNA, 19 bp, Mus musculus
  siRNA target sequence for Gif (NM_008118.2,419-437).
gtccactctactgaagaaa

SEQ ID NO: 573915 - DNA, 19 bp, Mus musculus
  siRNA target sequence for Gif (NM_008118.2,624-642).
gccctgacctgtatgtaca

SEQ ID NO: 573916 - DNA, 19 bp, Mus musculus
  siRNA target sequence for Gif (NM_008118.2,627-645).
ctgacctgtatgtacaaca

SEQ ID NO: 573917 - DNA, 19 bp, Mus musculus
  siRNA target sequence for Gif (NM_008118.2,631-649).
cctgtatgtacaacaagat

SEQ ID NO: 573918 - DNA, 19 bp, Mus musculus
  siRNA target sequence for Gif (NM_008118.2,651-669).
cctgtgggttctcaagaaa

SEQ ID NO: 573919 - DNA, 19 bp, Mus musculus
  siRNA target sequence for Gif (NM_008118.2,652-670).
ctgtgggttctcaagaaaa

SEQ ID NO: 573920 - DNA, 19 bp, Mus musculus
  siRNA target sequence for Gif (NM_008118.2,654-672).
gtgggttctcaagaaaact

SEQ ID NO: 573921 - DNA, 19 bp, Mus musculus
  siRNA target sequence for Gif (NM_008118.2,742-760).
gcatcatcggagacatcta

SEQ ID NO: 573922 - DNA, 19 bp, Mus musculus
  siRNA target sequence for Gif (NM_008118.2,801-819).
gagcaacctaccaagaagt

SEQ ID NO: 573923 - DNA, 19 bp, Mus musculus
  siRNA target sequence for Gif (NM_008118.2,828-846).
gagaagactatgcatacaa

SEQ ID NO: 573924 - DNA, 19 bp, Mus musculus
  siRNA target sequence for Gif (NM_008118.2,835-853).
ctatgcatacaatactcaa

SEQ ID NO: 573925 - DNA, 19 bp, Mus musculus
  siRNA target sequence for Gif (NM_008118.2,844-862).
caatactcaacgagattaa

SEQ ID NO: 573926 - DNA, 19 bp, Mus musculus
  siRNA target sequence for Gif (NM_008118.2,930-948).
ctagatgtgccccaagtaa

SEQ ID NO: 573927 - DNA, 19 bp, Mus musculus
  siRNA target sequence for Gif (NM_008118.2,933-951).
gatgtgccccaagtaacat

SEQ ID NO: 573928 - DNA, 19 bp, Mus musculus
  siRNA target sequence for Gif (NM_008118.2,998-1016).
cccggtccccacttcagta

SEQ ID NO: 573929 - DNA, 19 bp, Mus musculus
  siRNA target sequence for Gif (NM_008118.2,1005-1023).
cccacttcagtatctaaca

SEQ ID NO: 573930 - DNA, 19 bp, Mus musculus
  siRNA target sequence for Gif (NM_008118.2,1007-1025).
cacttcagtatctaacatt

SEQ ID NO: 573931 - DNA, 19 bp, Mus musculus
  siRNA target sequence for Gif (NM_008118.2,1018-1036).
ctaacattaccgtcatata

SEQ ID NO: 573932 - DNA, 19 bp, Mus musculus
  siRNA target sequence for Gif (NM_008118.2,1027-1045).
ccgtcatatataccataaa

SEQ ID NO: 573933 - DNA, 19 bp, Mus musculus
  siRNA target sequence for Gif (NM_008118.2,1029-1047).
gtcatatataccataaaca

SEQ ID NO: 573934 - DNA, 19 bp, Mus musculus
  siRNA target sequence for Gif (NM_008118.2,1057-1075).
gaggggttgatctgctttt

SEQ ID NO: 573935 - DNA, 19 bp, Mus musculus
  siRNA target sequence for Gif (NM_008118.2,1061-1079).
ggttgatctgcttttcaat

SEQ ID NO: 573936 - DNA, 19 bp, Mus musculus
  siRNA target sequence for Gif (NM_008118.2,1088-1106).
cgaggttagtgtgaaaagt

SEQ ID NO: 573937 - DNA, 19 bp, Mus musculus
  siRNA target sequence for Gif (NM_008118.2,1278-1296).
gaaggggttgcttactata

SEQ ID NO: 573938 - DNA, 19 bp, Mus musculus
  siRNA target sequence for Mtch1 (NM_019880.2,679-697).
gaagacctcactcaagaaa

SEQ ID NO: 573939 - DNA, 19 bp, Mus musculus
  siRNA target sequence for Mtch1 (NM_019880.2,682-700).
gacctcactcaagaaagtt

SEQ ID NO: 573940 - DNA, 19 bp, Mus musculus
  siRNA target sequence for Mtch1 (NM_019880.2,684-702).
cctcactcaagaaagttgt

SEQ ID NO: 573941 - DNA, 19 bp, Mus musculus
  siRNA target sequence for Mtch1 (NM_019880.2,831-849).
gttctattgggaagatctt

SEQ ID NO: 573942 - DNA, 19 bp, Mus musculus
  siRNA target sequence for Mtch1 (NM_019880.2,870-888).
gattcttcgttggcttaat

SEQ ID NO: 573943 - DNA, 19 bp, Mus musculus
  siRNA target sequence for Mtch1 (NM_019880.2,1047-1065).
ggagctacaccaagtttgt

SEQ ID NO: 573944 - DNA, 19 bp, Mus musculus
  siRNA target sequence for Mtch1 (NM_019880.2,1050-1068).
gctacaccaagtttgtgat

SEQ ID NO: 573945 - DNA, 19 bp, Mus musculus
  siRNA target sequence for Mtch1 (NM_019880.2,1161-1179).
cgtattcccctgtgttcaa

SEQ ID NO: 573946 - DNA, 19 bp, Mus musculus
  siRNA target sequence for Mtch2 (NM_019758.1,101-119).
cgctcatgtacgtgaaagt

SEQ ID NO: 573947 - DNA, 19 bp, Mus musculus
  siRNA target sequence for Mtch2 (NM_019758.1,141-159).
gcctcttcctccaacaata

SEQ ID NO: 573948 - DNA, 19 bp, Mus musculus
  siRNA target sequence for Mtch2 (NM_019758.1,152-170).
caacaataggacgaaatat

SEQ ID NO: 573949 - DNA, 19 bp, Mus musculus
  siRNA target sequence for Mtch2 (NM_019758.1,304-322).
catgggaaagtcttacagt

SEQ ID NO: 573950 - DNA, 19 bp, Mus musculus
  siRNA target sequence for Mtch2 (NM_019758.1,307-325).
gggaaagtcttacagtatt

SEQ ID NO: 573951 - DNA, 19 bp, Mus musculus
  siRNA target sequence for Mtch2 (NM_019758.1,348-366).
ggagttaggatctgtaact

SEQ ID NO: 573952 - DNA, 19 bp, Mus musculus
  siRNA target sequence for Mtch2 (NM_019758.1,355-373).
ggatctgtaactgtacaaa

SEQ ID NO: 573953 - DNA, 19 bp, Mus musculus
  siRNA target sequence for Mtch2 (NM_019758.1,389-407).
cctttgaccgagttatcaa

SEQ ID NO: 573954 - DNA, 19 bp, Mus musculus
  siRNA target sequence for Mtch2 (NM_019758.1,390-408).
ctttgaccgagttatcaaa

SEQ ID NO: 573955 - DNA, 19 bp, Mus musculus
  siRNA target sequence for Mtch2 (NM_019758.1,394-412).
gaccgagttatcaaagaga

SEQ ID NO: 573956 - DNA, 19 bp, Mus musculus
  siRNA target sequence for Mtch2 (NM_019758.1,502-520).
ggcagagagtctaagtact

SEQ ID NO: 573957 - DNA, 19 bp, Mus musculus
  siRNA target sequence for Mtch2 (NM_019758.1,526-544).
ctgtgtgactccatagtaa

SEQ ID NO: 573958 - DNA, 19 bp, Mus musculus
  siRNA target sequence for Mtch2 (NM_019758.1,530-548).
gtgactccatagtaaccat

SEQ ID NO: 573959 - DNA, 19 bp, Mus musculus
  siRNA target sequence for Mtch2 (NM_019758.1,635-653).
cactggcctatctcatcaa

SEQ ID NO: 573960 - DNA, 19 bp, Mus musculus
  siRNA target sequence for Mtch2 (NM_019758.1,641-659).
cctatctcatcaataccta

SEQ ID NO: 573961 - DNA, 19 bp, Mus musculus
  siRNA target sequence for Mtch2 (NM_019758.1,664-682).
ctggacagtggggtttcta

SEQ ID NO: 573962 - DNA, 19 bp, Mus musculus
  siRNA target sequence for Mtch2 (NM_019758.1,674-692).
gggtttctaccatgaatga

SEQ ID NO: 573963 - DNA, 19 bp, Mus musculus
  siRNA target sequence for Mtch2 (NM_019758.1,680-698).
ctaccatgaatgaaatgaa

SEQ ID NO: 573964 - DNA, 19 bp, Mus musculus
  siRNA target sequence for Mtch2 (NM_019758.1,721-739).
ggattctttgccagtatgt

SEQ ID NO: 573965 - DNA, 19 bp, Mus musculus
  siRNA target sequence for Mtch2 (NM_019758.1,722-740).
gattctttgccagtatgtt

SEQ ID NO: 573966 - DNA, 19 bp, Mus musculus
  siRNA target sequence for Mtch2 (NM_019758.1,769-787).
cttatggccgtcaacaact

SEQ ID NO: 573967 - DNA, 19 bp, Mus musculus
  siRNA target sequence for Mtch2 (NM_019758.1,799-817).
ggtggatctcctccttatt

SEQ ID NO: 573968 - DNA, 19 bp, Mus musculus
  siRNA target sequence for Mtch2 (NM_019758.1,811-829).
ccttattccccaatataca

SEQ ID NO: 573969 - DNA, 19 bp, Mus musculus
  siRNA target sequence for Mtch2 (NM_019758.1,845-863).
gctggtgcatgctacaaaa

SEQ ID NO: 573970 - DNA, 19 bp, Mus musculus
  siRNA target sequence for Mtch2 (NM_019758.1,856-874).
ctacaaaaagcgggaaata

SEQ ID NO: 573971 - DNA, 19 bp, Mus musculus
  siRNA target sequence for Mtch2 (NM_019758.1,917-935).
ggaagacttactgttatga

SEQ ID NO: 573972 - DNA, 19 bp, Mus musculus
  siRNA target sequence for Mtch2 (NM_019758.1,929-947).
gttatgacctaagaatgtt

SEQ ID NO: 573973 - DNA, 19 bp, Mus musculus
  siRNA target sequence for Nup155 (NM_133227.2,94-112).
cggtgctgggctctatgat

SEQ ID NO: 573974 - DNA, 19 bp, Mus musculus
  siRNA target sequence for Nup155 (NM_133227.2,261-279).
ggaatgtccgacatggatt

SEQ ID NO: 573975 - DNA, 19 bp, Mus musculus
  siRNA target sequence for Nup155 (NM_133227.2,262-280).
gaatgtccgacatggatta

SEQ ID NO: 573976 - DNA, 19 bp, Mus musculus
  siRNA target sequence for Nup155 (NM_133227.2,355-373).
cgcctgagctggttgaaca

SEQ ID NO: 573977 - DNA, 19 bp, Mus musculus
  siRNA target sequence for Nup155 (NM_133227.2,358-376).
ctgagctggttgaacagtt

SEQ ID NO: 573978 - DNA, 19 bp, Mus musculus
  siRNA target sequence for Nup155 (NM_133227.2,424-442).
gcagagcctggcttacgat

SEQ ID NO: 573979 - DNA, 19 bp, Mus musculus
  siRNA target sequence for Nup155 (NM_133227.2,425-443).
cagagcctggcttacgatt

SEQ ID NO: 573980 - DNA, 19 bp, Mus musculus
  siRNA target sequence for Nup155 (NM_133227.2,429-447).
gcctggcttacgattgaca

SEQ ID NO: 573981 - DNA, 19 bp, Mus musculus
  siRNA target sequence for Nup155 (NM_133227.2,478-496).
gaggtgaccttgcctattt

SEQ ID NO: 573982 - DNA, 19 bp, Mus musculus
  siRNA target sequence for Nup155 (NM_133227.2,481-499).
gtgaccttgcctattttga

SEQ ID NO: 573983 - DNA, 19 bp, Mus musculus
  siRNA target sequence for Nup155 (NM_133227.2,502-520).
gactcagtgagacaattct

SEQ ID NO: 573984 - DNA, 19 bp, Mus musculus
  siRNA target sequence for Nup155 (NM_133227.2,525-543).
gtggggcttgtgaaaccaa

SEQ ID NO: 573985 - DNA, 19 bp, Mus musculus
  siRNA target sequence for Nup155 (NM_133227.2,530-548).
gcttgtgaaaccaaaagct

SEQ ID NO: 573986 - DNA, 19 bp, Mus musculus
  siRNA target sequence for Nup155 (NM_133227.2,587-605).
ggcaacccctgtggatata

SEQ ID NO: 573987 - DNA, 19 bp, Mus musculus
  siRNA target sequence for Nup155 (NM_133227.2,592-610).
cccctgtggatatagtaat

SEQ ID NO: 573988 - DNA, 19 bp, Mus musculus
  siRNA target sequence for Nup155 (NM_133227.2,620-638).
cagctatgctaatgtacaa

SEQ ID NO: 573989 - DNA, 19 bp, Mus musculus
  siRNA target sequence for Nup155 (NM_133227.2,715-733).
cggacaacacgtacctttt

SEQ ID NO: 573990 - DNA, 19 bp, Mus musculus
  siRNA target sequence for Nup155 (NM_133227.2,716-734).
ggacaacacgtacctttta

SEQ ID NO: 573991 - DNA, 19 bp, Mus musculus
  siRNA target sequence for Nup155 (NM_133227.2,717-735).
gacaacacgtaccttttaa

SEQ ID NO: 573992 - DNA, 19 bp, Mus musculus
  siRNA target sequence for Nup155 (NM_133227.2,748-766).
cggataatggcagaatctt

SEQ ID NO: 573993 - DNA, 19 bp, Mus musculus
  siRNA target sequence for Nup155 (NM_133227.2,764-782).
ctttctggctggaaaggat

SEQ ID NO: 573994 - DNA, 19 bp, Mus musculus
  siRNA target sequence for Nup155 (NM_133227.2,774-792).
ggaaaggatggctgtttgt

SEQ ID NO: 573995 - DNA, 19 bp, Mus musculus
  siRNA target sequence for Nup155 (NM_133227.2,787-805).
gtttgtacgaagtagcata

SEQ ID NO: 573996 - DNA, 19 bp, Mus musculus
  siRNA target sequence for Nup155 (NM_133227.2,819-837).
ggctggttcagtcaaagat

SEQ ID NO: 573997 - DNA, 19 bp, Mus musculus
  siRNA target sequence for Nup155 (NM_133227.2,835-853).
gatgtaggaagatcaatca

SEQ ID NO: 573998 - DNA, 19 bp, Mus musculus
  siRNA target sequence for Nup155 (NM_133227.2,912-930).
gatgatcctattgttcaaa

SEQ ID NO: 573999 - DNA, 19 bp, Mus musculus
  siRNA target sequence for Nup155 (NM_133227.2,918-936).
cctattgttcaaattgaaa

SEQ ID NO: 574000 - DNA, 19 bp, Mus musculus
  siRNA target sequence for Nup155 (NM_133227.2,967-985).
gatcggagaaaggagttat

SEQ ID NO: 574001 - DNA, 19 bp, Mus musculus
  siRNA target sequence for Nup155 (NM_133227.2,979-997).
gagttatacaggtttatga

SEQ ID NO: 574002 - DNA, 19 bp, Mus musculus
  siRNA target sequence for Nup155 (NM_133227.2,981-999).
gttatacaggtttatgatt

SEQ ID NO: 574003 - DNA, 19 bp, Mus musculus
  siRNA target sequence for Nup155 (NM_133227.2,1027-1045).
gagttgcttcagtttcaca

SEQ ID NO: 574004 - DNA, 19 bp, Mus musculus
  siRNA target sequence for Nup155 (NM_133227.2,1096-1114).
ccgtctttaagccaattgt

SEQ ID NO: 574005 - DNA, 19 bp, Mus musculus
  siRNA target sequence for Nup155 (NM_133227.2,1097-1115).
cgtctttaagccaattgtt

SEQ ID NO: 574006 - DNA, 19 bp, Mus musculus
  siRNA target sequence for Nup155 (NM_133227.2,1176-1194).
gcaggtgtaaggctgtatt

SEQ ID NO: 574007 - DNA, 19 bp, Mus musculus
  siRNA target sequence for Nup155 (NM_133227.2,1177-1195).
caggtgtaaggctgtattt

SEQ ID NO: 574008 - DNA, 19 bp, Mus musculus
  siRNA target sequence for Nup155 (NM_133227.2,1179-1197).
ggtgtaaggctgtatttca

SEQ ID NO: 574009 - DNA, 19 bp, Mus musculus
  siRNA target sequence for Nup155 (NM_133227.2,1198-1216).
gcacttgtccgtttagaca

SEQ ID NO: 574010 - DNA, 19 bp, Mus musculus
  siRNA target sequence for Nup155 (NM_133227.2,1208-1226).
gtttagacagccattagct

SEQ ID NO: 574011 - DNA, 19 bp, Mus musculus
  siRNA target sequence for Nup155 (NM_133227.2,1256-1274).
ccggttacctcctggattt

SEQ ID NO: 574012 - DNA, 19 bp, Mus musculus
  siRNA target sequence for Nup155 (NM_133227.2,1257-1275).
cggttacctcctggatttt

SEQ ID NO: 574013 - DNA, 19 bp, Mus musculus
  siRNA target sequence for Nup155 (NM_133227.2,1259-1277).
gttacctcctggattttca

SEQ ID NO: 574014 - DNA, 19 bp, Mus musculus
  siRNA target sequence for Nup155 (NM_133227.2,1308-1326).
gtgcacaaagcactttaca

SEQ ID NO: 574015 - DNA, 19 bp, Mus musculus
  siRNA target sequence for Nup155 (NM_133227.2,1310-1328).
gcacaaagcactttacagt

SEQ ID NO: 574016 - DNA, 19 bp, Mus musculus
  siRNA target sequence for Nup155 (NM_133227.2,1313-1331).
caaagcactttacagtaaa

SEQ ID NO: 574017 - DNA, 19 bp, Mus musculus
  siRNA target sequence for Nup155 (NM_133227.2,1318-1336).
cactttacagtaaaggaat

SEQ ID NO: 574018 - DNA, 19 bp, Mus musculus
  siRNA target sequence for Nup155 (NM_133227.2,1327-1345).
gtaaaggaattttactgat

SEQ ID NO: 574019 - DNA, 19 bp, Mus musculus
  siRNA target sequence for Nup155 (NM_133227.2,1382-1400).
gtgtgtcaaccatgataca

SEQ ID NO: 574020 - DNA, 19 bp, Mus musculus
  siRNA target sequence for Nup155 (NM_133227.2,1388-1406).
caaccatgatacatttcct

SEQ ID NO: 574021 - DNA, 19 bp, Mus musculus
  siRNA target sequence for Nup155 (NM_133227.2,1433-1451).
gatgacaacccgtgttgat

SEQ ID NO: 574022 - DNA, 19 bp, Mus musculus
  siRNA target sequence for Nup155 (NM_133227.2,1462-1480).
gggctctctctgcaataga

SEQ ID NO: 574023 - DNA, 19 bp, Mus musculus
  siRNA target sequence for Nup155 (NM_133227.2,1510-1528).
cgttaaataaagatcatat

SEQ ID NO: 574024 - DNA, 19 bp, Mus musculus
  siRNA target sequence for Nup155 (NM_133227.2,1524-1542).
catattccaataactgatt

SEQ ID NO: 574025 - DNA, 19 bp, Mus musculus
  siRNA target sequence for Nup155 (NM_133227.2,1537-1555).
ctgattcgccagttgttgt

SEQ ID NO: 574026 - DNA, 19 bp, Mus musculus
  siRNA target sequence for Nup155 (NM_133227.2,1543-1561).
cgccagttgttgtacaaca

SEQ ID NO: 574027 - DNA, 19 bp, Mus musculus
  siRNA target sequence for Nup155 (NM_133227.2,1571-1589).
gcctccaaagaaattcgtt

SEQ ID NO: 574028 - DNA, 19 bp, Mus musculus
  siRNA target sequence for Nup155 (NM_133227.2,1597-1615).
cagcacagggtagtcttat

SEQ ID NO: 574029 - DNA, 19 bp, Mus musculus
  siRNA target sequence for Nup155 (NM_133227.2,1599-1617).
gcacagggtagtcttatgt

SEQ ID NO: 574030 - DNA, 19 bp, Mus musculus
  siRNA target sequence for Nup155 (NM_133227.2,1605-1623).
ggtagtcttatgtttcaca

SEQ ID NO: 574031 - DNA, 19 bp, Mus musculus
  siRNA target sequence for Nup155 (NM_133227.2,1606-1624).
gtagtcttatgtttcacaa

SEQ ID NO: 574032 - DNA, 19 bp, Mus musculus
  siRNA target sequence for Nup155 (NM_133227.2,1729-1747).
gtgcaacttgccttattct

SEQ ID NO: 574033 - DNA, 19 bp, Mus musculus
  siRNA target sequence for Nup155 (NM_133227.2,1789-1807).
gggcaacacgggcattctt

SEQ ID NO: 574034 - DNA, 19 bp, Mus musculus
  siRNA target sequence for Nup155 (NM_133227.2,1790-1808).
ggcaacacgggcattcttt

SEQ ID NO: 574035 - DNA, 19 bp, Mus musculus
  siRNA target sequence for Nup155 (NM_133227.2,1791-1809).
gcaacacgggcattcttta

SEQ ID NO: 574036 - DNA, 19 bp, Mus musculus
  siRNA target sequence for Nup155 (NM_133227.2,1795-1813).
cacgggcattctttaggta

SEQ ID NO: 574037 - DNA, 19 bp, Mus musculus
  siRNA target sequence for Nup155 (NM_133227.2,1818-1836).
ggtgaggcacagatgagat

SEQ ID NO: 574038 - DNA, 19 bp, Mus musculus
  siRNA target sequence for Nup155 (NM_133227.2,1919-1937).
gagtccctatccaaatcca

SEQ ID NO: 574039 - DNA, 19 bp, Mus musculus
  siRNA target sequence for Nup155 (NM_133227.2,1968-1986).
cagccgcctaccatgtcaa

SEQ ID NO: 574040 - DNA, 19 bp, Mus musculus
  siRNA target sequence for Nup155 (NM_133227.2,2044-2062).
ctgggccagagattgtgta

SEQ ID NO: 574041 - DNA, 19 bp, Mus musculus
  siRNA target sequence for Nup155 (NM_133227.2,2067-2085).
ggaaaacacaacggtattt

SEQ ID NO: 574042 - DNA, 19 bp, Mus musculus
  siRNA target sequence for Nup155 (NM_133227.2,2073-2091).
cacaacggtatttgcattt

SEQ ID NO: 574043 - DNA, 19 bp, Mus musculus
  siRNA target sequence for Nup155 (NM_133227.2,2078-2096).
cggtatttgcatttacttt

SEQ ID NO: 574044 - DNA, 19 bp, Mus musculus
  siRNA target sequence for Nup155 (NM_133227.2,2119-2137).
gggatgcgagcttagttgt

SEQ ID NO: 574045 - DNA, 19 bp, Mus musculus
  siRNA target sequence for Nup155 (NM_133227.2,2124-2142).
gcgagcttagttgttgaaa

SEQ ID NO: 574046 - DNA, 19 bp, Mus musculus
  siRNA target sequence for Nup155 (NM_133227.2,2128-2146).
gcttagttgttgaaagagt

SEQ ID NO: 574047 - DNA, 19 bp, Mus musculus
  siRNA target sequence for Nup155 (NM_133227.2,2133-2151).
gttgttgaaagagtattca

SEQ ID NO: 574048 - DNA, 19 bp, Mus musculus
  siRNA target sequence for Nup155 (NM_133227.2,2136-2154).
gttgaaagagtattcaaga

SEQ ID NO: 574049 - DNA, 19 bp, Mus musculus
  siRNA target sequence for Nup155 (NM_133227.2,2250-2268).
gacagaaactcccagtttt

SEQ ID NO: 574050 - DNA, 19 bp, Mus musculus
  siRNA target sequence for Nup155 (NM_133227.2,2252-2270).
cagaaactcccagttttca

SEQ ID NO: 574051 - DNA, 19 bp, Mus musculus
  siRNA target sequence for Nup155 (NM_133227.2,2277-2295).
cccctgggaaatccaaata

SEQ ID NO: 574052 - DNA, 19 bp, Mus musculus
  siRNA target sequence for Nup155 (NM_133227.2,2280-2298).
ctgggaaatccaaatacta

SEQ ID NO: 574053 - DNA, 19 bp, Mus musculus
  siRNA target sequence for Nup155 (NM_133227.2,2397-2415).
caactgagtgaaaagattt

SEQ ID NO: 574054 - DNA, 19 bp, Mus musculus
  siRNA target sequence for Nup155 (NM_133227.2,2471-2489).
gaaactcctttgtgaacat

SEQ ID NO: 574055 - DNA, 19 bp, Mus musculus
  siRNA target sequence for Nup155 (NM_133227.2,2538-2556).
ctgaagatcaccaccttta

SEQ ID NO: 574056 - DNA, 19 bp, Mus musculus
  siRNA target sequence for Nup155 (NM_133227.2,2543-2561).
gatcaccacctttaaggat

SEQ ID NO: 574057 - DNA, 19 bp, Mus musculus
  siRNA target sequence for Nup155 (NM_133227.2,2585-2603).
cactggagcattaattgct

SEQ ID NO: 574058 - DNA, 19 bp, Mus musculus
  siRNA target sequence for Nup155 (NM_133227.2,2592-2610).
gcattaattgcttctctta

SEQ ID NO: 574059 - DNA, 19 bp, Mus musculus
  siRNA target sequence for Nup155 (NM_133227.2,2637-2655).
gccgtagacggcattagct

SEQ ID NO: 574060 - DNA, 19 bp, Mus musculus
  siRNA target sequence for Nup155 (NM_133227.2,2638-2656).
ccgtagacggcattagctt

SEQ ID NO: 574061 - DNA, 19 bp, Mus musculus
  siRNA target sequence for Nup155 (NM_133227.2,2639-2657).
cgtagacggcattagctta

SEQ ID NO: 574062 - DNA, 19 bp, Mus musculus
  siRNA target sequence for Nup155 (NM_133227.2,2669-2687).
cacctgtccgcttctgtat

SEQ ID NO: 574063 - DNA, 19 bp, Mus musculus
  siRNA target sequence for Nup155 (NM_133227.2,2694-2712).
gacgatgcagtttgttcta

SEQ ID NO: 574064 - DNA, 19 bp, Mus musculus
  siRNA target sequence for Nup155 (NM_133227.2,2737-2755).
cccgacaagttcagagtaa

SEQ ID NO: 574065 - DNA, 19 bp, Mus musculus
  siRNA target sequence for Nup155 (NM_133227.2,2848-2866).
ggcaagtgcgtttttatga

SEQ ID NO: 574066 - DNA, 19 bp, Mus musculus
  siRNA target sequence for Nup155 (NM_133227.2,2886-2904).
cttactgctgccgagaaaa

SEQ ID NO: 574067 - DNA, 19 bp, Mus musculus
  siRNA target sequence for Nup155 (NM_133227.2,2916-2934).
ggtcttggactccatttct

SEQ ID NO: 574068 - DNA, 19 bp, Mus musculus
  siRNA target sequence for Nup155 (NM_133227.2,2917-2935).
gtcttggactccatttcta

SEQ ID NO: 574069 - DNA, 19 bp, Mus musculus
  siRNA target sequence for Nup155 (NM_133227.2,2919-2937).
cttggactccatttctata

SEQ ID NO: 574070 - DNA, 19 bp, Mus musculus
  siRNA target sequence for Nup155 (NM_133227.2,2981-2999).
ccaagagagattaaacagt

SEQ ID NO: 574071 - DNA, 19 bp, Mus musculus
  siRNA target sequence for Nup155 (NM_133227.2,2982-3000).
caagagagattaaacagtt

SEQ ID NO: 574072 - DNA, 19 bp, Mus musculus
  siRNA target sequence for Nup155 (NM_133227.2,2985-3003).
gagagattaaacagttaca

SEQ ID NO: 574073 - DNA, 19 bp, Mus musculus
  siRNA target sequence for Nup155 (NM_133227.2,3024-3042).
caagagctggtaaatcaaa

SEQ ID NO: 574074 - DNA, 19 bp, Mus musculus
  siRNA target sequence for Nup155 (NM_133227.2,3027-3045).
gagctggtaaatcaaagta

SEQ ID NO: 574075 - DNA, 19 bp, Mus musculus
  siRNA target sequence for Nup155 (NM_133227.2,3141-3159).
cactttgaacaaatgctta

SEQ ID NO: 574076 - DNA, 19 bp, Mus musculus
  siRNA target sequence for Nup155 (NM_133227.2,3143-3161).
ctttgaacaaatgcttaaa

SEQ ID NO: 574077 - DNA, 19 bp, Mus musculus
  siRNA target sequence for Nup155 (NM_133227.2,3305-3323).
cagagtccgctatatggat

SEQ ID NO: 574078 - DNA, 19 bp, Mus musculus
  siRNA target sequence for Nup155 (NM_133227.2,3307-3325).
gagtccgctatatggattt

SEQ ID NO: 574079 - DNA, 19 bp, Mus musculus
  siRNA target sequence for Nup155 (NM_133227.2,3312-3330).
cgctatatggatttactct

SEQ ID NO: 574080 - DNA, 19 bp, Mus musculus
  siRNA target sequence for Nup155 (NM_133227.2,3331-3349).
ggaggtattacgagaagaa

SEQ ID NO: 574081 - DNA, 19 bp, Mus musculus
  siRNA target sequence for Nup155 (NM_133227.2,3367-3385).
ccgctcgggtcctatccaa

SEQ ID NO: 574082 - DNA, 19 bp, Mus musculus
  siRNA target sequence for Nup155 (NM_133227.2,3395-3413).
catgcacagcacagaaatt

SEQ ID NO: 574083 - DNA, 19 bp, Mus musculus
  siRNA target sequence for Nup155 (NM_133227.2,3422-3440).
gcagcgactagaatacatt

SEQ ID NO: 574084 - DNA, 19 bp, Mus musculus
  siRNA target sequence for Nup155 (NM_133227.2,3449-3467).
catccttagtgcgaaaagt

SEQ ID NO: 574085 - DNA, 19 bp, Mus musculus
  siRNA target sequence for Nup155 (NM_133227.2,3470-3488).
cactgccatctcatccata

SEQ ID NO: 574086 - DNA, 19 bp, Mus musculus
  siRNA target sequence for Nup155 (NM_133227.2,3575-3593).
gcagtactcccatcattct

SEQ ID NO: 574087 - DNA, 19 bp, Mus musculus
  siRNA target sequence for Nup155 (NM_133227.2,3627-3645).
gagctcatggacattacta

SEQ ID NO: 574088 - DNA, 19 bp, Mus musculus
  siRNA target sequence for Nup155 (NM_133227.2,3647-3665).
gctctatggggaatttgct

SEQ ID NO: 574089 - DNA, 19 bp, Mus musculus
  siRNA target sequence for Nup155 (NM_133227.2,3686-3704).
gagtaaacttgcagtcatt

SEQ ID NO: 574090 - DNA, 19 bp, Mus musculus
  siRNA target sequence for Nup155 (NM_133227.2,3738-3756).
cacacactctggcaagata

SEQ ID NO: 574091 - DNA, 19 bp, Mus musculus
  siRNA target sequence for Nup155 (NM_133227.2,3742-3760).
cactctggcaagatatcat

SEQ ID NO: 574092 - DNA, 19 bp, Mus musculus
  siRNA target sequence for Nup155 (NM_133227.2,3794-3812).
ctcgtcagatcgaatgcat

SEQ ID NO: 574093 - DNA, 19 bp, Mus musculus
  siRNA target sequence for Nup155 (NM_133227.2,3831-3849).
gtcctcctcggcaaaatct

SEQ ID NO: 574094 - DNA, 19 bp, Mus musculus
  siRNA target sequence for Nup155 (NM_133227.2,3833-3851).
cctcctcggcaaaatctat

SEQ ID NO: 574095 - DNA, 19 bp, Mus musculus
  siRNA target sequence for Nup155 (NM_133227.2,3853-3871).
ctgggacgcctcggttttt

SEQ ID NO: 574096 - DNA, 19 bp, Mus musculus
  siRNA target sequence for Nup155 (NM_133227.2,3975-3993).
cctaggctgctagaagttt

SEQ ID NO: 574097 - DNA, 19 bp, Mus musculus
  siRNA target sequence for Nup155 (NM_133227.2,3976-3994).
ctaggctgctagaagttta

SEQ ID NO: 574098 - DNA, 19 bp, Mus musculus
  siRNA target sequence for Nup155 (NM_133227.2,3980-3998).
gctgctagaagtttatgat

SEQ ID NO: 574099 - DNA, 19 bp, Mus musculus
  siRNA target sequence for Nup155 (NM_133227.2,4092-4110).
gagaatcctagcctagttt

SEQ ID NO: 574100 - DNA, 19 bp, Mus musculus
  siRNA target sequence for Nup155 (NM_133227.2,4102-4120).
gcctagttttaaattgtga

SEQ ID NO: 574101 - DNA, 19 bp, Mus musculus
  siRNA target sequence for Nup155 (NM_133227.2,4170-4188).
gtggaacttcagtcaatga

SEQ ID NO: 574102 - DNA, 19 bp, Mus musculus
  siRNA target sequence for Nup155 (NM_133227.2,4172-4190).
ggaacttcagtcaatgagt

SEQ ID NO: 574103 - DNA, 19 bp, Mus musculus
  siRNA target sequence for Prom1 (NM_008935.1,983-1001).
gagcagcagcctgaaaagt

SEQ ID NO: 574104 - DNA, 19 bp, Mus musculus
  siRNA target sequence for Prom1 (NM_008935.1,985-1003).
gcagcagcctgaaaagtct

SEQ ID NO: 574105 - DNA, 19 bp, Mus musculus
  siRNA target sequence for Prom1 (NM_008935.1,1015-1033).
ccacccagctcaataccaa

SEQ ID NO: 574106 - DNA, 19 bp, Mus musculus
  siRNA target sequence for Prom1 (NM_008935.1,1102-1120).
gcaagatctgcgatagcat

SEQ ID NO: 574107 - DNA, 19 bp, Mus musculus
  siRNA target sequence for Prom1 (NM_008935.1,1233-1251).
gtcaaaagggggtatacga

SEQ ID NO: 574108 - DNA, 19 bp, Mus musculus
  siRNA target sequence for Prom1 (NM_008935.1,1240-1258).
gggggtatacgacaattga

SEQ ID NO: 574109 - DNA, 19 bp, Mus musculus
  siRNA target sequence for Prom1 (NM_008935.1,1241-1259).
ggggtatacgacaattgat

SEQ ID NO: 574110 - DNA, 19 bp, Mus musculus
  siRNA target sequence for Prom1 (NM_008935.1,1243-1261).
ggtatacgacaattgatga

SEQ ID NO: 574111 - DNA, 19 bp, Mus musculus
  siRNA target sequence for Prom1 (NM_008935.1,1244-1262).
gtatacgacaattgatgaa

SEQ ID NO: 574112 - DNA, 19 bp, Mus musculus
  siRNA target sequence for Prom1 (NM_008935.1,1346-1364).
ggacatgagccaaagtatt

SEQ ID NO: 574113 - DNA, 19 bp, Mus musculus
  siRNA target sequence for Prom1 (NM_008935.1,1354-1372).
gccaaagtattcctattga

SEQ ID NO: 574114 - DNA, 19 bp, Mus musculus
  siRNA target sequence for Prom1 (NM_008935.1,1360-1378).
gtattcctattgaggatat

SEQ ID NO: 574115 - DNA, 19 bp, Mus musculus
  siRNA target sequence for Prom1 (NM_008935.1,1386-1404).
caggtctcccattacctta

SEQ ID NO: 574116 - DNA, 19 bp, Mus musculus
  siRNA target sequence for Prom1 (NM_008935.1,1411-1429).
gcaacagatacttaaacca

SEQ ID NO: 574117 - DNA, 19 bp, Mus musculus
  siRNA target sequence for Prom1 (NM_008935.1,1466-1484).
gtggctgggtggcttgatt

SEQ ID NO: 574118 - DNA, 19 bp, Mus musculus
  siRNA target sequence for Prom1 (NM_008935.1,1539-1557).
ggtgtgtttggctatgaca

SEQ ID NO: 574119 - DNA, 19 bp, Mus musculus
  siRNA target sequence for Prom1 (NM_008935.1,1559-1577).
gcatgccaccccaactaga

SEQ ID NO: 574120 - DNA, 19 bp, Mus musculus
  siRNA target sequence for Prom1 (NM_008935.1,1661-1679).
ccttgtggttcttacgttt

SEQ ID NO: 574121 - DNA, 19 bp, Mus musculus
  siRNA target sequence for Prom1 (NM_008935.1,1667-1685).
ggttcttacgtttgttgtt

SEQ ID NO: 574122 - DNA, 19 bp, Mus musculus
  siRNA target sequence for Prom1 (NM_008935.1,1703-1721).
gttgctctgcgaaccttat

SEQ ID NO: 574123 - DNA, 19 bp, Mus musculus
  siRNA target sequence for Prom1 (NM_008935.1,1707-1725).
ctctgcgaaccttatgaaa

SEQ ID NO: 574124 - DNA, 19 bp, Mus musculus
  siRNA target sequence for Prom1 (NM_008935.1,1711-1729).
gcgaaccttatgaaaacaa

SEQ ID NO: 574125 - DNA, 19 bp, Mus musculus
  siRNA target sequence for Prom1 (NM_008935.1,1713-1731).
gaaccttatgaaaacaaga

SEQ ID NO: 574126 - DNA, 19 bp, Mus musculus
  siRNA target sequence for Prom1 (NM_008935.1,1788-1806).
ctttctggcatgctattca

SEQ ID NO: 574127 - DNA, 19 bp, Mus musculus
  siRNA target sequence for Prom1 (NM_008935.1,1839-1857).
gtctacagggattgcaaaa

SEQ ID NO: 574128 - DNA, 19 bp, Mus musculus
  siRNA target sequence for Prom1 (NM_008935.1,1841-1859).
ctacagggattgcaaaaga

SEQ ID NO: 574129 - DNA, 19 bp, Mus musculus
  siRNA target sequence for Prom1 (NM_008935.1,1853-1871).
caaaagaggtcgaggtata

SEQ ID NO: 574130 - DNA, 19 bp, Mus musculus
  siRNA target sequence for Prom1 (NM_008935.1,1898-1916).
cgtcaacgtcagtgatcat

SEQ ID NO: 574131 - DNA, 19 bp, Mus musculus
  siRNA target sequence for Prom1 (NM_008935.1,1899-1917).
gtcaacgtcagtgatcatt

SEQ ID NO: 574132 - DNA, 19 bp, Mus musculus
  siRNA target sequence for Prom1 (NM_008935.1,1905-1923).
gtcagtgatcatttcaaca

SEQ ID NO: 574133 - DNA, 19 bp, Mus musculus
  siRNA target sequence for Prom1 (NM_008935.1,1919-1937).
caacattgaccagatttct

SEQ ID NO: 574134 - DNA, 19 bp, Mus musculus
  siRNA target sequence for Prom1 (NM_008935.1,2040-2058).
gggatagatacaatcgatt

SEQ ID NO: 574135 - DNA, 19 bp, Mus musculus
  siRNA target sequence for Prom1 (NM_008935.1,2041-2059).
ggatagatacaatcgatta

SEQ ID NO: 574136 - DNA, 19 bp, Mus musculus
  siRNA target sequence for Prom1 (NM_008935.1,2042-2060).
gatagatacaatcgattat

SEQ ID NO: 574137 - DNA, 19 bp, Mus musculus
  siRNA target sequence for Prom1 (NM_008935.1,2055-2073).
gattattccacatacttga

SEQ ID NO: 574138 - DNA, 19 bp, Mus musculus
  siRNA target sequence for Prom1 (NM_008935.1,2089-2107).
cccctactgaagtgaatct

SEQ ID NO: 574139 - DNA, 19 bp, Mus musculus
  siRNA target sequence for Prom1 (NM_008935.1,2173-2191).
ccttcttactggatgtaca

SEQ ID NO: 574140 - DNA, 19 bp, Mus musculus
  siRNA target sequence for Prom1 (NM_008935.1,2232-2250).
cagcaatcactgaatacgt

SEQ ID NO: 574141 - DNA, 19 bp, Mus musculus
  siRNA target sequence for Prom1 (NM_008935.1,2234-2252).
gcaatcactgaatacgtta

SEQ ID NO: 574142 - DNA, 19 bp, Mus musculus
  siRNA target sequence for Prom1 (NM_008935.1,2235-2253).
caatcactgaatacgttaa

SEQ ID NO: 574143 - DNA, 19 bp, Mus musculus
  siRNA target sequence for Prom1 (NM_008935.1,2239-2257).
cactgaatacgttaagaca

SEQ ID NO: 574144 - DNA, 19 bp, Mus musculus
  siRNA target sequence for Prom1 (NM_008935.1,2241-2259).
ctgaatacgttaagacaaa

SEQ ID NO: 574145 - DNA, 19 bp, Mus musculus
  siRNA target sequence for Prom1 (NM_008935.1,2243-2261).
gaatacgttaagacaaagt

SEQ ID NO: 574146 - DNA, 19 bp, Mus musculus
  siRNA target sequence for Prom1 (NM_008935.1,2274-2292).
cagcaaacaagcaacaagt

SEQ ID NO: 574147 - DNA, 19 bp, Mus musculus
  siRNA target sequence for Prom1 (NM_008935.1,2390-2408).
gtttgggaaaacaatacta

SEQ ID NO: 574148 - DNA, 19 bp, Mus musculus
  siRNA target sequence for Prom1 (NM_008935.1,2406-2424).
ctaggctactttgaacatt

SEQ ID NO: 574149 - DNA, 19 bp, Mus musculus
  siRNA target sequence for Prom1 (NM_008935.1,2410-2428).
gctactttgaacattatct

SEQ ID NO: 574150 - DNA, 19 bp, Mus musculus
  siRNA target sequence for Prom1 (NM_008935.1,2488-2506).
cgatggactctgctgttaa

SEQ ID NO: 574151 - DNA, 19 bp, Mus musculus
  siRNA target sequence for Prom1 (NM_008935.1,2489-2507).
gatggactctgctgttaat

SEQ ID NO: 574152 - DNA, 19 bp, Mus musculus
  siRNA target sequence for Prom1 (NM_008935.1,2526-2544).
gttgcggaccctctgaatt

SEQ ID NO: 574153 - DNA, 19 bp, Mus musculus
  siRNA target sequence for Prom1 (NM_008935.1,2529-2547).
gcggaccctctgaatttgt

SEQ ID NO: 574154 - DNA, 19 bp, Mus musculus
  siRNA target sequence for Prom1 (NM_008935.1,2530-2548).
cggaccctctgaatttgtt

SEQ ID NO: 574155 - DNA, 19 bp, Mus musculus
  siRNA target sequence for Prom1 (NM_008935.1,2532-2550).
gaccctctgaatttgttct

SEQ ID NO: 574156 - DNA, 19 bp, Mus musculus
  siRNA target sequence for Prom1 (NM_008935.1,2586-2604).
ccggctgtaatcattgcta

SEQ ID NO: 574157 - DNA, 19 bp, Mus musculus
  siRNA target sequence for Prom1 (NM_008935.1,2587-2605).
cggctgtaatcattgctat

SEQ ID NO: 574158 - DNA, 19 bp, Mus musculus
  siRNA target sequence for Prom1 (NM_008935.1,2675-2693).
gaaaaatttggaaatcgat

SEQ ID NO: 574159 - DNA, 19 bp, Mus musculus
  siRNA target sequence for Prom1 (NM_008935.1,2684-2702).
ggaaatcgatagtaatggt

SEQ ID NO: 574160 - DNA, 19 bp, Mus musculus
  siRNA target sequence for Prom1 (NM_008935.1,2690-2708).
cgatagtaatggttatcat

SEQ ID NO: 574161 - DNA, 19 bp, Mus musculus
  siRNA target sequence for Prom1 (NM_008935.1,2691-2709).
gatagtaatggttatcata

SEQ ID NO: 574162 - DNA, 19 bp, Mus musculus
  siRNA target sequence for Prom1 (NM_008935.1,2725-2743).
gtgttcacaatcctgttat

SEQ ID NO: 574163 - DNA, 19 bp, Mus musculus
  siRNA target sequence for Scly (NM_016717.2,106-124).
cccgacaggaaggtctata

SEQ ID NO: 574164 - DNA, 19 bp, Mus musculus
  siRNA target sequence for Scly (NM_016717.2,117-135).
ggtctatatggactataat

SEQ ID NO: 574165 - DNA, 19 bp, Mus musculus
  siRNA target sequence for Scly (NM_016717.2,230-248).
ggaaggccaaggacattat

SEQ ID NO: 574166 - DNA, 19 bp, Mus musculus
  siRNA target sequence for Scly (NM_016717.2,263-281).
cgagcctggccaagatgat

SEQ ID NO: 574167 - DNA, 19 bp, Mus musculus
  siRNA target sequence for Scly (NM_016717.2,316-334).
gggggcaccgagtcaaata

SEQ ID NO: 574168 - DNA, 19 bp, Mus musculus
  siRNA target sequence for Scly (NM_016717.2,317-335).
ggggcaccgagtcaaataa

SEQ ID NO: 574169 - DNA, 19 bp, Mus musculus
  siRNA target sequence for Scly (NM_016717.2,318-336).
gggcaccgagtcaaataat

SEQ ID NO: 574170 - DNA, 19 bp, Mus musculus
  siRNA target sequence for Scly (NM_016717.2,319-337).
ggcaccgagtcaaataatt

SEQ ID NO: 574171 - DNA, 19 bp, Mus musculus
  siRNA target sequence for Scly (NM_016717.2,320-338).
gcaccgagtcaaataattt

SEQ ID NO: 574172 - DNA, 19 bp, Mus musculus
  siRNA target sequence for Scly (NM_016717.2,321-339).
caccgagtcaaataattta

SEQ ID NO: 574173 - DNA, 19 bp, Mus musculus
  siRNA target sequence for Scly (NM_016717.2,324-342).
cgagtcaaataatttagta

SEQ ID NO: 574174 - DNA, 19 bp, Mus musculus
  siRNA target sequence for Scly (NM_016717.2,646-664).
gagatcagtcggcgaatta

SEQ ID NO: 574175 - DNA, 19 bp, Mus musculus
  siRNA target sequence for Scly (NM_016717.2,648-666).
gatcagtcggcgaattaaa

SEQ ID NO: 574176 - DNA, 19 bp, Mus musculus
  siRNA target sequence for Scly (NM_016717.2,785-803).
ccatcgtgggacataagtt

SEQ ID NO: 574177 - DNA, 19 bp, Mus musculus
  siRNA target sequence for Scly (NM_016717.2,835-853).
cgaggggtcggtaaactta

SEQ ID NO: 574178 - DNA, 19 bp, Mus musculus
  siRNA target sequence for Scly (NM_016717.2,880-898).
ggtggacaagagtggaatt

SEQ ID NO: 574179 - DNA, 19 bp, Mus musculus
  siRNA target sequence for Scly (NM_016717.2,883-901).
ggacaagagtggaatttca

SEQ ID NO: 574180 - DNA, 19 bp, Mus musculus
  siRNA target sequence for Scly (NM_016717.2,912-930).
cgagaacacgcccatgatt

SEQ ID NO: 574181 - DNA, 19 bp, Mus musculus
  siRNA target sequence for Scly (NM_016717.2,962-980).
gcgagaactgcgagactta

SEQ ID NO: 574182 - DNA, 19 bp, Mus musculus
  siRNA target sequence for Scly (NM_016717.2,963-981).
cgagaactgcgagacttat

SEQ ID NO: 574183 - DNA, 19 bp, Mus musculus
  siRNA target sequence for Scly (NM_016717.2,995-1013).
gagacatccgagattacct

SEQ ID NO: 574184 - DNA, 19 bp, Mus musculus
  siRNA target sequence for Scly (NM_016717.2,1029-1047).
ggctgagtttggtaagaga

SEQ ID NO: 574185 - DNA, 19 bp, Mus musculus
  siRNA target sequence for Scly (NM_016717.2,1087-1105).
ccaaacacctgcaactttt

SEQ ID NO: 574186 - DNA, 19 bp, Mus musculus
  siRNA target sequence for Scly (NM_016717.2,1178-1196).
catcatgccactcaaatca

SEQ ID NO: 574187 - DNA, 19 bp, Mus musculus
  siRNA target sequence for Sfrs16 (NM_016680.2,129-147).
gcggcgtcgggagtactat

SEQ ID NO: 574188 - DNA, 19 bp, Mus musculus
  siRNA target sequence for Sfrs16 (NM_016680.2,131-149).
ggcgtcgggagtactatga

SEQ ID NO: 574189 - DNA, 19 bp, Mus musculus
  siRNA target sequence for Sfrs16 (NM_016680.2,133-151).
cgtcgggagtactatgaga

SEQ ID NO: 574190 - DNA, 19 bp, Mus musculus
  siRNA target sequence for Sfrs16 (NM_016680.2,137-155).
gggagtactatgagaagat

SEQ ID NO: 574191 - DNA, 19 bp, Mus musculus
  siRNA target sequence for Sfrs16 (NM_016680.2,236-254).
ctgagagccctgtgaacat

SEQ ID NO: 574192 - DNA, 19 bp, Mus musculus
  siRNA target sequence for Sfrs16 (NM_016680.2,372-390).
gtcagacgagcggaaatgt

SEQ ID NO: 574193 - DNA, 19 bp, Mus musculus
  siRNA target sequence for Sfrs16 (NM_016680.2,374-392).
cagacgagcggaaatgtaa

SEQ ID NO: 574194 - DNA, 19 bp, Mus musculus
  siRNA target sequence for Sfrs16 (NM_016680.2,376-394).
gacgagcggaaatgtaact

SEQ ID NO: 574195 - DNA, 19 bp, Mus musculus
  siRNA target sequence for Sfrs16 (NM_016680.2,452-470).
gcttgtatcagatctacat

SEQ ID NO: 574196 - DNA, 19 bp, Mus musculus
  siRNA target sequence for Sfrs16 (NM_016680.2,453-471).
cttgtatcagatctacatt

SEQ ID NO: 574197 - DNA, 19 bp, Mus musculus
  siRNA target sequence for Sfrs16 (NM_016680.2,497-515).
gacccagcgaggatgagaa

SEQ ID NO: 574198 - DNA, 19 bp, Mus musculus
  siRNA target sequence for Sfrs16 (NM_016680.2,549-567).
ctacacctatgaagatagt

SEQ ID NO: 574199 - DNA, 19 bp, Mus musculus
  siRNA target sequence for Sfrs16 (NM_016680.2,552-570).
cacctatgaagatagtact

SEQ ID NO: 574200 - DNA, 19 bp, Mus musculus
  siRNA target sequence for Sfrs16 (NM_016680.2,633-651).
gagcaactcggatgaagat

SEQ ID NO: 574201 - DNA, 19 bp, Mus musculus
  siRNA target sequence for Sfrs16 (NM_016680.2,706-724).
caggtggctgatctcaata

SEQ ID NO: 574202 - DNA, 19 bp, Mus musculus
  siRNA target sequence for Sfrs16 (NM_016680.2,767-785).
ggatgctacggaaagataa

SEQ ID NO: 574203 - DNA, 19 bp, Mus musculus
  siRNA target sequence for Sfrs16 (NM_016680.2,906-924).
gatcagccctcccagttat

SEQ ID NO: 574204 - DNA, 19 bp, Mus musculus
  siRNA target sequence for Sfrs16 (NM_016680.2,1021-1039).
cgcgaggaaaaaatcactt

SEQ ID NO: 574205 - DNA, 19 bp, Mus musculus
  siRNA target sequence for Sfrs16 (NM_016680.2,1022-1040).
gcgaggaaaaaatcacttt

SEQ ID NO: 574206 - DNA, 19 bp, Mus musculus
  siRNA target sequence for Sfrs16 (NM_016680.2,1460-1478).
gttcaggtgaccgctataa

SEQ ID NO: 574207 - DNA, 19 bp, Mus musculus
  siRNA target sequence for Sfrs16 (NM_016680.2,1501-1519).
caccatagcagcagtcata

SEQ ID NO: 574208 - DNA, 19 bp, Mus musculus
  siRNA target sequence for Sfrs16 (NM_152946.1,1695-1713).
ctctgaaccgccagttcaa

SEQ ID NO: 574209 - DNA, 19 bp, Mus musculus
  siRNA target sequence for Slc25a1 (NM_153150.1,200-218).
ctggctggaggcatcgaaa

SEQ ID NO: 574210 - DNA, 19 bp, Mus musculus
  siRNA target sequence for Slc25a1 (NM_153150.1,203-221).
gctggaggcatcgaaatct

SEQ ID NO: 574211 - DNA, 19 bp, Mus musculus
  siRNA target sequence for Slc25a1 (NM_153150.1,228-246).
ccttcccgaccgaatacgt

SEQ ID NO: 574212 - DNA, 19 bp, Mus musculus
  siRNA target sequence for Slc25a1 (NM_153150.1,574-592).
ccccaagtaccgaggattt

SEQ ID NO: 574213 - DNA, 19 bp, Mus musculus
  siRNA target sequence for Slc25a1 (NM_153150.1,575-593).
cccaagtaccgaggatttt

SEQ ID NO: 574214 - DNA, 19 bp, Mus musculus
  siRNA target sequence for Slc25a1 (NM_153150.1,576-594).
ccaagtaccgaggattttt

SEQ ID NO: 574215 - DNA, 19 bp, Mus musculus
  siRNA target sequence for Slc25a1 (NM_153150.1,595-613).
ccacggggttagagagatt

SEQ ID NO: 574216 - DNA, 19 bp, Mus musculus
  siRNA target sequence for Slc25a1 (NM_153150.1,596-614).
cacggggttagagagatta

SEQ ID NO: 574217 - DNA, 19 bp, Mus musculus
  siRNA target sequence for Slc25a1 (NM_153150.1,598-616).
cggggttagagagattatt

SEQ ID NO: 574218 - DNA, 19 bp, Mus musculus
  siRNA target sequence for Slc25a1 (NM_153150.1,628-646).
gctaaagggaacataccaa

SEQ ID NO: 574219 - DNA, 19 bp, Mus musculus
  siRNA target sequence for Slc25a1 (NM_153150.1,667-685).
gaagcagggctcaaaccaa

SEQ ID NO: 574220 - DNA, 19 bp, Mus musculus
  siRNA target sequence for Slc25a1 (NM_153150.1,682-700).
ccaagccatccgattcttt

SEQ ID NO: 574221 - DNA, 19 bp, Mus musculus
  siRNA target sequence for Slc25a1 (NM_153150.1,686-704).
gccatccgattctttgtca

SEQ ID NO: 574222 - DNA, 19 bp, Mus musculus
  siRNA target sequence for Slc25a1 (NM_153150.1,687-705).
ccatccgattctttgtcat

SEQ ID NO: 574223 - DNA, 19 bp, Mus musculus
  siRNA target sequence for Slc25a1 (NM_153150.1,790-808).
gggtgcagccagtgtcttt

SEQ ID NO: 574224 - DNA, 19 bp, Mus musculus
  siRNA target sequence for Slc25a1 (NM_153150.1,794-812).
gcagccagtgtctttggaa

SEQ ID NO: 574225 - DNA, 19 bp, Mus musculus
  siRNA target sequence for Slc25a1 (NM_153150.1,849-867).
gcctggaggcacacaaata

SEQ ID NO: 574226 - DNA, 19 bp, Mus musculus
  siRNA target sequence for Slc25a1 (NM_153150.1,878-896).
ctggactgcggcttgaaga

SEQ ID NO: 574227 - DNA, 19 bp, Mus musculus
  siRNA target sequence for Slc25a1 (NM_153150.1,885-903).
gcggcttgaagatcctaaa

SEQ ID NO: 574228 - DNA, 19 bp, Mus musculus
  siRNA target sequence for Slc25a1 (NM_153150.1,911-929).
gggccaaaggcattctaca

SEQ ID NO: 574229 - DNA, 19 bp, Mus musculus
  siRNA target sequence for Slc25a1 (NM_153150.1,912-930).
ggccaaaggcattctacaa

SEQ ID NO: 574230 - DNA, 19 bp, Mus musculus
  siRNA target sequence for Slc25a10 (NM_013770.1,405-423).
ctctccccttctacaacaa

SEQ ID NO: 574231 - DNA, 19 bp, Mus musculus
  siRNA target sequence for Slc25a10 (NM_013770.1,436-454).
cggcatcagtggtttaact

SEQ ID NO: 574232 - DNA, 19 bp, Mus musculus
  siRNA target sequence for Slc25a10 (NM_013770.1,495-513).
ggatgcagaacgacatgaa

SEQ ID NO: 574233 - DNA, 19 bp, Mus musculus
  siRNA target sequence for Slc25a10 (NM_013770.1,701-719).
ctgagtgacaacatattca

SEQ ID NO: 574234 - DNA, 19 bp, Mus musculus
  siRNA target sequence for Slc25a10 (NM_013770.1,749-767).
ggatgtgccacgtttctgt

SEQ ID NO: 574235 - DNA, 19 bp, Mus musculus
  siRNA target sequence for Slc25a10 (NM_013770.1,813-831).
gcgagtaccagggtgtttt

SEQ ID NO: 574236 - DNA, 19 bp, Mus musculus
  siRNA target sequence for Slc25a11 (NM_024211.2,179-197).
ccgtacctcccctaagtct

SEQ ID NO: 574237 - DNA, 19 bp, Mus musculus
  siRNA target sequence for Slc25a11 (NM_024211.2,311-329).
gtacaaaaccagtttccat

SEQ ID NO: 574238 - DNA, 19 bp, Mus musculus
  siRNA target sequence for Slc25a11 (NM_024211.2,359-377).
cctgaagggcatttacact

SEQ ID NO: 574239 - DNA, 19 bp, Mus musculus
  siRNA target sequence for Slc25a11 (NM_024211.2,415-433).
ccactactcgccttggaat

SEQ ID NO: 574240 - DNA, 19 bp, Mus musculus
  siRNA target sequence for Slc25a11 (NM_024211.2,416-434).
cactactcgccttggaata

SEQ ID NO: 574241 - DNA, 19 bp, Mus musculus
  siRNA target sequence for Slc25a11 (NM_024211.2,418-436).
ctactcgccttggaatata

SEQ ID NO: 574242 - DNA, 19 bp, Mus musculus
  siRNA target sequence for Slc25a11 (NM_024211.2,520-538).
gtgcaactggtgcatttgt

SEQ ID NO: 574243 - DNA, 19 bp, Mus musculus
  siRNA target sequence for Slc25a11 (NM_024211.2,599-617).
ccagcgccgtggctacaaa

SEQ ID NO: 574244 - DNA, 19 bp, Mus musculus
  siRNA target sequence for Slc25a11 (NM_024211.2,600-618).
cagcgccgtggctacaaaa

SEQ ID NO: 574245 - DNA, 19 bp, Mus musculus
  siRNA target sequence for Slc25a11 (NM_024211.2,602-620).
gcgccgtggctacaaaaat

SEQ ID NO: 574246 - DNA, 19 bp, Mus musculus
  siRNA target sequence for Slc25a11 (NM_024211.2,697-715).
ctcgagctgtcgttgtcaa

SEQ ID NO: 574247 - DNA, 19 bp, Mus musculus
  siRNA target sequence for Slc25a11 (NM_024211.2,722-740).
ccagcttgcctcttactct

SEQ ID NO: 574248 - DNA, 19 bp, Mus musculus
  siRNA target sequence for Slc25a11 (NM_024211.2,730-748).
cctcttactctcaatctaa

SEQ ID NO: 574249 - DNA, 19 bp, Mus musculus
  siRNA target sequence for Slc25a11 (NM_024211.2,846-864).
cctgtggacatcgtcaaaa

SEQ ID NO: 574250 - DNA, 19 bp, Mus musculus
  siRNA target sequence for Slc25a11 (NM_024211.2,849-867).
gtggacatcgtcaaaacta

SEQ ID NO: 574251 - DNA, 19 bp, Mus musculus
  siRNA target sequence for Slc25a11 (NM_024211.2,872-890).
ccagaatatgcggatgatt

SEQ ID NO: 574252 - DNA, 19 bp, Mus musculus
  siRNA target sequence for Slc25a11 (NM_024211.2,875-893).
gaatatgcggatgattgat

SEQ ID NO: 574253 - DNA, 19 bp, Mus musculus
  siRNA target sequence for Slc25a11 (NM_024211.2,894-912).
gggaagccagaatacaaga

SEQ ID NO: 574254 - DNA, 19 bp, Mus musculus
  siRNA target sequence for Slc25a11 (NM_024211.2,942-960).
cgctatgagggtttcttca

SEQ ID NO: 574255 - DNA, 19 bp, Mus musculus
  siRNA target sequence for Slc25a11 (NM_024211.2,971-989).
gggcttcacaccatactat

SEQ ID NO: 574256 - DNA, 19 bp, Mus musculus
  siRNA target sequence for Slc25a14 (NM_011398.1,426-444).
ggtatctttcccggaataa

SEQ ID NO: 574257 - DNA, 19 bp, Mus musculus
  siRNA target sequence for Slc25a14 (NM_011398.1,427-445).
gtatctttcccggaataat

SEQ ID NO: 574258 - DNA, 19 bp, Mus musculus
  siRNA target sequence for Slc25a14 (NM_011398.1,437-455).
cggaataatcctaattttt

SEQ ID NO: 574259 - DNA, 19 bp, Mus musculus
  siRNA target sequence for Slc25a14 (NM_011398.1,456-474).
ctaagggtgaagtttgcaa

SEQ ID NO: 574260 - DNA, 19 bp, Mus musculus
  siRNA target sequence for Slc25a14 (NM_011398.1,478-496).
cggcagtgattcatcagaa

SEQ ID NO: 574261 - DNA, 19 bp, Mus musculus
  siRNA target sequence for Slc25a14 (NM_011398.1,483-501).
gtgattcatcagaaaagtt

SEQ ID NO: 574262 - DNA, 19 bp, Mus musculus
  siRNA target sequence for Slc25a14 (NM_011398.1,591-609).
cctgtggatcttactaaaa

SEQ ID NO: 574263 - DNA, 19 bp, Mus musculus
  siRNA target sequence for Slc25a14 (NM_011398.1,623-641).
ccaaggccagagtatcgat

SEQ ID NO: 574264 - DNA, 19 bp, Mus musculus
  siRNA target sequence for Slc25a14 (NM_011398.1,634-652).
gtatcgatgttcgtttcaa

SEQ ID NO: 574265 - DNA, 19 bp, Mus musculus
  siRNA target sequence for Slc25a14 (NM_011398.1,638-656).
cgatgttcgtttcaaagaa

SEQ ID NO: 574266 - DNA, 19 bp, Mus musculus
  siRNA target sequence for Slc25a14 (NM_011398.1,681-699).
gccttgttccgaatctata

SEQ ID NO: 574267 - DNA, 19 bp, Mus musculus
  siRNA target sequence for Slc25a14 (NM_011398.1,682-700).
ccttgttccgaatctataa

SEQ ID NO: 574268 - DNA, 19 bp, Mus musculus
  siRNA target sequence for Slc25a14 (NM_011398.1,708-726).
gggatcttggctctgtatt

SEQ ID NO: 574269 - DNA, 19 bp, Mus musculus
  siRNA target sequence for Slc25a14 (NM_011398.1,710-728).
gatcttggctctgtattca

SEQ ID NO: 574270 - DNA, 19 bp, Mus musculus
  siRNA target sequence for Slc25a14 (NM_011398.1,765-783).
ggcaccatcaaaattggta

SEQ ID NO: 574271 - DNA, 19 bp, Mus musculus
  siRNA target sequence for Slc25a14 (NM_011398.1,793-811).
gcttgaagcgattatttgt

SEQ ID NO: 574272 - DNA, 19 bp, Mus musculus
  siRNA target sequence for Slc25a14 (NM_011398.1,794-812).
cttgaagcgattatttgta

SEQ ID NO: 574273 - DNA, 19 bp, Mus musculus
  siRNA target sequence for Slc25a14 (NM_011398.1,797-815).
gaagcgattatttgtagaa

SEQ ID NO: 574274 - DNA, 19 bp, Mus musculus
  siRNA target sequence for Slc25a14 (NM_011398.1,828-846).
gagactctcctaattaaca

SEQ ID NO: 574275 - DNA, 19 bp, Mus musculus
  siRNA target sequence for Slc25a14 (NM_011398.1,832-850).
ctctcctaattaacatgat

SEQ ID NO: 574276 - DNA, 19 bp, Mus musculus
  siRNA target sequence for Slc25a14 (NM_011398.1,834-852).
ctcctaattaacatgatct

SEQ ID NO: 574277 - DNA, 19 bp, Mus musculus
  siRNA target sequence for Slc25a14 (NM_011398.1,867-885).
ggagtgatttcctctacta

SEQ ID NO: 574278 - DNA, 19 bp, Mus musculus
  siRNA target sequence for Slc25a14 (NM_011398.1,957-975).
ggcagcttcattgacatat

SEQ ID NO: 574279 - DNA, 19 bp, Mus musculus
  siRNA target sequence for Slc25a14 (NM_011398.1,958-976).
gcagcttcattgacatata

SEQ ID NO: 574280 - DNA, 19 bp, Mus musculus
  siRNA target sequence for Slc25a14 (NM_011398.1,961-979).
gcttcattgacatatacca

SEQ ID NO: 574281 - DNA, 19 bp, Mus musculus
  siRNA target sequence for Slc25a14 (NM_011398.1,1055-1073).
gctgcccgtttatgatatt

SEQ ID NO: 574282 - DNA, 19 bp, Mus musculus
  siRNA target sequence for Slc25a14 (NM_011398.1,1056-1074).
ctgcccgtttatgatatta

SEQ ID NO: 574283 - DNA, 19 bp, Mus musculus
  siRNA target sequence for Slc25a14 (NM_011398.1,1059-1077).
cccgtttatgatattacca

SEQ ID NO: 574284 - DNA, 19 bp, Mus musculus
  siRNA target sequence for Slc25a14 (NM_011398.1,1060-1078).
ccgtttatgatattaccaa

SEQ ID NO: 574285 - DNA, 19 bp, Mus musculus
  siRNA target sequence for Slc25a14 (NM_011398.1,1112-1130).
cacaattttaacacacttt

SEQ ID NO: 574286 - DNA, 19 bp, Mus musculus
  siRNA target sequence for Slc25a14 (NM_011398.1,1244-1262).
gggtactttggatggtatt

SEQ ID NO: 574287 - DNA, 19 bp, Mus musculus
  siRNA target sequence for Slc25a14 (NM_011398.1,1246-1264).
gtactttggatggtatttt

SEQ ID NO: 574288 - DNA, 19 bp, Mus musculus
  siRNA target sequence for Slc25a14 (NM_011398.1,1283-1301).
gggattttttgcactctat

SEQ ID NO: 574289 - DNA, 19 bp, Mus musculus
  siRNA target sequence for Slc25a14 (NM_011398.1,1284-1302).
ggattttttgcactctata

SEQ ID NO: 574290 - DNA, 19 bp, Mus musculus
  siRNA target sequence for Slc25a14 (NM_011398.1,1333-1351).
gaccctggaacatcatttt

SEQ ID NO: 574291 - DNA, 19 bp, Mus musculus
  siRNA target sequence for Slc25a14 (NM_011398.1,1336-1354).
cctggaacatcattttttt

SEQ ID NO: 574292 - DNA, 19 bp, Mus musculus
  siRNA target sequence for Slc25a15 (NM_011017.1,300-318).
cctgattgccaatatagca

SEQ ID NO: 574293 - DNA, 19 bp, Mus musculus
  siRNA target sequence for Slc25a15 (NM_011017.1,326-344).
cggtgctgttcatgtgtta

SEQ ID NO: 574294 - DNA, 19 bp, Mus musculus
  siRNA target sequence for Slc25a15 (NM_011017.1,554-572).
cagttgtgaaggagatctt

SEQ ID NO: 574295 - DNA, 19 bp, Mus musculus
  siRNA target sequence for Slc25a15 (NM_011017.1,559-577).
gtgaaggagatctttagga

SEQ ID NO: 574296 - DNA, 19 bp, Mus musculus
  siRNA target sequence for Slc25a15 (NM_011017.1,606-624).
gctctcaagcactttactt

SEQ ID NO: 574297 - DNA, 19 bp, Mus musculus
  siRNA target sequence for Slc25a15 (NM_011017.1,615-633).
cactttacttcgagaagta

SEQ ID NO: 574298 - DNA, 19 bp, Mus musculus
  siRNA target sequence for Slc25a15 (NM_011017.1,628-646).
gaagtaccaggctacttct

SEQ ID NO: 574299 - DNA, 19 bp, Mus musculus
  siRNA target sequence for Slc25a15 (NM_011017.1,631-649).
gtaccaggctacttcttct

SEQ ID NO: 574300 - DNA, 19 bp, Mus musculus
  siRNA target sequence for Slc25a15 (NM_011017.1,664-682).
gaactgagcaggtcattct

SEQ ID NO: 574301 - DNA, 19 bp, Mus musculus
  siRNA target sequence for Slc25a15 (NM_011017.1,684-702).
cgcatcagggagatcaaaa

SEQ ID NO: 574302 - DNA, 19 bp, Mus musculus
  siRNA target sequence for Slc25a15 (NM_011017.1,726-744).
gatgctgagtggtggattt

SEQ ID NO: 574303 - DNA, 19 bp, Mus musculus
  siRNA target sequence for Slc25a15 (NM_011017.1,729-747).
gctgagtggtggatttggt

SEQ ID NO: 574304 - DNA, 19 bp, Mus musculus
  siRNA target sequence for Slc25a15 (NM_011017.1,775-793).
ccggtggattgtatcaaat

SEQ ID NO: 574305 - DNA, 19 bp, Mus musculus
  siRNA target sequence for Slc25a15 (NM_011017.1,778-796).
gtggattgtatcaaatcta

SEQ ID NO: 574306 - DNA, 19 bp, Mus musculus
  siRNA target sequence for Slc25a15 (NM_011017.1,780-798).
ggattgtatcaaatctaga

SEQ ID NO: 574307 - DNA, 19 bp, Mus musculus
  siRNA target sequence for Slc25a15 (NM_011017.1,781-799).
gattgtatcaaatctagaa

SEQ ID NO: 574308 - DNA, 19 bp, Mus musculus
  siRNA target sequence for Slc25a15 (NM_011017.1,785-803).
gtatcaaatctagaattca

SEQ ID NO: 574309 - DNA, 19 bp, Mus musculus
  siRNA target sequence for Slc25a15 (NM_011017.1,845-863).
ccttcctgagtatcgtaaa

SEQ ID NO: 574310 - DNA, 19 bp, Mus musculus
  siRNA target sequence for Slc25a15 (NM_011017.1,849-867).
cctgagtatcgtaaagaat

SEQ ID NO: 574311 - DNA, 19 bp, Mus musculus
  siRNA target sequence for Slc25a15 (NM_011017.1,852-870).
gagtatcgtaaagaatgaa

SEQ ID NO: 574312 - DNA, 19 bp, Mus musculus
  siRNA target sequence for Slc25a15 (NM_011017.1,926-944).
ccaacggggcactgttttt

SEQ ID NO: 574313 - DNA, 19 bp, Mus musculus
  siRNA target sequence for Slc25a15 (NM_011017.1,937-955).
ctgtttttggcctatgagt

SEQ ID NO: 574314 - DNA, 19 bp, Mus musculus
  siRNA target sequence for Slc25a16 (NM_175194.2,205-223).
cctcacgccgagacttcta

SEQ ID NO: 574315 - DNA, 19 bp, Mus musculus
  siRNA target sequence for Slc25a16 (NM_175194.2,236-254).
cttcttggccggaggtatt

SEQ ID NO: 574316 - DNA, 19 bp, Mus musculus
  siRNA target sequence for Slc25a16 (NM_175194.2,239-257).
cttggccggaggtattgct

SEQ ID NO: 574317 - DNA, 19 bp, Mus musculus
  siRNA target sequence for Slc25a16 (NM_175194.2,288-306).
ctggaccgagtgaaagttt

SEQ ID NO: 574318 - DNA, 19 bp, Mus musculus
  siRNA target sequence for Slc25a16 (NM_175194.2,293-311).
ccgagtgaaagttttatta

SEQ ID NO: 574319 - DNA, 19 bp, Mus musculus
  siRNA target sequence for Slc25a16 (NM_175194.2,316-334).
ctcacaaccgtcattacaa

SEQ ID NO: 574320 - DNA, 19 bp, Mus musculus
  siRNA target sequence for Slc25a16 (NM_175194.2,383-401).
ctatcttggactgtataaa

SEQ ID NO: 574321 - DNA, 19 bp, Mus musculus
  siRNA target sequence for Slc25a16 (NM_175194.2,402-420).
ggaaacggtgcaatgatga

SEQ ID NO: 574322 - DNA, 19 bp, Mus musculus
  siRNA target sequence for Slc25a16 (NM_175194.2,403-421).
gaaacggtgcaatgatgat

SEQ ID NO: 574323 - DNA, 19 bp, Mus musculus
  siRNA target sequence for Slc25a16 (NM_175194.2,455-473).
ggccttcgagcattataaa

SEQ ID NO: 574324 - DNA, 19 bp, Mus musculus
  siRNA target sequence for Slc25a16 (NM_175194.2,456-474).
gccttcgagcattataaaa

SEQ ID NO: 574325 - DNA, 19 bp, Mus musculus
  siRNA target sequence for Slc25a16 (NM_175194.2,540-558).
ggcatgacagcggttatct

SEQ ID NO: 574326 - DNA, 19 bp, Mus musculus
  siRNA target sequence for Slc25a16 (NM_175194.2,667-685).
gtggtttccttggattcta

SEQ ID NO: 574327 - DNA, 19 bp, Mus musculus
  siRNA target sequence for Slc25a16 (NM_175194.2,688-706).
gaggtctgatgcctactat

SEQ ID NO: 574328 - DNA, 19 bp, Mus musculus
  siRNA target sequence for Slc25a16 (NM_175194.2,690-708).
ggtctgatgcctactatat

SEQ ID NO: 574329 - DNA, 19 bp, Mus musculus
  siRNA target sequence for Slc25a16 (NM_175194.2,691-709).
gtctgatgcctactatatt

SEQ ID NO: 574330 - DNA, 19 bp, Mus musculus
  siRNA target sequence for Slc25a16 (NM_175194.2,695-713).
gatgcctactatattagga

SEQ ID NO: 574331 - DNA, 19 bp, Mus musculus
  siRNA target sequence for Slc25a16 (NM_175194.2,808-826).
ccgacaaccccaatgtctt

SEQ ID NO: 574332 - DNA, 19 bp, Mus musculus
  siRNA target sequence for Slc25a16 (NM_175194.2,809-827).
cgacaaccccaatgtctta

SEQ ID NO: 574333 - DNA, 19 bp, Mus musculus
  siRNA target sequence for Slc25a16 (NM_175194.2,816-834).
cccaatgtcttagttttga

SEQ ID NO: 574334 - DNA, 19 bp, Mus musculus
  siRNA target sequence for Slc25a16 (NM_175194.2,873-891).
gcaatagcacagacgatat

SEQ ID NO: 574335 - DNA, 19 bp, Mus musculus
  siRNA target sequence for Slc25a16 (NM_175194.2,886-904).
cgatatcctacccatttga

SEQ ID NO: 574336 - DNA, 19 bp, Mus musculus
  siRNA target sequence for Slc25a16 (NM_175194.2,887-905).
gatatcctacccatttgat

SEQ ID NO: 574337 - DNA, 19 bp, Mus musculus
  siRNA target sequence for Slc25a16 (NM_175194.2,936-954).
gtcctgccggagtttgaga

SEQ ID NO: 574338 - DNA, 19 bp, Mus musculus
  siRNA target sequence for Slc25a16 (NM_175194.2,1003-1021).
ggattcggagaggattgta

SEQ ID NO: 574339 - DNA, 19 bp, Mus musculus
  siRNA target sequence for Slc25a16 (NM_175194.2,1027-1045).
gcttatctctgaactacat

SEQ ID NO: 574340 - DNA, 19 bp, Mus musculus
  siRNA target sequence for Slc25a17 (NM_011399.1,112-130).
gtgttcttccccttggata

SEQ ID NO: 574341 - DNA, 19 bp, Mus musculus
  siRNA target sequence for Slc25a17 (NM_011399.1,123-141).
cttggatactgctagactt

SEQ ID NO: 574342 - DNA, 19 bp, Mus musculus
  siRNA target sequence for Slc25a17 (NM_011399.1,143-161).
ggcttcaggtcgatgagaa

SEQ ID NO: 574343 - DNA, 19 bp, Mus musculus
  siRNA target sequence for Slc25a17 (NM_011399.1,153-171).
cgatgagaaaagaaagtca

SEQ ID NO: 574344 - DNA, 19 bp, Mus musculus
  siRNA target sequence for Slc25a17 (NM_011399.1,805-823).
cgagtcaagcgctttggaa

SEQ ID NO: 574345 - DNA, 19 bp, Mus musculus
  siRNA target sequence for Slc25a17 (NM_011399.1,821-839).
gaataatgggactctacaa

SEQ ID NO: 574346 - DNA, 19 bp, Mus musculus
  siRNA target sequence for Slc25a17 (NM_011399.1,892-910).
cttgtgtacgagaaactga

SEQ ID NO: 574347 - DNA, 19 bp, Mus musculus
  siRNA target sequence for Slc25a17 (NM_011399.1,934-952).
ggcttgaagagcacacata

SEQ ID NO: 574348 - DNA, 19 bp, Mus musculus
  siRNA target sequence for Slc25a19 (NM_026071.1,215-233).
gccctttggacgtcatcaa

SEQ ID NO: 574349 - DNA, 19 bp, Mus musculus
  siRNA target sequence for Slc25a19 (NM_026071.1,386-404).
gctacggagctgtccaatt

SEQ ID NO: 574350 - DNA, 19 bp, Mus musculus
  siRNA target sequence for Slc25a19 (NM_026071.1,387-405).
ctacggagctgtccaattt

SEQ ID NO: 574351 - DNA, 19 bp, Mus musculus
  siRNA target sequence for Slc25a19 (NM_026071.1,399-417).
ccaatttttggcctttgaa

SEQ ID NO: 574352 - DNA, 19 bp, Mus musculus
  siRNA target sequence for Slc25a19 (NM_026071.1,561-579).
gggcgagcccaagatctat

SEQ ID NO: 574353 - DNA, 19 bp, Mus musculus
  siRNA target sequence for Slc25a19 (NM_026071.1,562-580).
ggcgagcccaagatctata

SEQ ID NO: 574354 - DNA, 19 bp, Mus musculus
  siRNA target sequence for Slc25a19 (NM_026071.1,563-581).
gcgagcccaagatctataa

SEQ ID NO: 574355 - DNA, 19 bp, Mus musculus
  siRNA target sequence for Slc25a19 (NM_026071.1,569-587).
ccaagatctataacaatct

SEQ ID NO: 574356 - DNA, 19 bp, Mus musculus
  siRNA target sequence for Slc25a19 (NM_026071.1,594-612).
ggccatacggaccatgtat

SEQ ID NO: 574357 - DNA, 19 bp, Mus musculus
  siRNA target sequence for Slc25a19 (NM_026071.1,595-613).
gccatacggaccatgtata

SEQ ID NO: 574358 - DNA, 19 bp, Mus musculus
  siRNA target sequence for Slc25a19 (NM_026071.1,596-614).
ccatacggaccatgtataa

SEQ ID NO: 574359 - DNA, 19 bp, Mus musculus
  siRNA target sequence for Slc25a19 (NM_026071.1,695-713).
cctgctaccgctccttaaa

SEQ ID NO: 574360 - DNA, 19 bp, Mus musculus
  siRNA target sequence for Slc25a19 (NM_026071.1,696-714).
ctgctaccgctccttaaaa

SEQ ID NO: 574361 - DNA, 19 bp, Mus musculus
  siRNA target sequence for Slc25a19 (NM_026071.1,699-717).
ctaccgctccttaaaacgt

SEQ ID NO: 574362 - DNA, 19 bp, Mus musculus
  siRNA target sequence for Slc25a19 (NM_026071.1,782-800).
gctgtggttcgggagttat

SEQ ID NO: 574363 - DNA, 19 bp, Mus musculus
  siRNA target sequence for Slc25a19 (NM_026071.1,796-814).
gttatcagcaagaccttta

SEQ ID NO: 574364 - DNA, 19 bp, Mus musculus
  siRNA target sequence for Slc25a19 (NM_026071.1,1019-1037).
ggtacgagctcttctgtaa

SEQ ID NO: 574365 - DNA, 19 bp, Mus musculus
  siRNA target sequence for Slc25a20 (NM_020520.2,150-168).
cccatcagtccgtttaaga

SEQ ID NO: 574366 - DNA, 19 bp, Mus musculus
  siRNA target sequence for Slc25a20 (NM_020520.2,151-169).
ccatcagtccgtttaagaa

SEQ ID NO: 574367 - DNA, 19 bp, Mus musculus
  siRNA target sequence for Slc25a20 (NM_020520.2,268-286).
ctggacagccacctatgta

SEQ ID NO: 574368 - DNA, 19 bp, Mus musculus
  siRNA target sequence for Slc25a20 (NM_020520.2,308-326).
ccggaagactcttatgaga

SEQ ID NO: 574369 - DNA, 19 bp, Mus musculus
  siRNA target sequence for Slc25a20 (NM_020520.2,412-430).
gtctggggaagaaactaca

SEQ ID NO: 574370 - DNA, 19 bp, Mus musculus
  siRNA target sequence for Slc25a20 (NM_020520.2,519-537).
cctggagaacggatcaaat

SEQ ID NO: 574371 - DNA, 19 bp, Mus musculus
  siRNA target sequence for Slc25a20 (NM_020520.2,522-540).
ggagaacggatcaaatgct

SEQ ID NO: 574372 - DNA, 19 bp, Mus musculus
  siRNA target sequence for Slc25a20 (NM_020520.2,523-541).
gagaacggatcaaatgctt

SEQ ID NO: 574373 - DNA, 19 bp, Mus musculus
  siRNA target sequence for Slc25a20 (NM_020520.2,545-563).
gcagattcaggcttcttca

SEQ ID NO: 574374 - DNA, 19 bp, Mus musculus
  siRNA target sequence for Slc25a20 (NM_020520.2,556-574).
cttcttcaggggagaacaa

SEQ ID NO: 574375 - DNA, 19 bp, Mus musculus
  siRNA target sequence for Slc25a20 (NM_020520.2,586-604).
ccttggactgcgcaaagaa

SEQ ID NO: 574376 - DNA, 19 bp, Mus musculus
  siRNA target sequence for Slc25a20 (NM_020520.2,595-613).
gcgcaaagaagctgtatca

SEQ ID NO: 574377 - DNA, 19 bp, Mus musculus
  siRNA target sequence for Slc25a20 (NM_020520.2,653-671).
cacactcatgcgagatgtt

SEQ ID NO: 574378 - DNA, 19 bp, Mus musculus
  siRNA target sequence for Slc25a20 (NM_020520.2,673-691).
ctgccagtgggatgtattt

SEQ ID NO: 574379 - DNA, 19 bp, Mus musculus
  siRNA target sequence for Slc25a20 (NM_020520.2,675-693).
gccagtgggatgtatttca

SEQ ID NO: 574380 - DNA, 19 bp, Mus musculus
  siRNA target sequence for Slc25a20 (NM_020520.2,681-699).
gggatgtatttcatgacat

SEQ ID NO: 574381 - DNA, 19 bp, Mus musculus
  siRNA target sequence for Slc25a20 (NM_020520.2,695-713).
gacatatgaatggcttaaa

SEQ ID NO: 574382 - DNA, 19 bp, Mus musculus
  siRNA target sequence for Slc25a20 (NM_020520.2,912-930).
ggagtcacctccttgtaca

SEQ ID NO: 574383 - DNA, 19 bp, Mus musculus
  siRNA target sequence for Slc25a20 (NM_020520.2,923-941).
cttgtacaaagggttcaat

SEQ ID NO: 574384 - DNA, 19 bp, Mus musculus
  siRNA target sequence for Slc25a20 (NM_020520.2,934-952).
ggttcaatgcagtcatgat

SEQ ID NO: 574385 - DNA, 19 bp, Mus musculus
  siRNA target sequence for Slc25a21 (NM_172577.1,628-646).
cctctcgatgtggtgaaaa

SEQ ID NO: 574386 - DNA, 19 bp, Mus musculus
  siRNA target sequence for Slc25a21 (NM_172577.1,670-688).
gtaacagacccacaaagtt

SEQ ID NO: 574387 - DNA, 19 bp, Mus musculus
  siRNA target sequence for Slc25a21 (NM_172577.1,676-694).
gacccacaaagttatagaa

SEQ ID NO: 574388 - DNA, 19 bp, Mus musculus
  siRNA target sequence for Slc25a21 (NM_172577.1,723-741).
ccgaacagaggggttgttt

SEQ ID NO: 574389 - DNA, 19 bp, Mus musculus
  siRNA target sequence for Slc25a21 (NM_172577.1,753-771).
gggaattatcccaccaatt

SEQ ID NO: 574390 - DNA, 19 bp, Mus musculus
  siRNA target sequence for Slc25a21 (NM_172577.1,754-772).
ggaattatcccaccaattt

SEQ ID NO: 574391 - DNA, 19 bp, Mus musculus
  siRNA target sequence for Slc25a21 (NM_172577.1,755-773).
gaattatcccaccaatttt

SEQ ID NO: 574392 - DNA, 19 bp, Mus musculus
  siRNA target sequence for Slc25a21 (NM_172577.1,806-824).
ctacctttgagctgtacaa

SEQ ID NO: 574393 - DNA, 19 bp, Mus musculus
  siRNA target sequence for Slc25a21 (NM_172577.1,834-852).
gggatatatgtcactatca

SEQ ID NO: 574394 - DNA, 19 bp, Mus musculus
  siRNA target sequence for Slc25a21 (NM_172577.1,868-886).
ctcatcgctggcttaggat

SEQ ID NO: 574395 - DNA, 19 bp, Mus musculus
  siRNA target sequence for Slc25a21 (NM_172577.1,879-897).
cttaggatcgggactaaca

SEQ ID NO: 574396 - DNA, 19 bp, Mus musculus
  siRNA target sequence for Slc25a21 (NM_172577.1,896-914).
cagaagctgtcgtggttaa

SEQ ID NO: 574397 - DNA, 19 bp, Mus musculus
  siRNA target sequence for Slc25a21 (NM_172577.1,917-935).
ctttcgaggtggtaaaagt

SEQ ID NO: 574398 - DNA, 19 bp, Mus musculus
  siRNA target sequence for Slc25a21 (NM_172577.1,943-961).
caagtcaatcggaacttgt

SEQ ID NO: 574399 - DNA, 19 bp, Mus musculus
  siRNA target sequence for Slc25a21 (NM_172577.1,946-964).
gtcaatcggaacttgttca

SEQ ID NO: 574400 - DNA, 19 bp, Mus musculus
  siRNA target sequence for Slc25a21 (NM_172577.1,948-966).
caatcggaacttgttcaaa

SEQ ID NO: 574401 - DNA, 19 bp, Mus musculus
  siRNA target sequence for Slc25a21 (NM_172577.1,970-988).
caaccatctacttttgctt

SEQ ID NO: 574402 - DNA, 19 bp, Mus musculus
  siRNA target sequence for Slc25a21 (NM_172577.1,991-1009).
gcaagacaaatcattaaga

SEQ ID NO: 574403 - DNA, 19 bp, Mus musculus
  siRNA target sequence for Slc25a21 (NM_172577.1,1060-1078).
ggacgtcacggaattttca

SEQ ID NO: 574404 - DNA, 19 bp, Mus musculus
  siRNA target sequence for Slc25a21 (NM_172577.1,1061-1079).
gacgtcacggaattttcaa

SEQ ID NO: 574405 - DNA, 19 bp, Mus musculus
  siRNA target sequence for Slc25a21 (NM_172577.1,1063-1081).
cgtcacggaattttcaaca

SEQ ID NO: 574406 - DNA, 19 bp, Mus musculus
  siRNA target sequence for Slc25a21 (NM_172577.1,1064-1082).
gtcacggaattttcaacat

SEQ ID NO: 574407 - DNA, 19 bp, Mus musculus
  siRNA target sequence for Slc25a21 (NM_172577.1,1070-1088).
gaattttcaacatggttta

SEQ ID NO: 574408 - DNA, 19 bp, Mus musculus
  siRNA target sequence for Slc25a21 (NM_172577.1,1101-1119).
ccacaacgtcaaaaatatt

SEQ ID NO: 574409 - DNA, 19 bp, Mus musculus
  siRNA target sequence for Slc25a21 (NM_172577.1,1102-1120).
cacaacgtcaaaaatatta

SEQ ID NO: 574410 - DNA, 19 bp, Mus musculus
  siRNA target sequence for Slc25a21 (NM_172577.1,1212-1230).
ctttgatgttgcaaagagt

SEQ ID NO: 574411 - DNA, 19 bp, Mus musculus
  siRNA target sequence for Slc25a21 (NM_172577.1,1250-1268).
cagttcctggagagatcaa

SEQ ID NO: 574412 - DNA, 19 bp, Mus musculus
  siRNA target sequence for Slc25a21 (NM_172577.1,1380-1398).
gatgttgctggtgtatgaa

SEQ ID NO: 574413 - DNA, 19 bp, Mus musculus
  siRNA target sequence for Slc25a26 (NM_026255.2,211-229).
caaggctggtggatttcgt

SEQ ID NO: 574414 - DNA, 19 bp, Mus musculus
  siRNA target sequence for Slc25a26 (NM_026255.2,257-275).
gctgttggatcctttccta

SEQ ID NO: 574415 - DNA, 19 bp, Mus musculus
  siRNA target sequence for Slc25a26 (NM_026255.2,272-290).
cctaacgctgctgcatttt

SEQ ID NO: 574416 - DNA, 19 bp, Mus musculus
  siRNA target sequence for Slc25a26 (NM_026255.2,273-291).
ctaacgctgctgcattttt

SEQ ID NO: 574417 - DNA, 19 bp, Mus musculus
  siRNA target sequence for Slc25a26 (NM_026255.2,400-418).
gattcgagttccttctgaa

SEQ ID NO: 574418 - DNA, 19 bp, Mus musculus
  siRNA target sequence for Slc25a26 (NM_026255.2,504-522).
gactgtaccgaggctataa

SEQ ID NO: 574419 - DNA, 19 bp, Mus musculus
  siRNA target sequence for Slc25a26 (NM_026255.2,506-524).
ctgtaccgaggctataaaa

SEQ ID NO: 574420 - DNA, 19 bp, Mus musculus
  siRNA target sequence for Slc25a26 (NM_026255.2,530-548).
gttttaagagagattcctt

SEQ ID NO: 574421 - DNA, 19 bp, Mus musculus
  siRNA target sequence for Slc25a28 (NM_145156.1,464-482).
gctctctggagaatcatga

SEQ ID NO: 574422 - DNA, 19 bp, Mus musculus
  siRNA target sequence for Slc25a28 (NM_145156.1,542-560).
cctgcccacgccctctatt

SEQ ID NO: 574423 - DNA, 19 bp, Mus musculus
  siRNA target sequence for Slc25a28 (NM_145156.1,543-561).
ctgcccacgccctctattt

SEQ ID NO: 574424 - DNA, 19 bp, Mus musculus
  siRNA target sequence for Slc25a28 (NM_145156.1,563-581).
gcctgctacgaaaagttaa

SEQ ID NO: 574425 - DNA, 19 bp, Mus musculus
  siRNA target sequence for Slc25a28 (NM_145156.1,564-582).
cctgctacgaaaagttaaa

SEQ ID NO: 574426 - DNA, 19 bp, Mus musculus
  siRNA target sequence for Slc25a28 (NM_145156.1,643-661).
cggatgtgtggcgacatta

SEQ ID NO: 574427 - DNA, 19 bp, Mus musculus
  siRNA target sequence for Slc25a28 (NM_145156.1,652-670).
ggcgacattacttcatgat

SEQ ID NO: 574428 - DNA, 19 bp, Mus musculus
  siRNA target sequence for Slc25a28 (NM_145156.1,825-843).
ccttccaagccattcactt

SEQ ID NO: 574429 - DNA, 19 bp, Mus musculus
  siRNA target sequence for Slc25a28 (NM_145156.1,956-974).
ccactggacgtttgtaaaa

SEQ ID NO: 574430 - DNA, 19 bp, Mus musculus
  siRNA target sequence for Slc25a28 (NM_145156.1,1051-1069).
caggacggtctatcaagta

SEQ ID NO: 574431 - DNA, 19 bp, Mus musculus
  siRNA target sequence for Slc25a28 (NM_145156.1,1135-1153).
catcgcatggtctgtgtat

SEQ ID NO: 574432 - DNA, 19 bp, Mus musculus
  siRNA target sequence for Slc25a28 (NM_145156.1,1138-1156).
cgcatggtctgtgtatgaa

SEQ ID NO: 574433 - DNA, 19 bp, Mus musculus
  siRNA target sequence for Slc25a28 (NM_145156.1,1139-1157).
gcatggtctgtgtatgaat

SEQ ID NO: 574434 - DNA, 19 bp, Mus musculus
  siRNA target sequence for Slc25a28 (NM_145156.1,1140-1158).
catggtctgtgtatgaatt

SEQ ID NO: 574435 - DNA, 19 bp, Mus musculus
  siRNA target sequence for Slc25a28 (NM_145156.1,1146-1164).
ctgtgtatgaatttttcaa

SEQ ID NO: 574436 - DNA, 19 bp, Mus musculus
  siRNA target sequence for Slc25a28 (NM_145156.1,1154-1172).
gaatttttcaaatacctaa

SEQ ID NO: 574437 - DNA, 19 bp, Mus musculus
  siRNA target sequence for Slc25a3 (NM_133668.2,288-306).
gttcccctggacttagtaa

SEQ ID NO: 574438 - DNA, 19 bp, Mus musculus
  siRNA target sequence for Slc25a3 (NM_133668.2,291-309).
cccctggacttagtaaagt

SEQ ID NO: 574439 - DNA, 19 bp, Mus musculus
  siRNA target sequence for Slc25a3 (NM_133668.2,321-339).
gtggaccctcagaagtaca

SEQ ID NO: 574440 - DNA, 19 bp, Mus musculus
  siRNA target sequence for Slc25a3 (NM_133668.2,335-353).
gtacaaaggcatatttaat

SEQ ID NO: 574441 - DNA, 19 bp, Mus musculus
  siRNA target sequence for Slc25a3 (NM_133668.2,387-405).
cgtggtttggctaaaggat

SEQ ID NO: 574442 - DNA, 19 bp, Mus musculus
  siRNA target sequence for Slc25a3 (NM_133668.2,446-464).
caaattcggcttttatgaa

SEQ ID NO: 574443 - DNA, 19 bp, Mus musculus
  siRNA target sequence for Slc25a3 (NM_133668.2,475-493).
ccttatatagcaacatact

SEQ ID NO: 574444 - DNA, 19 bp, Mus musculus
  siRNA target sequence for Slc25a3 (NM_133668.2,476-494).
cttatatagcaacatactt

SEQ ID NO: 574445 - DNA, 19 bp, Mus musculus
  siRNA target sequence for Slc25a3 (NM_133668.2,517-535).
ggcgcacatcactgtattt

SEQ ID NO: 574446 - DNA, 19 bp, Mus musculus
  siRNA target sequence for Slc25a3 (NM_133668.2,518-536).
gcgcacatcactgtattta

SEQ ID NO: 574447 - DNA, 19 bp, Mus musculus
  siRNA target sequence for Slc25a3 (NM_133668.2,521-539).
cacatcactgtatttagct

SEQ ID NO: 574448 - DNA, 19 bp, Mus musculus
  siRNA target sequence for Slc25a3 (NM_133668.2,592-610).
ctgctaaagttcgaattca

SEQ ID NO: 574449 - DNA, 19 bp, Mus musculus
  siRNA target sequence for Slc25a3 (NM_133668.2,594-612).
gctaaagttcgaattcaaa

SEQ ID NO: 574450 - DNA, 19 bp, Mus musculus
  siRNA target sequence for Slc25a3 (NM_133668.2,724-742).
cgtacaccatgatgaagtt

SEQ ID NO: 574451 - DNA, 19 bp, Mus musculus
  siRNA target sequence for Slc25a3 (NM_133668.2,789-807).
cctaagccccgaagtgaat

SEQ ID NO: 574452 - DNA, 19 bp, Mus musculus
  siRNA target sequence for Slc25a3 (NM_133668.2,794-812).
gccccgaagtgaatgtaca

SEQ ID NO: 574453 - DNA, 19 bp, Mus musculus
  siRNA target sequence for Slc25a3 (NM_133668.2,795-813).
ccccgaagtgaatgtacaa

SEQ ID NO: 574454 - DNA, 19 bp, Mus musculus
  siRNA target sequence for Slc25a3 (NM_133668.2,796-814).
cccgaagtgaatgtacaaa

SEQ ID NO: 574455 - DNA, 19 bp, Mus musculus
  siRNA target sequence for Slc25a3 (NM_133668.2,979-997).
ggctcttcgcccgaatcat

SEQ ID NO: 574456 - DNA, 19 bp, Mus musculus
  siRNA target sequence for Slc25a3 (NM_133668.2,981-999).
ctcttcgcccgaatcatca

SEQ ID NO: 574457 - DNA, 19 bp, Mus musculus
  siRNA target sequence for Slc25a3 (NM_133668.2,1103-1121).
gaagaagcttgggttaact

SEQ ID NO: 574458 - DNA, 19 bp, Mus musculus
  siRNA target sequence for Slc40a1 (NM_016917.1,311-329).
gtggatccttagcaaacta

SEQ ID NO: 574459 - DNA, 19 bp, Mus musculus
  siRNA target sequence for Slc40a1 (NM_016917.1,327-345).
ctacctgacctcagcaaaa

SEQ ID NO: 574460 - DNA, 19 bp, Mus musculus
  siRNA target sequence for Slc40a1 (NM_016917.1,414-432).
gtttctggtggaactctat

SEQ ID NO: 574461 - DNA, 19 bp, Mus musculus
  siRNA target sequence for Slc40a1 (NM_016917.1,489-507).
ggtcctgggagccatcatt

SEQ ID NO: 574462 - DNA, 19 bp, Mus musculus
  siRNA target sequence for Slc40a1 (NM_016917.1,508-526).
ggtgactgggtggataaga

SEQ ID NO: 574463 - DNA, 19 bp, Mus musculus
  siRNA target sequence for Slc40a1 (NM_016917.1,509-527).
gtgactgggtggataagaa

SEQ ID NO: 574464 - DNA, 19 bp, Mus musculus
  siRNA target sequence for Slc40a1 (NM_016917.1,587-605).
gcggaatcatcctgatgat

SEQ ID NO: 574465 - DNA, 19 bp, Mus musculus
  siRNA target sequence for Slc40a1 (NM_016917.1,672-690).
cctgatcatcactattgca

SEQ ID NO: 574466 - DNA, 19 bp, Mus musculus
  siRNA target sequence for Slc40a1 (NM_016917.1,673-691).
ctgatcatcactattgcaa

SEQ ID NO: 574467 - DNA, 19 bp, Mus musculus
  siRNA target sequence for Slc40a1 (NM_016917.1,678-696).
catcactattgcaaacatt

SEQ ID NO: 574468 - DNA, 19 bp, Mus musculus
  siRNA target sequence for Slc40a1 (NM_016917.1,717-735).
cactgcgatcacaatccaa

SEQ ID NO: 574469 - DNA, 19 bp, Mus musculus
  siRNA target sequence for Slc40a1 (NM_016917.1,786-804).
catgaatgctaccattaga

SEQ ID NO: 574470 - DNA, 19 bp, Mus musculus
  siRNA target sequence for Slc40a1 (NM_016917.1,806-824).
ggattgaccagctaaccaa

SEQ ID NO: 574471 - DNA, 19 bp, Mus musculus
  siRNA target sequence for Slc40a1 (NM_016917.1,841-859).
gctgtcggccagattatga

SEQ ID NO: 574472 - DNA, 19 bp, Mus musculus
  siRNA target sequence for Slc40a1 (NM_016917.1,844-862).
gtcggccagattatgacat

SEQ ID NO: 574473 - DNA, 19 bp, Mus musculus
  siRNA target sequence for Slc40a1 (NM_016917.1,846-864).
cggccagattatgacattt

SEQ ID NO: 574474 - DNA, 19 bp, Mus musculus
  siRNA target sequence for Slc40a1 (NM_016917.1,1011-1029).
gcagctgacctcacctaaa

SEQ ID NO: 574475 - DNA, 19 bp, Mus musculus
  siRNA target sequence for Slc40a1 (NM_016917.1,1014-1032).
gctgacctcacctaaagat

SEQ ID NO: 574476 - DNA, 19 bp, Mus musculus
  siRNA target sequence for Slc40a1 (NM_016917.1,1015-1033).
ctgacctcacctaaagata

SEQ ID NO: 574477 - DNA, 19 bp, Mus musculus
  siRNA target sequence for Slc40a1 (NM_016917.1,1017-1035).
gacctcacctaaagatact

SEQ ID NO: 574478 - DNA, 19 bp, Mus musculus
  siRNA target sequence for Slc40a1 (NM_016917.1,1082-1100).
ccaacatccgtgaacttga

SEQ ID NO: 574479 - DNA, 19 bp, Mus musculus
  siRNA target sequence for Slc40a1 (NM_016917.1,1083-1101).
caacatccgtgaacttgaa

SEQ ID NO: 574480 - DNA, 19 bp, Mus musculus
  siRNA target sequence for Slc40a1 (NM_016917.1,1086-1104).
catccgtgaacttgaatgt

SEQ ID NO: 574481 - DNA, 19 bp, Mus musculus
  siRNA target sequence for Slc40a1 (NM_016917.1,1162-1180).
ggatgggtctcctactata

SEQ ID NO: 574482 - DNA, 19 bp, Mus musculus
  siRNA target sequence for Slc40a1 (NM_016917.1,1163-1181).
gatgggtctcctactataa

SEQ ID NO: 574483 - DNA, 19 bp, Mus musculus
  siRNA target sequence for Slc40a1 (NM_016917.1,1166-1184).
gggtctcctactataacca

SEQ ID NO: 574484 - DNA, 19 bp, Mus musculus
  siRNA target sequence for Slc40a1 (NM_016917.1,1176-1194).
ctataaccagccagtgttt

SEQ ID NO: 574485 - DNA, 19 bp, Mus musculus
  siRNA target sequence for Slc40a1 (NM_016917.1,1210-1228).
ctggctttcctctatatga

SEQ ID NO: 574486 - DNA, 19 bp, Mus musculus
  siRNA target sequence for Slc40a1 (NM_016917.1,1212-1230).
ggctttcctctatatgaca

SEQ ID NO: 574487 - DNA, 19 bp, Mus musculus
  siRNA target sequence for Slc40a1 (NM_016917.1,1279-1297).
ctgagtggatccatcctta

SEQ ID NO: 574488 - DNA, 19 bp, Mus musculus
  siRNA target sequence for Slc40a1 (NM_016917.1,1283-1301).
gtggatccatccttagtat

SEQ ID NO: 574489 - DNA, 19 bp, Mus musculus
  siRNA target sequence for Slc40a1 (NM_016917.1,1285-1303).
ggatccatccttagtattt

SEQ ID NO: 574490 - DNA, 19 bp, Mus musculus
  siRNA target sequence for Slc40a1 (NM_016917.1,1378-1396).
gttcggactggtctattct

SEQ ID NO: 574491 - DNA, 19 bp, Mus musculus
  siRNA target sequence for Slc40a1 (NM_016917.1,1406-1424).
cccagctttcctgtttaat

SEQ ID NO: 574492 - DNA, 19 bp, Mus musculus
  siRNA target sequence for Slc40a1 (NM_016917.1,1430-1448).
gtgtgatctccgtattcat

SEQ ID NO: 574493 - DNA, 19 bp, Mus musculus
  siRNA target sequence for Slc40a1 (NM_016917.1,1527-1545).
cccaactaccaaaatacct

SEQ ID NO: 574494 - DNA, 19 bp, Mus musculus
  siRNA target sequence for Slc40a1 (NM_016917.1,1543-1561).
cctgagaccgtctttacaa

SEQ ID NO: 574495 - DNA, 19 bp, Mus musculus
  siRNA target sequence for Slc40a1 (NM_016917.1,1548-1566).
gaccgtctttacaacagaa

SEQ ID NO: 574496 - DNA, 19 bp, Mus musculus
  siRNA target sequence for Slc40a1 (NM_016917.1,1550-1568).
ccgtctttacaacagaaat

SEQ ID NO: 574497 - DNA, 19 bp, Mus musculus
  siRNA target sequence for Slc40a1 (NM_016917.1,1591-1609).
gtccatgagatgagtacta

SEQ ID NO: 574498 - DNA, 19 bp, Mus musculus
  siRNA target sequence for Slc40a1 (NM_016917.1,1649-1667).
gagtcattgctgctagaat

SEQ ID NO: 574499 - DNA, 19 bp, Mus musculus
  siRNA target sequence for Slc40a1 (NM_016917.1,1828-1846).
ggcttgctggtattgattt

SEQ ID NO: 574500 - DNA, 19 bp, Mus musculus
  siRNA target sequence for Slc40a1 (NM_016917.1,1858-1876).
gtggcaatgggacatctta

SEQ ID NO: 574501 - DNA, 19 bp, Mus musculus
  siRNA target sequence for Slc40a1 (NM_016917.1,1861-1879).
gcaatgggacatcttatgt

SEQ ID NO: 574502 - DNA, 19 bp, Mus musculus
  siRNA target sequence for Slc40a1 (NM_016917.1,1862-1880).
caatgggacatcttatgta

SEQ ID NO: 574503 - DNA, 19 bp, Mus musculus
  siRNA target sequence for Slc40a1 (NM_016917.1,1928-1946).
gtcctgatgaaaaagaagt

SEQ ID NO: 574504 - DNA, 19 bp, Mus musculus
  siRNA target sequence for Tcn2 (NM_015749.1,170-188).
ggggctcttgctgaattct

SEQ ID NO: 574505 - DNA, 19 bp, Mus musculus
  siRNA target sequence for Tcn2 (NM_015749.1,191-209).
gtaataccacggatagaca

SEQ ID NO: 574506 - DNA, 19 bp, Mus musculus
  siRNA target sequence for Tcn2 (NM_015749.1,229-247).
gggtcaacgtcttttacct

SEQ ID NO: 574507 - DNA, 19 bp, Mus musculus
  siRNA target sequence for Tcn2 (NM_015749.1,230-248).
ggtcaacgtcttttacctt

SEQ ID NO: 574508 - DNA, 19 bp, Mus musculus
  siRNA target sequence for Tcn2 (NM_015749.1,347-365).
cacagcctcaagatccatt

SEQ ID NO: 574509 - DNA, 19 bp, Mus musculus
  siRNA target sequence for Tcn2 (NM_015749.1,391-409).
ctccagcgatgataacagt

SEQ ID NO: 574510 - DNA, 19 bp, Mus musculus
  siRNA target sequence for Tcn2 (NM_015749.1,547-565).
ggccattgggcacaatcat

SEQ ID NO: 574511 - DNA, 19 bp, Mus musculus
  siRNA target sequence for Tcn2 (NM_015749.1,549-567).
ccattgggcacaatcatga

SEQ ID NO: 574512 - DNA, 19 bp, Mus musculus
  siRNA target sequence for Tcn2 (NM_015749.1,572-590).
caccccaacaccaactatt

SEQ ID NO: 574513 - DNA, 19 bp, Mus musculus
  siRNA target sequence for Tcn2 (NM_015749.1,661-679).
gctcctgtatgctgttgaa

SEQ ID NO: 574514 - DNA, 19 bp, Mus musculus
  siRNA target sequence for Tcn2 (NM_015749.1,664-682).
cctgtatgctgttgaacat

SEQ ID NO: 574515 - DNA, 19 bp, Mus musculus
  siRNA target sequence for Tcn2 (NM_015749.1,674-692).
gttgaacatgactacttta

SEQ ID NO: 574516 - DNA, 19 bp, Mus musculus
  siRNA target sequence for Tcn2 (NM_015749.1,677-695).
gaacatgactactttacct

SEQ ID NO: 574517 - DNA, 19 bp, Mus musculus
  siRNA target sequence for Tcn2 (NM_015749.1,747-765).
cctgtttggagcgattcaa

SEQ ID NO: 574518 - DNA, 19 bp, Mus musculus
  siRNA target sequence for Tcn2 (NM_015749.1,748-766).
ctgtttggagcgattcaat

SEQ ID NO: 574519 - DNA, 19 bp, Mus musculus
  siRNA target sequence for Tcn2 (NM_015749.1,750-768).
gtttggagcgattcaattt

SEQ ID NO: 574520 - DNA, 19 bp, Mus musculus
  siRNA target sequence for Tcn2 (NM_015749.1,755-773).
gagcgattcaatttcaact

SEQ ID NO: 574521 - DNA, 19 bp, Mus musculus
  siRNA target sequence for Tcn2 (NM_015749.1,806-824).
gagacagtgcgagagaaaa

SEQ ID NO: 574522 - DNA, 19 bp, Mus musculus
  siRNA target sequence for Tcn2 (NM_015749.1,985-1003).
ccaaaatcctctgatgatt

SEQ ID NO: 574523 - DNA, 19 bp, Mus musculus
  siRNA target sequence for Tcn2 (NM_015749.1,1158-1176).
caccatacgaacagacatt

SEQ ID NO: 574524 - DNA, 19 bp, Mus musculus
  siRNA target sequence for Tcn2 (NM_015749.1,1161-1179).
catacgaacagacattttt

SEQ ID NO: 574525 - DNA, 19 bp, Mus musculus
  siRNA target sequence for Tcn2 (NM_015749.1,1270-1288).
cccctacctgacatctgta

SEQ ID NO: 574526 - DNA, 19 bp, Mus musculus
  siRNA target sequence for Tcn2 (NM_015749.1,1301-1319).
gctggggaccgagaatatt

SEQ ID NO: 574527 - DNA, 19 bp, Mus musculus
  siRNA target sequence for Tcn2 (NM_015749.1,1378-1396).
ccaggacggggaaaccatt

SEQ ID NO: 574528 - DNA, 19 bp, Mus musculus
  siRNA target sequence for Tcn2 (NM_015749.1,1397-1415).
gagctgcggctagttagat

SEQ ID NO: 574529 - DNA, 19 bp, Mus musculus
  siRNA target sequence for Ucp1 (NM_009463.2,283-301).
cttctcagccggagtttca

SEQ ID NO: 574530 - DNA, 19 bp, Mus musculus
  siRNA target sequence for Ucp1 (NM_009463.2,374-392).
caggcttccagtaccatta

SEQ ID NO: 574531 - DNA, 19 bp, Mus musculus
  siRNA target sequence for Ucp1 (NM_009463.2,377-395).
gcttccagtaccattaggt

SEQ ID NO: 574532 - DNA, 19 bp, Mus musculus
  siRNA target sequence for Ucp1 (NM_009463.2,381-399).
ccagtaccattaggtataa

SEQ ID NO: 574533 - DNA, 19 bp, Mus musculus
  siRNA target sequence for Ucp1 (NM_009463.2,382-400).
cagtaccattaggtataaa

SEQ ID NO: 574534 - DNA, 19 bp, Mus musculus
  siRNA target sequence for Ucp1 (NM_009463.2,691-709).
ctacacggggacctacaat

SEQ ID NO: 574535 - DNA, 19 bp, Mus musculus
  siRNA target sequence for Ucp1 (NM_009463.2,696-714).
cggggacctacaatgctta

SEQ ID NO: 574536 - DNA, 19 bp, Mus musculus
  siRNA target sequence for Ucp1 (NM_009463.2,719-737).
gttatagccaccacagaaa

SEQ ID NO: 574537 - DNA, 19 bp, Mus musculus
  siRNA target sequence for Ucp1 (NM_009463.2,759-777).
ggacgacccctaatctaat

SEQ ID NO: 574538 - DNA, 19 bp, Mus musculus
  siRNA target sequence for Ucp1 (NM_009463.2,765-783).
cccctaatctaatgagaaa

SEQ ID NO: 574539 - DNA, 19 bp, Mus musculus
  siRNA target sequence for Ucp1 (NM_009463.2,766-784).
ccctaatctaatgagaaat

SEQ ID NO: 574540 - DNA, 19 bp, Mus musculus
  siRNA target sequence for Ucp1 (NM_009463.2,768-786).
ctaatctaatgagaaatgt

SEQ ID NO: 574541 - DNA, 19 bp, Mus musculus
  siRNA target sequence for Ucp1 (NM_009463.2,778-796).
gagaaatgtcatcatcaat

SEQ ID NO: 574542 - DNA, 19 bp, Mus musculus
  siRNA target sequence for Ucp1 (NM_009463.2,798-816).
gtacagagctggtaacata

SEQ ID NO: 574543 - DNA, 19 bp, Mus musculus
  siRNA target sequence for Ucp1 (NM_009463.2,801-819).
cagagctggtaacatatga

SEQ ID NO: 574544 - DNA, 19 bp, Mus musculus
  siRNA target sequence for Ucp1 (NM_009463.2,834-852).
cccttgtaaacaacaaaat

SEQ ID NO: 574545 - DNA, 19 bp, Mus musculus
  siRNA target sequence for Ucp1 (NM_009463.2,866-884).
gtcccctgccatttactgt

SEQ ID NO: 574546 - DNA, 19 bp, Mus musculus
  siRNA target sequence for Ucp1 (NM_009463.2,890-908).
cttgttgccgggttttgca

SEQ ID NO: 574547 - DNA, 19 bp, Mus musculus
  siRNA target sequence for Ucp1 (NM_009463.2,1019-1037).
ggaccgacggcctttttca

SEQ ID NO: 574548 - DNA, 19 bp, Mus musculus
  siRNA target sequence for Ucp1 (NM_009463.2,1020-1038).
gaccgacggcctttttcaa

SEQ ID NO: 574549 - DNA, 19 bp, Mus musculus
  siRNA target sequence for Ucp1 (NM_009463.2,1068-1086).
ggtcctggaacgtcatcat

SEQ ID NO: 574550 - DNA, 19 bp, Mus musculus
  siRNA target sequence for Ucp1 (NM_009463.2,1071-1089).
cctggaacgtcatcatgtt

SEQ ID NO: 574551 - DNA, 19 bp, Mus musculus
  siRNA target sequence for Ucp2 (NM_011671.2,583-601).
gtccacgcagcctctacaa

SEQ ID NO: 574552 - DNA, 19 bp, Mus musculus
  siRNA target sequence for Ucp2 (NM_011671.2,912-930).
gcccgtaatgccattgtca

SEQ ID NO: 574553 - DNA, 19 bp, Mus musculus
  siRNA target sequence for Ucp2 (NM_011671.2,913-931).
cccgtaatgccattgtcaa

SEQ ID NO: 574554 - DNA, 19 bp, Mus musculus
  siRNA target sequence for Ucp2 (NM_011671.2,1002-1020).
ctcccttgccacttcactt

SEQ ID NO: 574555 - DNA, 19 bp, Mus musculus
  siRNA target sequence for Ucp2 (NM_011671.2,1071-1089).
gtggtcaagacgagataca

SEQ ID NO: 574556 - DNA, 19 bp, Mus musculus
  siRNA target sequence for Ucp2 (NM_011671.2,1074-1092).
gtcaagacgagatacatga

SEQ ID NO: 574557 - DNA, 19 bp, Mus musculus
  siRNA target sequence for Ucp2 (NM_011671.2,1123-1141).
gtcactgtgcccttaccat

SEQ ID NO: 574558 - DNA, 19 bp, Mus musculus
  siRNA target sequence for Ucp2 (NM_011671.2,1207-1225).
cctggaacgtagtgatgtt

SEQ ID NO: 574559 - DNA, 19 bp, Mus musculus
  siRNA target sequence for Ucp2 (NM_011671.2,1208-1226).
ctggaacgtagtgatgttt

SEQ ID NO: 574560 - DNA, 19 bp, Mus musculus
  siRNA target sequence for Ucp2 (NM_011671.2,1254-1272).
ctaatggctgcctaccaat

SEQ ID NO: 574561 - DNA, 19 bp, Mus musculus
  siRNA target sequence for Ucp3 (NM_009464.2,226-244).
ctcccacaacggttgtgaa

SEQ ID NO: 574562 - DNA, 19 bp, Mus musculus
  siRNA target sequence for Ucp3 (NM_009464.2,257-275).
cggcactgcggcctgtttt

SEQ ID NO: 574563 - DNA, 19 bp, Mus musculus
  siRNA target sequence for Ucp3 (NM_009464.2,605-623).
ggtgaaggtccgatttcaa

SEQ ID NO: 574564 - DNA, 19 bp, Mus musculus
  siRNA target sequence for Ucp3 (NM_009464.2,809-827).
ggagtctcacctgtttact

SEQ ID NO: 574565 - DNA, 19 bp, Mus musculus
  siRNA target sequence for Ucp3 (NM_009464.2,946-964).
gcagccctctgcactgtat

SEQ ID NO: 574566 - DNA, 19 bp, Mus musculus
  siRNA target sequence for Ucp3 (NM_009464.2,1046-1064).
cgtgatgatgtttgtaaca

SEQ ID NO: 574567 - DNA, 19 bp, Mus musculus
  siRNA target sequence for Ucp3 (NM_009464.2,1076-1094).
gaagagggccttaatgaaa

SEQ ID NO: 574568 - DNA, 19 bp, Mus musculus
  siRNA target sequence for Mcpt7 (NM_031187.2,425-443).
cgtaagcagtacctctatt

SEQ ID NO: 574569 - DNA, 19 bp, Mus musculus
  siRNA target sequence for Mcpt7 (NM_031187.2,426-444).
gtaagcagtacctctatta

SEQ ID NO: 574570 - DNA, 19 bp, Mus musculus
  siRNA target sequence for Mcpt7 (NM_031187.2,663-681).
cgccaccatttcctttgaa

SEQ ID NO: 574571 - DNA, 19 bp, Mus musculus
  siRNA target sequence for Mcpt7 (NM_031187.2,685-703).
ggtgcaagttcccattata

SEQ ID NO: 574572 - DNA, 19 bp, Mus musculus
  siRNA target sequence for Mcpt7 (NM_031187.2,688-706).
gcaagttcccattatagaa

SEQ ID NO: 574573 - DNA, 19 bp, Mus musculus
  siRNA target sequence for Mcpt7 (NM_031187.2,750-768).
gtgacaatgtccacattgt

SEQ ID NO: 574574 - DNA, 19 bp, Mus musculus
  siRNA target sequence for Mcpt7 (NM_031187.2,927-945).
cccgggtcacctattactt

SEQ ID NO: 574575 - DNA, 19 bp, Mus musculus
  siRNA target sequence for 1700016G05Rik (NM_026317.1,323-341).
gcatacctcaagtctaact

SEQ ID NO: 574576 - DNA, 19 bp, Mus musculus
  siRNA target sequence for 1700016G05Rik (NM_026317.1,324-342).
catacctcaagtctaactt

SEQ ID NO: 574577 - DNA, 19 bp, Mus musculus
  siRNA target sequence for 1700016G05Rik (NM_026317.1,351-369).
gcgtgggtgtcctcatcaa

SEQ ID NO: 574578 - DNA, 19 bp, Mus musculus
  siRNA target sequence for 1700016G05Rik (NM_026317.1,352-370).
cgtgggtgtcctcatcaaa

SEQ ID NO: 574579 - DNA, 19 bp, Mus musculus
  siRNA target sequence for 1700016G05Rik (NM_026317.1,386-404).
gccccatctcactgctatt

SEQ ID NO: 574580 - DNA, 19 bp, Mus musculus
  siRNA target sequence for 1700016G05Rik (NM_026317.1,387-405).
ccccatctcactgctattt

SEQ ID NO: 574581 - DNA, 19 bp, Mus musculus
  siRNA target sequence for 1700016G05Rik (NM_026317.1,388-406).
cccatctcactgctattta

SEQ ID NO: 574582 - DNA, 19 bp, Mus musculus
  siRNA target sequence for 1700016G05Rik (NM_026317.1,417-435).
gggtgatgttgggaaattt

SEQ ID NO: 574583 - DNA, 19 bp, Mus musculus
  siRNA target sequence for 1700016G05Rik (NM_026317.1,588-606).
ccatagccaccactaatgt

SEQ ID NO: 574584 - DNA, 19 bp, Mus musculus
  siRNA target sequence for 1700016G05Rik (NM_026317.1,699-717).
ccgtgatgacggacaaaga

SEQ ID NO: 574585 - DNA, 19 bp, Mus musculus
  siRNA target sequence for 1700016G05Rik (NM_026317.1,756-774).
ccttatgtgtcagatttgt

SEQ ID NO: 574586 - DNA, 19 bp, Mus musculus
  siRNA target sequence for 1700016G05Rik (NM_026317.1,806-824).
gctgtagctactgtcattt

SEQ ID NO: 574587 - DNA, 19 bp, Mus musculus
  siRNA target sequence for 1700016G05Rik (NM_026317.1,872-890).
gacgttggcatctatacca

SEQ ID NO: 574588 - DNA, 19 bp, Mus musculus
  siRNA target sequence for 1700016G05Rik (NM_026317.1,879-897).
gcatctataccaacattta

SEQ ID NO: 574589 - DNA, 19 bp, Mus musculus
  siRNA target sequence for 1700016G05Rik (NM_026317.1,883-901).
ctataccaacatttactca

SEQ ID NO: 574590 - DNA, 19 bp, Mus musculus
  siRNA target sequence for 1700016G05Rik (NM_026317.1,888-906).
ccaacatttactcatatgt

SEQ ID NO: 574591 - DNA, 19 bp, Mus musculus
  siRNA target sequence for 1700016G05Rik (NM_026317.1,905-923).
gtaccatggattgagaaaa

SEQ ID NO: 574592 - DNA, 19 bp, Mus musculus
  siRNA target sequence for 1700016G05Rik (NM_026317.1,908-926).
ccatggattgagaaaacca

SEQ ID NO: 574593 - DNA, 19 bp, Mus musculus
  siRNA target sequence for 1700020H15 (NM_175020.1,290-308).
gagtcctgatccatccttt

SEQ ID NO: 574594 - DNA, 19 bp, Mus musculus
  siRNA target sequence for 1700020H15 (NM_175020.1,341-359).
cgaaccttcaagtgattct

SEQ ID NO: 574595 - DNA, 19 bp, Mus musculus
  siRNA target sequence for 1700020H15 (NM_175020.1,342-360).
gaaccttcaagtgattctt

SEQ ID NO: 574596 - DNA, 19 bp, Mus musculus
  siRNA target sequence for 1700020H15 (NM_175020.1,399-417).
ggaggtgtctgactatgaa

SEQ ID NO: 574597 - DNA, 19 bp, Mus musculus
  siRNA target sequence for 1700020H15 (NM_175020.1,444-462).
ggtctcttctatttcacat

SEQ ID NO: 574598 - DNA, 19 bp, Mus musculus
  siRNA target sequence for 1700020H15 (NM_175020.1,458-476).
cacatgacctcctgttaat

SEQ ID NO: 574599 - DNA, 19 bp, Mus musculus
  siRNA target sequence for 1700020H15 (NM_175020.1,460-478).
catgacctcctgttaatca

SEQ ID NO: 574600 - DNA, 19 bp, Mus musculus
  siRNA target sequence for 1700020H15 (NM_175020.1,466-484).
ctcctgttaatcaaactga

SEQ ID NO: 574601 - DNA, 19 bp, Mus musculus
  siRNA target sequence for 1700020H15 (NM_175020.1,490-508).
cggattaaacatagtaact

SEQ ID NO: 574602 - DNA, 19 bp, Mus musculus
  siRNA target sequence for 1700020H15 (NM_175020.1,491-509).
ggattaaacatagtaacta

SEQ ID NO: 574603 - DNA, 19 bp, Mus musculus
  siRNA target sequence for 1700020H15 (NM_175020.1,567-585).
gtctacctgggcctacaat

SEQ ID NO: 574604 - DNA, 19 bp, Mus musculus
  siRNA target sequence for 1700020H15 (NM_175020.1,569-587).
ctacctgggcctacaatct

SEQ ID NO: 574605 - DNA, 19 bp, Mus musculus
  siRNA target sequence for 1700020H15 (NM_175020.1,573-591).
ctgggcctacaatctatgt

SEQ ID NO: 574606 - DNA, 19 bp, Mus musculus
  siRNA target sequence for 1700020H15 (NM_175020.1,575-593).
gggcctacaatctatgtga

SEQ ID NO: 574607 - DNA, 19 bp, Mus musculus
  siRNA target sequence for 1700020H15 (NM_175020.1,623-641).
ccgtgaatgtcactgtaat

SEQ ID NO: 574608 - DNA, 19 bp, Mus musculus
  siRNA target sequence for 1700020H15 (NM_175020.1,627-645).
gaatgtcactgtaatctct

SEQ ID NO: 574609 - DNA, 19 bp, Mus musculus
  siRNA target sequence for 1700020H15 (NM_175020.1,654-672).
gtgccgtaatgcctataaa

SEQ ID NO: 574610 - DNA, 19 bp, Mus musculus
  siRNA target sequence for 1700020H15 (NM_175020.1,665-683).
cctataaagcctttgacat

SEQ ID NO: 574611 - DNA, 19 bp, Mus musculus
  siRNA target sequence for 1700020H15 (NM_175020.1,760-778).
gtctgcaacggggtacttt

SEQ ID NO: 574612 - DNA, 19 bp, Mus musculus
  siRNA target sequence for 1700020H15 (NM_175020.1,762-780).
ctgcaacggggtactttat

SEQ ID NO: 574613 - DNA, 19 bp, Mus musculus
  siRNA target sequence for 1700020H15 (NM_175020.1,770-788).
gggtactttatggaatctt

SEQ ID NO: 574614 - DNA, 19 bp, Mus musculus
  siRNA target sequence for 1700020H15 (NM_175020.1,852-870).
cttgccctggattgaagat

SEQ ID NO: 574615 - DNA, 19 bp, Mus musculus
  siRNA target sequence for 1700020H15 (NM_175020.1,857-875).
cctggattgaagataccat

SEQ ID NO: 574616 - DNA, 19 bp, Mus musculus
  siRNA target sequence for 1700020H15 (NM_175020.1,868-886).
gataccatgaaaaataact

SEQ ID NO: 574617 - DNA, 19 bp, Mus musculus
  siRNA target sequence for 1700036D21Rik (NM_148940.1,478-496).
gctgacttgtggtccaaaa

SEQ ID NO: 574618 - DNA, 19 bp, Mus musculus
  siRNA target sequence for 1700036D21Rik (NM_148940.1,623-641).
ccgtgtgcatccctgaaaa

SEQ ID NO: 574619 - DNA, 19 bp, Mus musculus
  siRNA target sequence for 1700036D21Rik (NM_148940.1,678-696).
gaccggatggggcaaagta

SEQ ID NO: 574620 - DNA, 19 bp, Mus musculus
  siRNA target sequence for 1700036D21Rik (NM_148940.1,680-698).
ccggatggggcaaagtact

SEQ ID NO: 574621 - DNA, 19 bp, Mus musculus
  siRNA target sequence for 1700036D21Rik (NM_148940.1,681-699).
cggatggggcaaagtactt

SEQ ID NO: 574622 - DNA, 19 bp, Mus musculus
  siRNA target sequence for 1700036D21Rik (NM_148940.1,707-725).
gtaggtcgtcgagaatact

SEQ ID NO: 574623 - DNA, 19 bp, Mus musculus
  siRNA target sequence for 1700036D21Rik (NM_148940.1,877-895).
cccctggtctgcgaattta

SEQ ID NO: 574624 - DNA, 19 bp, Mus musculus
  siRNA target sequence for 1700036D21Rik (NM_148940.1,878-896).
ccctggtctgcgaatttaa

SEQ ID NO: 574625 - DNA, 19 bp, Mus musculus
  siRNA target sequence for 1700036D21Rik (NM_148940.1,879-897).
cctggtctgcgaatttaat

SEQ ID NO: 574626 - DNA, 19 bp, Mus musculus
  siRNA target sequence for 1700036D21Rik (NM_148940.1,880-898).
ctggtctgcgaatttaata

SEQ ID NO: 574627 - DNA, 19 bp, Mus musculus
  siRNA target sequence for 1700036D21Rik (NM_148940.1,937-955).
ggctgtggccgaattggat

SEQ ID NO: 574628 - DNA, 19 bp, Mus musculus
  siRNA target sequence for 1700036D21Rik (NM_148940.1,938-956).
gctgtggccgaattggata

SEQ ID NO: 574629 - DNA, 19 bp, Mus musculus
  siRNA target sequence for 1700036D21Rik (NM_148940.1,1045-1063).
gacccacgcttggcaaaaa

SEQ ID NO: 574630 - DNA, 19 bp, Mus musculus
  siRNA target sequence for 1700036D21Rik (NM_148940.1,1051-1069).
cgcttggcaaaaatggaat

SEQ ID NO: 574631 - DNA, 19 bp, Mus musculus
  siRNA target sequence for 1700074P13Rik (NM_028550.2,409-427).
ctcccaaagccgttctgaa

SEQ ID NO: 574632 - DNA, 19 bp, Mus musculus
  siRNA target sequence for 1700074P13Rik (NM_028550.2,417-435).
gccgttctgaaagaatata

SEQ ID NO: 574633 - DNA, 19 bp, Mus musculus
  siRNA target sequence for 1700074P13Rik (NM_028550.2,418-436).
ccgttctgaaagaatataa

SEQ ID NO: 574634 - DNA, 19 bp, Mus musculus
  siRNA target sequence for 1700074P13Rik (NM_028550.2,437-455).
caattcagaagaatactta

SEQ ID NO: 574635 - DNA, 19 bp, Mus musculus
  siRNA target sequence for 1700074P13Rik (NM_028550.2,511-529).
gtgttgggactctcattga

SEQ ID NO: 574636 - DNA, 19 bp, Mus musculus
  siRNA target sequence for 1700074P13Rik (NM_028550.2,593-611).
ccgacccaacatcaaaaat

SEQ ID NO: 574637 - DNA, 19 bp, Mus musculus
  siRNA target sequence for 1700074P13Rik (NM_028550.2,641-659).
cactgtagtccatcctaat

SEQ ID NO: 574638 - DNA, 19 bp, Mus musculus
  siRNA target sequence for 1700074P13Rik (NM_028550.2,643-661).
ctgtagtccatcctaattt

SEQ ID NO: 574639 - DNA, 19 bp, Mus musculus
  siRNA target sequence for 1700074P13Rik (NM_028550.2,655-673).
ctaattttgatgcaaaatt

SEQ ID NO: 574640 - DNA, 19 bp, Mus musculus
  siRNA target sequence for 1700074P13Rik (NM_028550.2,706-724).
catatcctgctactatcaa

SEQ ID NO: 574641 - DNA, 19 bp, Mus musculus
  siRNA target sequence for 1700074P13Rik (NM_028550.2,711-729).
cctgctactatcaacatgt

SEQ ID NO: 574642 - DNA, 19 bp, Mus musculus
  siRNA target sequence for 1700074P13Rik (NM_028550.2,712-730).
ctgctactatcaacatgta

SEQ ID NO: 574643 - DNA, 19 bp, Mus musculus
  siRNA target sequence for 1700074P13Rik (NM_028550.2,715-733).
ctactatcaacatgtatgt

SEQ ID NO: 574644 - DNA, 19 bp, Mus musculus
  siRNA target sequence for 1700074P13Rik (NM_028550.2,735-753).
ggaactatagccatagcta

SEQ ID NO: 574645 - DNA, 19 bp, Mus musculus
  siRNA target sequence for 1700074P13Rik (NM_028550.2,745-763).
ccatagctatggaaccaat

SEQ ID NO: 574646 - DNA, 19 bp, Mus musculus
  siRNA target sequence for 1700074P13Rik (NM_028550.2,755-773).
ggaaccaatggcatttaat

SEQ ID NO: 574647 - DNA, 19 bp, Mus musculus
  siRNA target sequence for 1700074P13Rik (NM_028550.2,759-777).
ccaatggcatttaatgaat

SEQ ID NO: 574648 - DNA, 19 bp, Mus musculus
  siRNA target sequence for 1700074P13Rik (NM_028550.2,774-792).
gaatcctgcttcataccaa

SEQ ID NO: 574649 - DNA, 19 bp, Mus musculus
  siRNA target sequence for 1700074P13Rik (NM_028550.2,793-811).
catggacctggaataacta

SEQ ID NO: 574650 - DNA, 19 bp, Mus musculus
  siRNA target sequence for 1700074P13Rik (NM_028550.2,796-814).
ggacctggaataactacaa

SEQ ID NO: 574651 - DNA, 19 bp, Mus musculus
  siRNA target sequence for 1700074P13Rik (NM_028550.2,797-815).
gacctggaataactacaaa

SEQ ID NO: 574652 - DNA, 19 bp, Mus musculus
  siRNA target sequence for 1700074P13Rik (NM_028550.2,825-843).
gatcctgacatcttgacat

SEQ ID NO: 574653 - DNA, 19 bp, Mus musculus
  siRNA target sequence for 1700074P13Rik (NM_028550.2,831-849).
gacatcttgacatggataa

SEQ ID NO: 574654 - DNA, 19 bp, Mus musculus
  siRNA target sequence for 1700074P13Rik (NM_028550.2,833-851).
catcttgacatggataaat

SEQ ID NO: 574655 - DNA, 19 bp, Mus musculus
  siRNA target sequence for 1700074P13Rik (NM_028550.2,839-857).
gacatggataaatgagtat

SEQ ID NO: 574656 - DNA, 19 bp, Mus musculus
  siRNA target sequence for 1700074P13Rik (NM_028550.2,845-863).
gataaatgagtattctctt

SEQ ID NO: 574657 - DNA, 19 bp, Mus musculus
  siRNA target sequence for 1700074P13Rik (NM_028550.2,877-895).
gtttggacactcttcatca

SEQ ID NO: 574658 - DNA, 19 bp, Mus musculus
  siRNA target sequence for 1700074P13Rik (NM_028550.2,884-902).
cactcttcatcaacagaaa

SEQ ID NO: 574659 - DNA, 19 bp, Mus musculus
  siRNA target sequence for 1700074P13Rik (NM_028550.2,928-946).
gcataggacattcacttaa

SEQ ID NO: 574660 - DNA, 19 bp, Mus musculus
  siRNA target sequence for 1700074P13Rik (NM_028550.2,929-947).
cataggacattcacttaat

SEQ ID NO: 574661 - DNA, 19 bp, Mus musculus
  siRNA target sequence for 1700074P13Rik (NM_028550.2,933-951).
ggacattcacttaatgcta

SEQ ID NO: 574662 - DNA, 19 bp, Mus musculus
  siRNA target sequence for 1700074P13Rik (NM_028550.2,934-952).
gacattcacttaatgctat

SEQ ID NO: 574663 - DNA, 19 bp, Mus musculus
  siRNA target sequence for 1700074P13Rik (NM_028550.2,1029-1047).
gcaagtgtagccaatggaa

SEQ ID NO: 574664 - DNA, 19 bp, Mus musculus
  siRNA target sequence for 1700074P13Rik (NM_028550.2,1055-1073).
cttcttcactgaaattcat

SEQ ID NO: 574665 - DNA, 19 bp, Mus musculus
  siRNA target sequence for 1700074P13Rik (NM_028550.2,1065-1083).
gaaattcatccctatgcaa

SEQ ID NO: 574666 - DNA, 19 bp, Mus musculus
  siRNA target sequence for 1700112C13Rik (NM_183103.1,309-327).
ccaagaacccggctaaata

SEQ ID NO: 574667 - DNA, 19 bp, Mus musculus
  siRNA target sequence for 1700112C13Rik (NM_183103.1,379-397).
cctggtcactagaattgta

SEQ ID NO: 574668 - DNA, 19 bp, Mus musculus
  siRNA target sequence for 1700112C13Rik (NM_183103.1,382-400).
ggtcactagaattgtaatt

SEQ ID NO: 574669 - DNA, 19 bp, Mus musculus
  siRNA target sequence for 1700112C13Rik (NM_183103.1,395-413).
gtaattcacgagaacttca

SEQ ID NO: 574670 - DNA, 19 bp, Mus musculus
  siRNA target sequence for 1700112C13Rik (NM_183103.1,475-493).
cctcgtccagccaatctgt

SEQ ID NO: 574671 - DNA, 19 bp, Mus musculus
  siRNA target sequence for 1700112C13Rik (NM_183103.1,574-592).
cccaaagactccctatagt

SEQ ID NO: 574672 - DNA, 19 bp, Mus musculus
  siRNA target sequence for 1700112C13Rik (NM_183103.1,576-594).
caaagactccctatagtgt

SEQ ID NO: 574673 - DNA, 19 bp, Mus musculus
  siRNA target sequence for 1700112C13Rik (NM_183103.1,610-628).
caggattgtgaacaatgaa

SEQ ID NO: 574674 - DNA, 19 bp, Mus musculus
  siRNA target sequence for 1700112C13Rik (NM_183103.1,683-701).
gggaacgacatgttgtgta

SEQ ID NO: 574675 - DNA, 19 bp, Mus musculus
  siRNA target sequence for 1700112C13Rik (NM_183103.1,755-773).
gtttgccagatgaacaaga

SEQ ID NO: 574676 - DNA, 19 bp, Mus musculus
  siRNA target sequence for 1700112C13Rik (NM_183103.1,790-808).
cgtggtgagctggaacttt

SEQ ID NO: 574677 - DNA, 19 bp, Mus musculus
  siRNA target sequence for 1700112C13Rik (NM_183103.1,794-812).
gtgagctggaactttgact

SEQ ID NO: 574678 - DNA, 19 bp, Mus musculus
  siRNA target sequence for 1700127D06Rik (NM_029831.1,295-313).
catcgtggcgatttaacca

SEQ ID NO: 574679 - DNA, 19 bp, Mus musculus
  siRNA target sequence for 1810009J06Rik (NM_023707.2,109-127).
cgaagcattcggttcctta

SEQ ID NO: 574680 - DNA, 19 bp, Mus musculus
  siRNA target sequence for 1810009J06Rik (NM_023707.2,234-252).
cgccttggtgaacacaata

SEQ ID NO: 574681 - DNA, 19 bp, Mus musculus
  siRNA target sequence for 1810009J06Rik (NM_023707.2,235-253).
gccttggtgaacacaatat

SEQ ID NO: 574682 - DNA, 19 bp, Mus musculus
  siRNA target sequence for 1810009J06Rik (NM_023707.2,236-254).
ccttggtgaacacaatatt

SEQ ID NO: 574683 - DNA, 19 bp, Mus musculus
  siRNA target sequence for 1810009J06Rik (NM_023707.2,303-321).
cgacacccagactataaca

SEQ ID NO: 574684 - DNA, 19 bp, Mus musculus
  siRNA target sequence for 1810009J06Rik (NM_023707.2,304-322).
gacacccagactataacaa

SEQ ID NO: 574685 - DNA, 19 bp, Mus musculus
  siRNA target sequence for 2200008D09Rik (NM_025583.1,279-297).
ggtagctggagagtttgat

SEQ ID NO: 574686 - DNA, 19 bp, Mus musculus
  siRNA target sequence for 2200008D09Rik (NM_025583.1,368-386).
ccttcaccgtgcgtaatga

SEQ ID NO: 574687 - DNA, 19 bp, Mus musculus
  siRNA target sequence for 2200008D09Rik (NM_025583.1,452-470).
ccactgttgacgatgactt

SEQ ID NO: 574688 - DNA, 19 bp, Mus musculus
  siRNA target sequence for 2200008D09Rik (NM_025583.1,500-518).
gctggggcaagaccaaata

SEQ ID NO: 574689 - DNA, 19 bp, Mus musculus
  siRNA target sequence for 2200008D09Rik (NM_025583.1,602-620).
ccaagatcaccgatgtgat

SEQ ID NO: 574690 - DNA, 19 bp, Mus musculus
  siRNA target sequence for 2210010C04Rik (NM_023333.3,154-172).
ctgaacagcggctaccatt

SEQ ID NO: 574691 - DNA, 19 bp, Mus musculus
  siRNA target sequence for 2210010C04Rik (NM_023333.3,318-336).
ccaccccaactataatgca

SEQ ID NO: 574692 - DNA, 19 bp, Mus musculus
  siRNA target sequence for 2210010C04Rik (NM_023333.3,319-337).
caccccaactataatgcaa

SEQ ID NO: 574693 - DNA, 19 bp, Mus musculus
  siRNA target sequence for 2210010C04Rik (NM_023333.3,335-353).
caaacacctataacaatga

SEQ ID NO: 574694 - DNA, 19 bp, Mus musculus
  siRNA target sequence for 2210010C04Rik (NM_023333.3,411-429).
cgctctgccaagatcttgt

SEQ ID NO: 574695 - DNA, 19 bp, Mus musculus
  siRNA target sequence for 2300002A13Rik (NM_133712.1,284-302).
gtgcgagcgtgactatcat

SEQ ID NO: 574696 - DNA, 19 bp, Mus musculus
  siRNA target sequence for 2300002A13Rik (NM_133712.1,383-401).
cgcacattgctggagaaat

SEQ ID NO: 574697 - DNA, 19 bp, Mus musculus
  siRNA target sequence for 2300002A13Rik (NM_133712.1,384-402).
gcacattgctggagaaata

SEQ ID NO: 574698 - DNA, 19 bp, Mus musculus
  siRNA target sequence for 2300002A13Rik (NM_133712.1,466-484).
ccacgagttcacctgtttt

SEQ ID NO: 574699 - DNA, 19 bp, Mus musculus
  siRNA target sequence for 2300002A13Rik (NM_133712.1,667-685).
ccagccgaagagtgaagta

SEQ ID NO: 574700 - DNA, 19 bp, Mus musculus
  siRNA target sequence for 2300002A13Rik (NM_133712.1,670-688).
gccgaagagtgaagtacaa

SEQ ID NO: 574701 - DNA, 19 bp, Mus musculus
  siRNA target sequence for 2300002A13Rik (NM_133712.1,671-689).
ccgaagagtgaagtacaat

SEQ ID NO: 574702 - DNA, 19 bp, Mus musculus
  siRNA target sequence for 2300002A13Rik (NM_133712.1,672-690).
cgaagagtgaagtacaata

SEQ ID NO: 574703 - DNA, 19 bp, Mus musculus
  siRNA target sequence for 2300002A13Rik (NM_133712.1,943-961).
gaagagtcattcgtttcaa

SEQ ID NO: 574704 - DNA, 19 bp, Mus musculus
  siRNA target sequence for 2310015I08Rik (NM_019974.1,132-150).
ggatcatcaagggttatga

SEQ ID NO: 574705 - DNA, 19 bp, Mus musculus
  siRNA target sequence for 2310015I08Rik (NM_019974.1,258-276).
gccgcaagccccattacgt

SEQ ID NO: 574706 - DNA, 19 bp, Mus musculus
  siRNA target sequence for 2310015I08Rik (NM_019974.1,288-306).
gagagcacaatctagagaa

SEQ ID NO: 574707 - DNA, 19 bp, Mus musculus
  siRNA target sequence for 2310015I08Rik (NM_019974.1,386-404).
gaccaccggaatgacataa

SEQ ID NO: 574708 - DNA, 19 bp, Mus musculus
  siRNA target sequence for 2310015I08Rik (NM_019974.1,418-436).
gtcgtctcccgtcttcttt

SEQ ID NO: 574709 - DNA, 19 bp, Mus musculus
  siRNA target sequence for 2310015I08Rik (NM_019974.1,487-505).
caccagctgcctcatttct

SEQ ID NO: 574710 - DNA, 19 bp, Mus musculus
  siRNA target sequence for 2310015I08Rik (NM_019974.1,691-709).
ggtctgcaacggatctctt

SEQ ID NO: 574711 - DNA, 19 bp, Mus musculus
  siRNA target sequence for 2310046G15Rik (NM_029614.2,245-263).
ctaccctcaacttagctaa

SEQ ID NO: 574712 - DNA, 19 bp, Mus musculus
  siRNA target sequence for 2310046G15Rik (NM_029614.2,508-526).
ggctacgatggcaggttta

SEQ ID NO: 574713 - DNA, 19 bp, Mus musculus
  siRNA target sequence for 2310046G15Rik (NM_029614.2,540-558).
ggacttcctgctcaattat

SEQ ID NO: 574714 - DNA, 19 bp, Mus musculus
  siRNA target sequence for 2310046G15Rik (NM_029614.2,549-567).
gctcaattatcctttctca

SEQ ID NO: 574715 - DNA, 19 bp, Mus musculus
  siRNA target sequence for 2310046G15Rik (NM_029614.2,748-766).
gccatgccagacaagatga

SEQ ID NO: 574716 - DNA, 19 bp, Mus musculus
  siRNA target sequence for 2310046G15Rik (NM_029614.2,757-775).
gacaagatgaagtttcagt

SEQ ID NO: 574717 - DNA, 19 bp, Mus musculus
  siRNA target sequence for 2310046G15Rik (NM_029614.2,878-896).
cccacaaaagacagttcat

SEQ ID NO: 574718 - DNA, 19 bp, Mus musculus
  siRNA target sequence for 2310046G15Rik (NM_029614.2,993-1011).
cttctgtgatgtcaaagat

SEQ ID NO: 574719 - DNA, 19 bp, Mus musculus
  siRNA target sequence for 2310046G15Rik (NM_029614.2,1193-1211).
gaatcacgcctcttaaata

SEQ ID NO: 574720 - DNA, 19 bp, Mus musculus
  siRNA target sequence for 4732406D01Rik (NM_178730.2,18-36).
gatgtacgcaccagttgaa

SEQ ID NO: 574721 - DNA, 19 bp, Mus musculus
  siRNA target sequence for 4732406D01Rik (NM_178730.2,21-39).
gtacgcaccagttgaattt

SEQ ID NO: 574722 - DNA, 19 bp, Mus musculus
  siRNA target sequence for 4732406D01Rik (NM_178730.2,24-42).
cgcaccagttgaattttca

SEQ ID NO: 574723 - DNA, 19 bp, Mus musculus
  siRNA target sequence for 4732406D01Rik (NM_178730.2,28-46).
ccagttgaattttcacaaa

SEQ ID NO: 574724 - DNA, 19 bp, Mus musculus
  siRNA target sequence for 4732406D01Rik (NM_178730.2,49-67).
gcatacccacgaatcgaat

SEQ ID NO: 574725 - DNA, 19 bp, Mus musculus
  siRNA target sequence for 4732406D01Rik (NM_178730.2,50-68).
catacccacgaatcgaata

SEQ ID NO: 574726 - DNA, 19 bp, Mus musculus
  siRNA target sequence for 4732406D01Rik (NM_178730.2,54-72).
cccacgaatcgaatatcaa

SEQ ID NO: 574727 - DNA, 19 bp, Mus musculus
  siRNA target sequence for 4732406D01Rik (NM_178730.2,55-73).
ccacgaatcgaatatcaaa

SEQ ID NO: 574728 - DNA, 19 bp, Mus musculus
  siRNA target sequence for 4732406D01Rik (NM_178730.2,58-76).
cgaatcgaatatcaaagaa

SEQ ID NO: 574729 - DNA, 19 bp, Mus musculus
  siRNA target sequence for 4732406D01Rik (NM_178730.2,123-141).
ggcaattgtcgcaatcgta

SEQ ID NO: 574730 - DNA, 19 bp, Mus musculus
  siRNA target sequence for 4732406D01Rik (NM_178730.2,132-150).
cgcaatcgtaggaatcaca

SEQ ID NO: 574731 - DNA, 19 bp, Mus musculus
  siRNA target sequence for 4732406D01Rik (NM_178730.2,133-151).
gcaatcgtaggaatcacaa

SEQ ID NO: 574732 - DNA, 19 bp, Mus musculus
  siRNA target sequence for 4732406D01Rik (NM_178730.2,155-173).
gcatcgtcactcattttgt

SEQ ID NO: 574733 - DNA, 19 bp, Mus musculus
  siRNA target sequence for 4732406D01Rik (NM_178730.2,159-177).
cgtcactcattttgttgtt

SEQ ID NO: 574734 - DNA, 19 bp, Mus musculus
  siRNA target sequence for 4732406D01Rik (NM_178730.2,175-193).
gttgaagatgacaagtcat

SEQ ID NO: 574735 - DNA, 19 bp, Mus musculus
  siRNA target sequence for 4732406D01Rik (NM_178730.2,228-246).
caaatacagagaaaattat

SEQ ID NO: 574736 - DNA, 19 bp, Mus musculus
  siRNA target sequence for 4732406D01Rik (NM_178730.2,254-272).
ggtcatcaagggagtttat

SEQ ID NO: 574737 - DNA, 19 bp, Mus musculus
  siRNA target sequence for 4732406D01Rik (NM_178730.2,255-273).
gtcatcaagggagtttata

SEQ ID NO: 574738 - DNA, 19 bp, Mus musculus
  siRNA target sequence for 4732406D01Rik (NM_178730.2,257-275).
catcaagggagtttataga

SEQ ID NO: 574739 - DNA, 19 bp, Mus musculus
  siRNA target sequence for 4732406D01Rik (NM_178730.2,309-327).
gatattccgacgttcttct

SEQ ID NO: 574740 - DNA, 19 bp, Mus musculus
  siRNA target sequence for 4732406D01Rik (NM_178730.2,323-341).
cttctggagtgggtagatt

SEQ ID NO: 574741 - DNA, 19 bp, Mus musculus
  siRNA target sequence for 4732406D01Rik (NM_178730.2,328-346).
ggagtgggtagatttatca

SEQ ID NO: 574742 - DNA, 19 bp, Mus musculus
  siRNA target sequence for 4732406D01Rik (NM_178730.2,348-366).
gtcccatgttatcaagata

SEQ ID NO: 574743 - DNA, 19 bp, Mus musculus
  siRNA target sequence for 4732406D01Rik (NM_178730.2,351-369).
ccatgttatcaagataagt

SEQ ID NO: 574744 - DNA, 19 bp, Mus musculus
  siRNA target sequence for 4732406D01Rik (NM_178730.2,383-401).
gagtgaacattcttatagt

SEQ ID NO: 574745 - DNA, 19 bp, Mus musculus
  siRNA target sequence for 4732406D01Rik (NM_178730.2,412-430).
cgatacccatctactgata

SEQ ID NO: 574746 - DNA, 19 bp, Mus musculus
  siRNA target sequence for 4732406D01Rik (NM_178730.2,431-449).
gtgccgagcgaatcaagaa

SEQ ID NO: 574747 - DNA, 19 bp, Mus musculus
  siRNA target sequence for 4732406D01Rik (NM_178730.2,433-451).
gccgagcgaatcaagaaaa

SEQ ID NO: 574748 - DNA, 19 bp, Mus musculus
  siRNA target sequence for 4732406D01Rik (NM_178730.2,440-458).
gaatcaagaaaagaattga

SEQ ID NO: 574749 - DNA, 19 bp, Mus musculus
  siRNA target sequence for 4732406D01Rik (NM_178730.2,492-510).
gttgcctttgactattagt

SEQ ID NO: 574750 - DNA, 19 bp, Mus musculus
  siRNA target sequence for 4732406D01Rik (NM_178730.2,532-550).
cccattgacagcaaaaaga

SEQ ID NO: 574751 - DNA, 19 bp, Mus musculus
  siRNA target sequence for 4732406D01Rik (NM_178730.2,533-551).
ccattgacagcaaaaagat

SEQ ID NO: 574752 - DNA, 19 bp, Mus musculus
  siRNA target sequence for 4732406D01Rik (NM_178730.2,569-587).
gccgatgtgggataagaat

SEQ ID NO: 574753 - DNA, 19 bp, Mus musculus
  siRNA target sequence for 4732406D01Rik (NM_178730.2,571-589).
cgatgtgggataagaatgt

SEQ ID NO: 574754 - DNA, 19 bp, Mus musculus
  siRNA target sequence for 4732406D01Rik (NM_178730.2,645-663).
gagggaaacagctatggaa

SEQ ID NO: 574755 - DNA, 19 bp, Mus musculus
  siRNA target sequence for 4732406D01Rik (NM_178730.2,784-802).
ccaactaaatggattgtca

SEQ ID NO: 574756 - DNA, 19 bp, Mus musculus
  siRNA target sequence for 4732406D01Rik (NM_178730.2,823-841).
ccacctttagtcaaacgaa

SEQ ID NO: 574757 - DNA, 19 bp, Mus musculus
  siRNA target sequence for 4732406D01Rik (NM_178730.2,838-856).
cgaagtgttgggaagatta

SEQ ID NO: 574758 - DNA, 19 bp, Mus musculus
  siRNA target sequence for 4732406D01Rik (NM_178730.2,839-857).
gaagtgttgggaagattat

SEQ ID NO: 574759 - DNA, 19 bp, Mus musculus
  siRNA target sequence for 4732406D01Rik (NM_178730.2,870-888).
gtaccacagagataccaat

SEQ ID NO: 574760 - DNA, 19 bp, Mus musculus
  siRNA target sequence for 4732406D01Rik (NM_178730.2,918-936).
cacccgcgtcgagttttca

SEQ ID NO: 574761 - DNA, 19 bp, Mus musculus
  siRNA target sequence for 4732406D01Rik (NM_178730.2,920-938).
cccgcgtcgagttttcaaa

SEQ ID NO: 574762 - DNA, 19 bp, Mus musculus
  siRNA target sequence for 4732406D01Rik (NM_178730.2,921-939).
ccgcgtcgagttttcaaat

SEQ ID NO: 574763 - DNA, 19 bp, Mus musculus
  siRNA target sequence for 4732406D01Rik (NM_178730.2,923-941).
gcgtcgagttttcaaatgt

SEQ ID NO: 574764 - DNA, 19 bp, Mus musculus
  siRNA target sequence for 4732406D01Rik (NM_178730.2,956-974).
gcctcccagattcatctat

SEQ ID NO: 574765 - DNA, 19 bp, Mus musculus
  siRNA target sequence for 4732406D01Rik (NM_178730.2,958-976).
ctcccagattcatctatga

SEQ ID NO: 574766 - DNA, 19 bp, Mus musculus
  siRNA target sequence for 4732406D01Rik (NM_178730.2,960-978).
cccagattcatctatgaaa

SEQ ID NO: 574767 - DNA, 19 bp, Mus musculus
  siRNA target sequence for 4732406D01Rik (NM_178730.2,1005-1023).
cacaggatttgggtctatt

SEQ ID NO: 574768 - DNA, 19 bp, Mus musculus
  siRNA target sequence for 4732406D01Rik (NM_178730.2,1007-1025).
caggatttgggtctattgt

SEQ ID NO: 574769 - DNA, 19 bp, Mus musculus
  siRNA target sequence for 4732406D01Rik (NM_178730.2,1027-1045).
gatgatgggcctacacaaa

SEQ ID NO: 574770 - DNA, 19 bp, Mus musculus
  siRNA target sequence for 4732406D01Rik (NM_178730.2,1030-1048).
gatgggcctacacaaaata

SEQ ID NO: 574771 - DNA, 19 bp, Mus musculus
  siRNA target sequence for 4732406D01Rik (NM_178730.2,1187-1205).
gtggacctttggtttatga

SEQ ID NO: 574772 - DNA, 19 bp, Mus musculus
  siRNA target sequence for 4732406D01Rik (NM_178730.2,1189-1207).
ggacctttggtttatgaca

SEQ ID NO: 574773 - DNA, 19 bp, Mus musculus
  siRNA target sequence for 4732406D01Rik (NM_178730.2,1211-1229).
gggacatctggtacattgt

SEQ ID NO: 574774 - DNA, 19 bp, Mus musculus
  siRNA target sequence for 4732406D01Rik (NM_178730.2,1224-1242).
cattgtgggcatagtaagt

SEQ ID NO: 574775 - DNA, 19 bp, Mus musculus
  siRNA target sequence for 4732406D01Rik (NM_178730.2,1237-1255).
gtaagttggggacaatctt

SEQ ID NO: 574776 - DNA, 19 bp, Mus musculus
  siRNA target sequence for 4733401N09Rik (NM_133731.1,347-365).
cactgctttaagagcaata

SEQ ID NO: 574777 - DNA, 19 bp, Mus musculus
  siRNA target sequence for 4733401N09Rik (NM_133731.1,351-369).
gctttaagagcaatatgga

SEQ ID NO: 574778 - DNA, 19 bp, Mus musculus
  siRNA target sequence for 4733401N09Rik (NM_133731.1,423-441).
gcccaaggtcccagaaagt

SEQ ID NO: 574779 - DNA, 19 bp, Mus musculus
  siRNA target sequence for 4733401N09Rik (NM_133731.1,424-442).
cccaaggtcccagaaagta

SEQ ID NO: 574780 - DNA, 19 bp, Mus musculus
  siRNA target sequence for 4733401N09Rik (NM_133731.1,458-476).
ctgcctcaccccaggtatt

SEQ ID NO: 574781 - DNA, 19 bp, Mus musculus
  siRNA target sequence for 4733401N09Rik (NM_133731.1,487-505).
gggaacccatgcagacatt

SEQ ID NO: 574782 - DNA, 19 bp, Mus musculus
  siRNA target sequence for 4733401N09Rik (NM_133731.1,689-707).
gactccgaactctgcaaaa

SEQ ID NO: 574783 - DNA, 19 bp, Mus musculus
  siRNA target sequence for 4733401N09Rik (NM_133731.1,840-858).
ggctactgactggcataat

SEQ ID NO: 574784 - DNA, 19 bp, Mus musculus
  siRNA target sequence for 4733401N09Rik (NM_133731.1,842-860).
ctactgactggcataatca

SEQ ID NO: 574785 - DNA, 19 bp, Mus musculus
  siRNA target sequence for 4930478A21Rik (NM_183109.1,458-476).
ccctaccacagcaggaata

SEQ ID NO: 574786 - DNA, 19 bp, Mus musculus
  siRNA target sequence for 4930478A21Rik (NM_183109.1,459-477).
cctaccacagcaggaatat

SEQ ID NO: 574787 - DNA, 19 bp, Mus musculus
  siRNA target sequence for 4930478A21Rik (NM_183109.1,460-478).
ctaccacagcaggaatata

SEQ ID NO: 574788 - DNA, 19 bp, Mus musculus
  siRNA target sequence for 4930478A21Rik (NM_183109.1,463-481).
ccacagcaggaatatacga

SEQ ID NO: 574789 - DNA, 19 bp, Mus musculus
  siRNA target sequence for 4930478A21Rik (NM_183109.1,464-482).
cacagcaggaatatacgaa

SEQ ID NO: 574790 - DNA, 19 bp, Mus musculus
  siRNA target sequence for 4930478A21Rik (NM_183109.1,469-487).
caggaatatacgaatcaca

SEQ ID NO: 574791 - DNA, 19 bp, Mus musculus
  siRNA target sequence for 4930478A21Rik (NM_183109.1,479-497).
cgaatcacagacatcatca

SEQ ID NO: 574792 - DNA, 19 bp, Mus musculus
  siRNA target sequence for 4930478A21Rik (NM_183109.1,511-529).
cattatggaaactttcgta

SEQ ID NO: 574793 - DNA, 19 bp, Mus musculus
  siRNA target sequence for 4930478A21Rik (NM_183109.1,517-535).
ggaaactttcgtaaatgat

SEQ ID NO: 574794 - DNA, 19 bp, Mus musculus
  siRNA target sequence for 4930478A21Rik (NM_183109.1,518-536).
gaaactttcgtaaatgata

SEQ ID NO: 574795 - DNA, 19 bp, Mus musculus
  siRNA target sequence for 4930478A21Rik (NM_183109.1,539-557).
gcactgttccgtttaaaga

SEQ ID NO: 574796 - DNA, 19 bp, Mus musculus
  siRNA target sequence for 4930478A21Rik (NM_183109.1,558-576).
gagctgtgaggtataatga

SEQ ID NO: 574797 - DNA, 19 bp, Mus musculus
  siRNA target sequence for 4930478A21Rik (NM_183109.1,560-578).
gctgtgaggtataatgact

SEQ ID NO: 574798 - DNA, 19 bp, Mus musculus
  siRNA target sequence for 4930478A21Rik (NM_183109.1,561-579).
ctgtgaggtataatgacta

SEQ ID NO: 574799 - DNA, 19 bp, Mus musculus
  siRNA target sequence for 4930478A21Rik (NM_183109.1,563-581).
gtgaggtataatgactata

SEQ ID NO: 574800 - DNA, 19 bp, Mus musculus
  siRNA target sequence for 4930478A21Rik (NM_183109.1,565-583).
gaggtataatgactatatt

SEQ ID NO: 574801 - DNA, 19 bp, Mus musculus
  siRNA target sequence for 4930478A21Rik (NM_183109.1,567-585).
ggtataatgactatattca

SEQ ID NO: 574802 - DNA, 19 bp, Mus musculus
  siRNA target sequence for 4930478A21Rik (NM_183109.1,586-604).
gcccatttgtctacctttt

SEQ ID NO: 574803 - DNA, 19 bp, Mus musculus
  siRNA target sequence for 4930478A21Rik (NM_183109.1,625-643).
ccaaaacacagcgtgtttt

SEQ ID NO: 574804 - DNA, 19 bp, Mus musculus
  siRNA target sequence for 4930478A21Rik (NM_183109.1,626-644).
caaaacacagcgtgtttta

SEQ ID NO: 574805 - DNA, 19 bp, Mus musculus
  siRNA target sequence for 4930478A21Rik (NM_183109.1,724-742).
gggagggaagccgtttaca

SEQ ID NO: 574806 - DNA, 19 bp, Mus musculus
  siRNA target sequence for 4930478A21Rik (NM_183109.1,729-747).
ggaagccgtttacatataa

SEQ ID NO: 574807 - DNA, 19 bp, Mus musculus
  siRNA target sequence for 4930478A21Rik (NM_183109.1,730-748).
gaagccgtttacatataaa

SEQ ID NO: 574808 - DNA, 19 bp, Mus musculus
  siRNA target sequence for 4930478A21Rik (NM_183109.1,756-774).
gtgtgcatcgagctactaa

SEQ ID NO: 574809 - DNA, 19 bp, Mus musculus
  siRNA target sequence for 4930478A21Rik (NM_183109.1,758-776).
gtgcatcgagctactaatt

SEQ ID NO: 574810 - DNA, 19 bp, Mus musculus
  siRNA target sequence for 6030424L22Rik (NM_178738.1,289-307).
gttgtgagtgagaacacta

SEQ ID NO: 574811 - DNA, 19 bp, Mus musculus
  siRNA target sequence for 6030424L22Rik (NM_178738.1,294-312).
gagtgagaacactatccat

SEQ ID NO: 574812 - DNA, 19 bp, Mus musculus
  siRNA target sequence for 6030424L22Rik (NM_178738.1,414-432).
ggaagagtccctatcctat

SEQ ID NO: 574813 - DNA, 19 bp, Mus musculus
  siRNA target sequence for 6030424L22Rik (NM_178738.1,447-465).
gaatggcacccgaacctta

SEQ ID NO: 574814 - DNA, 19 bp, Mus musculus
  siRNA target sequence for 6030424L22Rik (NM_178738.1,451-469).
ggcacccgaaccttaacca

SEQ ID NO: 574815 - DNA, 19 bp, Mus musculus
  siRNA target sequence for 6030424L22Rik (NM_178738.1,564-582).
cagcaggttcagcatctta

SEQ ID NO: 574816 - DNA, 19 bp, Mus musculus
  siRNA target sequence for 6030424L22Rik (NM_178738.1,566-584).
gcaggttcagcatcttaga

SEQ ID NO: 574817 - DNA, 19 bp, Mus musculus
  siRNA target sequence for 6030424L22Rik (NM_178738.1,595-613).
gcgaccaatttccctttta

SEQ ID NO: 574818 - DNA, 19 bp, Mus musculus
  siRNA target sequence for 6030424L22Rik (NM_178738.1,596-614).
cgaccaatttcccttttaa

SEQ ID NO: 574819 - DNA, 19 bp, Mus musculus
  siRNA target sequence for 6030424L22Rik (NM_178738.1,597-615).
gaccaatttcccttttaat

SEQ ID NO: 574820 - DNA, 19 bp, Mus musculus
  siRNA target sequence for 6030424L22Rik (NM_178738.1,697-715).
gatgggaaggactatgtca

SEQ ID NO: 574821 - DNA, 19 bp, Mus musculus
  siRNA target sequence for 6030424L22Rik (NM_178738.1,778-796).
cgcagaggttccaaaagga

SEQ ID NO: 574822 - DNA, 19 bp, Mus musculus
  siRNA target sequence for 6030424L22Rik (NM_178738.1,1306-1324).
ggagttcagaaggactata

SEQ ID NO: 574823 - DNA, 19 bp, Mus musculus
  siRNA target sequence for 6030424L22Rik (NM_178738.1,1337-1355).
gcatcactccgctcaagta

SEQ ID NO: 574824 - DNA, 19 bp, Mus musculus
  siRNA target sequence for 6030424L22Rik (NM_178738.1,1348-1366).
ctcaagtacgcccagattt

SEQ ID NO: 574825 - DNA, 19 bp, Mus musculus
  siRNA target sequence for 9930019B18Rik (NM_177024.2,162-180).
gataattattggactctta

SEQ ID NO: 574826 - DNA, 19 bp, Mus musculus
  siRNA target sequence for 9930019B18Rik (NM_177024.2,213-231).
ctactatcaaggtggtttt

SEQ ID NO: 574827 - DNA, 19 bp, Mus musculus
  siRNA target sequence for 9930019B18Rik (NM_177024.2,275-293).
catcactagaaagtaacta

SEQ ID NO: 574828 - DNA, 19 bp, Mus musculus
  siRNA target sequence for 9930019B18Rik (NM_177024.2,329-347).
cctttcagaattctaacat

SEQ ID NO: 574829 - DNA, 19 bp, Mus musculus
  siRNA target sequence for 9930019B18Rik (NM_177024.2,436-454).
ccctggtctaacaaggaaa

SEQ ID NO: 574830 - DNA, 19 bp, Mus musculus
  siRNA target sequence for 9930019B18Rik (NM_177024.2,441-459).
gtctaacaaggaaaaccta

SEQ ID NO: 574831 - DNA, 19 bp, Mus musculus
  siRNA target sequence for 9930019B18Rik (NM_177024.2,543-561).
cacggaaatcagtaaggtt

SEQ ID NO: 574832 - DNA, 19 bp, Mus musculus
  siRNA target sequence for 9930019B18Rik (NM_177024.2,558-576).
ggttgatgctgagaagatt

SEQ ID NO: 574833 - DNA, 19 bp, Mus musculus
  siRNA target sequence for 9930019B18Rik (NM_177024.2,559-577).
gttgatgctgagaagatta

SEQ ID NO: 574834 - DNA, 19 bp, Mus musculus
  siRNA target sequence for 9930019B18Rik (NM_177024.2,566-584).
ctgagaagattatcaacaa

SEQ ID NO: 574835 - DNA, 19 bp, Mus musculus
  siRNA target sequence for 9930019B18Rik (NM_177024.2,611-629).
ctgcaacctacgacagaat

SEQ ID NO: 574836 - DNA, 19 bp, Mus musculus
  siRNA target sequence for 9930019B18Rik (NM_177024.2,613-631).
gcaacctacgacagaatca

SEQ ID NO: 574837 - DNA, 19 bp, Mus musculus
  siRNA target sequence for 9930019B18Rik (NM_177024.2,683-701).
gagtgaatggtaaacacta

SEQ ID NO: 574838 - DNA, 19 bp, Mus musculus
  siRNA target sequence for 9930019B18Rik (NM_177024.2,819-837).
catgcagcattctgttcaa

SEQ ID NO: 574839 - DNA, 19 bp, Mus musculus
  siRNA target sequence for 9930019B18Rik (NM_177024.2,825-843).
gcattctgttcaagagatt

SEQ ID NO: 574840 - DNA, 19 bp, Mus musculus
  siRNA target sequence for 9930019B18Rik (NM_177024.2,826-844).
cattctgttcaagagatta

SEQ ID NO: 574841 - DNA, 19 bp, Mus musculus
  siRNA target sequence for 9930019B18Rik (NM_177024.2,864-882).
gaagggggaacatcatgat

SEQ ID NO: 574842 - DNA, 19 bp, Mus musculus
  siRNA target sequence for 9930019B18Rik (NM_177024.2,949-967).
ccggaatccacccagattt

SEQ ID NO: 574843 - DNA, 19 bp, Mus musculus
  siRNA target sequence for 9930019B18Rik (NM_177024.2,998-1016).
gatggggatcattttctta

SEQ ID NO: 574844 - DNA, 19 bp, Mus musculus
  siRNA target sequence for 9930019B18Rik (NM_177024.2,1002-1020).
gggatcattttcttacaat

SEQ ID NO: 574845 - DNA, 19 bp, Mus musculus
  siRNA target sequence for 9930019B18Rik (NM_177024.2,1068-1086).
cacaaatacttgcaattca

SEQ ID NO: 574846 - DNA, 19 bp, Mus musculus
  siRNA target sequence for 9930019B18Rik (NM_177024.2,1070-1088).
caaatacttgcaattcaga

SEQ ID NO: 574847 - DNA, 19 bp, Mus musculus
  siRNA target sequence for 9930019B18Rik (NM_177024.2,1103-1121).
gcaggatagtggacacaat

SEQ ID NO: 574848 - DNA, 19 bp, Mus musculus
  siRNA target sequence for 9930019B18Rik (NM_177024.2,1137-1155).
cttggaaggcagtatcgat

SEQ ID NO: 574849 - DNA, 19 bp, Mus musculus
  siRNA target sequence for 9930019B18Rik (NM_177024.2,1192-1210).
cccaattctcgagatattt

SEQ ID NO: 574850 - DNA, 19 bp, Mus musculus
  siRNA target sequence for 9930019B18Rik (NM_177024.2,1269-1287).
ggtctatatgagagtaact

SEQ ID NO: 574851 - DNA, 19 bp, Mus musculus
  siRNA target sequence for 9930019B18Rik (NM_177024.2,1270-1288).
gtctatatgagagtaactt

SEQ ID NO: 574852 - DNA, 19 bp, Mus musculus
  siRNA target sequence for 9930032O22Rik (NM_177162.2,107-125).
ccaggaatactggttagaa

SEQ ID NO: 574853 - DNA, 19 bp, Mus musculus
  siRNA target sequence for 9930032O22Rik (NM_177162.2,194-212).
ctcattggtctccttgttt

SEQ ID NO: 574854 - DNA, 19 bp, Mus musculus
  siRNA target sequence for 9930032O22Rik (NM_177162.2,261-279).
ggattcccagtattaatta

SEQ ID NO: 574855 - DNA, 19 bp, Mus musculus
  siRNA target sequence for 9930032O22Rik (NM_177162.2,262-280).
gattcccagtattaattat

SEQ ID NO: 574856 - DNA, 19 bp, Mus musculus
  siRNA target sequence for 9930032O22Rik (NM_177162.2,315-333).
ggactggcctgaaacaaaa

SEQ ID NO: 574857 - DNA, 19 bp, Mus musculus
  siRNA target sequence for 9930032O22Rik (NM_177162.2,369-387).
ccagtttaaagcatcatta

SEQ ID NO: 574858 - DNA, 19 bp, Mus musculus
  siRNA target sequence for 9930032O22Rik (NM_177162.2,372-390).
gtttaaagcatcattatgt

SEQ ID NO: 574859 - DNA, 19 bp, Mus musculus
  siRNA target sequence for 9930032O22Rik (NM_177162.2,409-427).
ctttcggcccagtaacgat

SEQ ID NO: 574860 - DNA, 19 bp, Mus musculus
  siRNA target sequence for 9930032O22Rik (NM_177162.2,436-454).
ggcagatgtactgattaaa

SEQ ID NO: 574861 - DNA, 19 bp, Mus musculus
  siRNA target sequence for 9930032O22Rik (NM_177162.2,437-455).
gcagatgtactgattaaat

SEQ ID NO: 574862 - DNA, 19 bp, Mus musculus
  siRNA target sequence for 9930032O22Rik (NM_177162.2,472-490).
gaatgcgggtactttgaaa

SEQ ID NO: 574863 - DNA, 19 bp, Mus musculus
  siRNA target sequence for 9930032O22Rik (NM_177162.2,491-509).
cggcaagctgataacattt

SEQ ID NO: 574864 - DNA, 19 bp, Mus musculus
  siRNA target sequence for 9930032O22Rik (NM_177162.2,492-510).
ggcaagctgataacatttt

SEQ ID NO: 574865 - DNA, 19 bp, Mus musculus
  siRNA target sequence for 9930032O22Rik (NM_177162.2,544-562).
gaagagagacgcttcacta

SEQ ID NO: 574866 - DNA, 19 bp, Mus musculus
  siRNA target sequence for 9930032O22Rik (NM_177162.2,549-567).
gagacgcttcactacctta

SEQ ID NO: 574867 - DNA, 19 bp, Mus musculus
  siRNA target sequence for 9930032O22Rik (NM_177162.2,553-571).
cgcttcactaccttatctt

SEQ ID NO: 574868 - DNA, 19 bp, Mus musculus
  siRNA target sequence for 9930032O22Rik (NM_177162.2,558-576).
cactaccttatcttagaga

SEQ ID NO: 574869 - DNA, 19 bp, Mus musculus
  siRNA target sequence for 9930032O22Rik (NM_177162.2,560-578).
ctaccttatcttagagaaa

SEQ ID NO: 574870 - DNA, 19 bp, Mus musculus
  siRNA target sequence for 9930032O22Rik (NM_177162.2,632-650).
gagtacccacccatagcaa

SEQ ID NO: 574871 - DNA, 19 bp, Mus musculus
  siRNA target sequence for 9930032O22Rik (NM_177162.2,777-795).
gctttgacaattacaaaaa

SEQ ID NO: 574872 - DNA, 19 bp, Mus musculus
  siRNA target sequence for 9930032O22Rik (NM_177162.2,797-815).
cccaaactgtggacagtaa

SEQ ID NO: 574873 - DNA, 19 bp, Mus musculus
  siRNA target sequence for 9930032O22Rik (NM_177162.2,895-913).
caagcacgacgatgacata

SEQ ID NO: 574874 - DNA, 19 bp, Mus musculus
  siRNA target sequence for 9930032O22Rik (NM_177162.2,975-993).
ctgatgcgacttttcaagt

SEQ ID NO: 574875 - DNA, 19 bp, Mus musculus
  siRNA target sequence for 9930032O22Rik (NM_177162.2,1021-1039).
cggatggggagcactgaaa

SEQ ID NO: 574876 - DNA, 19 bp, Mus musculus
  siRNA target sequence for 9930032O22Rik (NM_177162.2,1072-1090).
ggttgaaatagagatcata

SEQ ID NO: 574877 - DNA, 19 bp, Mus musculus
  siRNA target sequence for 9930032O22Rik (NM_177162.2,1092-1110).
gtaatgatgtatgtaatca

SEQ ID NO: 574878 - DNA, 19 bp, Mus musculus
  siRNA target sequence for 9930032O22Rik (NM_177162.2,1097-1115).
gatgtatgtaatcaagtta

SEQ ID NO: 574879 - DNA, 19 bp, Mus musculus
  siRNA target sequence for 9930032O22Rik (NM_177162.2,1118-1136).
gtatacggtggtgctatat

SEQ ID NO: 574880 - DNA, 19 bp, Mus musculus
  siRNA target sequence for 9930032O22Rik (NM_177162.2,1203-1221).
ggcctctggttatttcaga

SEQ ID NO: 574881 - DNA, 19 bp, Mus musculus
  siRNA target sequence for 9930032O22Rik (NM_177162.2,1204-1222).
gcctctggttatttcagat

SEQ ID NO: 574882 - DNA, 19 bp, Mus musculus
  siRNA target sequence for 9930032O22Rik (NM_177162.2,1205-1223).
cctctggttatttcagata

SEQ ID NO: 574883 - DNA, 19 bp, Mus musculus
  siRNA target sequence for 9930032O22Rik (NM_177162.2,1236-1254).
ggtatcttcttggaattgt

SEQ ID NO: 574884 - DNA, 19 bp, Mus musculus
  siRNA target sequence for 9930032O22Rik (NM_177162.2,1253-1271).
gttagttggggaatagact

SEQ ID NO: 574885 - DNA, 19 bp, Mus musculus
  siRNA target sequence for 9930032O22Rik (NM_177162.2,1300-1318).
caccagagtgactcattat

SEQ ID NO: 574886 - DNA, 19 bp, Mus musculus
  siRNA target sequence for 9930032O22Rik (NM_177162.2,1313-1331).
cattatcgggactggatta

SEQ ID NO: 574887 - DNA, 19 bp, Mus musculus
  siRNA target sequence for 9930032O22Rik (NM_177162.2,1319-1337).
cgggactggattaaatcta

SEQ ID NO: 574888 - DNA, 19 bp, Mus musculus
  siRNA target sequence for 9930032O22Rik (NM_177162.2,1324-1342).
ctggattaaatctaaaact

SEQ ID NO: 574889 - DNA, 19 bp, Mus musculus
  siRNA target sequence for A030012E10 (NM_172880.1,160-178).
ctcactgttcactatgtca

SEQ ID NO: 574890 - DNA, 19 bp, Mus musculus
  siRNA target sequence for A030012E10 (NM_172880.1,164-182).
ctgttcactatgtcagata

SEQ ID NO: 574891 - DNA, 19 bp, Mus musculus
  siRNA target sequence for A030012E10 (NM_172880.1,166-184).
gttcactatgtcagataca

SEQ ID NO: 574892 - DNA, 19 bp, Mus musculus
  siRNA target sequence for A030012E10 (NM_172880.1,210-228).
cagcacgttgtcattcaca

SEQ ID NO: 574893 - DNA, 19 bp, Mus musculus
  siRNA target sequence for A030012E10 (NM_172880.1,225-243).
cacaagtgacaagctatat

SEQ ID NO: 574894 - DNA, 19 bp, Mus musculus
  siRNA target sequence for A030012E10 (NM_172880.1,234-252).
caagctatattctgagttt

SEQ ID NO: 574895 - DNA, 19 bp, Mus musculus
  siRNA target sequence for A030012E10 (NM_172880.1,302-320).
ctatggtaaaacatgcatt

SEQ ID NO: 574896 - DNA, 19 bp, Mus musculus
  siRNA target sequence for A030012E10 (NM_172880.1,332-350).
cactacggggacaacttgt

SEQ ID NO: 574897 - DNA, 19 bp, Mus musculus
  siRNA target sequence for A030012E10 (NM_172880.1,355-373).
gctcacattatcaagttca

SEQ ID NO: 574898 - DNA, 19 bp, Mus musculus
  siRNA target sequence for A030012E10 (NM_172880.1,358-376).
cacattatcaagttcagta

SEQ ID NO: 574899 - DNA, 19 bp, Mus musculus
  siRNA target sequence for A030012E10 (NM_172880.1,402-420).
catgctgctgatttttcga

SEQ ID NO: 574900 - DNA, 19 bp, Mus musculus
  siRNA target sequence for A030012E10 (NM_172880.1,405-423).
gctgctgatttttcgaatt

SEQ ID NO: 574901 - DNA, 19 bp, Mus musculus
  siRNA target sequence for A030012E10 (NM_172880.1,442-460).
gaaactgtgcataaaatta

SEQ ID NO: 574902 - DNA, 19 bp, Mus musculus
  siRNA target sequence for A030012E10 (NM_172880.1,497-515).
cgggaccccccaatgttga

SEQ ID NO: 574903 - DNA, 19 bp, Mus musculus
  siRNA target sequence for A030012E10 (NM_172880.1,498-516).
gggaccccccaatgttgat

SEQ ID NO: 574904 - DNA, 19 bp, Mus musculus
  siRNA target sequence for A030012E10 (NM_172880.1,514-532).
gatcctgagtcagttaaaa

SEQ ID NO: 574905 - DNA, 19 bp, Mus musculus
  siRNA target sequence for A030012E10 (NM_172880.1,517-535).
cctgagtcagttaaaatta

SEQ ID NO: 574906 - DNA, 19 bp, Mus musculus
  siRNA target sequence for A030012E10 (NM_172880.1,559-577).
gacaactatttcaaccatt

SEQ ID NO: 574907 - DNA, 19 bp, Mus musculus
  siRNA target sequence for A030012E10 (NM_172880.1,564-582).
ctatttcaaccattgttgt

SEQ ID NO: 574908 - DNA, 19 bp, Mus musculus
  siRNA target sequence for A030012E10 (NM_172880.1,585-603).
gacacgacggaacaaatct

SEQ ID NO: 574909 - DNA, 19 bp, Mus musculus
  siRNA target sequence for A030012E10 (NM_172880.1,697-715).
cgctgtggagcaactttga

SEQ ID NO: 574910 - DNA, 19 bp, Mus musculus
  siRNA target sequence for A030012E10 (NM_172880.1,698-716).
gctgtggagcaactttgat

SEQ ID NO: 574911 - DNA, 19 bp, Mus musculus
  siRNA target sequence for A030012E10 (NM_172880.1,701-719).
gtggagcaactttgatcaa

SEQ ID NO: 574912 - DNA, 19 bp, Mus musculus
  siRNA target sequence for A030012E10 (NM_172880.1,774-792).
cagatggagtgctaccttt

SEQ ID NO: 574913 - DNA, 19 bp, Mus musculus
  siRNA target sequence for A030012E10 (NM_172880.1,788-806).
cctttggggcaacattaca

SEQ ID NO: 574914 - DNA, 19 bp, Mus musculus
  siRNA target sequence for A030012E10 (NM_172880.1,800-818).
cattacaacctcgaaaact

SEQ ID NO: 574915 - DNA, 19 bp, Mus musculus
  siRNA target sequence for A030012E10 (NM_172880.1,824-842).
caggcatccggaggataat

SEQ ID NO: 574916 - DNA, 19 bp, Mus musculus
  siRNA target sequence for A030012E10 (NM_172880.1,827-845).
gcatccggaggataattgt

SEQ ID NO: 574917 - DNA, 19 bp, Mus musculus
  siRNA target sequence for A030012E10 (NM_172880.1,828-846).
catccggaggataattgtt

SEQ ID NO: 574918 - DNA, 19 bp, Mus musculus
  siRNA target sequence for A030012E10 (NM_172880.1,831-849).
ccggaggataattgttcat

SEQ ID NO: 574919 - DNA, 19 bp, Mus musculus
  siRNA target sequence for A030012E10 (NM_172880.1,833-851).
ggaggataattgttcatga

SEQ ID NO: 574920 - DNA, 19 bp, Mus musculus
  siRNA target sequence for A030012E10 (NM_172880.1,836-854).
ggataattgttcatgaaaa

SEQ ID NO: 574921 - DNA, 19 bp, Mus musculus
  siRNA target sequence for A030012E10 (NM_172880.1,865-883).
ccgtcccatgactatgaca

SEQ ID NO: 574922 - DNA, 19 bp, Mus musculus
  siRNA target sequence for A030012E10 (NM_172880.1,866-884).
cgtcccatgactatgacat

SEQ ID NO: 574923 - DNA, 19 bp, Mus musculus
  siRNA target sequence for A030012E10 (NM_172880.1,887-905).
cactggcagaactgtctaa

SEQ ID NO: 574924 - DNA, 19 bp, Mus musculus
  siRNA target sequence for A030012E10 (NM_172880.1,906-924).
gccggtcccctgcacaaat

SEQ ID NO: 574925 - DNA, 19 bp, Mus musculus
  siRNA target sequence for A030012E10 (NM_172880.1,909-927).
ggtcccctgcacaaatgca

SEQ ID NO: 574926 - DNA, 19 bp, Mus musculus
  siRNA target sequence for A030012E10 (NM_172880.1,926-944).
cagtgcataaggtttgtct

SEQ ID NO: 574927 - DNA, 19 bp, Mus musculus
  siRNA target sequence for A030012E10 (NM_172880.1,995-1013).
gatttggagcattgaaaaa

SEQ ID NO: 574928 - DNA, 19 bp, Mus musculus
  siRNA target sequence for A030012E10 (NM_172880.1,1019-1037).
gtttcacccagaataacct

SEQ ID NO: 574929 - DNA, 19 bp, Mus musculus
  siRNA target sequence for A030012E10 (NM_172880.1,1048-1066).
caggtggactacatagata

SEQ ID NO: 574930 - DNA, 19 bp, Mus musculus
  siRNA target sequence for A030012E10 (NM_172880.1,1074-1092).
ctgcaatcagcctcaatct

SEQ ID NO: 574931 - DNA, 19 bp, Mus musculus
  siRNA target sequence for A030012E10 (NM_172880.1,1076-1094).
gcaatcagcctcaatctta

SEQ ID NO: 574932 - DNA, 19 bp, Mus musculus
  siRNA target sequence for A030012E10 (NM_172880.1,1122-1140).
gtgcgctggcttcttaaaa

SEQ ID NO: 574933 - DNA, 19 bp, Mus musculus
  siRNA target sequence for A030012E10 (NM_172880.1,1167-1185).
ctcgggaggtccacttgtt

SEQ ID NO: 574934 - DNA, 19 bp, Mus musculus
  siRNA target sequence for A030012E10 (NM_172880.1,1170-1188).
gggaggtccacttgttact

SEQ ID NO: 574935 - DNA, 19 bp, Mus musculus
  siRNA target sequence for A030012E10 (NM_172880.1,1180-1198).
cttgttactgcagatgtta

SEQ ID NO: 574936 - DNA, 19 bp, Mus musculus
  siRNA target sequence for A030012E10 (NM_172880.1,1189-1207).
gcagatgttagagatatat

SEQ ID NO: 574937 - DNA, 19 bp, Mus musculus
  siRNA target sequence for AA881470 (NM_172724.1,165-183).
ctgctggactggtttaaaa

SEQ ID NO: 574938 - DNA, 19 bp, Mus musculus
  siRNA target sequence for AA881470 (NM_172724.1,219-237).
caggaccatccctgcttaa

SEQ ID NO: 574939 - DNA, 19 bp, Mus musculus
  siRNA target sequence for AA881470 (NM_172724.1,848-866).
catggaccttcttcttagt

SEQ ID NO: 574940 - DNA, 19 bp, Mus musculus
  siRNA target sequence for AA881470 (NM_172724.1,871-889).
ccaggtcgcctgtgttgaa

SEQ ID NO: 574941 - DNA, 19 bp, Mus musculus
  siRNA target sequence for AA881470 (NM_172724.1,872-890).
caggtcgcctgtgttgaat

SEQ ID NO: 574942 - DNA, 19 bp, Mus musculus
  siRNA target sequence for AA881470 (NM_172724.1,875-893).
gtcgcctgtgttgaatttt

SEQ ID NO: 574943 - DNA, 19 bp, Mus musculus
  siRNA target sequence for AA881470 (NM_172724.1,1245-1263).
caagctgctttgactatat

SEQ ID NO: 574944 - DNA, 19 bp, Mus musculus
  siRNA target sequence for AA881470 (NM_172724.1,1249-1267).
ctgctttgactatattgca

SEQ ID NO: 574945 - DNA, 19 bp, Mus musculus
  siRNA target sequence for AA881470 (NM_172724.1,1403-1421).
gttggttctggaggtattt

SEQ ID NO: 574946 - DNA, 19 bp, Mus musculus
  siRNA target sequence for AA881470 (NM_172724.1,1456-1474).
ccagccccatggtcctaaa

SEQ ID NO: 574947 - DNA, 19 bp, Mus musculus
  siRNA target sequence for AA881470 (NM_181066.1,1837-1855).
cccaacagggcctactcat

SEQ ID NO: 574948 - DNA, 19 bp, Mus musculus
  siRNA target sequence for AA881470 (NM_181066.1,1846-1864).
gcctactcatggaccttat

SEQ ID NO: 574949 - DNA, 19 bp, Mus musculus
  siRNA target sequence for AA881470 (NM_181066.1,1895-1913).
ccctcgaagggctgtgtta

SEQ ID NO: 574950 - DNA, 19 bp, Mus musculus
  siRNA target sequence for AA881470 (NM_181066.1,2131-2149).
gcccacacccggaattctt

SEQ ID NO: 574951 - DNA, 19 bp, Mus musculus
  siRNA target sequence for AA881470 (NM_181066.1,2163-2181).
cgtctgccgctctttgagt

SEQ ID NO: 574952 - DNA, 19 bp, Mus musculus
  siRNA target sequence for AA881470 (NM_181066.1,2164-2182).
gtctgccgctctttgagtt

SEQ ID NO: 574953 - DNA, 19 bp, Mus musculus
  siRNA target sequence for AA881470 (NM_181066.1,2235-2253).
gacctgctcctcttcttga

SEQ ID NO: 574954 - DNA, 19 bp, Mus musculus
  siRNA target sequence for Acr (NM_013455.1,47-65).
ccgtggttgccaaggataa

SEQ ID NO: 574955 - DNA, 19 bp, Mus musculus
  siRNA target sequence for Acr (NM_013455.1,49-67).
gtggttgccaaggataaca

SEQ ID NO: 574956 - DNA, 19 bp, Mus musculus
  siRNA target sequence for Acr (NM_013455.1,79-97).
ggtccctgtgggttacgat

SEQ ID NO: 574957 - DNA, 19 bp, Mus musculus
  siRNA target sequence for Acr (NM_013455.1,80-98).
gtccctgtgggttacgatt

SEQ ID NO: 574958 - DNA, 19 bp, Mus musculus
  siRNA target sequence for Acr (NM_013455.1,115-133).
gcaggtacccggattgtca

SEQ ID NO: 574959 - DNA, 19 bp, Mus musculus
  siRNA target sequence for Acr (NM_013455.1,167-185).
ggatggtcagcttacagat

SEQ ID NO: 574960 - DNA, 19 bp, Mus musculus
  siRNA target sequence for Acr (NM_013455.1,264-282).
ccactgcttcgataacaaa

SEQ ID NO: 574961 - DNA, 19 bp, Mus musculus
  siRNA target sequence for Acr (NM_013455.1,265-283).
cactgcttcgataacaaaa

SEQ ID NO: 574962 - DNA, 19 bp, Mus musculus
  siRNA target sequence for Acr (NM_013455.1,306-324).
ggttttcggagcacaagaa

SEQ ID NO: 574963 - DNA, 19 bp, Mus musculus
  siRNA target sequence for Acr (NM_013455.1,307-325).
gttttcggagcacaagaaa

SEQ ID NO: 574964 - DNA, 19 bp, Mus musculus
  siRNA target sequence for Acr (NM_013455.1,312-330).
cggagcacaagaaatcgaa

SEQ ID NO: 574965 - DNA, 19 bp, Mus musculus
  siRNA target sequence for Acr (NM_013455.1,313-331).
ggagcacaagaaatcgaat

SEQ ID NO: 574966 - DNA, 19 bp, Mus musculus
  siRNA target sequence for Acr (NM_013455.1,314-332).
gagcacaagaaatcgaata

SEQ ID NO: 574967 - DNA, 19 bp, Mus musculus
  siRNA target sequence for Acr (NM_013455.1,319-337).
caagaaatcgaatatggaa

SEQ ID NO: 574968 - DNA, 19 bp, Mus musculus
  siRNA target sequence for Acr (NM_013455.1,388-406).
gtcatccatgagaaataca

SEQ ID NO: 574969 - DNA, 19 bp, Mus musculus
  siRNA target sequence for Acr (NM_013455.1,414-432).
gacggagggaaatgacatt

SEQ ID NO: 574970 - DNA, 19 bp, Mus musculus
  siRNA target sequence for Acr (NM_013455.1,427-445).
gacattgcgctcttgaaga

SEQ ID NO: 574971 - DNA, 19 bp, Mus musculus
  siRNA target sequence for Acr (NM_013455.1,485-503).
gctgtctacctcattttaa

SEQ ID NO: 574972 - DNA, 19 bp, Mus musculus
  siRNA target sequence for Acr (NM_013455.1,504-522).
ggcgggtcctccccaaata

SEQ ID NO: 574973 - DNA, 19 bp, Mus musculus
  siRNA target sequence for Acr (NM_013455.1,540-558).
gactgggtggggatacata

SEQ ID NO: 574974 - DNA, 19 bp, Mus musculus
  siRNA target sequence for Acr (NM_013455.1,542-560).
ctgggtggggatacataaa

SEQ ID NO: 574975 - DNA, 19 bp, Mus musculus
  siRNA target sequence for Acr (NM_013455.1,548-566).
ggggatacataaaagagaa

SEQ ID NO: 574976 - DNA, 19 bp, Mus musculus
  siRNA target sequence for Acr (NM_013455.1,599-617).
cacgtgtggacctcattga

SEQ ID NO: 574977 - DNA, 19 bp, Mus musculus
  siRNA target sequence for Acr (NM_013455.1,618-636).
cctcgacctgtgtaactca

SEQ ID NO: 574978 - DNA, 19 bp, Mus musculus
  siRNA target sequence for Acr (NM_013455.1,619-637).
ctcgacctgtgtaactcaa

SEQ ID NO: 574979 - DNA, 19 bp, Mus musculus
  siRNA target sequence for Acr (NM_013455.1,633-651).
ctcaacccagtggtacaat

SEQ ID NO: 574980 - DNA, 19 bp, Mus musculus
  siRNA target sequence for Acr (NM_013455.1,654-672).
gcgtgtcacatcgactaat

SEQ ID NO: 574981 - DNA, 19 bp, Mus musculus
  siRNA target sequence for Acr (NM_013455.1,656-674).
gtgtcacatcgactaatgt

SEQ ID NO: 574982 - DNA, 19 bp, Mus musculus
  siRNA target sequence for Acr (NM_013455.1,658-676).
gtcacatcgactaatgtgt

SEQ ID NO: 574983 - DNA, 19 bp, Mus musculus
  siRNA target sequence for Acr (NM_013455.1,875-893).
ctaacgccttgcacttgat

SEQ ID NO: 574984 - DNA, 19 bp, Mus musculus
  siRNA target sequence for Acr (NM_013455.1,962-980).
gccctccttggtatttcca

SEQ ID NO: 574985 - DNA, 19 bp, Mus musculus
  siRNA target sequence for Acr (NM_013455.1,989-1007).
cttctcgaccgctttacct

SEQ ID NO: 574986 - DNA, 19 bp, Mus musculus
  siRNA target sequence for Acr (NM_013455.1,1107-1125).
ctttaccattgctacacaa

SEQ ID NO: 574987 - DNA, 19 bp, Mus musculus
  siRNA target sequence for Acr (NM_013455.1,1137-1155).
ccgcacaacgctgtctttt

SEQ ID NO: 574988 - DNA, 19 bp, Mus musculus
  siRNA target sequence for Acr (NM_013455.1,1163-1181).
gtctccagcgcctcataga

SEQ ID NO: 574989 - DNA, 19 bp, Mus musculus
  siRNA target sequence for Adn (NM_013459.1,287-305).
ctacaagcgatggtatgat

SEQ ID NO: 574990 - DNA, 19 bp, Mus musculus
  siRNA target sequence for Adn (NM_013459.1,409-427).
gacccctacccttgcaata

SEQ ID NO: 574991 - DNA, 19 bp, Mus musculus
  siRNA target sequence for Adn (NM_013459.1,412-430).
ccctacccttgcaatacga

SEQ ID NO: 574992 - DNA, 19 bp, Mus musculus
  siRNA target sequence for Adn (NM_013459.1,422-440).
gcaatacgaggacaaagaa

SEQ ID NO: 574993 - DNA, 19 bp, Mus musculus
  siRNA target sequence for Adn (NM_013459.1,576-594).
ggggtagtcaccattaaca

SEQ ID NO: 574994 - DNA, 19 bp, Mus musculus
  siRNA target sequence for Adn (NM_013459.1,577-595).
gggtagtcaccattaacat

SEQ ID NO: 574995 - DNA, 19 bp, Mus musculus
  siRNA target sequence for Adn (NM_013459.1,750-768).
cggatgtggatcgaaaaca

SEQ ID NO: 574996 - DNA, 19 bp, Mus musculus
  siRNA target sequence for Adn (NM_013459.1,751-769).
ggatgtggatcgaaaacat

SEQ ID NO: 574997 - DNA, 19 bp, Mus musculus
  siRNA target sequence for B230219I23 (NM_172455.1,547-565).
gccatcgtgggttatctga

SEQ ID NO: 574998 - DNA, 19 bp, Mus musculus
  siRNA target sequence for B230219I23 (NM_172455.1,548-566).
ccatcgtgggttatctgat

SEQ ID NO: 574999 - DNA, 19 bp, Mus musculus
  siRNA target sequence for B230219I23 (NM_172455.1,549-567).
catcgtgggttatctgatt

SEQ ID NO: 575000 - DNA, 19 bp, Mus musculus
  siRNA target sequence for B230219I23 (NM_172455.1,564-582).
gattcgtctctccattgaa

SEQ ID NO: 575001 - DNA, 19 bp, Mus musculus
  siRNA target sequence for B230219I23 (NM_172455.1,595-613).
gaagccgacaactgtatca

SEQ ID NO: 575002 - DNA, 19 bp, Mus musculus
  siRNA target sequence for B230219I23 (NM_172455.1,694-712).
ctaatgtccttcgtttcta

SEQ ID NO: 575003 - DNA, 19 bp, Mus musculus
  siRNA target sequence for B230219I23 (NM_172455.1,702-720).
cttcgtttctacaaataat

SEQ ID NO: 575004 - DNA, 19 bp, Mus musculus
  siRNA target sequence for B230219I23 (NM_172455.1,762-780).
ggcagggatccgagcatat

SEQ ID NO: 575005 - DNA, 19 bp, Mus musculus
  siRNA target sequence for B230219I23 (NM_172455.1,763-781).
gcagggatccgagcatatt

SEQ ID NO: 575006 - DNA, 19 bp, Mus musculus
  siRNA target sequence for B230219I23 (NM_172455.1,764-782).
cagggatccgagcatattt

SEQ ID NO: 575007 - DNA, 19 bp, Mus musculus
  siRNA target sequence for B230219I23 (NM_172455.1,767-785).
ggatccgagcatattttga

SEQ ID NO: 575008 - DNA, 19 bp, Mus musculus
  siRNA target sequence for B230219I23 (NM_172455.1,768-786).
gatccgagcatattttgaa

SEQ ID NO: 575009 - DNA, 19 bp, Mus musculus
  siRNA target sequence for B230219I23 (NM_172455.1,815-833).
caatactggtcaaggaaat

SEQ ID NO: 575010 - DNA, 19 bp, Mus musculus
  siRNA target sequence for B230219I23 (NM_172455.1,860-878).
gtccgtattacccaagtta

SEQ ID NO: 575011 - DNA, 19 bp, Mus musculus
  siRNA target sequence for B230219I23 (NM_172455.1,863-881).
cgtattacccaagttacta

SEQ ID NO: 575012 - DNA, 19 bp, Mus musculus
  siRNA target sequence for B230219I23 (NM_172455.1,864-882).
gtattacccaagttactat

SEQ ID NO: 575013 - DNA, 19 bp, Mus musculus
  siRNA target sequence for B230219I23 (NM_172455.1,941-959).
ccctgaaattctacaacta

SEQ ID NO: 575014 - DNA, 19 bp, Mus musculus
  siRNA target sequence for B230219I23 (NM_172455.1,942-960).
cctgaaattctacaactat

SEQ ID NO: 575015 - DNA, 19 bp, Mus musculus
  siRNA target sequence for B230219I23 (NM_172455.1,943-961).
ctgaaattctacaactatt

SEQ ID NO: 575016 - DNA, 19 bp, Mus musculus
  siRNA target sequence for B230219I23 (NM_172455.1,951-969).
ctacaactattccataact

SEQ ID NO: 575017 - DNA, 19 bp, Mus musculus
  siRNA target sequence for B230219I23 (NM_172455.1,1119-1137).
gccactcttggtagaatat

SEQ ID NO: 575018 - DNA, 19 bp, Mus musculus
  siRNA target sequence for B230219I23 (NM_172455.1,1132-1150).
gaatatggcggttacaaca

SEQ ID NO: 575019 - DNA, 19 bp, Mus musculus
  siRNA target sequence for B230219I23 (NM_172455.1,1165-1183).
cctgcaggatcttttaggt

SEQ ID NO: 575020 - DNA, 19 bp, Mus musculus
  siRNA target sequence for B230219I23 (NM_172455.1,1182-1200).
gtgctcctccggtttgtgt

SEQ ID NO: 575021 - DNA, 19 bp, Mus musculus
  siRNA target sequence for B230219I23 (NM_172455.1,1215-1233).
gcgttgtgacggagtgaat

SEQ ID NO: 575022 - DNA, 19 bp, Mus musculus
  siRNA target sequence for B230219I23 (NM_172455.1,1217-1235).
gttgtgacggagtgaatga

SEQ ID NO: 575023 - DNA, 19 bp, Mus musculus
  siRNA target sequence for B230219I23 (NM_172455.1,1236-1254).
ctgtttcgacgaaagtgat

SEQ ID NO: 575024 - DNA, 19 bp, Mus musculus
  siRNA target sequence for B230219I23 (NM_172455.1,1392-1410).
cagtaggacctttaaatgt

SEQ ID NO: 575025 - DNA, 19 bp, Mus musculus
  siRNA target sequence for B230219I23 (NM_172455.1,1431-1449).
gaagcaaaatgcacaatgt

SEQ ID NO: 575026 - DNA, 19 bp, Mus musculus
  siRNA target sequence for B230219I23 (NM_172455.1,1515-1533).
cttccttcaccgaatcgtt

SEQ ID NO: 575027 - DNA, 19 bp, Mus musculus
  siRNA target sequence for B230219I23 (NM_172455.1,1717-1735).
gggaatgccaagtttatct

SEQ ID NO: 575028 - DNA, 19 bp, Mus musculus
  siRNA target sequence for B230219I23 (NM_172455.1,1748-1766).
ggattgtggtccatgaata

SEQ ID NO: 575029 - DNA, 19 bp, Mus musculus
  siRNA target sequence for B230219I23 (NM_172455.1,1840-1858).
cagctcattcaaccaatat

SEQ ID NO: 575030 - DNA, 19 bp, Mus musculus
  siRNA target sequence for B230219I23 (NM_172455.1,1843-1861).
ctcattcaaccaatatgca

SEQ ID NO: 575031 - DNA, 19 bp, Mus musculus
  siRNA target sequence for B230219I23 (NM_172455.1,1845-1863).
cattcaaccaatatgcatt

SEQ ID NO: 575032 - DNA, 19 bp, Mus musculus
  siRNA target sequence for B230219I23 (NM_172455.1,1967-1985).
cggaggtagagctcataga

SEQ ID NO: 575033 - DNA, 19 bp, Mus musculus
  siRNA target sequence for B230219I23 (NM_172455.1,1968-1986).
ggaggtagagctcatagat

SEQ ID NO: 575034 - DNA, 19 bp, Mus musculus
  siRNA target sequence for B230219I23 (NM_172455.1,1972-1990).
gtagagctcatagatcaaa

SEQ ID NO: 575035 - DNA, 19 bp, Mus musculus
  siRNA target sequence for B230219I23 (NM_172455.1,1984-2002).
gatcaaaccgtctgtgttt

SEQ ID NO: 575036 - DNA, 19 bp, Mus musculus
  siRNA target sequence for B230219I23 (NM_172455.1,2064-2082).
cgcctgcaaaggagattca

SEQ ID NO: 575037 - DNA, 19 bp, Mus musculus
  siRNA target sequence for B230219I23 (NM_172455.1,2094-2112).
gtcttgtcgaagaaagagt

SEQ ID NO: 575038 - DNA, 19 bp, Mus musculus
  siRNA target sequence for B230219I23 (NM_172455.1,2156-2174).
gatgtggaagacccaattt

SEQ ID NO: 575039 - DNA, 19 bp, Mus musculus
  siRNA target sequence for B230219I23 (NM_172455.1,2187-2205).
cacaagggtgtcaagcttt

SEQ ID NO: 575040 - DNA, 19 bp, Mus musculus
  siRNA target sequence for BC020151 (NM_145561.1,90-108).
gtagctttcgttgtcataa

SEQ ID NO: 575041 - DNA, 19 bp, Mus musculus
  siRNA target sequence for BC020151 (NM_145561.1,93-111).
gctttcgttgtcataataa

SEQ ID NO: 575042 - DNA, 19 bp, Mus musculus
  siRNA target sequence for BC020151 (NM_145561.1,131-149).
gatggcaggtctacttatt

SEQ ID NO: 575043 - DNA, 19 bp, Mus musculus
  siRNA target sequence for BC020151 (NM_145561.1,135-153).
gcaggtctacttattcact

SEQ ID NO: 575044 - DNA, 19 bp, Mus musculus
  siRNA target sequence for BC020151 (NM_145561.1,167-185).
caagaaagcttacttttat

SEQ ID NO: 575045 - DNA, 19 bp, Mus musculus
  siRNA target sequence for BC020151 (NM_145561.1,170-188).
gaaagcttacttttatcat

SEQ ID NO: 575046 - DNA, 19 bp, Mus musculus
  siRNA target sequence for BC020151 (NM_145561.1,190-208).
gcagctttcaaatcctaaa

SEQ ID NO: 575047 - DNA, 19 bp, Mus musculus
  siRNA target sequence for BC020151 (NM_145561.1,193-211).
gctttcaaatcctaaacgt

SEQ ID NO: 575048 - DNA, 19 bp, Mus musculus
  siRNA target sequence for BC020151 (NM_145561.1,198-216).
caaatcctaaacgttgaat

SEQ ID NO: 575049 - DNA, 19 bp, Mus musculus
  siRNA target sequence for BC020151 (NM_145561.1,203-221).
cctaaacgttgaatacact

SEQ ID NO: 575050 - DNA, 19 bp, Mus musculus
  siRNA target sequence for BC020151 (NM_145561.1,213-231).
gaatacactgaggctttaa

SEQ ID NO: 575051 - DNA, 19 bp, Mus musculus
  siRNA target sequence for BC020151 (NM_145561.1,235-253).
caccagctacacacgaata

SEQ ID NO: 575052 - DNA, 19 bp, Mus musculus
  siRNA target sequence for BC020151 (NM_145561.1,237-255).
ccagctacacacgaataca

SEQ ID NO: 575053 - DNA, 19 bp, Mus musculus
  siRNA target sequence for BC020151 (NM_145561.1,254-272).
cagaaccttgagtgaaaga

SEQ ID NO: 575054 - DNA, 19 bp, Mus musculus
  siRNA target sequence for BC020151 (NM_145561.1,259-277).
ccttgagtgaaagaattga

SEQ ID NO: 575055 - DNA, 19 bp, Mus musculus
  siRNA target sequence for BC020151 (NM_145561.1,280-298).
ctatgattactgatgaatt

SEQ ID NO: 575056 - DNA, 19 bp, Mus musculus
  siRNA target sequence for BC020151 (NM_145561.1,284-302).
gattactgatgaatttcga

SEQ ID NO: 575057 - DNA, 19 bp, Mus musculus
  siRNA target sequence for BC020151 (NM_145561.1,300-318).
cgaggatcaagtctaaaaa

SEQ ID NO: 575058 - DNA, 19 bp, Mus musculus
  siRNA target sequence for BC020151 (NM_145561.1,312-330).
ctaaaaagtgagtttatca

SEQ ID NO: 575059 - DNA, 19 bp, Mus musculus
  siRNA target sequence for BC020151 (NM_145561.1,323-341).
gtttatcaggacacatgtt

SEQ ID NO: 575060 - DNA, 19 bp, Mus musculus
  siRNA target sequence for BC020151 (NM_145561.1,332-350).
gacacatgttgtcaaacta

SEQ ID NO: 575061 - DNA, 19 bp, Mus musculus
  siRNA target sequence for BC020151 (NM_145561.1,381-399).
gttgtcatgaaatttcgat

SEQ ID NO: 575062 - DNA, 19 bp, Mus musculus
  siRNA target sequence for BC020151 (NM_145561.1,386-404).
catgaaatttcgatctagt

SEQ ID NO: 575063 - DNA, 19 bp, Mus musculus
  siRNA target sequence for BC020151 (NM_145561.1,389-407).
gaaatttcgatctagtaaa

SEQ ID NO: 575064 - DNA, 19 bp, Mus musculus
  siRNA target sequence for BC020151 (NM_145561.1,479-497).
ggaaatagccccttcgaat

SEQ ID NO: 575065 - DNA, 19 bp, Mus musculus
  siRNA target sequence for BC020151 (NM_145561.1,486-504).
gccccttcgaatgagataa

SEQ ID NO: 575066 - DNA, 19 bp, Mus musculus
  siRNA target sequence for BC020151 (NM_145561.1,488-506).
cccttcgaatgagataaca

SEQ ID NO: 575067 - DNA, 19 bp, Mus musculus
  siRNA target sequence for BC020151 (NM_145561.1,489-507).
ccttcgaatgagataacat

SEQ ID NO: 575068 - DNA, 19 bp, Mus musculus
  siRNA target sequence for BC020151 (NM_145561.1,559-577).
gtccagaccttataacact

SEQ ID NO: 575069 - DNA, 19 bp, Mus musculus
  siRNA target sequence for BC020151 (NM_145561.1,636-654).
gtcagtctacagctcaata

SEQ ID NO: 575070 - DNA, 19 bp, Mus musculus
  siRNA target sequence for BC020151 (NM_145561.1,638-656).
cagtctacagctcaataat

SEQ ID NO: 575071 - DNA, 19 bp, Mus musculus
  siRNA target sequence for BC020151 (NM_145561.1,669-687).
ggaggtgccctgatcagta

SEQ ID NO: 575072 - DNA, 19 bp, Mus musculus
  siRNA target sequence for BC020151 (NM_145561.1,670-688).
gaggtgccctgatcagtaa

SEQ ID NO: 575073 - DNA, 19 bp, Mus musculus
  siRNA target sequence for BC020151 (NM_145561.1,672-690).
ggtgccctgatcagtaaca

SEQ ID NO: 575074 - DNA, 19 bp, Mus musculus
  siRNA target sequence for BC020151 (NM_145561.1,715-733).
gcttcaaaagctatcctaa

SEQ ID NO: 575075 - DNA, 19 bp, Mus musculus
  siRNA target sequence for BC020151 (NM_145561.1,729-747).
cctaatcctcaatattgga

SEQ ID NO: 575076 - DNA, 19 bp, Mus musculus
  siRNA target sequence for BC020151 (NM_145561.1,752-770).
cacctttggggtttctaca

SEQ ID NO: 575077 - DNA, 19 bp, Mus musculus
  siRNA target sequence for BC020151 (NM_145561.1,789-807).
gtgagagtaagggctattt

SEQ ID NO: 575078 - DNA, 19 bp, Mus musculus
  siRNA target sequence for BC020151 (NM_145561.1,791-809).
gagagtaagggctatttta

SEQ ID NO: 575079 - DNA, 19 bp, Mus musculus
  siRNA target sequence for BC020151 (NM_145561.1,827-845).
ctccgtaactcgtgacaat

SEQ ID NO: 575080 - DNA, 19 bp, Mus musculus
  siRNA target sequence for BC020151 (NM_145561.1,842-860).
caatgacatcgcagttgta

SEQ ID NO: 575081 - DNA, 19 bp, Mus musculus
  siRNA target sequence for BC020151 (NM_145561.1,848-866).
catcgcagttgtacaactt

SEQ ID NO: 575082 - DNA, 19 bp, Mus musculus
  siRNA target sequence for BC020151 (NM_145561.1,876-894).
gtcgccttttccagaaata

SEQ ID NO: 575083 - DNA, 19 bp, Mus musculus
  siRNA target sequence for BC020151 (NM_145561.1,880-898).
ccttttccagaaatatcca

SEQ ID NO: 575084 - DNA, 19 bp, Mus musculus
  siRNA target sequence for BC020151 (NM_145561.1,911-929).
cccagcagcaacccaaaat

SEQ ID NO: 575085 - DNA, 19 bp, Mus musculus
  siRNA target sequence for BC020151 (NM_145561.1,916-934).
cagcaacccaaaatatcat

SEQ ID NO: 575086 - DNA, 19 bp, Mus musculus
  siRNA target sequence for BC020151 (NM_145561.1,939-957).
ggttctgtcgcatatgtta

SEQ ID NO: 575087 - DNA, 19 bp, Mus musculus
  siRNA target sequence for BC020151 (NM_145561.1,965-983).
gggatctctcacatatgga

SEQ ID NO: 575088 - DNA, 19 bp, Mus musculus
  siRNA target sequence for BC020151 (NM_145561.1,1011-1029).
ggagaggtcagaataataa

SEQ ID NO: 575089 - DNA, 19 bp, Mus musculus
  siRNA target sequence for BC020151 (NM_145561.1,1016-1034).
ggtcagaataataagttca

SEQ ID NO: 575090 - DNA, 19 bp, Mus musculus
  siRNA target sequence for BC020151 (NM_145561.1,1160-1178).
ctcaaggcggctttggttt

SEQ ID NO: 575091 - DNA, 19 bp, Mus musculus
  siRNA target sequence for BC020151 (NM_145561.1,1165-1183).
ggcggctttggtttgttgt

SEQ ID NO: 575092 - DNA, 19 bp, Mus musculus
  siRNA target sequence for C2 (NM_013484.1,115-133).
ctgcaaccagaatgtcaat

SEQ ID NO: 575093 - DNA, 19 bp, Mus musculus
  siRNA target sequence for C2 (NM_013484.1,130-148).
caatatcaccggtggtaat

SEQ ID NO: 575094 - DNA, 19 bp, Mus musculus
  siRNA target sequence for C2 (NM_013484.1,174-192).
ctgggagcctcctcatcta

SEQ ID NO: 575095 - DNA, 19 bp, Mus musculus
  siRNA target sequence for C2 (NM_013484.1,176-194).
gggagcctcctcatctact

SEQ ID NO: 575096 - DNA, 19 bp, Mus musculus
  siRNA target sequence for C2 (NM_013484.1,290-308).
cgatcctctcggatggtta

SEQ ID NO: 575097 - DNA, 19 bp, Mus musculus
  siRNA target sequence for C2 (NM_013484.1,291-309).
gatcctctcggatggttaa

SEQ ID NO: 575098 - DNA, 19 bp, Mus musculus
  siRNA target sequence for C2 (NM_013484.1,339-357).
ctccttcatcctttgaaaa

SEQ ID NO: 575099 - DNA, 19 bp, Mus musculus
  siRNA target sequence for C2 (NM_013484.1,548-566).
gctcggacaggcttgaact

SEQ ID NO: 575100 - DNA, 19 bp, Mus musculus
  siRNA target sequence for C2 (NM_013484.1,592-610).
ccgctgctcctcctcaaat

SEQ ID NO: 575101 - DNA, 19 bp, Mus musculus
  siRNA target sequence for C2 (NM_013484.1,593-611).
cgctgctcctcctcaaata

SEQ ID NO: 575102 - DNA, 19 bp, Mus musculus
  siRNA target sequence for C2 (NM_013484.1,600-618).
cctcctcaaatatggtatt

SEQ ID NO: 575103 - DNA, 19 bp, Mus musculus
  siRNA target sequence for C2 (NM_013484.1,604-622).
ctcaaatatggtattgact

SEQ ID NO: 575104 - DNA, 19 bp, Mus musculus
  siRNA target sequence for C2 (NM_013484.1,681-699).
gccgacagccttactctta

SEQ ID NO: 575105 - DNA, 19 bp, Mus musculus
  siRNA target sequence for C2 (NM_013484.1,792-810).
gtttgggccgtaagatcat

SEQ ID NO: 575106 - DNA, 19 bp, Mus musculus
  siRNA target sequence for C2 (NM_013484.1,798-816).
gccgtaagatcataatcca

SEQ ID NO: 575107 - DNA, 19 bp, Mus musculus
  siRNA target sequence for C2 (NM_013484.1,968-986).
gcctctcagcccaaaacca

SEQ ID NO: 575108 - DNA, 19 bp, Mus musculus
  siRNA target sequence for C2 (NM_013484.1,974-992).
cagcccaaaaccatcatgt

SEQ ID NO: 575109 - DNA, 19 bp, Mus musculus
  siRNA target sequence for C2 (NM_013484.1,1097-1115).
gttctcatccgcgtttact

SEQ ID NO: 575110 - DNA, 19 bp, Mus musculus
  siRNA target sequence for C2 (NM_013484.1,1216-1234).
gggtgactctcccaagaaa

SEQ ID NO: 575111 - DNA, 19 bp, Mus musculus
  siRNA target sequence for C2 (NM_013484.1,1398-1416).
caaaggccttgcaacagat

SEQ ID NO: 575112 - DNA, 19 bp, Mus musculus
  siRNA target sequence for C2 (NM_013484.1,1402-1420).
ggccttgcaacagatcttt

SEQ ID NO: 575113 - DNA, 19 bp, Mus musculus
  siRNA target sequence for C2 (NM_013484.1,1440-1458).
ctaagctcacagataccat

SEQ ID NO: 575114 - DNA, 19 bp, Mus musculus
  siRNA target sequence for C2 (NM_013484.1,1509-1527).
cttggcaagtcacctttaa

SEQ ID NO: 575115 - DNA, 19 bp, Mus musculus
  siRNA target sequence for C2 (NM_013484.1,1627-1645).
cctgtggagggtcaatgta

SEQ ID NO: 575116 - DNA, 19 bp, Mus musculus
  siRNA target sequence for C2 (NM_013484.1,1735-1753).
gggcatctcagagttctat

SEQ ID NO: 575117 - DNA, 19 bp, Mus musculus
  siRNA target sequence for C2 (NM_013484.1,1777-1795).
gctatctcggaaagtgaaa

SEQ ID NO: 575118 - DNA, 19 bp, Mus musculus
  siRNA target sequence for C2 (NM_013484.1,1864-1882).
cccaggtagtacctgtaaa

SEQ ID NO: 575119 - DNA, 19 bp, Mus musculus
  siRNA target sequence for C2 (NM_013484.1,1869-1887).
gtagtacctgtaaagatca

SEQ ID NO: 575120 - DNA, 19 bp, Mus musculus
  siRNA target sequence for C2 (NM_013484.1,1872-1890).
gtacctgtaaagatcatga

SEQ ID NO: 575121 - DNA, 19 bp, Mus musculus
  siRNA target sequence for C2 (NM_013484.1,1923-1941).
cacattttgtagctttgaa

SEQ ID NO: 575122 - DNA, 19 bp, Mus musculus
  siRNA target sequence for C2 (NM_013484.1,2026-2044).
ccccagcttgacaaacgtt

SEQ ID NO: 575123 - DNA, 19 bp, Mus musculus
  siRNA target sequence for C2 (NM_013484.1,2027-2045).
cccagcttgacaaacgtta

SEQ ID NO: 575124 - DNA, 19 bp, Mus musculus
  siRNA target sequence for C2 (NM_013484.1,2087-2105).
gaggaagatgacaatcctt

SEQ ID NO: 575125 - DNA, 19 bp, Mus musculus
  siRNA target sequence for C2 (NM_013484.1,2201-2219).
ggttcctccaacaaaaact

SEQ ID NO: 575126 - DNA, 19 bp, Mus musculus
  siRNA target sequence for C2 (NM_013484.1,2249-2267).
ccaagggacttccacatta

SEQ ID NO: 575127 - DNA, 19 bp, Mus musculus
  siRNA target sequence for C2 (NM_013484.1,2254-2272).
ggacttccacattagtctt

SEQ ID NO: 575128 - DNA, 19 bp, Mus musculus
  siRNA target sequence for Cfi (NM_007686.1,83-101).
cgctcatctcagtctcttt

SEQ ID NO: 575129 - DNA, 19 bp, Mus musculus
  siRNA target sequence for Cfi (NM_007686.1,108-126).
gctctccacttgagttctt

SEQ ID NO: 575130 - DNA, 19 bp, Mus musculus
  siRNA target sequence for Cfi (NM_007686.1,161-179).
ggagctggtcgatcagaaa

SEQ ID NO: 575131 - DNA, 19 bp, Mus musculus
  siRNA target sequence for Cfi (NM_007686.1,162-180).
gagctggtcgatcagaaat

SEQ ID NO: 575132 - DNA, 19 bp, Mus musculus
  siRNA target sequence for Cfi (NM_007686.1,167-185).
ggtcgatcagaaatgctta

SEQ ID NO: 575133 - DNA, 19 bp, Mus musculus
  siRNA target sequence for Cfi (NM_007686.1,233-251).
gtggcagagatgtatcgaa

SEQ ID NO: 575134 - DNA, 19 bp, Mus musculus
  siRNA target sequence for Cfi (NM_007686.1,299-317).
cccagtgtgtgccatgaat

SEQ ID NO: 575135 - DNA, 19 bp, Mus musculus
  siRNA target sequence for Cfi (NM_007686.1,323-341).
gagctacccgacatactgt

SEQ ID NO: 575136 - DNA, 19 bp, Mus musculus
  siRNA target sequence for Cfi (NM_007686.1,342-360).
caccagaagagtttcgaat

SEQ ID NO: 575137 - DNA, 19 bp, Mus musculus
  siRNA target sequence for Cfi (NM_007686.1,347-365).
gaagagtttcgaatgtctt

SEQ ID NO: 575138 - DNA, 19 bp, Mus musculus
  siRNA target sequence for Cfi (NM_007686.1,368-386).
cccagagatcaagttttca

SEQ ID NO: 575139 - DNA, 19 bp, Mus musculus
  siRNA target sequence for Cfi (NM_007686.1,451-469).
cagagggacttgttcaagt

SEQ ID NO: 575140 - DNA, 19 bp, Mus musculus
  siRNA target sequence for Cfi (NM_007686.1,455-473).
gggacttgttcaagtcaaa

SEQ ID NO: 575141 - DNA, 19 bp, Mus musculus
  siRNA target sequence for Cfi (NM_007686.1,457-475).
gacttgttcaagtcaaact

SEQ ID NO: 575142 - DNA, 19 bp, Mus musculus
  siRNA target sequence for Cfi (NM_007686.1,486-504).
gatgagagaatgttcatat

SEQ ID NO: 575143 - DNA, 19 bp, Mus musculus
  siRNA target sequence for Cfi (NM_007686.1,541-559).
cctgcgtcgaccttggatt

SEQ ID NO: 575144 - DNA, 19 bp, Mus musculus
  siRNA target sequence for Cfi (NM_007686.1,542-560).
ctgcgtcgaccttggattt

SEQ ID NO: 575145 - DNA, 19 bp, Mus musculus
  siRNA target sequence for Cfi (NM_007686.1,545-563).
cgtcgaccttggatttcca

SEQ ID NO: 575146 - DNA, 19 bp, Mus musculus
  siRNA target sequence for Cfi (NM_007686.1,566-584).
gggtgttcgtgacatacaa

SEQ ID NO: 575147 - DNA, 19 bp, Mus musculus
  siRNA target sequence for Cfi (NM_007686.1,601-619).
ctggaaatctccatataaa

SEQ ID NO: 575148 - DNA, 19 bp, Mus musculus
  siRNA target sequence for Cfi (NM_007686.1,612-630).
catataaacgacactgaat

SEQ ID NO: 575149 - DNA, 19 bp, Mus musculus
  siRNA target sequence for Cfi (NM_007686.1,669-687).
gcggagtgtgcctttacga

SEQ ID NO: 575150 - DNA, 19 bp, Mus musculus
  siRNA target sequence for Cfi (NM_007686.1,670-688).
cggagtgtgcctttacgaa

SEQ ID NO: 575151 - DNA, 19 bp, Mus musculus
  siRNA target sequence for Cfi (NM_007686.1,846-864).
gagctgtgttgcaaaggtt

SEQ ID NO: 575152 - DNA, 19 bp, Mus musculus
  siRNA target sequence for Cfi (NM_007686.1,870-888).
ggtaacgcttccctttgta

SEQ ID NO: 575153 - DNA, 19 bp, Mus musculus
  siRNA target sequence for Cfi (NM_007686.1,871-889).
gtaacgcttccctttgtaa

SEQ ID NO: 575154 - DNA, 19 bp, Mus musculus
  siRNA target sequence for Cfi (NM_007686.1,886-904).
gtaagtcgggagtttgcat

SEQ ID NO: 575155 - DNA, 19 bp, Mus musculus
  siRNA target sequence for Cfi (NM_007686.1,901-919).
gcattccagaccaatacaa

SEQ ID NO: 575156 - DNA, 19 bp, Mus musculus
  siRNA target sequence for Cfi (NM_007686.1,906-924).
ccagaccaatacaagtgta

SEQ ID NO: 575157 - DNA, 19 bp, Mus musculus
  siRNA target sequence for Cfi (NM_007686.1,907-925).
cagaccaatacaagtgtaa

SEQ ID NO: 575158 - DNA, 19 bp, Mus musculus
  siRNA target sequence for Cfi (NM_007686.1,911-929).
ccaatacaagtgtaatggt

SEQ ID NO: 575159 - DNA, 19 bp, Mus musculus
  siRNA target sequence for Cfi (NM_007686.1,1191-1209).
ccatggcaggtggcaatta

SEQ ID NO: 575160 - DNA, 19 bp, Mus musculus
  siRNA target sequence for Cfi (NM_007686.1,1192-1210).
catggcaggtggcaattaa

SEQ ID NO: 575161 - DNA, 19 bp, Mus musculus
  siRNA target sequence for Cfi (NM_007686.1,1196-1214).
gcaggtggcaattaaggat

SEQ ID NO: 575162 - DNA, 19 bp, Mus musculus
  siRNA target sequence for Cfi (NM_007686.1,1226-1244).
cacctgtggtggcatttat

SEQ ID NO: 575163 - DNA, 19 bp, Mus musculus
  siRNA target sequence for Cfi (NM_007686.1,1288-1306).
ccagtagagctcacagtta

SEQ ID NO: 575164 - DNA, 19 bp, Mus musculus
  siRNA target sequence for Cfi (NM_007686.1,1308-1326).
caagtctggacggctttat

SEQ ID NO: 575165 - DNA, 19 bp, Mus musculus
  siRNA target sequence for Cfi (NM_007686.1,1366-1384).
cggtgaagagagttattgt

SEQ ID NO: 575166 - DNA, 19 bp, Mus musculus
  siRNA target sequence for Cfi (NM_007686.1,1404-1422).
gccaccttccaaaatgaca

SEQ ID NO: 575167 - DNA, 19 bp, Mus musculus
  siRNA target sequence for Cfi (NM_007686.1,1493-1511).
cgtcccgtggtctccatat

SEQ ID NO: 575168 - DNA, 19 bp, Mus musculus
  siRNA target sequence for Cfi (NM_007686.1,1497-1515).
ccgtggtctccatatctgt

SEQ ID NO: 575169 - DNA, 19 bp, Mus musculus
  siRNA target sequence for Cfi (NM_007686.1,1518-1536).
caaccgaatgacagatgta

SEQ ID NO: 575170 - DNA, 19 bp, Mus musculus
  siRNA target sequence for Cfi (NM_007686.1,1521-1539).
ccgaatgacagatgtatca

SEQ ID NO: 575171 - DNA, 19 bp, Mus musculus
  siRNA target sequence for Cfi (NM_007686.1,1522-1540).
cgaatgacagatgtatcat

SEQ ID NO: 575172 - DNA, 19 bp, Mus musculus
  siRNA target sequence for Cfi (NM_007686.1,1552-1570).
gtcgagggaaagataacca

SEQ ID NO: 575173 - DNA, 19 bp, Mus musculus
  siRNA target sequence for Cfi (NM_007686.1,1554-1572).
cgagggaaagataaccaaa

SEQ ID NO: 575174 - DNA, 19 bp, Mus musculus
  siRNA target sequence for Cfi (NM_007686.1,1555-1573).
gagggaaagataaccaaaa

SEQ ID NO: 575175 - DNA, 19 bp, Mus musculus
  siRNA target sequence for Cfi (NM_007686.1,1586-1604).
caggtggggcgaagttgat

SEQ ID NO: 575176 - DNA, 19 bp, Mus musculus
  siRNA target sequence for Cfi (NM_007686.1,1588-1606).
ggtggggcgaagttgatct

SEQ ID NO: 575177 - DNA, 19 bp, Mus musculus
  siRNA target sequence for Cfi (NM_007686.1,1589-1607).
gtggggcgaagttgatcta

SEQ ID NO: 575178 - DNA, 19 bp, Mus musculus
  siRNA target sequence for Cfi (NM_007686.1,1591-1609).
ggggcgaagttgatctaat

SEQ ID NO: 575179 - DNA, 19 bp, Mus musculus
  siRNA target sequence for Cfi (NM_007686.1,1592-1610).
gggcgaagttgatctaata

SEQ ID NO: 575180 - DNA, 19 bp, Mus musculus
  siRNA target sequence for Cfi (NM_007686.1,1611-1629).
ggcaactgctctcagtttt

SEQ ID NO: 575181 - DNA, 19 bp, Mus musculus
  siRNA target sequence for Cfi (NM_007686.1,1612-1630).
gcaactgctctcagtttta

SEQ ID NO: 575182 - DNA, 19 bp, Mus musculus
  siRNA target sequence for Cfi (NM_007686.1,1632-1650).
ccagatcgctactatgaga

SEQ ID NO: 575183 - DNA, 19 bp, Mus musculus
  siRNA target sequence for Cfi (NM_007686.1,1633-1651).
cagatcgctactatgagaa

SEQ ID NO: 575184 - DNA, 19 bp, Mus musculus
  siRNA target sequence for Cfi (NM_007686.1,1638-1656).
cgctactatgagaaagaga

SEQ ID NO: 575185 - DNA, 19 bp, Mus musculus
  siRNA target sequence for Cfi (NM_007686.1,1639-1657).
gctactatgagaaagagat

SEQ ID NO: 575186 - DNA, 19 bp, Mus musculus
  siRNA target sequence for Cfi (NM_007686.1,1673-1691).
gcgtgatgggtccattgat

SEQ ID NO: 575187 - DNA, 19 bp, Mus musculus
  siRNA target sequence for Cfi (NM_007686.1,1792-1810).
ccgagttcccaggtgttta

SEQ ID NO: 575188 - DNA, 19 bp, Mus musculus
  siRNA target sequence for Cfi (NM_007686.1,1794-1812).
gagttcccaggtgtttaca

SEQ ID NO: 575189 - DNA, 19 bp, Mus musculus
  siRNA target sequence for Cfi (NM_007686.1,1850-1868).
cgtaggaaggtctcttgtt

SEQ ID NO: 575190 - DNA, 19 bp, Mus musculus
  siRNA target sequence for Cfi (NM_007686.1,1866-1884).
gtttctcaacacaatgtct

SEQ ID NO: 575191 - DNA, 19 bp, Mus musculus
  siRNA target sequence for Ctrl (NM_023182.1,111-129).
gcactgagctacaatcaga

SEQ ID NO: 575192 - DNA, 19 bp, Mus musculus
  siRNA target sequence for Ctrl (NM_023182.1,268-286).
cgcctggacgccactttgt

SEQ ID NO: 575193 - DNA, 19 bp, Mus musculus
  siRNA target sequence for Ctrl (NM_023182.1,274-292).
gacgccactttgtcgtttt

SEQ ID NO: 575194 - DNA, 19 bp, Mus musculus
  siRNA target sequence for Ctrl (NM_023182.1,614-632).
cattaccgatgccatgata

SEQ ID NO: 575195 - DNA, 19 bp, Mus musculus
  siRNA target sequence for Ctrl (NM_023182.1,711-729).
gtgcttattgggattgtct

SEQ ID NO: 575196 - DNA, 19 bp, Mus musculus
  siRNA target sequence for Ctrl (NM_023182.1,726-744).
gtctcctggggcactaaga

SEQ ID NO: 575197 - DNA, 19 bp, Mus musculus
  siRNA target sequence for Ctrl (NM_023182.1,756-774).
caagcaccggccatgtaca

SEQ ID NO: 575198 - DNA, 19 bp, Mus musculus
  siRNA target sequence for Ctrl (NM_023182.1,777-795).
cgggtcagcaagttcagta

SEQ ID NO: 575199 - DNA, 19 bp, Mus musculus
  siRNA target sequence for Ctrl (NM_023182.1,807-825).
caagtcatggcctacaact

SEQ ID NO: 575200 - DNA, 19 bp, Mus musculus
  siRNA target sequence for Ctsg (NM_007800.1,151-169).
ctgctcctgttgaccttta

SEQ ID NO: 575201 - DNA, 19 bp, Mus musculus
  siRNA target sequence for Ctsg (NM_007800.1,156-174).
cctgttgacctttattcta

SEQ ID NO: 575202 - DNA, 19 bp, Mus musculus
  siRNA target sequence for Ctsg (NM_007800.1,332-350).
gcttgggaagctccataaa

SEQ ID NO: 575203 - DNA, 19 bp, Mus musculus
  siRNA target sequence for Ctsg (NM_007800.1,333-351).
cttgggaagctccataaat

SEQ ID NO: 575204 - DNA, 19 bp, Mus musculus
  siRNA target sequence for Ctsg (NM_007800.1,419-437).
ccatccgccatcctgatta

SEQ ID NO: 575205 - DNA, 19 bp, Mus musculus
  siRNA target sequence for Ctsg (NM_007800.1,423-441).
ccgccatcctgattacaat

SEQ ID NO: 575206 - DNA, 19 bp, Mus musculus
  siRNA target sequence for Ctsg (NM_007800.1,525-543).
gcctcaggccagcaaaaaa

SEQ ID NO: 575207 - DNA, 19 bp, Mus musculus
  siRNA target sequence for Ctsg (NM_007800.1,544-562).
ctgcagccaggggatttgt

SEQ ID NO: 575208 - DNA, 19 bp, Mus musculus
  siRNA target sequence for Ctsg (NM_007800.1,591-609).
ccagagcaggggaacaaat

SEQ ID NO: 575209 - DNA, 19 bp, Mus musculus
  siRNA target sequence for Ctsg (NM_007800.1,632-650).
gagtgcagatggaccaaat

SEQ ID NO: 575210 - DNA, 19 bp, Mus musculus
  siRNA target sequence for Ctsg (NM_007800.1,634-652).
gtgcagatggaccaaatgt

SEQ ID NO: 575211 - DNA, 19 bp, Mus musculus
  siRNA target sequence for Ctsg (NM_007800.1,775-793).
ggcatcgtctcctatggaa

SEQ ID NO: 575212 - DNA, 19 bp, Mus musculus
  siRNA target sequence for Ctsg (NM_007800.1,783-801).
ctcctatggaagcaacaat

SEQ ID NO: 575213 - DNA, 19 bp, Mus musculus
  siRNA target sequence for Ctsg (NM_007800.1,840-858).
catgccctggatcaaaaga

SEQ ID NO: 575214 - DNA, 19 bp, Mus musculus
  siRNA target sequence for Cyp51 (NM_020010.1,304-322).
gcccgctggagcgaaaagt

SEQ ID NO: 575215 - DNA, 19 bp, Mus musculus
  siRNA target sequence for Cyp51 (NM_020010.1,315-333).
cgaaaagtccaccacatat

SEQ ID NO: 575216 - DNA, 19 bp, Mus musculus
  siRNA target sequence for Cyp51 (NM_020010.1,316-334).
gaaaagtccaccacatatt

SEQ ID NO: 575217 - DNA, 19 bp, Mus musculus
  siRNA target sequence for Cyp51 (NM_020010.1,348-366).
cattccttggccatgcaat

SEQ ID NO: 575218 - DNA, 19 bp, Mus musculus
  siRNA target sequence for Cyp51 (NM_020010.1,352-370).
ccttggccatgcaatagca

SEQ ID NO: 575219 - DNA, 19 bp, Mus musculus
  siRNA target sequence for Cyp51 (NM_020010.1,374-392).
gggaaaagtccaattgagt

SEQ ID NO: 575220 - DNA, 19 bp, Mus musculus
  siRNA target sequence for Cyp51 (NM_020010.1,375-393).
ggaaaagtccaattgagtt

SEQ ID NO: 575221 - DNA, 19 bp, Mus musculus
  siRNA target sequence for Cyp51 (NM_020010.1,391-409).
gtttctggaaaatgcatat

SEQ ID NO: 575222 - DNA, 19 bp, Mus musculus
  siRNA target sequence for Cyp51 (NM_020010.1,443-461).
gtgggcaagaccttcactt

SEQ ID NO: 575223 - DNA, 19 bp, Mus musculus
  siRNA target sequence for Cyp51 (NM_020010.1,448-466).
caagaccttcacttacctt

SEQ ID NO: 575224 - DNA, 19 bp, Mus musculus
  siRNA target sequence for Cyp51 (NM_020010.1,480-498).
cagctgcgctgctcttcaa

SEQ ID NO: 575225 - DNA, 19 bp, Mus musculus
  siRNA target sequence for Cyp51 (NM_020010.1,485-503).
gcgctgctcttcaatagta

SEQ ID NO: 575226 - DNA, 19 bp, Mus musculus
  siRNA target sequence for Cyp51 (NM_020010.1,487-505).
gctgctcttcaatagtaaa

SEQ ID NO: 575227 - DNA, 19 bp, Mus musculus
  siRNA target sequence for Cyp51 (NM_020010.1,493-511).
cttcaatagtaaaaacgaa

SEQ ID NO: 575228 - DNA, 19 bp, Mus musculus
  siRNA target sequence for Cyp51 (NM_020010.1,561-579).
ggaagggagttgcatatga

SEQ ID NO: 575229 - DNA, 19 bp, Mus musculus
  siRNA target sequence for Cyp51 (NM_020010.1,562-580).
gaagggagttgcatatgat

SEQ ID NO: 575230 - DNA, 19 bp, Mus musculus
  siRNA target sequence for Cyp51 (NM_020010.1,629-647).
cttaacatagcccacttta

SEQ ID NO: 575231 - DNA, 19 bp, Mus musculus
  siRNA target sequence for Cyp51 (NM_020010.1,639-657).
cccactttaagcagtatgt

SEQ ID NO: 575232 - DNA, 19 bp, Mus musculus
  siRNA target sequence for Cyp51 (NM_020010.1,640-658).
ccactttaagcagtatgtt

SEQ ID NO: 575233 - DNA, 19 bp, Mus musculus
  siRNA target sequence for Cyp51 (NM_020010.1,652-670).
gtatgttcctatcattgaa

SEQ ID NO: 575234 - DNA, 19 bp, Mus musculus
  siRNA target sequence for Cyp51 (NM_020010.1,709-727).
cggagaaagaaatgtgttt

SEQ ID NO: 575235 - DNA, 19 bp, Mus musculus
  siRNA target sequence for Cyp51 (NM_020010.1,731-749).
gcactgtctgagctcataa

SEQ ID NO: 575236 - DNA, 19 bp, Mus musculus
  siRNA target sequence for Cyp51 (NM_020010.1,732-750).
cactgtctgagctcataat

SEQ ID NO: 575237 - DNA, 19 bp, Mus musculus
  siRNA target sequence for Cyp51 (NM_020010.1,754-772).
gacagctagccattgttta

SEQ ID NO: 575238 - DNA, 19 bp, Mus musculus
  siRNA target sequence for Cyp51 (NM_020010.1,873-891).
ggctgcctctgccaagttt

SEQ ID NO: 575239 - DNA, 19 bp, Mus musculus
  siRNA target sequence for Cyp51 (NM_020010.1,906-924).
gagcccatcgagagatcaa

SEQ ID NO: 575240 - DNA, 19 bp, Mus musculus
  siRNA target sequence for Cyp51 (NM_020010.1,908-926).
gcccatcgagagatcaaga

SEQ ID NO: 575241 - DNA, 19 bp, Mus musculus
  siRNA target sequence for Cyp51 (NM_020010.1,915-933).
gagagatcaagaatatttt

SEQ ID NO: 575242 - DNA, 19 bp, Mus musculus
  siRNA target sequence for Cyp51 (NM_020010.1,952-970).
gcgcaggctgtcaaaagaa

SEQ ID NO: 575243 - DNA, 19 bp, Mus musculus
  siRNA target sequence for Cyp51 (NM_020010.1,977-995).
gaggacattcttcaaactt

SEQ ID NO: 575244 - DNA, 19 bp, Mus musculus
  siRNA target sequence for Cyp51 (NM_020010.1,986-1004).
cttcaaactttactagatt

SEQ ID NO: 575245 - DNA, 19 bp, Mus musculus
  siRNA target sequence for Cyp51 (NM_020010.1,1015-1033).
ggacgggcgtcctctaaca

SEQ ID NO: 575246 - DNA, 19 bp, Mus musculus
  siRNA target sequence for Cyp51 (NM_020010.1,1018-1036).
cgggcgtcctctaacagat

SEQ ID NO: 575247 - DNA, 19 bp, Mus musculus
  siRNA target sequence for Cyp51 (NM_020010.1,1028-1046).
ctaacagatgaggagatat

SEQ ID NO: 575248 - DNA, 19 bp, Mus musculus
  siRNA target sequence for Cyp51 (NM_020010.1,1181-1199).
gaggatctgcctcctttaa

SEQ ID NO: 575249 - DNA, 19 bp, Mus musculus
  siRNA target sequence for Cyp51 (NM_020010.1,1210-1228).
gttgaaggatctgaattta

SEQ ID NO: 575250 - DNA, 19 bp, Mus musculus
  siRNA target sequence for Cyp51 (NM_020010.1,1213-1231).
gaaggatctgaatttactt

SEQ ID NO: 575251 - DNA, 19 bp, Mus musculus
  siRNA target sequence for Cyp51 (NM_020010.1,1220-1238).
ctgaatttacttgatagat

SEQ ID NO: 575252 - DNA, 19 bp, Mus musculus
  siRNA target sequence for Cyp51 (NM_020010.1,1351-1369).
ctctcctactgtcaatcaa

SEQ ID NO: 575253 - DNA, 19 bp, Mus musculus
  siRNA target sequence for Cyp51 (NM_020010.1,1388-1406).
gcagagcgcttggacttta

SEQ ID NO: 575254 - DNA, 19 bp, Mus musculus
  siRNA target sequence for Cyp51 (NM_020010.1,1434-1452).
cagcatcaggagagaagtt

SEQ ID NO: 575255 - DNA, 19 bp, Mus musculus
  siRNA target sequence for Cyp51 (NM_020010.1,1530-1548).
ggtcgactatgcttcgttt

SEQ ID NO: 575256 - DNA, 19 bp, Mus musculus
  siRNA target sequence for Cyp51 (NM_020010.1,1531-1549).
gtcgactatgcttcgttta

SEQ ID NO: 575257 - DNA, 19 bp, Mus musculus
  siRNA target sequence for Cyp51 (NM_020010.1,1533-1551).
cgactatgcttcgtttata

SEQ ID NO: 575258 - DNA, 19 bp, Mus musculus
  siRNA target sequence for Cyp51 (NM_020010.1,1534-1552).
gactatgcttcgtttatat

SEQ ID NO: 575259 - DNA, 19 bp, Mus musculus
  siRNA target sequence for Cyp51 (NM_020010.1,1580-1598).
cccactgtgaattatacaa

SEQ ID NO: 575260 - DNA, 19 bp, Mus musculus
  siRNA target sequence for Cyp51 (NM_020010.1,1584-1602).
ctgtgaattatacaacaat

SEQ ID NO: 575261 - DNA, 19 bp, Mus musculus
  siRNA target sequence for Cyp51 (NM_020010.1,1586-1604).
gtgaattatacaacaatga

SEQ ID NO: 575262 - DNA, 19 bp, Mus musculus
  siRNA target sequence for Cyp51 (NM_020010.1,1621-1639).
cccagtaatccgttacaaa

SEQ ID NO: 575263 - DNA, 19 bp, Mus musculus
  siRNA target sequence for Cyp51 (NM_020010.1,1632-1650).
gttacaaacgacgatcaaa

SEQ ID NO: 575264 - DNA, 19 bp, Mus musculus
  siRNA target sequence for Ela1 (NM_033612.1,119-137).
gaagcccggaggaactctt

SEQ ID NO: 575265 - DNA, 19 bp, Mus musculus
  siRNA target sequence for Ela1 (NM_033612.1,247-265).
cagccccatgacttatcga

SEQ ID NO: 575266 - DNA, 19 bp, Mus musculus
  siRNA target sequence for Ela1 (NM_033612.1,302-320).
ggcaccgagcagtatgtga

SEQ ID NO: 575267 - DNA, 19 bp, Mus musculus
  siRNA target sequence for Ela1 (NM_033612.1,395-413).
cgcttggccaagagtgtta

SEQ ID NO: 575268 - DNA, 19 bp, Mus musculus
  siRNA target sequence for Ela1 (NM_033612.1,403-421).
caagagtgttacactcaat

SEQ ID NO: 575269 - DNA, 19 bp, Mus musculus
  siRNA target sequence for Ela2 (NM_007919.1,69-87).
ctgtgggtaccccacttat

SEQ ID NO: 575270 - DNA, 19 bp, Mus musculus
  siRNA target sequence for Ela2 (NM_007919.1,373-391).
gtcggcaatggctatgaca

SEQ ID NO: 575271 - DNA, 19 bp, Mus musculus
  siRNA target sequence for Ela2 (NM_007919.1,375-393).
cggcaatggctatgacatt

SEQ ID NO: 575272 - DNA, 19 bp, Mus musculus
  siRNA target sequence for Ela2 (NM_007919.1,383-401).
gctatgacattgccttaat

SEQ ID NO: 575273 - DNA, 19 bp, Mus musculus
  siRNA target sequence for Ela2 (NM_007919.1,467-485).
ccattctcccgagaaacta

SEQ ID NO: 575274 - DNA, 19 bp, Mus musculus
  siRNA target sequence for Ela2 (NM_007919.1,468-486).
cattctcccgagaaactat

SEQ ID NO: 575275 - DNA, 19 bp, Mus musculus
  siRNA target sequence for Ela2 (NM_007919.1,472-490).
ctcccgagaaactatgtct

SEQ ID NO: 575276 - DNA, 19 bp, Mus musculus
  siRNA target sequence for Ela2 (NM_007919.1,672-690).
ctctggcggaccactgaat

SEQ ID NO: 575277 - DNA, 19 bp, Mus musculus
  siRNA target sequence for Ela3b (NM_026419.1,254-272).
gcacctaccaggttgtact

SEQ ID NO: 575278 - DNA, 19 bp, Mus musculus
  siRNA target sequence for Ela3b (NM_026419.1,349-367).
cccaagtggaactctatgt

SEQ ID NO: 575279 - DNA, 19 bp, Mus musculus
  siRNA target sequence for F11 (NM_028066.1,106-124).
catcaggtgttatatttta

SEQ ID NO: 575280 - DNA, 19 bp, Mus musculus
  siRNA target sequence for F11 (NM_028066.1,109-127).
caggtgttatattttatct

SEQ ID NO: 575281 - DNA, 19 bp, Mus musculus
  siRNA target sequence for F11 (NM_028066.1,133-151).
gcctcagtttctagtgaat

SEQ ID NO: 575282 - DNA, 19 bp, Mus musculus
  siRNA target sequence for F11 (NM_028066.1,143-161).
ctagtgaatgcgttactaa

SEQ ID NO: 575283 - DNA, 19 bp, Mus musculus
  siRNA target sequence for F11 (NM_028066.1,152-170).
gcgttactaaggtcttcaa

SEQ ID NO: 575284 - DNA, 19 bp, Mus musculus
  siRNA target sequence for F11 (NM_028066.1,295-313).
gatgatcctaccaaatggt

SEQ ID NO: 575285 - DNA, 19 bp, Mus musculus
  siRNA target sequence for F11 (NM_028066.1,343-361).
gaaatattgccaatggtaa

SEQ ID NO: 575286 - DNA, 19 bp, Mus musculus
  siRNA target sequence for F11 (NM_028066.1,370-388).
ggcgcgatctctggatatt

SEQ ID NO: 575287 - DNA, 19 bp, Mus musculus
  siRNA target sequence for F11 (NM_028066.1,373-391).
gcgatctctggatattcct

SEQ ID NO: 575288 - DNA, 19 bp, Mus musculus
  siRNA target sequence for F11 (NM_028066.1,382-400).
ggatattccttcaagcaat

SEQ ID NO: 575289 - DNA, 19 bp, Mus musculus
  siRNA target sequence for F11 (NM_028066.1,397-415).
caatgccctcagcaattaa

SEQ ID NO: 575290 - DNA, 19 bp, Mus musculus
  siRNA target sequence for F11 (NM_028066.1,402-420).
ccctcagcaattaagtact

SEQ ID NO: 575291 - DNA, 19 bp, Mus musculus
  siRNA target sequence for F11 (NM_028066.1,416-434).
gtacttgcagcaaagatgt

SEQ ID NO: 575292 - DNA, 19 bp, Mus musculus
  siRNA target sequence for F11 (NM_028066.1,471-489).
cagctctgtcgtgaagaat

SEQ ID NO: 575293 - DNA, 19 bp, Mus musculus
  siRNA target sequence for F11 (NM_028066.1,523-541).
gcccactgccagtttttca

SEQ ID NO: 575294 - DNA, 19 bp, Mus musculus
  siRNA target sequence for F11 (NM_028066.1,542-560).
catacgcaacagggtattt

SEQ ID NO: 575295 - DNA, 19 bp, Mus musculus
  siRNA target sequence for F11 (NM_028066.1,563-581).
ccagtgtggaccatcgtaa

SEQ ID NO: 575296 - DNA, 19 bp, Mus musculus
  siRNA target sequence for F11 (NM_028066.1,564-582).
cagtgtggaccatcgtaaa

SEQ ID NO: 575297 - DNA, 19 bp, Mus musculus
  siRNA target sequence for F11 (NM_028066.1,566-584).
gtgtggaccatcgtaaaat

SEQ ID NO: 575298 - DNA, 19 bp, Mus musculus
  siRNA target sequence for F11 (NM_028066.1,568-586).
gtggaccatcgtaaaatgt

SEQ ID NO: 575299 - DNA, 19 bp, Mus musculus
  siRNA target sequence for F11 (NM_028066.1,663-681).
gaagtcctgtggactttca

SEQ ID NO: 575300 - DNA, 19 bp, Mus musculus
  siRNA target sequence for F11 (NM_028066.1,688-706).
gcttgtatcagggacattt

SEQ ID NO: 575301 - DNA, 19 bp, Mus musculus
  siRNA target sequence for F11 (NM_028066.1,1425-1443).
cggtggcattgtaaatcaa

SEQ ID NO: 575302 - DNA, 19 bp, Mus musculus
  siRNA target sequence for F11 (NM_028066.1,1426-1444).
ggtggcattgtaaatcaat

SEQ ID NO: 575303 - DNA, 19 bp, Mus musculus
  siRNA target sequence for F11 (NM_028066.1,1488-1506).
gataattcatgatcagtat

SEQ ID NO: 575304 - DNA, 19 bp, Mus musculus
  siRNA target sequence for F11 (NM_028066.1,1503-1521).
gtatacgacagcagaaagt

SEQ ID NO: 575305 - DNA, 19 bp, Mus musculus
  siRNA target sequence for F11 (NM_028066.1,1570-1588).
gattttcagcggccaatat

SEQ ID NO: 575306 - DNA, 19 bp, Mus musculus
  siRNA target sequence for F11 (NM_028066.1,1647-1665).
ggggtacacagcactaaga

SEQ ID NO: 575307 - DNA, 19 bp, Mus musculus
  siRNA target sequence for F11 (NM_028066.1,1658-1676).
cactaagaggtgaagtaca

SEQ ID NO: 575308 - DNA, 19 bp, Mus musculus
  siRNA target sequence for F11 (NM_028066.1,1707-1725).
ggtgtcaaatgaagaatgt

SEQ ID NO: 575309 - DNA, 19 bp, Mus musculus
  siRNA target sequence for F12 (NM_021489.1,78-96).
gctccaccatggaaagact

SEQ ID NO: 575310 - DNA, 19 bp, Mus musculus
  siRNA target sequence for F12 (NM_021489.1,183-201).
cgtcagctacaccacaaat

SEQ ID NO: 575311 - DNA, 19 bp, Mus musculus
  siRNA target sequence for F12 (NM_021489.1,557-575).
catcaatccgtgccttaat

SEQ ID NO: 575312 - DNA, 19 bp, Mus musculus
  siRNA target sequence for F12 (NM_021489.1,753-771).
gccacctaccggaacatga

SEQ ID NO: 575313 - DNA, 19 bp, Mus musculus
  siRNA target sequence for F12 (NM_021489.1,798-816).
ctgggccaccacgcatttt

SEQ ID NO: 575314 - DNA, 19 bp, Mus musculus
  siRNA target sequence for F12 (NM_021489.1,902-920).
gtgccagacgccaacgttt

SEQ ID NO: 575315 - DNA, 19 bp, Mus musculus
  siRNA target sequence for F12 (NM_021489.1,916-934).
cgtttgcacctctagttgt

SEQ ID NO: 575316 - DNA, 19 bp, Mus musculus
  siRNA target sequence for F12 (NM_021489.1,1132-1150).
cactgtactggggtaacaa

SEQ ID NO: 575317 - DNA, 19 bp, Mus musculus
  siRNA target sequence for F12 (NM_021489.1,1361-1379).
gcgcctgcaggaaagcaaa

SEQ ID NO: 575318 - DNA, 19 bp, Mus musculus
  siRNA target sequence for F12 (NM_021489.1,1494-1512).
gagggggctgaagaatact

SEQ ID NO: 575319 - DNA, 19 bp, Mus musculus
  siRNA target sequence for F12 (NM_021489.1,1554-1572).
gatcgctgctccaactcta

SEQ ID NO: 575320 - DNA, 19 bp, Mus musculus
  siRNA target sequence for F12 (NM_021489.1,1786-1804).
cttggatccagaagcatat

SEQ ID NO: 575321 - DNA, 19 bp, Mus musculus
  siRNA target sequence for F12 (NM_021489.1,1790-1808).
gatccagaagcatattgct

SEQ ID NO: 575322 - DNA, 19 bp, Mus musculus
  siRNA target sequence for Gzma (NM_010370.1,64-82).
ctcttgctactctcctttt

SEQ ID NO: 575323 - DNA, 19 bp, Mus musculus
  siRNA target sequence for Gzma (NM_010370.1,142-160).
ctcactcaagaccgtatat

SEQ ID NO: 575324 - DNA, 19 bp, Mus musculus
  siRNA target sequence for Gzma (NM_010370.1,153-171).
ccgtatatggctctactta

SEQ ID NO: 575325 - DNA, 19 bp, Mus musculus
  siRNA target sequence for Gzma (NM_010370.1,154-172).
cgtatatggctctacttaa

SEQ ID NO: 575326 - DNA, 19 bp, Mus musculus
  siRNA target sequence for Gzma (NM_010370.1,161-179).
ggctctacttaaacttagt

SEQ ID NO: 575327 - DNA, 19 bp, Mus musculus
  siRNA target sequence for Gzma (NM_010370.1,168-186).
cttaaacttagttcaaata

SEQ ID NO: 575328 - DNA, 19 bp, Mus musculus
  siRNA target sequence for Gzma (NM_010370.1,191-209).
ctgtgctggcgctttgatt

SEQ ID NO: 575329 - DNA, 19 bp, Mus musculus
  siRNA target sequence for Gzma (NM_010370.1,193-211).
gtgctggcgctttgattga

SEQ ID NO: 575330 - DNA, 19 bp, Mus musculus
  siRNA target sequence for Gzma (NM_010370.1,195-213).
gctggcgctttgattgaaa

SEQ ID NO: 575331 - DNA, 19 bp, Mus musculus
  siRNA target sequence for Gzma (NM_010370.1,196-214).
ctggcgctttgattgaaaa

SEQ ID NO: 575332 - DNA, 19 bp, Mus musculus
  siRNA target sequence for Gzma (NM_010370.1,198-216).
ggcgctttgattgaaaaga

SEQ ID NO: 575333 - DNA, 19 bp, Mus musculus
  siRNA target sequence for Gzma (NM_010370.1,254-272).
gagatctaagttcattctt

SEQ ID NO: 575334 - DNA, 19 bp, Mus musculus
  siRNA target sequence for Gzma (NM_010370.1,270-288).
cttggggctcactcaatca

SEQ ID NO: 575335 - DNA, 19 bp, Mus musculus
  siRNA target sequence for Gzma (NM_010370.1,277-295).
ctcactcaatcaataagga

SEQ ID NO: 575336 - DNA, 19 bp, Mus musculus
  siRNA target sequence for Gzma (NM_010370.1,297-315).
ccagaacaacagatattga

SEQ ID NO: 575337 - DNA, 19 bp, Mus musculus
  siRNA target sequence for Gzma (NM_010370.1,303-321).
caacagatattgactgtta

SEQ ID NO: 575338 - DNA, 19 bp, Mus musculus
  siRNA target sequence for Gzma (NM_010370.1,306-324).
cagatattgactgttaaga

SEQ ID NO: 575339 - DNA, 19 bp, Mus musculus
  siRNA target sequence for Gzma (NM_010370.1,361-379).
gtgagggggatctacaact

SEQ ID NO: 575340 - DNA, 19 bp, Mus musculus
  siRNA target sequence for Gzma (NM_010370.1,365-383).
gggggatctacaacttgta

SEQ ID NO: 575341 - DNA, 19 bp, Mus musculus
  siRNA target sequence for Gzma (NM_010370.1,378-396).
cttgtacggctaaagaaaa

SEQ ID NO: 575342 - DNA, 19 bp, Mus musculus
  siRNA target sequence for Gzma (NM_010370.1,421-439).
ctatccttcacctacctaa

SEQ ID NO: 575343 - DNA, 19 bp, Mus musculus
  siRNA target sequence for Gzma (NM_010370.1,489-507).
gggagatttggcaataagt

SEQ ID NO: 575344 - DNA, 19 bp, Mus musculus
  siRNA target sequence for Gzma (NM_010370.1,523-541).
ctctgagagaagtcaacat

SEQ ID NO: 575345 - DNA, 19 bp, Mus musculus
  siRNA target sequence for Gzma (NM_010370.1,546-564).
gtcatagacagaaaaatct

SEQ ID NO: 575346 - DNA, 19 bp, Mus musculus
  siRNA target sequence for Gzma (NM_010370.1,594-612).
cctgtaattggactaaaca

SEQ ID NO: 575347 - DNA, 19 bp, Mus musculus
  siRNA target sequence for Gzma (NM_010370.1,595-613).
ctgtaattggactaaacat

SEQ ID NO: 575348 - DNA, 19 bp, Mus musculus
  siRNA target sequence for Gzma (NM_010370.1,597-615).
gtaattggactaaacatga

SEQ ID NO: 575349 - DNA, 19 bp, Mus musculus
  siRNA target sequence for Gzma (NM_010370.1,695-713).
gcgaggcatcacctctttt

SEQ ID NO: 575350 - DNA, 19 bp, Mus musculus
  siRNA target sequence for Gzma (NM_010370.1,768-786).
gataaacacctcaattgga

SEQ ID NO: 575351 - DNA, 19 bp, Mus musculus
  siRNA target sequence for Gzma (NM_010370.1,774-792).
cacctcaattggataaaga

SEQ ID NO: 575352 - DNA, 19 bp, Mus musculus
  siRNA target sequence for Gzmb (NM_013542.1,369-387).
gcaagtcatccctatggta

SEQ ID NO: 575353 - DNA, 19 bp, Mus musculus
  siRNA target sequence for Gzmb (NM_013542.1,373-391).
gtcatccctatggtaaaat

SEQ ID NO: 575354 - DNA, 19 bp, Mus musculus
  siRNA target sequence for Gzmb (NM_013542.1,498-516).
gcccaggcgcaatgtcaat

SEQ ID NO: 575355 - DNA, 19 bp, Mus musculus
  siRNA target sequence for Gzmb (NM_013542.1,500-518).
ccaggcgcaatgtcaatgt

SEQ ID NO: 575356 - DNA, 19 bp, Mus musculus
  siRNA target sequence for Gzmb (NM_013542.1,503-521).
ggcgcaatgtcaatgtgaa

SEQ ID NO: 575357 - DNA, 19 bp, Mus musculus
  siRNA target sequence for Gzmb (NM_013542.1,562-580).
gccccaatgggcaaatact

SEQ ID NO: 575358 - DNA, 19 bp, Mus musculus
  siRNA target sequence for Gzmb (NM_013542.1,564-582).
cccaatgggcaaatactca

SEQ ID NO: 575359 - DNA, 19 bp, Mus musculus
  siRNA target sequence for Gzmb (NM_013542.1,565-583).
ccaatgggcaaatactcaa

SEQ ID NO: 575360 - DNA, 19 bp, Mus musculus
  siRNA target sequence for Gzmb (NM_013542.1,633-651).
gtcctactttaaaaatcgt

SEQ ID NO: 575361 - DNA, 19 bp, Mus musculus
  siRNA target sequence for Gzmb (NM_013542.1,754-772).
ggcatagtttcctatggat

SEQ ID NO: 575362 - DNA, 19 bp, Mus musculus
  siRNA target sequence for Gzmb (NM_013542.1,755-773).
gcatagtttcctatggata

SEQ ID NO: 575363 - DNA, 19 bp, Mus musculus
  siRNA target sequence for Gzmb (NM_013542.1,793-811).
cgtgctttcaccaaagtct

SEQ ID NO: 575364 - DNA, 19 bp, Mus musculus
  siRNA target sequence for Gzmb (NM_013542.1,803-821).
ccaaagtctcgagtttctt

SEQ ID NO: 575365 - DNA, 19 bp, Mus musculus
  siRNA target sequence for Gzmb (NM_013542.1,804-822).
caaagtctcgagtttctta

SEQ ID NO: 575366 - DNA, 19 bp, Mus musculus
  siRNA target sequence for Gzmc (NM_010371.1,169-187).
gtccctacatggcatatta

SEQ ID NO: 575367 - DNA, 19 bp, Mus musculus
  siRNA target sequence for Gzmc (NM_010371.1,469-487).
ggcgcaatgctcatgtgaa

SEQ ID NO: 575368 - DNA, 19 bp, Mus musculus
  siRNA target sequence for Gzmc (NM_010371.1,510-528).
gctggttggggaaaggtaa

SEQ ID NO: 575369 - DNA, 19 bp, Mus musculus
  siRNA target sequence for Gzmc (NM_010371.1,534-552).
gacggggaattcccaaaaa

SEQ ID NO: 575370 - DNA, 19 bp, Mus musculus
  siRNA target sequence for Gzmc (NM_010371.1,553-571).
cactgcacgaagttaagct

SEQ ID NO: 575371 - DNA, 19 bp, Mus musculus
  siRNA target sequence for Gzmc (NM_010371.1,601-619).
cccagttccaaagttctta

SEQ ID NO: 575372 - DNA, 19 bp, Mus musculus
  siRNA target sequence for Gzmc (NM_010371.1,642-660).
gtgggagactcaaagatca

SEQ ID NO: 575373 - DNA, 19 bp, Mus musculus
  siRNA target sequence for Gzmc (NM_010371.1,656-674).
gatcaagggagcttccttt

SEQ ID NO: 575374 - DNA, 19 bp, Mus musculus
  siRNA target sequence for Gzmc (NM_010371.1,728-746).
ctcctacgggcaaactgat

SEQ ID NO: 575375 - DNA, 19 bp, Mus musculus
  siRNA target sequence for Gzmc (NM_010371.1,748-766).
gatcagctccacaagtctt

SEQ ID NO: 575376 - DNA, 19 bp, Mus musculus
  siRNA target sequence for Gzmc (NM_010371.1,781-799).
gttttgtatcgtggataaa

SEQ ID NO: 575377 - DNA, 19 bp, Mus musculus
  siRNA target sequence for Gzmd (NM_010372.1,98-116).
cctacatggcattcgttat

SEQ ID NO: 575378 - DNA, 19 bp, Mus musculus
  siRNA target sequence for Gzmd (NM_010372.1,132-150).
ggggaacaggatatactgt

SEQ ID NO: 575379 - DNA, 19 bp, Mus musculus
  siRNA target sequence for Gzmd (NM_010372.1,298-316).
gattataatgctactatct

SEQ ID NO: 575380 - DNA, 19 bp, Mus musculus
  siRNA target sequence for Gzme (NM_010373.2,286-304).
gtggatattgaaggtaata

SEQ ID NO: 575381 - DNA, 19 bp, Mus musculus
  siRNA target sequence for Gzme (NM_010373.2,289-307).
gatattgaaggtaatagga

SEQ ID NO: 575382 - DNA, 19 bp, Mus musculus
  siRNA target sequence for Gzmf (NM_010374.2,272-290).
gtgaggtttgtgaaagata

SEQ ID NO: 575383 - DNA, 19 bp, Mus musculus
  siRNA target sequence for Gzmf (NM_010374.2,274-292).
gaggtttgtgaaagataat

SEQ ID NO: 575384 - DNA, 19 bp, Mus musculus
  siRNA target sequence for Gzmf (NM_010374.2,287-305).
gataatggaaaaagacatt

SEQ ID NO: 575385 - DNA, 19 bp, Mus musculus
  siRNA target sequence for Gzmf (NM_010374.2,450-468).
cccacccagcttatgatga

SEQ ID NO: 575386 - DNA, 19 bp, Mus musculus
  siRNA target sequence for Gzmf (NM_010374.2,616-634).
catcaatgcaacacaaaga

SEQ ID NO: 575387 - DNA, 19 bp, Mus musculus
  siRNA target sequence for Gzmf (NM_010374.2,619-637).
caatgcaacacaaagatct

SEQ ID NO: 575388 - DNA, 19 bp, Mus musculus
  siRNA target sequence for Gzmg (NM_010375.1,357-375).
ggcaccaatgacattatgt

SEQ ID NO: 575389 - DNA, 19 bp, Mus musculus
  siRNA target sequence for Gzmg (NM_010375.1,358-376).
gcaccaatgacattatgtt

SEQ ID NO: 575390 - DNA, 19 bp, Mus musculus
  siRNA target sequence for Gzmk (NM_008196.1,30-48).
cctggtggctggcgtttat

SEQ ID NO: 575391 - DNA, 19 bp, Mus musculus
  siRNA target sequence for Gzmk (NM_008196.1,31-49).
ctggtggctggcgtttata

SEQ ID NO: 575392 - DNA, 19 bp, Mus musculus
  siRNA target sequence for Gzmk (NM_008196.1,34-52).
gtggctggcgtttatatgt

SEQ ID NO: 575393 - DNA, 19 bp, Mus musculus
  siRNA target sequence for Gzmk (NM_008196.1,36-54).
ggctggcgtttatatgtct

SEQ ID NO: 575394 - DNA, 19 bp, Mus musculus
  siRNA target sequence for Gzmk (NM_008196.1,37-55).
gctggcgtttatatgtctt

SEQ ID NO: 575395 - DNA, 19 bp, Mus musculus
  siRNA target sequence for Gzmk (NM_008196.1,51-69).
gtcttcagagtgtttccat

SEQ ID NO: 575396 - DNA, 19 bp, Mus musculus
  siRNA target sequence for Gzmk (NM_008196.1,100-118).
ccgcattccaggccattta

SEQ ID NO: 575397 - DNA, 19 bp, Mus musculus
  siRNA target sequence for Gzmk (NM_008196.1,135-153).
ccgcagcaagcatatttgt

SEQ ID NO: 575398 - DNA, 19 bp, Mus musculus
  siRNA target sequence for Gzmk (NM_008196.1,195-213).
ccactgctactcttggttt

SEQ ID NO: 575399 - DNA, 19 bp, Mus musculus
  siRNA target sequence for Gzmk (NM_008196.1,225-243).
ctctcccaccgtggtttta

SEQ ID NO: 575400 - DNA, 19 bp, Mus musculus
  siRNA target sequence for Gzmk (NM_008196.1,329-347).
gttccgcatcgcatgacat

SEQ ID NO: 575401 - DNA, 19 bp, Mus musculus
  siRNA target sequence for Gzmk (NM_008196.1,332-350).
ccgcatcgcatgacatcat

SEQ ID NO: 575402 - DNA, 19 bp, Mus musculus
  siRNA target sequence for Gzmk (NM_008196.1,364-382).
cgcactgctgcagaactaa

SEQ ID NO: 575403 - DNA, 19 bp, Mus musculus
  siRNA target sequence for Gzmk (NM_008196.1,370-388).
gctgcagaactaaacaaga

SEQ ID NO: 575404 - DNA, 19 bp, Mus musculus
  siRNA target sequence for Gzmk (NM_008196.1,400-418).
cttcacctgggatccaaaa

SEQ ID NO: 575405 - DNA, 19 bp, Mus musculus
  siRNA target sequence for Gzmk (NM_008196.1,403-421).
cacctgggatccaaaaact

SEQ ID NO: 575406 - DNA, 19 bp, Mus musculus
  siRNA target sequence for Gzmk (NM_008196.1,414-432).
caaaaactatcttagagat

SEQ ID NO: 575407 - DNA, 19 bp, Mus musculus
  siRNA target sequence for Gzmk (NM_008196.1,424-442).
cttagagatgggaccaaat

SEQ ID NO: 575408 - DNA, 19 bp, Mus musculus
  siRNA target sequence for Gzmk (NM_008196.1,478-496).
ctgttaaccgcctctgata

SEQ ID NO: 575409 - DNA, 19 bp, Mus musculus
  siRNA target sequence for Gzmk (NM_008196.1,499-517).
ctgagagaagtcactgtta

SEQ ID NO: 575410 - DNA, 19 bp, Mus musculus
  siRNA target sequence for Gzmk (NM_008196.1,536-554).
gctgtaacagccaaagcta

SEQ ID NO: 575411 - DNA, 19 bp, Mus musculus
  siRNA target sequence for Gzmk (NM_008196.1,681-699).
ctctcagggctataaatgt

SEQ ID NO: 575412 - DNA, 19 bp, Mus musculus
  siRNA target sequence for Gzmk (NM_008196.1,707-725).
ccaaaaagcctggaatcta

SEQ ID NO: 575413 - DNA, 19 bp, Mus musculus
  siRNA target sequence for Gzmk (NM_008196.1,718-736).
ggaatctatacgctattaa

SEQ ID NO: 575414 - DNA, 19 bp, Mus musculus
  siRNA target sequence for Gzmm (NM_008504.2,416-434).
ctactgctggccctgaaaa

SEQ ID NO: 575415 - DNA, 19 bp, Mus musculus
  siRNA target sequence for Gzmm (NM_008504.2,511-529).
catggcctctctacagaaa

SEQ ID NO: 575416 - DNA, 19 bp, Mus musculus
  siRNA target sequence for Gzmm (NM_008504.2,701-719).
cctggctacaaccacaaat

SEQ ID NO: 575417 - DNA, 19 bp, Mus musculus
  siRNA target sequence for Gzmm (NM_008504.2,702-720).
ctggctacaaccacaaata

SEQ ID NO: 575418 - DNA, 19 bp, Mus musculus
  siRNA target sequence for Gzmm (NM_008504.2,705-723).
gctacaaccacaaatatga

SEQ ID NO: 575419 - DNA, 19 bp, Mus musculus
  siRNA target sequence for Gzmm (NM_008504.2,734-752).
gcactgcttaagctagata

SEQ ID NO: 575420 - DNA, 19 bp, Mus musculus
  siRNA target sequence for Gzmm (NM_008504.2,761-779).
cagcccagcaagaatgtca

SEQ ID NO: 575421 - DNA, 19 bp, Mus musculus
  siRNA target sequence for Gzmm (NM_008504.2,763-781).
gcccagcaagaatgtcaaa

SEQ ID NO: 575422 - DNA, 19 bp, Mus musculus
  siRNA target sequence for Gzmm (NM_008504.2,783-801).
cactagctctgccaagaaa

SEQ ID NO: 575423 - DNA, 19 bp, Mus musculus
  siRNA target sequence for Gzmm (NM_008504.2,908-926).
gtgctggatacccaaatgt

SEQ ID NO: 575424 - DNA, 19 bp, Mus musculus
  siRNA target sequence for Gzmm (NM_008504.2,910-928).
gctggatacccaaatgtgt

SEQ ID NO: 575425 - DNA, 19 bp, Mus musculus
  siRNA target sequence for Gzmm (NM_008504.2,914-932).
gatacccaaatgtgtaaca

SEQ ID NO: 575426 - DNA, 19 bp, Mus musculus
  siRNA target sequence for Gzmm (NM_008504.2,945-963).
ggaacggtgtcctcataga

SEQ ID NO: 575427 - DNA, 19 bp, Mus musculus
  siRNA target sequence for Gzmm (NM_008504.2,1160-1178).
cgctggtcaccccaatctt

SEQ ID NO: 575428 - DNA, 19 bp, Mus musculus
  siRNA target sequence for Gzmn (NM_153052.1,197-215).
cttacatggcattagttgt

SEQ ID NO: 575429 - DNA, 19 bp, Mus musculus
  siRNA target sequence for Gzmn (NM_153052.1,354-372).
gactcagcagattattcct

SEQ ID NO: 575430 - DNA, 19 bp, Mus musculus
  siRNA target sequence for Gzmn (NM_153052.1,361-379).
cagattattcctgtgaata

SEQ ID NO: 575431 - DNA, 19 bp, Mus musculus
  siRNA target sequence for Gzmn (NM_153052.1,637-655).
cgtcactattccaaaatca

SEQ ID NO: 575432 - DNA, 19 bp, Mus musculus
  siRNA target sequence for H2-Bf (NM_008198.1,358-376).
cagacccgagaccaaaaga

SEQ ID NO: 575433 - DNA, 19 bp, Mus musculus
  siRNA target sequence for H2-Bf (NM_008198.1,387-405).
ggcggaatgcagagcaata

SEQ ID NO: 575434 - DNA, 19 bp, Mus musculus
  siRNA target sequence for H2-Bf (NM_008198.1,413-431).
cacgaccgcaggactttga

SEQ ID NO: 575435 - DNA, 19 bp, Mus musculus
  siRNA target sequence for H2-Bf (NM_008198.1,415-433).
cgaccgcaggactttgaaa

SEQ ID NO: 575436 - DNA, 19 bp, Mus musculus
  siRNA target sequence for H2-Bf (NM_008198.1,475-493).
gaccagatttcttttcaat

SEQ ID NO: 575437 - DNA, 19 bp, Mus musculus
  siRNA target sequence for H2-Bf (NM_008198.1,555-573).
ggatgggcaaacagcaatt

SEQ ID NO: 575438 - DNA, 19 bp, Mus musculus
  siRNA target sequence for H2-Bf (NM_008198.1,556-574).
gatgggcaaacagcaattt

SEQ ID NO: 575439 - DNA, 19 bp, Mus musculus
  siRNA target sequence for H2-Bf (NM_008198.1,600-618).
caatcccggtattcctatt

SEQ ID NO: 575440 - DNA, 19 bp, Mus musculus
  siRNA target sequence for H2-Bf (NM_008198.1,646-664).
cgccttgaagacattgtta

SEQ ID NO: 575441 - DNA, 19 bp, Mus musculus
  siRNA target sequence for H2-Bf (NM_008198.1,699-717).
ctcccagaagcgaaagtgt

SEQ ID NO: 575442 - DNA, 19 bp, Mus musculus
  siRNA target sequence for H2-Bf (NM_008198.1,755-773).
gccaagattccttcatgta

SEQ ID NO: 575443 - DNA, 19 bp, Mus musculus
  siRNA target sequence for H2-Bf (NM_008198.1,894-912).
cccctcgggctccatgaat

SEQ ID NO: 575444 - DNA, 19 bp, Mus musculus
  siRNA target sequence for H2-Bf (NM_008198.1,895-913).
ccctcgggctccatgaata

SEQ ID NO: 575445 - DNA, 19 bp, Mus musculus
  siRNA target sequence for H2-Bf (NM_008198.1,896-914).
cctcgggctccatgaatat

SEQ ID NO: 575446 - DNA, 19 bp, Mus musculus
  siRNA target sequence for H2-Bf (NM_008198.1,973-991).
cggtgcctcaccaacttga

SEQ ID NO: 575447 - DNA, 19 bp, Mus musculus
  siRNA target sequence for H2-Bf (NM_008198.1,974-992).
ggtgcctcaccaacttgat

SEQ ID NO: 575448 - DNA, 19 bp, Mus musculus
  siRNA target sequence for H2-Bf (NM_008198.1,977-995).
gcctcaccaacttgattga

SEQ ID NO: 575449 - DNA, 19 bp, Mus musculus
  siRNA target sequence for H2-Bf (NM_008198.1,1030-1048).
ggtctcctgacatatgcta

SEQ ID NO: 575450 - DNA, 19 bp, Mus musculus
  siRNA target sequence for H2-Bf (NM_008198.1,1116-1134).
gctcaaccaaatcagttat

SEQ ID NO: 575451 - DNA, 19 bp, Mus musculus
  siRNA target sequence for H2-Bf (NM_008198.1,1119-1137).
caaccaaatcagttatgaa

SEQ ID NO: 575452 - DNA, 19 bp, Mus musculus
  siRNA target sequence for H2-Bf (NM_008198.1,1183-1201).
gctgtgtatagcatgatga

SEQ ID NO: 575453 - DNA, 19 bp, Mus musculus
  siRNA target sequence for H2-Bf (NM_008198.1,1222-1240).
cctgaaggctggaatagaa

SEQ ID NO: 575454 - DNA, 19 bp, Mus musculus
  siRNA target sequence for H2-Bf (NM_008198.1,1242-1260).
ccgccatgtcatcatcatt

SEQ ID NO: 575455 - DNA, 19 bp, Mus musculus
  siRNA target sequence for H2-Bf (NM_008198.1,1335-1353).
cggcagggatcccaaaaat

SEQ ID NO: 575456 - DNA, 19 bp, Mus musculus
  siRNA target sequence for H2-Bf (NM_008198.1,1362-1380).
ggattacctggatgtgtat

SEQ ID NO: 575457 - DNA, 19 bp, Mus musculus
  siRNA target sequence for H2-Bf (NM_008198.1,1404-1422).
ggactccgtgaacatcaat

SEQ ID NO: 575458 - DNA, 19 bp, Mus musculus
  siRNA target sequence for H2-Bf (NM_008198.1,1424-1442).
ccttagcttccaaaaagga

SEQ ID NO: 575459 - DNA, 19 bp, Mus musculus
  siRNA target sequence for H2-Bf (NM_008198.1,1456-1474).
gtgtttaaagtcaaggata

SEQ ID NO: 575460 - DNA, 19 bp, Mus musculus
  siRNA target sequence for H2-Bf (NM_008198.1,1486-1504).
gagaatgttttctaccaaa

SEQ ID NO: 575461 - DNA, 19 bp, Mus musculus
  siRNA target sequence for H2-Bf (NM_008198.1,1552-1570).
cataaaaaaggcaacgatt

SEQ ID NO: 575462 - DNA, 19 bp, Mus musculus
  siRNA target sequence for H2-Bf (NM_008198.1,1563-1581).
caacgattatcataagcaa

SEQ ID NO: 575463 - DNA, 19 bp, Mus musculus
  siRNA target sequence for H2-Bf (NM_008198.1,1643-1661).
ccgtggtgtctgagtactt

SEQ ID NO: 575464 - DNA, 19 bp, Mus musculus
  siRNA target sequence for H2-Bf (NM_008198.1,1984-2002).
gtcaaagctctgtttgtat

SEQ ID NO: 575465 - DNA, 19 bp, Mus musculus
  siRNA target sequence for H2-Bf (NM_008198.1,2024-2042).
ctcggaaggaggtgtacat

SEQ ID NO: 575466 - DNA, 19 bp, Mus musculus
  siRNA target sequence for H2-Bf (NM_008198.1,2026-2044).
cggaaggaggtgtacatca

SEQ ID NO: 575467 - DNA, 19 bp, Mus musculus
  siRNA target sequence for H2-Bf (NM_008198.1,2225-2243).
gaagccgcttcattcaagt

SEQ ID NO: 575468 - DNA, 19 bp, Mus musculus
  siRNA target sequence for H2-Bf (NM_008198.1,2239-2257).
caagttggtgtgattagct

SEQ ID NO: 575469 - DNA, 19 bp, Mus musculus
  siRNA target sequence for H2-Bf (NM_008198.1,2250-2268).
gattagctggggagtagta

SEQ ID NO: 575470 - DNA, 19 bp, Mus musculus
  siRNA target sequence for H2-Bf (NM_008198.1,2255-2273).
gctggggagtagtagatgt

SEQ ID NO: 575471 - DNA, 19 bp, Mus musculus
  siRNA target sequence for H2-Bf (NM_008198.1,2377-2395).
gaggatttgggttttctat

SEQ ID NO: 575472 - DNA, 19 bp, Mus musculus
  siRNA target sequence for Hgfac (NM_019447.1,11-29).
cgacaggcctggatctcta

SEQ ID NO: 575473 - DNA, 19 bp, Mus musculus
  siRNA target sequence for Hgfac (NM_019447.1,130-148).
gcccccaggacctaacgtt

SEQ ID NO: 575474 - DNA, 19 bp, Mus musculus
  siRNA target sequence for Hgfac (NM_019447.1,131-149).
cccccaggacctaacgtta

SEQ ID NO: 575475 - DNA, 19 bp, Mus musculus
  siRNA target sequence for Hgfac (NM_019447.1,179-197).
gtgatctctgggaatgtca

SEQ ID NO: 575476 - DNA, 19 bp, Mus musculus
  siRNA target sequence for Hgfac (NM_019447.1,385-403).
gaagtggtgcgctacaaca

SEQ ID NO: 575477 - DNA, 19 bp, Mus musculus
  siRNA target sequence for Hgfac (NM_019447.1,393-411).
gcgctacaacacacaacta

SEQ ID NO: 575478 - DNA, 19 bp, Mus musculus
  siRNA target sequence for Hgfac (NM_019447.1,394-412).
cgctacaacacacaactat

SEQ ID NO: 575479 - DNA, 19 bp, Mus musculus
  siRNA target sequence for Hgfac (NM_019447.1,396-414).
ctacaacacacaactatga

SEQ ID NO: 575480 - DNA, 19 bp, Mus musculus
  siRNA target sequence for Hgfac (NM_019447.1,460-478).
ggaaggtccagctatcctt

SEQ ID NO: 575481 - DNA, 19 bp, Mus musculus
  siRNA target sequence for Hgfac (NM_019447.1,595-613).
gaaatgctttgatgaaaca

SEQ ID NO: 575482 - DNA, 19 bp, Mus musculus
  siRNA target sequence for Hgfac (NM_019447.1,605-623).
gatgaaacacgctatgagt

SEQ ID NO: 575483 - DNA, 19 bp, Mus musculus
  siRNA target sequence for Hgfac (NM_019447.1,608-626).
gaaacacgctatgagtatt

SEQ ID NO: 575484 - DNA, 19 bp, Mus musculus
  siRNA target sequence for Hgfac (NM_019447.1,612-630).
cacgctatgagtattttga

SEQ ID NO: 575485 - DNA, 19 bp, Mus musculus
  siRNA target sequence for Hgfac (NM_019447.1,819-837).
ggcggttctgtaacattgt

SEQ ID NO: 575486 - DNA, 19 bp, Mus musculus
  siRNA target sequence for Hgfac (NM_019447.1,820-838).
gcggttctgtaacattgtt

SEQ ID NO: 575487 - DNA, 19 bp, Mus musculus
  siRNA target sequence for Hgfac (NM_019447.1,1082-1100).
cgcctgacagcctgtgaat

SEQ ID NO: 575488 - DNA, 19 bp, Mus musculus
  siRNA target sequence for Hgfac (NM_019447.1,1382-1400).
ctgggtcagcacttcttca

SEQ ID NO: 575489 - DNA, 19 bp, Mus musculus
  siRNA target sequence for Hgfac (NM_019447.1,1421-1439).
cagacatttggcattgaga

SEQ ID NO: 575490 - DNA, 19 bp, Mus musculus
  siRNA target sequence for Hgfac (NM_019447.1,1455-1473).
ccctgtactcggtgttcaa

SEQ ID NO: 575491 - DNA, 19 bp, Mus musculus
  siRNA target sequence for Hgfac (NM_019447.1,1493-1511).
gtcttgatccggctaaaga

SEQ ID NO: 575492 - DNA, 19 bp, Mus musculus
  siRNA target sequence for Hgfac (NM_019447.1,1698-1716).
gtagcagcccagaggtata

SEQ ID NO: 575493 - DNA, 19 bp, Mus musculus
  siRNA target sequence for Hgfac (NM_019447.1,1918-1936).
gatcaacgaccgtattcga

SEQ ID NO: 575494 - DNA, 19 bp, Mus musculus
  siRNA target sequence for Hp (NM_017370.1,84-102).
ctggggtcagctttttgct

SEQ ID NO: 575495 - DNA, 19 bp, Mus musculus
  siRNA target sequence for Hp (NM_017370.1,199-217).
cgctgccgacagttctaca

SEQ ID NO: 575496 - DNA, 19 bp, Mus musculus
  siRNA target sequence for Hp (NM_017370.1,235-253).
gatggggtgtacaccttaa

SEQ ID NO: 575497 - DNA, 19 bp, Mus musculus
  siRNA target sequence for Hp (NM_017370.1,239-257).
gggtgtacaccttaaacga

SEQ ID NO: 575498 - DNA, 19 bp, Mus musculus
  siRNA target sequence for Hp (NM_017370.1,357-375).
catcggtggctctatggat

SEQ ID NO: 575499 - DNA, 19 bp, Mus musculus
  siRNA target sequence for Hp (NM_017370.1,392-410).
cttggcaggccaagatgat

SEQ ID NO: 575500 - DNA, 19 bp, Mus musculus
  siRNA target sequence for Hp (NM_017370.1,536-554).
cgctctacgtggggaaaaa

SEQ ID NO: 575501 - DNA, 19 bp, Mus musculus
  siRNA target sequence for Hp (NM_017370.1,604-622).
gtggatatcgggctaatca

SEQ ID NO: 575502 - DNA, 19 bp, Mus musculus
  siRNA target sequence for Hp (NM_017370.1,606-624).
ggatatcgggctaatcaaa

SEQ ID NO: 575503 - DNA, 19 bp, Mus musculus
  siRNA target sequence for Hp (NM_017370.1,726-744).
gcggaacgccaactttaga

SEQ ID NO: 575504 - DNA, 19 bp, Mus musculus
  siRNA target sequence for Hp (NM_017370.1,727-745).
cggaacgccaactttagat

SEQ ID NO: 575505 - DNA, 19 bp, Mus musculus
  siRNA target sequence for Hp (NM_017370.1,728-746).
ggaacgccaactttagatt

SEQ ID NO: 575506 - DNA, 19 bp, Mus musculus
  siRNA target sequence for Hp (NM_017370.1,749-767).
ccgatcgtctcaagtatgt

SEQ ID NO: 575507 - DNA, 19 bp, Mus musculus
  siRNA target sequence for Hp (NM_017370.1,751-769).
gatcgtctcaagtatgtca

SEQ ID NO: 575508 - DNA, 19 bp, Mus musculus
  siRNA target sequence for Hp (NM_017370.1,801-819).
ggtgcactatgagaatagt

SEQ ID NO: 575509 - DNA, 19 bp, Mus musculus
  siRNA target sequence for Hp (NM_017370.1,802-820).
gtgcactatgagaatagta

SEQ ID NO: 575510 - DNA, 19 bp, Mus musculus
  siRNA target sequence for Hp (NM_017370.1,804-822).
gcactatgagaatagtaca

SEQ ID NO: 575511 - DNA, 19 bp, Mus musculus
  siRNA target sequence for Hp (NM_017370.1,818-836).
gtacagtgcccgagaagaa

SEQ ID NO: 575512 - DNA, 19 bp, Mus musculus
  siRNA target sequence for Hp (NM_017370.1,823-841).
gtgcccgagaagaaaaact

SEQ ID NO: 575513 - DNA, 19 bp, Mus musculus
  siRNA target sequence for Hp (NM_017370.1,856-874).
ggggtccagcctatcttga

SEQ ID NO: 575514 - DNA, 19 bp, Mus musculus
  siRNA target sequence for Hp (NM_017370.1,857-875).
gggtccagcctatcttgaa

SEQ ID NO: 575515 - DNA, 19 bp, Mus musculus
  siRNA target sequence for Hp (NM_017370.1,989-1007).
ggatcctgagctttgacaa

SEQ ID NO: 575516 - DNA, 19 bp, Mus musculus
  siRNA target sequence for Hp (NM_017370.1,1011-1029).
ctgcgctgtcgctgagtat

SEQ ID NO: 575517 - DNA, 19 bp, Mus musculus
  siRNA target sequence for Hpn (NM_008281.1,304-322).
gcgtcctgggccattgtga

SEQ ID NO: 575518 - DNA, 19 bp, Mus musculus
  siRNA target sequence for Hpn (NM_008281.1,537-555).
cggcacatcgggcttcttt

SEQ ID NO: 575519 - DNA, 19 bp, Mus musculus
  siRNA target sequence for Hpn (NM_008281.1,538-556).
ggcacatcgggcttctttt

SEQ ID NO: 575520 - DNA, 19 bp, Mus musculus
  siRNA target sequence for Hpn (NM_008281.1,837-855).
gtctcggtggcgagtattt

SEQ ID NO: 575521 - DNA, 19 bp, Mus musculus
  siRNA target sequence for Hpn (NM_008281.1,1080-1098).
gaccggctggggtaacaca

SEQ ID NO: 575522 - DNA, 19 bp, Mus musculus
  siRNA target sequence for Hpn (NM_008281.1,1088-1106).
ggggtaacacacagttcta

SEQ ID NO: 575523 - DNA, 19 bp, Mus musculus
  siRNA target sequence for Hpn (NM_008281.1,1089-1107).
gggtaacacacagttctat

SEQ ID NO: 575524 - DNA, 19 bp, Mus musculus
  siRNA target sequence for Hpn (NM_008281.1,1138-1156).
cgggttcccatcataagca

SEQ ID NO: 575525 - DNA, 19 bp, Mus musculus
  siRNA target sequence for Hpn (NM_008281.1,1139-1157).
gggttcccatcataagcaa

SEQ ID NO: 575526 - DNA, 19 bp, Mus musculus
  siRNA target sequence for Hpn (NM_008281.1,1177-1195).
gacttctacgggaatcaga

SEQ ID NO: 575527 - DNA, 19 bp, Mus musculus
  siRNA target sequence for Hpn (NM_008281.1,1308-1326).
gcggctatgtggcattgta

SEQ ID NO: 575528 - DNA, 19 bp, Mus musculus
  siRNA target sequence for Hpn (NM_008281.1,1309-1327).
cggctatgtggcattgtaa

SEQ ID NO: 575529 - DNA, 19 bp, Mus musculus
  siRNA target sequence for Isp1 (NM_053259.1,136-154).
gtcagcctaagaatgtaca

SEQ ID NO: 575530 - DNA, 19 bp, Mus musculus
  siRNA target sequence for Isp1 (NM_053259.1,271-289).
gtccaggtgggggaagtat

SEQ ID NO: 575531 - DNA, 19 bp, Mus musculus
  siRNA target sequence for Isp1 (NM_053259.1,280-298).
ggggaagtatacctctata

SEQ ID NO: 575532 - DNA, 19 bp, Mus musculus
  siRNA target sequence for Isp1 (NM_053259.1,281-299).
gggaagtatacctctataa

SEQ ID NO: 575533 - DNA, 19 bp, Mus musculus
  siRNA target sequence for Isp1 (NM_053259.1,399-417).
cctggtcacatccacaaat

SEQ ID NO: 575534 - DNA, 19 bp, Mus musculus
  siRNA target sequence for Isp1 (NM_053259.1,550-568).
ccaattcaggacaacaaga

SEQ ID NO: 575535 - DNA, 19 bp, Mus musculus
  siRNA target sequence for Isp1 (NM_053259.1,572-590).
gtaagcgggcttataggaa

SEQ ID NO: 575536 - DNA, 19 bp, Mus musculus
  siRNA target sequence for Isp1 (NM_053259.1,657-675).
ccgaggcccctgttttggt

SEQ ID NO: 575537 - DNA, 19 bp, Mus musculus
  siRNA target sequence for Isp1 (NM_053259.1,733-751).
gtcagcaaggggatcgatt

SEQ ID NO: 575538 - DNA, 19 bp, Mus musculus
  siRNA target sequence for Isp1 (NM_053259.1,744-762).
gatcgattgcagcaacaat

SEQ ID NO: 575539 - DNA, 19 bp, Mus musculus
  siRNA target sequence for Isp1 (NM_053259.1,755-773).
gcaacaatctgccatcaat

SEQ ID NO: 575540 - DNA, 19 bp, Mus musculus
  siRNA target sequence for Isp1 (NM_053259.1,800-818).
cctggatccatcaacacat

SEQ ID NO: 575541 - DNA, 19 bp, Mus musculus
  siRNA target sequence for Isp2 (NM_053260.2,90-108).
catcgtggggggtcatagt

SEQ ID NO: 575542 - DNA, 19 bp, Mus musculus
  siRNA target sequence for Isp2 (NM_053260.2,138-156).
cagcctgaggatctataga

SEQ ID NO: 575543 - DNA, 19 bp, Mus musculus
  siRNA target sequence for Isp2 (NM_053260.2,392-410).
cagtgtctgtacaatcctt

SEQ ID NO: 575544 - DNA, 19 bp, Mus musculus
  siRNA target sequence for Isp2 (NM_053260.2,398-416).
ctgtacaatcctttcctaa

SEQ ID NO: 575545 - DNA, 19 bp, Mus musculus
  siRNA target sequence for Isp2 (NM_053260.2,403-421).
caatcctttcctaatgtca

SEQ ID NO: 575546 - DNA, 19 bp, Mus musculus
  siRNA target sequence for Isp2 (NM_053260.2,535-553).
cagcaggtgcaggtaaaga

SEQ ID NO: 575547 - DNA, 19 bp, Mus musculus
  siRNA target sequence for Isp2 (NM_053260.2,537-555).
gcaggtgcaggtaaagata

SEQ ID NO: 575548 - DNA, 19 bp, Mus musculus
  siRNA target sequence for Isp2 (NM_053260.2,540-558).
ggtgcaggtaaagataatt

SEQ ID NO: 575549 - DNA, 19 bp, Mus musculus
  siRNA target sequence for Isp2 (NM_053260.2,605-623).
gcaatcgtggccagaaact

SEQ ID NO: 575550 - DNA, 19 bp, Mus musculus
  siRNA target sequence for Isp2 (NM_053260.2,614-632).
gccagaaactgatcctaaa

SEQ ID NO: 575551 - DNA, 19 bp, Mus musculus
  siRNA target sequence for Isp2 (NM_053260.2,624-642).
gatcctaaaggacatgtta

SEQ ID NO: 575552 - DNA, 19 bp, Mus musculus
  siRNA target sequence for Klk14 (NM_174866.1,3-21).
gttccttctactgatcata

SEQ ID NO: 575553 - DNA, 19 bp, Mus musculus
  siRNA target sequence for Klk14 (NM_174866.1,160-178).
gtcctgttgtcagatcaat

SEQ ID NO: 575554 - DNA, 19 bp, Mus musculus
  siRNA target sequence for Klk14 (NM_174866.1,225-243).
cctgggcaagcacaacata

SEQ ID NO: 575555 - DNA, 19 bp, Mus musculus
  siRNA target sequence for Klk14 (NM_174866.1,226-244).
ctgggcaagcacaacataa

SEQ ID NO: 575556 - DNA, 19 bp, Mus musculus
  siRNA target sequence for Klk14 (NM_174866.1,228-246).
gggcaagcacaacataaga

SEQ ID NO: 575557 - DNA, 19 bp, Mus musculus
  siRNA target sequence for Klk14 (NM_174866.1,229-247).
ggcaagcacaacataagaa

SEQ ID NO: 575558 - DNA, 19 bp, Mus musculus
  siRNA target sequence for Klk14 (NM_174866.1,488-506).
gtgtgaatgtcaacatcat

SEQ ID NO: 575559 - DNA, 19 bp, Mus musculus
  siRNA target sequence for Klk14 (NM_174866.1,529-547).
gcctaccctggaatcataa

SEQ ID NO: 575560 - DNA, 19 bp, Mus musculus
  siRNA target sequence for Klk14 (NM_174866.1,531-549).
ctaccctggaatcataaca

SEQ ID NO: 575561 - DNA, 19 bp, Mus musculus
  siRNA target sequence for Klk14 (NM_174866.1,701-719).
ccaacctgtgcaattacca

SEQ ID NO: 575562 - DNA, 19 bp, Mus musculus
  siRNA target sequence for Klk15 (NM_174865.1,114-132).
cgaacgtggccggtttaat

SEQ ID NO: 575563 - DNA, 19 bp, Mus musculus
  siRNA target sequence for Klk15 (NM_174865.1,115-133).
gaacgtggccggtttaatt

SEQ ID NO: 575564 - DNA, 19 bp, Mus musculus
  siRNA target sequence for Klk15 (NM_174865.1,255-273).
ctccgtctctcgcatcatt

SEQ ID NO: 575565 - DNA, 19 bp, Mus musculus
  siRNA target sequence for Klk15 (NM_174865.1,299-317).
cccaccgccatgacattat

SEQ ID NO: 575566 - DNA, 19 bp, Mus musculus
  siRNA target sequence for Klk15 (NM_174865.1,318-336).
gctgttgcgacttttcaaa

SEQ ID NO: 575567 - DNA, 19 bp, Mus musculus
  siRNA target sequence for Klk15 (NM_174865.1,425-443).
gtctgttatcagacaacaa

SEQ ID NO: 575568 - DNA, 19 bp, Mus musculus
  siRNA target sequence for Klk15 (NM_174865.1,481-499).
ctccctgatacgttgcatt

SEQ ID NO: 575569 - DNA, 19 bp, Mus musculus
  siRNA target sequence for Klk15 (NM_174865.1,670-688).
ggcgatgtcccctgtgata

SEQ ID NO: 575570 - DNA, 19 bp, Mus musculus
  siRNA target sequence for Klk15 (NM_174865.1,672-690).
cgatgtcccctgtgatact

SEQ ID NO: 575571 - DNA, 19 bp, Mus musculus
  siRNA target sequence for Klk15 (NM_174865.1,673-691).
gatgtcccctgtgatacta

SEQ ID NO: 575572 - DNA, 19 bp, Mus musculus
  siRNA target sequence for Klk15 (NM_174865.1,732-750).
ggagtggatctgggaaaat

SEQ ID NO: 575573 - DNA, 19 bp, Mus musculus
  siRNA target sequence for Klk16 (NM_008454.1,682-700).
ctaccacaaggaacacatt

SEQ ID NO: 575574 - DNA, 19 bp, Mus musculus
  siRNA target sequence for Klk16 (NM_008454.1,868-886).
cctgacctttgaaaagtta

SEQ ID NO: 575575 - DNA, 19 bp, Mus musculus
  siRNA target sequence for Klk16 (NM_008454.1,994-1012).
gctggatagcacatgtcta

SEQ ID NO: 575576 - DNA, 19 bp, Mus musculus
  siRNA target sequence for Klk16 (NM_008454.1,1222-1240).
ccaaggaaccgtatcaatt

SEQ ID NO: 575577 - DNA, 19 bp, Mus musculus
  siRNA target sequence for Klk21 (NM_010642.1,272-290).
gctatggcaaccagtataa

SEQ ID NO: 575578 - DNA, 19 bp, Mus musculus
  siRNA target sequence for Klk21 (NM_010642.1,273-291).
ctatggcaaccagtataat

SEQ ID NO: 575579 - DNA, 19 bp, Mus musculus
  siRNA target sequence for Klk21 (NM_010642.1,609-627).
cctgcctaatgaaaattgt

SEQ ID NO: 575580 - DNA, 19 bp, Mus musculus
  siRNA target sequence for Klk24 (NM_010643.1,565-583).
ctgtaccaaaccctactta

SEQ ID NO: 575581 - DNA, 19 bp, Mus musculus
  siRNA target sequence for Klk4 (NM_019928.1,293-311).
gactgggcctgcataacct

SEQ ID NO: 575582 - DNA, 19 bp, Mus musculus
  siRNA target sequence for Klk4 (NM_019928.1,329-347).
ctggcagccggatgttaga

SEQ ID NO: 575583 - DNA, 19 bp, Mus musculus
  siRNA target sequence for Klk4 (NM_019928.1,375-393).
cttcaacgatccttctttt

SEQ ID NO: 575584 - DNA, 19 bp, Mus musculus
  siRNA target sequence for Klk4 (NM_019928.1,378-396).
caacgatccttcttttgca

SEQ ID NO: 575585 - DNA, 19 bp, Mus musculus
  siRNA target sequence for Klk4 (NM_019928.1,389-407).
cttttgcaaacgatctcat

SEQ ID NO: 575586 - DNA, 19 bp, Mus musculus
  siRNA target sequence for Klk4 (NM_019928.1,430-448).
gtgatagagtctaacacta

SEQ ID NO: 575587 - DNA, 19 bp, Mus musculus
  siRNA target sequence for Klk4 (NM_019928.1,504-522).
ctctggttggggtcaacta

SEQ ID NO: 575588 - DNA, 19 bp, Mus musculus
  siRNA target sequence for Klk4 (NM_019928.1,506-524).
ctggttggggtcaactaaa

SEQ ID NO: 575589 - DNA, 19 bp, Mus musculus
  siRNA target sequence for Klk4 (NM_019928.1,543-561).
cctcctgcagtgtgtgaat

SEQ ID NO: 575590 - DNA, 19 bp, Mus musculus
  siRNA target sequence for Klk4 (NM_019928.1,584-602).
cttgccggctgctgtatga

SEQ ID NO: 575591 - DNA, 19 bp, Mus musculus
  siRNA target sequence for Klk4 (NM_019928.1,605-623).
ctgtgtaccacctcagtat

SEQ ID NO: 575592 - DNA, 19 bp, Mus musculus
  siRNA target sequence for Klk4 (NM_019928.1,682-700).
cccatagtgtgcaacagat

SEQ ID NO: 575593 - DNA, 19 bp, Mus musculus
  siRNA target sequence for Klk4 (NM_019928.1,772-790).
ctctgcaagttcactaact

SEQ ID NO: 575594 - DNA, 19 bp, Mus musculus
  siRNA target sequence for Klk5 (NM_008456.1,100-118).
ccagtccaatcacgaattt

SEQ ID NO: 575595 - DNA, 19 bp, Mus musculus
  siRNA target sequence for Klk5 (NM_008456.1,101-119).
cagtccaatcacgaatttt

SEQ ID NO: 575596 - DNA, 19 bp, Mus musculus
  siRNA target sequence for Klk5 (NM_008456.1,105-123).
ccaatcacgaatttttgga

SEQ ID NO: 575597 - DNA, 19 bp, Mus musculus
  siRNA target sequence for Klk6 (NM_010639.5,525-543).
cacccgtcaaatatgaata

SEQ ID NO: 575598 - DNA, 19 bp, Mus musculus
  siRNA target sequence for Klk6 (NM_010639.5,765-783).
gtatctacaccagagtttt

SEQ ID NO: 575599 - DNA, 19 bp, Mus musculus
  siRNA target sequence for Klk7 (NM_011872.2,163-181).
gattatagatggctacaaa

SEQ ID NO: 575600 - DNA, 19 bp, Mus musculus
  siRNA target sequence for Klk7 (NM_011872.2,248-266).
gtgctggtggacaaatact

SEQ ID NO: 575601 - DNA, 19 bp, Mus musculus
  siRNA target sequence for Klk7 (NM_011872.2,380-398).
cctggctactccacaaaga

SEQ ID NO: 575602 - DNA, 19 bp, Mus musculus
  siRNA target sequence for Klk7 (NM_011872.2,393-411).
caaagacccacgtcaatga

SEQ ID NO: 575603 - DNA, 19 bp, Mus musculus
  siRNA target sequence for Klk7 (NM_011872.2,431-449).
gatgagccagtcaagatgt

SEQ ID NO: 575604 - DNA, 19 bp, Mus musculus
  siRNA target sequence for Klk7 (NM_011872.2,434-452).
gagccagtcaagatgtcat

SEQ ID NO: 575605 - DNA, 19 bp, Mus musculus
  siRNA target sequence for Klk7 (NM_011872.2,491-509).
cccccagggacgtcatgta

SEQ ID NO: 575606 - DNA, 19 bp, Mus musculus
  siRNA target sequence for Klk9 (NM_010116.1,363-381).
catccgacatcctgagtat

SEQ ID NO: 575607 - DNA, 19 bp, Mus musculus
  siRNA target sequence for LOC260408 (NM_153172.1,142-160).
gccaaacttaggttataat

SEQ ID NO: 575608 - DNA, 19 bp, Mus musculus
  siRNA target sequence for LOC260408 (NM_153172.1,144-162).
caaacttaggttataatga

SEQ ID NO: 575609 - DNA, 19 bp, Mus musculus
  siRNA target sequence for LOC260408 (NM_153172.1,152-170).
ggttataatgagaactaca

SEQ ID NO: 575610 - DNA, 19 bp, Mus musculus
  siRNA target sequence for LOC260408 (NM_153172.1,235-253).
ggaagcgagccttcagata

SEQ ID NO: 575611 - DNA, 19 bp, Mus musculus
  siRNA target sequence for LOC260408 (NM_153172.1,402-420).
ccgtgggtgacatcattat

SEQ ID NO: 575612 - DNA, 19 bp, Mus musculus
  siRNA target sequence for LOC260408 (NM_153172.1,485-503).
cctgtcactttcaacaagt

SEQ ID NO: 575613 - DNA, 19 bp, Mus musculus
  siRNA target sequence for LOC260408 (NM_153172.1,524-542).
ccagagcacaacttcaact

SEQ ID NO: 575614 - DNA, 19 bp, Mus musculus
  siRNA target sequence for LOC260408 (NM_153172.1,570-588).
ctggctggggccaggttaa

SEQ ID NO: 575615 - DNA, 19 bp, Mus musculus
  siRNA target sequence for LOC260408 (NM_153172.1,710-728).
ccccttatccggaagaaca

SEQ ID NO: 575616 - DNA, 19 bp, Mus musculus
  siRNA target sequence for LOC260408 (NM_153172.1,713-731).
cttatccggaagaacatga

SEQ ID NO: 575617 - DNA, 19 bp, Mus musculus
  siRNA target sequence for LOC260408 (NM_153172.1,815-833).
ctggctggggtattctcat

SEQ ID NO: 575618 - DNA, 19 bp, Mus musculus
  siRNA target sequence for LOC260408 (NM_153172.1,850-868).
cacagtaccgaatctaagt

SEQ ID NO: 575619 - DNA, 19 bp, Mus musculus
  siRNA target sequence for LOC260408 (NM_153172.1,852-870).
cagtaccgaatctaagtgt

SEQ ID NO: 575620 - DNA, 19 bp, Mus musculus
  siRNA target sequence for LOC260408 (NM_153172.1,857-875).
ccgaatctaagtgtataca

SEQ ID NO: 575621 - DNA, 19 bp, Mus musculus
  siRNA target sequence for LOC260408 (NM_153172.1,878-896).
cgtatcaccaaatatacca

SEQ ID NO: 575622 - DNA, 19 bp, Mus musculus
  siRNA target sequence for LOC260408 (NM_153172.1,879-897).
gtatcaccaaatataccat

SEQ ID NO: 575623 - DNA, 19 bp, Mus musculus
  siRNA target sequence for Lrp4 (NM_016869.1,542-560).
ctggtgttattcctgtaaa

SEQ ID NO: 575624 - DNA, 19 bp, Mus musculus
  siRNA target sequence for Lrp4 (NM_016869.1,734-752).
ctctcttgccaattgtcaa

SEQ ID NO: 575625 - DNA, 19 bp, Mus musculus
  siRNA target sequence for Lrp4 (NM_016869.1,736-754).
ctcttgccaattgtcaaaa

SEQ ID NO: 575626 - DNA, 19 bp, Mus musculus
  siRNA target sequence for Lrp4 (NM_016869.1,800-818).
gcctcagttgctatcaaca

SEQ ID NO: 575627 - DNA, 19 bp, Mus musculus
  siRNA target sequence for Lrp4 (NM_016869.1,801-819).
cctcagttgctatcaacat

SEQ ID NO: 575628 - DNA, 19 bp, Mus musculus
  siRNA target sequence for Lrp4 (NM_016869.1,883-901).
ggtcttctaccctgtagat

SEQ ID NO: 575629 - DNA, 19 bp, Mus musculus
  siRNA target sequence for Lrp4 (NM_016869.1,972-990).
cctcagatgctctcagttt

SEQ ID NO: 575630 - DNA, 19 bp, Mus musculus
  siRNA target sequence for Lrp4 (NM_016869.1,973-991).
ctcagatgctctcagttta

SEQ ID NO: 575631 - DNA, 19 bp, Mus musculus
  siRNA target sequence for Lrp4 (NM_016869.1,992-1010).
gggaccacactgagactaa

SEQ ID NO: 575632 - DNA, 19 bp, Mus musculus
  siRNA target sequence for Lrp4 (NM_016869.1,994-1012).
gaccacactgagactaaca

SEQ ID NO: 575633 - DNA, 19 bp, Mus musculus
  siRNA target sequence for Lrp4 (NM_016869.1,1125-1143).
gcagtgtaacggctataat

SEQ ID NO: 575634 - DNA, 19 bp, Mus musculus
  siRNA target sequence for Lrp4 (NM_016869.1,1160-1178).
gcgacgaggcgcattgcaa

SEQ ID NO: 575635 - DNA, 19 bp, Mus musculus
  siRNA target sequence for Lrp4 (NM_016869.1,1181-1199).
gcagcaaggatctgtttca

SEQ ID NO: 575636 - DNA, 19 bp, Mus musculus
  siRNA target sequence for Lrp4 (NM_016869.1,1270-1288).
gacgagcaaaactgtgatt

SEQ ID NO: 575637 - DNA, 19 bp, Mus musculus
  siRNA target sequence for Lrp4 (NM_016869.1,1273-1291).
gagcaaaactgtgattgta

SEQ ID NO: 575638 - DNA, 19 bp, Mus musculus
  siRNA target sequence for Lrp4 (NM_016869.1,1275-1293).
gcaaaactgtgattgtaat

SEQ ID NO: 575639 - DNA, 19 bp, Mus musculus
  siRNA target sequence for Lrp4 (NM_016869.1,1624-1642).
caatgtgagcccatcactt

SEQ ID NO: 575640 - DNA, 19 bp, Mus musculus
  siRNA target sequence for Lrp4 (NM_016869.1,1665-1683).
ctacaaccatacacattat

SEQ ID NO: 575641 - DNA, 19 bp, Mus musculus
  siRNA target sequence for Lrp4 (NM_016869.1,1668-1686).
caaccatacacattatcca

SEQ ID NO: 575642 - DNA, 19 bp, Mus musculus
  siRNA target sequence for Lrp4 (NM_016869.1,1672-1690).
catacacattatccaaatt

SEQ ID NO: 575643 - DNA, 19 bp, Mus musculus
  siRNA target sequence for Lrp4 (NM_016869.1,1676-1694).
cacattatccaaattacct

SEQ ID NO: 575644 - DNA, 19 bp, Mus musculus
  siRNA target sequence for Lrp4 (NM_016869.1,1692-1710).
ccttggccacagaactcaa

SEQ ID NO: 575645 - DNA, 19 bp, Mus musculus
  siRNA target sequence for Lrp4 (NM_016869.1,1693-1711).
cttggccacagaactcaaa

SEQ ID NO: 575646 - DNA, 19 bp, Mus musculus
  siRNA target sequence for Lrp4 (NM_016869.1,1748-1766).
ctgcccttgtacaaaccaa

SEQ ID NO: 575647 - DNA, 19 bp, Mus musculus
  siRNA target sequence for Lrp4 (NM_016869.1,1753-1771).
cttgtacaaaccaactgtt

SEQ ID NO: 575648 - DNA, 19 bp, Mus musculus
  siRNA target sequence for Lrp4 (NM_016869.1,1756-1774).
gtacaaaccaactgttaca

SEQ ID NO: 575649 - DNA, 19 bp, Mus musculus
  siRNA target sequence for Lrp4 (NM_016869.1,1791-1809).
cgcttgcaccattttggtt

SEQ ID NO: 575650 - DNA, 19 bp, Mus musculus
  siRNA target sequence for Lrp4 (NM_016869.1,1796-1814).
gcaccattttggttccaaa

SEQ ID NO: 575651 - DNA, 19 bp, Mus musculus
  siRNA target sequence for Lrp4 (NM_016869.1,1800-1818).
cattttggttccaaagtgt

SEQ ID NO: 575652 - DNA, 19 bp, Mus musculus
  siRNA target sequence for Lrp4 (NM_016869.1,1810-1828).
ccaaagtgtgatgtgaata

SEQ ID NO: 575653 - DNA, 19 bp, Mus musculus
  siRNA target sequence for Lrp4 (NM_016869.1,1926-1944).
caccgactgcaatcaattt

SEQ ID NO: 575654 - DNA, 19 bp, Mus musculus
  siRNA target sequence for Lrp4 (NM_016869.1,1929-1947).
cgactgcaatcaatttcca

SEQ ID NO: 575655 - DNA, 19 bp, Mus musculus
  siRNA target sequence for Lrp4 (NM_016869.1,1950-1968).
ggaaagttcagacaatcaa

SEQ ID NO: 575656 - DNA, 19 bp, Mus musculus
  siRNA target sequence for Lrp4 (NM_016869.1,1951-1969).
gaaagttcagacaatcaaa

SEQ ID NO: 575657 - DNA, 19 bp, Mus musculus
  siRNA target sequence for Lrp4 (NM_016869.1,2003-2021).
gctctccgagtcacttcaa

SEQ ID NO: 575658 - DNA, 19 bp, Mus musculus
  siRNA target sequence for Lrp4 (NM_016869.1,2129-2147).
gggaatgtccatttaataa

SEQ ID NO: 575659 - DNA, 19 bp, Mus musculus
  siRNA target sequence for Lrp4 (NM_016869.1,2149-2167).
caatgtctgaagcatacat

SEQ ID NO: 575660 - DNA, 19 bp, Mus musculus
  siRNA target sequence for Lrp4 (NM_016869.1,2155-2173).
ctgaagcatacattaatct

SEQ ID NO: 575661 - DNA, 19 bp, Mus musculus
  siRNA target sequence for Lrp4 (NM_016869.1,2222-2240).
cattttgccaagacaatga

SEQ ID NO: 575662 - DNA, 19 bp, Mus musculus
  siRNA target sequence for Lrp4 (NM_016869.1,2328-2346).
ctgtgtgaccctctctaaa

SEQ ID NO: 575663 - DNA, 19 bp, Mus musculus
  siRNA target sequence for Lrp4 (NM_016869.1,2639-2657).
gccctgctgcccgaatgaa

SEQ ID NO: 575664 - DNA, 19 bp, Mus musculus
  siRNA target sequence for Lrp4 (NM_016869.1,2642-2660).
ctgctgcccgaatgaacaa

SEQ ID NO: 575665 - DNA, 19 bp, Mus musculus
  siRNA target sequence for Lrp4 (NM_016869.1,2725-2743).
gaacccagtggacatatct

SEQ ID NO: 575666 - DNA, 19 bp, Mus musculus
  siRNA target sequence for Lrp4 (NM_016869.1,2752-2770).
gtcctcattgccaagaagt

SEQ ID NO: 575667 - DNA, 19 bp, Mus musculus
  siRNA target sequence for Lrp4 (NM_016869.1,2827-2845).
gtggtatttggcataaaca

SEQ ID NO: 575668 - DNA, 19 bp, Mus musculus
  siRNA target sequence for Lrp4 (NM_016869.1,2898-2916).
gctacatccccgttacagt

SEQ ID NO: 575669 - DNA, 19 bp, Mus musculus
  siRNA target sequence for Lrp4 (NM_016869.1,2915-2933).
gtcgagcagtggtagacta

SEQ ID NO: 575670 - DNA, 19 bp, Mus musculus
  siRNA target sequence for Lrp4 (NM_016869.1,2950-2968).
gagctgagcgatgatatca

SEQ ID NO: 575671 - DNA, 19 bp, Mus musculus
  siRNA target sequence for Lrp4 (NM_016869.1,2952-2970).
gctgagcgatgatatcaat

SEQ ID NO: 575672 - DNA, 19 bp, Mus musculus
  siRNA target sequence for Lrp4 (NM_016869.1,3003-3021).
cagtccggaggagtatcta

SEQ ID NO: 575673 - DNA, 19 bp, Mus musculus
  siRNA target sequence for Lrp4 (NM_016869.1,3005-3023).
gtccggaggagtatctaga

SEQ ID NO: 575674 - DNA, 19 bp, Mus musculus
  siRNA target sequence for Lrp4 (NM_016869.1,3056-3074).
gccacatgggcaataaaat

SEQ ID NO: 575675 - DNA, 19 bp, Mus musculus
  siRNA target sequence for Lrp4 (NM_016869.1,3120-3138).
gcagtgccagtcctatttt

SEQ ID NO: 575676 - DNA, 19 bp, Mus musculus
  siRNA target sequence for Lrp4 (NM_016869.1,3125-3143).
gccagtcctattttgacat

SEQ ID NO: 575677 - DNA, 19 bp, Mus musculus
  siRNA target sequence for Lrp4 (NM_016869.1,3243-3261).
cggaggacagtggacatta

SEQ ID NO: 575678 - DNA, 19 bp, Mus musculus
  siRNA target sequence for Lrp4 (NM_016869.1,3250-3268).
cagtggacattatttggtt

SEQ ID NO: 575679 - DNA, 19 bp, Mus musculus
  siRNA target sequence for Lrp4 (NM_016869.1,3282-3300).
ctccgtctgcttttccaaa

SEQ ID NO: 575680 - DNA, 19 bp, Mus musculus
  siRNA target sequence for Lrp4 (NM_016869.1,3323-3341).
gcaatgtgtcttactttgt

SEQ ID NO: 575681 - DNA, 19 bp, Mus musculus
  siRNA target sequence for Lrp4 (NM_016869.1,3336-3354).
ctttgtgggctggattgaa

SEQ ID NO: 575682 - DNA, 19 bp, Mus musculus
  siRNA target sequence for Mcpt1 (NM_008570.1,563-581).
gtataagcattatgactat

SEQ ID NO: 575683 - DNA, 19 bp, Mus musculus
  siRNA target sequence for Mcpt2 (NM_008571.1,260-278).
gctcataatataaacaaga

SEQ ID NO: 575684 - DNA, 19 bp, Mus musculus
  siRNA target sequence for Mcpt2 (NM_008571.1,315-333).
catttgttcacccaaagtt

SEQ ID NO: 575685 - DNA, 19 bp, Mus musculus
  siRNA target sequence for Mcpt2 (NM_008571.1,337-355).
gtacctttcgggtttctat

SEQ ID NO: 575686 - DNA, 19 bp, Mus musculus
  siRNA target sequence for Mcpt2 (NM_008571.1,341-359).
ctttcgggtttctatgaca

SEQ ID NO: 575687 - DNA, 19 bp, Mus musculus
  siRNA target sequence for Mcpt2 (NM_008571.1,345-363).
cgggtttctatgacatcat

SEQ ID NO: 575688 - DNA, 19 bp, Mus musculus
  siRNA target sequence for Mcpt2 (NM_008571.1,490-508).
gaataaccctctatcagtt

SEQ ID NO: 575689 - DNA, 19 bp, Mus musculus
  siRNA target sequence for Mcpt2 (NM_008571.1,557-575).
gaccacagtgattacgatt

SEQ ID NO: 575690 - DNA, 19 bp, Mus musculus
  siRNA target sequence for Mcpt2 (NM_008571.1,559-577).
ccacagtgattacgattat

SEQ ID NO: 575691 - DNA, 19 bp, Mus musculus
  siRNA target sequence for Mcpt2 (NM_008571.1,562-580).
cagtgattacgattatcaa

SEQ ID NO: 575692 - DNA, 19 bp, Mus musculus
  siRNA target sequence for Mcpt2 (NM_008571.1,564-582).
gtgattacgattatcaact

SEQ ID NO: 575693 - DNA, 19 bp, Mus musculus
  siRNA target sequence for Mcpt2 (NM_008571.1,641-659).
ggacctctagtgtgtgata

SEQ ID NO: 575694 - DNA, 19 bp, Mus musculus
  siRNA target sequence for Mcpt2 (NM_008571.1,714-732).
cccgaatctcctattacct

SEQ ID NO: 575695 - DNA, 19 bp, Mus musculus
  siRNA target sequence for Mcpt4 (NM_010779.1,325-343).
gttcacccaaagtacaact

SEQ ID NO: 575696 - DNA, 19 bp, Mus musculus
  siRNA target sequence for Mcpt4 (NM_010779.1,405-423).
ctctgtgaatgtaattcct

SEQ ID NO: 575697 - DNA, 19 bp, Mus musculus
  siRNA target sequence for Mcpt4 (NM_010779.1,600-618).
gggcagtcccagaaagaaa

SEQ ID NO: 575698 - DNA, 19 bp, Mus musculus
  siRNA target sequence for Mcpt5 (NM_010780.1,127-145).
gaggatgcatcttcttact

SEQ ID NO: 575699 - DNA, 19 bp, Mus musculus
  siRNA target sequence for Mcpt5 (NM_010780.1,235-253).
catggcctatctggaaatt

SEQ ID NO: 575700 - DNA, 19 bp, Mus musculus
  siRNA target sequence for Mcpt5 (NM_010780.1,328-346).
ctgtgcgggaaggtctata

SEQ ID NO: 575701 - DNA, 19 bp, Mus musculus
  siRNA target sequence for Mcpt5 (NM_010780.1,333-351).
cgggaaggtctataacagt

SEQ ID NO: 575702 - DNA, 19 bp, Mus musculus
  siRNA target sequence for Mcpt5 (NM_010780.1,362-380).
gcccataacaaaacatcta

SEQ ID NO: 575703 - DNA, 19 bp, Mus musculus
  siRNA target sequence for Mcpt5 (NM_010780.1,363-381).
cccataacaaaacatctaa

SEQ ID NO: 575704 - DNA, 19 bp, Mus musculus
  siRNA target sequence for Mcpt5 (NM_010780.1,400-418).
gcttgaggtggaaaagcaa

SEQ ID NO: 575705 - DNA, 19 bp, Mus musculus
  siRNA target sequence for Mcpt5 (NM_010780.1,401-419).
cttgaggtggaaaagcaat

SEQ ID NO: 575706 - DNA, 19 bp, Mus musculus
  siRNA target sequence for Mcpt5 (NM_010780.1,518-536).
ccactctctgccaacttca

SEQ ID NO: 575707 - DNA, 19 bp, Mus musculus
  siRNA target sequence for Mcpt5 (NM_010780.1,579-597).
gcagaacaaacgtgaatga

SEQ ID NO: 575708 - DNA, 19 bp, Mus musculus
  siRNA target sequence for Mcpt5 (NM_010780.1,664-682).
caccagttttcgacacaat

SEQ ID NO: 575709 - DNA, 19 bp, Mus musculus
  siRNA target sequence for Mcpt5 (NM_010780.1,769-787).
ccaaggcattgcatcctat

SEQ ID NO: 575710 - DNA, 19 bp, Mus musculus
  siRNA target sequence for Mcpt5 (NM_010780.1,842-860).
ccctggatcaataagatct

SEQ ID NO: 575711 - DNA, 19 bp, Mus musculus
  siRNA target sequence for Mcpt8 (NM_008572.1,56-74).
gctgaaggaggggaaatca

SEQ ID NO: 575712 - DNA, 19 bp, Mus musculus
  siRNA target sequence for Mcpt8 (NM_008572.1,57-75).
ctgaaggaggggaaatcat

SEQ ID NO: 575713 - DNA, 19 bp, Mus musculus
  siRNA target sequence for Mcpt8 (NM_008572.1,106-124).
gccctatatggcatacata

SEQ ID NO: 575714 - DNA, 19 bp, Mus musculus
  siRNA target sequence for Mcpt8 (NM_008572.1,107-125).
ccctatatggcatacataa

SEQ ID NO: 575715 - DNA, 19 bp, Mus musculus
  siRNA target sequence for Mcpt8 (NM_008572.1,170-188).
gtggcaagagacatcgtaa

SEQ ID NO: 575716 - DNA, 19 bp, Mus musculus
  siRNA target sequence for Mcpt8 (NM_008572.1,173-191).
gcaagagacatcgtaatga

SEQ ID NO: 575717 - DNA, 19 bp, Mus musculus
  siRNA target sequence for Mcpt8 (NM_008572.1,195-213).
cagctcactgtaatggaaa

SEQ ID NO: 575718 - DNA, 19 bp, Mus musculus
  siRNA target sequence for Mcpt8 (NM_008572.1,202-220).
ctgtaatggaaaagttata

SEQ ID NO: 575719 - DNA, 19 bp, Mus musculus
  siRNA target sequence for Mcpt8 (NM_008572.1,293-311).
cctcacgagagctttgaca

SEQ ID NO: 575720 - DNA, 19 bp, Mus musculus
  siRNA target sequence for Mcpt8 (NM_008572.1,370-388).
cagtgctgtggatactatt

SEQ ID NO: 575721 - DNA, 19 bp, Mus musculus
  siRNA target sequence for Mcpt8 (NM_008572.1,472-490).
gtctgacacacttcaagaa

SEQ ID NO: 575722 - DNA, 19 bp, Mus musculus
  siRNA target sequence for Mcpt8 (NM_008572.1,525-543).
gcagcatgtcccaaaccta

SEQ ID NO: 575723 - DNA, 19 bp, Mus musculus
  siRNA target sequence for Mcpt8 (NM_008572.1,650-668).
gtcagttgtcgcttgtgta

SEQ ID NO: 575724 - DNA, 19 bp, Mus musculus
  siRNA target sequence for Mcpt8 (NM_008572.1,683-701).
cgggtattcaccagaattt

SEQ ID NO: 575725 - DNA, 19 bp, Mus musculus
  siRNA target sequence for Mcpt8 (NM_008572.1,686-704).
gtattcaccagaatttcca

SEQ ID NO: 575726 - DNA, 19 bp, Mus musculus
  siRNA target sequence for Mcpt8 (NM_008572.1,703-721).
cagctttatgccttggatt

SEQ ID NO: 575727 - DNA, 19 bp, Mus musculus
  siRNA target sequence for Mcpt8 (NM_008572.1,713-731).
ccttggattcggaaaacaa

SEQ ID NO: 575728 - DNA, 19 bp, Mus musculus
  siRNA target sequence for Mcpt8 (NM_008572.1,714-732).
cttggattcggaaaacaat

SEQ ID NO: 575729 - DNA, 19 bp, Mus musculus
  siRNA target sequence for Mpn (NM_175440.2,151-169).
gtgggcatccaaagatgtt

SEQ ID NO: 575730 - DNA, 19 bp, Mus musculus
  siRNA target sequence for Mpn (NM_175440.2,153-171).
gggcatccaaagatgttca

SEQ ID NO: 575731 - DNA, 19 bp, Mus musculus
  siRNA target sequence for Mpn (NM_175440.2,154-172).
ggcatccaaagatgttcaa

SEQ ID NO: 575732 - DNA, 19 bp, Mus musculus
  siRNA target sequence for Mpn (NM_175440.2,311-329).
cacttcggacatatccata

SEQ ID NO: 575733 - DNA, 19 bp, Mus musculus
  siRNA target sequence for Mpn (NM_175440.2,313-331).
cttcggacatatccatata

SEQ ID NO: 575734 - DNA, 19 bp, Mus musculus
  siRNA target sequence for Mpn (NM_175440.2,316-334).
cggacatatccatatacca

SEQ ID NO: 575735 - DNA, 19 bp, Mus musculus
  siRNA target sequence for Mpn (NM_175440.2,370-388).
gaccacacgccttgtatgt

SEQ ID NO: 575736 - DNA, 19 bp, Mus musculus
  siRNA target sequence for Mpn (NM_175440.2,471-489).
ccggtgaccttcaccaatt

SEQ ID NO: 575737 - DNA, 19 bp, Mus musculus
  siRNA target sequence for Mpn (NM_175440.2,472-490).
cggtgaccttcaccaatta

SEQ ID NO: 575738 - DNA, 19 bp, Mus musculus
  siRNA target sequence for Mpn (NM_175440.2,474-492).
gtgaccttcaccaattaca

SEQ ID NO: 575739 - DNA, 19 bp, Mus musculus
  siRNA target sequence for Mpn (NM_175440.2,511-529).
ctgatccctcggtcatctt

SEQ ID NO: 575740 - DNA, 19 bp, Mus musculus
  siRNA target sequence for Mpn (NM_175440.2,563-581).
gggcagccccagtgaacaa

SEQ ID NO: 575741 - DNA, 19 bp, Mus musculus
  siRNA target sequence for Mpn (NM_175440.2,650-668).
cctgctgtacaacaaagat

SEQ ID NO: 575742 - DNA, 19 bp, Mus musculus
  siRNA target sequence for Mpn (NM_175440.2,865-883).
gtgtgacttctcatcacaa

SEQ ID NO: 575743 - DNA, 19 bp, Mus musculus
  siRNA target sequence for Mpn (NM_175440.2,994-1012).
gcctggctgcccatgcaat

SEQ ID NO: 575744 - DNA, 19 bp, Mus musculus
  siRNA target sequence for NE (NM_015779.1,466-484).
ggcaggttgggcacaaaca

SEQ ID NO: 575745 - DNA, 19 bp, Mus musculus
  siRNA target sequence for NE (NM_015779.1,468-486).
caggttgggcacaaacaga

SEQ ID NO: 575746 - DNA, 19 bp, Mus musculus
  siRNA target sequence for NE (NM_015779.1,491-509).
cacccagtgtgctacaaga

SEQ ID NO: 575747 - DNA, 19 bp, Mus musculus
  siRNA target sequence for NE (NM_015779.1,718-736).
gattggatcaattccatta

SEQ ID NO: 575748 - DNA, 19 bp, Mus musculus
  siRNA target sequence for Ovtn (NM_172908.2,11-29).
gcaaggacaagctgatttt

SEQ ID NO: 575749 - DNA, 19 bp, Mus musculus
  siRNA target sequence for Ovtn (NM_172908.2,15-33).
ggacaagctgattttaata

SEQ ID NO: 575750 - DNA, 19 bp, Mus musculus
  siRNA target sequence for Ovtn (NM_172908.2,52-70).
gaacaaggtcattctgaaa

SEQ ID NO: 575751 - DNA, 19 bp, Mus musculus
  siRNA target sequence for Ovtn (NM_172908.2,171-189).
ggtggaaaagggttcctat

SEQ ID NO: 575752 - DNA, 19 bp, Mus musculus
  siRNA target sequence for Ovtn (NM_172908.2,195-213).
gcaagtgtctctgaaacaa

SEQ ID NO: 575753 - DNA, 19 bp, Mus musculus
  siRNA target sequence for Ovtn (NM_172908.2,283-301).
gctaacagaaacattgcat

SEQ ID NO: 575754 - DNA, 19 bp, Mus musculus
  siRNA target sequence for Ovtn (NM_172908.2,298-316).
gcattaactttgaatgtaa

SEQ ID NO: 575755 - DNA, 19 bp, Mus musculus
  siRNA target sequence for Ovtn (NM_172908.2,362-380).
cacttgccattgaaaccat

SEQ ID NO: 575756 - DNA, 19 bp, Mus musculus
  siRNA target sequence for Ovtn (NM_172908.2,505-523).
cactttaatgctggattta

SEQ ID NO: 575757 - DNA, 19 bp, Mus musculus
  siRNA target sequence for Ovtn (NM_172908.2,626-644).
ccgttctgttgaccttaaa

SEQ ID NO: 575758 - DNA, 19 bp, Mus musculus
  siRNA target sequence for Ovtn (NM_172908.2,715-733).
gattcaggagggtcactta

SEQ ID NO: 575759 - DNA, 19 bp, Mus musculus
  siRNA target sequence for Ovtn (NM_172908.2,763-781).
ctggctggagtgacttctt

SEQ ID NO: 575760 - DNA, 19 bp, Mus musculus
  siRNA target sequence for Ovtn (NM_172908.2,874-892).
ccctggatcctcaaacata

SEQ ID NO: 575761 - DNA, 19 bp, Mus musculus
  siRNA target sequence for Ovtn (NM_172908.2,875-893).
cctggatcctcaaacatat

SEQ ID NO: 575762 - DNA, 19 bp, Mus musculus
  siRNA target sequence for Ovtn (NM_172908.2,989-1007).
gcctccacctgtactatga

SEQ ID NO: 575763 - DNA, 19 bp, Mus musculus
  siRNA target sequence for Ovtn (NM_172908.2,1091-1109).
cttgtcaccacaattacct

SEQ ID NO: 575764 - DNA, 19 bp, Mus musculus
  siRNA target sequence for Ovtn (NM_172908.2,1107-1125).
cctggcaatgtactcttta

SEQ ID NO: 575765 - DNA, 19 bp, Mus musculus
  siRNA target sequence for Ovtn (NM_172908.2,1110-1128).
ggcaatgtactctttagaa

SEQ ID NO: 575766 - DNA, 19 bp, Mus musculus
  siRNA target sequence for Ovtn (NM_172908.2,1112-1130).
caatgtactctttagaaga

SEQ ID NO: 575767 - DNA, 19 bp, Mus musculus
  siRNA target sequence for Ovtn (NM_172908.2,1231-1249).
gccactgggtttaatctca

SEQ ID NO: 575768 - DNA, 19 bp, Mus musculus
  siRNA target sequence for Ovtn (NM_172908.2,1237-1255).
gggtttaatctcacctata

SEQ ID NO: 575769 - DNA, 19 bp, Mus musculus
  siRNA target sequence for Ovtn (NM_172908.2,1287-1305).
cggctgcaggtctctaact

SEQ ID NO: 575770 - DNA, 19 bp, Mus musculus
  siRNA target sequence for Ovtn (NM_172908.2,1325-1343).
ctatacagagtcttcacta

SEQ ID NO: 575771 - DNA, 19 bp, Mus musculus
  siRNA target sequence for Ovtn (NM_172908.2,1345-1363).
cctgaagactacagtaaca

SEQ ID NO: 575772 - DNA, 19 bp, Mus musculus
  siRNA target sequence for Ovtn (NM_172908.2,1366-1384).
gctagctgtacctggattt

SEQ ID NO: 575773 - DNA, 19 bp, Mus musculus
  siRNA target sequence for Ovtn (NM_172908.2,1367-1385).
ctagctgtacctggatttt

SEQ ID NO: 575774 - DNA, 19 bp, Mus musculus
  siRNA target sequence for Ovtn (NM_172908.2,1508-1526).
ctcggttctgcgactatgt

SEQ ID NO: 575775 - DNA, 19 bp, Mus musculus
  siRNA target sequence for Ovtn (NM_172908.2,1510-1528).
cggttctgcgactatgtga

SEQ ID NO: 575776 - DNA, 19 bp, Mus musculus
  siRNA target sequence for Ovtn (NM_172908.2,1511-1529).
ggttctgcgactatgtgat

SEQ ID NO: 575777 - DNA, 19 bp, Mus musculus
  siRNA target sequence for Ovtn (NM_172908.2,1512-1530).
gttctgcgactatgtgata

SEQ ID NO: 575778 - DNA, 19 bp, Mus musculus
  siRNA target sequence for Ovtn (NM_172908.2,1566-1584).
catcagcttccaatcagat

SEQ ID NO: 575779 - DNA, 19 bp, Mus musculus
  siRNA target sequence for Ovtn (NM_172908.2,1703-1721).
gagcaatggaaattttcga

SEQ ID NO: 575780 - DNA, 19 bp, Mus musculus
  siRNA target sequence for Ovtn (NM_172908.2,1767-1785).
cggggagatgccagctatt

SEQ ID NO: 575781 - DNA, 19 bp, Mus musculus
  siRNA target sequence for Pgm5 (NM_175013.1,237-255).
cagctggtgggatcattct

SEQ ID NO: 575782 - DNA, 19 bp, Mus musculus
  siRNA target sequence for Pgm5 (NM_175013.1,239-257).
gctggtgggatcattctaa

SEQ ID NO: 575783 - DNA, 19 bp, Mus musculus
  siRNA target sequence for Pgm5 (NM_175013.1,288-306).
gagagtttggagtgaagtt

SEQ ID NO: 575784 - DNA, 19 bp, Mus musculus
  siRNA target sequence for Pgm5 (NM_175013.1,334-352).
ggaccccgttgacatctat

SEQ ID NO: 575785 - DNA, 19 bp, Mus musculus
  siRNA target sequence for Pgm5 (NM_175013.1,338-356).
cccgttgacatctatctca

SEQ ID NO: 575786 - DNA, 19 bp, Mus musculus
  siRNA target sequence for Pgm5 (NM_175013.1,339-357).
ccgttgacatctatctcaa

SEQ ID NO: 575787 - DNA, 19 bp, Mus musculus
  siRNA target sequence for Pgm5 (NM_175013.1,362-380).
ctccggaatatctttgact

SEQ ID NO: 575788 - DNA, 19 bp, Mus musculus
  siRNA target sequence for Pgm5 (NM_175013.1,427-445).
ccgtgttgatgctatgcat

SEQ ID NO: 575789 - DNA, 19 bp, Mus musculus
  siRNA target sequence for Pgm5 (NM_175013.1,449-467).
gttatgggaccctatgtaa

SEQ ID NO: 575790 - DNA, 19 bp, Mus musculus
  siRNA target sequence for Pgm5 (NM_175013.1,454-472).
gggaccctatgtaagaaaa

SEQ ID NO: 575791 - DNA, 19 bp, Mus musculus
  siRNA target sequence for Pgm5 (NM_175013.1,459-477).
cctatgtaagaaaagttct

SEQ ID NO: 575792 - DNA, 19 bp, Mus musculus
  siRNA target sequence for Pgm5 (NM_175013.1,497-515).
ccagccaactccgcaataa

SEQ ID NO: 575793 - DNA, 19 bp, Mus musculus
  siRNA target sequence for Pgm5 (NM_175013.1,498-516).
cagccaactccgcaataaa

SEQ ID NO: 575794 - DNA, 19 bp, Mus musculus
  siRNA target sequence for Pgm5 (NM_175013.1,500-518).
gccaactccgcaataaact

SEQ ID NO: 575795 - DNA, 19 bp, Mus musculus
  siRNA target sequence for Pgm5 (NM_175013.1,519-537).
gtgtcccactagaagactt

SEQ ID NO: 575796 - DNA, 19 bp, Mus musculus
  siRNA target sequence for Pgm5 (NM_175013.1,557-575).
ccaaacctgacctatgcaa

SEQ ID NO: 575797 - DNA, 19 bp, Mus musculus
  siRNA target sequence for Pgm5 (NM_175013.1,678-696).
cacgtgatggaagaaacat

SEQ ID NO: 575798 - DNA, 19 bp, Mus musculus
  siRNA target sequence for Plat (NM_008872.1,214-232).
gagccaacgcagacaactt

SEQ ID NO: 575799 - DNA, 19 bp, Mus musculus
  siRNA target sequence for Plat (NM_008872.1,269-287).
gaagcagccgggtggaata

SEQ ID NO: 575800 - DNA, 19 bp, Mus musculus
  siRNA target sequence for Plat (NM_008872.1,345-363).
cgaaccaagatgcttcaat

SEQ ID NO: 575801 - DNA, 19 bp, Mus musculus
  siRNA target sequence for Plat (NM_008872.1,376-394).
cagcaggccctgtatttct

SEQ ID NO: 575802 - DNA, 19 bp, Mus musculus
  siRNA target sequence for Plat (NM_008872.1,552-570).
gtcgctgaagccctacaat

SEQ ID NO: 575803 - DNA, 19 bp, Mus musculus
  siRNA target sequence for Plat (NM_008872.1,646-664).
ccctggtgctatgtcttta

SEQ ID NO: 575804 - DNA, 19 bp, Mus musculus
  siRNA target sequence for Plat (NM_008872.1,647-665).
cctggtgctatgtctttaa

SEQ ID NO: 575805 - DNA, 19 bp, Mus musculus
  siRNA target sequence for Plat (NM_008872.1,814-832).
gtcctcatgggcaagagtt

SEQ ID NO: 575806 - DNA, 19 bp, Mus musculus
  siRNA target sequence for Plat (NM_008872.1,817-835).
ctcatgggcaagagttaca

SEQ ID NO: 575807 - DNA, 19 bp, Mus musculus
  siRNA target sequence for Plat (NM_008872.1,819-837).
catgggcaagagttacaca

SEQ ID NO: 575808 - DNA, 19 bp, Mus musculus
  siRNA target sequence for Plat (NM_008872.1,999-1017).
caaacggcctcagtttaga

SEQ ID NO: 575809 - DNA, 19 bp, Mus musculus
  siRNA target sequence for Plat (NM_008872.1,1003-1021).
cggcctcagtttagaatta

SEQ ID NO: 575810 - DNA, 19 bp, Mus musculus
  siRNA target sequence for Plat (NM_008872.1,1067-1085).
ccatctttgtcaagaacaa

SEQ ID NO: 575811 - DNA, 19 bp, Mus musculus
  siRNA target sequence for Plat (NM_008872.1,1195-1213).
gtggtcttgggcagaacat

SEQ ID NO: 575812 - DNA, 19 bp, Mus musculus
  siRNA target sequence for Plat (NM_008872.1,1263-1281).
catagtccatgaggaattt

SEQ ID NO: 575813 - DNA, 19 bp, Mus musculus
  siRNA target sequence for Plat (NM_008872.1,1518-1536).
ctcacagcatctgtttaat

SEQ ID NO: 575814 - DNA, 19 bp, Mus musculus
  siRNA target sequence for Plat (NM_008872.1,1724-1742).
caaaggttacgaattacct

SEQ ID NO: 575815 - DNA, 19 bp, Mus musculus
  siRNA target sequence for Plat (NM_008872.1,1753-1771).
cacgacaacatgaagcaat

SEQ ID NO: 575816 - DNA, 19 bp, Mus musculus
  siRNA target sequence for Plau (NM_008873.2,90-108).
gcgccttggtggtgaaaaa

SEQ ID NO: 575817 - DNA, 19 bp, Mus musculus
  siRNA target sequence for Plau (NM_008873.2,94-112).
cttggtggtgaaaaactct

SEQ ID NO: 575818 - DNA, 19 bp, Mus musculus
  siRNA target sequence for Plau (NM_008873.2,128-146).
cttggagctcctgatgaat

SEQ ID NO: 575819 - DNA, 19 bp, Mus musculus
  siRNA target sequence for Plau (NM_008873.2,131-149).
ggagctcctgatgaatcaa

SEQ ID NO: 575820 - DNA, 19 bp, Mus musculus
  siRNA target sequence for Plau (NM_008873.2,173-191).
gtatgcgtgtcctacaagt

SEQ ID NO: 575821 - DNA, 19 bp, Mus musculus
  siRNA target sequence for Plau (NM_008873.2,216-234).
gctgcccaaggaaattcca

SEQ ID NO: 575822 - DNA, 19 bp, Mus musculus
  siRNA target sequence for Plau (NM_008873.2,246-264).
gtgagatagatgcatcaaa

SEQ ID NO: 575823 - DNA, 19 bp, Mus musculus
  siRNA target sequence for Plau (NM_008873.2,401-419).
ctaggcctggggaaacaca

SEQ ID NO: 575824 - DNA, 19 bp, Mus musculus
  siRNA target sequence for Plau (NM_008873.2,730-748).
cgcacactgcttcattcaa

SEQ ID NO: 575825 - DNA, 19 bp, Mus musculus
  siRNA target sequence for Plau (NM_008873.2,789-807).
cgaaggagagctcctataa

SEQ ID NO: 575826 - DNA, 19 bp, Mus musculus
  siRNA target sequence for Plau (NM_008873.2,793-811).
ggagagctcctataatcct

SEQ ID NO: 575827 - DNA, 19 bp, Mus musculus
  siRNA target sequence for Plau (NM_008873.2,839-857).
ctcatcttgcacgaatact

SEQ ID NO: 575828 - DNA, 19 bp, Mus musculus
  siRNA target sequence for Plau (NM_008873.2,866-884).
gacagcctggcctaccata

SEQ ID NO: 575829 - DNA, 19 bp, Mus musculus
  siRNA target sequence for Plau (NM_008873.2,868-886).
cagcctggcctaccataat

SEQ ID NO: 575830 - DNA, 19 bp, Mus musculus
  siRNA target sequence for Plau (NM_008873.2,871-889).
cctggcctaccataatgat

SEQ ID NO: 575831 - DNA, 19 bp, Mus musculus
  siRNA target sequence for Plau (NM_008873.2,872-890).
ctggcctaccataatgata

SEQ ID NO: 575832 - DNA, 19 bp, Mus musculus
  siRNA target sequence for Plau (NM_008873.2,874-892).
ggcctaccataatgatatt

SEQ ID NO: 575833 - DNA, 19 bp, Mus musculus
  siRNA target sequence for Plau (NM_008873.2,1035-1053).
gtgactatctctatccaaa

SEQ ID NO: 575834 - DNA, 19 bp, Mus musculus
  siRNA target sequence for Plau (NM_008873.2,1069-1087).
cgtcgtaaagcttgtttct

SEQ ID NO: 575835 - DNA, 19 bp, Mus musculus
  siRNA target sequence for Plau (NM_008873.2,1072-1090).
cgtaaagcttgtttctcat

SEQ ID NO: 575836 - DNA, 19 bp, Mus musculus
  siRNA target sequence for Plau (NM_008873.2,1098-1116).
gtatgcagccccactacta

SEQ ID NO: 575837 - DNA, 19 bp, Mus musculus
  siRNA target sequence for Plau (NM_008873.2,1109-1127).
cactactatggctctgaaa

SEQ ID NO: 575838 - DNA, 19 bp, Mus musculus
  siRNA target sequence for Plau (NM_008873.2,1118-1136).
ggctctgaaattaattata

SEQ ID NO: 575839 - DNA, 19 bp, Mus musculus
  siRNA target sequence for Plau (NM_008873.2,1156-1174).
cccagagtggaaaacagat

SEQ ID NO: 575840 - DNA, 19 bp, Mus musculus
  siRNA target sequence for Plau (NM_008873.2,1193-1211).
ggaggaccgcttatctgta

SEQ ID NO: 575841 - DNA, 19 bp, Mus musculus
  siRNA target sequence for Plau (NM_008873.2,1194-1212).
gaggaccgcttatctgtaa

SEQ ID NO: 575842 - DNA, 19 bp, Mus musculus
  siRNA target sequence for Plau (NM_008873.2,1196-1214).
ggaccgcttatctgtaaca

SEQ ID NO: 575843 - DNA, 19 bp, Mus musculus
  siRNA target sequence for Plau (NM_008873.2,1197-1215).
gaccgcttatctgtaacat

SEQ ID NO: 575844 - DNA, 19 bp, Mus musculus
  siRNA target sequence for Plau (NM_008873.2,1256-1274).
cgaggatgtgcagagaaaa

SEQ ID NO: 575845 - DNA, 19 bp, Mus musculus
  siRNA target sequence for Prss12 (NM_008939.1,612-630).
gagggcagccgcacaactt

SEQ ID NO: 575846 - DNA, 19 bp, Mus musculus
  siRNA target sequence for Prss12 (NM_008939.1,614-632).
gggcagccgcacaacttct

SEQ ID NO: 575847 - DNA, 19 bp, Mus musculus
  siRNA target sequence for Prss12 (NM_008939.1,839-857).
gacgcagacgtcatctgta

SEQ ID NO: 575848 - DNA, 19 bp, Mus musculus
  siRNA target sequence for Prss12 (NM_008939.1,888-906).
catggcatcaggcacattt

SEQ ID NO: 575849 - DNA, 19 bp, Mus musculus
  siRNA target sequence for Prss12 (NM_008939.1,911-929).
gaaggatctggcccaatat

SEQ ID NO: 575850 - DNA, 19 bp, Mus musculus
  siRNA target sequence for Prss12 (NM_008939.1,951-969).
ccggaaacgagctgtcaat

SEQ ID NO: 575851 - DNA, 19 bp, Mus musculus
  siRNA target sequence for Prss12 (NM_008939.1,952-970).
cggaaacgagctgtcaatt

SEQ ID NO: 575852 - DNA, 19 bp, Mus musculus
  siRNA target sequence for Prss12 (NM_008939.1,987-1005).
gttcctggggcgaacataa

SEQ ID NO: 575853 - DNA, 19 bp, Mus musculus
  siRNA target sequence for Prss12 (NM_008939.1,991-1009).
ctggggcgaacataactgt

SEQ ID NO: 575854 - DNA, 19 bp, Mus musculus
  siRNA target sequence for Prss12 (NM_008939.1,1176-1194).
gtcgactgctgggatttaa

SEQ ID NO: 575855 - DNA, 19 bp, Mus musculus
  siRNA target sequence for Prss12 (NM_008939.1,1179-1197).
gactgctgggatttaaata

SEQ ID NO: 575856 - DNA, 19 bp, Mus musculus
  siRNA target sequence for Prss12 (NM_008939.1,1436-1454).
cgagtggaggtttttgtca

SEQ ID NO: 575857 - DNA, 19 bp, Mus musculus
  siRNA target sequence for Prss12 (NM_008939.1,1483-1501).
cggatggaccgataagcat

SEQ ID NO: 575858 - DNA, 19 bp, Mus musculus
  siRNA target sequence for Prss12 (NM_008939.1,1515-1533).
gccggcagcttggctataa

SEQ ID NO: 575859 - DNA, 19 bp, Mus musculus
  siRNA target sequence for Prss12 (NM_008939.1,1580-1598).
ggccccatccacatggata

SEQ ID NO: 575860 - DNA, 19 bp, Mus musculus
  siRNA target sequence for Prss12 (NM_008939.1,1582-1600).
ccccatccacatggataat

SEQ ID NO: 575861 - DNA, 19 bp, Mus musculus
  siRNA target sequence for Prss12 (NM_008939.1,1584-1602).
ccatccacatggataatgt

SEQ ID NO: 575862 - DNA, 19 bp, Mus musculus
  siRNA target sequence for Prss12 (NM_008939.1,1636-1654).
ctgtgtcaaacaagacatt

SEQ ID NO: 575863 - DNA, 19 bp, Mus musculus
  siRNA target sequence for Prss12 (NM_008939.1,1640-1658).
gtcaaacaagacattggaa

SEQ ID NO: 575864 - DNA, 19 bp, Mus musculus
  siRNA target sequence for Prss12 (NM_008939.1,1698-1716).
gtgactatttagagaagaa

SEQ ID NO: 575865 - DNA, 19 bp, Mus musculus
  siRNA target sequence for Prss12 (NM_008939.1,1718-1736).
gcatcaagtagtggtaata

SEQ ID NO: 575866 - DNA, 19 bp, Mus musculus
  siRNA target sequence for Prss12 (NM_008939.1,1719-1737).
catcaagtagtggtaataa

SEQ ID NO: 575867 - DNA, 19 bp, Mus musculus
  siRNA target sequence for Prss12 (NM_008939.1,1725-1743).
gtagtggtaataaagagat

SEQ ID NO: 575868 - DNA, 19 bp, Mus musculus
  siRNA target sequence for Prss12 (NM_008939.1,1795-1813).
cattggtgggaacaattct

SEQ ID NO: 575869 - DNA, 19 bp, Mus musculus
  siRNA target sequence for Prss12 (NM_008939.1,1799-1817).
ggtgggaacaattctttaa

SEQ ID NO: 575870 - DNA, 19 bp, Mus musculus
  siRNA target sequence for Prss12 (NM_008939.1,1926-1944).
cacactgcttcaaaaggta

SEQ ID NO: 575871 - DNA, 19 bp, Mus musculus
  siRNA target sequence for Prss12 (NM_008939.1,1973-1991).
cgagttggggattatcata

SEQ ID NO: 575872 - DNA, 19 bp, Mus musculus
  siRNA target sequence for Prss12 (NM_008939.1,1996-2014).
ggtaccagaggagtttgaa

SEQ ID NO: 575873 - DNA, 19 bp, Mus musculus
  siRNA target sequence for Prss12 (NM_008939.1,2078-2096).
gacattgccctggttagat

SEQ ID NO: 575874 - DNA, 19 bp, Mus musculus
  siRNA target sequence for Prss12 (NM_008939.1,2111-2129).
gagcaatgtgccagactaa

SEQ ID NO: 575875 - DNA, 19 bp, Mus musculus
  siRNA target sequence for Prss12 (NM_008939.1,2124-2142).
gactaagcacccacgtttt

SEQ ID NO: 575876 - DNA, 19 bp, Mus musculus
  siRNA target sequence for Prss12 (NM_008939.1,2137-2155).
cgttttgccagcctgttta

SEQ ID NO: 575877 - DNA, 19 bp, Mus musculus
  siRNA target sequence for Prss12 (NM_008939.1,2186-2204).
gcctccaactgtcacataa

SEQ ID NO: 575878 - DNA, 19 bp, Mus musculus
  siRNA target sequence for Prss12 (NM_008939.1,2222-2240).
ggtcgtgcctactcaagaa

SEQ ID NO: 575879 - DNA, 19 bp, Mus musculus
  siRNA target sequence for Prss12 (NM_008939.1,2230-2248).
ctactcaagaactctacaa

SEQ ID NO: 575880 - DNA, 19 bp, Mus musculus
  siRNA target sequence for Prss12 (NM_008939.1,2271-2289).
ccaagaggttttgtaaaga

SEQ ID NO: 575881 - DNA, 19 bp, Mus musculus
  siRNA target sequence for Prss12 (NM_008939.1,2290-2308).
gaggtacaagggactattt

SEQ ID NO: 575882 - DNA, 19 bp, Mus musculus
  siRNA target sequence for Prss12 (NM_008939.1,2491-2509).
cgcctttgtaccttggata

SEQ ID NO: 575883 - DNA, 19 bp, Mus musculus
  siRNA target sequence for Prss12 (NM_008939.1,2492-2510).
gcctttgtaccttggataa

SEQ ID NO: 575884 - DNA, 19 bp, Mus musculus
  siRNA target sequence for Prss12 (NM_008939.1,2493-2511).
cctttgtaccttggataaa

SEQ ID NO: 575885 - DNA, 19 bp, Mus musculus
  siRNA target sequence for Prss18 (NM_011177.1,255-273).
gtgcttggttcttgctaaa

SEQ ID NO: 575886 - DNA, 19 bp, Mus musculus
  siRNA target sequence for Prss18 (NM_011177.1,258-276).
cttggttcttgctaaatca

SEQ ID NO: 575887 - DNA, 19 bp, Mus musculus
  siRNA target sequence for Prss18 (NM_011177.1,307-325).
catggaggcccgtgtttga

SEQ ID NO: 575888 - DNA, 19 bp, Mus musculus
  siRNA target sequence for Prss18 (NM_011177.1,434-452).
cgaatctgcaggtgatctt

SEQ ID NO: 575889 - DNA, 19 bp, Mus musculus
  siRNA target sequence for Prss18 (NM_011177.1,471-489).
gcaaacagagactttccaa

SEQ ID NO: 575890 - DNA, 19 bp, Mus musculus
  siRNA target sequence for Prss18 (NM_011177.1,498-516).
ctcagtggacaggactatt

SEQ ID NO: 575891 - DNA, 19 bp, Mus musculus
  siRNA target sequence for Prss18 (NM_011177.1,500-518).
cagtggacaggactattgt

SEQ ID NO: 575892 - DNA, 19 bp, Mus musculus
  siRNA target sequence for Prss18 (NM_011177.1,558-576).
catgatggtgcatctgaaa

SEQ ID NO: 575893 - DNA, 19 bp, Mus musculus
  siRNA target sequence for Prss18 (NM_011177.1,564-582).
ggtgcatctgaaaaatcca

SEQ ID NO: 575894 - DNA, 19 bp, Mus musculus
  siRNA target sequence for Prss18 (NM_011177.1,580-598).
ccagtcaaattctctaaaa

SEQ ID NO: 575895 - DNA, 19 bp, Mus musculus
  siRNA target sequence for Prss18 (NM_011177.1,581-599).
cagtcaaattctctaaaaa

SEQ ID NO: 575896 - DNA, 19 bp, Mus musculus
  siRNA target sequence for Prss18 (NM_011177.1,604-622).
cagcctctgcccttgaaga

SEQ ID NO: 575897 - DNA, 19 bp, Mus musculus
  siRNA target sequence for Prss18 (NM_011177.1,610-628).
ctgcccttgaagaatgact

SEQ ID NO: 575898 - DNA, 19 bp, Mus musculus
  siRNA target sequence for Prss18 (NM_011177.1,666-684).
gggcaagatggaaaatggt

SEQ ID NO: 575899 - DNA, 19 bp, Mus musculus
  siRNA target sequence for Prss18 (NM_011177.1,683-701).
gtgacttcccagataccat

SEQ ID NO: 575900 - DNA, 19 bp, Mus musculus
  siRNA target sequence for Prss18 (NM_011177.1,780-798).
gtgcgcaggcgacatgaaa

SEQ ID NO: 575901 - DNA, 19 bp, Mus musculus
  siRNA target sequence for Prss18 (NM_011177.1,782-800).
gcgcaggcgacatgaaaga

SEQ ID NO: 575902 - DNA, 19 bp, Mus musculus
  siRNA target sequence for Prss18 (NM_011177.1,783-801).
cgcaggcgacatgaaagaa

SEQ ID NO: 575903 - DNA, 19 bp, Mus musculus
  siRNA target sequence for Prss18 (NM_011177.1,920-938).
ccgatgtctgcactcatat

SEQ ID NO: 575904 - DNA, 19 bp, Mus musculus
  siRNA target sequence for Prss18 (NM_011177.1,922-940).
gatgtctgcactcatatca

SEQ ID NO: 575905 - DNA, 19 bp, Mus musculus
  siRNA target sequence for Prss18 (NM_011177.1,925-943).
gtctgcactcatatcagat

SEQ ID NO: 575906 - DNA, 19 bp, Mus musculus
  siRNA target sequence for Prss18 (NM_011177.1,934-952).
catatcagatggatccaaa

SEQ ID NO: 575907 - DNA, 19 bp, Mus musculus
  siRNA target sequence for Prss19 (NM_008940.1,588-606).
ggaaggtcgagagtgtata

SEQ ID NO: 575908 - DNA, 19 bp, Mus musculus
  siRNA target sequence for Prss19 (NM_008940.1,832-850).
gatcacagtcacgatataa

SEQ ID NO: 575909 - DNA, 19 bp, Mus musculus
  siRNA target sequence for Prss19 (NM_008940.1,931-949).
ggccagaagtgcatcatat

SEQ ID NO: 575910 - DNA, 19 bp, Mus musculus
  siRNA target sequence for Prss19 (NM_008940.1,933-951).
ccagaagtgcatcatatca

SEQ ID NO: 575911 - DNA, 19 bp, Mus musculus
  siRNA target sequence for Prss19 (NM_008940.1,999-1017).
caactgtgcggaagtgaaa

SEQ ID NO: 575912 - DNA, 19 bp, Mus musculus
  siRNA target sequence for Prss19 (NM_008940.1,1004-1022).
gtgcggaagtgaaaatcta

SEQ ID NO: 575913 - DNA, 19 bp, Mus musculus
  siRNA target sequence for Prss19 (NM_008940.1,1006-1024).
gcggaagtgaaaatctatt

SEQ ID NO: 575914 - DNA, 19 bp, Mus musculus
  siRNA target sequence for Prss21 (NM_020487.2,75-93).
gcggcgatggccttacagt

SEQ ID NO: 575915 - DNA, 19 bp, Mus musculus
  siRNA target sequence for Prss21 (NM_020487.2,83-101).
ggccttacagtcaacctat

SEQ ID NO: 575916 - DNA, 19 bp, Mus musculus
  siRNA target sequence for Prss21 (NM_020487.2,84-102).
gccttacagtcaacctatt

SEQ ID NO: 575917 - DNA, 19 bp, Mus musculus
  siRNA target sequence for Prss21 (NM_020487.2,85-103).
ccttacagtcaacctattt

SEQ ID NO: 575918 - DNA, 19 bp, Mus musculus
  siRNA target sequence for Prss21 (NM_020487.2,132-150).
caggaacccgacctattgt

SEQ ID NO: 575919 - DNA, 19 bp, Mus musculus
  siRNA target sequence for Prss21 (NM_020487.2,134-152).
ggaacccgacctattgtca

SEQ ID NO: 575920 - DNA, 19 bp, Mus musculus
  siRNA target sequence for Prss21 (NM_020487.2,310-328).
gcttccaaaaggataacga

SEQ ID NO: 575921 - DNA, 19 bp, Mus musculus
  siRNA target sequence for Prss21 (NM_020487.2,311-329).
cttccaaaaggataacgat

SEQ ID NO: 575922 - DNA, 19 bp, Mus musculus
  siRNA target sequence for Prss21 (NM_020487.2,321-339).
gataacgatccttttgact

SEQ ID NO: 575923 - DNA, 19 bp, Mus musculus
  siRNA target sequence for Prss21 (NM_020487.2,395-413).
ctattccaaccgttaccaa

SEQ ID NO: 575924 - DNA, 19 bp, Mus musculus
  siRNA target sequence for Prss21 (NM_020487.2,400-418).
ccaaccgttaccaaataga

SEQ ID NO: 575925 - DNA, 19 bp, Mus musculus
  siRNA target sequence for Prss21 (NM_020487.2,401-419).
caaccgttaccaaatagaa

SEQ ID NO: 575926 - DNA, 19 bp, Mus musculus
  siRNA target sequence for Prss21 (NM_020487.2,404-422).
ccgttaccaaatagaagat

SEQ ID NO: 575927 - DNA, 19 bp, Mus musculus
  siRNA target sequence for Prss21 (NM_020487.2,405-423).
cgttaccaaatagaagata

SEQ ID NO: 575928 - DNA, 19 bp, Mus musculus
  siRNA target sequence for Prss21 (NM_020487.2,406-424).
gttaccaaatagaagatat

SEQ ID NO: 575929 - DNA, 19 bp, Mus musculus
  siRNA target sequence for Prss21 (NM_020487.2,447-465).
gagcagtatcccaatgaca

SEQ ID NO: 575930 - DNA, 19 bp, Mus musculus
  siRNA target sequence for Prss21 (NM_020487.2,487-505).
ctccagtcacctacaataa

SEQ ID NO: 575931 - DNA, 19 bp, Mus musculus
  siRNA target sequence for Prss21 (NM_020487.2,530-548).
gaactccacgtacaagttt

SEQ ID NO: 575932 - DNA, 19 bp, Mus musculus
  siRNA target sequence for Prss21 (NM_020487.2,658-676).
gcatgtgtaaccatatgta

SEQ ID NO: 575933 - DNA, 19 bp, Mus musculus
  siRNA target sequence for Prss21 (NM_020487.2,687-705).
gacttccgcacgaacatct

SEQ ID NO: 575934 - DNA, 19 bp, Mus musculus
  siRNA target sequence for Prss21 (NM_020487.2,852-870).
cgccctggagtctatacca

SEQ ID NO: 575935 - DNA, 19 bp, Mus musculus
  siRNA target sequence for Prss25 (NM_019752.2,572-590).
ccccggagccagtacaatt

SEQ ID NO: 575936 - DNA, 19 bp, Mus musculus
  siRNA target sequence for Prss25 (NM_019752.2,573-591).
cccggagccagtacaattt

SEQ ID NO: 575937 - DNA, 19 bp, Mus musculus
  siRNA target sequence for Prss25 (NM_019752.2,575-593).
cggagccagtacaatttca

SEQ ID NO: 575938 - DNA, 19 bp, Mus musculus
  siRNA target sequence for Prss25 (NM_019752.2,617-635).
gcccctgctgtggtctata

SEQ ID NO: 575939 - DNA, 19 bp, Mus musculus
  siRNA target sequence for Prss25 (NM_019752.2,618-636).
cccctgctgtggtctatat

SEQ ID NO: 575940 - DNA, 19 bp, Mus musculus
  siRNA target sequence for Prss25 (NM_019752.2,668-686).
cgtgaagtccccatctcaa

SEQ ID NO: 575941 - DNA, 19 bp, Mus musculus
  siRNA target sequence for Prss25 (NM_019752.2,773-791).
ctgcctagcggggatactt

SEQ ID NO: 575942 - DNA, 19 bp, Mus musculus
  siRNA target sequence for Prss25 (NM_019752.2,775-793).
gcctagcggggatacttat

SEQ ID NO: 575943 - DNA, 19 bp, Mus musculus
  siRNA target sequence for Prss25 (NM_019752.2,777-795).
ctagcggggatacttatga

SEQ ID NO: 575944 - DNA, 19 bp, Mus musculus
  siRNA target sequence for Prss25 (NM_019752.2,814-832).
ggatcccgtagcagacatt

SEQ ID NO: 575945 - DNA, 19 bp, Mus musculus
  siRNA target sequence for Prss25 (NM_019752.2,833-851).
gccacactgaggattcaaa

SEQ ID NO: 575946 - DNA, 19 bp, Mus musculus
  siRNA target sequence for Prss25 (NM_019752.2,898-916).
ccggcaaggggagtttgtt

SEQ ID NO: 575947 - DNA, 19 bp, Mus musculus
  siRNA target sequence for Prss25 (NM_019752.2,900-918).
ggcaaggggagtttgttgt

SEQ ID NO: 575948 - DNA, 19 bp, Mus musculus
  siRNA target sequence for Prss25 (NM_019752.2,941-959).
ctgcagaacacgatcacat

SEQ ID NO: 575949 - DNA, 19 bp, Mus musculus
  siRNA target sequence for Prss25 (NM_019752.2,951-969).
cgatcacatctggtattgt

SEQ ID NO: 575950 - DNA, 19 bp, Mus musculus
  siRNA target sequence for Prss25 (NM_019752.2,1033-1051).
gaccgatgcagctattgat

SEQ ID NO: 575951 - DNA, 19 bp, Mus musculus
  siRNA target sequence for Prss25 (NM_019752.2,1035-1053).
ccgatgcagctattgattt

SEQ ID NO: 575952 - DNA, 19 bp, Mus musculus
  siRNA target sequence for Prss25 (NM_019752.2,1065-1083).
gtggtcccctggttaacct

SEQ ID NO: 575953 - DNA, 19 bp, Mus musculus
  siRNA target sequence for Prss25 (NM_019752.2,1224-1242).
gctacattggagtgatgat

SEQ ID NO: 575954 - DNA, 19 bp, Mus musculus
  siRNA target sequence for Prss25 (NM_019752.2,1309-1327).
gcatggtgtcctcattcat

SEQ ID NO: 575955 - DNA, 19 bp, Mus musculus
  siRNA target sequence for Prss25 (NM_019752.2,1314-1332).
gtgtcctcattcataaagt

SEQ ID NO: 575956 - DNA, 19 bp, Mus musculus
  siRNA target sequence for Prss25 (NM_019752.2,1395-1413).
gggagaaattggcacaaaa

SEQ ID NO: 575957 - DNA, 19 bp, Mus musculus
  siRNA target sequence for Prss25 (NM_019752.2,1396-1414).
ggagaaattggcacaaaat

SEQ ID NO: 575958 - DNA, 19 bp, Mus musculus
  siRNA target sequence for Prss25 (NM_019752.2,1399-1417).
gaaattggcacaaaatgct

SEQ ID NO: 575959 - DNA, 19 bp, Mus musculus
  siRNA target sequence for Prss33 (NM_178370.2,807-825).
caatgtggccaagtatagt

SEQ ID NO: 575960 - DNA, 19 bp, Mus musculus
  siRNA target sequence for Prss34 (NM_178372.2,364-382).
ggaggcctatggagttaga

SEQ ID NO: 575961 - DNA, 19 bp, Mus musculus
  siRNA target sequence for Prss34 (NM_178372.2,447-465).
gccaccccaagtttagtga

SEQ ID NO: 575962 - DNA, 19 bp, Mus musculus
  siRNA target sequence for Prss34 (NM_178372.2,609-627).
ggggtgtcatcgagaacta

SEQ ID NO: 575963 - DNA, 19 bp, Mus musculus
  siRNA target sequence for Prss34 (NM_178372.2,612-630).
gtgtcatcgagaactacat

SEQ ID NO: 575964 - DNA, 19 bp, Mus musculus
  siRNA target sequence for Prss34 (NM_178372.2,670-688).
ccccatcgtggaaaacaat

SEQ ID NO: 575965 - DNA, 19 bp, Mus musculus
  siRNA target sequence for Prss34 (NM_178372.2,698-716).
cagaagtaccagaccaatt

SEQ ID NO: 575966 - DNA, 19 bp, Mus musculus
  siRNA target sequence for Prss34 (NM_178372.2,700-718).
gaagtaccagaccaattct

SEQ ID NO: 575967 - DNA, 19 bp, Mus musculus
  siRNA target sequence for Prss34 (NM_178372.2,945-963).
ccacgttcctagaaccttt

SEQ ID NO: 575968 - DNA, 19 bp, Mus musculus
  siRNA target sequence for Prss34 (NM_178372.2,968-986).
gggccagatgggattcata

SEQ ID NO: 575969 - DNA, 19 bp, Mus musculus
  siRNA target sequence for Prss34 (NM_178372.2,997-1015).
gaccccagccactcatatt

SEQ ID NO: 575970 - DNA, 19 bp, Mus musculus
  siRNA target sequence for Prss34 (NM_178372.2,1005-1023).
ccactcatattgatccatt

SEQ ID NO: 575971 - DNA, 19 bp, Mus musculus
  siRNA target sequence for Prss7 (NM_008941.1,198-216).
ctgtaggacatcactctat

SEQ ID NO: 575972 - DNA, 19 bp, Mus musculus
  siRNA target sequence for Prss7 (NM_008941.1,200-218).
gtaggacatcactctatca

SEQ ID NO: 575973 - DNA, 19 bp, Mus musculus
  siRNA target sequence for Prss7 (NM_008941.1,265-283).
cttctctattggattaatt

SEQ ID NO: 575974 - DNA, 19 bp, Mus musculus
  siRNA target sequence for Prss7 (NM_008941.1,268-286).
ctctattggattaattgca

SEQ ID NO: 575975 - DNA, 19 bp, Mus musculus
  siRNA target sequence for Prss7 (NM_008941.1,324-342).
cagccctggggaaaagtca

SEQ ID NO: 575976 - DNA, 19 bp, Mus musculus
  siRNA target sequence for Prss7 (NM_008941.1,328-346).
cctggggaaaagtcatgaa

SEQ ID NO: 575977 - DNA, 19 bp, Mus musculus
  siRNA target sequence for Prss7 (NM_008941.1,369-387).
catctggagtgacatataa

SEQ ID NO: 575978 - DNA, 19 bp, Mus musculus
  siRNA target sequence for Prss7 (NM_008941.1,377-395).
gtgacatataatcctaatt

SEQ ID NO: 575979 - DNA, 19 bp, Mus musculus
  siRNA target sequence for Prss7 (NM_008941.1,379-397).
gacatataatcctaattta

SEQ ID NO: 575980 - DNA, 19 bp, Mus musculus
  siRNA target sequence for Prss7 (NM_008941.1,451-469).
gatagacgagatctttgaa

SEQ ID NO: 575981 - DNA, 19 bp, Mus musculus
  siRNA target sequence for Prss7 (NM_008941.1,455-473).
gacgagatctttgaatcaa

SEQ ID NO: 575982 - DNA, 19 bp, Mus musculus
  siRNA target sequence for Prss7 (NM_008941.1,457-475).
cgagatctttgaatcaagt

SEQ ID NO: 575983 - DNA, 19 bp, Mus musculus
  siRNA target sequence for Prss7 (NM_008941.1,460-478).
gatctttgaatcaagtagt

SEQ ID NO: 575984 - DNA, 19 bp, Mus musculus
  siRNA target sequence for Prss7 (NM_008941.1,471-489).
caagtagtctgaagaatga

SEQ ID NO: 575985 - DNA, 19 bp, Mus musculus
  siRNA target sequence for Prss7 (NM_008941.1,501-519).
cgaaggtttttcaatttga

SEQ ID NO: 575986 - DNA, 19 bp, Mus musculus
  siRNA target sequence for Prss7 (NM_008941.1,558-576).
ctcagtgggtgtcagataa

SEQ ID NO: 575987 - DNA, 19 bp, Mus musculus
  siRNA target sequence for Prss7 (NM_008941.1,564-582).
gggtgtcagataaaaatgt

SEQ ID NO: 575988 - DNA, 19 bp, Mus musculus
  siRNA target sequence for Prss7 (NM_008941.1,599-617).
cagggcattgaagcaaata

SEQ ID NO: 575989 - DNA, 19 bp, Mus musculus
  siRNA target sequence for Prss7 (NM_008941.1,602-620).
ggcattgaagcaaatatat

SEQ ID NO: 575990 - DNA, 19 bp, Mus musculus
  siRNA target sequence for Prss7 (NM_008941.1,632-650).
gtcactctccatattgatt

SEQ ID NO: 575991 - DNA, 19 bp, Mus musculus
  siRNA target sequence for Prss7 (NM_008941.1,636-654).
ctctccatattgatttgaa

SEQ ID NO: 575992 - DNA, 19 bp, Mus musculus
  siRNA target sequence for Prss7 (NM_008941.1,638-656).
ctccatattgatttgaaca

SEQ ID NO: 575993 - DNA, 19 bp, Mus musculus
  siRNA target sequence for Prss7 (NM_008941.1,752-770).
gcatcactgggtaacttat

SEQ ID NO: 575994 - DNA, 19 bp, Mus musculus
  siRNA target sequence for Prss7 (NM_008941.1,760-778).
gggtaacttatcaacaaca

SEQ ID NO: 575995 - DNA, 19 bp, Mus musculus
  siRNA target sequence for Prss7 (NM_008941.1,984-1002).
gtgatggaagatttttgtt

SEQ ID NO: 575996 - DNA, 19 bp, Mus musculus
  siRNA target sequence for Prss7 (NM_008941.1,1024-1042).
ccaagctgatcgttatcca

SEQ ID NO: 575997 - DNA, 19 bp, Mus musculus
  siRNA target sequence for Prss7 (NM_008941.1,1025-1043).
caagctgatcgttatccaa

SEQ ID NO: 575998 - DNA, 19 bp, Mus musculus
  siRNA target sequence for Prss7 (NM_008941.1,1071-1089).
gatggatcatccgtgtaaa

SEQ ID NO: 575999 - DNA, 19 bp, Mus musculus
  siRNA target sequence for Prss7 (NM_008941.1,1094-1112).
ggactttccattagaatga

SEQ ID NO: 576000 - DNA, 19 bp, Mus musculus
  siRNA target sequence for Prss7 (NM_008941.1,1119-1137).
gatcttttattccacatta

SEQ ID NO: 576001 - DNA, 19 bp, Mus musculus
  siRNA target sequence for Prss7 (NM_008941.1,1140-1158).
cagatgtgttagatatcta

SEQ ID NO: 576002 - DNA, 19 bp, Mus musculus
  siRNA target sequence for Prss7 (NM_008941.1,1163-1181).
ggtataggacctagcaaaa

SEQ ID NO: 576003 - DNA, 19 bp, Mus musculus
  siRNA target sequence for Prss7 (NM_008941.1,1169-1187).
ggacctagcaaaattttaa

SEQ ID NO: 576004 - DNA, 19 bp, Mus musculus
  siRNA target sequence for Prss7 (NM_008941.1,1208-1226).
gatcctggaacaattcgaa

SEQ ID NO: 576005 - DNA, 19 bp, Mus musculus
  siRNA target sequence for Prss7 (NM_008941.1,1211-1229).
cctggaacaattcgaattt

SEQ ID NO: 576006 - DNA, 19 bp, Mus musculus
  siRNA target sequence for Prss7 (NM_008941.1,1249-1267).
cacctttctgataaaatca

SEQ ID NO: 576007 - DNA, 19 bp, Mus musculus
  siRNA target sequence for Prss7 (NM_008941.1,1252-1270).
ctttctgataaaatcagat

SEQ ID NO: 576008 - DNA, 19 bp, Mus musculus
  siRNA target sequence for Prss7 (NM_008941.1,1295-1313).
gcaacgtacagcactttca

SEQ ID NO: 576009 - DNA, 19 bp, Mus musculus
  siRNA target sequence for Prss7 (NM_008941.1,1296-1314).
caacgtacagcactttcaa

SEQ ID NO: 576010 - DNA, 19 bp, Mus musculus
  siRNA target sequence for Prss7 (NM_008941.1,1299-1317).
cgtacagcactttcaacaa

SEQ ID NO: 576011 - DNA, 19 bp, Mus musculus
  siRNA target sequence for Prss7 (NM_008941.1,1320-1338).
gcgaacttaacaattatga

SEQ ID NO: 576012 - DNA, 19 bp, Mus musculus
  siRNA target sequence for Prss7 (NM_008941.1,1337-1355).
gagaaaatcgactgtacat

SEQ ID NO: 576013 - DNA, 19 bp, Mus musculus
  siRNA target sequence for Prss7 (NM_008941.1,1339-1357).
gaaaatcgactgtacattt

SEQ ID NO: 576014 - DNA, 19 bp, Mus musculus
  siRNA target sequence for Prss7 (NM_008941.1,1345-1363).
cgactgtacatttgatgat

SEQ ID NO: 576015 - DNA, 19 bp, Mus musculus
  siRNA target sequence for Prss7 (NM_008941.1,1388-1406).
cttgatgatgataatgagt

SEQ ID NO: 576016 - DNA, 19 bp, Mus musculus
  siRNA target sequence for Prss7 (NM_008941.1,1418-1436).
caagtgaccacgtttcctt

SEQ ID NO: 576017 - DNA, 19 bp, Mus musculus
  siRNA target sequence for Prss7 (NM_008941.1,1438-1456).
ctacactggcccacgtttt

SEQ ID NO: 576018 - DNA, 19 bp, Mus musculus
  siRNA target sequence for Prss7 (NM_008941.1,1523-1541).
gaaagagtaggcctttcaa

SEQ ID NO: 576019 - DNA, 19 bp, Mus musculus
  siRNA target sequence for Prss7 (NM_008941.1,1599-1617).
gctgtgaaaatgtctacaa

SEQ ID NO: 576020 - DNA, 19 bp, Mus musculus
  siRNA target sequence for Prss7 (NM_008941.1,1704-1722).
gtcaagtcacattaaatga

SEQ ID NO: 576021 - DNA, 19 bp, Mus musculus
  siRNA target sequence for Prss7 (NM_008941.1,1728-1746).
gagaatttaaggttgtgtt

SEQ ID NO: 576022 - DNA, 19 bp, Mus musculus
  siRNA target sequence for Prss7 (NM_008941.1,1762-1780).
ccgaggttgcagtacaata

SEQ ID NO: 576023 - DNA, 19 bp, Mus musculus
  siRNA target sequence for Prss7 (NM_008941.1,1882-1900).
cggaggaccttttgaacta

SEQ ID NO: 576024 - DNA, 19 bp, Mus musculus
  siRNA target sequence for Prss7 (NM_008941.1,1898-1916).
ctatgggagccaaattcaa

SEQ ID NO: 576025 - DNA, 19 bp, Mus musculus
  siRNA target sequence for Prss7 (NM_008941.1,1918-1936).
cttcagttctccgaacttt

SEQ ID NO: 576026 - DNA, 19 bp, Mus musculus
  siRNA target sequence for Prss7 (NM_008941.1,1951-1969).
caatcaagcttcctgtata

SEQ ID NO: 576027 - DNA, 19 bp, Mus musculus
  siRNA target sequence for Prss7 (NM_008941.1,1958-1976).
gcttcctgtatatggaatt

SEQ ID NO: 576028 - DNA, 19 bp, Mus musculus
  siRNA target sequence for Prss7 (NM_008941.1,2009-2027).
cattttcaagaattcgatt

SEQ ID NO: 576029 - DNA, 19 bp, Mus musculus
  siRNA target sequence for Prss7 (NM_008941.1,2018-2036).
gaattcgatttagaaaaca

SEQ ID NO: 576030 - DNA, 19 bp, Mus musculus
  siRNA target sequence for Prss7 (NM_008941.1,2023-2041).
cgatttagaaaacatcaat

SEQ ID NO: 576031 - DNA, 19 bp, Mus musculus
  siRNA target sequence for Prss7 (NM_008941.1,2060-2078).
gatgggggagaatttgact

SEQ ID NO: 576032 - DNA, 19 bp, Mus musculus
  siRNA target sequence for Prss7 (NM_008941.1,2111-2129).
cctgtgaaggacttgttct

SEQ ID NO: 576033 - DNA, 19 bp, Mus musculus
  siRNA target sequence for Prss7 (NM_008941.1,2137-2155).
caataggatgactgtgatt

SEQ ID NO: 576034 - DNA, 19 bp, Mus musculus
  siRNA target sequence for Prss7 (NM_008941.1,2176-2194).
cagacgcaagggcttcaaa

SEQ ID NO: 576035 - DNA, 19 bp, Mus musculus
  siRNA target sequence for Prss7 (NM_008941.1,2180-2198).
cgcaagggcttcaaagcaa

SEQ ID NO: 576036 - DNA, 19 bp, Mus musculus
  siRNA target sequence for Prss7 (NM_008941.1,2186-2204).
ggcttcaaagcaaatttca

SEQ ID NO: 576037 - DNA, 19 bp, Mus musculus
  siRNA target sequence for Prss7 (NM_008941.1,2188-2206).
cttcaaagcaaatttcact

SEQ ID NO: 576038 - DNA, 19 bp, Mus musculus
  siRNA target sequence for Prss7 (NM_008941.1,2235-2253).
cctgccaagatgacgaatt

SEQ ID NO: 576039 - DNA, 19 bp, Mus musculus
  siRNA target sequence for Prss7 (NM_008941.1,2248-2266).
cgaatttcagtgcaaagat

SEQ ID NO: 576040 - DNA, 19 bp, Mus musculus
  siRNA target sequence for Prss7 (NM_008941.1,2282-2300).
ctggggaatctctgtgata

SEQ ID NO: 576041 - DNA, 19 bp, Mus musculus
  siRNA target sequence for Prss7 (NM_008941.1,2286-2304).
ggaatctctgtgatagcta

SEQ ID NO: 576042 - DNA, 19 bp, Mus musculus
  siRNA target sequence for Prss7 (NM_008941.1,2375-2393).
gggttggtacagttcaata

SEQ ID NO: 576043 - DNA, 19 bp, Mus musculus
  siRNA target sequence for Prss7 (NM_008941.1,2376-2394).
ggttggtacagttcaatat

SEQ ID NO: 576044 - DNA, 19 bp, Mus musculus
  siRNA target sequence for Prss7 (NM_008941.1,2380-2398).
ggtacagttcaatatccat

SEQ ID NO: 576045 - DNA, 19 bp, Mus musculus
  siRNA target sequence for Prss7 (NM_008941.1,2381-2399).
gtacagttcaatatccata

SEQ ID NO: 576046 - DNA, 19 bp, Mus musculus
  siRNA target sequence for Prss7 (NM_008941.1,2386-2404).
gttcaatatccatagcata

SEQ ID NO: 576047 - DNA, 19 bp, Mus musculus
  siRNA target sequence for Prss7 (NM_008941.1,2395-2413).
ccatagcatatggcatata

SEQ ID NO: 576048 - DNA, 19 bp, Mus musculus
  siRNA target sequence for Prss7 (NM_008941.1,2430-2448).
ggaccacacaaatttcaaa

SEQ ID NO: 576049 - DNA, 19 bp, Mus musculus
  siRNA target sequence for Prss7 (NM_008941.1,2431-2449).
gaccacacaaatttcaaat

SEQ ID NO: 576050 - DNA, 19 bp, Mus musculus
  siRNA target sequence for Prss7 (NM_008941.1,2471-2489).
ctagggagtgcaaactcat

SEQ ID NO: 576051 - DNA, 19 bp, Mus musculus
  siRNA target sequence for Prss7 (NM_008941.1,2475-2493).
ggagtgcaaactcatcaat

SEQ ID NO: 576052 - DNA, 19 bp, Mus musculus
  siRNA target sequence for Prss7 (NM_008941.1,2508-2526).
ccggaggtggaccatttgt

SEQ ID NO: 576053 - DNA, 19 bp, Mus musculus
  siRNA target sequence for Prss7 (NM_008941.1,2517-2535).
gaccatttgtgagagtaaa

SEQ ID NO: 576054 - DNA, 19 bp, Mus musculus
  siRNA target sequence for Prss7 (NM_008941.1,2520-2538).
catttgtgagagtaaacca

SEQ ID NO: 576055 - DNA, 19 bp, Mus musculus
  siRNA target sequence for Prss7 (NM_008941.1,2542-2560).
ccctaatggaagcttgata

SEQ ID NO: 576056 - DNA, 19 bp, Mus musculus
  siRNA target sequence for Prss7 (NM_008941.1,2544-2562).
ctaatggaagcttgatact

SEQ ID NO: 576057 - DNA, 19 bp, Mus musculus
  siRNA target sequence for Prss7 (NM_008941.1,2557-2575).
gatactaactcctagtcta

SEQ ID NO: 576058 - DNA, 19 bp, Mus musculus
  siRNA target sequence for Prss7 (NM_008941.1,2561-2579).
ctaactcctagtctacaat

SEQ ID NO: 576059 - DNA, 19 bp, Mus musculus
  siRNA target sequence for Prss7 (NM_008941.1,2605-2623).
gcaatgcaaccataaatca

SEQ ID NO: 576060 - DNA, 19 bp, Mus musculus
  siRNA target sequence for Prss7 (NM_008941.1,2606-2624).
caatgcaaccataaatcat

SEQ ID NO: 576061 - DNA, 19 bp, Mus musculus
  siRNA target sequence for Prss7 (NM_008941.1,2746-2764).
gctctgcggtgcatctctt

SEQ ID NO: 576062 - DNA, 19 bp, Mus musculus
  siRNA target sequence for Prss7 (NM_008941.1,2843-2861).
ctgggcctgcatatgcaat

SEQ ID NO: 576063 - DNA, 19 bp, Mus musculus
  siRNA target sequence for Prss7 (NM_008941.1,2847-2865).
gcctgcatatgcaatcaaa

SEQ ID NO: 576064 - DNA, 19 bp, Mus musculus
  siRNA target sequence for Prss7 (NM_008941.1,2889-2907).
gacgggtggttgatcaaat

SEQ ID NO: 576065 - DNA, 19 bp, Mus musculus
  siRNA target sequence for Prss7 (NM_008941.1,2892-2910).
gggtggttgatcaaattgt

SEQ ID NO: 576066 - DNA, 19 bp, Mus musculus
  siRNA target sequence for Prss7 (NM_008941.1,2897-2915).
gttgatcaaattgtcataa

SEQ ID NO: 576067 - DNA, 19 bp, Mus musculus
  siRNA target sequence for Prss7 (NM_008941.1,2955-2973).
ctatgatgcaccttgagtt

SEQ ID NO: 576068 - DNA, 19 bp, Mus musculus
  siRNA target sequence for Prss7 (NM_008941.1,2962-2980).
gcaccttgagtttaaagta

SEQ ID NO: 576069 - DNA, 19 bp, Mus musculus
  siRNA target sequence for Prss7 (NM_008941.1,2978-2996).
gtaaattacacagattata

SEQ ID NO: 576070 - DNA, 19 bp, Mus musculus
  siRNA target sequence for Prss7 (NM_008941.1,2990-3008).
gattatatacagcctattt

SEQ ID NO: 576071 - DNA, 19 bp, Mus musculus
  siRNA target sequence for Prss7 (NM_008941.1,3014-3032).
ccagaagagaatcaaatat

SEQ ID NO: 576072 - DNA, 19 bp, Mus musculus
  siRNA target sequence for Prss7 (NM_008941.1,3059-3077).
gctggctggggatatgata

SEQ ID NO: 576073 - DNA, 19 bp, Mus musculus
  siRNA target sequence for Prss7 (NM_008941.1,3060-3078).
ctggctggggatatgataa

SEQ ID NO: 576074 - DNA, 19 bp, Mus musculus
  siRNA target sequence for Prss7 (NM_008941.1,3119-3137).
gatgttcctcttatatcca

SEQ ID NO: 576075 - DNA, 19 bp, Mus musculus
  siRNA target sequence for Prss7 (NM_008941.1,3125-3143).
cctcttatatccaatgaaa

SEQ ID NO: 576076 - DNA, 19 bp, Mus musculus
  siRNA target sequence for Prss7 (NM_008941.1,3126-3144).
ctcttatatccaatgaaaa

SEQ ID NO: 576077 - DNA, 19 bp, Mus musculus
  siRNA target sequence for Prss7 (NM_008941.1,3245-3263).
ccattaatgtgccaagaaa

SEQ ID NO: 576078 - DNA, 19 bp, Mus musculus
  siRNA target sequence for Prss7 (NM_008941.1,3278-3296).
cttgttggtgtgacatcat

SEQ ID NO: 576079 - DNA, 19 bp, Mus musculus
  siRNA target sequence for Prss7 (NM_008941.1,3338-3356).
gtccgagtctcacagttta

SEQ ID NO: 576080 - DNA, 19 bp, Mus musculus
  siRNA target sequence for Prss7 (NM_008941.1,3342-3360).
gagtctcacagtttataga

SEQ ID NO: 576081 - DNA, 19 bp, Mus musculus
  siRNA target sequence for Prss7 (NM_008941.1,3344-3362).
gtctcacagtttatagaat

SEQ ID NO: 576082 - DNA, 19 bp, Mus musculus
  siRNA target sequence for Prss8 (NM_133351.1,404-422).
cgatggcaaccatgtttgt

SEQ ID NO: 576083 - DNA, 19 bp, Mus musculus
  siRNA target sequence for Prss8 (NM_133351.1,424-442).
gcgggtcgctcgtgtcaaa

SEQ ID NO: 576084 - DNA, 19 bp, Mus musculus
  siRNA target sequence for Prss8 (NM_133351.1,425-443).
cgggtcgctcgtgtcaaat

SEQ ID NO: 576085 - DNA, 19 bp, Mus musculus
  siRNA target sequence for Prss8 (NM_133351.1,426-444).
gggtcgctcgtgtcaaata

SEQ ID NO: 576086 - DNA, 19 bp, Mus musculus
  siRNA target sequence for Prss8 (NM_133351.1,427-445).
ggtcgctcgtgtcaaataa

SEQ ID NO: 576087 - DNA, 19 bp, Mus musculus
  siRNA target sequence for Prss8 (NM_133351.1,428-446).
gtcgctcgtgtcaaataaa

SEQ ID NO: 576088 - DNA, 19 bp, Mus musculus
  siRNA target sequence for Prss8 (NM_133351.1,818-836).
ctgcctgtacaacattaat

SEQ ID NO: 576089 - DNA, 19 bp, Mus musculus
  siRNA target sequence for Prss8 (NM_133351.1,844-862).
ctgaagaaccgcacactat

SEQ ID NO: 576090 - DNA, 19 bp, Mus musculus
  siRNA target sequence for Prss8 (NM_133351.1,1006-1024).
ccaacaggcctggagtata

SEQ ID NO: 576091 - DNA, 19 bp, Mus musculus
  siRNA target sequence for Prss8 (NM_133351.1,1020-1038).
gtatacactctgacttcta

SEQ ID NO: 576092 - DNA, 19 bp, Mus musculus
  siRNA target sequence for Prss8 (NM_133351.1,1153-1171).
cagcggcagccccgaaatt

SEQ ID NO: 576093 - DNA, 19 bp, Mus musculus
  siRNA target sequence for Prss8 (NM_133351.1,1155-1173).
gcggcagccccgaaattgt

SEQ ID NO: 576094 - DNA, 19 bp, Mus musculus
  siRNA target sequence for Prss8 (NM_133351.1,1156-1174).
cggcagccccgaaattgtt

SEQ ID NO: 576095 - DNA, 19 bp, Mus musculus
  siRNA target sequence for Prss8 (NM_133351.1,1158-1176).
gcagccccgaaattgttaa

SEQ ID NO: 576096 - DNA, 19 bp, Mus musculus
  siRNA target sequence for Prtn3 (NM_011178.2,122-140).
cccactctcggccttatgt

SEQ ID NO: 576097 - DNA, 19 bp, Mus musculus
  siRNA target sequence for St14 (NM_011176.3,244-262).
cccggctagagaacatgaa

SEQ ID NO: 576098 - DNA, 19 bp, Mus musculus
  siRNA target sequence for St14 (NM_011176.3,245-263).
ccggctagagaacatgaat

SEQ ID NO: 576099 - DNA, 19 bp, Mus musculus
  siRNA target sequence for St14 (NM_011176.3,396-414).
ctggtgtggcacttccatt

SEQ ID NO: 576100 - DNA, 19 bp, Mus musculus
  siRNA target sequence for St14 (NM_011176.3,398-416).
ggtgtggcacttccattat

SEQ ID NO: 576101 - DNA, 19 bp, Mus musculus
  siRNA target sequence for St14 (NM_011176.3,417-435).
cggaatgtgcgggttcaaa

SEQ ID NO: 576102 - DNA, 19 bp, Mus musculus
  siRNA target sequence for St14 (NM_011176.3,418-436).
ggaatgtgcgggttcaaaa

SEQ ID NO: 576103 - DNA, 19 bp, Mus musculus
  siRNA target sequence for St14 (NM_011176.3,419-437).
gaatgtgcgggttcaaaaa

SEQ ID NO: 576104 - DNA, 19 bp, Mus musculus
  siRNA target sequence for St14 (NM_011176.3,423-441).
gtgcgggttcaaaaagtct

SEQ ID NO: 576105 - DNA, 19 bp, Mus musculus
  siRNA target sequence for St14 (NM_011176.3,447-465).
ggccatctgaggatcacaa

SEQ ID NO: 576106 - DNA, 19 bp, Mus musculus
  siRNA target sequence for St14 (NM_011176.3,448-466).
gccatctgaggatcacaaa

SEQ ID NO: 576107 - DNA, 19 bp, Mus musculus
  siRNA target sequence for St14 (NM_011176.3,576-594).
ggtccctaccacaagaagt

SEQ ID NO: 576108 - DNA, 19 bp, Mus musculus
  siRNA target sequence for St14 (NM_011176.3,587-605).
caagaagtcggctgtaact

SEQ ID NO: 576109 - DNA, 19 bp, Mus musculus
  siRNA target sequence for St14 (NM_011176.3,692-710).
ggctgtggagcgagttgta

SEQ ID NO: 576110 - DNA, 19 bp, Mus musculus
  siRNA target sequence for St14 (NM_011176.3,696-714).
gtggagcgagttgtaacat

SEQ ID NO: 576111 - DNA, 19 bp, Mus musculus
  siRNA target sequence for St14 (NM_011176.3,722-740).
ccgagcacgggcactgaaa

SEQ ID NO: 576112 - DNA, 19 bp, Mus musculus
  siRNA target sequence for St14 (NM_011176.3,723-741).
cgagcacgggcactgaaat

SEQ ID NO: 576113 - DNA, 19 bp, Mus musculus
  siRNA target sequence for St14 (NM_011176.3,726-744).
gcacgggcactgaaatcct

SEQ ID NO: 576114 - DNA, 19 bp, Mus musculus
  siRNA target sequence for St14 (NM_011176.3,727-745).
cacgggcactgaaatcctt

SEQ ID NO: 576115 - DNA, 19 bp, Mus musculus
  siRNA target sequence for St14 (NM_011176.3,944-962).
cctcaccttccgaagcttt

SEQ ID NO: 576116 - DNA, 19 bp, Mus musculus
  siRNA target sequence for St14 (NM_011176.3,995-1013).
cctggtcaccgtgtatgat

SEQ ID NO: 576117 - DNA, 19 bp, Mus musculus
  siRNA target sequence for St14 (NM_011176.3,996-1014).
ctggtcaccgtgtatgata

SEQ ID NO: 576118 - DNA, 19 bp, Mus musculus
  siRNA target sequence for St14 (NM_011176.3,1110-1128).
cttgtcacgctgataacca

SEQ ID NO: 576119 - DNA, 19 bp, Mus musculus
  siRNA target sequence for St14 (NM_011176.3,1113-1131).
gtcacgctgataaccaata

SEQ ID NO: 576120 - DNA, 19 bp, Mus musculus
  siRNA target sequence for St14 (NM_011176.3,1117-1135).
cgctgataaccaatactga

SEQ ID NO: 576121 - DNA, 19 bp, Mus musculus
  siRNA target sequence for St14 (NM_011176.3,1190-1208).
ctgtggcggctttttgagt

SEQ ID NO: 576122 - DNA, 19 bp, Mus musculus
  siRNA target sequence for St14 (NM_011176.3,1360-1378).
cctgcaccaaggactatgt

SEQ ID NO: 576123 - DNA, 19 bp, Mus musculus
  siRNA target sequence for St14 (NM_011176.3,1405-1423).
gtgagaggtcccagtttgt

SEQ ID NO: 576124 - DNA, 19 bp, Mus musculus
  siRNA target sequence for St14 (NM_011176.3,1527-1545).
ccgtgcccagggatgttca

SEQ ID NO: 576125 - DNA, 19 bp, Mus musculus
  siRNA target sequence for St14 (NM_011176.3,1622-1640).
gcgttactgccgatgcaat

SEQ ID NO: 576126 - DNA, 19 bp, Mus musculus
  siRNA target sequence for St14 (NM_011176.3,1749-1767).
cctgctgggagtttcaagt

SEQ ID NO: 576127 - DNA, 19 bp, Mus musculus
  siRNA target sequence for St14 (NM_011176.3,1832-1850).
gtctgacgaggcttcatgt

SEQ ID NO: 576128 - DNA, 19 bp, Mus musculus
  siRNA target sequence for St14 (NM_011176.3,1846-1864).
catgtgacagcgtgaatgt

SEQ ID NO: 576129 - DNA, 19 bp, Mus musculus
  siRNA target sequence for St14 (NM_011176.3,1863-1881).
gtcgtctcttgcaccaaat

SEQ ID NO: 576130 - DNA, 19 bp, Mus musculus
  siRNA target sequence for St14 (NM_011176.3,1865-1883).
cgtctcttgcaccaaatat

SEQ ID NO: 576131 - DNA, 19 bp, Mus musculus
  siRNA target sequence for St14 (NM_011176.3,1986-2004).
gggctgcgatcctttacca

SEQ ID NO: 576132 - DNA, 19 bp, Mus musculus
  siRNA target sequence for St14 (NM_011176.3,1987-2005).
ggctgcgatcctttaccaa

SEQ ID NO: 576133 - DNA, 19 bp, Mus musculus
  siRNA target sequence for St14 (NM_011176.3,2470-2488).
gtgagatccgtgtcatcaa

SEQ ID NO: 576134 - DNA, 19 bp, Mus musculus
  siRNA target sequence for St14 (NM_011176.3,2600-2618).
gtcaagcgcggagaaagat

SEQ ID NO: 576135 - DNA, 19 bp, Mus musculus
  siRNA target sequence for Tesp1 (NM_009355.1,124-142).
gactacacgccctcacaaa

SEQ ID NO: 576136 - DNA, 19 bp, Mus musculus
  siRNA target sequence for Tesp1 (NM_009355.1,186-204).
ggtccagaaggagttatgt

SEQ ID NO: 576137 - DNA, 19 bp, Mus musculus
  siRNA target sequence for Tesp1 (NM_009355.1,270-288).
gcaggccagtctgatcttt

SEQ ID NO: 576138 - DNA, 19 bp, Mus musculus
  siRNA target sequence for Tesp1 (NM_009355.1,485-503).
gccgtctggagaagaacat

SEQ ID NO: 576139 - DNA, 19 bp, Mus musculus
  siRNA target sequence for Tesp1 (NM_009355.1,568-586).
gacggcaccacgaaggttt

SEQ ID NO: 576140 - DNA, 19 bp, Mus musculus
  siRNA target sequence for Tesp1 (NM_009355.1,578-596).
cgaaggtttcccctaataa

SEQ ID NO: 576141 - DNA, 19 bp, Mus musculus
  siRNA target sequence for Tesp1 (NM_009355.1,667-685).
gacgcggaggtctctctta

SEQ ID NO: 576142 - DNA, 19 bp, Mus musculus
  siRNA target sequence for Tesp1 (NM_009355.1,669-687).
cgcggaggtctctcttatt

SEQ ID NO: 576143 - DNA, 19 bp, Mus musculus
  siRNA target sequence for Tesp1 (NM_009355.1,671-689).
cggaggtctctcttattga

SEQ ID NO: 576144 - DNA, 19 bp, Mus musculus
  siRNA target sequence for Tesp1 (NM_009355.1,672-690).
ggaggtctctcttattgat

SEQ ID NO: 576145 - DNA, 19 bp, Mus musculus
  siRNA target sequence for Tesp1 (NM_009355.1,675-693).
ggtctctcttattgatgaa

SEQ ID NO: 576146 - DNA, 19 bp, Mus musculus
  siRNA target sequence for Tesp1 (NM_009355.1,729-747).
cagcatcacggaatatgat

SEQ ID NO: 576147 - DNA, 19 bp, Mus musculus
  siRNA target sequence for Tesp1 (NM_009355.1,731-749).
gcatcacggaatatgatgt

SEQ ID NO: 576148 - DNA, 19 bp, Mus musculus
  siRNA target sequence for Tesp1 (NM_009355.1,732-750).
catcacggaatatgatgtt

SEQ ID NO: 576149 - DNA, 19 bp, Mus musculus
  siRNA target sequence for Tesp1 (NM_009355.1,735-753).
cacggaatatgatgttata

SEQ ID NO: 576150 - DNA, 19 bp, Mus musculus
  siRNA target sequence for Tesp1 (NM_009355.1,737-755).
cggaatatgatgttataaa

SEQ ID NO: 576151 - DNA, 19 bp, Mus musculus
  siRNA target sequence for Tesp1 (NM_009355.1,918-936).
caccaaggtctcctacttt

SEQ ID NO: 576152 - DNA, 19 bp, Mus musculus
  siRNA target sequence for Tesp2 (NM_009356.1,139-157).
caacgctgcgaataacact

SEQ ID NO: 576153 - DNA, 19 bp, Mus musculus
  siRNA target sequence for Tesp2 (NM_009356.1,271-289).
ggccagtctgcgcttatat

SEQ ID NO: 576154 - DNA, 19 bp, Mus musculus
  siRNA target sequence for Tesp2 (NM_009356.1,352-370).
cttccaaagatctcaagaa

SEQ ID NO: 576155 - DNA, 19 bp, Mus musculus
  siRNA target sequence for Tesp2 (NM_009356.1,452-470).
gtcatcgttcacaaagact

SEQ ID NO: 576156 - DNA, 19 bp, Mus musculus
  siRNA target sequence for Tesp2 (NM_009356.1,486-504).
cccaaggaagtgacattgt

SEQ ID NO: 576157 - DNA, 19 bp, Mus musculus
  siRNA target sequence for Tesp2 (NM_009356.1,629-647).
gaggacgtgcgaattcctt

SEQ ID NO: 576158 - DNA, 19 bp, Mus musculus
  siRNA target sequence for Tesp2 (NM_009356.1,735-753).
gtagaagctactacatata

SEQ ID NO: 576159 - DNA, 19 bp, Mus musculus
  siRNA target sequence for Tesp2 (NM_009356.1,763-781).
ggtgtgtgctgctgactat

SEQ ID NO: 576160 - DNA, 19 bp, Mus musculus
  siRNA target sequence for Tesp2 (NM_009356.1,773-791).
gctgactatgacatgtcaa

SEQ ID NO: 576161 - DNA, 19 bp, Mus musculus
  siRNA target sequence for Tesp2 (NM_009356.1,874-892).
gagctctacatgtgaagaa

SEQ ID NO: 576162 - DNA, 19 bp, Mus musculus
  siRNA target sequence for Tesp2 (NM_009356.1,950-968).
gataacaagaaatcatcat

SEQ ID NO: 576163 - DNA, 19 bp, Mus musculus
  siRNA target sequence for Tessp2 (NM_153099.1,95-113).
gcctctgtactctctactt

SEQ ID NO: 576164 - DNA, 19 bp, Mus musculus
  siRNA target sequence for Tessp2 (NM_153099.1,121-139).
cccctcagggtttagtgaa

SEQ ID NO: 576165 - DNA, 19 bp, Mus musculus
  siRNA target sequence for Tessp2 (NM_153099.1,192-210).
ccacccgctctcctttcat

SEQ ID NO: 576166 - DNA, 19 bp, Mus musculus
  siRNA target sequence for Tessp2 (NM_153099.1,197-215).
cgctctcctttcatgaact

SEQ ID NO: 576167 - DNA, 19 bp, Mus musculus
  siRNA target sequence for Tessp2 (NM_153099.1,198-216).
gctctcctttcatgaactt

SEQ ID NO: 576168 - DNA, 19 bp, Mus musculus
  siRNA target sequence for Tessp2 (NM_153099.1,228-246).
gtggccaaccctttatgaa

SEQ ID NO: 576169 - DNA, 19 bp, Mus musculus
  siRNA target sequence for Tessp2 (NM_153099.1,230-248).
ggccaaccctttatgaaga

SEQ ID NO: 576170 - DNA, 19 bp, Mus musculus
  siRNA target sequence for Tessp2 (NM_153099.1,231-249).
gccaaccctttatgaagat

SEQ ID NO: 576171 - DNA, 19 bp, Mus musculus
  siRNA target sequence for Tessp2 (NM_153099.1,419-437).
gtctaccgacagaatacaa

SEQ ID NO: 576172 - DNA, 19 bp, Mus musculus
  siRNA target sequence for Tessp2 (NM_153099.1,421-439).
ctaccgacagaatacaagt

SEQ ID NO: 576173 - DNA, 19 bp, Mus musculus
  siRNA target sequence for Tessp2 (NM_153099.1,467-485).
gtccaccctaagttctcaa

SEQ ID NO: 576174 - DNA, 19 bp, Mus musculus
  siRNA target sequence for Tessp2 (NM_153099.1,470-488).
caccctaagttctcaacaa

SEQ ID NO: 576175 - DNA, 19 bp, Mus musculus
  siRNA target sequence for Tessp2 (NM_153099.1,472-490).
ccctaagttctcaacaact

SEQ ID NO: 576176 - DNA, 19 bp, Mus musculus
  siRNA target sequence for Tessp2 (NM_153099.1,474-492).
ctaagttctcaacaactat

SEQ ID NO: 576177 - DNA, 19 bp, Mus musculus
  siRNA target sequence for Tessp2 (NM_153099.1,483-501).
caacaactatcgtcgttaa

SEQ ID NO: 576178 - DNA, 19 bp, Mus musculus
  siRNA target sequence for Tessp2 (NM_153099.1,486-504).
caactatcgtcgttaaaaa

SEQ ID NO: 576179 - DNA, 19 bp, Mus musculus
  siRNA target sequence for Tessp2 (NM_153099.1,489-507).
ctatcgtcgttaaaaatga

SEQ ID NO: 576180 - DNA, 19 bp, Mus musculus
  siRNA target sequence for Tessp2 (NM_153099.1,493-511).
cgtcgttaaaaatgatatt

SEQ ID NO: 576181 - DNA, 19 bp, Mus musculus
  siRNA target sequence for Tessp2 (NM_153099.1,523-541).
gctccaacaccctgtgaat

SEQ ID NO: 576182 - DNA, 19 bp, Mus musculus
  siRNA target sequence for Tessp2 (NM_153099.1,524-542).
ctccaacaccctgtgaatt

SEQ ID NO: 576183 - DNA, 19 bp, Mus musculus
  siRNA target sequence for Tessp2 (NM_153099.1,580-598).
gagttttcctgtaaaagct

SEQ ID NO: 576184 - DNA, 19 bp, Mus musculus
  siRNA target sequence for Tessp2 (NM_153099.1,618-636).
caggatggggaaaactagt

SEQ ID NO: 576185 - DNA, 19 bp, Mus musculus
  siRNA target sequence for Tessp2 (NM_153099.1,647-665).
ccggatgttccgacagaaa

SEQ ID NO: 576186 - DNA, 19 bp, Mus musculus
  siRNA target sequence for Tessp2 (NM_153099.1,648-666).
cggatgttccgacagaaat

SEQ ID NO: 576187 - DNA, 19 bp, Mus musculus
  siRNA target sequence for Tessp2 (NM_153099.1,819-837).
gcccgatgtcctgtgaatt

SEQ ID NO: 576188 - DNA, 19 bp, Mus musculus
  siRNA target sequence for Tessp2 (NM_153099.1,820-838).
cccgatgtcctgtgaattt

SEQ ID NO: 576189 - DNA, 19 bp, Mus musculus
  siRNA target sequence for Tessp2 (NM_153099.1,822-840).
cgatgtcctgtgaatttga

SEQ ID NO: 576190 - DNA, 19 bp, Mus musculus
  siRNA target sequence for Tessp2 (NM_153099.1,882-900).
gctgtggtcgcaaaggata

SEQ ID NO: 576191 - DNA, 19 bp, Mus musculus
  siRNA target sequence for Tessp2 (NM_153099.1,928-946).
ctacagcaagtggctaatt

SEQ ID NO: 576192 - DNA, 19 bp, Mus musculus
  siRNA target sequence for Tessp2 (NM_153099.1,958-976).
ccaggcagattgtttgcat

SEQ ID NO: 576193 - DNA, 19 bp, Mus musculus
  siRNA target sequence for Tmem5 (NM_153059.1,564-582).
ccacccagtggttaattta

SEQ ID NO: 576194 - DNA, 19 bp, Mus musculus
  siRNA target sequence for Tmem5 (NM_153059.1,565-583).
cacccagtggttaatttat

SEQ ID NO: 576195 - DNA, 19 bp, Mus musculus
  siRNA target sequence for Tmem5 (NM_153059.1,568-586).
ccagtggttaatttatgca

SEQ ID NO: 576196 - DNA, 19 bp, Mus musculus
  siRNA target sequence for Tmem5 (NM_153059.1,574-592).
gttaatttatgcacagaat

SEQ ID NO: 576197 - DNA, 19 bp, Mus musculus
  siRNA target sequence for Tmem5 (NM_153059.1,700-718).
ggatctgcttttcataaca

SEQ ID NO: 576198 - DNA, 19 bp, Mus musculus
  siRNA target sequence for Tmem5 (NM_153059.1,724-742).
cagcccctggattaatggt

SEQ ID NO: 576199 - DNA, 19 bp, Mus musculus
  siRNA target sequence for Tmem5 (NM_153059.1,762-780).
ctttaggtgtagcaacata

SEQ ID NO: 576200 - DNA, 19 bp, Mus musculus
  siRNA target sequence for Tmem5 (NM_153059.1,783-801).
ggcagtttcctgtagttga

SEQ ID NO: 576201 - DNA, 19 bp, Mus musculus
  siRNA target sequence for Tmem5 (NM_153059.1,854-872).
ggaactgcctatgaaaatt

SEQ ID NO: 576202 - DNA, 19 bp, Mus musculus
  siRNA target sequence for Tmem5 (NM_153059.1,873-891).
catcaagacaagcactaat

SEQ ID NO: 576203 - DNA, 19 bp, Mus musculus
  siRNA target sequence for Tmem5 (NM_153059.1,879-897).
gacaagcactaatgaacat

SEQ ID NO: 576204 - DNA, 19 bp, Mus musculus
  siRNA target sequence for Tmem5 (NM_153059.1,952-970).
gcagcctcaggagacaaat

SEQ ID NO: 576205 - DNA, 19 bp, Mus musculus
  siRNA target sequence for Tmem5 (NM_153059.1,1032-1050).
gagtgaacacggaatgtta

SEQ ID NO: 576206 - DNA, 19 bp, Mus musculus
  siRNA target sequence for Tmem5 (NM_153059.1,1146-1164).
ctcctctgcagttactcaa

SEQ ID NO: 576207 - DNA, 19 bp, Mus musculus
  siRNA target sequence for Tmem5 (NM_153059.1,1223-1241).
gaaaaggagaagactataa

SEQ ID NO: 576208 - DNA, 19 bp, Mus musculus
  siRNA target sequence for Tmem5 (NM_153059.1,1242-1260).
gcttacaagaaaagattca

SEQ ID NO: 576209 - DNA, 19 bp, Mus musculus
  siRNA target sequence for Tmprss2 (NM_015775.2,328-346).
ctcccaatggctacaactt

SEQ ID NO: 576210 - DNA, 19 bp, Mus musculus
  siRNA target sequence for Tmprss2 (NM_015775.2,381-399).
cagtatgctccgaggatta

SEQ ID NO: 576211 - DNA, 19 bp, Mus musculus
  siRNA target sequence for Tmprss2 (NM_015775.2,383-401).
gtatgctccgaggattaca

SEQ ID NO: 576212 - DNA, 19 bp, Mus musculus
  siRNA target sequence for Tmprss2 (NM_015775.2,450-468).
gcactgtgcacctcaaagt

SEQ ID NO: 576213 - DNA, 19 bp, Mus musculus
  siRNA target sequence for Tmprss2 (NM_015775.2,643-661).
gtcccaacggagaagatga

SEQ ID NO: 576214 - DNA, 19 bp, Mus musculus
  siRNA target sequence for Tmprss2 (NM_015775.2,695-713).
catcctccaggtttactca

SEQ ID NO: 576215 - DNA, 19 bp, Mus musculus
  siRNA target sequence for Tmprss2 (NM_015775.2,767-785).
cgggagagcagcatgtaaa

SEQ ID NO: 576216 - DNA, 19 bp, Mus musculus
  siRNA target sequence for Tmprss2 (NM_015775.2,769-787).
ggagagcagcatgtaaaga

SEQ ID NO: 576217 - DNA, 19 bp, Mus musculus
  siRNA target sequence for Tmprss2 (NM_015775.2,781-799).
gtaaagacatgggatacaa

SEQ ID NO: 576218 - DNA, 19 bp, Mus musculus
  siRNA target sequence for Tmprss2 (NM_015775.2,786-804).
gacatgggatacaagaaca

SEQ ID NO: 576219 - DNA, 19 bp, Mus musculus
  siRNA target sequence for Tmprss2 (NM_015775.2,788-806).
catgggatacaagaacaat

SEQ ID NO: 576220 - DNA, 19 bp, Mus musculus
  siRNA target sequence for Tmprss2 (NM_015775.2,791-809).
gggatacaagaacaatttt

SEQ ID NO: 576221 - DNA, 19 bp, Mus musculus
  siRNA target sequence for Tmprss2 (NM_015775.2,876-894).
ggcaacgttgacctctata

SEQ ID NO: 576222 - DNA, 19 bp, Mus musculus
  siRNA target sequence for Tmprss2 (NM_015775.2,877-895).
gcaacgttgacctctataa

SEQ ID NO: 576223 - DNA, 19 bp, Mus musculus
  siRNA target sequence for Tmprss2 (NM_015775.2,905-923).
ccacagtgactcatgttca

SEQ ID NO: 576224 - DNA, 19 bp, Mus musculus
  siRNA target sequence for Tmprss2 (NM_015775.2,925-943).
cccgcatggtggtttcttt

SEQ ID NO: 576225 - DNA, 19 bp, Mus musculus
  siRNA target sequence for Tmprss2 (NM_015775.2,935-953).
ggtttctttgcgctgtata

SEQ ID NO: 576226 - DNA, 19 bp, Mus musculus
  siRNA target sequence for Tmprss2 (NM_015775.2,959-977).
cggggttcgctcagtgaaa

SEQ ID NO: 576227 - DNA, 19 bp, Mus musculus
  siRNA target sequence for Tmprss2 (NM_015775.2,988-1006).
ggattgtgggtggattgaa

SEQ ID NO: 576228 - DNA, 19 bp, Mus musculus
  siRNA target sequence for Tmprss2 (NM_015775.2,989-1007).
gattgtgggtggattgaat

SEQ ID NO: 576229 - DNA, 19 bp, Mus musculus
  siRNA target sequence for Tmprss2 (NM_015775.2,1150-1168).
cggcatttgcgggaattct

SEQ ID NO: 576230 - DNA, 19 bp, Mus musculus
  siRNA target sequence for Tmprss2 (NM_015775.2,1152-1170).
gcatttgcgggaattctga

SEQ ID NO: 576231 - DNA, 19 bp, Mus musculus
  siRNA target sequence for Tmprss2 (NM_015775.2,1227-1245).
ccaaattacgactctaaga

SEQ ID NO: 576232 - DNA, 19 bp, Mus musculus
  siRNA target sequence for Tmprss2 (NM_015775.2,1400-1418).
gacctcggacgtgttgaat

SEQ ID NO: 576233 - DNA, 19 bp, Mus musculus
  siRNA target sequence for Tmprss2 (NM_015775.2,1436-1454).
gatcgagccctccaaatgt

SEQ ID NO: 576234 - DNA, 19 bp, Mus musculus
  siRNA target sequence for Tmprss2 (NM_015775.2,1439-1457).
cgagccctccaaatgtaat

SEQ ID NO: 576235 - DNA, 19 bp, Mus musculus
  siRNA target sequence for Tmprss2 (NM_015775.2,1440-1458).
gagccctccaaatgtaata

SEQ ID NO: 576236 - DNA, 19 bp, Mus musculus
  siRNA target sequence for Tmprss2 (NM_015775.2,1442-1460).
gccctccaaatgtaatagt

SEQ ID NO: 576237 - DNA, 19 bp, Mus musculus
  siRNA target sequence for Tmprss2 (NM_015775.2,1459-1477).
gtaaatacatatacaacaa

SEQ ID NO: 576238 - DNA, 19 bp, Mus musculus
  siRNA target sequence for Tmprss2 (NM_015775.2,1554-1572).
ccgctggttactttgaaga

SEQ ID NO: 576239 - DNA, 19 bp, Mus musculus
  siRNA target sequence for Tmprss2 (NM_015775.2,1555-1573).
cgctggttactttgaagaa

SEQ ID NO: 576240 - DNA, 19 bp, Mus musculus
  siRNA target sequence for Tmprss2 (NM_015775.2,1556-1574).
gctggttactttgaagaat

SEQ ID NO: 576241 - DNA, 19 bp, Mus musculus
  siRNA target sequence for Tmprss2 (NM_015775.2,1646-1664).
cgggaacgtgacggtattt

SEQ ID NO: 576242 - DNA, 19 bp, Mus musculus
  siRNA target sequence for Tmprss2 (NM_015775.2,1647-1665).
gggaacgtgacggtattta

SEQ ID NO: 576243 - DNA, 19 bp, Mus musculus
  siRNA target sequence for Tmprss2 (NM_015775.2,1652-1670).
cgtgacggtatttacagat

SEQ ID NO: 576244 - DNA, 19 bp, Mus musculus
  siRNA target sequence for Tmprss2 (NM_015775.2,1653-1671).
gtgacggtatttacagatt

SEQ ID NO: 576245 - DNA, 19 bp, Mus musculus
  siRNA target sequence for Tmprss2 (NM_015775.2,1657-1675).
cggtatttacagattggat

SEQ ID NO: 576246 - DNA, 19 bp, Mus musculus
  siRNA target sequence for Tmprss4 (NM_145403.1,302-320).
gtggccaacccctcaacaa

SEQ ID NO: 576247 - DNA, 19 bp, Mus musculus
  siRNA target sequence for Tmprss4 (NM_145403.1,315-333).
caacaaccgtgatattgtt

SEQ ID NO: 576248 - DNA, 19 bp, Mus musculus
  siRNA target sequence for Tmprss4 (NM_145403.1,375-393).
ggtggggatccccatcatt

SEQ ID NO: 576249 - DNA, 19 bp, Mus musculus
  siRNA target sequence for Tmprss4 (NM_145403.1,451-469).
ctggataaatactacttca

SEQ ID NO: 576250 - DNA, 19 bp, Mus musculus
  siRNA target sequence for Tmprss4 (NM_145403.1,454-472).
gataaatactacttcatct

SEQ ID NO: 576251 - DNA, 19 bp, Mus musculus
  siRNA target sequence for Tmprss4 (NM_145403.1,656-674).
cagtctgtttcgacaactt

SEQ ID NO: 576252 - DNA, 19 bp, Mus musculus
  siRNA target sequence for Tmprss4 (NM_145403.1,658-676).
gtctgtttcgacaacttca

SEQ ID NO: 576253 - DNA, 19 bp, Mus musculus
  siRNA target sequence for Tmprss4 (NM_145403.1,1014-1032).
ccactgcttcaggaagtat

SEQ ID NO: 576254 - DNA, 19 bp, Mus musculus
  siRNA target sequence for Tmprss4 (NM_145403.1,1020-1038).
cttcaggaagtatcttgat

SEQ ID NO: 576255 - DNA, 19 bp, Mus musculus
  siRNA target sequence for Tmprss4 (NM_145403.1,1054-1072).
gtcagggcaggctcaaaca

SEQ ID NO: 576256 - DNA, 19 bp, Mus musculus
  siRNA target sequence for Tmprss4 (NM_145403.1,1056-1074).
cagggcaggctcaaacata

SEQ ID NO: 576257 - DNA, 19 bp, Mus musculus
  siRNA target sequence for Tmprss4 (NM_145403.1,1058-1076).
gggcaggctcaaacatact

SEQ ID NO: 576258 - DNA, 19 bp, Mus musculus
  siRNA target sequence for Tmprss4 (NM_145403.1,1171-1189).
cagatgccactcacattct

SEQ ID NO: 576259 - DNA, 19 bp, Mus musculus
  siRNA target sequence for Tmprss4 (NM_145403.1,1173-1191).
gatgccactcacattctca

SEQ ID NO: 576260 - DNA, 19 bp, Mus musculus
  siRNA target sequence for Tmprss4 (NM_145403.1,1249-1267).
ccagtctgggtcattggat

SEQ ID NO: 576261 - DNA, 19 bp, Mus musculus
  siRNA target sequence for Tmprss4 (NM_145403.1,1260-1278).
cattggatggggctttaca

SEQ ID NO: 576262 - DNA, 19 bp, Mus musculus
  siRNA target sequence for Tmprss4 (NM_145403.1,1319-1337).
catcagtccaggtcattga

SEQ ID NO: 576263 - DNA, 19 bp, Mus musculus
  siRNA target sequence for Tmprss4 (NM_145403.1,1447-1465).
gggcctttgatgtaccatt

SEQ ID NO: 576264 - DNA, 19 bp, Mus musculus
  siRNA target sequence for Tmprss5 (NM_030709.1,147-165).
ggcctgggatcttcagaat

SEQ ID NO: 576265 - DNA, 19 bp, Mus musculus
  siRNA target sequence for Tmprss5 (NM_030709.1,276-294).
cttcatggctcttagtgtt

SEQ ID NO: 576266 - DNA, 19 bp, Mus musculus
  siRNA target sequence for Tmprss5 (NM_030709.1,282-300).
ggctcttagtgttgtatct

SEQ ID NO: 576267 - DNA, 19 bp, Mus musculus
  siRNA target sequence for Tmprss5 (NM_030709.1,396-414).
catctcttcccaaaacagt

SEQ ID NO: 576268 - DNA, 19 bp, Mus musculus
  siRNA target sequence for Tmprss5 (NM_030709.1,540-558).
ggcatatcaggcttactca

SEQ ID NO: 576269 - DNA, 19 bp, Mus musculus
  siRNA target sequence for Tmprss5 (NM_030709.1,541-559).
gcatatcaggcttactcaa

SEQ ID NO: 576270 - DNA, 19 bp, Mus musculus
  siRNA target sequence for Tmprss5 (NM_030709.1,560-578).
cacaaggccgtgaatctgt

SEQ ID NO: 576271 - DNA, 19 bp, Mus musculus
  siRNA target sequence for Tmprss5 (NM_030709.1,627-645).
gaccgggaggccttgtaga

SEQ ID NO: 576272 - DNA, 19 bp, Mus musculus
  siRNA target sequence for Tmprss5 (NM_030709.1,672-690).
gtccttctggccgaattgt

SEQ ID NO: 576273 - DNA, 19 bp, Mus musculus
  siRNA target sequence for Tmprss5 (NM_030709.1,674-692).
ccttctggccgaattgttt

SEQ ID NO: 576274 - DNA, 19 bp, Mus musculus
  siRNA target sequence for Tmprss5 (NM_030709.1,678-696).
ctggccgaattgtttctct

SEQ ID NO: 576275 - DNA, 19 bp, Mus musculus
  siRNA target sequence for Tmprss5 (NM_030709.1,682-700).
ccgaattgtttctctcaaa

SEQ ID NO: 576276 - DNA, 19 bp, Mus musculus
  siRNA target sequence for Tmprss5 (NM_030709.1,683-701).
cgaattgtttctctcaaat

SEQ ID NO: 576277 - DNA, 19 bp, Mus musculus
  siRNA target sequence for Tmprss5 (NM_030709.1,721-739).
gcctctggcttctcgaata

SEQ ID NO: 576278 - DNA, 19 bp, Mus musculus
  siRNA target sequence for Tmprss5 (NM_030709.1,723-741).
ctctggcttctcgaatagt

SEQ ID NO: 576279 - DNA, 19 bp, Mus musculus
  siRNA target sequence for Tmprss5 (NM_030709.1,936-954).
gacaacaccagggaactat

SEQ ID NO: 576280 - DNA, 19 bp, Mus musculus
  siRNA target sequence for Tmprss5 (NM_030709.1,987-1005).
gtgcccagaaccatgacta

SEQ ID NO: 576281 - DNA, 19 bp, Mus musculus
  siRNA target sequence for Tmprss5 (NM_030709.1,1025-1043).
ctccggacaccaatcaact

SEQ ID NO: 576282 - DNA, 19 bp, Mus musculus
  siRNA target sequence for Tmprss5 (NM_030709.1,1028-1046).
cggacaccaatcaacttct

SEQ ID NO: 576283 - DNA, 19 bp, Mus musculus
  siRNA target sequence for Tmprss5 (NM_030709.1,1134-1152).
ccgaccccagccatactca

SEQ ID NO: 576284 - DNA, 19 bp, Mus musculus
  siRNA target sequence for Tmprss5 (NM_030709.1,1135-1153).
cgaccccagccatactcat

SEQ ID NO: 576285 - DNA, 19 bp, Mus musculus
  siRNA target sequence for Tmprss5 (NM_030709.1,1136-1154).
gaccccagccatactcata

SEQ ID NO: 576286 - DNA, 19 bp, Mus musculus
  siRNA target sequence for Tmprss5 (NM_030709.1,1145-1163).
catactcatagctcagata

SEQ ID NO: 576287 - DNA, 19 bp, Mus musculus
  siRNA target sequence for Tmprss5 (NM_030709.1,1149-1167).
ctcatagctcagatacact

SEQ ID NO: 576288 - DNA, 19 bp, Mus musculus
  siRNA target sequence for Tmprss5 (NM_030709.1,1222-1240).
gtacagtggggcacttaca

SEQ ID NO: 576289 - DNA, 19 bp, Mus musculus
  siRNA target sequence for Tmprss5 (NM_030709.1,1235-1253).
cttacacaccgcatgttgt

SEQ ID NO: 576290 - DNA, 19 bp, Mus musculus
  siRNA target sequence for Tmprss6 (NM_027902.1,267-285).
ggggtcatgctttggtatt

SEQ ID NO: 576291 - DNA, 19 bp, Mus musculus
  siRNA target sequence for Tmprss6 (NM_027902.1,268-286).
gggtcatgctttggtattt

SEQ ID NO: 576292 - DNA, 19 bp, Mus musculus
  siRNA target sequence for Tmprss6 (NM_027902.1,281-299).
gtatttcctagggtacaaa

SEQ ID NO: 576293 - DNA, 19 bp, Mus musculus
  siRNA target sequence for Tmprss6 (NM_027902.1,340-358).
gggtgctcaaccgtcattt

SEQ ID NO: 576294 - DNA, 19 bp, Mus musculus
  siRNA target sequence for Tmprss6 (NM_027902.1,342-360).
gtgctcaaccgtcatttct

SEQ ID NO: 576295 - DNA, 19 bp, Mus musculus
  siRNA target sequence for Tmprss6 (NM_027902.1,371-389).
gggccgacgggagtctatt

SEQ ID NO: 576296 - DNA, 19 bp, Mus musculus
  siRNA target sequence for Tmprss6 (NM_027902.1,374-392).
ccgacgggagtctattgct

SEQ ID NO: 576297 - DNA, 19 bp, Mus musculus
  siRNA target sequence for Tmprss6 (NM_027902.1,375-393).
cgacgggagtctattgctt

SEQ ID NO: 576298 - DNA, 19 bp, Mus musculus
  siRNA target sequence for Tmprss6 (NM_027902.1,376-394).
gacgggagtctattgcttt

SEQ ID NO: 576299 - DNA, 19 bp, Mus musculus
  siRNA target sequence for Tmprss6 (NM_027902.1,445-463).
gcacccgcctgggtactta

SEQ ID NO: 576300 - DNA, 19 bp, Mus musculus
  siRNA target sequence for Tmprss6 (NM_027902.1,456-474).
ggtacttactacaactcta

SEQ ID NO: 576301 - DNA, 19 bp, Mus musculus
  siRNA target sequence for Tmprss6 (NM_027902.1,556-574).
ccctgagccctgaagtagt

SEQ ID NO: 576302 - DNA, 19 bp, Mus musculus
  siRNA target sequence for Tmprss6 (NM_027902.1,613-631).
caaccctggcttcctataa

SEQ ID NO: 576303 - DNA, 19 bp, Mus musculus
  siRNA target sequence for Tmprss6 (NM_027902.1,625-643).
cctataagaccgaatatga

SEQ ID NO: 576304 - DNA, 19 bp, Mus musculus
  siRNA target sequence for Tmprss6 (NM_027902.1,686-704).
cgacatagtcgtactgaat

SEQ ID NO: 576305 - DNA, 19 bp, Mus musculus
  siRNA target sequence for Tmprss6 (NM_027902.1,687-705).
gacatagtcgtactgaatt

SEQ ID NO: 576306 - DNA, 19 bp, Mus musculus
  siRNA target sequence for Tmprss6 (NM_027902.1,811-829).
ccgaagacctcatgatcaa

SEQ ID NO: 576307 - DNA, 19 bp, Mus musculus
  siRNA target sequence for Tmprss6 (NM_027902.1,1000-1018).
gcatgcatagctactatga

SEQ ID NO: 576308 - DNA, 19 bp, Mus musculus
  siRNA target sequence for Tmprss6 (NM_027902.1,1405-1423).
gcttgtacaaccaatcaga

SEQ ID NO: 576309 - DNA, 19 bp, Mus musculus
  siRNA target sequence for Tmprss6 (NM_027902.1,1439-1457).
gttcctctgctctgtgaat

SEQ ID NO: 576310 - DNA, 19 bp, Mus musculus
  siRNA target sequence for Tmprss6 (NM_027902.1,1592-1610).
gcagcccgactgtctcaat

SEQ ID NO: 576311 - DNA, 19 bp, Mus musculus
  siRNA target sequence for Tmprss6 (NM_027902.1,1644-1662).
ccctgtgggacattcactt

SEQ ID NO: 576312 - DNA, 19 bp, Mus musculus
  siRNA target sequence for Tmprss6 (NM_027902.1,1878-1896).
gctgaccgctgggtcataa

SEQ ID NO: 576313 - DNA, 19 bp, Mus musculus
  siRNA target sequence for Tmprss6 (NM_027902.1,2419-2437).
gtggccgacccaatttctt

SEQ ID NO: 576314 - DNA, 19 bp, Mus musculus
  siRNA target sequence for Tmprss6 (NM_027902.1,2452-2470).
gtgtcacacgtgtgatcaa

SEQ ID NO: 576315 - DNA, 19 bp, Mus musculus
  siRNA target sequence for Tmprss6 (NM_027902.1,2454-2472).
gtcacacgtgtgatcaact

SEQ ID NO: 576316 - DNA, 19 bp, Mus musculus
  siRNA target sequence for Tpsg1 (NM_012034.2,86-104).
ctgtggcatcctactgttt

SEQ ID NO: 576317 - DNA, 19 bp, Mus musculus
  siRNA target sequence for Tpsg1 (NM_012034.2,123-141).
ggccatccccaggtttcaa

SEQ ID NO: 576318 - DNA, 19 bp, Mus musculus
  siRNA target sequence for Tpsg1 (NM_012034.2,124-142).
gccatccccaggtttcaaa

SEQ ID NO: 576319 - DNA, 19 bp, Mus musculus
  siRNA target sequence for Tpsg1 (NM_012034.2,126-144).
catccccaggtttcaaact

SEQ ID NO: 576320 - DNA, 19 bp, Mus musculus
  siRNA target sequence for Tpsg1 (NM_012034.2,292-310).
ctgtgaactcgtctgatta

SEQ ID NO: 576321 - DNA, 19 bp, Mus musculus
  siRNA target sequence for Tpsg1 (NM_012034.2,348-366).
ccccacttctccactgtaa

SEQ ID NO: 576322 - DNA, 19 bp, Mus musculus
  siRNA target sequence for Tpsg1 (NM_012034.2,350-368).
ccacttctccactgtaaaa

SEQ ID NO: 576323 - DNA, 19 bp, Mus musculus
  siRNA target sequence for Tpsg1 (NM_012034.2,363-381).
gtaaaacggatcatcatgt

SEQ ID NO: 576324 - DNA, 19 bp, Mus musculus
  siRNA target sequence for Tpsg1 (NM_012034.2,813-831).
cgggttactgcctatgtaa

SEQ ID NO: 576325 - DNA, 19 bp, Mus musculus
  siRNA target sequence for Tpsg1 (NM_012034.2,814-832).
gggttactgcctatgtaaa

SEQ ID NO: 576326 - DNA, 19 bp, Mus musculus
  siRNA target sequence for Tpsg1 (NM_012034.2,816-834).
gttactgcctatgtaaact

SEQ ID NO: 576327 - DNA, 19 bp, Mus musculus
  siRNA target sequence for Tpsg1 (NM_012034.2,948-966).
gtcctgatggccaagtact

SEQ ID NO: 576328 - DNA, 19 bp, Mus musculus
  siRNA target sequence for Tsp50 (NM_146227.2,354-372).
ctcggcaagcccagactaa

SEQ ID NO: 576329 - DNA, 19 bp, Mus musculus
  siRNA target sequence for Tsp50 (NM_146227.2,403-421).
gaccatggctccactgaaa

SEQ ID NO: 576330 - DNA, 19 bp, Mus musculus
  siRNA target sequence for Tsp50 (NM_146227.2,450-468).
ctactgggtccgttcttaa

SEQ ID NO: 576331 - DNA, 19 bp, Mus musculus
  siRNA target sequence for Tsp50 (NM_146227.2,461-479).
gttcttaagacggttcatt

SEQ ID NO: 576332 - DNA, 19 bp, Mus musculus
  siRNA target sequence for Tsp50 (NM_146227.2,658-676).
gaaccatgttaactacata

SEQ ID NO: 576333 - DNA, 19 bp, Mus musculus
  siRNA target sequence for Tsp50 (NM_146227.2,662-680).
catgttaactacatagtga

SEQ ID NO: 576334 - DNA, 19 bp, Mus musculus
  siRNA target sequence for Tsp50 (NM_146227.2,685-703).
ggggagcccgtggattaat

SEQ ID NO: 576335 - DNA, 19 bp, Mus musculus
  siRNA target sequence for Tsp50 (NM_146227.2,687-705).
ggagcccgtggattaatca

SEQ ID NO: 576336 - DNA, 19 bp, Mus musculus
  siRNA target sequence for Tsp50 (NM_146227.2,734-752).
gtccatcgagtcatcataa

SEQ ID NO: 576337 - DNA, 19 bp, Mus musculus
  siRNA target sequence for Tsp50 (NM_146227.2,828-846).
gggggctcaagtacagtaa

SEQ ID NO: 576338 - DNA, 19 bp, Mus musculus
  siRNA target sequence for Tsp50 (NM_146227.2,829-847).
ggggctcaagtacagtaaa

SEQ ID NO: 576339 - DNA, 19 bp, Mus musculus
  siRNA target sequence for Tsp50 (NM_146227.2,830-848).
gggctcaagtacagtaaat

SEQ ID NO: 576340 - DNA, 19 bp, Mus musculus
  siRNA target sequence for Tsp50 (NM_146227.2,1099-1117).
gttctgctatgagataact

SEQ ID NO: 576341 - DNA, 19 bp, Mus musculus
  siRNA target sequence for Tsp50 (NM_146227.2,1198-1216).
cgaggccccacccatcttt

SEQ ID NO: 576342 - DNA, 19 bp, Mus musculus
  siRNA target sequence for 0610013D04Rik (NM_030697.1,154-172).
ccctagctctccctattct

SEQ ID NO: 576343 - DNA, 19 bp, Mus musculus
  siRNA target sequence for 0610013D04Rik (NM_030697.1,156-174).
ctagctctccctattctgt

SEQ ID NO: 576344 - DNA, 19 bp, Mus musculus
  siRNA target sequence for 0610013D04Rik (NM_030697.1,1164-1182).
gaggggtgagcgaactctt

SEQ ID NO: 576345 - DNA, 19 bp, Mus musculus
  siRNA target sequence for 0610013D04Rik (NM_030697.1,1445-1463).
ctcaacggagagtatgaga

SEQ ID NO: 576346 - DNA, 19 bp, Mus musculus
  siRNA target sequence for 0610013D04Rik (NM_030697.1,1683-1701).
cttgcattgctctgaatca

SEQ ID NO: 576347 - DNA, 19 bp, Mus musculus
  siRNA target sequence for 0610013D04Rik (NM_030697.1,1967-1985).
gatgtgaatcaccagaata

SEQ ID NO: 576348 - DNA, 19 bp, Mus musculus
  siRNA target sequence for 0610013D04Rik (NM_030697.1,2052-2070).
ctgtggcccagagactttt

SEQ ID NO: 576349 - DNA, 19 bp, Mus musculus
  siRNA target sequence for 0610013D04Rik (NM_030697.1,2058-2076).
cccagagacttttcagtat

SEQ ID NO: 576350 - DNA, 19 bp, Mus musculus
  siRNA target sequence for 0610013D04Rik (NM_030697.1,2156-2174).
gtagctgccttgctagaat

SEQ ID NO: 576351 - DNA, 19 bp, Mus musculus
  siRNA target sequence for 0610013D04Rik (NM_030697.1,2234-2252).
gagtatggacgccttgata

SEQ ID NO: 576352 - DNA, 19 bp, Mus musculus
  siRNA target sequence for 0610013D04Rik (NM_030697.1,2243-2261).
cgccttgatacagttcaat

SEQ ID NO: 576353 - DNA, 19 bp, Mus musculus
  siRNA target sequence for 0610013D04Rik (NM_030697.1,2246-2264).
cttgatacagttcaattgt

SEQ ID NO: 576354 - DNA, 19 bp, Mus musculus
  siRNA target sequence for 0610013D04Rik (NM_030697.1,2249-2267).
gatacagttcaattgttgt

SEQ ID NO: 576355 - DNA, 19 bp, Mus musculus
  siRNA target sequence for 0610013D04Rik (NM_030697.1,2287-2305).
cctaaccatcttagacaat

SEQ ID NO: 576356 - DNA, 19 bp, Mus musculus
  siRNA target sequence for 0610013D04Rik (NM_030697.1,2369-2387).
catgcccacctgacatcaa

SEQ ID NO: 576357 - DNA, 19 bp, Mus musculus
  siRNA target sequence for 6030446N20Rik (NM_178801.2,219-237).
cagtccaagatctgatgtt

SEQ ID NO: 576358 - DNA, 19 bp, Mus musculus
  siRNA target sequence for 6030446N20Rik (NM_178801.2,224-242).
caagatctgatgttttgat

SEQ ID NO: 576359 - DNA, 19 bp, Mus musculus
  siRNA target sequence for 6030446N20Rik (NM_178801.2,260-278).
cgctgtttgtgggcataat

SEQ ID NO: 576360 - DNA, 19 bp, Mus musculus
  siRNA target sequence for 6030446N20Rik (NM_178801.2,285-303).
ggggtccaaagctttgtct

SEQ ID NO: 576361 - DNA, 19 bp, Mus musculus
  siRNA target sequence for 6030446N20Rik (NM_178801.2,286-304).
gggtccaaagctttgtcta

SEQ ID NO: 576362 - DNA, 19 bp, Mus musculus
  siRNA target sequence for 6030446N20Rik (NM_178801.2,488-506).
gggctcttatccacatctt

SEQ ID NO: 576363 - DNA, 19 bp, Mus musculus
  siRNA target sequence for 6030446N20Rik (NM_178801.2,489-507).
ggctcttatccacatcttt

SEQ ID NO: 576364 - DNA, 19 bp, Mus musculus
  siRNA target sequence for 6030446N20Rik (NM_178801.2,490-508).
gctcttatccacatctttt

SEQ ID NO: 576365 - DNA, 19 bp, Mus musculus
  siRNA target sequence for 6030446N20Rik (NM_178801.2,549-567).
cactgtgctaagtgacatt

SEQ ID NO: 576366 - DNA, 19 bp, Mus musculus
  siRNA target sequence for 6030446N20Rik (NM_178801.2,571-589).
cagcagtacttaaactata

SEQ ID NO: 576367 - DNA, 19 bp, Mus musculus
  siRNA target sequence for 6030446N20Rik (NM_178801.2,573-591).
gcagtacttaaactatata

SEQ ID NO: 576368 - DNA, 19 bp, Mus musculus
  siRNA target sequence for 6030446N20Rik (NM_178801.2,600-618).
ggtactcctggcatttgca

SEQ ID NO: 576369 - DNA, 19 bp, Mus musculus
  siRNA target sequence for 6030446N20Rik (NM_178801.2,601-619).
gtactcctggcatttgcat

SEQ ID NO: 576370 - DNA, 19 bp, Mus musculus
  siRNA target sequence for 6030446N20Rik (NM_178801.2,813-831).
gtcgatgttgctgtttgat

SEQ ID NO: 576371 - DNA, 19 bp, Mus musculus
  siRNA target sequence for 6030446N20Rik (NM_178801.2,815-833).
cgatgttgctgtttgatat

SEQ ID NO: 576372 - DNA, 19 bp, Mus musculus
  siRNA target sequence for Col6a1 (NM_009933.1,274-292).
ccttgaggctgaaacctta

SEQ ID NO: 576373 - DNA, 19 bp, Mus musculus
  siRNA target sequence for Col6a1 (NM_009933.1,371-389).
ccgcaacctggtttggaat

SEQ ID NO: 576374 - DNA, 19 bp, Mus musculus
  siRNA target sequence for Col6a1 (NM_009933.1,514-532).
ccgactgcgccattaagaa

SEQ ID NO: 576375 - DNA, 19 bp, Mus musculus
  siRNA target sequence for Col6a1 (NM_009933.1,562-580).
cccacctgaaggagaacaa

SEQ ID NO: 576376 - DNA, 19 bp, Mus musculus
  siRNA target sequence for Col6a1 (NM_009933.1,672-690).
ctgggcatcaaggtctttt

SEQ ID NO: 576377 - DNA, 19 bp, Mus musculus
  siRNA target sequence for Col6a1 (NM_009933.1,676-694).
gcatcaaggtcttttctgt

SEQ ID NO: 576378 - DNA, 19 bp, Mus musculus
  siRNA target sequence for Col6a1 (NM_009933.1,713-731).
cctggagccacgtctaagt

SEQ ID NO: 576379 - DNA, 19 bp, Mus musculus
  siRNA target sequence for Col6a1 (NM_009933.1,714-732).
ctggagccacgtctaagta

SEQ ID NO: 576380 - DNA, 19 bp, Mus musculus
  siRNA target sequence for Col6a1 (NM_009933.1,717-735).
gagccacgtctaagtatca

SEQ ID NO: 576381 - DNA, 19 bp, Mus musculus
  siRNA target sequence for Col6a1 (NM_009933.1,719-737).
gccacgtctaagtatcatt

SEQ ID NO: 576382 - DNA, 19 bp, Mus musculus
  siRNA target sequence for Col6a1 (NM_009933.1,829-847).
ccattgtggacatgattaa

SEQ ID NO: 576383 - DNA, 19 bp, Mus musculus
  siRNA target sequence for Col6a1 (NM_009933.1,830-848).
cattgtggacatgattaaa

SEQ ID NO: 576384 - DNA, 19 bp, Mus musculus
  siRNA target sequence for Col6a1 (NM_009933.1,1352-1370).
ggccggtgatgaaggaaat

SEQ ID NO: 576385 - DNA, 19 bp, Mus musculus
  siRNA target sequence for Col6a1 (NM_009933.1,1539-1557).
cccattggacctaaaggat

SEQ ID NO: 576386 - DNA, 19 bp, Mus musculus
  siRNA target sequence for Col6a1 (NM_009933.1,1672-1690).
gaaacggcacggaaggttt

SEQ ID NO: 576387 - DNA, 19 bp, Mus musculus
  siRNA target sequence for Col6a1 (NM_009933.1,1797-1815).
gaggataacaacgacattt

SEQ ID NO: 576388 - DNA, 19 bp, Mus musculus
  siRNA target sequence for Col6a1 (NM_009933.1,1799-1817).
ggataacaacgacatttca

SEQ ID NO: 576389 - DNA, 19 bp, Mus musculus
  siRNA target sequence for Col6a1 (NM_009933.1,2069-2087).
ggatgagctggtcaaattt

SEQ ID NO: 576390 - DNA, 19 bp, Mus musculus
  siRNA target sequence for Col6a1 (NM_009933.1,2173-2191).
gcaacgcccaggacttcaa

SEQ ID NO: 576391 - DNA, 19 bp, Mus musculus
  siRNA target sequence for Col6a1 (NM_009933.1,2174-2192).
caacgcccaggacttcaaa

SEQ ID NO: 576392 - DNA, 19 bp, Mus musculus
  siRNA target sequence for Col6a1 (NM_009933.1,2292-2310).
cgaattgccctggtcatta

SEQ ID NO: 576393 - DNA, 19 bp, Mus musculus
  siRNA target sequence for Col6a1 (NM_009933.1,2425-2443).
ccgaccagctcaatgtcat

SEQ ID NO: 576394 - DNA, 19 bp, Mus musculus
  siRNA target sequence for Col6a1 (NM_009933.1,2426-2444).
cgaccagctcaatgtcatt

SEQ ID NO: 576395 - DNA, 19 bp, Mus musculus
  siRNA target sequence for Col6a1 (NM_009933.1,2511-2529).
ctcgatgacggctttctga

SEQ ID NO: 576396 - DNA, 19 bp, Mus musculus
  siRNA target sequence for Col6a1 (NM_009933.1,2519-2537).
cggctttctgaagaacata

SEQ ID NO: 576397 - DNA, 19 bp, Mus musculus
  siRNA target sequence for Col6a1 (NM_009933.1,2539-2557).
cagcccagatctgtataga

SEQ ID NO: 576398 - DNA, 19 bp, Mus musculus
  siRNA target sequence for Col6a1 (NM_009933.1,2739-2757).
gtggccgtggtacagtata

SEQ ID NO: 576399 - DNA, 19 bp, Mus musculus
  siRNA target sequence for Col6a1 (NM_009933.1,2741-2759).
ggccgtggtacagtatagt

SEQ ID NO: 576400 - DNA, 19 bp, Mus musculus
  siRNA target sequence for Col6a1 (NM_009933.1,2884-2902).
gctacgtgactcgtttcta

SEQ ID NO: 576401 - DNA, 19 bp, Mus musculus
  siRNA target sequence for Col6a1 (NM_009933.1,2930-2948).
gaagagagtgctgttgttt

SEQ ID NO: 576402 - DNA, 19 bp, Mus musculus
  siRNA target sequence for Col6a1 (NM_009933.1,3009-3027).
cagcgtgcaggcattgaga

SEQ ID NO: 576403 - DNA, 19 bp, Mus musculus
  siRNA target sequence for Col6a1 (NM_009933.1,3013-3031).
gtgcaggcattgagatctt

SEQ ID NO: 576404 - DNA, 19 bp, Mus musculus
  siRNA target sequence for E130306I01Rik (NM_145471.1,630-648).
ctgacagctcggattcaca

SEQ ID NO: 576405 - DNA, 19 bp, Mus musculus
  siRNA target sequence for E130306I01Rik (NM_145471.1,838-856).
caccagtccccgtggaaat

SEQ ID NO: 576406 - DNA, 19 bp, Mus musculus
  siRNA target sequence for E130306I01Rik (NM_145471.1,989-1007).
ggccctgctacagctttta

SEQ ID NO: 576407 - DNA, 19 bp, Mus musculus
  siRNA target sequence for E130306I01Rik (NM_145471.1,1092-1110).
cgctttcagcacttagcta

SEQ ID NO: 576408 - DNA, 19 bp, Mus musculus
  siRNA target sequence for E130306I01Rik (NM_145471.1,1166-1184).
ggacaactttcgctacttt

SEQ ID NO: 576409 - DNA, 19 bp, Mus musculus
  siRNA target sequence for E130306I01Rik (NM_145471.1,1359-1377).
gctgcccatctcaaaaagt

SEQ ID NO: 576410 - DNA, 19 bp, Mus musculus
  siRNA target sequence for E130306I01Rik (NM_145471.1,1365-1383).
catctcaaaaagttggatt

SEQ ID NO: 576411 - DNA, 19 bp, Mus musculus
  siRNA target sequence for E130306I01Rik (NM_145471.1,1368-1386).
ctcaaaaagttggatttga

SEQ ID NO: 576412 - DNA, 19 bp, Mus musculus
  siRNA target sequence for E130306I01Rik (NM_145471.1,1541-1559).
ccgctaccttggtctctat

SEQ ID NO: 576413 - DNA, 19 bp, Mus musculus
  siRNA target sequence for E130306I01Rik (NM_145471.1,1556-1574).
ctatggcaaccctttgtct

SEQ ID NO: 576414 - DNA, 19 bp, Mus musculus
  siRNA target sequence for E130306I01Rik (NM_145471.1,1571-1589).
gtctatggcaggacttaaa

SEQ ID NO: 576415 - DNA, 19 bp, Mus musculus
  siRNA target sequence for E130306I01Rik (NM_145471.1,1573-1591).
ctatggcaggacttaaaga

SEQ ID NO: 576416 - DNA, 19 bp, Mus musculus
  siRNA target sequence for E130306I01Rik (NM_145471.1,1732-1750).
gggtggaagctgagttaca

SEQ ID NO: 576417 - DNA, 19 bp, Mus musculus
  siRNA target sequence for E130306I01Rik (NM_145471.1,1809-1827).
cggctagctgcagactatt

SEQ ID NO: 576418 - DNA, 19 bp, Mus musculus
  siRNA target sequence for E130306I01Rik (NM_145471.1,1810-1828).
ggctagctgcagactattt

SEQ ID NO: 576419 - DNA, 19 bp, Mus musculus
  siRNA target sequence for E130306I01Rik (NM_145471.1,1812-1830).
ctagctgcagactatttta

SEQ ID NO: 576420 - DNA, 19 bp, Mus musculus
  siRNA target sequence for Furin (NM_011046.1,565-583).
ccagatcttcggtgactat

SEQ ID NO: 576421 - DNA, 19 bp, Mus musculus
  siRNA target sequence for Furin (NM_011046.1,774-792).
ctcagcgagacctgaatgt

SEQ ID NO: 576422 - DNA, 19 bp, Mus musculus
  siRNA target sequence for Furin (NM_011046.1,776-794).
cagcgagacctgaatgtga

SEQ ID NO: 576423 - DNA, 19 bp, Mus musculus
  siRNA target sequence for Furin (NM_011046.1,903-921).
ccagttttgacgtgaatga

SEQ ID NO: 576424 - DNA, 19 bp, Mus musculus
  siRNA target sequence for Furin (NM_011046.1,942-960).
ctcggtacacacagatgaa

SEQ ID NO: 576425 - DNA, 19 bp, Mus musculus
  siRNA target sequence for Furin (NM_011046.1,945-963).
ggtacacacagatgaatga

SEQ ID NO: 576426 - DNA, 19 bp, Mus musculus
  siRNA target sequence for Furin (NM_011046.1,1023-1041).
gtggcgtaggtgtagctta

SEQ ID NO: 576427 - DNA, 19 bp, Mus musculus
  siRNA target sequence for Furin (NM_011046.1,1026-1044).
gcgtaggtgtagcttacaa

SEQ ID NO: 576428 - DNA, 19 bp, Mus musculus
  siRNA target sequence for Furin (NM_011046.1,1027-1045).
cgtaggtgtagcttacaat

SEQ ID NO: 576429 - DNA, 19 bp, Mus musculus
  siRNA target sequence for Furin (NM_011046.1,1506-1524).
ccttggcagctggtatcat

SEQ ID NO: 576430 - DNA, 19 bp, Mus musculus
  siRNA target sequence for Furin (NM_011046.1,1603-1621).
ccacctcaacgctgatgat

SEQ ID NO: 576431 - DNA, 19 bp, Mus musculus
  siRNA target sequence for Furin (NM_011046.1,1604-1622).
cacctcaacgctgatgatt

SEQ ID NO: 576432 - DNA, 19 bp, Mus musculus
  siRNA target sequence for Furin (NM_011046.1,1644-1662).
ggaaagtgagccattcgta

SEQ ID NO: 576433 - DNA, 19 bp, Mus musculus
  siRNA target sequence for Furin (NM_011046.1,1645-1663).
gaaagtgagccattcgtat

SEQ ID NO: 576434 - DNA, 19 bp, Mus musculus
  siRNA target sequence for Furin (NM_011046.1,1729-1747).
ccagcggaagtgcattgtt

SEQ ID NO: 576435 - DNA, 19 bp, Mus musculus
  siRNA target sequence for Furin (NM_011046.1,1733-1751).
cggaagtgcattgttgaaa

SEQ ID NO: 576436 - DNA, 19 bp, Mus musculus
  siRNA target sequence for Furin (NM_011046.1,1941-1959).
ctgccagaccacatgacta

SEQ ID NO: 576437 - DNA, 19 bp, Mus musculus
  siRNA target sequence for Furin (NM_011046.1,1979-1997).
gattgggctttcatgacaa

SEQ ID NO: 576438 - DNA, 19 bp, Mus musculus
  siRNA target sequence for Furin (NM_011046.1,2033-2051).
gtcctagagattgaaaata

SEQ ID NO: 576439 - DNA, 19 bp, Mus musculus
  siRNA target sequence for Furin (NM_011046.1,2072-2090).
gggacgctgaccaagttca

SEQ ID NO: 576440 - DNA, 19 bp, Mus musculus
  siRNA target sequence for Furin (NM_011046.1,2086-2104).
gttcactctcgttctgtat

SEQ ID NO: 576441 - DNA, 19 bp, Mus musculus
  siRNA target sequence for Furin (NM_011046.1,2185-2203).
gtgtgaggaaggttactct

SEQ ID NO: 576442 - DNA, 19 bp, Mus musculus
  siRNA target sequence for Furin (NM_011046.1,2248-2266).
cccccaagtccttgataca

SEQ ID NO: 576443 - DNA, 19 bp, Mus musculus
  siRNA target sequence for Furin (NM_011046.1,2614-2632).
cagcttccggggagtgaaa

SEQ ID NO: 576444 - DNA, 19 bp, Mus musculus
  siRNA target sequence for Furin (NM_011046.1,2616-2634).
gcttccggggagtgaaagt

SEQ ID NO: 576445 - DNA, 19 bp, Mus musculus
  siRNA target sequence for Mbtps1 (NM_019709.2,548-566).
ggtggaattctcttcaact

SEQ ID NO: 576446 - DNA, 19 bp, Mus musculus
  siRNA target sequence for Mbtps1 (NM_019709.2,565-583).
ctgtggtggagtacgaata

SEQ ID NO: 576447 - DNA, 19 bp, Mus musculus
  siRNA target sequence for Mbtps1 (NM_019709.2,567-585).
gtggtggagtacgaatata

SEQ ID NO: 576448 - DNA, 19 bp, Mus musculus
  siRNA target sequence for Mbtps1 (NM_019709.2,569-587).
ggtggagtacgaatatatt

SEQ ID NO: 576449 - DNA, 19 bp, Mus musculus
  siRNA target sequence for Mbtps1 (NM_019709.2,591-609).
gctttcaacggatacttca

SEQ ID NO: 576450 - DNA, 19 bp, Mus musculus
  siRNA target sequence for Mbtps1 (NM_019709.2,613-631).
ccaaagctagaaactcatt

SEQ ID NO: 576451 - DNA, 19 bp, Mus musculus
  siRNA target sequence for Mbtps1 (NM_019709.2,754-772).
ggctgctcacacttgaaga

SEQ ID NO: 576452 - DNA, 19 bp, Mus musculus
  siRNA target sequence for Mbtps1 (NM_019709.2,796-814).
caccccagcggaaagtctt

SEQ ID NO: 576453 - DNA, 19 bp, Mus musculus
  siRNA target sequence for Mbtps1 (NM_019709.2,812-830).
ctttcgttccctcaagttt

SEQ ID NO: 576454 - DNA, 19 bp, Mus musculus
  siRNA target sequence for Mbtps1 (NM_019709.2,842-860).
ccccatcgtgccctgtaat

SEQ ID NO: 576455 - DNA, 19 bp, Mus musculus
  siRNA target sequence for Mbtps1 (NM_019709.2,942-960).
gcaacaggaagacattcaa

SEQ ID NO: 576456 - DNA, 19 bp, Mus musculus
  siRNA target sequence for Mbtps1 (NM_019709.2,1031-1049).
gggatacacaggtgctaat

SEQ ID NO: 576457 - DNA, 19 bp, Mus musculus
  siRNA target sequence for Mbtps1 (NM_019709.2,1241-1259).
cagggtctttaccaacaat

SEQ ID NO: 576458 - DNA, 19 bp, Mus musculus
  siRNA target sequence for Mbtps1 (NM_019709.2,1252-1270).
ccaacaatcaggtgtctta

SEQ ID NO: 576459 - DNA, 19 bp, Mus musculus
  siRNA target sequence for Mbtps1 (NM_019709.2,1260-1278).
caggtgtcttacacatctt

SEQ ID NO: 576460 - DNA, 19 bp, Mus musculus
  siRNA target sequence for Mbtps1 (NM_019709.2,1355-1373).
catggatcatccgtttgtt

SEQ ID NO: 576461 - DNA, 19 bp, Mus musculus
  siRNA target sequence for Mbtps1 (NM_019709.2,1374-1392).
gacaaggtgtgggaattaa

SEQ ID NO: 576462 - DNA, 19 bp, Mus musculus
  siRNA target sequence for Mbtps1 (NM_019709.2,1376-1394).
caaggtgtgggaattaaca

SEQ ID NO: 576463 - DNA, 19 bp, Mus musculus
  siRNA target sequence for Mbtps1 (NM_019709.2,1393-1411).
cagctaacaatgtaattat

SEQ ID NO: 576464 - DNA, 19 bp, Mus musculus
  siRNA target sequence for Mbtps1 (NM_019709.2,1396-1414).
ctaacaatgtaattatggt

SEQ ID NO: 576465 - DNA, 19 bp, Mus musculus
  siRNA target sequence for Mbtps1 (NM_019709.2,1573-1591).
gtgtgaagcctgacattgt

SEQ ID NO: 576466 - DNA, 19 bp, Mus musculus
  siRNA target sequence for Mbtps1 (NM_019709.2,1683-1701).
gccgtcaccttgttagtaa

SEQ ID NO: 576467 - DNA, 19 bp, Mus musculus
  siRNA target sequence for Mbtps1 (NM_019709.2,1735-1753).
ccagtgtgaagcaagcttt

SEQ ID NO: 576468 - DNA, 19 bp, Mus musculus
  siRNA target sequence for Mbtps1 (NM_019709.2,1771-1789).
gacttcctggggtcaacat

SEQ ID NO: 576469 - DNA, 19 bp, Mus musculus
  siRNA target sequence for Mbtps1 (NM_019709.2,1773-1791).
cttcctggggtcaacatgt

SEQ ID NO: 576470 - DNA, 19 bp, Mus musculus
  siRNA target sequence for Mbtps1 (NM_019709.2,1941-1959).
ggaatgccaacaatcgtta

SEQ ID NO: 576471 - DNA, 19 bp, Mus musculus
  siRNA target sequence for Mbtps1 (NM_019709.2,1942-1960).
gaatgccaacaatcgttaa

SEQ ID NO: 576472 - DNA, 19 bp, Mus musculus
  siRNA target sequence for Mbtps1 (NM_019709.2,1947-1965).
ccaacaatcgttaatgtca

SEQ ID NO: 576473 - DNA, 19 bp, Mus musculus
  siRNA target sequence for Mbtps1 (NM_019709.2,1982-2000).
gggcgtcacaggaagaatt

SEQ ID NO: 576474 - DNA, 19 bp, Mus musculus
  siRNA target sequence for Mbtps1 (NM_019709.2,2011-2029).
ctgagtggcgaccctattt

SEQ ID NO: 576475 - DNA, 19 bp, Mus musculus
  siRNA target sequence for Mbtps1 (NM_019709.2,2015-2033).
gtggcgaccctatttacca

SEQ ID NO: 576476 - DNA, 19 bp, Mus musculus
  siRNA target sequence for Mbtps1 (NM_019709.2,2084-2102).
gccctggtcaggttacctt

SEQ ID NO: 576477 - DNA, 19 bp, Mus musculus
  siRNA target sequence for Mbtps1 (NM_019709.2,2152-2170).
ctcagggccacatcatgat

SEQ ID NO: 576478 - DNA, 19 bp, Mus musculus
  siRNA target sequence for Mbtps1 (NM_019709.2,2382-2400).
cacgtccacaccaacttca

SEQ ID NO: 576479 - DNA, 19 bp, Mus musculus
  siRNA target sequence for Mbtps1 (NM_019709.2,2392-2410).
ccaacttcagggacatgta

SEQ ID NO: 576480 - DNA, 19 bp, Mus musculus
  siRNA target sequence for Mbtps1 (NM_019709.2,2566-2584).
gcctttccctcgtcatctt

SEQ ID NO: 576481 - DNA, 19 bp, Mus musculus
  siRNA target sequence for Mbtps1 (NM_019709.2,2591-2609).
ctggtacaacacttctgtt

SEQ ID NO: 576482 - DNA, 19 bp, Mus musculus
  siRNA target sequence for Mbtps1 (NM_019709.2,2720-2738).
gttcagtgacggcctatat

SEQ ID NO: 576483 - DNA, 19 bp, Mus musculus
  siRNA target sequence for Mbtps1 (NM_019709.2,2723-2741).
cagtgacggcctatatgaa

SEQ ID NO: 576484 - DNA, 19 bp, Mus musculus
  siRNA target sequence for Mbtps1 (NM_019709.2,2758-2776).
caaaccatgacatgtacta

SEQ ID NO: 576485 - DNA, 19 bp, Mus musculus
  siRNA target sequence for Mbtps1 (NM_019709.2,2786-2804).
gtgcagcatcgccaagttt

SEQ ID NO: 576486 - DNA, 19 bp, Mus musculus
  siRNA target sequence for Mbtps1 (NM_019709.2,2795-2813).
cgccaagtttccagaagat

SEQ ID NO: 576487 - DNA, 19 bp, Mus musculus
  siRNA target sequence for Mbtps1 (NM_019709.2,2893-2911).
ccattttggggctttatca

SEQ ID NO: 576488 - DNA, 19 bp, Mus musculus
  siRNA target sequence for Mbtps1 (NM_019709.2,3009-3027).
gcgctccttcagtacacat

SEQ ID NO: 576489 - DNA, 19 bp, Mus musculus
  siRNA target sequence for Mbtps1 (NM_019709.2,3014-3032).
ccttcagtacacatcctat

SEQ ID NO: 576490 - DNA, 19 bp, Mus musculus
  siRNA target sequence for Mbtps1 (NM_019709.2,3137-3155).
gtactccaaagttcttgaa

SEQ ID NO: 576491 - DNA, 19 bp, Mus musculus
  siRNA target sequence for Mbtps1 (NM_019709.2,3192-3210).
gcctgtccacatttgtcat

SEQ ID NO: 576492 - DNA, 19 bp, Mus musculus
  siRNA target sequence for Mbtps1 (NM_019709.2,3214-3232).
ccaagccacagcctttgaa

SEQ ID NO: 576493 - DNA, 19 bp, Mus musculus
  siRNA target sequence for Mbtps1 (NM_019709.2,3241-3259).
cacccagtaatctttggaa

SEQ ID NO: 576494 - DNA, 19 bp, Mus musculus
  siRNA target sequence for Mbtps1 (NM_019709.2,3245-3263).
cagtaatctttggaaacat

SEQ ID NO: 576495 - DNA, 19 bp, Mus musculus
  siRNA target sequence for Odz1 (NM_011855.2,314-332).
gatagaattctgtgaaaca

SEQ ID NO: 576496 - DNA, 19 bp, Mus musculus
  siRNA target sequence for Odz1 (NM_011855.2,325-343).
gtgaaacacctcctacttt

SEQ ID NO: 576497 - DNA, 19 bp, Mus musculus
  siRNA target sequence for Odz1 (NM_011855.2,395-413).
gctggagatgggatctgat

SEQ ID NO: 576498 - DNA, 19 bp, Mus musculus
  siRNA target sequence for Odz1 (NM_011855.2,401-419).
gatgggatctgatgtagat

SEQ ID NO: 576499 - DNA, 19 bp, Mus musculus
  siRNA target sequence for Odz1 (NM_011855.2,406-424).
gatctgatgtagatacaga

SEQ ID NO: 576500 - DNA, 19 bp, Mus musculus
  siRNA target sequence for Odz1 (NM_011855.2,464-482).
gtggataagaggcatgaaa

SEQ ID NO: 576501 - DNA, 19 bp, Mus musculus
  siRNA target sequence for Odz1 (NM_011855.2,467-485).
gataagaggcatgaaatca

SEQ ID NO: 576502 - DNA, 19 bp, Mus musculus
  siRNA target sequence for Odz1 (NM_011855.2,533-551).
gaccgacactgatcatgaa

SEQ ID NO: 576503 - DNA, 19 bp, Mus musculus
  siRNA target sequence for Odz1 (NM_011855.2,554-572).
gaagtctgatggggaaaat

SEQ ID NO: 576504 - DNA, 19 bp, Mus musculus
  siRNA target sequence for Odz1 (NM_011855.2,557-575).
gtctgatggggaaaatggt

SEQ ID NO: 576505 - DNA, 19 bp, Mus musculus
  siRNA target sequence for Odz1 (NM_011855.2,559-577).
ctgatggggaaaatggttt

SEQ ID NO: 576506 - DNA, 19 bp, Mus musculus
  siRNA target sequence for Odz1 (NM_011855.2,561-579).
gatggggaaaatggtttta

SEQ ID NO: 576507 - DNA, 19 bp, Mus musculus
  siRNA target sequence for Odz1 (NM_011855.2,564-582).
ggggaaaatggttttaaat

SEQ ID NO: 576508 - DNA, 19 bp, Mus musculus
  siRNA target sequence for Odz1 (NM_011855.2,565-583).
gggaaaatggttttaaatt

SEQ ID NO: 576509 - DNA, 19 bp, Mus musculus
  siRNA target sequence for Odz1 (NM_011855.2,744-762).
caaagaagatcaatgacta

SEQ ID NO: 576510 - DNA, 19 bp, Mus musculus
  siRNA target sequence for Odz1 (NM_011855.2,806-824).
cacacaggattcagttcat

SEQ ID NO: 576511 - DNA, 19 bp, Mus musculus
  siRNA target sequence for Odz1 (NM_011855.2,935-953).
ccctctgacatctaatact

SEQ ID NO: 576512 - DNA, 19 bp, Mus musculus
  siRNA target sequence for Odz1 (NM_011855.2,999-1017).
cgacctgccttcactttta

SEQ ID NO: 576513 - DNA, 19 bp, Mus musculus
  siRNA target sequence for Odz1 (NM_011855.2,1058-1076).
gagcgccactgcaatcaca

SEQ ID NO: 576514 - DNA, 19 bp, Mus musculus
  siRNA target sequence for Odz1 (NM_011855.2,1079-1097).
gactttggccttgttacta

SEQ ID NO: 576515 - DNA, 19 bp, Mus musculus
  siRNA target sequence for Odz1 (NM_011855.2,1088-1106).
cttgttactagcctatgta

SEQ ID NO: 576516 - DNA, 19 bp, Mus musculus
  siRNA target sequence for Odz1 (NM_011855.2,1265-1283).
ccagaagggacgagcaatt

SEQ ID NO: 576517 - DNA, 19 bp, Mus musculus
  siRNA target sequence for Odz1 (NM_011855.2,1286-1304).
cactggggaagttgacatt

SEQ ID NO: 576518 - DNA, 19 bp, Mus musculus
  siRNA target sequence for Odz1 (NM_011855.2,1345-1363).
ggcgtttccagattactat

SEQ ID NO: 576519 - DNA, 19 bp, Mus musculus
  siRNA target sequence for Odz1 (NM_011855.2,1371-1389).
cctatatatctgaaattca

SEQ ID NO: 576520 - DNA, 19 bp, Mus musculus
  siRNA target sequence for Odz1 (NM_011855.2,1447-1465).
ctacacacactcagtttga

SEQ ID NO: 576521 - DNA, 19 bp, Mus musculus
  siRNA target sequence for Odz1 (NM_011855.2,1460-1478).
gtttgatttcgtgaaatta

SEQ ID NO: 576522 - DNA, 19 bp, Mus musculus
  siRNA target sequence for Odz1 (NM_011855.2,1544-1562).
gaatctgatcttaacatca

SEQ ID NO: 576523 - DNA, 19 bp, Mus musculus
  siRNA target sequence for Odz1 (NM_011855.2,1571-1589).
gacaggtttcatagagtat

SEQ ID NO: 576524 - DNA, 19 bp, Mus musculus
  siRNA target sequence for Odz1 (NM_011855.2,1573-1591).
caggtttcatagagtatat

SEQ ID NO: 576525 - DNA, 19 bp, Mus musculus
  siRNA target sequence for Odz1 (NM_011855.2,1576-1594).
gtttcatagagtatatgga

SEQ ID NO: 576526 - DNA, 19 bp, Mus musculus
  siRNA target sequence for Odz1 (NM_011855.2,1592-1610).
ggaccaaggaccttggtat

SEQ ID NO: 576527 - DNA, 19 bp, Mus musculus
  siRNA target sequence for Odz1 (NM_011855.2,1644-1662).
caagtatttgtgctaacta

SEQ ID NO: 576528 - DNA, 19 bp, Mus musculus
  siRNA target sequence for Odz1 (NM_011855.2,1655-1673).
gctaactacagcaattgaa

SEQ ID NO: 576529 - DNA, 19 bp, Mus musculus
  siRNA target sequence for Odz1 (NM_011855.2,1656-1674).
ctaactacagcaattgaaa

SEQ ID NO: 576530 - DNA, 19 bp, Mus musculus
  siRNA target sequence for Odz1 (NM_011855.2,1679-1697).
ggatgactgctcaaccaat

SEQ ID NO: 576531 - DNA, 19 bp, Mus musculus
  siRNA target sequence for Odz1 (NM_011855.2,1683-1701).
gactgctcaaccaattgta

SEQ ID NO: 576532 - DNA, 19 bp, Mus musculus
  siRNA target sequence for Odz1 (NM_011855.2,1685-1703).
ctgctcaaccaattgtaat

SEQ ID NO: 576533 - DNA, 19 bp, Mus musculus
  siRNA target sequence for Odz1 (NM_011855.2,1795-1813).
gtggaaacggagaatacga

SEQ ID NO: 576534 - DNA, 19 bp, Mus musculus
  siRNA target sequence for Odz1 (NM_011855.2,1798-1816).
gaaacggagaatacgaaaa

SEQ ID NO: 576535 - DNA, 19 bp, Mus musculus
  siRNA target sequence for Odz1 (NM_011855.2,1912-1930).
gcatcatgggagtttgcat

SEQ ID NO: 576536 - DNA, 19 bp, Mus musculus
  siRNA target sequence for Odz1 (NM_011855.2,2056-2074).
gcgaaactccacttcctat

SEQ ID NO: 576537 - DNA, 19 bp, Mus musculus
  siRNA target sequence for Odz1 (NM_011855.2,2057-2075).
cgaaactccacttcctata

SEQ ID NO: 576538 - DNA, 19 bp, Mus musculus
  siRNA target sequence for Odz1 (NM_011855.2,2092-2110).
ccggacatggaacttttct

SEQ ID NO: 576539 - DNA, 19 bp, Mus musculus
  siRNA target sequence for Odz1 (NM_011855.2,2093-2111).
cggacatggaacttttctt

SEQ ID NO: 576540 - DNA, 19 bp, Mus musculus
  siRNA target sequence for Odz1 (NM_011855.2,2237-2255).
ctgggtaggaccaacatgt

SEQ ID NO: 576541 - DNA, 19 bp, Mus musculus
  siRNA target sequence for Odz1 (NM_011855.2,2336-2354).
gggcgaccactgcacaatt

SEQ ID NO: 576542 - DNA, 19 bp, Mus musculus
  siRNA target sequence for Odz1 (NM_011855.2,2476-2494).
gcaacatcgtcatggaaat

SEQ ID NO: 576543 - DNA, 19 bp, Mus musculus
  siRNA target sequence for Odz1 (NM_011855.2,2543-2561).
cgtggacccagattgttgt

SEQ ID NO: 576544 - DNA, 19 bp, Mus musculus
  siRNA target sequence for Odz1 (NM_011855.2,2546-2564).
ggacccagattgttgtcaa

SEQ ID NO: 576545 - DNA, 19 bp, Mus musculus
  siRNA target sequence for Odz1 (NM_011855.2,2550-2568).
ccagattgttgtcaacaaa

SEQ ID NO: 576546 - DNA, 19 bp, Mus musculus
  siRNA target sequence for Odz1 (NM_011855.2,2560-2578).
gtcaacaaagcaactgtta

SEQ ID NO: 576547 - DNA, 19 bp, Mus musculus
  siRNA target sequence for Odz1 (NM_011855.2,2613-2631).
cttgacctcatccaacaaa

SEQ ID NO: 576548 - DNA, 19 bp, Mus musculus
  siRNA target sequence for Odz1 (NM_011855.2,2654-2672).
cacttcaagactcttctat

SEQ ID NO: 576549 - DNA, 19 bp, Mus musculus
  siRNA target sequence for Odz1 (NM_011855.2,2688-2706).
cttattggcaaggatagta

SEQ ID NO: 576550 - DNA, 19 bp, Mus musculus
  siRNA target sequence for Odz1 (NM_011855.2,2699-2717).
ggatagtactcatgttgtt

SEQ ID NO: 576551 - DNA, 19 bp, Mus musculus
  siRNA target sequence for Odz1 (NM_011855.2,2715-2733).
gttcctcaagatatctcat

SEQ ID NO: 576552 - DNA, 19 bp, Mus musculus
  siRNA target sequence for Odz1 (NM_011855.2,2721-2739).
caagatatctcatttgaca

SEQ ID NO: 576553 - DNA, 19 bp, Mus musculus
  siRNA target sequence for Odz1 (NM_011855.2,2741-2759).
caggcgtgcttgtgtgatt

SEQ ID NO: 576554 - DNA, 19 bp, Mus musculus
  siRNA target sequence for Odz1 (NM_011855.2,2791-2809).
cgcttgtgggagtcaatgt

SEQ ID NO: 576555 - DNA, 19 bp, Mus musculus
  siRNA target sequence for Odz1 (NM_011855.2,2799-2817).
ggagtcaatgtcagtttct

SEQ ID NO: 576556 - DNA, 19 bp, Mus musculus
  siRNA target sequence for Odz1 (NM_011855.2,2891-2909).
ctctgtagtcttaatcttt

SEQ ID NO: 576557 - DNA, 19 bp, Mus musculus
  siRNA target sequence for Odz1 (NM_011855.2,3008-3026).
cgcaccatcctgtgatatt

SEQ ID NO: 576558 - DNA, 19 bp, Mus musculus
  siRNA target sequence for Odz1 (NM_011855.2,3009-3027).
gcaccatcctgtgatattt

SEQ ID NO: 576559 - DNA, 19 bp, Mus musculus
  siRNA target sequence for Odz1 (NM_011855.2,3040-3058).
gcccaaatcctattgtact

SEQ ID NO: 576560 - DNA, 19 bp, Mus musculus
  siRNA target sequence for Odz1 (NM_011855.2,3041-3059).
cccaaatcctattgtactt

SEQ ID NO: 576561 - DNA, 19 bp, Mus musculus
  siRNA target sequence for Odz1 (NM_011855.2,3115-3133).
ccgagctgcaggttgtaca

SEQ ID NO: 576562 - DNA, 19 bp, Mus musculus
  siRNA target sequence for Odz1 (NM_011855.2,3190-3208).
cacctgggtataaaacttt

SEQ ID NO: 576563 - DNA, 19 bp, Mus musculus
  siRNA target sequence for Odz1 (NM_011855.2,3205-3223).
ctttgctacggatcctttt

SEQ ID NO: 576564 - DNA, 19 bp, Mus musculus
  siRNA target sequence for Odz1 (NM_011855.2,3209-3227).
gctacggatccttttgaca

SEQ ID NO: 576565 - DNA, 19 bp, Mus musculus
  siRNA target sequence for Odz1 (NM_011855.2,3241-3259).
ctgtgggcatgattaaagt

SEQ ID NO: 576566 - DNA, 19 bp, Mus musculus
  siRNA target sequence for Odz1 (NM_011855.2,3456-3474).
gttttgcagggctttgaga

SEQ ID NO: 576567 - DNA, 19 bp, Mus musculus
  siRNA target sequence for Odz1 (NM_011855.2,3473-3491).
gatggatgcatctaaccta

SEQ ID NO: 576568 - DNA, 19 bp, Mus musculus
  siRNA target sequence for Odz1 (NM_011855.2,3492-3510).
ggaggctggtccttgaata

SEQ ID NO: 576569 - DNA, 19 bp, Mus musculus
  siRNA target sequence for Odz1 (NM_011855.2,3493-3511).
gaggctggtccttgaataa

SEQ ID NO: 576570 - DNA, 19 bp, Mus musculus
  siRNA target sequence for Odz1 (NM_011855.2,3529-3547).
ctcaaagtggaattattca

SEQ ID NO: 576571 - DNA, 19 bp, Mus musculus
  siRNA target sequence for Odz1 (NM_011855.2,3531-3549).
caaagtggaattattcata

SEQ ID NO: 576572 - DNA, 19 bp, Mus musculus
  siRNA target sequence for Odz1 (NM_011855.2,3578-3596).
ccagcagcccccagtcata

SEQ ID NO: 576573 - DNA, 19 bp, Mus musculus
  siRNA target sequence for Odz1 (NM_011855.2,3582-3600).
cagcccccagtcatagcta

SEQ ID NO: 576574 - DNA, 19 bp, Mus musculus
  siRNA target sequence for Odz1 (NM_011855.2,3589-3607).
cagtcatagctaccataat

SEQ ID NO: 576575 - DNA, 19 bp, Mus musculus
  siRNA target sequence for Odz1 (NM_011855.2,3657-3675).
gcccacaacaacaaactct

SEQ ID NO: 576576 - DNA, 19 bp, Mus musculus
  siRNA target sequence for Odz1 (NM_011855.2,3678-3696).
gctcctgtcgccttagctt

SEQ ID NO: 576577 - DNA, 19 bp, Mus musculus
  siRNA target sequence for Odz1 (NM_011855.2,3738-3756).
gtaaggcgaatatttcctt

SEQ ID NO: 576578 - DNA, 19 bp, Mus musculus
  siRNA target sequence for Odz1 (NM_011855.2,3757-3775).
caggaaactctgttagcat

SEQ ID NO: 576579 - DNA, 19 bp, Mus musculus
  siRNA target sequence for Odz1 (NM_011855.2,3759-3777).
ggaaactctgttagcattt

SEQ ID NO: 576580 - DNA, 19 bp, Mus musculus
  siRNA target sequence for Odz1 (NM_011855.2,3760-3778).
gaaactctgttagcatttt

SEQ ID NO: 576581 - DNA, 19 bp, Mus musculus
  siRNA target sequence for Odz1 (NM_011855.2,3811-3829).
caagccctgcacacaagta

SEQ ID NO: 576582 - DNA, 19 bp, Mus musculus
  siRNA target sequence for Odz1 (NM_011855.2,3815-3833).
ccctgcacacaagtactat

SEQ ID NO: 576583 - DNA, 19 bp, Mus musculus
  siRNA target sequence for Odz1 (NM_011855.2,3817-3835).
ctgcacacaagtactatct

SEQ ID NO: 576584 - DNA, 19 bp, Mus musculus
  siRNA target sequence for Odz1 (NM_011855.2,3842-3860).
ggaccctatgtctgaatca

SEQ ID NO: 576585 - DNA, 19 bp, Mus musculus
  siRNA target sequence for Odz1 (NM_011855.2,3877-3895).
ccaatactcgaaaagtcta

SEQ ID NO: 576586 - DNA, 19 bp, Mus musculus
  siRNA target sequence for Odz1 (NM_011855.2,3885-3903).
cgaaaagtctacaaactga

SEQ ID NO: 576587 - DNA, 19 bp, Mus musculus
  siRNA target sequence for Odz1 (NM_011855.2,4038-4056).
cgaggcatcacagtagata

SEQ ID NO: 576588 - DNA, 19 bp, Mus musculus
  siRNA target sequence for Odz1 (NM_011855.2,4048-4066).
cagtagataggcatggatt

SEQ ID NO: 576589 - DNA, 19 bp, Mus musculus
  siRNA target sequence for Odz1 (NM_011855.2,4053-4071).
gataggcatggattcattt

SEQ ID NO: 576590 - DNA, 19 bp, Mus musculus
  siRNA target sequence for Odz1 (NM_011855.2,4057-4075).
ggcatggattcatttactt

SEQ ID NO: 576591 - DNA, 19 bp, Mus musculus
  siRNA target sequence for Odz1 (NM_011855.2,4084-4102).
ggactatgatccgaagaat

SEQ ID NO: 576592 - DNA, 19 bp, Mus musculus
  siRNA target sequence for Odz1 (NM_011855.2,4085-4103).
gactatgatccgaagaatt

SEQ ID NO: 576593 - DNA, 19 bp, Mus musculus
  siRNA target sequence for Odz1 (NM_011855.2,4087-4105).
ctatgatccgaagaattga

SEQ ID NO: 576594 - DNA, 19 bp, Mus musculus
  siRNA target sequence for Odz1 (NM_011855.2,4094-4112).
ccgaagaattgatgagaat

SEQ ID NO: 576595 - DNA, 19 bp, Mus musculus
  siRNA target sequence for Odz1 (NM_011855.2,4229-4247).
caatcccatggacaattca

SEQ ID NO: 576596 - DNA, 19 bp, Mus musculus
  siRNA target sequence for Odz1 (NM_011855.2,4292-4310).
caggcgtgtgcggatcatt

SEQ ID NO: 576597 - DNA, 19 bp, Mus musculus
  siRNA target sequence for Odz1 (NM_011855.2,4311-4329).
gcagggcgtcccattcact

SEQ ID NO: 576598 - DNA, 19 bp, Mus musculus
  siRNA target sequence for Odz1 (NM_011855.2,4516-4534).
ccactgactgcgactgtaa

SEQ ID NO: 576599 - DNA, 19 bp, Mus musculus
  siRNA target sequence for Odz1 (NM_011855.2,4519-4537).
ctgactgcgactgtaaaat

SEQ ID NO: 576600 - DNA, 19 bp, Mus musculus
  siRNA target sequence for Odz1 (NM_011855.2,4653-4671).
ggcaatgttcgaattcgta

SEQ ID NO: 576601 - DNA, 19 bp, Mus musculus
  siRNA target sequence for Odz1 (NM_011855.2,4686-4704).
caagcccacctgaatgaca

SEQ ID NO: 576602 - DNA, 19 bp, Mus musculus
  siRNA target sequence for Odz1 (NM_011855.2,4695-4713).
ctgaatgacatgaacctat

SEQ ID NO: 576603 - DNA, 19 bp, Mus musculus
  siRNA target sequence for Odz1 (NM_011855.2,4697-4715).
gaatgacatgaacctatat

SEQ ID NO: 576604 - DNA, 19 bp, Mus musculus
  siRNA target sequence for Odz1 (NM_011855.2,4701-4719).
gacatgaacctatatgaga

SEQ ID NO: 576605 - DNA, 19 bp, Mus musculus
  siRNA target sequence for Odz1 (NM_011855.2,4703-4721).
catgaacctatatgagatt

SEQ ID NO: 576606 - DNA, 19 bp, Mus musculus
  siRNA target sequence for Odz1 (NM_011855.2,4743-4761).
ctctaccagttcactgtaa

SEQ ID NO: 576607 - DNA, 19 bp, Mus musculus
  siRNA target sequence for Odz1 (NM_011855.2,4748-4766).
ccagttcactgtaaatgga

SEQ ID NO: 576608 - DNA, 19 bp, Mus musculus
  siRNA target sequence for Odz1 (NM_011855.2,4765-4783).
gaacgcacctacataccat

SEQ ID NO: 576609 - DNA, 19 bp, Mus musculus
  siRNA target sequence for Odz1 (NM_011855.2,4790-4808).
gataacaagggactatgtt

SEQ ID NO: 576610 - DNA, 19 bp, Mus musculus
  siRNA target sequence for Odz1 (NM_011855.2,4795-4813).
caagggactatgtttataa

SEQ ID NO: 576611 - DNA, 19 bp, Mus musculus
  siRNA target sequence for Odz1 (NM_011855.2,4798-4816).
gggactatgtttataactt

SEQ ID NO: 576612 - DNA, 19 bp, Mus musculus
  siRNA target sequence for Odz1 (NM_011855.2,4836-4854).
gatttgggtgccatcacta

SEQ ID NO: 576613 - DNA, 19 bp, Mus musculus
  siRNA target sequence for Odz1 (NM_011855.2,4932-4950).
gtctactggcttaccataa

SEQ ID NO: 576614 - DNA, 19 bp, Mus musculus
  siRNA target sequence for Odz1 (NM_011855.2,4940-4958).
gcttaccataagtagcaat

SEQ ID NO: 576615 - DNA, 19 bp, Mus musculus
  siRNA target sequence for Odz1 (NM_011855.2,4976-4994).
gtcagcccaaggctacaat

SEQ ID NO: 576616 - DNA, 19 bp, Mus musculus
  siRNA target sequence for Odz1 (NM_011855.2,5023-5041).
caggacttctggcaacaaa

SEQ ID NO: 576617 - DNA, 19 bp, Mus musculus
  siRNA target sequence for Odz1 (NM_011855.2,5025-5043).
ggacttctggcaacaaaaa

SEQ ID NO: 576618 - DNA, 19 bp, Mus musculus
  siRNA target sequence for Odz1 (NM_011855.2,5088-5106).
ggacatctgaccaatgcaa

SEQ ID NO: 576619 - DNA, 19 bp, Mus musculus
  siRNA target sequence for Odz1 (NM_011855.2,5096-5114).
gaccaatgcaacttttcct

SEQ ID NO: 576620 - DNA, 19 bp, Mus musculus
  siRNA target sequence for Odz1 (NM_011855.2,5174-5192).
cacttccaaccgcgaaaat

SEQ ID NO: 576621 - DNA, 19 bp, Mus musculus
  siRNA target sequence for Odz1 (NM_011855.2,5176-5194).
cttccaaccgcgaaaatgt

SEQ ID NO: 576622 - DNA, 19 bp, Mus musculus
  siRNA target sequence for Odz1 (NM_011855.2,5196-5214).
ctcatgtcaaccaacttga

SEQ ID NO: 576623 - DNA, 19 bp, Mus musculus
  siRNA target sequence for Odz1 (NM_011855.2,5217-5235).
gcaaccagtactatctaca

SEQ ID NO: 576624 - DNA, 19 bp, Mus musculus
  siRNA target sequence for Odz1 (NM_011855.2,5218-5236).
caaccagtactatctacat

SEQ ID NO: 576625 - DNA, 19 bp, Mus musculus
  siRNA target sequence for Odz1 (NM_011855.2,5221-5239).
ccagtactatctacatttt

SEQ ID NO: 576626 - DNA, 19 bp, Mus musculus
  siRNA target sequence for Odz1 (NM_011855.2,5222-5240).
cagtactatctacatttta

SEQ ID NO: 576627 - DNA, 19 bp, Mus musculus
  siRNA target sequence for Odz1 (NM_011855.2,5305-5323).
ccagtgggatggagatcaa

SEQ ID NO: 576628 - DNA, 19 bp, Mus musculus
  siRNA target sequence for Odz1 (NM_011855.2,5373-5391).
ggcaaatgcaacatatcgt

SEQ ID NO: 576629 - DNA, 19 bp, Mus musculus
  siRNA target sequence for Odz1 (NM_011855.2,5374-5392).
gcaaatgcaacatatcgtt

SEQ ID NO: 576630 - DNA, 19 bp, Mus musculus
  siRNA target sequence for Odz1 (NM_011855.2,5430-5448).
cagagaaaggagcaaaaca

SEQ ID NO: 576631 - DNA, 19 bp, Mus musculus
  siRNA target sequence for Odz1 (NM_011855.2,5452-5470).
gcaacgtttcagcttttga

SEQ ID NO: 576632 - DNA, 19 bp, Mus musculus
  siRNA target sequence for Odz1 (NM_011855.2,5487-5505).
cataacagaaacctacttt

SEQ ID NO: 576633 - DNA, 19 bp, Mus musculus
  siRNA target sequence for Odz1 (NM_011855.2,5506-5524).
ccattgattttgatcatat

SEQ ID NO: 576634 - DNA, 19 bp, Mus musculus
  siRNA target sequence for Odz1 (NM_011855.2,5527-5545).
cccgcacgggtaagatcta

SEQ ID NO: 576635 - DNA, 19 bp, Mus musculus
  siRNA target sequence for Odz1 (NM_011855.2,5528-5546).
ccgcacgggtaagatctat

SEQ ID NO: 576636 - DNA, 19 bp, Mus musculus
  siRNA target sequence for Odz1 (NM_011855.2,5531-5549).
cacgggtaagatctatgat

SEQ ID NO: 576637 - DNA, 19 bp, Mus musculus
  siRNA target sequence for Odz1 (NM_011855.2,5557-5575).
gaaaattcactcttcgaat

SEQ ID NO: 576638 - DNA, 19 bp, Mus musculus
  siRNA target sequence for Odz1 (NM_011855.2,5564-5582).
cactcttcgaattctttat

SEQ ID NO: 576639 - DNA, 19 bp, Mus musculus
  siRNA target sequence for Odz1 (NM_011855.2,5566-5584).
ctcttcgaattctttatga

SEQ ID NO: 576640 - DNA, 19 bp, Mus musculus
  siRNA target sequence for Odz1 (NM_011855.2,5631-5649).
gaagtgaacatcacgtatt

SEQ ID NO: 576641 - DNA, 19 bp, Mus musculus
  siRNA target sequence for Odz1 (NM_011855.2,5653-5671).
cttcaggattagtcacatt

SEQ ID NO: 576642 - DNA, 19 bp, Mus musculus
  siRNA target sequence for Odz1 (NM_011855.2,5683-5701).
gaacctggaatgaaaagat

SEQ ID NO: 576643 - DNA, 19 bp, Mus musculus
  siRNA target sequence for Odz1 (NM_011855.2,5759-5777).
gagctatacctacttagaa

SEQ ID NO: 576644 - DNA, 19 bp, Mus musculus
  siRNA target sequence for Odz1 (NM_011855.2,5761-5779).
gctatacctacttagaaaa

SEQ ID NO: 576645 - DNA, 19 bp, Mus musculus
  siRNA target sequence for Odz1 (NM_011855.2,5784-5802).
gtgatgcttctgttacaca

SEQ ID NO: 576646 - DNA, 19 bp, Mus musculus
  siRNA target sequence for Odz1 (NM_011855.2,5803-5821).
gtcagcggcgttacatctt

SEQ ID NO: 576647 - DNA, 19 bp, Mus musculus
  siRNA target sequence for Odz1 (NM_011855.2,5838-5856).
gattgcctgctgtcagtta

SEQ ID NO: 576648 - DNA, 19 bp, Mus musculus
  siRNA target sequence for Odz1 (NM_011855.2,5871-5889).
gtgcgccacagcttacaaa

SEQ ID NO: 576649 - DNA, 19 bp, Mus musculus
  siRNA target sequence for Odz1 (NM_011855.2,5901-5919).
gtgggctactaccgtaata

SEQ ID NO: 576650 - DNA, 19 bp, Mus musculus
  siRNA target sequence for Odz1 (NM_011855.2,5938-5956).
gcagcacctcttttatcca

SEQ ID NO: 576651 - DNA, 19 bp, Mus musculus
  siRNA target sequence for Odz1 (NM_011855.2,5939-5957).
cagcacctcttttatccaa

SEQ ID NO: 576652 - DNA, 19 bp, Mus musculus
  siRNA target sequence for Odz1 (NM_011855.2,5968-5986).
gagatggccgactgttaca

SEQ ID NO: 576653 - DNA, 19 bp, Mus musculus
  siRNA target sequence for Odz1 (NM_011855.2,5970-5988).
gatggccgactgttacaga

SEQ ID NO: 576654 - DNA, 19 bp, Mus musculus
  siRNA target sequence for Odz1 (NM_011855.2,6001-6019).
ggactgggcgcagagtttt

SEQ ID NO: 576655 - DNA, 19 bp, Mus musculus
  siRNA target sequence for Odz1 (NM_011855.2,6002-6020).
gactgggcgcagagtttta

SEQ ID NO: 576656 - DNA, 19 bp, Mus musculus
  siRNA target sequence for Odz1 (NM_011855.2,6006-6024).
gggcgcagagttttataca

SEQ ID NO: 576657 - DNA, 19 bp, Mus musculus
  siRNA target sequence for Odz1 (NM_011855.2,6007-6025).
ggcgcagagttttatacaa

SEQ ID NO: 576658 - DNA, 19 bp, Mus musculus
  siRNA target sequence for Odz1 (NM_011855.2,6009-6027).
cgcagagttttatacaagt

SEQ ID NO: 576659 - DNA, 19 bp, Mus musculus
  siRNA target sequence for Odz1 (NM_011855.2,6010-6028).
gcagagttttatacaagta

SEQ ID NO: 576660 - DNA, 19 bp, Mus musculus
  siRNA target sequence for Odz1 (NM_011855.2,6065-6083).
caccactcaggtcacatta

SEQ ID NO: 576661 - DNA, 19 bp, Mus musculus
  siRNA target sequence for Odz1 (NM_011855.2,6068-6086).
cactcaggtcacattaaca

SEQ ID NO: 576662 - DNA, 19 bp, Mus musculus
  siRNA target sequence for Odz1 (NM_011855.2,6093-6111).
gagtcttctggagtaatta

SEQ ID NO: 576663 - DNA, 19 bp, Mus musculus
  siRNA target sequence for Odz1 (NM_011855.2,6103-6121).
gagtaattaagacaataca

SEQ ID NO: 576664 - DNA, 19 bp, Mus musculus
  siRNA target sequence for Odz1 (NM_011855.2,6161-6179).
gcaaacaggacctctcatt

SEQ ID NO: 576665 - DNA, 19 bp, Mus musculus
  siRNA target sequence for Odz1 (NM_011855.2,6202-6220).
gtgaagaaggtcttgtgaa

SEQ ID NO: 576666 - DNA, 19 bp, Mus musculus
  siRNA target sequence for Odz1 (NM_011855.2,6216-6234).
gtgaatgcacggtttgact

SEQ ID NO: 576667 - DNA, 19 bp, Mus musculus
  siRNA target sequence for Odz1 (NM_011855.2,6222-6240).
gcacggtttgactacagtt

SEQ ID NO: 576668 - DNA, 19 bp, Mus musculus
  siRNA target sequence for Odz1 (NM_011855.2,6223-6241).
cacggtttgactacagtta

SEQ ID NO: 576669 - DNA, 19 bp, Mus musculus
  siRNA target sequence for Odz1 (NM_011855.2,6225-6243).
cggtttgactacagttaca

SEQ ID NO: 576670 - DNA, 19 bp, Mus musculus
  siRNA target sequence for Odz1 (NM_011855.2,6226-6244).
ggtttgactacagttacaa

SEQ ID NO: 576671 - DNA, 19 bp, Mus musculus
  siRNA target sequence for Odz1 (NM_011855.2,6284-6302).
gacccctttgcccatagat

SEQ ID NO: 576672 - DNA, 19 bp, Mus musculus
  siRNA target sequence for Odz1 (NM_011855.2,6472-6490).
cctactggatgactattca

SEQ ID NO: 576673 - DNA, 19 bp, Mus musculus
  siRNA target sequence for Odz1 (NM_011855.2,6506-6524).
ccggatggtcatatgtgat

SEQ ID NO: 576674 - DNA, 19 bp, Mus musculus
  siRNA target sequence for Odz1 (NM_011855.2,6507-6525).
cggatggtcatatgtgata

SEQ ID NO: 576675 - DNA, 19 bp, Mus musculus
  siRNA target sequence for Odz1 (NM_011855.2,6534-6552).
ggagtagatgccaatatca

SEQ ID NO: 576676 - DNA, 19 bp, Mus musculus
  siRNA target sequence for Odz1 (NM_011855.2,6582-6600).
gggcaacttcaaactgttt

SEQ ID NO: 576677 - DNA, 19 bp, Mus musculus
  siRNA target sequence for Odz1 (NM_011855.2,6617-6635).
ccagtggcggtatagttat

SEQ ID NO: 576678 - DNA, 19 bp, Mus musculus
  siRNA target sequence for Odz1 (NM_011855.2,6620-6638).
gtggcggtatagttatgat

SEQ ID NO: 576679 - DNA, 19 bp, Mus musculus
  siRNA target sequence for Odz1 (NM_011855.2,6622-6640).
ggcggtatagttatgatct

SEQ ID NO: 576680 - DNA, 19 bp, Mus musculus
  siRNA target sequence for Odz1 (NM_011855.2,6631-6649).
gttatgatctgaatggaaa

SEQ ID NO: 576681 - DNA, 19 bp, Mus musculus
  siRNA target sequence for Odz1 (NM_011855.2,6671-6689).
gaatagtgctcgtcttact

SEQ ID NO: 576682 - DNA, 19 bp, Mus musculus
  siRNA target sequence for Odz1 (NM_011855.2,6719-6737).
cactagactaggggaaatt

SEQ ID NO: 576683 - DNA, 19 bp, Mus musculus
  siRNA target sequence for Odz1 (NM_011855.2,6721-6739).
ctagactaggggaaattca

SEQ ID NO: 576684 - DNA, 19 bp, Mus musculus
  siRNA target sequence for Odz1 (NM_011855.2,6726-6744).
ctaggggaaattcagtata

SEQ ID NO: 576685 - DNA, 19 bp, Mus musculus
  siRNA target sequence for Odz1 (NM_011855.2,6771-6789).
cagaggggaaatgatatat

SEQ ID NO: 576686 - DNA, 19 bp, Mus musculus
  siRNA target sequence for Odz1 (NM_011855.2,6841-6859).
gctggactgtacagtatta

SEQ ID NO: 576687 - DNA, 19 bp, Mus musculus
  siRNA target sequence for Odz1 (NM_011855.2,6847-6865).
ctgtacagtattactatga

SEQ ID NO: 576688 - DNA, 19 bp, Mus musculus
  siRNA target sequence for Odz1 (NM_011855.2,6876-6894).
cgacgcgttgccagtaagt

SEQ ID NO: 576689 - DNA, 19 bp, Mus musculus
  siRNA target sequence for Odz1 (NM_011855.2,6908-6926).
gcatctccaattcttttat

SEQ ID NO: 576690 - DNA, 19 bp, Mus musculus
  siRNA target sequence for Odz1 (NM_011855.2,6930-6948).
gacctggccaaccctataa

SEQ ID NO: 576691 - DNA, 19 bp, Mus musculus
  siRNA target sequence for Odz1 (NM_011855.2,6932-6950).
cctggccaaccctataaga

SEQ ID NO: 576692 - DNA, 19 bp, Mus musculus
  siRNA target sequence for Odz1 (NM_011855.2,6935-6953).
ggccaaccctataagagtt

SEQ ID NO: 576693 - DNA, 19 bp, Mus musculus
  siRNA target sequence for Odz1 (NM_011855.2,6936-6954).
gccaaccctataagagtta

SEQ ID NO: 576694 - DNA, 19 bp, Mus musculus
  siRNA target sequence for Odz1 (NM_011855.2,6938-6956).
caaccctataagagttact

SEQ ID NO: 576695 - DNA, 19 bp, Mus musculus
  siRNA target sequence for Odz1 (NM_011855.2,6949-6967).
gagttactcatctgtacaa

SEQ ID NO: 576696 - DNA, 19 bp, Mus musculus
  siRNA target sequence for Odz1 (NM_011855.2,6977-6995).
cgcagagattacatctctt

SEQ ID NO: 576697 - DNA, 19 bp, Mus musculus
  siRNA target sequence for Odz1 (NM_011855.2,6978-6996).
gcagagattacatctcttt

SEQ ID NO: 576698 - DNA, 19 bp, Mus musculus
  siRNA target sequence for Odz1 (NM_011855.2,6979-6997).
cagagattacatctcttta

SEQ ID NO: 576699 - DNA, 19 bp, Mus musculus
  siRNA target sequence for Odz1 (NM_011855.2,6988-7006).
catctctttattatgatct

SEQ ID NO: 576700 - DNA, 19 bp, Mus musculus
  siRNA target sequence for Odz1 (NM_011855.2,7037-7055).
cagtggtgaggaatattat

SEQ ID NO: 576701 - DNA, 19 bp, Mus musculus
  siRNA target sequence for Odz1 (NM_011855.2,7105-7123).
gtcaggtcataaaagagat

SEQ ID NO: 576702 - DNA, 19 bp, Mus musculus
  siRNA target sequence for Odz1 (NM_011855.2,7191-7209).
catggaggactctatgatt

SEQ ID NO: 576703 - DNA, 19 bp, Mus musculus
  siRNA target sequence for Odz1 (NM_011855.2,7200-7218).
ctctatgattttcttacta

SEQ ID NO: 576704 - DNA, 19 bp, Mus musculus
  siRNA target sequence for Odz1 (NM_011855.2,7227-7245).
catctagggcaaagagatt

SEQ ID NO: 576705 - DNA, 19 bp, Mus musculus
  siRNA target sequence for Odz1 (NM_011855.2,7264-7282).
gatggacaacgcctaatca

SEQ ID NO: 576706 - DNA, 19 bp, Mus musculus
  siRNA target sequence for Odz1 (NM_011855.2,7267-7285).
ggacaacgcctaatcatca

SEQ ID NO: 576707 - DNA, 19 bp, Mus musculus
  siRNA target sequence for Odz1 (NM_011855.2,7270-7288).
caacgcctaatcatcacat

SEQ ID NO: 576708 - DNA, 19 bp, Mus musculus
  siRNA target sequence for Odz1 (NM_011855.2,7275-7293).
cctaatcatcacatatgga

SEQ ID NO: 576709 - DNA, 19 bp, Mus musculus
  siRNA target sequence for Odz1 (NM_011855.2,7276-7294).
ctaatcatcacatatggaa

SEQ ID NO: 576710 - DNA, 19 bp, Mus musculus
  siRNA target sequence for Odz1 (NM_011855.2,7346-7364).
ctacccagttggcaaaatt

SEQ ID NO: 576711 - DNA, 19 bp, Mus musculus
  siRNA target sequence for Odz1 (NM_011855.2,7365-7383).
caagatgttgcaaagtata

SEQ ID NO: 576712 - DNA, 19 bp, Mus musculus
  siRNA target sequence for Odz1 (NM_011855.2,7374-7392).
gcaaagtataccacagata

SEQ ID NO: 576713 - DNA, 19 bp, Mus musculus
  siRNA target sequence for Odz1 (NM_011855.2,7417-7435).
gtttccagttacataacgt

SEQ ID NO: 576714 - DNA, 19 bp, Mus musculus
  siRNA target sequence for Odz1 (NM_011855.2,7449-7467).
cccaaaccagaacttgaaa

SEQ ID NO: 576715 - DNA, 19 bp, Mus musculus
  siRNA target sequence for Odz1 (NM_011855.2,7585-7603).
ccttggatcagcttcctat

SEQ ID NO: 576716 - DNA, 19 bp, Mus musculus
  siRNA target sequence for Odz1 (NM_011855.2,7589-7607).
ggatcagcttcctatgact

SEQ ID NO: 576717 - DNA, 19 bp, Mus musculus
  siRNA target sequence for Odz1 (NM_011855.2,7712-7730).
catagtgacagctgatatt

SEQ ID NO: 576718 - DNA, 19 bp, Mus musculus
  siRNA target sequence for Odz1 (NM_011855.2,7718-7736).
gacagctgatattatagga

SEQ ID NO: 576719 - DNA, 19 bp, Mus musculus
  siRNA target sequence for Odz1 (NM_011855.2,7758-7776).
cgtcttgctgccattctca

SEQ ID NO: 576720 - DNA, 19 bp, Mus musculus
  siRNA target sequence for Odz1 (NM_011855.2,7828-7846).
ctcactacttcattaagct

SEQ ID NO: 576721 - DNA, 19 bp, Mus musculus
  siRNA target sequence for Odz1 (NM_011855.2,7868-7886).
ggtgctcatcggtaacact

SEQ ID NO: 576722 - DNA, 19 bp, Mus musculus
  siRNA target sequence for Odz1 (NM_011855.2,7934-7952).
gatgacgtcagtgttgaat

SEQ ID NO: 576723 - DNA, 19 bp, Mus musculus
  siRNA target sequence for Odz1 (NM_011855.2,7960-7978).
ctagacggtttgcagatat

SEQ ID NO: 576724 - DNA, 19 bp, Mus musculus
  siRNA target sequence for Odz1 (NM_011855.2,7992-8010).
ggagctctgtgcttcaaca

SEQ ID NO: 576725 - DNA, 19 bp, Mus musculus
  siRNA target sequence for Odz1 (NM_011855.2,8177-8195).
gagggtgcaggggtatgat

SEQ ID NO: 576726 - DNA, 19 bp, Mus musculus
  siRNA target sequence for Pcsk1 (NM_013628.1,125-143).
gcgtttggtgtgcactaaa

SEQ ID NO: 576727 - DNA, 19 bp, Mus musculus
  siRNA target sequence for Pcsk1 (NM_013628.1,127-145).
gtttggtgtgcactaaaca

SEQ ID NO: 576728 - DNA, 19 bp, Mus musculus
  siRNA target sequence for Pcsk1 (NM_013628.1,155-173).
caaagaggcagtttgttaa

SEQ ID NO: 576729 - DNA, 19 bp, Mus musculus
  siRNA target sequence for Pcsk1 (NM_013628.1,215-233).
ctgccatcgccgaagaact

SEQ ID NO: 576730 - DNA, 19 bp, Mus musculus
  siRNA target sequence for Pcsk1 (NM_013628.1,244-262).
cttttgggtcagattggat

SEQ ID NO: 576731 - DNA, 19 bp, Mus musculus
  siRNA target sequence for Pcsk1 (NM_013628.1,249-267).
gggtcagattggatcactt

SEQ ID NO: 576732 - DNA, 19 bp, Mus musculus
  siRNA target sequence for Pcsk1 (NM_013628.1,255-273).
gattggatcacttgaaaat

SEQ ID NO: 576733 - DNA, 19 bp, Mus musculus
  siRNA target sequence for Pcsk1 (NM_013628.1,259-277).
ggatcacttgaaaatcact

SEQ ID NO: 576734 - DNA, 19 bp, Mus musculus
  siRNA target sequence for Pcsk1 (NM_013628.1,274-292).
cactatttattcaaacaca

SEQ ID NO: 576735 - DNA, 19 bp, Mus musculus
  siRNA target sequence for Pcsk1 (NM_013628.1,313-331).
cgaagaagcgctcttcata

SEQ ID NO: 576736 - DNA, 19 bp, Mus musculus
  siRNA target sequence for Pcsk1 (NM_013628.1,320-338).
gcgctcttcatatcactaa

SEQ ID NO: 576737 - DNA, 19 bp, Mus musculus
  siRNA target sequence for Pcsk1 (NM_013628.1,328-346).
catatcactaagaggttat

SEQ ID NO: 576738 - DNA, 19 bp, Mus musculus
  siRNA target sequence for Pcsk1 (NM_013628.1,339-357).
gaggttatctgatgatgat

SEQ ID NO: 576739 - DNA, 19 bp, Mus musculus
  siRNA target sequence for Pcsk1 (NM_013628.1,366-384).
gtgggctgaacaacagtat

SEQ ID NO: 576740 - DNA, 19 bp, Mus musculus
  siRNA target sequence for Pcsk1 (NM_013628.1,403-421).
cgttcagttcaaaaagact

SEQ ID NO: 576741 - DNA, 19 bp, Mus musculus
  siRNA target sequence for Pcsk1 (NM_013628.1,425-443).
cattggatctcttcaatga

SEQ ID NO: 576742 - DNA, 19 bp, Mus musculus
  siRNA target sequence for Pcsk1 (NM_013628.1,460-478).
cagtggtacttgcaagata

SEQ ID NO: 576743 - DNA, 19 bp, Mus musculus
  siRNA target sequence for Pcsk1 (NM_013628.1,500-518).
ccaagctggaccttcatgt

SEQ ID NO: 576744 - DNA, 19 bp, Mus musculus
  siRNA target sequence for Pcsk1 (NM_013628.1,545-563).
ctggcaaaggagttgttat

SEQ ID NO: 576745 - DNA, 19 bp, Mus musculus
  siRNA target sequence for Pcsk1 (NM_013628.1,547-565).
ggcaaaggagttgttatta

SEQ ID NO: 576746 - DNA, 19 bp, Mus musculus
  siRNA target sequence for Pcsk1 (NM_013628.1,580-598).
ggcttggagtggaatcaca

SEQ ID NO: 576747 - DNA, 19 bp, Mus musculus
  siRNA target sequence for Pcsk1 (NM_013628.1,590-608).
ggaatcacacagacattta

SEQ ID NO: 576748 - DNA, 19 bp, Mus musculus
  siRNA target sequence for Pcsk1 (NM_013628.1,625-643).
gaggctagctatgatttta

SEQ ID NO: 576749 - DNA, 19 bp, Mus musculus
  siRNA target sequence for Pcsk1 (NM_013628.1,662-680).
catttccccgatatgatct

SEQ ID NO: 576750 - DNA, 19 bp, Mus musculus
  siRNA target sequence for Pcsk1 (NM_013628.1,668-686).
cccgatatgatctcacaaa

SEQ ID NO: 576751 - DNA, 19 bp, Mus musculus
  siRNA target sequence for Pcsk1 (NM_013628.1,669-687).
ccgatatgatctcacaaat

SEQ ID NO: 576752 - DNA, 19 bp, Mus musculus
  siRNA target sequence for Pcsk1 (NM_013628.1,753-771).
ggttggagttgcatataat

SEQ ID NO: 576753 - DNA, 19 bp, Mus musculus
  siRNA target sequence for Pcsk1 (NM_013628.1,754-772).
gttggagttgcatataatt

SEQ ID NO: 576754 - DNA, 19 bp, Mus musculus
  siRNA target sequence for Pcsk1 (NM_013628.1,757-775).
ggagttgcatataattcca

SEQ ID NO: 576755 - DNA, 19 bp, Mus musculus
  siRNA target sequence for Pcsk1 (NM_013628.1,818-836).
ccattgaggctagttcaat

SEQ ID NO: 576756 - DNA, 19 bp, Mus musculus
  siRNA target sequence for Pcsk1 (NM_013628.1,819-837).
cattgaggctagttcaatt

SEQ ID NO: 576757 - DNA, 19 bp, Mus musculus
  siRNA target sequence for Pcsk1 (NM_013628.1,823-841).
gaggctagttcaattggat

SEQ ID NO: 576758 - DNA, 19 bp, Mus musculus
  siRNA target sequence for Pcsk1 (NM_013628.1,827-845).
ctagttcaattggattcaa

SEQ ID NO: 576759 - DNA, 19 bp, Mus musculus
  siRNA target sequence for Pcsk1 (NM_013628.1,846-864).
ccctggccatgtggatatt

SEQ ID NO: 576760 - DNA, 19 bp, Mus musculus
  siRNA target sequence for Pcsk1 (NM_013628.1,848-866).
ctggccatgtggatattta

SEQ ID NO: 576761 - DNA, 19 bp, Mus musculus
  siRNA target sequence for Pcsk1 (NM_013628.1,883-901).
cctaatgatgatggaaaaa

SEQ ID NO: 576762 - DNA, 19 bp, Mus musculus
  siRNA target sequence for Pcsk1 (NM_013628.1,1004-1022).
ggggtcgtcagggagataa

SEQ ID NO: 576763 - DNA, 19 bp, Mus musculus
  siRNA target sequence for Pcsk1 (NM_013628.1,1006-1024).
ggtcgtcagggagataact

SEQ ID NO: 576764 - DNA, 19 bp, Mus musculus
  siRNA target sequence for Pcsk1 (NM_013628.1,1140-1158).
cagcagtggtgattacaca

SEQ ID NO: 576765 - DNA, 19 bp, Mus musculus
  siRNA target sequence for Pcsk1 (NM_013628.1,1155-1173).
cacagaccagcgaataaca

SEQ ID NO: 576766 - DNA, 19 bp, Mus musculus
  siRNA target sequence for Pcsk1 (NM_013628.1,1177-1195).
gctgacctgcacaatgact

SEQ ID NO: 576767 - DNA, 19 bp, Mus musculus
  siRNA target sequence for Pcsk1 (NM_013628.1,1377-1395).
ggtgaacagccgatttgga

SEQ ID NO: 576768 - DNA, 19 bp, Mus musculus
  siRNA target sequence for Pcsk1 (NM_013628.1,1378-1396).
gtgaacagccgatttggat

SEQ ID NO: 576769 - DNA, 19 bp, Mus musculus
  siRNA target sequence for Pcsk1 (NM_013628.1,1471-1489).
gaatgtgttgtaaaagaca

SEQ ID NO: 576770 - DNA, 19 bp, Mus musculus
  siRNA target sequence for Pcsk1 (NM_013628.1,1512-1530).
gaaagctaatggagaagta

SEQ ID NO: 576771 - DNA, 19 bp, Mus musculus
  siRNA target sequence for Pcsk1 (NM_013628.1,1523-1541).
gagaagtaattgttgaaat

SEQ ID NO: 576772 - DNA, 19 bp, Mus musculus
  siRNA target sequence for Pcsk1 (NM_013628.1,1603-1621).
gaagcaacaattgaatatt

SEQ ID NO: 576773 - DNA, 19 bp, Mus musculus
  siRNA target sequence for Pcsk1 (NM_013628.1,1703-1721).
catcccccaatggctttaa

SEQ ID NO: 576774 - DNA, 19 bp, Mus musculus
  siRNA target sequence for Pcsk1 (NM_013628.1,1706-1724).
cccccaatggctttaagaa

SEQ ID NO: 576775 - DNA, 19 bp, Mus musculus
  siRNA target sequence for Pcsk1 (NM_013628.1,1794-1812).
catgtctggaagaatgcaa

SEQ ID NO: 576776 - DNA, 19 bp, Mus musculus
  siRNA target sequence for Pcsk1 (NM_013628.1,1797-1815).
gtctggaagaatgcaaaat

SEQ ID NO: 576777 - DNA, 19 bp, Mus musculus
  siRNA target sequence for Pcsk1 (NM_013628.1,1848-1866).
gcatgggacatcttctcaa

SEQ ID NO: 576778 - DNA, 19 bp, Mus musculus
  siRNA target sequence for Pcsk1 (NM_013628.1,1882-1900).
cagcctcgtgtgtacacat

SEQ ID NO: 576779 - DNA, 19 bp, Mus musculus
  siRNA target sequence for Pcsk1 (NM_013628.1,1891-1909).
gtgtacacatcctacaata

SEQ ID NO: 576780 - DNA, 19 bp, Mus musculus
  siRNA target sequence for Pcsk1 (NM_013628.1,2076-2094).
gctgcgactcctacaaagt

SEQ ID NO: 576781 - DNA, 19 bp, Mus musculus
  siRNA target sequence for Pcsk1 (NM_013628.1,2086-2104).
ctacaaagtgcttttagca

SEQ ID NO: 576782 - DNA, 19 bp, Mus musculus
  siRNA target sequence for Pcsk1 (NM_013628.1,2151-2169).
gctcagcatcccttatgaa

SEQ ID NO: 576783 - DNA, 19 bp, Mus musculus
  siRNA target sequence for Pcsk1 (NM_013628.1,2154-2172).
cagcatcccttatgaaagt

SEQ ID NO: 576784 - DNA, 19 bp, Mus musculus
  siRNA target sequence for Pcsk1 (NM_013628.1,2156-2174).
gcatcccttatgaaagttt

SEQ ID NO: 576785 - DNA, 19 bp, Mus musculus
  siRNA target sequence for Pcsk1 (NM_013628.1,2251-2269).
gatgtattctataacacaa

SEQ ID NO: 576786 - DNA, 19 bp, Mus musculus
  siRNA target sequence for Pcsk1 (NM_013628.1,2259-2277).
ctataacacaaaaccttat

SEQ ID NO: 576787 - DNA, 19 bp, Mus musculus
  siRNA target sequence for Pcsk2 (NM_008792.3,392-410).
cccgtcttcacgaatcatt

SEQ ID NO: 576788 - DNA, 19 bp, Mus musculus
  siRNA target sequence for Pcsk2 (NM_008792.3,393-411).
ccgtcttcacgaatcattt

SEQ ID NO: 576789 - DNA, 19 bp, Mus musculus
  siRNA target sequence for Pcsk2 (NM_008792.3,394-412).
cgtcttcacgaatcatttt

SEQ ID NO: 576790 - DNA, 19 bp, Mus musculus
  siRNA target sequence for Pcsk2 (NM_008792.3,498-516).
cagaaggcctgtatcactt

SEQ ID NO: 576791 - DNA, 19 bp, Mus musculus
  siRNA target sequence for Pcsk2 (NM_008792.3,500-518).
gaaggcctgtatcactttt

SEQ ID NO: 576792 - DNA, 19 bp, Mus musculus
  siRNA target sequence for Pcsk2 (NM_008792.3,598-616).
gatggcgctgcaacaagaa

SEQ ID NO: 576793 - DNA, 19 bp, Mus musculus
  siRNA target sequence for Pcsk2 (NM_008792.3,603-621).
cgctgcaacaagaaggatt

SEQ ID NO: 576794 - DNA, 19 bp, Mus musculus
  siRNA target sequence for Pcsk2 (NM_008792.3,614-632).
gaaggatttgaccgtaaaa

SEQ ID NO: 576795 - DNA, 19 bp, Mus musculus
  siRNA target sequence for Pcsk2 (NM_008792.3,617-635).
ggatttgaccgtaaaaaga

SEQ ID NO: 576796 - DNA, 19 bp, Mus musculus
  siRNA target sequence for Pcsk2 (NM_008792.3,639-657).
ggtacagggacatcaatga

SEQ ID NO: 576797 - DNA, 19 bp, Mus musculus
  siRNA target sequence for Pcsk2 (NM_008792.3,658-676).
gattgacatcaacatgaat

SEQ ID NO: 576798 - DNA, 19 bp, Mus musculus
  siRNA target sequence for Pcsk2 (NM_008792.3,673-691).
gaatgatcctctctttaca

SEQ ID NO: 576799 - DNA, 19 bp, Mus musculus
  siRNA target sequence for Pcsk2 (NM_008792.3,680-698).
cctctctttacaaagcaat

SEQ ID NO: 576800 - DNA, 19 bp, Mus musculus
  siRNA target sequence for Pcsk2 (NM_008792.3,695-713).
caatggtacctgttcaaca

SEQ ID NO: 576801 - DNA, 19 bp, Mus musculus
  siRNA target sequence for Pcsk2 (NM_008792.3,729-747).
gaactcctgggctagactt

SEQ ID NO: 576802 - DNA, 19 bp, Mus musculus
  siRNA target sequence for Pcsk2 (NM_008792.3,732-750).
ctcctgggctagacttgaa

SEQ ID NO: 576803 - DNA, 19 bp, Mus musculus
  siRNA target sequence for Pcsk2 (NM_008792.3,772-790).
gggatacacaggaaaagga

SEQ ID NO: 576804 - DNA, 19 bp, Mus musculus
  siRNA target sequence for Pcsk2 (NM_008792.3,789-807).
gagtgaccattggaattat

SEQ ID NO: 576805 - DNA, 19 bp, Mus musculus
  siRNA target sequence for Pcsk2 (NM_008792.3,836-854).
gacctggcctacaactaca

SEQ ID NO: 576806 - DNA, 19 bp, Mus musculus
  siRNA target sequence for Pcsk2 (NM_008792.3,853-871).
caacgctgatgcaagttat

SEQ ID NO: 576807 - DNA, 19 bp, Mus musculus
  siRNA target sequence for Pcsk2 (NM_008792.3,857-875).
gctgatgcaagttatgact

SEQ ID NO: 576808 - DNA, 19 bp, Mus musculus
  siRNA target sequence for Pcsk2 (NM_008792.3,895-913).
cccataccctcgatacaca

SEQ ID NO: 576809 - DNA, 19 bp, Mus musculus
  siRNA target sequence for Pcsk2 (NM_008792.3,984-1002).
gtggagtcggcgtagcata

SEQ ID NO: 576810 - DNA, 19 bp, Mus musculus
  siRNA target sequence for Pcsk2 (NM_008792.3,987-1005).
gagtcggcgtagcatacaa

SEQ ID NO: 576811 - DNA, 19 bp, Mus musculus
  siRNA target sequence for Pcsk2 (NM_008792.3,989-1007).
gtcggcgtagcatacaact

SEQ ID NO: 576812 - DNA, 19 bp, Mus musculus
  siRNA target sequence for Pcsk2 (NM_008792.3,1086-1104).
ctcaactgatcgacatcta

SEQ ID NO: 576813 - DNA, 19 bp, Mus musculus
  siRNA target sequence for Pcsk2 (NM_008792.3,1088-1106).
caactgatcgacatctaca

SEQ ID NO: 576814 - DNA, 19 bp, Mus musculus
  siRNA target sequence for Pcsk2 (NM_008792.3,1324-1342).
caggactgccttgtatgat

SEQ ID NO: 576815 - DNA, 19 bp, Mus musculus
  siRNA target sequence for Pcsk2 (NM_008792.3,1326-1344).
ggactgccttgtatgatga

SEQ ID NO: 576816 - DNA, 19 bp, Mus musculus
  siRNA target sequence for Pcsk2 (NM_008792.3,1484-1502).
ggcgtgtttgcattagctt

SEQ ID NO: 576817 - DNA, 19 bp, Mus musculus
  siRNA target sequence for Pcsk2 (NM_008792.3,1485-1503).
gcgtgtttgcattagcttt

SEQ ID NO: 576818 - DNA, 19 bp, Mus musculus
  siRNA target sequence for Pcsk2 (NM_008792.3,1564-1582).
gcggaaccagcttcatgat

SEQ ID NO: 576819 - DNA, 19 bp, Mus musculus
  siRNA target sequence for Pcsk2 (NM_008792.3,1656-1674).
caggtgccatggtgaaaat

SEQ ID NO: 576820 - DNA, 19 bp, Mus musculus
  siRNA target sequence for Pcsk2 (NM_008792.3,1763-1781).
ctggtactgaccctcaaaa

SEQ ID NO: 576821 - DNA, 19 bp, Mus musculus
  siRNA target sequence for Pcsk2 (NM_008792.3,1860-1878).
ggagaggagacctgaacat

SEQ ID NO: 576822 - DNA, 19 bp, Mus musculus
  siRNA target sequence for Pcsk2 (NM_008792.3,1899-1917).
gcaccaagtccattttgct

SEQ ID NO: 576823 - DNA, 19 bp, Mus musculus
  siRNA target sequence for Pcsk2 (NM_008792.3,1958-1976).
gacaagtggcctttcatga

SEQ ID NO: 576824 - DNA, 19 bp, Mus musculus
  siRNA target sequence for Pcsk2 (NM_008792.3,2192-2210).
gagagaagcctgcaaagta

SEQ ID NO: 576825 - DNA, 19 bp, Mus musculus
  siRNA target sequence for Pcsk4 (NM_008793.1,162-180).
gagcgcctggcccgtaaat

SEQ ID NO: 576826 - DNA, 19 bp, Mus musculus
  siRNA target sequence for Pcsk4 (NM_008793.1,164-182).
gcgcctggcccgtaaattt

SEQ ID NO: 576827 - DNA, 19 bp, Mus musculus
  siRNA target sequence for Pcsk4 (NM_008793.1,283-301).
gtctacgactgaagaaaga

SEQ ID NO: 576828 - DNA, 19 bp, Mus musculus
  siRNA target sequence for Pcsk4 (NM_008793.1,404-422).
caaggagatacaacaagat

SEQ ID NO: 576829 - DNA, 19 bp, Mus musculus
  siRNA target sequence for Pcsk4 (NM_008793.1,510-528).
ccggacctctgggctaatt

SEQ ID NO: 576830 - DNA, 19 bp, Mus musculus
  siRNA target sequence for Pcsk4 (NM_008793.1,511-529).
cggacctctgggctaatta

SEQ ID NO: 576831 - DNA, 19 bp, Mus musculus
  siRNA target sequence for Pcsk4 (NM_008793.1,512-530).
ggacctctgggctaattat

SEQ ID NO: 576832 - DNA, 19 bp, Mus musculus
  siRNA target sequence for Pcsk4 (NM_008793.1,677-695).
cttcaatgctagaattgga

SEQ ID NO: 576833 - DNA, 19 bp, Mus musculus
  siRNA target sequence for Pcsk4 (NM_008793.1,751-769).
gcctgcagccgcaacacat

SEQ ID NO: 576834 - DNA, 19 bp, Mus musculus
  siRNA target sequence for Pcsk4 (NM_008793.1,752-770).
cctgcagccgcaacacata

SEQ ID NO: 576835 - DNA, 19 bp, Mus musculus
  siRNA target sequence for Pcsk4 (NM_008793.1,760-778).
cgcaacacatacacatcta

SEQ ID NO: 576836 - DNA, 19 bp, Mus musculus
  siRNA target sequence for Pcsk4 (NM_008793.1,924-942).
cattacgacaactgcaatt

SEQ ID NO: 576837 - DNA, 19 bp, Mus musculus
  siRNA target sequence for Pcsk4 (NM_008793.1,1023-1041).
gcctgtgcctccacgttta

SEQ ID NO: 576838 - DNA, 19 bp, Mus musculus
  siRNA target sequence for Pcsk4 (NM_008793.1,1282-1300).
gccaagtgagccaccatta

SEQ ID NO: 576839 - DNA, 19 bp, Mus musculus
  siRNA target sequence for Pcsk4 (NM_008793.1,1584-1602).
gccatcagaccgttggata

SEQ ID NO: 576840 - DNA, 19 bp, Mus musculus
  siRNA target sequence for Pcsk4 (NM_008793.1,1585-1603).
ccatcagaccgttggatat

SEQ ID NO: 576841 - DNA, 19 bp, Mus musculus
  siRNA target sequence for Pcsk4 (NM_008793.1,1606-1624).
gcggccaaggctacaacaa

SEQ ID NO: 576842 - DNA, 19 bp, Mus musculus
  siRNA target sequence for Pcsk4 (NM_008793.1,1689-1707).
gagaataagggctactatt

SEQ ID NO: 576843 - DNA, 19 bp, Mus musculus
  siRNA target sequence for Pcsk7 (NM_008794.1,246-264).
ctggaattagccatcttct

SEQ ID NO: 576844 - DNA, 19 bp, Mus musculus
  siRNA target sequence for Pcsk7 (NM_008794.1,598-616).
gcagtatccacttcaatga

SEQ ID NO: 576845 - DNA, 19 bp, Mus musculus
  siRNA target sequence for Pcsk7 (NM_008794.1,599-617).
cagtatccacttcaatgat

SEQ ID NO: 576846 - DNA, 19 bp, Mus musculus
  siRNA target sequence for Pcsk7 (NM_008794.1,779-797).
cagtccagagggaagttat

SEQ ID NO: 576847 - DNA, 19 bp, Mus musculus
  siRNA target sequence for Pcsk7 (NM_008794.1,926-944).
ctacgggagccgaatagca

SEQ ID NO: 576848 - DNA, 19 bp, Mus musculus
  siRNA target sequence for Pcsk7 (NM_008794.1,956-974).
gctggatggaccacttact

SEQ ID NO: 576849 - DNA, 19 bp, Mus musculus
  siRNA target sequence for Pcsk7 (NM_008794.1,984-1002).
gaggctgtggcgttcaaca

SEQ ID NO: 576850 - DNA, 19 bp, Mus musculus
  siRNA target sequence for Pcsk7 (NM_008794.1,994-1012).
cgttcaacaagcactatca

SEQ ID NO: 576851 - DNA, 19 bp, Mus musculus
  siRNA target sequence for Pcsk7 (NM_008794.1,1085-1103).
cggaaaggctgccttacaa

SEQ ID NO: 576852 - DNA, 19 bp, Mus musculus
  siRNA target sequence for Pcsk7 (NM_008794.1,1125-1143).
caaggctttggaagtatct

SEQ ID NO: 576853 - DNA, 19 bp, Mus musculus
  siRNA target sequence for Pcsk7 (NM_008794.1,1175-1193).
caatgacaactgcaactat

SEQ ID NO: 576854 - DNA, 19 bp, Mus musculus
  siRNA target sequence for Pcsk7 (NM_008794.1,1245-1263).
gagggacggatgccttttt

SEQ ID NO: 576855 - DNA, 19 bp, Mus musculus
  siRNA target sequence for Pcsk7 (NM_008794.1,1247-1265).
gggacggatgcctttttat

SEQ ID NO: 576856 - DNA, 19 bp, Mus musculus
  siRNA target sequence for Pcsk7 (NM_008794.1,1462-1480).
gggatgtacagcacataat

SEQ ID NO: 576857 - DNA, 19 bp, Mus musculus
  siRNA target sequence for Pcsk7 (NM_008794.1,1496-1514).
ccagtatgaagatcatcat

SEQ ID NO: 576858 - DNA, 19 bp, Mus musculus
  siRNA target sequence for Pcsk7 (NM_008794.1,1580-1598).
cgcttggagacttgtcaat

SEQ ID NO: 576859 - DNA, 19 bp, Mus musculus
  siRNA target sequence for Pcsk7 (NM_008794.1,1612-1630).
ggacatctgtcccttactt

SEQ ID NO: 576860 - DNA, 19 bp, Mus musculus
  siRNA target sequence for Pcsk7 (NM_008794.1,1825-1843).
gtggcatgatgtctttgat

SEQ ID NO: 576861 - DNA, 19 bp, Mus musculus
  siRNA target sequence for Pcsk7 (NM_008794.1,1858-1876).
gcatggactcggatcctaa

SEQ ID NO: 576862 - DNA, 19 bp, Mus musculus
  siRNA target sequence for Pcsk7 (NM_008794.1,1868-1886).
ggatcctaatggcttcaat

SEQ ID NO: 576863 - DNA, 19 bp, Mus musculus
  siRNA target sequence for Pcsk7 (NM_008794.1,1872-1890).
cctaatggcttcaatgctt

SEQ ID NO: 576864 - DNA, 19 bp, Mus musculus
  siRNA target sequence for Pcsk7 (NM_008794.1,1933-1951).
gcgtctacagactggttat

SEQ ID NO: 576865 - DNA, 19 bp, Mus musculus
  siRNA target sequence for Pcsk7 (NM_008794.1,1935-1953).
gtctacagactggttatca

SEQ ID NO: 576866 - DNA, 19 bp, Mus musculus
  siRNA target sequence for Pcsk7 (NM_008794.1,2026-2044).
ggagtccagtagacatcaa

SEQ ID NO: 576867 - DNA, 19 bp, Mus musculus
  siRNA target sequence for Pcsk7 (NM_008794.1,2037-2055).
gacatcaaggacagacaaa

SEQ ID NO: 576868 - DNA, 19 bp, Mus musculus
  siRNA target sequence for Pcsk7 (NM_008794.1,2068-2086).
gtgctatgagtggaaaata

SEQ ID NO: 576869 - DNA, 19 bp, Mus musculus
  siRNA target sequence for Pcsk7 (NM_008794.1,2071-2089).
ctatgagtggaaaatacct

SEQ ID NO: 576870 - DNA, 19 bp, Mus musculus
  siRNA target sequence for Pcsk7 (NM_008794.1,2113-2131).
gcccacctgggctgaaaat

SEQ ID NO: 576871 - DNA, 19 bp, Mus musculus
  siRNA target sequence for Pcsk7 (NM_008794.1,2150-2168).
caccattacccctaacaca

SEQ ID NO: 576872 - DNA, 19 bp, Mus musculus
  siRNA target sequence for Pcsk7 (NM_008794.1,2322-2340).
gcagggacagcactagaat

SEQ ID NO: 576873 - DNA, 19 bp, Mus musculus
  siRNA target sequence for Pcsk9 (NM_153565.1,694-712).
gacccagaggctacagatt

SEQ ID NO: 576874 - DNA, 19 bp, Mus musculus
  siRNA target sequence for Pcsk9 (NM_153565.1,696-714).
cccagaggctacagattga

SEQ ID NO: 576875 - DNA, 19 bp, Mus musculus
  siRNA target sequence for Pcsk9 (NM_153565.1,697-715).
ccagaggctacagattgaa

SEQ ID NO: 576876 - DNA, 19 bp, Mus musculus
  siRNA target sequence for Pcsk9 (NM_153565.1,700-718).
gaggctacagattgaacaa

SEQ ID NO: 576877 - DNA, 19 bp, Mus musculus
  siRNA target sequence for Pcsk9 (NM_153565.1,906-924).
ggaacctggagcgaattat

SEQ ID NO: 576878 - DNA, 19 bp, Mus musculus
  siRNA target sequence for Pcsk9 (NM_153565.1,979-997).
ggaggtgtatctcttagat

SEQ ID NO: 576879 - DNA, 19 bp, Mus musculus
  siRNA target sequence for Pcsk9 (NM_153565.1,980-998).
gaggtgtatctcttagata

SEQ ID NO: 576880 - DNA, 19 bp, Mus musculus
  siRNA target sequence for Pcsk9 (NM_153565.1,1011-1029).
gtgcccatcgggagattga

SEQ ID NO: 576881 - DNA, 19 bp, Mus musculus
  siRNA target sequence for Pcsk9 (NM_153565.1,1234-1252).
cataggcctggagtttatt

SEQ ID NO: 576882 - DNA, 19 bp, Mus musculus
  siRNA target sequence for Pcsk9 (NM_153565.1,1254-1272).
ggaagagtcagctaatcca

SEQ ID NO: 576883 - DNA, 19 bp, Mus musculus
  siRNA target sequence for Pcsk9 (NM_153565.1,1484-1502).
gggactttggggactaatt

SEQ ID NO: 576884 - DNA, 19 bp, Mus musculus
  siRNA target sequence for Pcsk9 (NM_153565.1,1485-1503).
ggactttggggactaattt

SEQ ID NO: 576885 - DNA, 19 bp, Mus musculus
  siRNA target sequence for Pcsk9 (NM_153565.1,1695-1713).
ctaccaaagacgtcatcaa

SEQ ID NO: 576886 - DNA, 19 bp, Mus musculus
  siRNA target sequence for Pcsk9 (NM_153565.1,1965-1983).
gcaaggccctcaatgcatt

SEQ ID NO: 576887 - DNA, 19 bp, Mus musculus
  siRNA target sequence for Pcsk9 (NM_153565.1,2253-2271).
ggctggaatgcaaaatcaa

SEQ ID NO: 576888 - DNA, 19 bp, Mus musculus
  siRNA target sequence for Pcsk9 (NM_153565.1,2329-2347).
gaccctgactggatgcaat

SEQ ID NO: 576889 - DNA, 19 bp, Mus musculus
  siRNA target sequence for Pla2g4a (NM_008869.2,173-191).
gatccttatcagcacatta

SEQ ID NO: 576890 - DNA, 19 bp, Mus musculus
  siRNA target sequence for Pla2g4a (NM_008869.2,177-195).
cttatcagcacattatagt

SEQ ID NO: 576891 - DNA, 19 bp, Mus musculus
  siRNA target sequence for Pla2g4a (NM_008869.2,200-218).
caccagtactcccataagt

SEQ ID NO: 576892 - DNA, 19 bp, Mus musculus
  siRNA target sequence for Pla2g4a (NM_008869.2,202-220).
ccagtactcccataagttt

SEQ ID NO: 576893 - DNA, 19 bp, Mus musculus
  siRNA target sequence for Pla2g4a (NM_008869.2,203-221).
cagtactcccataagttta

SEQ ID NO: 576894 - DNA, 19 bp, Mus musculus
  siRNA target sequence for Pla2g4a (NM_008869.2,205-223).
gtactcccataagtttact

SEQ ID NO: 576895 - DNA, 19 bp, Mus musculus
  siRNA target sequence for Pla2g4a (NM_008869.2,233-251).
ctacgtgccaccaaagtaa

SEQ ID NO: 576896 - DNA, 19 bp, Mus musculus
  siRNA target sequence for Pla2g4a (NM_008869.2,258-276).
ggacctttggcgatatgct

SEQ ID NO: 576897 - DNA, 19 bp, Mus musculus
  siRNA target sequence for Pla2g4a (NM_008869.2,287-305).
gatccttatgtggaacttt

SEQ ID NO: 576898 - DNA, 19 bp, Mus musculus
  siRNA target sequence for Pla2g4a (NM_008869.2,334-352).
gcgaacgagacacttcaat

SEQ ID NO: 576899 - DNA, 19 bp, Mus musculus
  siRNA target sequence for Pla2g4a (NM_008869.2,335-353).
cgaacgagacacttcaata

SEQ ID NO: 576900 - DNA, 19 bp, Mus musculus
  siRNA target sequence for Pla2g4a (NM_008869.2,339-357).
cgagacacttcaataatga

SEQ ID NO: 576901 - DNA, 19 bp, Mus musculus
  siRNA target sequence for Pla2g4a (NM_008869.2,473-491).
gctacattccctgtatctt

SEQ ID NO: 576902 - DNA, 19 bp, Mus musculus
  siRNA target sequence for Pla2g4a (NM_008869.2,814-832).
ggactgtgctacatacatt

SEQ ID NO: 576903 - DNA, 19 bp, Mus musculus
  siRNA target sequence for Pla2g4a (NM_008869.2,871-889).
gtactctcaccccgatttt

SEQ ID NO: 576904 - DNA, 19 bp, Mus musculus
  siRNA target sequence for Pla2g4a (NM_008869.2,900-918).
gtcccgaggagattaatga

SEQ ID NO: 576905 - DNA, 19 bp, Mus musculus
  siRNA target sequence for Pla2g4a (NM_008869.2,903-921).
ccgaggagattaatgaaga

SEQ ID NO: 576906 - DNA, 19 bp, Mus musculus
  siRNA target sequence for Pla2g4a (NM_008869.2,937-955).
cagccacaaccctctctta

SEQ ID NO: 576907 - DNA, 19 bp, Mus musculus
  siRNA target sequence for Pla2g4a (NM_008869.2,1016-1034).
ggccagcctgtcaccttta

SEQ ID NO: 576908 - DNA, 19 bp, Mus musculus
  siRNA target sequence for Pla2g4a (NM_008869.2,1027-1045).
cacctttactgacatcttt

SEQ ID NO: 576909 - DNA, 19 bp, Mus musculus
  siRNA target sequence for Pla2g4a (NM_008869.2,1039-1057).
catctttgggatgctaata

SEQ ID NO: 576910 - DNA, 19 bp, Mus musculus
  siRNA target sequence for Pla2g4a (NM_008869.2,1051-1069).
gctaataggagaaacacta

SEQ ID NO: 576911 - DNA, 19 bp, Mus musculus
  siRNA target sequence for Pla2g4a (NM_008869.2,1065-1083).
cactaattcaaaataggat

SEQ ID NO: 576912 - DNA, 19 bp, Mus musculus
  siRNA target sequence for Pla2g4a (NM_008869.2,1098-1116).
gtagtttgaaggaaaaggt

SEQ ID NO: 576913 - DNA, 19 bp, Mus musculus
  siRNA target sequence for Pla2g4a (NM_008869.2,1190-1208).
gccgattgggtggaattta

SEQ ID NO: 576914 - DNA, 19 bp, Mus musculus
  siRNA target sequence for Pla2g4a (NM_008869.2,1192-1210).
cgattgggtggaatttagt

SEQ ID NO: 576915 - DNA, 19 bp, Mus musculus
  siRNA target sequence for Pla2g4a (NM_008869.2,1198-1216).
ggtggaatttagtccatat

SEQ ID NO: 576916 - DNA, 19 bp, Mus musculus
  siRNA target sequence for Pla2g4a (NM_008869.2,1202-1220).
gaatttagtccatatgaga

SEQ ID NO: 576917 - DNA, 19 bp, Mus musculus
  siRNA target sequence for Pla2g4a (NM_008869.2,1219-1237).
gattggcatggcaaaatat

SEQ ID NO: 576918 - DNA, 19 bp, Mus musculus
  siRNA target sequence for Pla2g4a (NM_008869.2,1249-1267).
ggctcctgacctatttgga

SEQ ID NO: 576919 - DNA, 19 bp, Mus musculus
  siRNA target sequence for Pla2g4a (NM_008869.2,1338-1356).
ggggcagtgccttttctat

SEQ ID NO: 576920 - DNA, 19 bp, Mus musculus
  siRNA target sequence for Pla2g4a (NM_008869.2,1391-1409).
cagaataaaggctctacaa

SEQ ID NO: 576921 - DNA, 19 bp, Mus musculus
  siRNA target sequence for Pla2g4a (NM_008869.2,1437-1455).
caaagcacatcgtgagtaa

SEQ ID NO: 576922 - DNA, 19 bp, Mus musculus
  siRNA target sequence for Pla2g4a (NM_008869.2,1442-1460).
cacatcgtgagtaatgaca

SEQ ID NO: 576923 - DNA, 19 bp, Mus musculus
  siRNA target sequence for Pla2g4a (NM_008869.2,1491-1509).
ccaaaggcaccgagaatga

SEQ ID NO: 576924 - DNA, 19 bp, Mus musculus
  siRNA target sequence for Pla2g4a (NM_008869.2,1551-1569).
gggtccatcggatgctaat

SEQ ID NO: 576925 - DNA, 19 bp, Mus musculus
  siRNA target sequence for Pla2g4a (NM_008869.2,1577-1595).
gtgagcgactcggctttat

SEQ ID NO: 576926 - DNA, 19 bp, Mus musculus
  siRNA target sequence for Pla2g4a (NM_008869.2,1581-1599).
gcgactcggctttattcaa

SEQ ID NO: 576927 - DNA, 19 bp, Mus musculus
  siRNA target sequence for Pla2g4a (NM_008869.2,1582-1600).
cgactcggctttattcaat

SEQ ID NO: 576928 - DNA, 19 bp, Mus musculus
  siRNA target sequence for Pla2g4a (NM_008869.2,1614-1632).
gtgccggaaaggtgcataa

SEQ ID NO: 576929 - DNA, 19 bp, Mus musculus
  siRNA target sequence for Pla2g4a (NM_008869.2,1616-1634).
gccggaaaggtgcataact

SEQ ID NO: 576930 - DNA, 19 bp, Mus musculus
  siRNA target sequence for Pla2g4a (NM_008869.2,1617-1635).
ccggaaaggtgcataactt

SEQ ID NO: 576931 - DNA, 19 bp, Mus musculus
  siRNA target sequence for Pla2g4a (NM_008869.2,1619-1637).
ggaaaggtgcataacttca

SEQ ID NO: 576932 - DNA, 19 bp, Mus musculus
  siRNA target sequence for Pla2g4a (NM_008869.2,1648-1666).
gaatctcaacacatcatat

SEQ ID NO: 576933 - DNA, 19 bp, Mus musculus
  siRNA target sequence for Pla2g4a (NM_008869.2,1766-1784).
ccactggatgtcaaaagta

SEQ ID NO: 576934 - DNA, 19 bp, Mus musculus
  siRNA target sequence for Pla2g4a (NM_008869.2,1806-1824).
gtgggctcacatttaacct

SEQ ID NO: 576935 - DNA, 19 bp, Mus musculus
  siRNA target sequence for Pla2g4a (NM_008869.2,1854-1872).
gaggtgtggatcttatcat

SEQ ID NO: 576936 - DNA, 19 bp, Mus musculus
  siRNA target sequence for Pla2g4a (NM_008869.2,1856-1874).
ggtgtggatcttatcatct

SEQ ID NO: 576937 - DNA, 19 bp, Mus musculus
  siRNA target sequence for Pla2g4a (NM_008869.2,1865-1883).
cttatcatctcctttgact

SEQ ID NO: 576938 - DNA, 19 bp, Mus musculus
  siRNA target sequence for Pla2g4a (NM_008869.2,1911-1929).
cccctttcaaggaacttct

SEQ ID NO: 576939 - DNA, 19 bp, Mus musculus
  siRNA target sequence for Pla2g4a (NM_008869.2,1978-1996).
cgatccttatgtgtttgat

SEQ ID NO: 576940 - DNA, 19 bp, Mus musculus
  siRNA target sequence for Pla2g4a (NM_008869.2,1990-2008).
gtttgatcgggaaggatta

SEQ ID NO: 576941 - DNA, 19 bp, Mus musculus
  siRNA target sequence for Pla2g4a (NM_008869.2,2050-2068).
gaaggattgcccaaccatt

SEQ ID NO: 576942 - DNA, 19 bp, Mus musculus
  siRNA target sequence for Pla2g4a (NM_008869.2,2118-2136).
gtgttctaagggaaaccaa

SEQ ID NO: 576943 - DNA, 19 bp, Mus musculus
  siRNA target sequence for Pla2g4a (NM_008869.2,2174-2192).
gaccccgaatcgccatttt

SEQ ID NO: 576944 - DNA, 19 bp, Mus musculus
  siRNA target sequence for Pla2g4a (NM_008869.2,2176-2194).
ccccgaatcgccattttca

SEQ ID NO: 576945 - DNA, 19 bp, Mus musculus
  siRNA target sequence for Pla2g4a (NM_008869.2,2177-2195).
cccgaatcgccattttcaa

SEQ ID NO: 576946 - DNA, 19 bp, Mus musculus
  siRNA target sequence for Pla2g4a (NM_008869.2,2203-2221).
ctttcagtatcccaatcaa

SEQ ID NO: 576947 - DNA, 19 bp, Mus musculus
  siRNA target sequence for Pla2g4a (NM_008869.2,2257-2275).
cacactgaacaacattgat

SEQ ID NO: 576948 - DNA, 19 bp, Mus musculus
  siRNA target sequence for Pla2g4a (NM_008869.2,2259-2277).
cactgaacaacattgatgt

SEQ ID NO: 576949 - DNA, 19 bp, Mus musculus
  siRNA target sequence for Pla2g4a (NM_008869.2,2278-2296).
gataaaggatgccattgtt

SEQ ID NO: 576950 - DNA, 19 bp, Mus musculus
  siRNA target sequence for Pla2g4a (NM_008869.2,2360-2378).
gcaagaaaattcttcaata

SEQ ID NO: 576951 - DNA, 19 bp, Mus musculus
  siRNA target sequence for Tpp2 (NM_009418.1,166-184).
gccgctacccggagtatga

SEQ ID NO: 576952 - DNA, 19 bp, Mus musculus
  siRNA target sequence for Tpp2 (NM_009418.1,239-257).
gggcatgcaggttacaact

SEQ ID NO: 576953 - DNA, 19 bp, Mus musculus
  siRNA target sequence for Tpp2 (NM_009418.1,253-271).
caactgatggaaaaccaaa

SEQ ID NO: 576954 - DNA, 19 bp, Mus musculus
  siRNA target sequence for Tpp2 (NM_009418.1,275-293).
cattgatatcattgataca

SEQ ID NO: 576955 - DNA, 19 bp, Mus musculus
  siRNA target sequence for Tpp2 (NM_009418.1,297-315).
ggaagtggtgatgtaaata

SEQ ID NO: 576956 - DNA, 19 bp, Mus musculus
  siRNA target sequence for Tpp2 (NM_009418.1,333-351).
ccaaaagatggtgaaatta

SEQ ID NO: 576957 - DNA, 19 bp, Mus musculus
  siRNA target sequence for Tpp2 (NM_009418.1,389-407).
ctggacaaatcctttagga

SEQ ID NO: 576958 - DNA, 19 bp, Mus musculus
  siRNA target sequence for Tpp2 (NM_009418.1,391-409).
ggacaaatcctttaggaaa

SEQ ID NO: 576959 - DNA, 19 bp, Mus musculus
  siRNA target sequence for Tpp2 (NM_009418.1,432-450).
ggttatgacttctatccaa

SEQ ID NO: 576960 - DNA, 19 bp, Mus musculus
  siRNA target sequence for Tpp2 (NM_009418.1,610-628).
gtcaagtggaattacttaa

SEQ ID NO: 576961 - DNA, 19 bp, Mus musculus
  siRNA target sequence for Tpp2 (NM_009418.1,649-667).
gtgatccaggccctgtata

SEQ ID NO: 576962 - DNA, 19 bp, Mus musculus
  siRNA target sequence for Tpp2 (NM_009418.1,745-763).
gtgccgtattgagaaacta

SEQ ID NO: 576963 - DNA, 19 bp, Mus musculus
  siRNA target sequence for Tpp2 (NM_009418.1,747-765).
gccgtattgagaaactaca

SEQ ID NO: 576964 - DNA, 19 bp, Mus musculus
  siRNA target sequence for Tpp2 (NM_009418.1,768-786).
gaggcccaagagtacagtt

SEQ ID NO: 576965 - DNA, 19 bp, Mus musculus
  siRNA target sequence for Tpp2 (NM_009418.1,771-789).
gcccaagagtacagttctt

SEQ ID NO: 576966 - DNA, 19 bp, Mus musculus
  siRNA target sequence for Tpp2 (NM_009418.1,809-827).
gaattactctgtgaacatt

SEQ ID NO: 576967 - DNA, 19 bp, Mus musculus
  siRNA target sequence for Tpp2 (NM_009418.1,942-960).
cctggtgctcaaattctat

SEQ ID NO: 576968 - DNA, 19 bp, Mus musculus
  siRNA target sequence for Tpp2 (NM_009418.1,948-966).
gctcaaattctatccatta

SEQ ID NO: 576969 - DNA, 19 bp, Mus musculus
  siRNA target sequence for Tpp2 (NM_009418.1,981-999).
cggctaagcactatggaaa

SEQ ID NO: 576970 - DNA, 19 bp, Mus musculus
  siRNA target sequence for Tpp2 (NM_009418.1,1009-1027).
gcctcatcagagctatgat

SEQ ID NO: 576971 - DNA, 19 bp, Mus musculus
  siRNA target sequence for Tpp2 (NM_009418.1,1010-1028).
cctcatcagagctatgata

SEQ ID NO: 576972 - DNA, 19 bp, Mus musculus
  siRNA target sequence for Tpp2 (NM_009418.1,1013-1031).
catcagagctatgatagaa

SEQ ID NO: 576973 - DNA, 19 bp, Mus musculus
  siRNA target sequence for Tpp2 (NM_009418.1,1016-1034).
cagagctatgatagaagtt

SEQ ID NO: 576974 - DNA, 19 bp, Mus musculus
  siRNA target sequence for Tpp2 (NM_009418.1,1018-1036).
gagctatgatagaagttat

SEQ ID NO: 576975 - DNA, 19 bp, Mus musculus
  siRNA target sequence for Tpp2 (NM_009418.1,1020-1038).
gctatgatagaagttataa

SEQ ID NO: 576976 - DNA, 19 bp, Mus musculus
  siRNA target sequence for Tpp2 (NM_009418.1,1021-1039).
ctatgatagaagttataaa

SEQ ID NO: 576977 - DNA, 19 bp, Mus musculus
  siRNA target sequence for Tpp2 (NM_009418.1,1077-1095).
gcaactcattggccaaatt

SEQ ID NO: 576978 - DNA, 19 bp, Mus musculus
  siRNA target sequence for Tpp2 (NM_009418.1,1102-1120).
gaatttgtgaagtaattaa

SEQ ID NO: 576979 - DNA, 19 bp, Mus musculus
  siRNA target sequence for Tpp2 (NM_009418.1,1256-1274).
gatggttgcagagtattca

SEQ ID NO: 576980 - DNA, 19 bp, Mus musculus
  siRNA target sequence for Tpp2 (NM_009418.1,1289-1307).
gcctgcaaatcaatataca

SEQ ID NO: 576981 - DNA, 19 bp, Mus musculus
  siRNA target sequence for Tpp2 (NM_009418.1,1290-1308).
cctgcaaatcaatatacat

SEQ ID NO: 576982 - DNA, 19 bp, Mus musculus
  siRNA target sequence for Tpp2 (NM_009418.1,1299-1317).
caatatacatggtcttcta

SEQ ID NO: 576983 - DNA, 19 bp, Mus musculus
  siRNA target sequence for Tpp2 (NM_009418.1,1402-1420).
gggggactcagctaatgaa

SEQ ID NO: 576984 - DNA, 19 bp, Mus musculus
  siRNA target sequence for Tpp2 (NM_009418.1,1403-1421).
ggggactcagctaatgaat

SEQ ID NO: 576985 - DNA, 19 bp, Mus musculus
  siRNA target sequence for Tpp2 (NM_009418.1,1413-1431).
ctaatgaatgggacatcaa

SEQ ID NO: 576986 - DNA, 19 bp, Mus musculus
  siRNA target sequence for Tpp2 (NM_009418.1,1540-1558).
caataaaagctgacaatat

SEQ ID NO: 576987 - DNA, 19 bp, Mus musculus
  siRNA target sequence for Tpp2 (NM_009418.1,1548-1566).
gctgacaatatagaagtat

SEQ ID NO: 576988 - DNA, 19 bp, Mus musculus
  siRNA target sequence for Tpp2 (NM_009418.1,1549-1567).
ctgacaatatagaagtatt

SEQ ID NO: 576989 - DNA, 19 bp, Mus musculus
  siRNA target sequence for Tpp2 (NM_009418.1,1593-1611).
gttgacaaagcttatgact

SEQ ID NO: 576990 - DNA, 19 bp, Mus musculus
  siRNA target sequence for Tpp2 (NM_009418.1,1616-1634).
cattcaaaatacatcattt

SEQ ID NO: 576991 - DNA, 19 bp, Mus musculus
  siRNA target sequence for Tpp2 (NM_009418.1,1635-1653).
gctaacagattaggtttta

SEQ ID NO: 576992 - DNA, 19 bp, Mus musculus
  siRNA target sequence for Tpp2 (NM_009418.1,1666-1684).
gaaataaccgtggtatcta

SEQ ID NO: 576993 - DNA, 19 bp, Mus musculus
  siRNA target sequence for Tpp2 (NM_009418.1,1856-1874).
gtgtcggcacataaacata

SEQ ID NO: 576994 - DNA, 19 bp, Mus musculus
  siRNA target sequence for Tpp2 (NM_009418.1,1883-1901).
ccccaggggcttaagagaa

SEQ ID NO: 576995 - DNA, 19 bp, Mus musculus
  siRNA target sequence for Tpp2 (NM_009418.1,1892-1910).
cttaagagaagggttacat

SEQ ID NO: 576996 - DNA, 19 bp, Mus musculus
  siRNA target sequence for Tpp2 (NM_009418.1,1917-1935).
gaggtatgtggctatgata

SEQ ID NO: 576997 - DNA, 19 bp, Mus musculus
  siRNA target sequence for Tpp2 (NM_009418.1,1919-1937).
ggtatgtggctatgatata

SEQ ID NO: 576998 - DNA, 19 bp, Mus musculus
  siRNA target sequence for Tpp2 (NM_009418.1,1943-1961).
ccccaatgcaggtccttta

SEQ ID NO: 576999 - DNA, 19 bp, Mus musculus
  siRNA target sequence for Tpp2 (NM_009418.1,1944-1962).
cccaatgcaggtcctttat

SEQ ID NO: 577000 - DNA, 19 bp, Mus musculus
  siRNA target sequence for Tpp2 (NM_009418.1,1945-1963).
ccaatgcaggtcctttatt

SEQ ID NO: 577001 - DNA, 19 bp, Mus musculus
  siRNA target sequence for Tpp2 (NM_009418.1,1998-2016).
gtaaatgagtcatcacatt

SEQ ID NO: 577002 - DNA, 19 bp, Mus musculus
  siRNA target sequence for Tpp2 (NM_009418.1,2006-2024).
gtcatcacattatgatcta

SEQ ID NO: 577003 - DNA, 19 bp, Mus musculus
  siRNA target sequence for Tpp2 (NM_009418.1,2052-2070).
ggtcagattcgaagacatt

SEQ ID NO: 577004 - DNA, 19 bp, Mus musculus
  siRNA target sequence for Tpp2 (NM_009418.1,2090-2108).
ggcaacctgggctgaagtt

SEQ ID NO: 577005 - DNA, 19 bp, Mus musculus
  siRNA target sequence for Tpp2 (NM_009418.1,2091-2109).
gcaacctgggctgaagtta

SEQ ID NO: 577006 - DNA, 19 bp, Mus musculus
  siRNA target sequence for Tpp2 (NM_009418.1,2103-2121).
gaagttaccgtgtgttcat

SEQ ID NO: 577007 - DNA, 19 bp, Mus musculus
  siRNA target sequence for Tpp2 (NM_009418.1,2106-2124).
gttaccgtgtgttcatgtt

SEQ ID NO: 577008 - DNA, 19 bp, Mus musculus
  siRNA target sequence for Tpp2 (NM_009418.1,2128-2146).
ctgaggtatcggcaaaatt

SEQ ID NO: 577009 - DNA, 19 bp, Mus musculus
  siRNA target sequence for Tpp2 (NM_009418.1,2132-2150).
ggtatcggcaaaatttgtt

SEQ ID NO: 577010 - DNA, 19 bp, Mus musculus
  siRNA target sequence for Tpp2 (NM_009418.1,2171-2189).
gaagcagagagcatatcga

SEQ ID NO: 577011 - DNA, 19 bp, Mus musculus
  siRNA target sequence for Tpp2 (NM_009418.1,2181-2199).
gcatatcgaagtcatgaat

SEQ ID NO: 577012 - DNA, 19 bp, Mus musculus
  siRNA target sequence for Tpp2 (NM_009418.1,2182-2200).
catatcgaagtcatgaatt

SEQ ID NO: 577013 - DNA, 19 bp, Mus musculus
  siRNA target sequence for Tpp2 (NM_009418.1,2187-2205).
cgaagtcatgaattttata

SEQ ID NO: 577014 - DNA, 19 bp, Mus musculus
  siRNA target sequence for Tpp2 (NM_009418.1,2220-2238).
ccagaaaaaggaacactta

SEQ ID NO: 577015 - DNA, 19 bp, Mus musculus
  siRNA target sequence for Tpp2 (NM_009418.1,2230-2248).
gaacacttattgaagcttt

SEQ ID NO: 577016 - DNA, 19 bp, Mus musculus
  siRNA target sequence for Tpp2 (NM_009418.1,2258-2276).
gggcggaaaagcaattgaa

SEQ ID NO: 577017 - DNA, 19 bp, Mus musculus
  siRNA target sequence for Tpp2 (NM_009418.1,2259-2277).
ggcggaaaagcaattgaat

SEQ ID NO: 577018 - DNA, 19 bp, Mus musculus
  siRNA target sequence for Tpp2 (NM_009418.1,2260-2278).
gcggaaaagcaattgaatt

SEQ ID NO: 577019 - DNA, 19 bp, Mus musculus
  siRNA target sequence for Tpp2 (NM_009418.1,2261-2279).
cggaaaagcaattgaattt

SEQ ID NO: 577020 - DNA, 19 bp, Mus musculus
  siRNA target sequence for Tpp2 (NM_009418.1,2262-2280).
ggaaaagcaattgaatttt

SEQ ID NO: 577021 - DNA, 19 bp, Mus musculus
  siRNA target sequence for Tpp2 (NM_009418.1,2289-2307).
cgttggtgggcaagtctta

SEQ ID NO: 577022 - DNA, 19 bp, Mus musculus
  siRNA target sequence for Tpp2 (NM_009418.1,2293-2311).
ggtgggcaagtcttagtga

SEQ ID NO: 577023 - DNA, 19 bp, Mus musculus
  siRNA target sequence for Tpp2 (NM_009418.1,2294-2312).
gtgggcaagtcttagtgat

SEQ ID NO: 577024 - DNA, 19 bp, Mus musculus
  siRNA target sequence for Tpp2 (NM_009418.1,2299-2317).
caagtcttagtgatgtcaa

SEQ ID NO: 577025 - DNA, 19 bp, Mus musculus
  siRNA target sequence for Tpp2 (NM_009418.1,2310-2328).
gatgtcaatattgattata

SEQ ID NO: 577026 - DNA, 19 bp, Mus musculus
  siRNA target sequence for Tpp2 (NM_009418.1,2313-2331).
gtcaatattgattatacca

SEQ ID NO: 577027 - DNA, 19 bp, Mus musculus
  siRNA target sequence for Tpp2 (NM_009418.1,2351-2369).
gtgtactgcaccacagtta

SEQ ID NO: 577028 - DNA, 19 bp, Mus musculus
  siRNA target sequence for Tpp2 (NM_009418.1,2353-2371).
gtactgcaccacagttaaa

SEQ ID NO: 577029 - DNA, 19 bp, Mus musculus
  siRNA target sequence for Tpp2 (NM_009418.1,2383-2401).
ctgaaggaatcaatcgttt

SEQ ID NO: 577030 - DNA, 19 bp, Mus musculus
  siRNA target sequence for Tpp2 (NM_009418.1,2389-2407).
gaatcaatcgttttgatgt

SEQ ID NO: 577031 - DNA, 19 bp, Mus musculus
  siRNA target sequence for Tpp2 (NM_009418.1,2436-2454).
gctccttgcataactttga

SEQ ID NO: 577032 - DNA, 19 bp, Mus musculus
  siRNA target sequence for Tpp2 (NM_009418.1,2471-2489).
gctacgcccagtaaatgca

SEQ ID NO: 577033 - DNA, 19 bp, Mus musculus
  siRNA target sequence for Tpp2 (NM_009418.1,2472-2490).
ctacgcccagtaaatgcaa

SEQ ID NO: 577034 - DNA, 19 bp, Mus musculus
  siRNA target sequence for Tpp2 (NM_009418.1,2475-2493).
cgcccagtaaatgcaaaaa

SEQ ID NO: 577035 - DNA, 19 bp, Mus musculus
  siRNA target sequence for Tpp2 (NM_009418.1,2512-2530).
gagatgttttgccaaataa

SEQ ID NO: 577036 - DNA, 19 bp, Mus musculus
  siRNA target sequence for Tpp2 (NM_009418.1,2524-2542).
caaataatcgccagcttta

SEQ ID NO: 577037 - DNA, 19 bp, Mus musculus
  siRNA target sequence for Tpp2 (NM_009418.1,2573-2591).
gcccaagagcggagaagta

SEQ ID NO: 577038 - DNA, 19 bp, Mus musculus
  siRNA target sequence for Tpp2 (NM_009418.1,2574-2592).
cccaagagcggagaagtaa

SEQ ID NO: 577039 - DNA, 19 bp, Mus musculus
  siRNA target sequence for Tpp2 (NM_009418.1,2576-2594).
caagagcggagaagtaaca

SEQ ID NO: 577040 - DNA, 19 bp, Mus musculus
  siRNA target sequence for Tpp2 (NM_009418.1,2599-2617).
gttgtccactcctttgtga

SEQ ID NO: 577041 - DNA, 19 bp, Mus musculus
  siRNA target sequence for Tpp2 (NM_009418.1,2602-2620).
gtccactcctttgtgaatt

SEQ ID NO: 577042 - DNA, 19 bp, Mus musculus
  siRNA target sequence for Tpp2 (NM_009418.1,2697-2715).
gcctatccacatcagtatt

SEQ ID NO: 577043 - DNA, 19 bp, Mus musculus
  siRNA target sequence for Tpp2 (NM_009418.1,2699-2717).
ctatccacatcagtattct

SEQ ID NO: 577044 - DNA, 19 bp, Mus musculus
  siRNA target sequence for Tpp2 (NM_009418.1,2727-2745).
gagaaaggagattatacaa

SEQ ID NO: 577045 - DNA, 19 bp, Mus musculus
  siRNA target sequence for Tpp2 (NM_009418.1,2729-2747).
gaaaggagattatacaatt

SEQ ID NO: 577046 - DNA, 19 bp, Mus musculus
  siRNA target sequence for Tpp2 (NM_009418.1,2733-2751).
ggagattatacaattcgat

SEQ ID NO: 577047 - DNA, 19 bp, Mus musculus
  siRNA target sequence for Tpp2 (NM_009418.1,2734-2752).
gagattatacaattcgatt

SEQ ID NO: 577048 - DNA, 19 bp, Mus musculus
  siRNA target sequence for Tpp2 (NM_009418.1,2783-2801).
ggatcgtctcaaagatctt

SEQ ID NO: 577049 - DNA, 19 bp, Mus musculus
  siRNA target sequence for Tpp2 (NM_009418.1,2796-2814).
gatcttccgtttattgttt

SEQ ID NO: 577050 - DNA, 19 bp, Mus musculus
  siRNA target sequence for Tpp2 (NM_009418.1,2802-2820).
ccgtttattgtttcacata

SEQ ID NO: 577051 - DNA, 19 bp, Mus musculus
  siRNA target sequence for Tpp2 (NM_009418.1,2811-2829).
gtttcacataggttgtcta

SEQ ID NO: 577052 - DNA, 19 bp, Mus musculus
  siRNA target sequence for Tpp2 (NM_009418.1,2837-2855).
gagcttagatattcatgaa

SEQ ID NO: 577053 - DNA, 19 bp, Mus musculus
  siRNA target sequence for Tpp2 (NM_009418.1,2863-2881).
gccttgcacttctaggaaa

SEQ ID NO: 577054 - DNA, 19 bp, Mus musculus
  siRNA target sequence for Tpp2 (NM_009418.1,2941-2959).
ccttacctgatgataaaat

SEQ ID NO: 577055 - DNA, 19 bp, Mus musculus
  siRNA target sequence for Tpp2 (NM_009418.1,2942-2960).
cttacctgatgataaaata

SEQ ID NO: 577056 - DNA, 19 bp, Mus musculus
  siRNA target sequence for Tpp2 (NM_009418.1,2988-3006).
cttgcaggctccttgacat

SEQ ID NO: 577057 - DNA, 19 bp, Mus musculus
  siRNA target sequence for Tpp2 (NM_009418.1,2991-3009).
gcaggctccttgacattgt

SEQ ID NO: 577058 - DNA, 19 bp, Mus musculus
  siRNA target sequence for Tpp2 (NM_009418.1,2994-3012).
ggctccttgacattgtcaa

SEQ ID NO: 577059 - DNA, 19 bp, Mus musculus
  siRNA target sequence for Tpp2 (NM_009418.1,2995-3013).
gctccttgacattgtcaaa

SEQ ID NO: 577060 - DNA, 19 bp, Mus musculus
  siRNA target sequence for Tpp2 (NM_009418.1,3010-3028).
caaagactgagcttggaaa

SEQ ID NO: 577061 - DNA, 19 bp, Mus musculus
  siRNA target sequence for Tpp2 (NM_009418.1,3038-3056).
gcagtctgcagcaaaacga

SEQ ID NO: 577062 - DNA, 19 bp, Mus musculus
  siRNA target sequence for Tpp2 (NM_009418.1,3048-3066).
gcaaaacgacaaggaaaat

SEQ ID NO: 577063 - DNA, 19 bp, Mus musculus
  siRNA target sequence for Tpp2 (NM_009418.1,3049-3067).
caaaacgacaaggaaaatt

SEQ ID NO: 577064 - DNA, 19 bp, Mus musculus
  siRNA target sequence for Tpp2 (NM_009418.1,3075-3093).
gatgtgatccctgttcatt

SEQ ID NO: 577065 - DNA, 19 bp, Mus musculus
  siRNA target sequence for Tpp2 (NM_009418.1,3078-3096).
gtgatccctgttcattact

SEQ ID NO: 577066 - DNA, 19 bp, Mus musculus
  siRNA target sequence for Tpp2 (NM_009418.1,3084-3102).
cctgttcattactatctca

SEQ ID NO: 577067 - DNA, 19 bp, Mus musculus
  siRNA target sequence for Tpp2 (NM_009418.1,3108-3126).
ccaccaacaaagattaaga

SEQ ID NO: 577068 - DNA, 19 bp, Mus musculus
  siRNA target sequence for Tpp2 (NM_009418.1,3192-3210).
gcattacgcgatctcaaaa

SEQ ID NO: 577069 - DNA, 19 bp, Mus musculus
  siRNA target sequence for Tpp2 (NM_009418.1,3193-3211).
cattacgcgatctcaaaat

SEQ ID NO: 577070 - DNA, 19 bp, Mus musculus
  siRNA target sequence for Tpp2 (NM_009418.1,3198-3216).
cgcgatctcaaaattcagt

SEQ ID NO: 577071 - DNA, 19 bp, Mus musculus
  siRNA target sequence for Tpp2 (NM_009418.1,3218-3236).
gatgaccaagcttgattct

SEQ ID NO: 577072 - DNA, 19 bp, Mus musculus
  siRNA target sequence for Tpp2 (NM_009418.1,3227-3245).
gcttgattctactgacatt

SEQ ID NO: 577073 - DNA, 19 bp, Mus musculus
  siRNA target sequence for Tpp2 (NM_009418.1,3242-3260).
catttacaatgaattgaaa

SEQ ID NO: 577074 - DNA, 19 bp, Mus musculus
  siRNA target sequence for Tpp2 (NM_009418.1,3287-3305).
gtatgttgcacgtcttcat

SEQ ID NO: 577075 - DNA, 19 bp, Mus musculus
  siRNA target sequence for Tpp2 (NM_009418.1,3391-3409).
ccgctcttgcagtttacat

SEQ ID NO: 577076 - DNA, 19 bp, Mus musculus
  siRNA target sequence for Tpp2 (NM_009418.1,3392-3410).
cgctcttgcagtttacatt

SEQ ID NO: 577077 - DNA, 19 bp, Mus musculus
  siRNA target sequence for Tpp2 (NM_009418.1,3396-3414).
cttgcagtttacattgcaa

SEQ ID NO: 577078 - DNA, 19 bp, Mus musculus
  siRNA target sequence for Tpp2 (NM_009418.1,3588-3606).
ggagaaagtaccatggaat

SEQ ID NO: 577079 - DNA, 19 bp, Mus musculus
  siRNA target sequence for Tpp2 (NM_009418.1,3643-3661).
cagatctttttgacactaa

SEQ ID NO: 577080 - DNA, 19 bp, Mus musculus
  siRNA target sequence for Tpp2 (NM_009418.1,3648-3666).
ctttttgacactaaggttt

SEQ ID NO: 577081 - DNA, 19 bp, Mus musculus
  siRNA target sequence for Tpp2 (NM_009418.1,3680-3698).
caagcatgcattagtaaat

SEQ ID NO: 577082 - DNA, 19 bp, Mus musculus
  siRNA target sequence for Tpp2 (NM_009418.1,3735-3753).
ctcgtagaagaaaaaccaa

SEQ ID NO: 577083 - DNA, 19 bp, Mus musculus
  siRNA target sequence for Tpp2 (NM_009418.1,3842-3860).
catgtatcctcctgattat

SEQ ID NO: 577084 - DNA, 19 bp, Mus musculus
  siRNA target sequence for Tpp2 (NM_009418.1,3845-3863).
gtatcctcctgattattgt

SEQ ID NO: 577085 - DNA, 19 bp, Mus musculus
  siRNA target sequence for Apeh (NM_146226.1,207-225).
gccgccagtacctagtgtt

SEQ ID NO: 577086 - DNA, 19 bp, Mus musculus
  siRNA target sequence for Apeh (NM_146226.1,357-375).
cgggagaggaaaaacagtt

SEQ ID NO: 577087 - DNA, 19 bp, Mus musculus
  siRNA target sequence for Apeh (NM_146226.1,398-416).
cgcaagctcaagagtttca

SEQ ID NO: 577088 - DNA, 19 bp, Mus musculus
  siRNA target sequence for Apeh (NM_146226.1,433-451).
gaagcatgggcctgtgtat

SEQ ID NO: 577089 - DNA, 19 bp, Mus musculus
  siRNA target sequence for Apeh (NM_146226.1,441-459).
ggcctgtgtatgaagatga

SEQ ID NO: 577090 - DNA, 19 bp, Mus musculus
  siRNA target sequence for Apeh (NM_146226.1,489-507).
cagagacgcacttgttgta

SEQ ID NO: 577091 - DNA, 19 bp, Mus musculus
  siRNA target sequence for Apeh (NM_146226.1,533-551).
gctgagtccttctttcaaa

SEQ ID NO: 577092 - DNA, 19 bp, Mus musculus
  siRNA target sequence for Apeh (NM_146226.1,622-640).
gggggaccagtttgtattt

SEQ ID NO: 577093 - DNA, 19 bp, Mus musculus
  siRNA target sequence for Apeh (NM_146226.1,623-641).
ggggaccagtttgtatttt

SEQ ID NO: 577094 - DNA, 19 bp, Mus musculus
  siRNA target sequence for Apeh (NM_146226.1,624-642).
gggaccagtttgtatttta

SEQ ID NO: 577095 - DNA, 19 bp, Mus musculus
  siRNA target sequence for Apeh (NM_146226.1,625-643).
ggaccagtttgtattttat

SEQ ID NO: 577096 - DNA, 19 bp, Mus musculus
  siRNA target sequence for Apeh (NM_146226.1,731-749).
ggcgtccctgaaaatgtgt

SEQ ID NO: 577097 - DNA, 19 bp, Mus musculus
  siRNA target sequence for Apeh (NM_146226.1,852-870).
ggtcagccctgtactatgt

SEQ ID NO: 577098 - DNA, 19 bp, Mus musculus
  siRNA target sequence for Apeh (NM_146226.1,1243-1261).
ctggaagctgcttacaatt

SEQ ID NO: 577099 - DNA, 19 bp, Mus musculus
  siRNA target sequence for Apeh (NM_146226.1,1257-1275).
caattgaccgagaccttat

SEQ ID NO: 577100 - DNA, 19 bp, Mus musculus
  siRNA target sequence for Apeh (NM_146226.1,1375-1393).
ggaggctgaacctattcct

SEQ ID NO: 577101 - DNA, 19 bp, Mus musculus
  siRNA target sequence for Apeh (NM_146226.1,1552-1570).
gatgggctttgcagtacta

SEQ ID NO: 577102 - DNA, 19 bp, Mus musculus
  siRNA target sequence for Apeh (NM_146226.1,1563-1581).
cagtactactggtgaacta

SEQ ID NO: 577103 - DNA, 19 bp, Mus musculus
  siRNA target sequence for Apeh (NM_146226.1,1752-1770).
gccacctgattggtcaata

SEQ ID NO: 577104 - DNA, 19 bp, Mus musculus
  siRNA target sequence for Apeh (NM_146226.1,1928-1946).
gataaatcacccatcaagt

SEQ ID NO: 577105 - DNA, 19 bp, Mus musculus
  siRNA target sequence for Apeh (NM_146226.1,2017-2035).
gggtctggagtattaccat

SEQ ID NO: 577106 - DNA, 19 bp, Mus musculus
  siRNA target sequence for D030028O16Rik (NM_145984.2,337-355).
gcggctttgtttattatca

SEQ ID NO: 577107 - DNA, 19 bp, Mus musculus
  siRNA target sequence for D030028O16Rik (NM_145984.2,338-356).
cggctttgtttattatcaa

SEQ ID NO: 577108 - DNA, 19 bp, Mus musculus
  siRNA target sequence for D030028O16Rik (NM_145984.2,365-383).
ctgcttggttcgttccaaa

SEQ ID NO: 577109 - DNA, 19 bp, Mus musculus
  siRNA target sequence for D030028O16Rik (NM_145984.2,394-412).
ctgacagtgataattatga

SEQ ID NO: 577110 - DNA, 19 bp, Mus musculus
  siRNA target sequence for D030028O16Rik (NM_145984.2,398-416).
cagtgataattatgaagtt

SEQ ID NO: 577111 - DNA, 19 bp, Mus musculus
  siRNA target sequence for D030028O16Rik (NM_145984.2,475-493).
ctcctgatgagaaatacgt

SEQ ID NO: 577112 - DNA, 19 bp, Mus musculus
  siRNA target sequence for D030028O16Rik (NM_145984.2,492-510).
gtggctgccaagataagga

SEQ ID NO: 577113 - DNA, 19 bp, Mus musculus
  siRNA target sequence for D030028O16Rik (NM_145984.2,529-547).
ccaccttagtagttgtgaa

SEQ ID NO: 577114 - DNA, 19 bp, Mus musculus
  siRNA target sequence for D030028O16Rik (NM_145984.2,624-642).
gaagatgtcttattctaca

SEQ ID NO: 577115 - DNA, 19 bp, Mus musculus
  siRNA target sequence for D030028O16Rik (NM_145984.2,674-692).
gtatcgagccacatttggt

SEQ ID NO: 577116 - DNA, 19 bp, Mus musculus
  siRNA target sequence for D030028O16Rik (NM_145984.2,702-720).
cgcaatgaacggttctaca

SEQ ID NO: 577117 - DNA, 19 bp, Mus musculus
  siRNA target sequence for D030028O16Rik (NM_145984.2,723-741).
gagaaagacccaagctatt

SEQ ID NO: 577118 - DNA, 19 bp, Mus musculus
  siRNA target sequence for D030028O16Rik (NM_145984.2,725-743).
gaaagacccaagctatttt

SEQ ID NO: 577119 - DNA, 19 bp, Mus musculus
  siRNA target sequence for D030028O16Rik (NM_145984.2,771-789).
cgtttcctcacactgaata

SEQ ID NO: 577120 - DNA, 19 bp, Mus musculus
  siRNA target sequence for D030028O16Rik (NM_145984.2,772-790).
gtttcctcacactgaatat

SEQ ID NO: 577121 - DNA, 19 bp, Mus musculus
  siRNA target sequence for D030028O16Rik (NM_145984.2,809-827).
cgaggtgtggttgatagat

SEQ ID NO: 577122 - DNA, 19 bp, Mus musculus
  siRNA target sequence for D030028O16Rik (NM_145984.2,846-864).
ccaccagtccttattcaga

SEQ ID NO: 577123 - DNA, 19 bp, Mus musculus
  siRNA target sequence for D030028O16Rik (NM_145984.2,847-865).
caccagtccttattcagaa

SEQ ID NO: 577124 - DNA, 19 bp, Mus musculus
  siRNA target sequence for D030028O16Rik (NM_145984.2,866-884).
gaggatacacggaatgctt

SEQ ID NO: 577125 - DNA, 19 bp, Mus musculus
  siRNA target sequence for D030028O16Rik (NM_145984.2,868-886).
ggatacacggaatgcttta

SEQ ID NO: 577126 - DNA, 19 bp, Mus musculus
  siRNA target sequence for D030028O16Rik (NM_145984.2,875-893).
cggaatgctttactatgtt

SEQ ID NO: 577127 - DNA, 19 bp, Mus musculus
  siRNA target sequence for D030028O16Rik (NM_145984.2,896-914).
gcatcgagatgatgagtta

SEQ ID NO: 577128 - DNA, 19 bp, Mus musculus
  siRNA target sequence for D030028O16Rik (NM_145984.2,897-915).
catcgagatgatgagttat

SEQ ID NO: 577129 - DNA, 19 bp, Mus musculus
  siRNA target sequence for D030028O16Rik (NM_145984.2,900-918).
cgagatgatgagttataca

SEQ ID NO: 577130 - DNA, 19 bp, Mus musculus
  siRNA target sequence for D030028O16Rik (NM_145984.2,901-919).
gagatgatgagttatacat

SEQ ID NO: 577131 - DNA, 19 bp, Mus musculus
  siRNA target sequence for D030028O16Rik (NM_145984.2,972-990).
gatgcccctgctattatga

SEQ ID NO: 577132 - DNA, 19 bp, Mus musculus
  siRNA target sequence for D030028O16Rik (NM_145984.2,975-993).
gcccctgctattatgaatt

SEQ ID NO: 577133 - DNA, 19 bp, Mus musculus
  siRNA target sequence for D030028O16Rik (NM_145984.2,1018-1036).
gaaataccaaggttgtaga

SEQ ID NO: 577134 - DNA, 19 bp, Mus musculus
  siRNA target sequence for D030028O16Rik (NM_145984.2,1081-1099).
gcaatctcctctatgttaa

SEQ ID NO: 577135 - DNA, 19 bp, Mus musculus
  siRNA target sequence for D030028O16Rik (NM_145984.2,1086-1104).
ctcctctatgttaatgtga

SEQ ID NO: 577136 - DNA, 19 bp, Mus musculus
  siRNA target sequence for D030028O16Rik (NM_145984.2,1123-1141).
cagtgcgctccctaaagct

SEQ ID NO: 577137 - DNA, 19 bp, Mus musculus
  siRNA target sequence for D030028O16Rik (NM_145984.2,1147-1165).
cttgggcctgtggattcat

SEQ ID NO: 577138 - DNA, 19 bp, Mus musculus
  siRNA target sequence for D030028O16Rik (NM_145984.2,1150-1168).
gggcctgtggattcataat

SEQ ID NO: 577139 - DNA, 19 bp, Mus musculus
  siRNA target sequence for D030028O16Rik (NM_145984.2,1158-1176).
ggattcataatggatacaa

SEQ ID NO: 577140 - DNA, 19 bp, Mus musculus
  siRNA target sequence for D030028O16Rik (NM_145984.2,1205-1223).
gctttgctctccaataaga

SEQ ID NO: 577141 - DNA, 19 bp, Mus musculus
  siRNA target sequence for D030028O16Rik (NM_145984.2,1215-1233).
ccaataagacccccaaaat

SEQ ID NO: 577142 - DNA, 19 bp, Mus musculus
  siRNA target sequence for D030028O16Rik (NM_145984.2,1216-1234).
caataagacccccaaaata

SEQ ID NO: 577143 - DNA, 19 bp, Mus musculus
  siRNA target sequence for D030028O16Rik (NM_145984.2,1224-1242).
cccccaaaatattacacat

SEQ ID NO: 577144 - DNA, 19 bp, Mus musculus
  siRNA target sequence for D030028O16Rik (NM_145984.2,1281-1299).
cacgaagatccgattacaa

SEQ ID NO: 577145 - DNA, 19 bp, Mus musculus
  siRNA target sequence for D030028O16Rik (NM_145984.2,1297-1315).
caaagaccagccgtgtttt

SEQ ID NO: 577146 - DNA, 19 bp, Mus musculus
  siRNA target sequence for D030028O16Rik (NM_145984.2,1307-1325).
ccgtgttttacgcatagaa

SEQ ID NO: 577147 - DNA, 19 bp, Mus musculus
  siRNA target sequence for D030028O16Rik (NM_145984.2,1317-1335).
cgcatagaagccaaaagca

SEQ ID NO: 577148 - DNA, 19 bp, Mus musculus
  siRNA target sequence for D030028O16Rik (NM_145984.2,1333-1351).
gcaaggatggaaagttagt

SEQ ID NO: 577149 - DNA, 19 bp, Mus musculus
  siRNA target sequence for D030028O16Rik (NM_145984.2,1354-1372).
ccatgacagtttttcacaa

SEQ ID NO: 577150 - DNA, 19 bp, Mus musculus
  siRNA target sequence for D030028O16Rik (NM_145984.2,1482-1500).
gatggatggatcttagctt

SEQ ID NO: 577151 - DNA, 19 bp, Mus musculus
  siRNA target sequence for D030028O16Rik (NM_145984.2,1485-1503).
ggatggatcttagcttatt

SEQ ID NO: 577152 - DNA, 19 bp, Mus musculus
  siRNA target sequence for D030028O16Rik (NM_145984.2,1545-1563).
gccgatggccgactaacta

SEQ ID NO: 577153 - DNA, 19 bp, Mus musculus
  siRNA target sequence for D030028O16Rik (NM_145984.2,1546-1564).
ccgatggccgactaactaa

SEQ ID NO: 577154 - DNA, 19 bp, Mus musculus
  siRNA target sequence for D030028O16Rik (NM_145984.2,1548-1566).
gatggccgactaactaaaa

SEQ ID NO: 577155 - DNA, 19 bp, Mus musculus
  siRNA target sequence for D030028O16Rik (NM_145984.2,1552-1570).
gccgactaactaaaaagct

SEQ ID NO: 577156 - DNA, 19 bp, Mus musculus
  siRNA target sequence for D030028O16Rik (NM_145984.2,1571-1589).
caatggccttgctgactta

SEQ ID NO: 577157 - DNA, 19 bp, Mus musculus
  siRNA target sequence for D030028O16Rik (NM_145984.2,1584-1602).
gacttagtggcttgcatta

SEQ ID NO: 577158 - DNA, 19 bp, Mus musculus
  siRNA target sequence for D030028O16Rik (NM_145984.2,1676-1694).
cgtgggagcactgtgtaat

SEQ ID NO: 577159 - DNA, 19 bp, Mus musculus
  siRNA target sequence for D030028O16Rik (NM_145984.2,1677-1695).
gtgggagcactgtgtaatt

SEQ ID NO: 577160 - DNA, 19 bp, Mus musculus
  siRNA target sequence for D030028O16Rik (NM_145984.2,1680-1698).
ggagcactgtgtaattcta

SEQ ID NO: 577161 - DNA, 19 bp, Mus musculus
  siRNA target sequence for D030028O16Rik (NM_145984.2,1681-1699).
gagcactgtgtaattctaa

SEQ ID NO: 577162 - DNA, 19 bp, Mus musculus
  siRNA target sequence for D030028O16Rik (NM_145984.2,1749-1767).
ctcaataccatgttggata

SEQ ID NO: 577163 - DNA, 19 bp, Mus musculus
  siRNA target sequence for D030028O16Rik (NM_145984.2,1805-1823).
ggggaacccgtcatctgat

SEQ ID NO: 577164 - DNA, 19 bp, Mus musculus
  siRNA target sequence for D030028O16Rik (NM_145984.2,1811-1829).
cccgtcatctgatgagaaa

SEQ ID NO: 577165 - DNA, 19 bp, Mus musculus
  siRNA target sequence for D030028O16Rik (NM_145984.2,1813-1831).
cgtcatctgatgagaaaca

SEQ ID NO: 577166 - DNA, 19 bp, Mus musculus
  siRNA target sequence for D030028O16Rik (NM_145984.2,1923-1941).
cgagtgccgctgaaaggaa

SEQ ID NO: 577167 - DNA, 19 bp, Mus musculus
  siRNA target sequence for D030028O16Rik (NM_145984.2,1924-1942).
gagtgccgctgaaaggaat

SEQ ID NO: 577168 - DNA, 19 bp, Mus musculus
  siRNA target sequence for D030028O16Rik (NM_145984.2,2016-2034).
cccaacattatcctagata

SEQ ID NO: 577169 - DNA, 19 bp, Mus musculus
  siRNA target sequence for D030028O16Rik (NM_145984.2,2017-2035).
ccaacattatcctagatat

SEQ ID NO: 577170 - DNA, 19 bp, Mus musculus
  siRNA target sequence for D030028O16Rik (NM_145984.2,2044-2062).
gggggaaccacgtgattga

SEQ ID NO: 577171 - DNA, 19 bp, Mus musculus
  siRNA target sequence for D030028O16Rik (NM_145984.2,2141-2159).
ggcgctgaagaaataccta

SEQ ID NO: 577172 - DNA, 19 bp, Mus musculus
  siRNA target sequence for Dpp4 (NM_010074.2,408-426).
gacagccgcagaacgtatt

SEQ ID NO: 577173 - DNA, 19 bp, Mus musculus
  siRNA target sequence for Dpp4 (NM_010074.2,410-428).
cagccgcagaacgtattca

SEQ ID NO: 577174 - DNA, 19 bp, Mus musculus
  siRNA target sequence for Dpp4 (NM_010074.2,412-430).
gccgcagaacgtattcact

SEQ ID NO: 577175 - DNA, 19 bp, Mus musculus
  siRNA target sequence for Dpp4 (NM_010074.2,413-431).
ccgcagaacgtattcacta

SEQ ID NO: 577176 - DNA, 19 bp, Mus musculus
  siRNA target sequence for Dpp4 (NM_010074.2,429-447).
ctagctgactatttaaaga

SEQ ID NO: 577177 - DNA, 19 bp, Mus musculus
  siRNA target sequence for Dpp4 (NM_010074.2,432-450).
gctgactatttaaagagta

SEQ ID NO: 577178 - DNA, 19 bp, Mus musculus
  siRNA target sequence for Dpp4 (NM_010074.2,437-455).
ctatttaaagagtaccttt

SEQ ID NO: 577179 - DNA, 19 bp, Mus musculus
  siRNA target sequence for Dpp4 (NM_010074.2,456-474).
cgggtcaagtcctactctt

SEQ ID NO: 577180 - DNA, 19 bp, Mus musculus
  siRNA target sequence for Dpp4 (NM_010074.2,457-475).
gggtcaagtcctactcttt

SEQ ID NO: 577181 - DNA, 19 bp, Mus musculus
  siRNA target sequence for Dpp4 (NM_010074.2,459-477).
gtcaagtcctactctttgt

SEQ ID NO: 577182 - DNA, 19 bp, Mus musculus
  siRNA target sequence for Dpp4 (NM_010074.2,481-499).
gggtttcagactttgaata

SEQ ID NO: 577183 - DNA, 19 bp, Mus musculus
  siRNA target sequence for Dpp4 (NM_010074.2,527-545).
gctgctcaatgctgaacat

SEQ ID NO: 577184 - DNA, 19 bp, Mus musculus
  siRNA target sequence for Dpp4 (NM_010074.2,577-595).
cctttgaaagctttggata

SEQ ID NO: 577185 - DNA, 19 bp, Mus musculus
  siRNA target sequence for Dpp4 (NM_010074.2,605-623).
gtcacctgaccgactgttt

SEQ ID NO: 577186 - DNA, 19 bp, Mus musculus
  siRNA target sequence for Dpp4 (NM_010074.2,607-625).
cacctgaccgactgtttgt

SEQ ID NO: 577187 - DNA, 19 bp, Mus musculus
  siRNA target sequence for Dpp4 (NM_010074.2,610-628).
ctgaccgactgtttgttct

SEQ ID NO: 577188 - DNA, 19 bp, Mus musculus
  siRNA target sequence for Dpp4 (NM_010074.2,754-772).
ggtcaccagaaggtcataa

SEQ ID NO: 577189 - DNA, 19 bp, Mus musculus
  siRNA target sequence for Dpp4 (NM_010074.2,766-784).
gtcataagttggcatatgt

SEQ ID NO: 577190 - DNA, 19 bp, Mus musculus
  siRNA target sequence for Dpp4 (NM_010074.2,768-786).
cataagttggcatatgtct

SEQ ID NO: 577191 - DNA, 19 bp, Mus musculus
  siRNA target sequence for Dpp4 (NM_010074.2,787-805).
ggaagaatgatatttacgt

SEQ ID NO: 577192 - DNA, 19 bp, Mus musculus
  siRNA target sequence for Dpp4 (NM_010074.2,791-809).
gaatgatatttacgttaaa

SEQ ID NO: 577193 - DNA, 19 bp, Mus musculus
  siRNA target sequence for Dpp4 (NM_010074.2,825-843).
cctagtcataggatcacat

SEQ ID NO: 577194 - DNA, 19 bp, Mus musculus
  siRNA target sequence for Dpp4 (NM_010074.2,941-959).
caacacgtttctagcttat

SEQ ID NO: 577195 - DNA, 19 bp, Mus musculus
  siRNA target sequence for Dpp4 (NM_010074.2,951-969).
ctagcttatgcccagttta

SEQ ID NO: 577196 - DNA, 19 bp, Mus musculus
  siRNA target sequence for Dpp4 (NM_010074.2,955-973).
cttatgcccagtttaacga

SEQ ID NO: 577197 - DNA, 19 bp, Mus musculus
  siRNA target sequence for Dpp4 (NM_010074.2,976-994).
caggagtgccgctcattga

SEQ ID NO: 577198 - DNA, 19 bp, Mus musculus
  siRNA target sequence for Dpp4 (NM_010074.2,978-996).
ggagtgccgctcattgaat

SEQ ID NO: 577199 - DNA, 19 bp, Mus musculus
  siRNA target sequence for Dpp4 (NM_010074.2,979-997).
gagtgccgctcattgaata

SEQ ID NO: 577200 - DNA, 19 bp, Mus musculus
  siRNA target sequence for Dpp4 (NM_010074.2,981-999).
gtgccgctcattgaatact

SEQ ID NO: 577201 - DNA, 19 bp, Mus musculus
  siRNA target sequence for Dpp4 (NM_010074.2,989-1007).
cattgaatactccttctat

SEQ ID NO: 577202 - DNA, 19 bp, Mus musculus
  siRNA target sequence for Dpp4 (NM_010074.2,1068-1086).
gtgaatccaactgtaaagt

SEQ ID NO: 577203 - DNA, 19 bp, Mus musculus
  siRNA target sequence for Dpp4 (NM_010074.2,1126-1144).
gtgcggctcccatccaaat

SEQ ID NO: 577204 - DNA, 19 bp, Mus musculus
  siRNA target sequence for Dpp4 (NM_010074.2,1163-1181).
ggcaagaggggatcactat

SEQ ID NO: 577205 - DNA, 19 bp, Mus musculus
  siRNA target sequence for Dpp4 (NM_010074.2,1164-1182).
gcaagaggggatcactatt

SEQ ID NO: 577206 - DNA, 19 bp, Mus musculus
  siRNA target sequence for Dpp4 (NM_010074.2,1165-1183).
caagaggggatcactattt

SEQ ID NO: 577207 - DNA, 19 bp, Mus musculus
  siRNA target sequence for Dpp4 (NM_010074.2,1338-1356).
ggctgggtcggaagattta

SEQ ID NO: 577208 - DNA, 19 bp, Mus musculus
  siRNA target sequence for Dpp4 (NM_010074.2,1387-1405).
gaagcagcttctataagat

SEQ ID NO: 577209 - DNA, 19 bp, Mus musculus
  siRNA target sequence for Dpp4 (NM_010074.2,1436-1454).
ctgccacttcccgaaagat

SEQ ID NO: 577210 - DNA, 19 bp, Mus musculus
  siRNA target sequence for Dpp4 (NM_010074.2,1438-1456).
gccacttcccgaaagataa

SEQ ID NO: 577211 - DNA, 19 bp, Mus musculus
  siRNA target sequence for Dpp4 (NM_010074.2,1440-1458).
cacttcccgaaagataaga

SEQ ID NO: 577212 - DNA, 19 bp, Mus musculus
  siRNA target sequence for Dpp4 (NM_010074.2,1446-1464).
ccgaaagataagaaagact

SEQ ID NO: 577213 - DNA, 19 bp, Mus musculus
  siRNA target sequence for Dpp4 (NM_010074.2,1463-1481).
ctgtacatttattacaaaa

SEQ ID NO: 577214 - DNA, 19 bp, Mus musculus
  siRNA target sequence for Dpp4 (NM_010074.2,1510-1528).
ctctgaccagcgattatct

SEQ ID NO: 577215 - DNA, 19 bp, Mus musculus
  siRNA target sequence for Dpp4 (NM_010074.2,1512-1530).
ctgaccagcgattatctat

SEQ ID NO: 577216 - DNA, 19 bp, Mus musculus
  siRNA target sequence for Dpp4 (NM_010074.2,1516-1534).
ccagcgattatctatacta

SEQ ID NO: 577217 - DNA, 19 bp, Mus musculus
  siRNA target sequence for Dpp4 (NM_010074.2,1519-1537).
gcgattatctatactacat

SEQ ID NO: 577218 - DNA, 19 bp, Mus musculus
  siRNA target sequence for Dpp4 (NM_010074.2,1520-1538).
cgattatctatactacatt

SEQ ID NO: 577219 - DNA, 19 bp, Mus musculus
  siRNA target sequence for Dpp4 (NM_010074.2,1669-1687).
gtaaagaggcaaagtacta

SEQ ID NO: 577220 - DNA, 19 bp, Mus musculus
  siRNA target sequence for Dpp4 (NM_010074.2,1731-1749).
catcgtagcacggatcata

SEQ ID NO: 577221 - DNA, 19 bp, Mus musculus
  siRNA target sequence for Dpp4 (NM_010074.2,1735-1753).
gtagcacggatcataaaga

SEQ ID NO: 577222 - DNA, 19 bp, Mus musculus
  siRNA target sequence for Dpp4 (NM_010074.2,1852-1870).
gattttggtatcaaatgat

SEQ ID NO: 577223 - DNA, 19 bp, Mus musculus
  siRNA target sequence for Dpp4 (NM_010074.2,1874-1892).
gccccctcattttgataaa

SEQ ID NO: 577224 - DNA, 19 bp, Mus musculus
  siRNA target sequence for Dpp4 (NM_010074.2,1875-1893).
ccccctcattttgataaat

SEQ ID NO: 577225 - DNA, 19 bp, Mus musculus
  siRNA target sequence for Dpp4 (NM_010074.2,1879-1897).
ctcattttgataaatccaa

SEQ ID NO: 577226 - DNA, 19 bp, Mus musculus
  siRNA target sequence for Dpp4 (NM_010074.2,1895-1913).
caagaaatatcctctacta

SEQ ID NO: 577227 - DNA, 19 bp, Mus musculus
  siRNA target sequence for Dpp4 (NM_010074.2,1905-1923).
cctctactattagatgtat

SEQ ID NO: 577228 - DNA, 19 bp, Mus musculus
  siRNA target sequence for Dpp4 (NM_010074.2,1906-1924).
ctctactattagatgtata

SEQ ID NO: 577229 - DNA, 19 bp, Mus musculus
  siRNA target sequence for Dpp4 (NM_010074.2,1926-1944).
gcaggtccctgtagtcaaa

SEQ ID NO: 577230 - DNA, 19 bp, Mus musculus
  siRNA target sequence for Dpp4 (NM_010074.2,1927-1945).
caggtccctgtagtcaaaa

SEQ ID NO: 577231 - DNA, 19 bp, Mus musculus
  siRNA target sequence for Dpp4 (NM_010074.2,1976-1994).
cacttaccttgcaagtaca

SEQ ID NO: 577232 - DNA, 19 bp, Mus musculus
  siRNA target sequence for Dpp4 (NM_010074.2,1990-2008).
gtacagaaaacatcatagt

SEQ ID NO: 577233 - DNA, 19 bp, Mus musculus
  siRNA target sequence for Dpp4 (NM_010074.2,2000-2018).
catcatagtagctagcttt

SEQ ID NO: 577234 - DNA, 19 bp, Mus musculus
  siRNA target sequence for Dpp4 (NM_010074.2,2032-2050).
gtggttaccaaggagataa

SEQ ID NO: 577235 - DNA, 19 bp, Mus musculus
  siRNA target sequence for Dpp4 (NM_010074.2,2078-2096).
gggaacactggaagttgaa

SEQ ID NO: 577236 - DNA, 19 bp, Mus musculus
  siRNA target sequence for Dpp4 (NM_010074.2,2083-2101).
cactggaagttgaagatca

SEQ ID NO: 577237 - DNA, 19 bp, Mus musculus
  siRNA target sequence for Dpp4 (NM_010074.2,2209-2227).
cgggaagtggcgtgttcaa

SEQ ID NO: 577238 - DNA, 19 bp, Mus musculus
  siRNA target sequence for Dpp4 (NM_010074.2,2222-2240).
gttcaagtgcggaatagct

SEQ ID NO: 577239 - DNA, 19 bp, Mus musculus
  siRNA target sequence for Dpp4 (NM_010074.2,2252-2270).
gtcacggtgggagtactat

SEQ ID NO: 577240 - DNA, 19 bp, Mus musculus
  siRNA target sequence for Dpp4 (NM_010074.2,2254-2272).
cacggtgggagtactatga

SEQ ID NO: 577241 - DNA, 19 bp, Mus musculus
  siRNA target sequence for Dpp4 (NM_010074.2,2256-2274).
cggtgggagtactatgact

SEQ ID NO: 577242 - DNA, 19 bp, Mus musculus
  siRNA target sequence for Dpp4 (NM_010074.2,2325-2343).
gaccattacaggaactcaa

SEQ ID NO: 577243 - DNA, 19 bp, Mus musculus
  siRNA target sequence for Dpp4 (NM_010074.2,2351-2369).
gagcagagctgaacatttt

SEQ ID NO: 577244 - DNA, 19 bp, Mus musculus
  siRNA target sequence for Fap (NM_007986.1,219-237).
cttgctttagtggtgatat

SEQ ID NO: 577245 - DNA, 19 bp, Mus musculus
  siRNA target sequence for Fap (NM_007986.1,222-240).
gctttagtggtgatatgca

SEQ ID NO: 577246 - DNA, 19 bp, Mus musculus
  siRNA target sequence for Fap (NM_007986.1,223-241).
ctttagtggtgatatgcat

SEQ ID NO: 577247 - DNA, 19 bp, Mus musculus
  siRNA target sequence for Fap (NM_007986.1,230-248).
ggtgatatgcattgtctta

SEQ ID NO: 577248 - DNA, 19 bp, Mus musculus
  siRNA target sequence for Fap (NM_007986.1,245-263).
cttacgtccctcaagagtt

SEQ ID NO: 577249 - DNA, 19 bp, Mus musculus
  siRNA target sequence for Fap (NM_007986.1,249-267).
cgtccctcaagagtttaca

SEQ ID NO: 577250 - DNA, 19 bp, Mus musculus
  siRNA target sequence for Fap (NM_007986.1,250-268).
gtccctcaagagtttacaa

SEQ ID NO: 577251 - DNA, 19 bp, Mus musculus
  siRNA target sequence for Fap (NM_007986.1,352-370).
ggatttcagaacaagaata

SEQ ID NO: 577252 - DNA, 19 bp, Mus musculus
  siRNA target sequence for Fap (NM_007986.1,375-393).
catcaatctgaggatgata

SEQ ID NO: 577253 - DNA, 19 bp, Mus musculus
  siRNA target sequence for Fap (NM_007986.1,378-396).
caatctgaggatgataaca

SEQ ID NO: 577254 - DNA, 19 bp, Mus musculus
  siRNA target sequence for Fap (NM_007986.1,382-400).
ctgaggatgataacatagt

SEQ ID NO: 577255 - DNA, 19 bp, Mus musculus
  siRNA target sequence for Fap (NM_007986.1,386-404).
ggatgataacatagtattt

SEQ ID NO: 577256 - DNA, 19 bp, Mus musculus
  siRNA target sequence for Fap (NM_007986.1,427-445).
catatatcattttgagtaa

SEQ ID NO: 577257 - DNA, 19 bp, Mus musculus
  siRNA target sequence for Fap (NM_007986.1,440-458).
gagtaatagcaccatgaaa

SEQ ID NO: 577258 - DNA, 19 bp, Mus musculus
  siRNA target sequence for Fap (NM_007986.1,449-467).
caccatgaaaagtgtgaat

SEQ ID NO: 577259 - DNA, 19 bp, Mus musculus
  siRNA target sequence for Fap (NM_007986.1,460-478).
gtgtgaatgctacagatta

SEQ ID NO: 577260 - DNA, 19 bp, Mus musculus
  siRNA target sequence for Fap (NM_007986.1,485-503).
gtcacctgatcggcaattt

SEQ ID NO: 577261 - DNA, 19 bp, Mus musculus
  siRNA target sequence for Fap (NM_007986.1,487-505).
cacctgatcggcaatttgt

SEQ ID NO: 577262 - DNA, 19 bp, Mus musculus
  siRNA target sequence for Fap (NM_007986.1,489-507).
cctgatcggcaatttgtgt

SEQ ID NO: 577263 - DNA, 19 bp, Mus musculus
  siRNA target sequence for Fap (NM_007986.1,490-508).
ctgatcggcaatttgtgta

SEQ ID NO: 577264 - DNA, 19 bp, Mus musculus
  siRNA target sequence for Fap (NM_007986.1,496-514).
ggcaatttgtgtatctaga

SEQ ID NO: 577265 - DNA, 19 bp, Mus musculus
  siRNA target sequence for Fap (NM_007986.1,498-516).
caatttgtgtatctagaaa

SEQ ID NO: 577266 - DNA, 19 bp, Mus musculus
  siRNA target sequence for Fap (NM_007986.1,506-524).
gtatctagaaagtgattat

SEQ ID NO: 577267 - DNA, 19 bp, Mus musculus
  siRNA target sequence for Fap (NM_007986.1,531-549).
ctctggcgatattcataca

SEQ ID NO: 577268 - DNA, 19 bp, Mus musculus
  siRNA target sequence for Fap (NM_007986.1,533-551).
ctggcgatattcatacaca

SEQ ID NO: 577269 - DNA, 19 bp, Mus musculus
  siRNA target sequence for Fap (NM_007986.1,550-568).
cagcgacatactacatcta

SEQ ID NO: 577270 - DNA, 19 bp, Mus musculus
  siRNA target sequence for Fap (NM_007986.1,563-581).
catctacgaccttcagaat

SEQ ID NO: 577271 - DNA, 19 bp, Mus musculus
  siRNA target sequence for Fap (NM_007986.1,572-590).
ccttcagaatggggaattt

SEQ ID NO: 577272 - DNA, 19 bp, Mus musculus
  siRNA target sequence for Fap (NM_007986.1,602-620).
cgagctccctcgtccaatt

SEQ ID NO: 577273 - DNA, 19 bp, Mus musculus
  siRNA target sequence for Fap (NM_007986.1,606-624).
ctccctcgtccaattcagt

SEQ ID NO: 577274 - DNA, 19 bp, Mus musculus
  siRNA target sequence for Fap (NM_007986.1,608-626).
ccctcgtccaattcagtat

SEQ ID NO: 577275 - DNA, 19 bp, Mus musculus
  siRNA target sequence for Fap (NM_007986.1,610-628).
ctcgtccaattcagtatct

SEQ ID NO: 577276 - DNA, 19 bp, Mus musculus
  siRNA target sequence for Fap (NM_007986.1,635-653).
gtcgcctgttgggagtaaa

SEQ ID NO: 577277 - DNA, 19 bp, Mus musculus
  siRNA target sequence for Fap (NM_007986.1,637-655).
cgcctgttgggagtaaatt

SEQ ID NO: 577278 - DNA, 19 bp, Mus musculus
  siRNA target sequence for Fap (NM_007986.1,642-660).
gttgggagtaaattagcat

SEQ ID NO: 577279 - DNA, 19 bp, Mus musculus
  siRNA target sequence for Fap (NM_007986.1,657-675).
gcatatgtatatcaaaaca

SEQ ID NO: 577280 - DNA, 19 bp, Mus musculus
  siRNA target sequence for Fap (NM_007986.1,697-715).
caggagatccaccttttca

SEQ ID NO: 577281 - DNA, 19 bp, Mus musculus
  siRNA target sequence for Fap (NM_007986.1,705-723).
ccaccttttcaaataactt

SEQ ID NO: 577282 - DNA, 19 bp, Mus musculus
  siRNA target sequence for Fap (NM_007986.1,835-853).
catatgtagaatttaatga

SEQ ID NO: 577283 - DNA, 19 bp, Mus musculus
  siRNA target sequence for Fap (NM_007986.1,864-882).
ccaattattgcctattctt

SEQ ID NO: 577284 - DNA, 19 bp, Mus musculus
  siRNA target sequence for Fap (NM_007986.1,865-883).
caattattgcctattctta

SEQ ID NO: 577285 - DNA, 19 bp, Mus musculus
  siRNA target sequence for Fap (NM_007986.1,888-906).
ggtgatggacagtatccta

SEQ ID NO: 577286 - DNA, 19 bp, Mus musculus
  siRNA target sequence for Fap (NM_007986.1,894-912).
ggacagtatcctagaacta

SEQ ID NO: 577287 - DNA, 19 bp, Mus musculus
  siRNA target sequence for Fap (NM_007986.1,897-915).
cagtatcctagaactataa

SEQ ID NO: 577288 - DNA, 19 bp, Mus musculus
  siRNA target sequence for Fap (NM_007986.1,899-917).
gtatcctagaactataaat

SEQ ID NO: 577289 - DNA, 19 bp, Mus musculus
  siRNA target sequence for Fap (NM_007986.1,907-925).
gaactataaatattccata

SEQ ID NO: 577290 - DNA, 19 bp, Mus musculus
  siRNA target sequence for Fap (NM_007986.1,949-967).
cggttgttcgtgtttttat

SEQ ID NO: 577291 - DNA, 19 bp, Mus musculus
  siRNA target sequence for Fap (NM_007986.1,1010-1028).
gccagttccagaaatgata

SEQ ID NO: 577292 - DNA, 19 bp, Mus musculus
  siRNA target sequence for Fap (NM_007986.1,1029-1047).
gcctcaagtgactattatt

SEQ ID NO: 577293 - DNA, 19 bp, Mus musculus
  siRNA target sequence for Fap (NM_007986.1,1113-1131).
gtctcagtcctgtctatat

SEQ ID NO: 577294 - DNA, 19 bp, Mus musculus
  siRNA target sequence for Fap (NM_007986.1,1117-1135).
cagtcctgtctatatgtga

SEQ ID NO: 577295 - DNA, 19 bp, Mus musculus
  siRNA target sequence for Fap (NM_007986.1,1119-1137).
gtcctgtctatatgtgatt

SEQ ID NO: 577296 - DNA, 19 bp, Mus musculus
  siRNA target sequence for Fap (NM_007986.1,1243-1261).
gccaggatgccacttctta

SEQ ID NO: 577297 - DNA, 19 bp, Mus musculus
  siRNA target sequence for Fap (NM_007986.1,1245-1263).
caggatgccacttcttact

SEQ ID NO: 577298 - DNA, 19 bp, Mus musculus
  siRNA target sequence for Fap (NM_007986.1,1253-1271).
cacttcttactacaaaata

SEQ ID NO: 577299 - DNA, 19 bp, Mus musculus
  siRNA target sequence for Fap (NM_007986.1,1280-1298).
caaggatggttacaaacat

SEQ ID NO: 577300 - DNA, 19 bp, Mus musculus
  siRNA target sequence for Fap (NM_007986.1,1287-1305).
ggttacaaacatattcact

SEQ ID NO: 577301 - DNA, 19 bp, Mus musculus
  siRNA target sequence for Fap (NM_007986.1,1288-1306).
gttacaaacatattcacta

SEQ ID NO: 577302 - DNA, 19 bp, Mus musculus
  siRNA target sequence for Fap (NM_007986.1,1320-1338).
gtggaaaatgctattcaaa

SEQ ID NO: 577303 - DNA, 19 bp, Mus musculus
  siRNA target sequence for Fap (NM_007986.1,1349-1367).
caagtgggaggccatatat

SEQ ID NO: 577304 - DNA, 19 bp, Mus musculus
  siRNA target sequence for Fap (NM_007986.1,1352-1370).
gtgggaggccatatatata

SEQ ID NO: 577305 - DNA, 19 bp, Mus musculus
  siRNA target sequence for Fap (NM_007986.1,1375-1393).
gcgtaacacaggattcact

SEQ ID NO: 577306 - DNA, 19 bp, Mus musculus
  siRNA target sequence for Fap (NM_007986.1,1470-1488).
ccgagcaagaagtgtgtta

SEQ ID NO: 577307 - DNA, 19 bp, Mus musculus
  siRNA target sequence for Fap (NM_007986.1,1502-1520).
gaaagaaaggtgccaatat

SEQ ID NO: 577308 - DNA, 19 bp, Mus musculus
  siRNA target sequence for Fap (NM_007986.1,1506-1524).
gaaaggtgccaatattaca

SEQ ID NO: 577309 - DNA, 19 bp, Mus musculus
  siRNA target sequence for Fap (NM_007986.1,1538-1556).
ctacaaagccaagtactat

SEQ ID NO: 577310 - DNA, 19 bp, Mus musculus
  siRNA target sequence for Fap (NM_007986.1,1680-1698).
cctaaagtggagattaaga

SEQ ID NO: 577311 - DNA, 19 bp, Mus musculus
  siRNA target sequence for Fap (NM_007986.1,1720-1738).
ctttctggtacaagatgat

SEQ ID NO: 577312 - DNA, 19 bp, Mus musculus
  siRNA target sequence for Fap (NM_007986.1,1736-1754).
gattctgcctcctcagttt

SEQ ID NO: 577313 - DNA, 19 bp, Mus musculus
  siRNA target sequence for Fap (NM_007986.1,1746-1764).
cctcagtttgacagatcaa

SEQ ID NO: 577314 - DNA, 19 bp, Mus musculus
  siRNA target sequence for Fap (NM_007986.1,1747-1765).
ctcagtttgacagatcaaa

SEQ ID NO: 577315 - DNA, 19 bp, Mus musculus
  siRNA target sequence for Fap (NM_007986.1,1769-1787).
gtaccctttgctaattcaa

SEQ ID NO: 577316 - DNA, 19 bp, Mus musculus
  siRNA target sequence for Fap (NM_007986.1,1774-1792).
ctttgctaattcaagtgta

SEQ ID NO: 577317 - DNA, 19 bp, Mus musculus
  siRNA target sequence for Fap (NM_007986.1,1831-1849).
ctgttaattggataactta

SEQ ID NO: 577318 - DNA, 19 bp, Mus musculus
  siRNA target sequence for Fap (NM_007986.1,1923-1941).
ctgcatgccgtgtatcgaa

SEQ ID NO: 577319 - DNA, 19 bp, Mus musculus
  siRNA target sequence for Fap (NM_007986.1,1925-1943).
gcatgccgtgtatcgaaaa

SEQ ID NO: 577320 - DNA, 19 bp, Mus musculus
  siRNA target sequence for Fap (NM_007986.1,1939-1957).
gaaaactgggtgtatatga

SEQ ID NO: 577321 - DNA, 19 bp, Mus musculus
  siRNA target sequence for Fap (NM_007986.1,2036-2054).
ctggtcctacggaggttat

SEQ ID NO: 577322 - DNA, 19 bp, Mus musculus
  siRNA target sequence for Fap (NM_007986.1,2038-2056).
ggtcctacggaggttatgt

SEQ ID NO: 577323 - DNA, 19 bp, Mus musculus
  siRNA target sequence for Fap (NM_007986.1,2039-2057).
gtcctacggaggttatgtt

SEQ ID NO: 577324 - DNA, 19 bp, Mus musculus
  siRNA target sequence for Fap (NM_007986.1,2042-2060).
ctacggaggttatgtttca

SEQ ID NO: 577325 - DNA, 19 bp, Mus musculus
  siRNA target sequence for Fap (NM_007986.1,2079-2097).
ggaactggtcttttcaaat

SEQ ID NO: 577326 - DNA, 19 bp, Mus musculus
  siRNA target sequence for Fap (NM_007986.1,2130-2148).
gaatattacgcatctatct

SEQ ID NO: 577327 - DNA, 19 bp, Mus musculus
  siRNA target sequence for Fap (NM_007986.1,2143-2161).
ctatctactcagagagatt

SEQ ID NO: 577328 - DNA, 19 bp, Mus musculus
  siRNA target sequence for Fap (NM_007986.1,2183-2201).
cgacaatctcgaacactat

SEQ ID NO: 577329 - DNA, 19 bp, Mus musculus
  siRNA target sequence for Fap (NM_007986.1,2184-2202).
gacaatctcgaacactata

SEQ ID NO: 577330 - DNA, 19 bp, Mus musculus
  siRNA target sequence for Fap (NM_007986.1,2186-2204).
caatctcgaacactataaa

SEQ ID NO: 577331 - DNA, 19 bp, Mus musculus
  siRNA target sequence for Fap (NM_007986.1,2190-2208).
ctcgaacactataaaaatt

SEQ ID NO: 577332 - DNA, 19 bp, Mus musculus
  siRNA target sequence for Fap (NM_007986.1,2193-2211).
gaacactataaaaattcaa

SEQ ID NO: 577333 - DNA, 19 bp, Mus musculus
  siRNA target sequence for Fap (NM_007986.1,2261-2279).
ccacggaacagcagatgat

SEQ ID NO: 577334 - DNA, 19 bp, Mus musculus
  siRNA target sequence for Fap (NM_007986.1,2306-2324).
gattgctaaagctttggtt

SEQ ID NO: 577335 - DNA, 19 bp, Mus musculus
  siRNA target sequence for Fap (NM_007986.1,2359-2377).
ctgaccagaaccatggtat

SEQ ID NO: 577336 - DNA, 19 bp, Mus musculus
  siRNA target sequence for Fap (NM_007986.1,2361-2379).
gaccagaaccatggtatat

SEQ ID NO: 577337 - DNA, 19 bp, Mus musculus
  siRNA target sequence for Fap (NM_007986.1,2364-2382).
cagaaccatggtatatcat

SEQ ID NO: 577338 - DNA, 19 bp, Mus musculus
  siRNA target sequence for Fap (NM_007986.1,2387-2405).
gcgctcccagaatcattta

SEQ ID NO: 577339 - DNA, 19 bp, Mus musculus
  siRNA target sequence for Fap (NM_007986.1,2388-2406).
cgctcccagaatcatttat

SEQ ID NO: 577340 - DNA, 19 bp, Mus musculus
  siRNA target sequence for Fap (NM_007986.1,2389-2407).
gctcccagaatcatttata

SEQ ID NO: 577341 - DNA, 19 bp, Mus musculus
  siRNA target sequence for Prep (NM_011156.2,158-176).
cctccgtgcaggagtatca

SEQ ID NO: 577342 - DNA, 19 bp, Mus musculus
  siRNA target sequence for Prep (NM_011156.2,159-177).
ctccgtgcaggagtatcat

SEQ ID NO: 577343 - DNA, 19 bp, Mus musculus
  siRNA target sequence for Prep (NM_011156.2,239-257).
ctttcgtggaggcacaaaa

SEQ ID NO: 577344 - DNA, 19 bp, Mus musculus
  siRNA target sequence for Prep (NM_011156.2,287-305).
gtccaatcagaggtttata

SEQ ID NO: 577345 - DNA, 19 bp, Mus musculus
  siRNA target sequence for Prep (NM_011156.2,290-308).
caatcagaggtttatacaa

SEQ ID NO: 577346 - DNA, 19 bp, Mus musculus
  siRNA target sequence for Prep (NM_011156.2,360-378).
gaaaggaaagcggtacttt

SEQ ID NO: 577347 - DNA, 19 bp, Mus musculus
  siRNA target sequence for Prep (NM_011156.2,364-382).
ggaaagcggtacttttatt

SEQ ID NO: 577348 - DNA, 19 bp, Mus musculus
  siRNA target sequence for Prep (NM_011156.2,365-383).
gaaagcggtacttttattt

SEQ ID NO: 577349 - DNA, 19 bp, Mus musculus
  siRNA target sequence for Prep (NM_011156.2,400-418).
cagaaccaacgcgtgttat

SEQ ID NO: 577350 - DNA, 19 bp, Mus musculus
  siRNA target sequence for Prep (NM_011156.2,515-533).
gtgaagatggcgaatactt

SEQ ID NO: 577351 - DNA, 19 bp, Mus musculus
  siRNA target sequence for Prep (NM_011156.2,568-586).
gtgacgatcaagttcatga

SEQ ID NO: 577352 - DNA, 19 bp, Mus musculus
  siRNA target sequence for Prep (NM_011156.2,658-676).
gacgggaagggaatgttct

SEQ ID NO: 577353 - DNA, 19 bp, Mus musculus
  siRNA target sequence for Prep (NM_011156.2,661-679).
gggaagggaatgttctata

SEQ ID NO: 577354 - DNA, 19 bp, Mus musculus
  siRNA target sequence for Prep (NM_011156.2,662-680).
ggaagggaatgttctataa

SEQ ID NO: 577355 - DNA, 19 bp, Mus musculus
  siRNA target sequence for Prep (NM_011156.2,668-686).
gaatgttctataactcata

SEQ ID NO: 577356 - DNA, 19 bp, Mus musculus
  siRNA target sequence for Prep (NM_011156.2,725-743).
ccaccaatctccaccaaaa

SEQ ID NO: 577357 - DNA, 19 bp, Mus musculus
  siRNA target sequence for Prep (NM_011156.2,728-746).
ccaatctccaccaaaagct

SEQ ID NO: 577358 - DNA, 19 bp, Mus musculus
  siRNA target sequence for Prep (NM_011156.2,765-783).
gacggatcagtcagaagat

SEQ ID NO: 577359 - DNA, 19 bp, Mus musculus
  siRNA target sequence for Prep (NM_011156.2,767-785).
cggatcagtcagaagatat

SEQ ID NO: 577360 - DNA, 19 bp, Mus musculus
  siRNA target sequence for Prep (NM_011156.2,802-820).
cccgatgagcctaaatgga

SEQ ID NO: 577361 - DNA, 19 bp, Mus musculus
  siRNA target sequence for Prep (NM_011156.2,803-821).
ccgatgagcctaaatggat

SEQ ID NO: 577362 - DNA, 19 bp, Mus musculus
  siRNA target sequence for Prep (NM_011156.2,847-865).
ggccggtacgtcttgttat

SEQ ID NO: 577363 - DNA, 19 bp, Mus musculus
  siRNA target sequence for Prep (NM_011156.2,850-868).
cggtacgtcttgttatcca

SEQ ID NO: 577364 - DNA, 19 bp, Mus musculus
  siRNA target sequence for Prep (NM_011156.2,851-869).
ggtacgtcttgttatccat

SEQ ID NO: 577365 - DNA, 19 bp, Mus musculus
  siRNA target sequence for Prep (NM_011156.2,867-885).
catctgggagggatgtgat

SEQ ID NO: 577366 - DNA, 19 bp, Mus musculus
  siRNA target sequence for Prep (NM_011156.2,946-964).
ctgaagtgggtaaaactga

SEQ ID NO: 577367 - DNA, 19 bp, Mus musculus
  siRNA target sequence for Prep (NM_011156.2,953-971).
gggtaaaactgatagacaa

SEQ ID NO: 577368 - DNA, 19 bp, Mus musculus
  siRNA target sequence for Prep (NM_011156.2,1023-1041).
caagacgaaccgcaattct

SEQ ID NO: 577369 - DNA, 19 bp, Mus musculus
  siRNA target sequence for Prep (NM_011156.2,1032-1050).
ccgcaattctcccaattat

SEQ ID NO: 577370 - DNA, 19 bp, Mus musculus
  siRNA target sequence for Prep (NM_011156.2,1113-1131).
gcacgagaaggatgtctta

SEQ ID NO: 577371 - DNA, 19 bp, Mus musculus
  siRNA target sequence for Prep (NM_011156.2,1116-1134).
cgagaaggatgtcttagaa

SEQ ID NO: 577372 - DNA, 19 bp, Mus musculus
  siRNA target sequence for Prep (NM_011156.2,1117-1135).
gagaaggatgtcttagaat

SEQ ID NO: 577373 - DNA, 19 bp, Mus musculus
  siRNA target sequence for Prep (NM_011156.2,1179-1197).
ccatgacgtgaagaacatt

SEQ ID NO: 577374 - DNA, 19 bp, Mus musculus
  siRNA target sequence for Prep (NM_011156.2,1320-1338).
cctatctccaggtgtcatt

SEQ ID NO: 577375 - DNA, 19 bp, Mus musculus
  siRNA target sequence for Prep (NM_011156.2,1392-1410).
gacggtgaagggaatcgat

SEQ ID NO: 577376 - DNA, 19 bp, Mus musculus
  siRNA target sequence for Prep (NM_011156.2,1403-1421).
gaatcgatgctgctgatta

SEQ ID NO: 577377 - DNA, 19 bp, Mus musculus
  siRNA target sequence for Prep (NM_011156.2,1612-1630).
ctcgcggtggctaacatca

SEQ ID NO: 577378 - DNA, 19 bp, Mus musculus
  siRNA target sequence for Prep (NM_011156.2,1678-1696).
gccaacaaacagaactgtt

SEQ ID NO: 577379 - DNA, 19 bp, Mus musculus
  siRNA target sequence for Prep (NM_011156.2,1679-1697).
ccaacaaacagaactgttt

SEQ ID NO: 577380 - DNA, 19 bp, Mus musculus
  siRNA target sequence for Prep (NM_011156.2,1728-1746).
catcaaggaaggttacaca

SEQ ID NO: 577381 - DNA, 19 bp, Mus musculus
  siRNA target sequence for Prep (NM_011156.2,1822-1840).
gacctcttcggctgtgtta

SEQ ID NO: 577382 - DNA, 19 bp, Mus musculus
  siRNA target sequence for Prep (NM_011156.2,1824-1842).
cctcttcggctgtgttatt

SEQ ID NO: 577383 - DNA, 19 bp, Mus musculus
  siRNA target sequence for Prep (NM_011156.2,1869-1887).
gaagttccacaaatttact

SEQ ID NO: 577384 - DNA, 19 bp, Mus musculus
  siRNA target sequence for Prep (NM_011156.2,1894-1912).
catgcatggaccactgatt

SEQ ID NO: 577385 - DNA, 19 bp, Mus musculus
  siRNA target sequence for Prep (NM_011156.2,1914-1932).
cgggtgctccgacactaaa

SEQ ID NO: 577386 - DNA, 19 bp, Mus musculus
  siRNA target sequence for Prep (NM_011156.2,1916-1934).
ggtgctccgacactaaaca

SEQ ID NO: 577387 - DNA, 19 bp, Mus musculus
  siRNA target sequence for Prep (NM_011156.2,1917-1935).
gtgctccgacactaaacaa

SEQ ID NO: 577388 - DNA, 19 bp, Mus musculus
  siRNA target sequence for Prep (NM_011156.2,1961-1979).
cgccactacacaatgtgaa

SEQ ID NO: 577389 - DNA, 19 bp, Mus musculus
  siRNA target sequence for Prep (NM_011156.2,2175-2193).
cgccaaagtgatagaagaa

SEQ ID NO: 577390 - DNA, 19 bp, Mus musculus
  siRNA target sequence for Prep (NM_011156.2,2188-2206).
gaagaagtctcggatatgt

SEQ ID NO: 577391 - DNA, 19 bp, Mus musculus
  siRNA target sequence for Prep (NM_011156.2,2199-2217).
ggatatgtttgcgttcata

SEQ ID NO: 577392 - DNA, 19 bp, Mus musculus
  siRNA target sequence for Serpinb2 (NM_011111.2,27-45).
catggcaaacaccatgttt

SEQ ID NO: 577393 - DNA, 19 bp, Mus musculus
  siRNA target sequence for Serpinb2 (NM_011111.2,47-65).
ccctcaatctccttaagca

SEQ ID NO: 577394 - DNA, 19 bp, Mus musculus
  siRNA target sequence for Serpinb2 (NM_011111.2,110-128).
ggagcatctcatcaacatt

SEQ ID NO: 577395 - DNA, 19 bp, Mus musculus
  siRNA target sequence for Serpinb2 (NM_011111.2,122-140).
caacattggccatagttct

SEQ ID NO: 577396 - DNA, 19 bp, Mus musculus
  siRNA target sequence for Serpinb2 (NM_011111.2,177-195).
caaagtgctgcagtttaat

SEQ ID NO: 577397 - DNA, 19 bp, Mus musculus
  siRNA target sequence for Serpinb2 (NM_011111.2,196-214).
gaaattggcagttatggta

SEQ ID NO: 577398 - DNA, 19 bp, Mus musculus
  siRNA target sequence for Serpinb2 (NM_011111.2,248-266).
gtgatttcgcacaacagat

SEQ ID NO: 577399 - DNA, 19 bp, Mus musculus
  siRNA target sequence for Serpinb2 (NM_011111.2,338-356).
ctctcagctcaacaatcaa

SEQ ID NO: 577400 - DNA, 19 bp, Mus musculus
  siRNA target sequence for Serpinb2 (NM_011111.2,340-358).
ctcagctcaacaatcaaca

SEQ ID NO: 577401 - DNA, 19 bp, Mus musculus
  siRNA target sequence for Serpinb2 (NM_011111.2,361-379).
ccacagggggattatttgt

SEQ ID NO: 577402 - DNA, 19 bp, Mus musculus
  siRNA target sequence for Serpinb2 (NM_011111.2,415-433).
gcaagattcaaagaagaat

SEQ ID NO: 577403 - DNA, 19 bp, Mus musculus
  siRNA target sequence for Serpinb2 (NM_011111.2,527-545).
gggtcaagactcaaaccaa

SEQ ID NO: 577404 - DNA, 19 bp, Mus musculus
  siRNA target sequence for Serpinb2 (NM_011111.2,564-582).
gctacccgaaggttctgta

SEQ ID NO: 577405 - DNA, 19 bp, Mus musculus
  siRNA target sequence for Serpinb2 (NM_011111.2,569-587).
ccgaaggttctgtagatga

SEQ ID NO: 577406 - DNA, 19 bp, Mus musculus
  siRNA target sequence for Serpinb2 (NM_011111.2,570-588).
cgaaggttctgtagatgaa

SEQ ID NO: 577407 - DNA, 19 bp, Mus musculus
  siRNA target sequence for Serpinb2 (NM_011111.2,658-676).
cttaatgggctttatcctt

SEQ ID NO: 577408 - DNA, 19 bp, Mus musculus
  siRNA target sequence for Serpinb2 (NM_011111.2,732-750).
gctgaacattggatacata

SEQ ID NO: 577409 - DNA, 19 bp, Mus musculus
  siRNA target sequence for Serpinb2 (NM_011111.2,762-780).
gactcagatcctagaactt

SEQ ID NO: 577410 - DNA, 19 bp, Mus musculus
  siRNA target sequence for Serpinb2 (NM_011111.2,810-828).
gttgcttcccgatgagatt

SEQ ID NO: 577411 - DNA, 19 bp, Mus musculus
  siRNA target sequence for Serpinb2 (NM_011111.2,839-857).
ccactggcttggaattgct

SEQ ID NO: 577412 - DNA, 19 bp, Mus musculus
  siRNA target sequence for Serpinb2 (NM_011111.2,956-974).
cacaaagctacgaactcaa

SEQ ID NO: 577413 - DNA, 19 bp, Mus musculus
  siRNA target sequence for Serpinb2 (NM_011111.2,1124-1142).
gtgggactggggcagttat

SEQ ID NO: 577414 - DNA, 19 bp, Mus musculus
  siRNA target sequence for Serpinb2 (NM_011111.2,1126-1144).
gggactggggcagttatga

SEQ ID NO: 577415 - DNA, 19 bp, Mus musculus
  siRNA target sequence for Serpinb2 (NM_011111.2,1179-1197).
ggccgatcatccctttctt

SEQ ID NO: 577416 - DNA, 19 bp, Mus musculus
  siRNA target sequence for Serpinb2 (NM_011111.2,1200-1218).
ctttatcatggacaaaatt

SEQ ID NO: 577417 - DNA, 19 bp, Mus musculus
  siRNA target sequence for Serpinb2 (NM_011111.2,1220-1238).
cccacacgatactatttgt

SEQ ID NO: 577418 - DNA, 19 bp, Mus musculus
  siRNA target sequence for Clpp (NM_017393.1,97-115).
ctcgccttgccgtgcattt

SEQ ID NO: 577419 - DNA, 19 bp, Mus musculus
  siRNA target sequence for Clpp (NM_017393.1,99-117).
cgccttgccgtgcatttct

SEQ ID NO: 577420 - DNA, 19 bp, Mus musculus
  siRNA target sequence for Clpp (NM_017393.1,223-241).
gaggcgagcgcgcttatga

SEQ ID NO: 577421 - DNA, 19 bp, Mus musculus
  siRNA target sequence for Clpp (NM_017393.1,226-244).
gcgagcgcgcttatgacat

SEQ ID NO: 577422 - DNA, 19 bp, Mus musculus
  siRNA target sequence for Clpp (NM_017393.1,227-245).
cgagcgcgcttatgacata

SEQ ID NO: 577423 - DNA, 19 bp, Mus musculus
  siRNA target sequence for Clpp (NM_017393.1,228-246).
gagcgcgcttatgacatat

SEQ ID NO: 577424 - DNA, 19 bp, Mus musculus
  siRNA target sequence for Clpp (NM_017393.1,231-249).
cgcgcttatgacatatact

SEQ ID NO: 577425 - DNA, 19 bp, Mus musculus
  siRNA target sequence for Clpp (NM_017393.1,350-368).
caacaagaagcccattcat

SEQ ID NO: 577426 - DNA, 19 bp, Mus musculus
  siRNA target sequence for Clpp (NM_017393.1,360-378).
cccattcatatgtatatca

SEQ ID NO: 577427 - DNA, 19 bp, Mus musculus
  siRNA target sequence for Clpp (NM_017393.1,361-379).
ccattcatatgtatatcaa

SEQ ID NO: 577428 - DNA, 19 bp, Mus musculus
  siRNA target sequence for Clpp (NM_017393.1,531-549).
cccaattccagaatcatga

SEQ ID NO: 577429 - DNA, 19 bp, Mus musculus
  siRNA target sequence for Clpp (NM_017393.1,532-550).
ccaattccagaatcatgat

SEQ ID NO: 577430 - DNA, 19 bp, Mus musculus
  siRNA target sequence for Wdr11 (NM_172255.1,60-78).
cctacaccgtaaacttcaa

SEQ ID NO: 577431 - DNA, 19 bp, Mus musculus
  siRNA target sequence for Wdr11 (NM_172255.1,105-123).
ctctcaacgcgcacaacaa

SEQ ID NO: 577432 - DNA, 19 bp, Mus musculus
  siRNA target sequence for Wdr11 (NM_172255.1,136-154).
ctggggctggcaaggttta

SEQ ID NO: 577433 - DNA, 19 bp, Mus musculus
  siRNA target sequence for Wdr11 (NM_172255.1,138-156).
ggggctggcaaggtttaat

SEQ ID NO: 577434 - DNA, 19 bp, Mus musculus
  siRNA target sequence for Wdr11 (NM_172255.1,139-157).
gggctggcaaggtttaatt

SEQ ID NO: 577435 - DNA, 19 bp, Mus musculus
  siRNA target sequence for Wdr11 (NM_172255.1,144-162).
ggcaaggtttaattgcata

SEQ ID NO: 577436 - DNA, 19 bp, Mus musculus
  siRNA target sequence for Wdr11 (NM_172255.1,145-163).
gcaaggtttaattgcatat

SEQ ID NO: 577437 - DNA, 19 bp, Mus musculus
  siRNA target sequence for Wdr11 (NM_172255.1,149-167).
ggtttaattgcatatggat

SEQ ID NO: 577438 - DNA, 19 bp, Mus musculus
  siRNA target sequence for Wdr11 (NM_172255.1,176-194).
ctggtggtagtgatcgatt

SEQ ID NO: 577439 - DNA, 19 bp, Mus musculus
  siRNA target sequence for Wdr11 (NM_172255.1,181-199).
ggtagtgatcgattccaat

SEQ ID NO: 577440 - DNA, 19 bp, Mus musculus
  siRNA target sequence for Wdr11 (NM_172255.1,182-200).
gtagtgatcgattccaata

SEQ ID NO: 577441 - DNA, 19 bp, Mus musculus
  siRNA target sequence for Wdr11 (NM_172255.1,195-213).
ccaatactgcccaaactct

SEQ ID NO: 577442 - DNA, 19 bp, Mus musculus
  siRNA target sequence for Wdr11 (NM_172255.1,196-214).
caatactgcccaaactcta

SEQ ID NO: 577443 - DNA, 19 bp, Mus musculus
  siRNA target sequence for Wdr11 (NM_172255.1,205-223).
ccaaactctacaagttcta

SEQ ID NO: 577444 - DNA, 19 bp, Mus musculus
  siRNA target sequence for Wdr11 (NM_172255.1,255-273).
ggtgggccagggagaacta

SEQ ID NO: 577445 - DNA, 19 bp, Mus musculus
  siRNA target sequence for Wdr11 (NM_172255.1,256-274).
gtgggccagggagaactat

SEQ ID NO: 577446 - DNA, 19 bp, Mus musculus
  siRNA target sequence for Wdr11 (NM_172255.1,264-282).
gggagaactatcaccataa

SEQ ID NO: 577447 - DNA, 19 bp, Mus musculus
  siRNA target sequence for Wdr11 (NM_172255.1,266-284).
gagaactatcaccataaca

SEQ ID NO: 577448 - DNA, 19 bp, Mus musculus
  siRNA target sequence for Wdr11 (NM_172255.1,452-470).
gctatccacccgcctaatt

SEQ ID NO: 577449 - DNA, 19 bp, Mus musculus
  siRNA target sequence for Wdr11 (NM_172255.1,453-471).
ctatccacccgcctaatta

SEQ ID NO: 577450 - DNA, 19 bp, Mus musculus
  siRNA target sequence for Wdr11 (NM_172255.1,564-582).
cttcacatttaactttact

SEQ ID NO: 577451 - DNA, 19 bp, Mus musculus
  siRNA target sequence for Wdr11 (NM_172255.1,585-603).
ccagcgagggcatcgtttt

SEQ ID NO: 577452 - DNA, 19 bp, Mus musculus
  siRNA target sequence for Wdr11 (NM_172255.1,588-606).
gcgagggcatcgttttcat

SEQ ID NO: 577453 - DNA, 19 bp, Mus musculus
  siRNA target sequence for Wdr11 (NM_172255.1,644-662).
gggaagaaagtgtacatct

SEQ ID NO: 577454 - DNA, 19 bp, Mus musculus
  siRNA target sequence for Wdr11 (NM_172255.1,675-693).
ccagcccagctcataacaa

SEQ ID NO: 577455 - DNA, 19 bp, Mus musculus
  siRNA target sequence for Wdr11 (NM_172255.1,713-731).
gccaagaaggctcttaata

SEQ ID NO: 577456 - DNA, 19 bp, Mus musculus
  siRNA target sequence for Wdr11 (NM_172255.1,803-821).
gcctatctgccttcaaaaa

SEQ ID NO: 577457 - DNA, 19 bp, Mus musculus
  siRNA target sequence for Wdr11 (NM_172255.1,841-859).
ctaccctcgggagatttta

SEQ ID NO: 577458 - DNA, 19 bp, Mus musculus
  siRNA target sequence for Wdr11 (NM_172255.1,885-903).
cagttggtgtgattgcaat

SEQ ID NO: 577459 - DNA, 19 bp, Mus musculus
  siRNA target sequence for Wdr11 (NM_172255.1,947-965).
cagcgagatggcttgtttt

SEQ ID NO: 577460 - DNA, 19 bp, Mus musculus
  siRNA target sequence for Wdr11 (NM_172255.1,995-1013).
cgtgtccggaggtcttata

SEQ ID NO: 577461 - DNA, 19 bp, Mus musculus
  siRNA target sequence for Wdr11 (NM_172255.1,996-1014).
gtgtccggaggtcttataa

SEQ ID NO: 577462 - DNA, 19 bp, Mus musculus
  siRNA target sequence for Wdr11 (NM_172255.1,998-1016).
gtccggaggtcttataaca

SEQ ID NO: 577463 - DNA, 19 bp, Mus musculus
  siRNA target sequence for Wdr11 (NM_172255.1,1018-1036).
catctgtactacatcaaat

SEQ ID NO: 577464 - DNA, 19 bp, Mus musculus
  siRNA target sequence for Wdr11 (NM_172255.1,1023-1041).
gtactacatcaaatgatga

SEQ ID NO: 577465 - DNA, 19 bp, Mus musculus
  siRNA target sequence for Wdr11 (NM_172255.1,1067-1085).
cttacctatgacttgagaa

SEQ ID NO: 577466 - DNA, 19 bp, Mus musculus
  siRNA target sequence for Wdr11 (NM_172255.1,1097-1115).
gcaatcagggtgacgaaaa

SEQ ID NO: 577467 - DNA, 19 bp, Mus musculus
  siRNA target sequence for Wdr11 (NM_172255.1,1116-1134).
ctgtccgtcccttcagtat

SEQ ID NO: 577468 - DNA, 19 bp, Mus musculus
  siRNA target sequence for Wdr11 (NM_172255.1,1160-1178).
gcagctgccctcatagtaa

SEQ ID NO: 577469 - DNA, 19 bp, Mus musculus
  siRNA target sequence for Wdr11 (NM_172255.1,1179-1197).
gcgacggcagagtcatgat

SEQ ID NO: 577470 - DNA, 19 bp, Mus musculus
  siRNA target sequence for Wdr11 (NM_172255.1,1180-1198).
cgacggcagagtcatgata

SEQ ID NO: 577471 - DNA, 19 bp, Mus musculus
  siRNA target sequence for Wdr11 (NM_172255.1,1181-1199).
gacggcagagtcatgatat

SEQ ID NO: 577472 - DNA, 19 bp, Mus musculus
  siRNA target sequence for Wdr11 (NM_172255.1,1226-1244).
cgaaatgcacggaacagtt

SEQ ID NO: 577473 - DNA, 19 bp, Mus musculus
  siRNA target sequence for Wdr11 (NM_172255.1,1245-1263).
ccggtgtgtctcctttata

SEQ ID NO: 577474 - DNA, 19 bp, Mus musculus
  siRNA target sequence for Wdr11 (NM_172255.1,1247-1265).
ggtgtgtctcctttatact

SEQ ID NO: 577475 - DNA, 19 bp, Mus musculus
  siRNA target sequence for Wdr11 (NM_172255.1,1292-1310).
ggaggagtgctacagaata

SEQ ID NO: 577476 - DNA, 19 bp, Mus musculus
  siRNA target sequence for Wdr11 (NM_172255.1,1293-1311).
gaggagtgctacagaataa

SEQ ID NO: 577477 - DNA, 19 bp, Mus musculus
  siRNA target sequence for Wdr11 (NM_172255.1,1316-1334).
ccagacctttccctagata

SEQ ID NO: 577478 - DNA, 19 bp, Mus musculus
  siRNA target sequence for Wdr11 (NM_172255.1,1317-1335).
cagacctttccctagataa

SEQ ID NO: 577479 - DNA, 19 bp, Mus musculus
  siRNA target sequence for Wdr11 (NM_172255.1,1339-1357).
gatcgggcagagtgcaatt

SEQ ID NO: 577480 - DNA, 19 bp, Mus musculus
  siRNA target sequence for Wdr11 (NM_172255.1,1342-1360).
cgggcagagtgcaattgct

SEQ ID NO: 577481 - DNA, 19 bp, Mus musculus
  siRNA target sequence for Wdr11 (NM_172255.1,1647-1665).
ctgcttcgaccccaaacaa

SEQ ID NO: 577482 - DNA, 19 bp, Mus musculus
  siRNA target sequence for Wdr11 (NM_172255.1,1649-1667).
gcttcgaccccaaacaaca

SEQ ID NO: 577483 - DNA, 19 bp, Mus musculus
  siRNA target sequence for Wdr11 (NM_172255.1,1663-1681).
caacatggggttagtaaga

SEQ ID NO: 577484 - DNA, 19 bp, Mus musculus
  siRNA target sequence for Wdr11 (NM_172255.1,1666-1684).
catggggttagtaagaaat

SEQ ID NO: 577485 - DNA, 19 bp, Mus musculus
  siRNA target sequence for Wdr11 (NM_172255.1,1748-1766).
gacgaatcacccattgaaa

SEQ ID NO: 577486 - DNA, 19 bp, Mus musculus
  siRNA target sequence for Wdr11 (NM_172255.1,1777-1795).
gtctcatctgaaacagtat

SEQ ID NO: 577487 - DNA, 19 bp, Mus musculus
  siRNA target sequence for Wdr11 (NM_172255.1,1825-1843).
ggaattatgggatattaga

SEQ ID NO: 577488 - DNA, 19 bp, Mus musculus
  siRNA target sequence for Wdr11 (NM_172255.1,1848-1866).
gcactcttcttagagaaat

SEQ ID NO: 577489 - DNA, 19 bp, Mus musculus
  siRNA target sequence for Wdr11 (NM_172255.1,2070-2088).
ctgctcgggagcattttgt

SEQ ID NO: 577490 - DNA, 19 bp, Mus musculus
  siRNA target sequence for Wdr11 (NM_172255.1,2072-2090).
gctcgggagcattttgtgt

SEQ ID NO: 577491 - DNA, 19 bp, Mus musculus
  siRNA target sequence for Wdr11 (NM_172255.1,2075-2093).
cgggagcattttgtgttta

SEQ ID NO: 577492 - DNA, 19 bp, Mus musculus
  siRNA target sequence for Wdr11 (NM_172255.1,2171-2189).
ggtagcatgggcagtatta

SEQ ID NO: 577493 - DNA, 19 bp, Mus musculus
  siRNA target sequence for Wdr11 (NM_172255.1,2214-2232).
cattagtgcttggagatat

SEQ ID NO: 577494 - DNA, 19 bp, Mus musculus
  siRNA target sequence for Wdr11 (NM_172255.1,2226-2244).
gagatatggatggaaattt

SEQ ID NO: 577495 - DNA, 19 bp, Mus musculus
  siRNA target sequence for Wdr11 (NM_172255.1,2234-2252).
gatggaaatttaaacttct

SEQ ID NO: 577496 - DNA, 19 bp, Mus musculus
  siRNA target sequence for Wdr11 (NM_172255.1,2279-2297).
ggaatacccacacatagaa

SEQ ID NO: 577497 - DNA, 19 bp, Mus musculus
  siRNA target sequence for Wdr11 (NM_172255.1,2344-2362).
gctaatagcaatgtataat

SEQ ID NO: 577498 - DNA, 19 bp, Mus musculus
  siRNA target sequence for Wdr11 (NM_172255.1,2369-2387).
gctgaagtgtgggatacta

SEQ ID NO: 577499 - DNA, 19 bp, Mus musculus
  siRNA target sequence for Wdr11 (NM_172255.1,2370-2388).
ctgaagtgtgggatactaa

SEQ ID NO: 577500 - DNA, 19 bp, Mus musculus
  siRNA target sequence for Wdr11 (NM_172255.1,2401-2419).
ggtgagcagtttaagaagt

SEQ ID NO: 577501 - DNA, 19 bp, Mus musculus
  siRNA target sequence for Wdr11 (NM_172255.1,2457-2475).
ggtgcacatcagataaggt

SEQ ID NO: 577502 - DNA, 19 bp, Mus musculus
  siRNA target sequence for Wdr11 (NM_172255.1,2463-2481).
catcagataaggtgatctt

SEQ ID NO: 577503 - DNA, 19 bp, Mus musculus
  siRNA target sequence for Wdr11 (NM_172255.1,2473-2491).
ggtgatcttggcatctgat

SEQ ID NO: 577504 - DNA, 19 bp, Mus musculus
  siRNA target sequence for Wdr11 (NM_172255.1,2524-2542).
gaagtctacgtgtttcaga

SEQ ID NO: 577505 - DNA, 19 bp, Mus musculus
  siRNA target sequence for Wdr11 (NM_172255.1,2595-2613).
cgagggctgcccttgcttt

SEQ ID NO: 577506 - DNA, 19 bp, Mus musculus
  siRNA target sequence for Wdr11 (NM_172255.1,2640-2658).
ggaatgggcgatattcgtt

SEQ ID NO: 577507 - DNA, 19 bp, Mus musculus
  siRNA target sequence for Wdr11 (NM_172255.1,2648-2666).
cgatattcgttggacattt

SEQ ID NO: 577508 - DNA, 19 bp, Mus musculus
  siRNA target sequence for Wdr11 (NM_172255.1,2671-2689).
cattgattatccagaaaat

SEQ ID NO: 577509 - DNA, 19 bp, Mus musculus
  siRNA target sequence for Wdr11 (NM_172255.1,2717-2735).
cagttgcatgcattgtcta

SEQ ID NO: 577510 - DNA, 19 bp, Mus musculus
  siRNA target sequence for Wdr11 (NM_172255.1,2726-2744).
gcattgtctaacgacataa

SEQ ID NO: 577511 - DNA, 19 bp, Mus musculus
  siRNA target sequence for Wdr11 (NM_172255.1,2727-2745).
cattgtctaacgacataaa

SEQ ID NO: 577512 - DNA, 19 bp, Mus musculus
  siRNA target sequence for Wdr11 (NM_172255.1,2731-2749).
gtctaacgacataaagaaa

SEQ ID NO: 577513 - DNA, 19 bp, Mus musculus
  siRNA target sequence for Wdr11 (NM_172255.1,2733-2751).
ctaacgacataaagaaact

SEQ ID NO: 577514 - DNA, 19 bp, Mus musculus
  siRNA target sequence for Wdr11 (NM_172255.1,2970-2988).
cctacttccagaaatttca

SEQ ID NO: 577515 - DNA, 19 bp, Mus musculus
  siRNA target sequence for Wdr11 (NM_172255.1,2989-3007).
gctagaaagagttaatcta

SEQ ID NO: 577516 - DNA, 19 bp, Mus musculus
  siRNA target sequence for Wdr11 (NM_172255.1,3011-3029).
gaagtaaaacggtcaactt

SEQ ID NO: 577517 - DNA, 19 bp, Mus musculus
  siRNA target sequence for Wdr11 (NM_172255.1,3116-3134).
gataaccagcactactact

SEQ ID NO: 577518 - DNA, 19 bp, Mus musculus
  siRNA target sequence for Wdr11 (NM_172255.1,3181-3199).
cccttctcagagcacaatt

SEQ ID NO: 577519 - DNA, 19 bp, Mus musculus
  siRNA target sequence for Wdr11 (NM_172255.1,3182-3200).
ccttctcagagcacaatta

SEQ ID NO: 577520 - DNA, 19 bp, Mus musculus
  siRNA target sequence for Wdr11 (NM_172255.1,3183-3201).
cttctcagagcacaattaa

SEQ ID NO: 577521 - DNA, 19 bp, Mus musculus
  siRNA target sequence for Wdr11 (NM_172255.1,3203-3221).
ctggtagcaaccaatatga

SEQ ID NO: 577522 - DNA, 19 bp, Mus musculus
  siRNA target sequence for Wdr11 (NM_172255.1,3242-3260).
gagggtgttcagttactct

SEQ ID NO: 577523 - DNA, 19 bp, Mus musculus
  siRNA target sequence for Wdr11 (NM_172255.1,3335-3353).
gcaaaggttcggttaaatt

SEQ ID NO: 577524 - DNA, 19 bp, Mus musculus
  siRNA target sequence for Wdr11 (NM_172255.1,3340-3358).
ggttcggttaaattctgaa

SEQ ID NO: 577525 - DNA, 19 bp, Mus musculus
  siRNA target sequence for Wdr11 (NM_172255.1,3344-3362).
cggttaaattctgaagaat

SEQ ID NO: 577526 - DNA, 19 bp, Mus musculus
  siRNA target sequence for Wdr11 (NM_172255.1,3477-3495).
cgcttcacagcatgagata

SEQ ID NO: 577527 - DNA, 19 bp, Mus musculus
  siRNA target sequence for Wdr11 (NM_172255.1,3499-3517).
cgatagagctgccttgttt

SEQ ID NO: 577528 - DNA, 19 bp, Mus musculus
  siRNA target sequence for Wdr11 (NM_172255.1,3532-3550).
caagtacggtgcatttgaa

SEQ ID NO: 577529 - DNA, 19 bp, Mus musculus
  siRNA target sequence for Wdr11 (NM_172255.1,3610-3628).
gaagagcctcggctttaga

SEQ ID NO: 577530 - DNA, 19 bp, Mus musculus
  siRNA target sequence for Wdr11 (NM_172255.1,3631-3649).
gggagcagtgcgttttgct

SEQ ID NO: 577531 - DNA, 19 bp, Mus musculus
  siRNA target sequence for Wdr11 (NM_172255.1,3632-3650).
ggagcagtgcgttttgctt

SEQ ID NO: 577532 - DNA, 19 bp, Mus musculus
  siRNA target sequence for Wdr11 (NM_172255.1,3636-3654).
cagtgcgttttgcttcaaa

SEQ ID NO: 577533 - DNA, 19 bp, Mus musculus
  siRNA target sequence for Cln2 (NM_009906.2,236-254).
gctctcctcaatatggaaa

SEQ ID NO: 577534 - DNA, 19 bp, Mus musculus
  siRNA target sequence for Cln2 (NM_009906.2,239-257).
ctcctcaatatggaaagta

SEQ ID NO: 577535 - DNA, 19 bp, Mus musculus
  siRNA target sequence for Cln2 (NM_009906.2,344-362).
cccggaactgcgattcagt

SEQ ID NO: 577536 - DNA, 19 bp, Mus musculus
  siRNA target sequence for Cln2 (NM_009906.2,445-463).
gtagggggacctacaaaga

SEQ ID NO: 577537 - DNA, 19 bp, Mus musculus
  siRNA target sequence for Cln2 (NM_009906.2,454-472).
cctacaaagacccatgtta

SEQ ID NO: 577538 - DNA, 19 bp, Mus musculus
  siRNA target sequence for Cln2 (NM_009906.2,731-749).
cggatctgactgagttcat

SEQ ID NO: 577539 - DNA, 19 bp, Mus musculus
  siRNA target sequence for Cln2 (NM_009906.2,753-771).
cctattcggtggcagtttt

SEQ ID NO: 577540 - DNA, 19 bp, Mus musculus
  siRNA target sequence for Cln2 (NM_009906.2,754-772).
ctattcggtggcagtttta

SEQ ID NO: 577541 - DNA, 19 bp, Mus musculus
  siRNA target sequence for Cln2 (NM_009906.2,782-800).
cctcagtagcaaaagttgt

SEQ ID NO: 577542 - DNA, 19 bp, Mus musculus
  siRNA target sequence for Cln2 (NM_009906.2,783-801).
ctcagtagcaaaagttgtt

SEQ ID NO: 577543 - DNA, 19 bp, Mus musculus
  siRNA target sequence for Cln2 (NM_009906.2,836-854).
ccagtctagatgtggaata

SEQ ID NO: 577544 - DNA, 19 bp, Mus musculus
  siRNA target sequence for Cln2 (NM_009906.2,915-933).
ggcacaggagcccttctta

SEQ ID NO: 577545 - DNA, 19 bp, Mus musculus
  siRNA target sequence for Cln2 (NM_009906.2,960-978).
gtcatctttgccacatgta

SEQ ID NO: 577546 - DNA, 19 bp, Mus musculus
  siRNA target sequence for Cln2 (NM_009906.2,989-1007).
gttacggagacgatgaaga

SEQ ID NO: 577547 - DNA, 19 bp, Mus musculus
  siRNA target sequence for Cln2 (NM_009906.2,1034-1052).
gagtcaacactgagttcat

SEQ ID NO: 577548 - DNA, 19 bp, Mus musculus
  siRNA target sequence for Cln2 (NM_009906.2,1068-1086).
gggtctcaccctccttttt

SEQ ID NO: 577549 - DNA, 19 bp, Mus musculus
  siRNA target sequence for Cln2 (NM_009906.2,1156-1174).
gcttccagcccctatgtta

SEQ ID NO: 577550 - DNA, 19 bp, Mus musculus
  siRNA target sequence for Cln2 (NM_009906.2,1161-1179).
cagcccctatgttactaca

SEQ ID NO: 577551 - DNA, 19 bp, Mus musculus
  siRNA target sequence for Cln2 (NM_009906.2,1164-1182).
cccctatgttactacagtt

SEQ ID NO: 577552 - DNA, 19 bp, Mus musculus
  siRNA target sequence for Cln2 (NM_009906.2,1217-1235).
cagatgaagtagttgacta

SEQ ID NO: 577553 - DNA, 19 bp, Mus musculus
  siRNA target sequence for Cln2 (NM_009906.2,1219-1237).
gatgaagtagttgactata

SEQ ID NO: 577554 - DNA, 19 bp, Mus musculus
  siRNA target sequence for Cln2 (NM_009906.2,1324-1342).
ctaccaccatccagttact

SEQ ID NO: 577555 - DNA, 19 bp, Mus musculus
  siRNA target sequence for Cln2 (NM_009906.2,1356-1374).
ccgtgcctacccagatgtt

SEQ ID NO: 577556 - DNA, 19 bp, Mus musculus
  siRNA target sequence for Cln2 (NM_009906.2,1464-1482).
gggaattttatccttgata

SEQ ID NO: 577557 - DNA, 19 bp, Mus musculus
  siRNA target sequence for Cln2 (NM_009906.2,1584-1602).
ccatgagtcctgtctgaat

SEQ ID NO: 577558 - DNA, 19 bp, Mus musculus
  siRNA target sequence for Dpp7 (NM_031843.2,171-189).
gagagtttcggcaacaaaa

SEQ ID NO: 577559 - DNA, 19 bp, Mus musculus
  siRNA target sequence for Dpp7 (NM_031843.2,175-193).
gtttcggcaacaaaacctt

SEQ ID NO: 577560 - DNA, 19 bp, Mus musculus
  siRNA target sequence for Dpp7 (NM_031843.2,202-220).
ggttcctagtgtcagataa

SEQ ID NO: 577561 - DNA, 19 bp, Mus musculus
  siRNA target sequence for Dpp7 (NM_031843.2,233-251).
gggcgaagggcccatcttt

SEQ ID NO: 577562 - DNA, 19 bp, Mus musculus
  siRNA target sequence for Dpp7 (NM_031843.2,240-258).
gggcccatctttttctaca

SEQ ID NO: 577563 - DNA, 19 bp, Mus musculus
  siRNA target sequence for Dpp7 (NM_031843.2,397-415).
cacagcggggatatacaca

SEQ ID NO: 577564 - DNA, 19 bp, Mus musculus
  siRNA target sequence for Dpp7 (NM_031843.2,618-636).
cttggggactcctaccaat

SEQ ID NO: 577565 - DNA, 19 bp, Mus musculus
  siRNA target sequence for Dpp7 (NM_031843.2,621-639).
ggggactcctaccaattct

SEQ ID NO: 577566 - DNA, 19 bp, Mus musculus
  siRNA target sequence for Dpp7 (NM_031843.2,645-663).
gatgtcacagcggactttt

SEQ ID NO: 577567 - DNA, 19 bp, Mus musculus
  siRNA target sequence for Dpp7 (NM_031843.2,729-747).
ctccagggagcctatgaca

SEQ ID NO: 577568 - DNA, 19 bp, Mus musculus
  siRNA target sequence for Dpp7 (NM_031843.2,813-831).
gggtttgcccgaaatgcat

SEQ ID NO: 577569 - DNA, 19 bp, Mus musculus
  siRNA target sequence for Dpp7 (NM_031843.2,814-832).
ggtttgcccgaaatgcatt

SEQ ID NO: 577570 - DNA, 19 bp, Mus musculus
  siRNA target sequence for Dpp7 (NM_031843.2,815-833).
gtttgcccgaaatgcattt

SEQ ID NO: 577571 - DNA, 19 bp, Mus musculus
  siRNA target sequence for Dpp7 (NM_031843.2,820-838).
cccgaaatgcatttactgt

SEQ ID NO: 577572 - DNA, 19 bp, Mus musculus
  siRNA target sequence for Dpp7 (NM_031843.2,857-875).
cccgtatcctactgacttt

SEQ ID NO: 577573 - DNA, 19 bp, Mus musculus
  siRNA target sequence for Dpp7 (NM_031843.2,859-877).
cgtatcctactgactttct

SEQ ID NO: 577574 - DNA, 19 bp, Mus musculus
  siRNA target sequence for Dpp7 (NM_031843.2,860-878).
gtatcctactgactttcta

SEQ ID NO: 577575 - DNA, 19 bp, Mus musculus
  siRNA target sequence for Dpp7 (NM_031843.2,910-928).
gctgtcaacggctgttgaa

SEQ ID NO: 577576 - DNA, 19 bp, Mus musculus
  siRNA target sequence for Dpp7 (NM_031843.2,911-929).
ctgtcaacggctgttgaat

SEQ ID NO: 577577 - DNA, 19 bp, Mus musculus
  siRNA target sequence for Dpp7 (NM_031843.2,963-981).
gcagggctggtctacaact

SEQ ID NO: 577578 - DNA, 19 bp, Mus musculus
  siRNA target sequence for Dpp7 (NM_031843.2,988-1006).
gcacggaaccctgttatga

SEQ ID NO: 577579 - DNA, 19 bp, Mus musculus
  siRNA target sequence for Dpp7 (NM_031843.2,991-1009).
cggaaccctgttatgacat

SEQ ID NO: 577580 - DNA, 19 bp, Mus musculus
  siRNA target sequence for Dpp7 (NM_031843.2,1007-1025).
catctaccggttataccaa

SEQ ID NO: 577581 - DNA, 19 bp, Mus musculus
  siRNA target sequence for Dpp7 (NM_031843.2,1085-1103).
ggcctgtacggagatcaat

SEQ ID NO: 577582 - DNA, 19 bp, Mus musculus
  siRNA target sequence for Dpp7 (NM_031843.2,1087-1105).
cctgtacggagatcaatct

SEQ ID NO: 577583 - DNA, 19 bp, Mus musculus
  siRNA target sequence for Dpp7 (NM_031843.2,1235-1253).
gggtggtgaccttaaagca

SEQ ID NO: 577584 - DNA, 19 bp, Mus musculus
  siRNA target sequence for Dpp7 (NM_031843.2,1371-1389).
gatctcagagcatctaact

SEQ ID NO: 577585 - DNA, 19 bp, Mus musculus
  siRNA target sequence for Dpp7 (NM_031843.2,1416-1434).
gtgcgtaagctggaatcta

SEQ ID NO: 577586 - DNA, 19 bp, Mus musculus
  siRNA target sequence for Dpp7 (NM_031843.2,1452-1470).
gtagcagcagccagactaa

SEQ ID NO: 577587 - DNA, 19 bp, Mus musculus
  siRNA target sequence for Folh1 (NM_016770.2,187-205).
ctctttgggtggtttataa

SEQ ID NO: 577588 - DNA, 19 bp, Mus musculus
  siRNA target sequence for Folh1 (NM_016770.2,276-294).
ggctgagaacatcaaaaaa

SEQ ID NO: 577589 - DNA, 19 bp, Mus musculus
  siRNA target sequence for Folh1 (NM_016770.2,278-296).
ctgagaacatcaaaaaatt

SEQ ID NO: 577590 - DNA, 19 bp, Mus musculus
  siRNA target sequence for Folh1 (NM_016770.2,367-385).
catgaccagtggaaagaat

SEQ ID NO: 577591 - DNA, 19 bp, Mus musculus
  siRNA target sequence for Folh1 (NM_016770.2,390-408).
cctggatttggttgagtta

SEQ ID NO: 577592 - DNA, 19 bp, Mus musculus
  siRNA target sequence for Folh1 (NM_016770.2,423-441).
cttgctgtcctatccaaat

SEQ ID NO: 577593 - DNA, 19 bp, Mus musculus
  siRNA target sequence for Folh1 (NM_016770.2,429-447).
gtcctatccaaataaaact

SEQ ID NO: 577594 - DNA, 19 bp, Mus musculus
  siRNA target sequence for Folh1 (NM_016770.2,431-449).
cctatccaaataaaactca

SEQ ID NO: 577595 - DNA, 19 bp, Mus musculus
  siRNA target sequence for Folh1 (NM_016770.2,432-450).
ctatccaaataaaactcat

SEQ ID NO: 577596 - DNA, 19 bp, Mus musculus
  siRNA target sequence for Folh1 (NM_016770.2,448-466).
catcctaactatatctcaa

SEQ ID NO: 577597 - DNA, 19 bp, Mus musculus
  siRNA target sequence for Folh1 (NM_016770.2,521-539).
ccccaggatatgagaatat

SEQ ID NO: 577598 - DNA, 19 bp, Mus musculus
  siRNA target sequence for Folh1 (NM_016770.2,584-602).
caccagagggtgatctagt

SEQ ID NO: 577599 - DNA, 19 bp, Mus musculus
  siRNA target sequence for Folh1 (NM_016770.2,587-605).
cagagggtgatctagtgta

SEQ ID NO: 577600 - DNA, 19 bp, Mus musculus
  siRNA target sequence for Folh1 (NM_016770.2,592-610).
ggtgatctagtgtatgtca

SEQ ID NO: 577601 - DNA, 19 bp, Mus musculus
  siRNA target sequence for Folh1 (NM_016770.2,593-611).
gtgatctagtgtatgtcaa

SEQ ID NO: 577602 - DNA, 19 bp, Mus musculus
  siRNA target sequence for Folh1 (NM_016770.2,609-627).
caactatgcacgaactgaa

SEQ ID NO: 577603 - DNA, 19 bp, Mus musculus
  siRNA target sequence for Folh1 (NM_016770.2,617-635).
cacgaactgaagacttctt

SEQ ID NO: 577604 - DNA, 19 bp, Mus musculus
  siRNA target sequence for Folh1 (NM_016770.2,685-703).
gccagatatgggaaagtgt

SEQ ID NO: 577605 - DNA, 19 bp, Mus musculus
  siRNA target sequence for Folh1 (NM_016770.2,833-851).
gtgtccaacgtggaaatgt

SEQ ID NO: 577606 - DNA, 19 bp, Mus musculus
  siRNA target sequence for Folh1 (NM_016770.2,835-853).
gtccaacgtggaaatgtct

SEQ ID NO: 577607 - DNA, 19 bp, Mus musculus
  siRNA target sequence for Folh1 (NM_016770.2,837-855).
ccaacgtggaaatgtctta

SEQ ID NO: 577608 - DNA, 19 bp, Mus musculus
  siRNA target sequence for Folh1 (NM_016770.2,838-856).
caacgtggaaatgtcttaa

SEQ ID NO: 577609 - DNA, 19 bp, Mus musculus
  siRNA target sequence for Folh1 (NM_016770.2,887-905).
caggttacccagcaaatga

SEQ ID NO: 577610 - DNA, 19 bp, Mus musculus
  siRNA target sequence for Folh1 (NM_016770.2,1034-1052).
ggaagggaggattaaaagt

SEQ ID NO: 577611 - DNA, 19 bp, Mus musculus
  siRNA target sequence for Folh1 (NM_016770.2,1111-1129).
catattcactcttacacta

SEQ ID NO: 577612 - DNA, 19 bp, Mus musculus
  siRNA target sequence for Folh1 (NM_016770.2,1127-1145).
ctaaagtgacaagaatcta

SEQ ID NO: 577613 - DNA, 19 bp, Mus musculus
  siRNA target sequence for Folh1 (NM_016770.2,1136-1154).
caagaatctataatgtcat

SEQ ID NO: 577614 - DNA, 19 bp, Mus musculus
  siRNA target sequence for Folh1 (NM_016770.2,1408-1426).
gagcgaggtgtggcttata

SEQ ID NO: 577615 - DNA, 19 bp, Mus musculus
  siRNA target sequence for Folh1 (NM_016770.2,1411-1429).
cgaggtgtggcttatatta

SEQ ID NO: 577616 - DNA, 19 bp, Mus musculus
  siRNA target sequence for Folh1 (NM_016770.2,1412-1430).
gaggtgtggcttatattaa

SEQ ID NO: 577617 - DNA, 19 bp, Mus musculus
  siRNA target sequence for Folh1 (NM_016770.2,1451-1469).
gaaattacactctaagagt

SEQ ID NO: 577618 - DNA, 19 bp, Mus musculus
  siRNA target sequence for Folh1 (NM_016770.2,1483-1501).
ctgatgtacagcttagtgt

SEQ ID NO: 577619 - DNA, 19 bp, Mus musculus
  siRNA target sequence for Folh1 (NM_016770.2,1526-1544).
gcccagatgaaggttttga

SEQ ID NO: 577620 - DNA, 19 bp, Mus musculus
  siRNA target sequence for Folh1 (NM_016770.2,1527-1545).
cccagatgaaggttttgaa

SEQ ID NO: 577621 - DNA, 19 bp, Mus musculus
  siRNA target sequence for Folh1 (NM_016770.2,1546-1564).
ggaaaatctctttatgaca

SEQ ID NO: 577622 - DNA, 19 bp, Mus musculus
  siRNA target sequence for Folh1 (NM_016770.2,1580-1598).
gtccttcacctgagttcat

SEQ ID NO: 577623 - DNA, 19 bp, Mus musculus
  siRNA target sequence for Folh1 (NM_016770.2,1586-1604).
cacctgagttcattggaat

SEQ ID NO: 577624 - DNA, 19 bp, Mus musculus
  siRNA target sequence for Folh1 (NM_016770.2,1601-1619).
gaatgcccagaattagcaa

SEQ ID NO: 577625 - DNA, 19 bp, Mus musculus
  siRNA target sequence for Folh1 (NM_016770.2,1621-1639).
ctggggtctggcaatgatt

SEQ ID NO: 577626 - DNA, 19 bp, Mus musculus
  siRNA target sequence for Folh1 (NM_016770.2,1623-1641).
ggggtctggcaatgatttt

SEQ ID NO: 577627 - DNA, 19 bp, Mus musculus
  siRNA target sequence for Folh1 (NM_016770.2,1625-1643).
ggtctggcaatgattttga

SEQ ID NO: 577628 - DNA, 19 bp, Mus musculus
  siRNA target sequence for Folh1 (NM_016770.2,1675-1693).
ggcagagcccgatatacta

SEQ ID NO: 577629 - DNA, 19 bp, Mus musculus
  siRNA target sequence for Folh1 (NM_016770.2,1676-1694).
gcagagcccgatatactaa

SEQ ID NO: 577630 - DNA, 19 bp, Mus musculus
  siRNA target sequence for Folh1 (NM_016770.2,1677-1695).
cagagcccgatatactaaa

SEQ ID NO: 577631 - DNA, 19 bp, Mus musculus
  siRNA target sequence for Folh1 (NM_016770.2,1679-1697).
gagcccgatatactaaaaa

SEQ ID NO: 577632 - DNA, 19 bp, Mus musculus
  siRNA target sequence for Folh1 (NM_016770.2,1681-1699).
gcccgatatactaaaaatt

SEQ ID NO: 577633 - DNA, 19 bp, Mus musculus
  siRNA target sequence for Folh1 (NM_016770.2,1684-1702).
cgatatactaaaaattgga

SEQ ID NO: 577634 - DNA, 19 bp, Mus musculus
  siRNA target sequence for Folh1 (NM_016770.2,1716-1734).
cagcagctatcctctctat

SEQ ID NO: 577635 - DNA, 19 bp, Mus musculus
  siRNA target sequence for Folh1 (NM_016770.2,1731-1749).
ctatcacagtgtctatgaa

SEQ ID NO: 577636 - DNA, 19 bp, Mus musculus
  siRNA target sequence for Folh1 (NM_016770.2,1735-1753).
cacagtgtctatgaaacat

SEQ ID NO: 577637 - DNA, 19 bp, Mus musculus
  siRNA target sequence for Folh1 (NM_016770.2,1758-1776).
gctggtagtaaaattttat

SEQ ID NO: 577638 - DNA, 19 bp, Mus musculus
  siRNA target sequence for Folh1 (NM_016770.2,1813-1831).
gttcgaggagcgatggtat

SEQ ID NO: 577639 - DNA, 19 bp, Mus musculus
  siRNA target sequence for Folh1 (NM_016770.2,1911-1929).
ctacaatatttcaatgaaa

SEQ ID NO: 577640 - DNA, 19 bp, Mus musculus
  siRNA target sequence for Folh1 (NM_016770.2,1944-1962).
gaaggcttacatgatatca

SEQ ID NO: 577641 - DNA, 19 bp, Mus musculus
  siRNA target sequence for Folh1 (NM_016770.2,2005-2023).
gcatctaagttcaatcaga

SEQ ID NO: 577642 - DNA, 19 bp, Mus musculus
  siRNA target sequence for Folh1 (NM_016770.2,2024-2042).
gactgcaagagttagacaa

SEQ ID NO: 577643 - DNA, 19 bp, Mus musculus
  siRNA target sequence for Folh1 (NM_016770.2,2049-2067).
ccccatattactgagaatt

SEQ ID NO: 577644 - DNA, 19 bp, Mus musculus
  siRNA target sequence for Folh1 (NM_016770.2,2050-2068).
cccatattactgagaatta

SEQ ID NO: 577645 - DNA, 19 bp, Mus musculus
  siRNA target sequence for Folh1 (NM_016770.2,2051-2069).
ccatattactgagaattat

SEQ ID NO: 577646 - DNA, 19 bp, Mus musculus
  siRNA target sequence for Folh1 (NM_016770.2,2091-2109).
ggaacgtgcattcattgat

SEQ ID NO: 577647 - DNA, 19 bp, Mus musculus
  siRNA target sequence for Folh1 (NM_016770.2,2096-2114).
gtgcattcattgatccttt

SEQ ID NO: 577648 - DNA, 19 bp, Mus musculus
  siRNA target sequence for Folh1 (NM_016770.2,2206-2224).
gatgccctttttgatataa

SEQ ID NO: 577649 - DNA, 19 bp, Mus musculus
  siRNA target sequence for Folh1 (NM_016770.2,2209-2227).
gccctttttgatataagta

SEQ ID NO: 577650 - DNA, 19 bp, Mus musculus
  siRNA target sequence for LOC217820 (NM_178409.2,343-361).
ctgctcggacagtgtgtta

SEQ ID NO: 577651 - DNA, 19 bp, Mus musculus
  siRNA target sequence for LOC217820 (NM_178409.2,345-363).
gctcggacagtgtgttata

SEQ ID NO: 577652 - DNA, 19 bp, Mus musculus
  siRNA target sequence for LOC217820 (NM_178409.2,374-392).
ggacatggtggctattgga

SEQ ID NO: 577653 - DNA, 19 bp, Mus musculus
  siRNA target sequence for LOC217820 (NM_178409.2,383-401).
ggctattggaatgaaaaat

SEQ ID NO: 577654 - DNA, 19 bp, Mus musculus
  siRNA target sequence for LOC217820 (NM_178409.2,458-476).
caggcgatgtgcaatccat

SEQ ID NO: 577655 - DNA, 19 bp, Mus musculus
  siRNA target sequence for LOC217820 (NM_178409.2,462-480).
cgatgtgcaatccatgata

SEQ ID NO: 577656 - DNA, 19 bp, Mus musculus
  siRNA target sequence for LOC217820 (NM_178409.2,463-481).
gatgtgcaatccatgatat

SEQ ID NO: 577657 - DNA, 19 bp, Mus musculus
  siRNA target sequence for LOC217820 (NM_178409.2,490-508).
gcccagattcccggtattt

SEQ ID NO: 577658 - DNA, 19 bp, Mus musculus
  siRNA target sequence for LOC217820 (NM_178409.2,555-573).
ctgggtcccacacttaaca

SEQ ID NO: 577659 - DNA, 19 bp, Mus musculus
  siRNA target sequence for LOC217820 (NM_178409.2,557-575).
gggtcccacacttaacaga

SEQ ID NO: 577660 - DNA, 19 bp, Mus musculus
  siRNA target sequence for LOC217820 (NM_178409.2,561-579).
cccacacttaacagaatca

SEQ ID NO: 577661 - DNA, 19 bp, Mus musculus
  siRNA target sequence for LOC217820 (NM_178409.2,648-666).
gtttctagtggctgctata

SEQ ID NO: 577662 - DNA, 19 bp, Mus musculus
  siRNA target sequence for LOC217820 (NM_178409.2,661-679).
gctataaacggcatgtcta

SEQ ID NO: 577663 - DNA, 19 bp, Mus musculus
  siRNA target sequence for LOC217820 (NM_178409.2,662-680).
ctataaacggcatgtctat

SEQ ID NO: 577664 - DNA, 19 bp, Mus musculus
  siRNA target sequence for LOC217820 (NM_178409.2,737-755).
ggctacctggactagtatt

SEQ ID NO: 577665 - DNA, 19 bp, Mus musculus
  siRNA target sequence for LOC217820 (NM_178409.2,739-757).
ctacctggactagtattct

SEQ ID NO: 577666 - DNA, 19 bp, Mus musculus
  siRNA target sequence for LOC217820 (NM_178409.2,865-883).
gcatggttaaattatatga

SEQ ID NO: 577667 - DNA, 19 bp, Mus musculus
  siRNA target sequence for LOC217820 (NM_178409.2,892-910).
gcccagaaaaatttgcaaa

SEQ ID NO: 577668 - DNA, 19 bp, Mus musculus
  siRNA target sequence for LOC217820 (NM_178409.2,939-957).
catgtgacaaatattcgat

SEQ ID NO: 577669 - DNA, 19 bp, Mus musculus
  siRNA target sequence for LOC217820 (NM_178409.2,942-960).
gtgacaaatattcgattta

SEQ ID NO: 577670 - DNA, 19 bp, Mus musculus
  siRNA target sequence for LOC217820 (NM_178409.2,993-1011).
ggcgatgactgcagtttgt

SEQ ID NO: 577671 - DNA, 19 bp, Mus musculus
  siRNA target sequence for LOC217820 (NM_178409.2,994-1012).
gcgatgactgcagtttgtt

SEQ ID NO: 577672 - DNA, 19 bp, Mus musculus
  siRNA target sequence for LOC217820 (NM_178409.2,995-1013).
cgatgactgcagtttgttt

SEQ ID NO: 577673 - DNA, 19 bp, Mus musculus
  siRNA target sequence for Naalad2 (NM_028279.1,121-139).
gagttgcctagaatcaata

SEQ ID NO: 577674 - DNA, 19 bp, Mus musculus
  siRNA target sequence for Naalad2 (NM_028279.1,196-214).
ggcagagctcgctacacta

SEQ ID NO: 577675 - DNA, 19 bp, Mus musculus
  siRNA target sequence for Naalad2 (NM_028279.1,200-218).
gagctcgctacactaagaa

SEQ ID NO: 577676 - DNA, 19 bp, Mus musculus
  siRNA target sequence for Naalad2 (NM_028279.1,202-220).
gctcgctacactaagaaca

SEQ ID NO: 577677 - DNA, 19 bp, Mus musculus
  siRNA target sequence for Naalad2 (NM_028279.1,203-221).
ctcgctacactaagaacaa

SEQ ID NO: 577678 - DNA, 19 bp, Mus musculus
  siRNA target sequence for Naalad2 (NM_028279.1,205-223).
cgctacactaagaacaaga

SEQ ID NO: 577679 - DNA, 19 bp, Mus musculus
  siRNA target sequence for Naalad2 (NM_028279.1,264-282).
ctatgagacgtttgaatta

SEQ ID NO: 577680 - DNA, 19 bp, Mus musculus
  siRNA target sequence for Naalad2 (NM_028279.1,277-295).
gaattagtacagaactttt

SEQ ID NO: 577681 - DNA, 19 bp, Mus musculus
  siRNA target sequence for Naalad2 (NM_028279.1,333-351).
gttacgaggagcattggta

SEQ ID NO: 577682 - DNA, 19 bp, Mus musculus
  siRNA target sequence for Naalad2 (NM_028279.1,338-356).
gaggagcattggtatatga

SEQ ID NO: 577683 - DNA, 19 bp, Mus musculus
  siRNA target sequence for Naalad2 (NM_028279.1,370-388).
gtggtcattcctttcaaca

SEQ ID NO: 577684 - DNA, 19 bp, Mus musculus
  siRNA target sequence for Naalad2 (NM_028279.1,380-398).
ctttcaacattcaagacta

SEQ ID NO: 577685 - DNA, 19 bp, Mus musculus
  siRNA target sequence for Naalad2 (NM_028279.1,396-414).
ctatgcaaaagccttgaaa

SEQ ID NO: 577686 - DNA, 19 bp, Mus musculus
  siRNA target sequence for Naalad2 (NM_028279.1,451-469).
cacgaccagcaattgagaa

SEQ ID NO: 577687 - DNA, 19 bp, Mus musculus
  siRNA target sequence for Naalad2 (NM_028279.1,471-489).
ccatgcagtgtcatttgat

SEQ ID NO: 577688 - DNA, 19 bp, Mus musculus
  siRNA target sequence for Naalad2 (NM_028279.1,556-574).
gttgatcttaataatccta

SEQ ID NO: 577689 - DNA, 19 bp, Mus musculus
  siRNA target sequence for Naalad2 (NM_028279.1,572-590).
ctattgcagtgagaattat

SEQ ID NO: 577690 - DNA, 19 bp, Mus musculus
  siRNA target sequence for Naalad2 (NM_028279.1,600-618).
gcagatgcttcttgaaaga

SEQ ID NO: 577691 - DNA, 19 bp, Mus musculus
  siRNA target sequence for Naalad2 (NM_028279.1,624-642).
catagatcctcttggttta

SEQ ID NO: 577692 - DNA, 19 bp, Mus musculus
  siRNA target sequence for Naalad2 (NM_028279.1,643-661).
cctgggaggaagttctaca

SEQ ID NO: 577693 - DNA, 19 bp, Mus musculus
  siRNA target sequence for Naalad2 (NM_028279.1,797-815).
ctattgcagcttttacaat

SEQ ID NO: 577694 - DNA, 19 bp, Mus musculus
  siRNA target sequence for Prss16 (NM_019429.1,125-143).
gcgcctgagggaacacatt

SEQ ID NO: 577695 - DNA, 19 bp, Mus musculus
  siRNA target sequence for Prss16 (NM_019429.1,278-296).
gcggtactgggtgaatgat

SEQ ID NO: 577696 - DNA, 19 bp, Mus musculus
  siRNA target sequence for Prss16 (NM_019429.1,280-298).
ggtactgggtgaatgatca

SEQ ID NO: 577697 - DNA, 19 bp, Mus musculus
  siRNA target sequence for Prss16 (NM_019429.1,281-299).
gtactgggtgaatgatcaa

SEQ ID NO: 577698 - DNA, 19 bp, Mus musculus
  siRNA target sequence for Prss16 (NM_019429.1,302-320).
cagaactggccaagatgta

SEQ ID NO: 577699 - DNA, 19 bp, Mus musculus
  siRNA target sequence for Prss16 (NM_019429.1,310-328).
gccaagatgtaccagtatt

SEQ ID NO: 577700 - DNA, 19 bp, Mus musculus
  siRNA target sequence for Prss16 (NM_019429.1,424-442).
gcctagaacacagattcta

SEQ ID NO: 577701 - DNA, 19 bp, Mus musculus
  siRNA target sequence for Prss16 (NM_019429.1,429-447).
gaacacagattctatggtt

SEQ ID NO: 577702 - DNA, 19 bp, Mus musculus
  siRNA target sequence for Prss16 (NM_019429.1,434-452).
cagattctatggtttgagt

SEQ ID NO: 577703 - DNA, 19 bp, Mus musculus
  siRNA target sequence for Prss16 (NM_019429.1,436-454).
gattctatggtttgagtat

SEQ ID NO: 577704 - DNA, 19 bp, Mus musculus
  siRNA target sequence for Prss16 (NM_019429.1,477-495).
gccctgcttcgctacttgt

SEQ ID NO: 577705 - DNA, 19 bp, Mus musculus
  siRNA target sequence for Prss16 (NM_019429.1,549-567).
ctcctcaatgtgtcttctt

SEQ ID NO: 577706 - DNA, 19 bp, Mus musculus
  siRNA target sequence for Prss16 (NM_019429.1,1039-1057).
gggctgtacagatagtctt

SEQ ID NO: 577707 - DNA, 19 bp, Mus musculus
  siRNA target sequence for Prss16 (NM_019429.1,1302-1320).
gctgtggcccagacaaact

SEQ ID NO: 577708 - DNA, 19 bp, Mus musculus
  siRNA target sequence for Prss16 (NM_019429.1,1310-1328).
ccagacaaactcctattat

SEQ ID NO: 577709 - DNA, 19 bp, Mus musculus
  siRNA target sequence for Prss16 (NM_019429.1,1313-1331).
gacaaactcctattatggt

SEQ ID NO: 577710 - DNA, 19 bp, Mus musculus
  siRNA target sequence for Prss16 (NM_019429.1,1345-1363).
gagccacccaagtactgtt

SEQ ID NO: 577711 - DNA, 19 bp, Mus musculus
  siRNA target sequence for Prss16 (NM_019429.1,1348-1366).
ccacccaagtactgtttgt

SEQ ID NO: 577712 - DNA, 19 bp, Mus musculus
  siRNA target sequence for Prss16 (NM_019429.1,1351-1369).
cccaagtactgtttgttaa

SEQ ID NO: 577713 - DNA, 19 bp, Mus musculus
  siRNA target sequence for Prss16 (NM_019429.1,1352-1370).
ccaagtactgtttgttaat

SEQ ID NO: 577714 - DNA, 19 bp, Mus musculus
  siRNA target sequence for Prss16 (NM_019429.1,1506-1524).
ctgggacgtcagaaaatct

SEQ ID NO: 577715 - DNA, 19 bp, Mus musculus
  siRNA target sequence for Prss16 (NM_019429.1,1517-1535).
gaaaatctcccagcaatta

SEQ ID NO: 577716 - DNA, 19 bp, Mus musculus
  siRNA target sequence for Prss16 (NM_019429.1,1536-1554).
caggattggctcaaagata

SEQ ID NO: 577717 - DNA, 19 bp, Mus musculus
  siRNA target sequence for Prss16 (NM_019429.1,1538-1556).
ggattggctcaaagatata

SEQ ID NO: 577718 - DNA, 19 bp, Mus musculus
  siRNA target sequence for Prss16 (NM_019429.1,1539-1557).
gattggctcaaagatataa

SEQ ID NO: 577719 - DNA, 19 bp, Mus musculus
  siRNA target sequence for Reln (NM_011261.1,632-650).
ccgaccaccagtttggtaa

SEQ ID NO: 577720 - DNA, 19 bp, Mus musculus
  siRNA target sequence for Reln (NM_011261.1,852-870).
ctcgcaccttgctgaaata

SEQ ID NO: 577721 - DNA, 19 bp, Mus musculus
  siRNA target sequence for Reln (NM_011261.1,856-874).
caccttgctgaaatacaca

SEQ ID NO: 577722 - DNA, 19 bp, Mus musculus
  siRNA target sequence for Reln (NM_011261.1,885-903).
gatcctacgagatgacttt

SEQ ID NO: 577723 - DNA, 19 bp, Mus musculus
  siRNA target sequence for Reln (NM_011261.1,931-949).
cccaacatatgggttgaat

SEQ ID NO: 577724 - DNA, 19 bp, Mus musculus
  siRNA target sequence for Reln (NM_011261.1,1096-1114).
ggatcatgtcgatttagtt

SEQ ID NO: 577725 - DNA, 19 bp, Mus musculus
  siRNA target sequence for Reln (NM_011261.1,1097-1115).
gatcatgtcgatttagtta

SEQ ID NO: 577726 - DNA, 19 bp, Mus musculus
  siRNA target sequence for Reln (NM_011261.1,1135-1153).
gtgtcatacgccaagaaca

SEQ ID NO: 577727 - DNA, 19 bp, Mus musculus
  siRNA target sequence for Reln (NM_011261.1,1137-1155).
gtcatacgccaagaacaat

SEQ ID NO: 577728 - DNA, 19 bp, Mus musculus
  siRNA target sequence for Reln (NM_011261.1,1152-1170).
caataccgctgattggatt

SEQ ID NO: 577729 - DNA, 19 bp, Mus musculus
  siRNA target sequence for Reln (NM_011261.1,1391-1409).
cgggcaactggctcttctt

SEQ ID NO: 577730 - DNA, 19 bp, Mus musculus
  siRNA target sequence for Reln (NM_011261.1,1414-1432).
ggagcaacggtcaagcata

SEQ ID NO: 577731 - DNA, 19 bp, Mus musculus
  siRNA target sequence for Reln (NM_011261.1,1442-1460).
cagatgggaactccattta

SEQ ID NO: 577732 - DNA, 19 bp, Mus musculus
  siRNA target sequence for Reln (NM_011261.1,1474-1492).
gaaggcagcgagttcaatt

SEQ ID NO: 577733 - DNA, 19 bp, Mus musculus
  siRNA target sequence for Reln (NM_011261.1,1496-1514).
ccaccacccgggatgtaga

SEQ ID NO: 577734 - DNA, 19 bp, Mus musculus
  siRNA target sequence for Reln (NM_011261.1,1497-1515).
caccacccgggatgtagat

SEQ ID NO: 577735 - DNA, 19 bp, Mus musculus
  siRNA target sequence for Reln (NM_011261.1,1499-1517).
ccacccgggatgtagatct

SEQ ID NO: 577736 - DNA, 19 bp, Mus musculus
  siRNA target sequence for Reln (NM_011261.1,1500-1518).
cacccgggatgtagatctt

SEQ ID NO: 577737 - DNA, 19 bp, Mus musculus
  siRNA target sequence for Reln (NM_011261.1,1504-1522).
cgggatgtagatctttcta

SEQ ID NO: 577738 - DNA, 19 bp, Mus musculus
  siRNA target sequence for Reln (NM_011261.1,1539-1557).
gcagtggtcagaagaattt

SEQ ID NO: 577739 - DNA, 19 bp, Mus musculus
  siRNA target sequence for Reln (NM_011261.1,1568-1586).
ccacaggatgggatatctt

SEQ ID NO: 577740 - DNA, 19 bp, Mus musculus
  siRNA target sequence for Reln (NM_011261.1,1606-1624).
gactgtggaaccgtagaat

SEQ ID NO: 577741 - DNA, 19 bp, Mus musculus
  siRNA target sequence for Reln (NM_011261.1,1608-1626).
ctgtggaaccgtagaatca

SEQ ID NO: 577742 - DNA, 19 bp, Mus musculus
  siRNA target sequence for Reln (NM_011261.1,1617-1635).
cgtagaatcaggactatca

SEQ ID NO: 577743 - DNA, 19 bp, Mus musculus
  siRNA target sequence for Reln (NM_011261.1,1674-1692).
cccctacatggatacaact

SEQ ID NO: 577744 - DNA, 19 bp, Mus musculus
  siRNA target sequence for Reln (NM_011261.1,1705-1723).
ctgaggttctacttcgtta

SEQ ID NO: 577745 - DNA, 19 bp, Mus musculus
  siRNA target sequence for Reln (NM_011261.1,1719-1737).
cgttatgggaggaatctgt

SEQ ID NO: 577746 - DNA, 19 bp, Mus musculus
  siRNA target sequence for Reln (NM_011261.1,1753-1771).
catgaaaacgatatcatct

SEQ ID NO: 577747 - DNA, 19 bp, Mus musculus
  siRNA target sequence for Reln (NM_011261.1,1756-1774).
gaaaacgatatcatcttat

SEQ ID NO: 577748 - DNA, 19 bp, Mus musculus
  siRNA target sequence for Reln (NM_011261.1,1761-1779).
cgatatcatcttatatgca

SEQ ID NO: 577749 - DNA, 19 bp, Mus musculus
  siRNA target sequence for Reln (NM_011261.1,1762-1780).
gatatcatcttatatgcaa

SEQ ID NO: 577750 - DNA, 19 bp, Mus musculus
  siRNA target sequence for Reln (NM_011261.1,1808-1826).
cactggacactcttaccta

SEQ ID NO: 577751 - DNA, 19 bp, Mus musculus
  siRNA target sequence for Reln (NM_011261.1,1824-1842).
ctattcttcctataaggtt

SEQ ID NO: 577752 - DNA, 19 bp, Mus musculus
  siRNA target sequence for Reln (NM_011261.1,1860-1878).
ggtcatcaaccctgaactt

SEQ ID NO: 577753 - DNA, 19 bp, Mus musculus
  siRNA target sequence for Reln (NM_011261.1,1886-1904).
ctgccaccaaattttgtct

SEQ ID NO: 577754 - DNA, 19 bp, Mus musculus
  siRNA target sequence for Reln (NM_011261.1,1914-1932).
gagccaccaagggtataat

SEQ ID NO: 577755 - DNA, 19 bp, Mus musculus
  siRNA target sequence for Reln (NM_011261.1,1924-1942).
gggtataatcggaatgtct

SEQ ID NO: 577756 - DNA, 19 bp, Mus musculus
  siRNA target sequence for Reln (NM_011261.1,1968-1986).
gcccgttctcccttcaaca

SEQ ID NO: 577757 - DNA, 19 bp, Mus musculus
  siRNA target sequence for Reln (NM_011261.1,1970-1988).
ccgttctcccttcaacaat

SEQ ID NO: 577758 - DNA, 19 bp, Mus musculus
  siRNA target sequence for Reln (NM_011261.1,1982-2000).
caacaatgtctcacatgat

SEQ ID NO: 577759 - DNA, 19 bp, Mus musculus
  siRNA target sequence for Reln (NM_011261.1,1993-2011).
cacatgatccagttttcta

SEQ ID NO: 577760 - DNA, 19 bp, Mus musculus
  siRNA target sequence for Reln (NM_011261.1,1998-2016).
gatccagttttctattaat

SEQ ID NO: 577761 - DNA, 19 bp, Mus musculus
  siRNA target sequence for Reln (NM_011261.1,2050-2068).
gtcagcttggagttttcta

SEQ ID NO: 577762 - DNA, 19 bp, Mus musculus
  siRNA target sequence for Reln (NM_011261.1,2058-2076).
ggagttttctactaaccat

SEQ ID NO: 577763 - DNA, 19 bp, Mus musculus
  siRNA target sequence for Reln (NM_011261.1,2193-2211).
gattcctctccctaatgca

SEQ ID NO: 577764 - DNA, 19 bp, Mus musculus
  siRNA target sequence for Reln (NM_011261.1,2232-2250).
gattcgctggagacaaaca

SEQ ID NO: 577765 - DNA, 19 bp, Mus musculus
  siRNA target sequence for Reln (NM_011261.1,2252-2270).
gcccaatcctgggaaatat

SEQ ID NO: 577766 - DNA, 19 bp, Mus musculus
  siRNA target sequence for Reln (NM_011261.1,2254-2272).
ccaatcctgggaaatatgt

SEQ ID NO: 577767 - DNA, 19 bp, Mus musculus
  siRNA target sequence for Reln (NM_011261.1,2271-2289).
gtgggcaattgataatgtt

SEQ ID NO: 577768 - DNA, 19 bp, Mus musculus
  siRNA target sequence for Reln (NM_011261.1,2296-2314).
ggtccttcgtgtctcaaat

SEQ ID NO: 577769 - DNA, 19 bp, Mus musculus
  siRNA target sequence for Reln (NM_011261.1,2355-2373).
gtgtgacccaggattttct

SEQ ID NO: 577770 - DNA, 19 bp, Mus musculus
  siRNA target sequence for Reln (NM_011261.1,2443-2461).
ctttcctcttaccataact

SEQ ID NO: 577771 - DNA, 19 bp, Mus musculus
  siRNA target sequence for Reln (NM_011261.1,2479-2497).
gctgaagtcagctttggtt

SEQ ID NO: 577772 - DNA, 19 bp, Mus musculus
  siRNA target sequence for Reln (NM_011261.1,2513-2531).
gtggtaaggctctggtttt

SEQ ID NO: 577773 - DNA, 19 bp, Mus musculus
  siRNA target sequence for Reln (NM_011261.1,2515-2533).
ggtaaggctctggttttca

SEQ ID NO: 577774 - DNA, 19 bp, Mus musculus
  siRNA target sequence for Reln (NM_011261.1,2516-2534).
gtaaggctctggttttcaa

SEQ ID NO: 577775 - DNA, 19 bp, Mus musculus
  siRNA target sequence for Reln (NM_011261.1,2542-2560).
gggaggcggcagctaatca

SEQ ID NO: 577776 - DNA, 19 bp, Mus musculus
  siRNA target sequence for Reln (NM_011261.1,2665-2683).
ggagtcctgctgcactatt

SEQ ID NO: 577777 - DNA, 19 bp, Mus musculus
  siRNA target sequence for Reln (NM_011261.1,2668-2686).
gtcctgctgcactattcat

SEQ ID NO: 577778 - DNA, 19 bp, Mus musculus
  siRNA target sequence for Reln (NM_011261.1,2691-2709).
caacgggataacatggaaa

SEQ ID NO: 577779 - DNA, 19 bp, Mus musculus
  siRNA target sequence for Reln (NM_011261.1,2736-2754).
ctaccacgagcccagaata

SEQ ID NO: 577780 - DNA, 19 bp, Mus musculus
  siRNA target sequence for Reln (NM_011261.1,2740-2758).
cacgagcccagaataatct

SEQ ID NO: 577781 - DNA, 19 bp, Mus musculus
  siRNA target sequence for Reln (NM_011261.1,2742-2760).
cgagcccagaataatctct

SEQ ID NO: 577782 - DNA, 19 bp, Mus musculus
  siRNA target sequence for Reln (NM_011261.1,2940-2958).
ctaccttggcaatgttcaa

SEQ ID NO: 577783 - DNA, 19 bp, Mus musculus
  siRNA target sequence for Reln (NM_011261.1,3046-3064).
cagatcggagcatcctata

SEQ ID NO: 577784 - DNA, 19 bp, Mus musculus
  siRNA target sequence for Reln (NM_011261.1,3051-3069).
cggagcatcctatatgatt

SEQ ID NO: 577785 - DNA, 19 bp, Mus musculus
  siRNA target sequence for Reln (NM_011261.1,3145-3163).
gccaaccacggccttacat

SEQ ID NO: 577786 - DNA, 19 bp, Mus musculus
  siRNA target sequence for Reln (NM_011261.1,3313-3331).
cgttggagtcagagctatt

SEQ ID NO: 577787 - DNA, 19 bp, Mus musculus
  siRNA target sequence for Reln (NM_011261.1,3318-3336).
gagtcagagctattacaca

SEQ ID NO: 577788 - DNA, 19 bp, Mus musculus
  siRNA target sequence for Reln (NM_011261.1,3352-3370).
gctttagacaacatttaca

SEQ ID NO: 577789 - DNA, 19 bp, Mus musculus
  siRNA target sequence for Reln (NM_011261.1,3442-3460).
ggataccagggcactgaat

SEQ ID NO: 577790 - DNA, 19 bp, Mus musculus
  siRNA target sequence for Reln (NM_011261.1,3478-3496).
cttccttccacgattatgt

SEQ ID NO: 577791 - DNA, 19 bp, Mus musculus
  siRNA target sequence for Reln (NM_011261.1,3485-3503).
ccacgattatgtcagattt

SEQ ID NO: 577792 - DNA, 19 bp, Mus musculus
  siRNA target sequence for Reln (NM_011261.1,3486-3504).
cacgattatgtcagatttt

SEQ ID NO: 577793 - DNA, 19 bp, Mus musculus
  siRNA target sequence for Reln (NM_011261.1,3488-3506).
cgattatgtcagattttga

SEQ ID NO: 577794 - DNA, 19 bp, Mus musculus
  siRNA target sequence for Reln (NM_011261.1,3739-3757).
ggcattctgctccagtata

SEQ ID NO: 577795 - DNA, 19 bp, Mus musculus
  siRNA target sequence for Reln (NM_011261.1,3787-3805).
ctggcagagatgtacttct

SEQ ID NO: 577796 - DNA, 19 bp, Mus musculus
  siRNA target sequence for Reln (NM_011261.1,3915-3933).
ccagtgggccgttgatgat

SEQ ID NO: 577797 - DNA, 19 bp, Mus musculus
  siRNA target sequence for Reln (NM_011261.1,3916-3934).
cagtgggccgttgatgata

SEQ ID NO: 577798 - DNA, 19 bp, Mus musculus
  siRNA target sequence for Reln (NM_011261.1,3920-3938).
gggccgttgatgatatcat

SEQ ID NO: 577799 - DNA, 19 bp, Mus musculus
  siRNA target sequence for Reln (NM_011261.1,3923-3941).
ccgttgatgatatcatcat

SEQ ID NO: 577800 - DNA, 19 bp, Mus musculus
  siRNA target sequence for Reln (NM_011261.1,3924-3942).
cgttgatgatatcatcatt

SEQ ID NO: 577801 - DNA, 19 bp, Mus musculus
  siRNA target sequence for Reln (NM_011261.1,3971-3989).
cagttgtcaacccaacttt

SEQ ID NO: 577802 - DNA, 19 bp, Mus musculus
  siRNA target sequence for Reln (NM_011261.1,3983-4001).
caactttgccccagaactt

SEQ ID NO: 577803 - DNA, 19 bp, Mus musculus
  siRNA target sequence for Reln (NM_011261.1,4006-4024).
gagaagccagctttcgatt

SEQ ID NO: 577804 - DNA, 19 bp, Mus musculus
  siRNA target sequence for Reln (NM_011261.1,4050-4068).
gctaatgttggccaatgaa

SEQ ID NO: 577805 - DNA, 19 bp, Mus musculus
  siRNA target sequence for Reln (NM_011261.1,4166-4184).
ccctgaaacctggatatgt

SEQ ID NO: 577806 - DNA, 19 bp, Mus musculus
  siRNA target sequence for Reln (NM_011261.1,4186-4204).
ctgcagttcaagctaaaca

SEQ ID NO: 577807 - DNA, 19 bp, Mus musculus
  siRNA target sequence for Reln (NM_011261.1,4237-4255).
ccggttctcctgcagtatt

SEQ ID NO: 577808 - DNA, 19 bp, Mus musculus
  siRNA target sequence for Reln (NM_011261.1,4332-4350).
gaactccagggaattgagt

SEQ ID NO: 577809 - DNA, 19 bp, Mus musculus
  siRNA target sequence for Reln (NM_011261.1,4347-4365).
gagtgagcctactgtctat

SEQ ID NO: 577810 - DNA, 19 bp, Mus musculus
  siRNA target sequence for Reln (NM_011261.1,4349-4367).
gtgagcctactgtctatta

SEQ ID NO: 577811 - DNA, 19 bp, Mus musculus
  siRNA target sequence for Reln (NM_011261.1,4351-4369).
gagcctactgtctattata

SEQ ID NO: 577812 - DNA, 19 bp, Mus musculus
  siRNA target sequence for Reln (NM_011261.1,4491-4509).
cttagatggggtgtacata

SEQ ID NO: 577813 - DNA, 19 bp, Mus musculus
  siRNA target sequence for Reln (NM_011261.1,4550-4568).
gcatctcgggggtgtgttt

SEQ ID NO: 577814 - DNA, 19 bp, Mus musculus
  siRNA target sequence for Reln (NM_011261.1,4551-4569).
catctcgggggtgtgtttt

SEQ ID NO: 577815 - DNA, 19 bp, Mus musculus
  siRNA target sequence for Reln (NM_011261.1,4556-4574).
cgggggtgtgtttttgtga

SEQ ID NO: 577816 - DNA, 19 bp, Mus musculus
  siRNA target sequence for Reln (NM_011261.1,4597-4615).
ggaacctgtgtgtcaaaca

SEQ ID NO: 577817 - DNA, 19 bp, Mus musculus
  siRNA target sequence for Reln (NM_011261.1,4703-4721).
gctgtggcaccctcaatga

SEQ ID NO: 577818 - DNA, 19 bp, Mus musculus
  siRNA target sequence for Reln (NM_011261.1,4723-4741).
ggcaggtccctctacttta

SEQ ID NO: 577819 - DNA, 19 bp, Mus musculus
  siRNA target sequence for Reln (NM_011261.1,4724-4742).
gcaggtccctctactttaa

SEQ ID NO: 577820 - DNA, 19 bp, Mus musculus
  siRNA target sequence for Reln (NM_011261.1,4725-4743).
caggtccctctactttaat

SEQ ID NO: 577821 - DNA, 19 bp, Mus musculus
  siRNA target sequence for Reln (NM_011261.1,4777-4795).
ctggacaccaggaatatca

SEQ ID NO: 577822 - DNA, 19 bp, Mus musculus
  siRNA target sequence for Reln (NM_011261.1,4872-4890).
ggggcttgttgttcagtat

SEQ ID NO: 577823 - DNA, 19 bp, Mus musculus
  siRNA target sequence for Reln (NM_011261.1,5077-5095).
gtgaatgacagctctcaaa

SEQ ID NO: 577824 - DNA, 19 bp, Mus musculus
  siRNA target sequence for Reln (NM_011261.1,5092-5110).
caaactggatttcaagata

SEQ ID NO: 577825 - DNA, 19 bp, Mus musculus
  siRNA target sequence for Reln (NM_011261.1,5096-5114).
ctggatttcaagataaatt

SEQ ID NO: 577826 - DNA, 19 bp, Mus musculus
  siRNA target sequence for Reln (NM_011261.1,5134-5152).
caagccaactggtatcgaa

SEQ ID NO: 577827 - DNA, 19 bp, Mus musculus
  siRNA target sequence for Reln (NM_011261.1,5159-5177).
gaggccaagttgatatcga

SEQ ID NO: 577828 - DNA, 19 bp, Mus musculus
  siRNA target sequence for Reln (NM_011261.1,5200-5218).
cttatattcactgaaaaca

SEQ ID NO: 577829 - DNA, 19 bp, Mus musculus
  siRNA target sequence for Reln (NM_011261.1,5422-5440).
gagagttcaacttacacat

SEQ ID NO: 577830 - DNA, 19 bp, Mus musculus
  siRNA target sequence for Reln (NM_011261.1,5481-5499).
gccactcgccaccaattct

SEQ ID NO: 577831 - DNA, 19 bp, Mus musculus
  siRNA target sequence for Reln (NM_011261.1,5500-5518).
cccaggactcggttcagat

SEQ ID NO: 577832 - DNA, 19 bp, Mus musculus
  siRNA target sequence for Reln (NM_011261.1,5505-5523).
gactcggttcagatggatt

SEQ ID NO: 577833 - DNA, 19 bp, Mus musculus
  siRNA target sequence for Reln (NM_011261.1,5548-5566).
gattcctgggctattgata

SEQ ID NO: 577834 - DNA, 19 bp, Mus musculus
  siRNA target sequence for Reln (NM_011261.1,5555-5573).
gggctattgataatgtcat

SEQ ID NO: 577835 - DNA, 19 bp, Mus musculus
  siRNA target sequence for Reln (NM_011261.1,5688-5706).
ctccattctaaaagatgat

SEQ ID NO: 577836 - DNA, 19 bp, Mus musculus
  siRNA target sequence for Reln (NM_011261.1,5769-5787).
gaatggcgaaaccatcaaa

SEQ ID NO: 577837 - DNA, 19 bp, Mus musculus
  siRNA target sequence for Reln (NM_011261.1,5781-5799).
catcaaatccggaacatgt

SEQ ID NO: 577838 - DNA, 19 bp, Mus musculus
  siRNA target sequence for Reln (NM_011261.1,5790-5808).
cggaacatgtctgatcttt

SEQ ID NO: 577839 - DNA, 19 bp, Mus musculus
  siRNA target sequence for Reln (NM_011261.1,5791-5809).
ggaacatgtctgatcttta

SEQ ID NO: 577840 - DNA, 19 bp, Mus musculus
  siRNA target sequence for Reln (NM_011261.1,5821-5839).
ctaagaatgcttatttcca

SEQ ID NO: 577841 - DNA, 19 bp, Mus musculus
  siRNA target sequence for Reln (NM_011261.1,5872-5890).
cagttctctctccgattta

SEQ ID NO: 577842 - DNA, 19 bp, Mus musculus
  siRNA target sequence for Reln (NM_011261.1,5874-5892).
gttctctctccgatttata

SEQ ID NO: 577843 - DNA, 19 bp, Mus musculus
  siRNA target sequence for Reln (NM_011261.1,5884-5902).
cgatttatagcgaaaggta

SEQ ID NO: 577844 - DNA, 19 bp, Mus musculus
  siRNA target sequence for Reln (NM_011261.1,5965-5983).
ctgatggatgaattctact

SEQ ID NO: 577845 - DNA, 19 bp, Mus musculus
  siRNA target sequence for Reln (NM_011261.1,5993-6011).
cgaccagcatacttttcat

SEQ ID NO: 577846 - DNA, 19 bp, Mus musculus
  siRNA target sequence for Reln (NM_011261.1,5997-6015).
cagcatacttttcatcaat

SEQ ID NO: 577847 - DNA, 19 bp, Mus musculus
  siRNA target sequence for Reln (NM_011261.1,6000-6018).
catacttttcatcaatgtt

SEQ ID NO: 577848 - DNA, 19 bp, Mus musculus
  siRNA target sequence for Reln (NM_011261.1,6026-6044).
catacggtgcccaaaccaa

SEQ ID NO: 577849 - DNA, 19 bp, Mus musculus
  siRNA target sequence for Reln (NM_011261.1,6037-6055).
caaaccaacgctacaagat

SEQ ID NO: 577850 - DNA, 19 bp, Mus musculus
  siRNA target sequence for Reln (NM_011261.1,6042-6060).
caacgctacaagattcaga

SEQ ID NO: 577851 - DNA, 19 bp, Mus musculus
  siRNA target sequence for Reln (NM_011261.1,6061-6079).
ctctggcaaccgtacaata

SEQ ID NO: 577852 - DNA, 19 bp, Mus musculus
  siRNA target sequence for Reln (NM_011261.1,6063-6081).
ctggcaaccgtacaataat

SEQ ID NO: 577853 - DNA, 19 bp, Mus musculus
  siRNA target sequence for Reln (NM_011261.1,6066-6084).
gcaaccgtacaataatggt

SEQ ID NO: 577854 - DNA, 19 bp, Mus musculus
  siRNA target sequence for Reln (NM_011261.1,6067-6085).
caaccgtacaataatggta

SEQ ID NO: 577855 - DNA, 19 bp, Mus musculus
  siRNA target sequence for Reln (NM_011261.1,6102-6120).
gatcattgatgactttatt

SEQ ID NO: 577856 - DNA, 19 bp, Mus musculus
  siRNA target sequence for Reln (NM_011261.1,6180-6198).
cagggaagacaattggttt

SEQ ID NO: 577857 - DNA, 19 bp, Mus musculus
  siRNA target sequence for Reln (NM_011261.1,6209-6227).
gtggtaatatcggacttta

SEQ ID NO: 577858 - DNA, 19 bp, Mus musculus
  siRNA target sequence for Reln (NM_011261.1,6211-6229).
ggtaatatcggactttact

SEQ ID NO: 577859 - DNA, 19 bp, Mus musculus
  siRNA target sequence for Reln (NM_011261.1,6273-6291).
ggtgtttgtttcaaacgaa

SEQ ID NO: 577860 - DNA, 19 bp, Mus musculus
  siRNA target sequence for Reln (NM_011261.1,6295-6313).
ggagaacactccattacca

SEQ ID NO: 577861 - DNA, 19 bp, Mus musculus
  siRNA target sequence for Reln (NM_011261.1,6311-6329).
ccacacgagacctaagtgt

SEQ ID NO: 577862 - DNA, 19 bp, Mus musculus
  siRNA target sequence for Reln (NM_011261.1,6330-6348).
gaacgagaacaccatcatt

SEQ ID NO: 577863 - DNA, 19 bp, Mus musculus
  siRNA target sequence for Reln (NM_011261.1,6475-6493).
ctcgtcagctccttatgct

SEQ ID NO: 577864 - DNA, 19 bp, Mus musculus
  siRNA target sequence for Reln (NM_011261.1,6699-6717).
gcacgggagctgcatcaat

SEQ ID NO: 577865 - DNA, 19 bp, Mus musculus
  siRNA target sequence for Reln (NM_011261.1,6719-6737).
gaaccaagtgtatatgtga

SEQ ID NO: 577866 - DNA, 19 bp, Mus musculus
  siRNA target sequence for Reln (NM_011261.1,6747-6765).
ctctgggccaacctgtaaa

SEQ ID NO: 577867 - DNA, 19 bp, Mus musculus
  siRNA target sequence for Reln (NM_011261.1,6749-6767).
ctgggccaacctgtaaaat

SEQ ID NO: 577868 - DNA, 19 bp, Mus musculus
  siRNA target sequence for Reln (NM_011261.1,6816-6834).
ggaatccgatcgattctta

SEQ ID NO: 577869 - DNA, 19 bp, Mus musculus
  siRNA target sequence for Reln (NM_011261.1,6821-6839).
ccgatcgattcttactgat

SEQ ID NO: 577870 - DNA, 19 bp, Mus musculus
  siRNA target sequence for Reln (NM_011261.1,6849-6867).
gaagccgtctcgtaagtgt

SEQ ID NO: 577871 - DNA, 19 bp, Mus musculus
  siRNA target sequence for Reln (NM_011261.1,6859-6877).
cgtaagtgtggcatccttt

SEQ ID NO: 577872 - DNA, 19 bp, Mus musculus
  siRNA target sequence for Reln (NM_011261.1,6910-6928).
ggcttgcgcatgctagtaa

SEQ ID NO: 577873 - DNA, 19 bp, Mus musculus
  siRNA target sequence for Reln (NM_011261.1,6912-6930).
cttgcgcatgctagtaaca

SEQ ID NO: 577874 - DNA, 19 bp, Mus musculus
  siRNA target sequence for Reln (NM_011261.1,6933-6951).
ggacctggatttatcacat

SEQ ID NO: 577875 - DNA, 19 bp, Mus musculus
  siRNA target sequence for Reln (NM_011261.1,7095-7113).
caatgtgggcaggtacatt

SEQ ID NO: 577876 - DNA, 19 bp, Mus musculus
  siRNA target sequence for Reln (NM_011261.1,7161-7179).
ctggtggcagccatctgaa

SEQ ID NO: 577877 - DNA, 19 bp, Mus musculus
  siRNA target sequence for Reln (NM_011261.1,7204-7222).
gtgatcgaccagattctta

SEQ ID NO: 577878 - DNA, 19 bp, Mus musculus
  siRNA target sequence for Reln (NM_011261.1,7206-7224).
gatcgaccagattcttatt

SEQ ID NO: 577879 - DNA, 19 bp, Mus musculus
  siRNA target sequence for Reln (NM_011261.1,7241-7259).
gtaatacagtcttagaaga

SEQ ID NO: 577880 - DNA, 19 bp, Mus musculus
  siRNA target sequence for Reln (NM_011261.1,7251-7269).
cttagaagatgatttctca

SEQ ID NO: 577881 - DNA, 19 bp, Mus musculus
  siRNA target sequence for Reln (NM_011261.1,7336-7354).
ggcgatgccctggtcttta

SEQ ID NO: 577882 - DNA, 19 bp, Mus musculus
  siRNA target sequence for Reln (NM_011261.1,7337-7355).
gcgatgccctggtctttat

SEQ ID NO: 577883 - DNA, 19 bp, Mus musculus
  siRNA target sequence for Reln (NM_011261.1,7401-7419).
gaatgaggactcattccta

SEQ ID NO: 577884 - DNA, 19 bp, Mus musculus
  siRNA target sequence for Reln (NM_011261.1,7407-7425).
ggactcattcctacagata

SEQ ID NO: 577885 - DNA, 19 bp, Mus musculus
  siRNA target sequence for Reln (NM_011261.1,7412-7430).
cattcctacagatagactt

SEQ ID NO: 577886 - DNA, 19 bp, Mus musculus
  siRNA target sequence for Reln (NM_011261.1,7526-7544).
gcctgcctaccaatgttga

SEQ ID NO: 577887 - DNA, 19 bp, Mus musculus
  siRNA target sequence for Reln (NM_011261.1,7569-7587).
gatcctggtgtcagatact

SEQ ID NO: 577888 - DNA, 19 bp, Mus musculus
  siRNA target sequence for Reln (NM_011261.1,7576-7594).
gtgtcagatactttcaaca

SEQ ID NO: 577889 - DNA, 19 bp, Mus musculus
  siRNA target sequence for Reln (NM_011261.1,7593-7611).
caagtggaccagaatcact

SEQ ID NO: 577890 - DNA, 19 bp, Mus musculus
  siRNA target sequence for Reln (NM_011261.1,7689-7707).
gacctgggcaatagataat

SEQ ID NO: 577891 - DNA, 19 bp, Mus musculus
  siRNA target sequence for Reln (NM_011261.1,7718-7736).
gggatggttgcctagacat

SEQ ID NO: 577892 - DNA, 19 bp, Mus musculus
  siRNA target sequence for Reln (NM_011261.1,7952-7970).
ggggctgcagccgattgtt

SEQ ID NO: 577893 - DNA, 19 bp, Mus musculus
  siRNA target sequence for Reln (NM_011261.1,7953-7971).
gggctgcagccgattgtta

SEQ ID NO: 577894 - DNA, 19 bp, Mus musculus
  siRNA target sequence for Reln (NM_011261.1,7955-7973).
gctgcagccgattgttagt

SEQ ID NO: 577895 - DNA, 19 bp, Mus musculus
  siRNA target sequence for Reln (NM_011261.1,7989-8007).
cctcaccaatgctgagttt

SEQ ID NO: 577896 - DNA, 19 bp, Mus musculus
  siRNA target sequence for Reln (NM_011261.1,8205-8223).
gtggcagccacgacatgat

SEQ ID NO: 577897 - DNA, 19 bp, Mus musculus
  siRNA target sequence for Reln (NM_011261.1,8224-8242).
ggccttgaccagaatgact

SEQ ID NO: 577898 - DNA, 19 bp, Mus musculus
  siRNA target sequence for Reln (NM_011261.1,8356-8374).
cctgttggaagaattgctt

SEQ ID NO: 577899 - DNA, 19 bp, Mus musculus
  siRNA target sequence for Reln (NM_011261.1,8431-8449).
gactgtacagtggaaagat

SEQ ID NO: 577900 - DNA, 19 bp, Mus musculus
  siRNA target sequence for Reln (NM_011261.1,8602-8620).
caaattcacgtgcagtttt

SEQ ID NO: 577901 - DNA, 19 bp, Mus musculus
  siRNA target sequence for Reln (NM_011261.1,8613-8631).
gcagttttctactgacttt

SEQ ID NO: 577902 - DNA, 19 bp, Mus musculus
  siRNA target sequence for Reln (NM_011261.1,8632-8650).
ggcgtgagctggagttatt

SEQ ID NO: 577903 - DNA, 19 bp, Mus musculus
  siRNA target sequence for Reln (NM_011261.1,8634-8652).
cgtgagctggagttattta

SEQ ID NO: 577904 - DNA, 19 bp, Mus musculus
  siRNA target sequence for Reln (NM_011261.1,8699-8717).
ctcaaccgtctgtgttctt

SEQ ID NO: 577905 - DNA, 19 bp, Mus musculus
  siRNA target sequence for Reln (NM_011261.1,8719-8737).
ccaactgaagggtggaaaa

SEQ ID NO: 577906 - DNA, 19 bp, Mus musculus
  siRNA target sequence for Reln (NM_011261.1,8723-8741).
ctgaagggtggaaaaggat

SEQ ID NO: 577907 - DNA, 19 bp, Mus musculus
  siRNA target sequence for Reln (NM_011261.1,8768-8786).
cggggaatcctgtaagatt

SEQ ID NO: 577908 - DNA, 19 bp, Mus musculus
  siRNA target sequence for Reln (NM_011261.1,8769-8787).
ggggaatcctgtaagattt

SEQ ID NO: 577909 - DNA, 19 bp, Mus musculus
  siRNA target sequence for Reln (NM_011261.1,8812-8830).
gtgcagtgggcaattgaca

SEQ ID NO: 577910 - DNA, 19 bp, Mus musculus
  siRNA target sequence for Reln (NM_011261.1,8874-8892).
cggagactgcctaaaggaa

SEQ ID NO: 577911 - DNA, 19 bp, Mus musculus
  siRNA target sequence for Reln (NM_011261.1,8882-8900).
gcctaaaggaacagtgtat

SEQ ID NO: 577912 - DNA, 19 bp, Mus musculus
  siRNA target sequence for Reln (NM_011261.1,8920-8938).
gggccaaactgctacttaa

SEQ ID NO: 577913 - DNA, 19 bp, Mus musculus
  siRNA target sequence for Reln (NM_011261.1,8922-8940).
gccaaactgctacttaact

SEQ ID NO: 577914 - DNA, 19 bp, Mus musculus
  siRNA target sequence for Reln (NM_011261.1,8982-9000).
ggagatcaagcctgactta

SEQ ID NO: 577915 - DNA, 19 bp, Mus musculus
  siRNA target sequence for Reln (NM_011261.1,8983-9001).
gagatcaagcctgacttat

SEQ ID NO: 577916 - DNA, 19 bp, Mus musculus
  siRNA target sequence for Reln (NM_011261.1,9013-9031).
gaaggcggaagcacttgta

SEQ ID NO: 577917 - DNA, 19 bp, Mus musculus
  siRNA target sequence for Reln (NM_011261.1,9051-9069).
cgagaacactgcactctat

SEQ ID NO: 577918 - DNA, 19 bp, Mus musculus
  siRNA target sequence for Reln (NM_011261.1,9081-9099).
cactgtgagacaagctatt

SEQ ID NO: 577919 - DNA, 19 bp, Mus musculus
  siRNA target sequence for Reln (NM_011261.1,9087-9105).
gagacaagctattactcaa

SEQ ID NO: 577920 - DNA, 19 bp, Mus musculus
  siRNA target sequence for Reln (NM_011261.1,9112-9130).
gatctcagaggtgcaaaat

SEQ ID NO: 577921 - DNA, 19 bp, Mus musculus
  siRNA target sequence for Reln (NM_011261.1,9149-9167).
gtatcggcagtgagaacaa

SEQ ID NO: 577922 - DNA, 19 bp, Mus musculus
  siRNA target sequence for Reln (NM_011261.1,9160-9178).
gagaacaacatgacatctt

SEQ ID NO: 577923 - DNA, 19 bp, Mus musculus
  siRNA target sequence for Reln (NM_011261.1,9284-9302).
ctgtgaggcacgactacat

SEQ ID NO: 577924 - DNA, 19 bp, Mus musculus
  siRNA target sequence for Reln (NM_011261.1,9504-9522).
gagtttttaccctaatgca

SEQ ID NO: 577925 - DNA, 19 bp, Mus musculus
  siRNA target sequence for Reln (NM_011261.1,9608-9626).
cctcccgagagctcattat

SEQ ID NO: 577926 - DNA, 19 bp, Mus musculus
  siRNA target sequence for Reln (NM_011261.1,9609-9627).
ctcccgagagctcattata

SEQ ID NO: 577927 - DNA, 19 bp, Mus musculus
  siRNA target sequence for Reln (NM_011261.1,9611-9629).
cccgagagctcattataca

SEQ ID NO: 577928 - DNA, 19 bp, Mus musculus
  siRNA target sequence for Reln (NM_011261.1,9631-9649).
ccaggatacatgatgcaat

SEQ ID NO: 577929 - DNA, 19 bp, Mus musculus
  siRNA target sequence for Reln (NM_011261.1,9635-9653).
gatacatgatgcaatttaa

SEQ ID NO: 577930 - DNA, 19 bp, Mus musculus
  siRNA target sequence for Reln (NM_011261.1,9808-9826).
catgaagccaccatttata

SEQ ID NO: 577931 - DNA, 19 bp, Mus musculus
  siRNA target sequence for Reln (NM_011261.1,10021-10039).
gtctgcatctgcgatgaaa

SEQ ID NO: 577932 - DNA, 19 bp, Mus musculus
  siRNA target sequence for Reln (NM_011261.1,10070-10088).
gtcacgagcttcctagtta

SEQ ID NO: 577933 - DNA, 19 bp, Mus musculus
  siRNA target sequence for Reln (NM_011261.1,10072-10090).
cacgagcttcctagttaca

SEQ ID NO: 577934 - DNA, 19 bp, Mus musculus
  siRNA target sequence for Reln (NM_011261.1,10074-10092).
cgagcttcctagttacatt

SEQ ID NO: 577935 - DNA, 19 bp, Mus musculus
  siRNA target sequence for Reln (NM_011261.1,10075-10093).
gagcttcctagttacatta

SEQ ID NO: 577936 - DNA, 19 bp, Mus musculus
  siRNA target sequence for Reln (NM_011261.1,10081-10099).
cctagttacattaaagata

SEQ ID NO: 577937 - DNA, 19 bp, Mus musculus
  siRNA target sequence for Reln (NM_011261.1,10195-10213).
ggagattcgctctacttta

SEQ ID NO: 577938 - DNA, 19 bp, Mus musculus
  siRNA target sequence for Reln (NM_011261.1,10196-10214).
gagattcgctctactttaa

SEQ ID NO: 577939 - DNA, 19 bp, Mus musculus
  siRNA target sequence for Reln (NM_011261.1,10254-10272).
cctcactcgagcaagcaaa

SEQ ID NO: 577940 - DNA, 19 bp, Mus musculus
  siRNA target sequence for Reln (NM_011261.1,10255-10273).
ctcactcgagcaagcaaaa

SEQ ID NO: 577941 - DNA, 19 bp, Mus musculus
  siRNA target sequence for Reln (NM_011261.1,10257-10275).
cactcgagcaagcaaaatt

SEQ ID NO: 577942 - DNA, 19 bp, Mus musculus
  siRNA target sequence for Reln (NM_011261.1,10259-10277).
ctcgagcaagcaaaattat

SEQ ID NO: 577943 - DNA, 19 bp, Mus musculus
  siRNA target sequence for Reln (NM_011261.1,10439-10457).
ctcagcgggtgtcttacaa

SEQ ID NO: 577944 - DNA, 19 bp, Mus musculus
  siRNA target sequence for Reln (NM_011261.1,10464-10482).
cctggaagctcggatgaaa

SEQ ID NO: 577945 - DNA, 19 bp, Mus musculus
  siRNA target sequence for Reln (NM_011261.1,10515-10533).
caatggaacaggtcatgat

SEQ ID NO: 577946 - DNA, 19 bp, Mus musculus
  siRNA target sequence for Reln (NM_011261.1,10519-10537).
ggaacaggtcatgatcaat

SEQ ID NO: 577947 - DNA, 19 bp, Mus musculus
  siRNA target sequence for Reln (NM_011261.1,10571-10589).
gcactcgcaaacaaaatta

SEQ ID NO: 577948 - DNA, 19 bp, Mus musculus
  siRNA target sequence for Reln (NM_011261.1,10574-10592).
ctcgcaaacaaaattacat

SEQ ID NO: 577949 - DNA, 19 bp, Mus musculus
  siRNA target sequence for Reln (NM_011261.1,10576-10594).
cgcaaacaaaattacatga

SEQ ID NO: 577950 - DNA, 19 bp, Mus musculus
  siRNA target sequence for Reln (NM_011261.1,10616-10634).
ggctcaggcacttctacaa

SEQ ID NO: 577951 - DNA, 19 bp, Mus musculus
  siRNA target sequence for Reln (NM_011261.1,10618-10636).
ctcaggcacttctacaaca

SEQ ID NO: 577952 - DNA, 19 bp, Mus musculus
  siRNA target sequence for Wdr17 (NM_028220.2,218-236).
ccatggaacaaagatgtat

SEQ ID NO: 577953 - DNA, 19 bp, Mus musculus
  siRNA target sequence for Wdr17 (NM_028220.2,270-288).
caactctggccatctacat

SEQ ID NO: 577954 - DNA, 19 bp, Mus musculus
  siRNA target sequence for Wdr17 (NM_028220.2,273-291).
ctctggccatctacatata

SEQ ID NO: 577955 - DNA, 19 bp, Mus musculus
  siRNA target sequence for Wdr17 (NM_028220.2,293-311).
cagctggatcaccgttata

SEQ ID NO: 577956 - DNA, 19 bp, Mus musculus
  siRNA target sequence for Wdr17 (NM_028220.2,295-313).
gctggatcaccgttataat

SEQ ID NO: 577957 - DNA, 19 bp, Mus musculus
  siRNA target sequence for Wdr17 (NM_028220.2,298-316).
ggatcaccgttataatgaa

SEQ ID NO: 577958 - DNA, 19 bp, Mus musculus
  siRNA target sequence for Wdr17 (NM_028220.2,302-320).
caccgttataatgaattca

SEQ ID NO: 577959 - DNA, 19 bp, Mus musculus
  siRNA target sequence for Wdr17 (NM_028220.2,304-322).
ccgttataatgaattcaaa

SEQ ID NO: 577960 - DNA, 19 bp, Mus musculus
  siRNA target sequence for Wdr17 (NM_028220.2,329-347).
gcaattatgtcggaacata

SEQ ID NO: 577961 - DNA, 19 bp, Mus musculus
  siRNA target sequence for Wdr17 (NM_028220.2,330-348).
caattatgtcggaacataa

SEQ ID NO: 577962 - DNA, 19 bp, Mus musculus
  siRNA target sequence for Wdr17 (NM_028220.2,402-420).
gcagcagtaccgataactt

SEQ ID NO: 577963 - DNA, 19 bp, Mus musculus
  siRNA target sequence for Wdr17 (NM_028220.2,403-421).
cagcagtaccgataactta

SEQ ID NO: 577964 - DNA, 19 bp, Mus musculus
  siRNA target sequence for Wdr17 (NM_028220.2,405-423).
gcagtaccgataacttagt

SEQ ID NO: 577965 - DNA, 19 bp, Mus musculus
  siRNA target sequence for Wdr17 (NM_028220.2,408-426).
gtaccgataacttagtgat

SEQ ID NO: 577966 - DNA, 19 bp, Mus musculus
  siRNA target sequence for Wdr17 (NM_028220.2,411-429).
ccgataacttagtgatcat

SEQ ID NO: 577967 - DNA, 19 bp, Mus musculus
  siRNA target sequence for Wdr17 (NM_028220.2,412-430).
cgataacttagtgatcatt

SEQ ID NO: 577968 - DNA, 19 bp, Mus musculus
  siRNA target sequence for Wdr17 (NM_028220.2,432-450).
ggaacgtggctgagcaaaa

SEQ ID NO: 577969 - DNA, 19 bp, Mus musculus
  siRNA target sequence for Wdr17 (NM_028220.2,437-455).
gtggctgagcaaaaagtca

SEQ ID NO: 577970 - DNA, 19 bp, Mus musculus
  siRNA target sequence for Wdr17 (NM_028220.2,439-457).
ggctgagcaaaaagtcatt

SEQ ID NO: 577971 - DNA, 19 bp, Mus musculus
  siRNA target sequence for Wdr17 (NM_028220.2,458-476).
gctaaactcgacaacatca

SEQ ID NO: 577972 - DNA, 19 bp, Mus musculus
  siRNA target sequence for Wdr17 (NM_028220.2,459-477).
ctaaactcgacaacatcaa

SEQ ID NO: 577973 - DNA, 19 bp, Mus musculus
  siRNA target sequence for Wdr17 (NM_028220.2,502-520).
gtgctggaacacacatgat

SEQ ID NO: 577974 - DNA, 19 bp, Mus musculus
  siRNA target sequence for Wdr17 (NM_028220.2,639-657).
ggtggcacacccaaaagaa

SEQ ID NO: 577975 - DNA, 19 bp, Mus musculus
  siRNA target sequence for Wdr17 (NM_028220.2,640-658).
gtggcacacccaaaagaaa

SEQ ID NO: 577976 - DNA, 19 bp, Mus musculus
  siRNA target sequence for Wdr17 (NM_028220.2,677-695).
cacattgatggaagcatat

SEQ ID NO: 577977 - DNA, 19 bp, Mus musculus
  siRNA target sequence for Wdr17 (NM_028220.2,683-701).
gatggaagcatatcgattt

SEQ ID NO: 577978 - DNA, 19 bp, Mus musculus
  siRNA target sequence for Wdr17 (NM_028220.2,687-705).
gaagcatatcgatttttca

SEQ ID NO: 577979 - DNA, 19 bp, Mus musculus
  siRNA target sequence for Wdr17 (NM_028220.2,747-765).
cactgtccacagattatct

SEQ ID NO: 577980 - DNA, 19 bp, Mus musculus
  siRNA target sequence for Wdr17 (NM_028220.2,769-787).
ggtggctaatttgcatttt

SEQ ID NO: 577981 - DNA, 19 bp, Mus musculus
  siRNA target sequence for Wdr17 (NM_028220.2,772-790).
ggctaatttgcattttgga

SEQ ID NO: 577982 - DNA, 19 bp, Mus musculus
  siRNA target sequence for Wdr17 (NM_028220.2,794-812).
cgtcttctggactctgaat

SEQ ID NO: 577983 - DNA, 19 bp, Mus musculus
  siRNA target sequence for Wdr17 (NM_028220.2,822-840).
gcatcacaacgtttaatct

SEQ ID NO: 577984 - DNA, 19 bp, Mus musculus
  siRNA target sequence for Wdr17 (NM_028220.2,823-841).
catcacaacgtttaatctt

SEQ ID NO: 577985 - DNA, 19 bp, Mus musculus
  siRNA target sequence for Wdr17 (NM_028220.2,885-903).
gtgctccaggcatgtttat

SEQ ID NO: 577986 - DNA, 19 bp, Mus musculus
  siRNA target sequence for Wdr17 (NM_028220.2,887-905).
gctccaggcatgtttataa

SEQ ID NO: 577987 - DNA, 19 bp, Mus musculus
  siRNA target sequence for Wdr17 (NM_028220.2,925-943).
cgttttacgcatttggaat

SEQ ID NO: 577988 - DNA, 19 bp, Mus musculus
  siRNA target sequence for Wdr17 (NM_028220.2,948-966).
caagaacaacacctattga

SEQ ID NO: 577989 - DNA, 19 bp, Mus musculus
  siRNA target sequence for Wdr17 (NM_028220.2,951-969).
gaacaacacctattgataa

SEQ ID NO: 577990 - DNA, 19 bp, Mus musculus
  siRNA target sequence for Wdr17 (NM_028220.2,957-975).
cacctattgataattttaa

SEQ ID NO: 577991 - DNA, 19 bp, Mus musculus
  siRNA target sequence for Wdr17 (NM_028220.2,990-1008).
gatttcactgctttcatgt

SEQ ID NO: 577992 - DNA, 19 bp, Mus musculus
  siRNA target sequence for Wdr17 (NM_028220.2,1039-1057).
cgtccagtctccaaacaaa

SEQ ID NO: 577993 - DNA, 19 bp, Mus musculus
  siRNA target sequence for Wdr17 (NM_028220.2,1096-1114).
cccaaatttgacacagaat

SEQ ID NO: 577994 - DNA, 19 bp, Mus musculus
  siRNA target sequence for Wdr17 (NM_028220.2,1098-1116).
caaatttgacacagaatca

SEQ ID NO: 577995 - DNA, 19 bp, Mus musculus
  siRNA target sequence for Wdr17 (NM_028220.2,1167-1185).
gagttggactttatgacat

SEQ ID NO: 577996 - DNA, 19 bp, Mus musculus
  siRNA target sequence for Wdr17 (NM_028220.2,1219-1237).
gggacacgtggaaactata

SEQ ID NO: 577997 - DNA, 19 bp, Mus musculus
  siRNA target sequence for Wdr17 (NM_028220.2,1220-1238).
ggacacgtggaaactatat

SEQ ID NO: 577998 - DNA, 19 bp, Mus musculus
  siRNA target sequence for Wdr17 (NM_028220.2,1221-1239).
gacacgtggaaactatatt

SEQ ID NO: 577999 - DNA, 19 bp, Mus musculus
  siRNA target sequence for Wdr17 (NM_028220.2,1233-1251).
ctatatttgactgcaaatt

SEQ ID NO: 578000 - DNA, 19 bp, Mus musculus
  siRNA target sequence for Wdr17 (NM_028220.2,1252-1270).
caaacctgatgatccaaat

SEQ ID NO: 578001 - DNA, 19 bp, Mus musculus
  siRNA target sequence for Wdr17 (NM_028220.2,1262-1280).
gatccaaatgttttagcaa

SEQ ID NO: 578002 - DNA, 19 bp, Mus musculus
  siRNA target sequence for Wdr17 (NM_028220.2,1287-1305).
catttgatggcactataaa

SEQ ID NO: 578003 - DNA, 19 bp, Mus musculus
  siRNA target sequence for Wdr17 (NM_028220.2,1312-1330).
ggatataaacacattaaca

SEQ ID NO: 578004 - DNA, 19 bp, Mus musculus
  siRNA target sequence for Wdr17 (NM_028220.2,1354-1372).
cgaaggggtcatttttgct

SEQ ID NO: 578005 - DNA, 19 bp, Mus musculus
  siRNA target sequence for Wdr17 (NM_028220.2,1380-1398).
gggctccaggtgatttaaa

SEQ ID NO: 578006 - DNA, 19 bp, Mus musculus
  siRNA target sequence for Wdr17 (NM_028220.2,1381-1399).
ggctccaggtgatttaaat

SEQ ID NO: 578007 - DNA, 19 bp, Mus musculus
  siRNA target sequence for Wdr17 (NM_028220.2,1382-1400).
gctccaggtgatttaaatt

SEQ ID NO: 578008 - DNA, 19 bp, Mus musculus
  siRNA target sequence for Wdr17 (NM_028220.2,1385-1403).
ccaggtgatttaaattgca

SEQ ID NO: 578009 - DNA, 19 bp, Mus musculus
  siRNA target sequence for Wdr17 (NM_028220.2,1420-1438).
cagaaatggcgcttttatt

SEQ ID NO: 578010 - DNA, 19 bp, Mus musculus
  siRNA target sequence for Wdr17 (NM_028220.2,1429-1447).
cgcttttatttgggatatt

SEQ ID NO: 578011 - DNA, 19 bp, Mus musculus
  siRNA target sequence for Wdr17 (NM_028220.2,1508-1526).
gcctggagtcataaagatt

SEQ ID NO: 578012 - DNA, 19 bp, Mus musculus
  siRNA target sequence for Wdr17 (NM_028220.2,1510-1528).
ctggagtcataaagattct

SEQ ID NO: 578013 - DNA, 19 bp, Mus musculus
  siRNA target sequence for Wdr17 (NM_028220.2,1513-1531).
gagtcataaagattctaaa

SEQ ID NO: 578014 - DNA, 19 bp, Mus musculus
  siRNA target sequence for Wdr17 (NM_028220.2,1517-1535).
cataaagattctaaacgaa

SEQ ID NO: 578015 - DNA, 19 bp, Mus musculus
  siRNA target sequence for Wdr17 (NM_028220.2,1542-1560).
cttgcagtggcgatggttt

SEQ ID NO: 578016 - DNA, 19 bp, Mus musculus
  siRNA target sequence for Wdr17 (NM_028220.2,1550-1568).
ggcgatggtttttgcatta

SEQ ID NO: 578017 - DNA, 19 bp, Mus musculus
  siRNA target sequence for Wdr17 (NM_028220.2,1551-1569).
gcgatggtttttgcattat

SEQ ID NO: 578018 - DNA, 19 bp, Mus musculus
  siRNA target sequence for Wdr17 (NM_028220.2,1552-1570).
cgatggtttttgcattatt

SEQ ID NO: 578019 - DNA, 19 bp, Mus musculus
  siRNA target sequence for Wdr17 (NM_028220.2,1556-1574).
ggtttttgcattattcgaa

SEQ ID NO: 578020 - DNA, 19 bp, Mus musculus
  siRNA target sequence for Wdr17 (NM_028220.2,1572-1590).
gaacagtcgatggtaaact

SEQ ID NO: 578021 - DNA, 19 bp, Mus musculus
  siRNA target sequence for Wdr17 (NM_028220.2,1575-1593).
cagtcgatggtaaactact

SEQ ID NO: 578022 - DNA, 19 bp, Mus musculus
  siRNA target sequence for Wdr17 (NM_028220.2,1583-1601).
ggtaaactactgcacaaat

SEQ ID NO: 578023 - DNA, 19 bp, Mus musculus
  siRNA target sequence for Wdr17 (NM_028220.2,1584-1602).
gtaaactactgcacaaata

SEQ ID NO: 578024 - DNA, 19 bp, Mus musculus
  siRNA target sequence for Wdr17 (NM_028220.2,1631-1649).
gattggagccaaaacaaca

SEQ ID NO: 578025 - DNA, 19 bp, Mus musculus
  siRNA target sequence for Wdr17 (NM_028220.2,1678-1696).
caaaaacatccgtgtcttt

SEQ ID NO: 578026 - DNA, 19 bp, Mus musculus
  siRNA target sequence for Wdr17 (NM_028220.2,1711-1729).
ctctaatcagcccttgaaa

SEQ ID NO: 578027 - DNA, 19 bp, Mus musculus
  siRNA target sequence for Wdr17 (NM_028220.2,1713-1731).
ctaatcagcccttgaaagt

SEQ ID NO: 578028 - DNA, 19 bp, Mus musculus
  siRNA target sequence for Wdr17 (NM_028220.2,1718-1736).
cagcccttgaaagtgttta

SEQ ID NO: 578029 - DNA, 19 bp, Mus musculus
  siRNA target sequence for Wdr17 (NM_028220.2,1795-1813).
ctgcagtggttctgatgat

SEQ ID NO: 578030 - DNA, 19 bp, Mus musculus
  siRNA target sequence for Wdr17 (NM_028220.2,1820-1838).
gttcgaatctgggattata

SEQ ID NO: 578031 - DNA, 19 bp, Mus musculus
  siRNA target sequence for Wdr17 (NM_028220.2,1847-1865).
gcttgcgtaagcactctta

SEQ ID NO: 578032 - DNA, 19 bp, Mus musculus
  siRNA target sequence for Wdr17 (NM_028220.2,1848-1866).
cttgcgtaagcactcttaa

SEQ ID NO: 578033 - DNA, 19 bp, Mus musculus
  siRNA target sequence for Wdr17 (NM_028220.2,1852-1870).
cgtaagcactcttaatgga

SEQ ID NO: 578034 - DNA, 19 bp, Mus musculus
  siRNA target sequence for Wdr17 (NM_028220.2,1878-1896).
cacctgtgagggggttaat

SEQ ID NO: 578035 - DNA, 19 bp, Mus musculus
  siRNA target sequence for Wdr17 (NM_028220.2,1880-1898).
cctgtgagggggttaatgt

SEQ ID NO: 578036 - DNA, 19 bp, Mus musculus
  siRNA target sequence for Wdr17 (NM_028220.2,1888-1906).
ggggttaatgtggaatact

SEQ ID NO: 578037 - DNA, 19 bp, Mus musculus
  siRNA target sequence for Wdr17 (NM_028220.2,1890-1908).
ggttaatgtggaatactga

SEQ ID NO: 578038 - DNA, 19 bp, Mus musculus
  siRNA target sequence for Wdr17 (NM_028220.2,1899-1917).
ggaatactgagattccata

SEQ ID NO: 578039 - DNA, 19 bp, Mus musculus
  siRNA target sequence for Wdr17 (NM_028220.2,1907-1925).
gagattccatacctactaa

SEQ ID NO: 578040 - DNA, 19 bp, Mus musculus
  siRNA target sequence for Wdr17 (NM_028220.2,1931-1949).
ggaagctgggactatacta

SEQ ID NO: 578041 - DNA, 19 bp, Mus musculus
  siRNA target sequence for Wdr17 (NM_028220.2,1935-1953).
gctgggactatactatcaa

SEQ ID NO: 578042 - DNA, 19 bp, Mus musculus
  siRNA target sequence for Wdr17 (NM_028220.2,1936-1954).
ctgggactatactatcaaa

SEQ ID NO: 578043 - DNA, 19 bp, Mus musculus
  siRNA target sequence for Wdr17 (NM_028220.2,1938-1956).
gggactatactatcaaagt

SEQ ID NO: 578044 - DNA, 19 bp, Mus musculus
  siRNA target sequence for Wdr17 (NM_028220.2,1940-1958).
gactatactatcaaagtgt

SEQ ID NO: 578045 - DNA, 19 bp, Mus musculus
  siRNA target sequence for Wdr17 (NM_028220.2,1980-1998).
gcctagatactgtgtatga

SEQ ID NO: 578046 - DNA, 19 bp, Mus musculus
  siRNA target sequence for Wdr17 (NM_028220.2,1981-1999).
cctagatactgtgtatgat

SEQ ID NO: 578047 - DNA, 19 bp, Mus musculus
  siRNA target sequence for Wdr17 (NM_028220.2,2004-2022).
gtgcagacgtttatggttt

SEQ ID NO: 578048 - DNA, 19 bp, Mus musculus
  siRNA target sequence for Wdr17 (NM_028220.2,2084-2102).
ctctggtcattaatacctt

SEQ ID NO: 578049 - DNA, 19 bp, Mus musculus
  siRNA target sequence for Wdr17 (NM_028220.2,2139-2157).
gatcttgggacgaagttat

SEQ ID NO: 578050 - DNA, 19 bp, Mus musculus
  siRNA target sequence for Wdr17 (NM_028220.2,2149-2167).
cgaagttatcggaaacact

SEQ ID NO: 578051 - DNA, 19 bp, Mus musculus
  siRNA target sequence for Wdr17 (NM_028220.2,2153-2171).
gttatcggaaacactgata

SEQ ID NO: 578052 - DNA, 19 bp, Mus musculus
  siRNA target sequence for Wdr17 (NM_028220.2,2198-2216).
ctcctctgcggcaaagtgt

SEQ ID NO: 578053 - DNA, 19 bp, Mus musculus
  siRNA target sequence for Wdr17 (NM_028220.2,2253-2271).
gcaaccctcgggcgaaaaa

SEQ ID NO: 578054 - DNA, 19 bp, Mus musculus
  siRNA target sequence for Wdr17 (NM_028220.2,2258-2276).
cctcgggcgaaaaagctaa

SEQ ID NO: 578055 - DNA, 19 bp, Mus musculus
  siRNA target sequence for Wdr17 (NM_028220.2,2281-2299).
gttttcagaatgtttatca

SEQ ID NO: 578056 - DNA, 19 bp, Mus musculus
  siRNA target sequence for Wdr17 (NM_028220.2,2306-2324).
ggtggcagtgacaacttgt

SEQ ID NO: 578057 - DNA, 19 bp, Mus musculus
  siRNA target sequence for Wdr17 (NM_028220.2,2329-2347).
cttggtgtccgtgattaaa

SEQ ID NO: 578058 - DNA, 19 bp, Mus musculus
  siRNA target sequence for Wdr17 (NM_028220.2,2338-2356).
cgtgattaaaggacaagat

SEQ ID NO: 578059 - DNA, 19 bp, Mus musculus
  siRNA target sequence for Wdr17 (NM_028220.2,2388-2406).
gaatgatgcatttgaaaca

SEQ ID NO: 578060 - DNA, 19 bp, Mus musculus
  siRNA target sequence for Wdr17 (NM_028220.2,2401-2419).
gaaacacctgatcaaattt

SEQ ID NO: 578061 - DNA, 19 bp, Mus musculus
  siRNA target sequence for Wdr17 (NM_028220.2,2441-2459).
ctaacgacaatcaagatgt

SEQ ID NO: 578062 - DNA, 19 bp, Mus musculus
  siRNA target sequence for Wdr17 (NM_028220.2,2452-2470).
caagatgtctaaatttggt

SEQ ID NO: 578063 - DNA, 19 bp, Mus musculus
  siRNA target sequence for Wdr17 (NM_028220.2,2475-2493).
gtgttggcgcacctactaa

SEQ ID NO: 578064 - DNA, 19 bp, Mus musculus
  siRNA target sequence for Wdr17 (NM_028220.2,2483-2501).
gcacctactaaggagaaaa

SEQ ID NO: 578065 - DNA, 19 bp, Mus musculus
  siRNA target sequence for Wdr17 (NM_028220.2,2517-2535).
ctgaaatccacctgagatt

SEQ ID NO: 578066 - DNA, 19 bp, Mus musculus
  siRNA target sequence for Wdr17 (NM_028220.2,2527-2545).
cctgagattaggacaaata

SEQ ID NO: 578067 - DNA, 19 bp, Mus musculus
  siRNA target sequence for Wdr17 (NM_028220.2,2584-2602).
ggacaaagccctatcagtt

SEQ ID NO: 578068 - DNA, 19 bp, Mus musculus
  siRNA target sequence for Wdr17 (NM_028220.2,2681-2699).
gatgtcattccatactgta

SEQ ID NO: 578069 - DNA, 19 bp, Mus musculus
  siRNA target sequence for Wdr17 (NM_028220.2,2703-2721).
ccactggggatgtgaaaaa

SEQ ID NO: 578070 - DNA, 19 bp, Mus musculus
  siRNA target sequence for Wdr17 (NM_028220.2,2714-2732).
gtgaaaaagctcgtcaatt

SEQ ID NO: 578071 - DNA, 19 bp, Mus musculus
  siRNA target sequence for Wdr17 (NM_028220.2,2723-2741).
ctcgtcaatttttttgtgt

SEQ ID NO: 578072 - DNA, 19 bp, Mus musculus
  siRNA target sequence for Wdr17 (NM_028220.2,2742-2760).
ccaggggtcagcttaaaga

SEQ ID NO: 578073 - DNA, 19 bp, Mus musculus
  siRNA target sequence for Wdr17 (NM_028220.2,2743-2761).
caggggtcagcttaaagaa

SEQ ID NO: 578074 - DNA, 19 bp, Mus musculus
  siRNA target sequence for Wdr17 (NM_028220.2,2784-2802).
cctgtgagggaaatatgca

SEQ ID NO: 578075 - DNA, 19 bp, Mus musculus
  siRNA target sequence for Wdr17 (NM_028220.2,2785-2803).
ctgtgagggaaatatgcaa

SEQ ID NO: 578076 - DNA, 19 bp, Mus musculus
  siRNA target sequence for Wdr17 (NM_028220.2,2787-2805).
gtgagggaaatatgcaaaa

SEQ ID NO: 578077 - DNA, 19 bp, Mus musculus
  siRNA target sequence for Wdr17 (NM_028220.2,2801-2819).
caaaatgcccatgtttcta

SEQ ID NO: 578078 - DNA, 19 bp, Mus musculus
  siRNA target sequence for Wdr17 (NM_028220.2,2831-2849).
gcttcaaactctgatgata

SEQ ID NO: 578079 - DNA, 19 bp, Mus musculus
  siRNA target sequence for Wdr17 (NM_028220.2,2873-2891).
ctcttacacaaagtcataa

SEQ ID NO: 578080 - DNA, 19 bp, Mus musculus
  siRNA target sequence for Wdr17 (NM_028220.2,2875-2893).
cttacacaaagtcataaat

SEQ ID NO: 578081 - DNA, 19 bp, Mus musculus
  siRNA target sequence for Wdr17 (NM_028220.2,2894-2912).
gagctggccgaatggtatt

SEQ ID NO: 578082 - DNA, 19 bp, Mus musculus
  siRNA target sequence for Wdr17 (NM_028220.2,2896-2914).
gctggccgaatggtatttt

SEQ ID NO: 578083 - DNA, 19 bp, Mus musculus
  siRNA target sequence for Wdr17 (NM_028220.2,2946-2964).
gccatcttgctgtagatga

SEQ ID NO: 578084 - DNA, 19 bp, Mus musculus
  siRNA target sequence for Wdr17 (NM_028220.2,2947-2965).
ccatcttgctgtagatgat

SEQ ID NO: 578085 - DNA, 19 bp, Mus musculus
  siRNA target sequence for Wdr17 (NM_028220.2,2948-2966).
catcttgctgtagatgata

SEQ ID NO: 578086 - DNA, 19 bp, Mus musculus
  siRNA target sequence for Wdr17 (NM_028220.2,2986-3004).
cctgatccgtgggaatgaa

SEQ ID NO: 578087 - DNA, 19 bp, Mus musculus
  siRNA target sequence for Wdr17 (NM_028220.2,2989-3007).
gatccgtgggaatgaacta

SEQ ID NO: 578088 - DNA, 19 bp, Mus musculus
  siRNA target sequence for Wdr17 (NM_028220.2,3048-3066).
cagccccagcaatgcatta

SEQ ID NO: 578089 - DNA, 19 bp, Mus musculus
  siRNA target sequence for Wdr17 (NM_028220.2,3073-3091).
gcagctactggcgacaaaa

SEQ ID NO: 578090 - DNA, 19 bp, Mus musculus
  siRNA target sequence for Wdr17 (NM_028220.2,3074-3092).
cagctactggcgacaaaat

SEQ ID NO: 578091 - DNA, 19 bp, Mus musculus
  siRNA target sequence for Wdr17 (NM_028220.2,3077-3095).
ctactggcgacaaaatgca

SEQ ID NO: 578092 - DNA, 19 bp, Mus musculus
  siRNA target sequence for Wdr17 (NM_028220.2,3111-3129).
gcttcccatctgttgtata

SEQ ID NO: 578093 - DNA, 19 bp, Mus musculus
  siRNA target sequence for Wdr17 (NM_028220.2,3168-3186).
gtagcgaagtccacttagt

SEQ ID NO: 578094 - DNA, 19 bp, Mus musculus
  siRNA target sequence for Wdr17 (NM_028220.2,3171-3189).
gcgaagtccacttagtaaa

SEQ ID NO: 578095 - DNA, 19 bp, Mus musculus
  siRNA target sequence for Wdr17 (NM_028220.2,3172-3190).
cgaagtccacttagtaaaa

SEQ ID NO: 578096 - DNA, 19 bp, Mus musculus
  siRNA target sequence for Wdr17 (NM_028220.2,3206-3224).
cctgggtgcatcgaagaaa

SEQ ID NO: 578097 - DNA, 19 bp, Mus musculus
  siRNA target sequence for Wdr17 (NM_028220.2,3207-3225).
ctgggtgcatcgaagaaat

SEQ ID NO: 578098 - DNA, 19 bp, Mus musculus
  siRNA target sequence for Wdr17 (NM_028220.2,3210-3228).
ggtgcatcgaagaaatcaa

SEQ ID NO: 578099 - DNA, 19 bp, Mus musculus
  siRNA target sequence for Wdr17 (NM_028220.2,3213-3231).
gcatcgaagaaatcaatga

SEQ ID NO: 578100 - DNA, 19 bp, Mus musculus
  siRNA target sequence for Wdr17 (NM_028220.2,3355-3373).
ggctcttcctattggtatt

SEQ ID NO: 578101 - DNA, 19 bp, Mus musculus
  siRNA target sequence for Wdr17 (NM_028220.2,3359-3377).
cttcctattggtattgact

SEQ ID NO: 578102 - DNA, 19 bp, Mus musculus
  siRNA target sequence for Wdr17 (NM_028220.2,3380-3398).
gtcaaaggatgtatcagta

SEQ ID NO: 578103 - DNA, 19 bp, Mus musculus
  siRNA target sequence for Wdr17 (NM_028220.2,3387-3405).
gatgtatcagtaactcaaa

SEQ ID NO: 578104 - DNA, 19 bp, Mus musculus
  siRNA target sequence for Wdr17 (NM_028220.2,3400-3418).
ctcaaactggactctagat

SEQ ID NO: 578105 - DNA, 19 bp, Mus musculus
  siRNA target sequence for Wdr17 (NM_028220.2,3406-3424).
ctggactctagatactgtt

SEQ ID NO: 578106 - DNA, 19 bp, Mus musculus
  siRNA target sequence for Wdr17 (NM_028220.2,3408-3426).
ggactctagatactgttta

SEQ ID NO: 578107 - DNA, 19 bp, Mus musculus
  siRNA target sequence for Wdr17 (NM_028220.2,3433-3451).
gcttgacctgatgagttat

SEQ ID NO: 578108 - DNA, 19 bp, Mus musculus
  siRNA target sequence for Wdr17 (NM_028220.2,3445-3463).
gagttatatccgtactgaa

SEQ ID NO: 578109 - DNA, 19 bp, Mus musculus
  siRNA target sequence for Wdr17 (NM_028220.2,3447-3465).
gttatatccgtactgaaaa

SEQ ID NO: 578110 - DNA, 19 bp, Mus musculus
  siRNA target sequence for Wdr17 (NM_028220.2,3486-3504).
ctgaggctcgaaatgaatt

SEQ ID NO: 578111 - DNA, 19 bp, Mus musculus
  siRNA target sequence for Wdr17 (NM_028220.2,3490-3508).
ggctcgaaatgaattgctt

SEQ ID NO: 578112 - DNA, 19 bp, Mus musculus
  siRNA target sequence for Wdr17 (NM_028220.2,3491-3509).
gctcgaaatgaattgctta

SEQ ID NO: 578113 - DNA, 19 bp, Mus musculus
  siRNA target sequence for Wdr17 (NM_028220.2,3492-3510).
ctcgaaatgaattgcttat

SEQ ID NO: 578114 - DNA, 19 bp, Mus musculus
  siRNA target sequence for Wdr17 (NM_028220.2,3540-3558).
ctatcaggagacagtatca

SEQ ID NO: 578115 - DNA, 19 bp, Mus musculus
  siRNA target sequence for Wdr17 (NM_028220.2,3589-3607).
gagtcagctcttaaaacga

SEQ ID NO: 578116 - DNA, 19 bp, Mus musculus
  siRNA target sequence for Wdr17 (NM_028220.2,3609-3627).
gagtggtgtcagtaccatt

SEQ ID NO: 578117 - DNA, 19 bp, Mus musculus
  siRNA target sequence for Wdr17 (NM_028220.2,3611-3629).
gtggtgtcagtaccattaa

SEQ ID NO: 578118 - DNA, 19 bp, Mus musculus
  siRNA target sequence for Wdr17 (NM_028220.2,3613-3631).
ggtgtcagtaccattaaaa

SEQ ID NO: 578119 - DNA, 19 bp, Mus musculus
  siRNA target sequence for Wdr17 (NM_028220.2,3614-3632).
gtgtcagtaccattaaaaa

SEQ ID NO: 578120 - DNA, 19 bp, Mus musculus
  siRNA target sequence for Wdr17 (NM_028220.2,3616-3634).
gtcagtaccattaaaaatt

SEQ ID NO: 578121 - DNA, 19 bp, Mus musculus
  siRNA target sequence for Wdr17 (NM_028220.2,3618-3636).
cagtaccattaaaaattga

SEQ ID NO: 578122 - DNA, 19 bp, Mus musculus
  siRNA target sequence for Wdr17 (NM_028220.2,3682-3700).
gaccaaacaatcatcagaa

SEQ ID NO: 578123 - DNA, 19 bp, Mus musculus
  siRNA target sequence for Wdr17 (NM_028220.2,3685-3703).
caaacaatcatcagaagat

SEQ ID NO: 578124 - DNA, 19 bp, Mus musculus
  siRNA target sequence for Wdr17 (NM_028220.2,3716-3734).
cccccttctgactcacaaa

SEQ ID NO: 578125 - DNA, 19 bp, Mus musculus
  siRNA target sequence for Wdr17 (NM_028220.2,3718-3736).
cccttctgactcacaaaga

SEQ ID NO: 578126 - DNA, 19 bp, Mus musculus
  siRNA target sequence for Wdr17 (NM_028220.2,3738-3756).
cagtttatgaaactttatt

SEQ ID NO: 578127 - DNA, 19 bp, Mus musculus
  siRNA target sequence for Wdr17 (NM_028220.2,3775-3793).
gccactcaaaggaattact

SEQ ID NO: 578128 - DNA, 19 bp, Mus musculus
  siRNA target sequence for Wdr17 (NM_028220.2,3785-3803).
ggaattactggactagatt

SEQ ID NO: 578129 - DNA, 19 bp, Mus musculus
  siRNA target sequence for Wdr17 (NM_028220.2,3786-3804).
gaattactggactagatta

SEQ ID NO: 578130 - DNA, 19 bp, Mus musculus
  siRNA target sequence for Wdr17 (NM_028220.2,3828-3846).
gccattcagacattcacat

SEQ ID NO: 578131 - DNA, 19 bp, Mus musculus
  siRNA target sequence for Wdr17 (NM_028220.2,3852-3870).
gtcttactggactaaaaat

SEQ ID NO: 578132 - DNA, 19 bp, Mus musculus
  siRNA target sequence for Wdr17 (NM_028220.2,3899-3917).
ggaaaatcaactatttctt

SEQ ID NO: 578133 - DNA, 19 bp, Mus musculus
  siRNA target sequence for Wdr17 (NM_028220.2,3950-3968).
ccattctcacctttaggaa

SEQ ID NO: 578134 - DNA, 19 bp, Mus musculus
  siRNA target sequence for Wdr17 (NM_028220.2,3971-3989).
ggaatacgactcaatccat

SEQ ID NO: 578135 - DNA, 19 bp, Mus musculus
  siRNA target sequence for 4933435E07Rik (NM_173180.2,162-180).
ggagtacccaagcctattt

SEQ ID NO: 578136 - DNA, 19 bp, Mus musculus
  siRNA target sequence for 4933435E07Rik (NM_173180.2,163-181).
gagtacccaagcctatttt

SEQ ID NO: 578137 - DNA, 19 bp, Mus musculus
  siRNA target sequence for 4933435E07Rik (NM_173180.2,168-186).
cccaagcctatttttgcaa

SEQ ID NO: 578138 - DNA, 19 bp, Mus musculus
  siRNA target sequence for 4933435E07Rik (NM_173180.2,240-258).
cttcgtgtggcatctcaaa

SEQ ID NO: 578139 - DNA, 19 bp, Mus musculus
  siRNA target sequence for 4933435E07Rik (NM_173180.2,243-261).
cgtgtggcatctcaaaata

SEQ ID NO: 578140 - DNA, 19 bp, Mus musculus
  siRNA target sequence for 4933435E07Rik (NM_173180.2,275-293).
ctgtaccgtaggaattctt

SEQ ID NO: 578141 - DNA, 19 bp, Mus musculus
  siRNA target sequence for 4933435E07Rik (NM_173180.2,277-295).
gtaccgtaggaattcttat

SEQ ID NO: 578142 - DNA, 19 bp, Mus musculus
  siRNA target sequence for 4933435E07Rik (NM_173180.2,280-298).
ccgtaggaattcttattaa

SEQ ID NO: 578143 - DNA, 19 bp, Mus musculus
  siRNA target sequence for 4933435E07Rik (NM_173180.2,307-325).
cacgatatgaagcgaaata

SEQ ID NO: 578144 - DNA, 19 bp, Mus musculus
  siRNA target sequence for 4933435E07Rik (NM_173180.2,310-328).
gatatgaagcgaaatatct

SEQ ID NO: 578145 - DNA, 19 bp, Mus musculus
  siRNA target sequence for 4933435E07Rik (NM_173180.2,339-357).
gctcattttttggaaaaat

SEQ ID NO: 578146 - DNA, 19 bp, Mus musculus
  siRNA target sequence for 4933435E07Rik (NM_173180.2,367-385).
cgtccactgctcgatttga

SEQ ID NO: 578147 - DNA, 19 bp, Mus musculus
  siRNA target sequence for 4933435E07Rik (NM_173180.2,401-419).
cctgcttacgctggaaaaa

SEQ ID NO: 578148 - DNA, 19 bp, Mus musculus
  siRNA target sequence for 4933435E07Rik (NM_173180.2,404-422).
gcttacgctggaaaaacat

SEQ ID NO: 578149 - DNA, 19 bp, Mus musculus
  siRNA target sequence for 4933435E07Rik (NM_173180.2,533-551).
cccccgactgacagatgaa

SEQ ID NO: 578150 - DNA, 19 bp, Mus musculus
  siRNA target sequence for 4933435E07Rik (NM_173180.2,535-553).
cccgactgacagatgaaga

SEQ ID NO: 578151 - DNA, 19 bp, Mus musculus
  siRNA target sequence for 4933435E07Rik (NM_173180.2,574-592).
ctgtgcagtttgaactaga

SEQ ID NO: 578152 - DNA, 19 bp, Mus musculus
  siRNA target sequence for 4933435E07Rik (NM_173180.2,733-751).
cctacctaaagaactacta

SEQ ID NO: 578153 - DNA, 19 bp, Mus musculus
  siRNA target sequence for 4933435E07Rik (NM_173180.2,791-809).
gcatgagcacctagtagaa

SEQ ID NO: 578154 - DNA, 19 bp, Mus musculus
  siRNA target sequence for 4933435E07Rik (NM_173180.2,792-810).
catgagcacctagtagaat

SEQ ID NO: 578155 - DNA, 19 bp, Mus musculus
  siRNA target sequence for 4933435E07Rik (NM_173180.2,1122-1140).
cggcaccactggatgtaca

SEQ ID NO: 578156 - DNA, 19 bp, Mus musculus
  siRNA target sequence for 4933435E07Rik (NM_173180.2,1155-1173).
caccacagctatgaagata

SEQ ID NO: 578157 - DNA, 19 bp, Mus musculus
  siRNA target sequence for 4933435E07Rik (NM_173180.2,1199-1217).
cgcagacccaagacaagtt

SEQ ID NO: 578158 - DNA, 19 bp, Mus musculus
  siRNA target sequence for 4933435E07Rik (NM_173180.2,1210-1228).
gacaagttcgagaaatggt

SEQ ID NO: 578159 - DNA, 19 bp, Mus musculus
  siRNA target sequence for 4933435E07Rik (NM_173180.2,1215-1233).
gttcgagaaatggtagaaa

SEQ ID NO: 578160 - DNA, 19 bp, Mus musculus
  siRNA target sequence for 4933435E07Rik (NM_173180.2,1240-1258).
caaaggagtttatcttgat

SEQ ID NO: 578161 - DNA, 19 bp, Mus musculus
  siRNA target sequence for 4933435E07Rik (NM_173180.2,1395-1413).
ctgccccacgagctatgta

SEQ ID NO: 578162 - DNA, 19 bp, Mus musculus
  siRNA target sequence for 4933435E07Rik (NM_173180.2,1397-1415).
gccccacgagctatgtaca

SEQ ID NO: 578163 - DNA, 19 bp, Mus musculus
  siRNA target sequence for 4933435E07Rik (NM_173180.2,1428-1446).
gtgaagccagaagatatca

SEQ ID NO: 578164 - DNA, 19 bp, Mus musculus
  siRNA target sequence for 4933435E07Rik (NM_173180.2,1558-1576).
gacacctgcccagatcata

SEQ ID NO: 578165 - DNA, 19 bp, Mus musculus
  siRNA target sequence for Ide (NM_031156.1,144-162).
gattcccaaaacagactta

SEQ ID NO: 578166 - DNA, 19 bp, Mus musculus
  siRNA target sequence for Ide (NM_031156.1,157-175).
gacttacagcacaatgagt

SEQ ID NO: 578167 - DNA, 19 bp, Mus musculus
  siRNA target sequence for Ide (NM_031156.1,159-177).
cttacagcacaatgagtaa

SEQ ID NO: 578168 - DNA, 19 bp, Mus musculus
  siRNA target sequence for Ide (NM_031156.1,180-198).
cggccatccagagaataga

SEQ ID NO: 578169 - DNA, 19 bp, Mus musculus
  siRNA target sequence for Ide (NM_031156.1,181-199).
ggccatccagagaatagaa

SEQ ID NO: 578170 - DNA, 19 bp, Mus musculus
  siRNA target sequence for Ide (NM_031156.1,192-210).
gaatagaagaccaaattgt

SEQ ID NO: 578171 - DNA, 19 bp, Mus musculus
  siRNA target sequence for Ide (NM_031156.1,261-279).
gcatcaaagtgcttctcat

SEQ ID NO: 578172 - DNA, 19 bp, Mus musculus
  siRNA target sequence for Ide (NM_031156.1,314-332).
ctcgatgtgcacataggtt

SEQ ID NO: 578173 - DNA, 19 bp, Mus musculus
  siRNA target sequence for Ide (NM_031156.1,335-353).
ctgtcagaccctccaaata

SEQ ID NO: 578174 - DNA, 19 bp, Mus musculus
  siRNA target sequence for Ide (NM_031156.1,337-355).
gtcagaccctccaaatatt

SEQ ID NO: 578175 - DNA, 19 bp, Mus musculus
  siRNA target sequence for Ide (NM_031156.1,360-378).
gcttaagtcatttttgtga

SEQ ID NO: 578176 - DNA, 19 bp, Mus musculus
  siRNA target sequence for Ide (NM_031156.1,479-497).
gaacacaccaattattatt

SEQ ID NO: 578177 - DNA, 19 bp, Mus musculus
  siRNA target sequence for Ide (NM_031156.1,533-551).
gacaggtttgcgcagtttt

SEQ ID NO: 578178 - DNA, 19 bp, Mus musculus
  siRNA target sequence for Ide (NM_031156.1,565-583).
gcttgatgcaagttgtaaa

SEQ ID NO: 578179 - DNA, 19 bp, Mus musculus
  siRNA target sequence for Ide (NM_031156.1,569-587).
gatgcaagttgtaaagaca

SEQ ID NO: 578180 - DNA, 19 bp, Mus musculus
  siRNA target sequence for Ide (NM_031156.1,598-616).
cgctgtcgattcagaacat

SEQ ID NO: 578181 - DNA, 19 bp, Mus musculus
  siRNA target sequence for Ide (NM_031156.1,600-618).
ctgtcgattcagaacatga

SEQ ID NO: 578182 - DNA, 19 bp, Mus musculus
  siRNA target sequence for Ide (NM_031156.1,703-721).
gacaggaaacaaatatact

SEQ ID NO: 578183 - DNA, 19 bp, Mus musculus
  siRNA target sequence for Ide (NM_031156.1,759-777).
gggaagagctcttgaaatt

SEQ ID NO: 578184 - DNA, 19 bp, Mus musculus
  siRNA target sequence for Ide (NM_031156.1,764-782).
gagctcttgaaatttcact

SEQ ID NO: 578185 - DNA, 19 bp, Mus musculus
  siRNA target sequence for Ide (NM_031156.1,772-790).
gaaatttcactctacgtat

SEQ ID NO: 578186 - DNA, 19 bp, Mus musculus
  siRNA target sequence for Ide (NM_031156.1,779-797).
cactctacgtattattcgt

SEQ ID NO: 578187 - DNA, 19 bp, Mus musculus
  siRNA target sequence for Ide (NM_031156.1,799-817).
caatctgatggcgatttgt

SEQ ID NO: 578188 - DNA, 19 bp, Mus musculus
  siRNA target sequence for Ide (NM_031156.1,805-823).
gatggcgatttgtgtttta

SEQ ID NO: 578189 - DNA, 19 bp, Mus musculus
  siRNA target sequence for Ide (NM_031156.1,1010-1028).
cttcagcagtactacaaat

SEQ ID NO: 578190 - DNA, 19 bp, Mus musculus
  siRNA target sequence for Ide (NM_031156.1,1030-1048).
caatcctggttattatctt

SEQ ID NO: 578191 - DNA, 19 bp, Mus musculus
  siRNA target sequence for Ide (NM_031156.1,1081-1099).
cctgttgtcagaactcaaa

SEQ ID NO: 578192 - DNA, 19 bp, Mus musculus
  siRNA target sequence for Ide (NM_031156.1,1142-1160).
ggagcccgaggttttatgt

SEQ ID NO: 578193 - DNA, 19 bp, Mus musculus
  siRNA target sequence for Ide (NM_031156.1,1143-1161).
gagcccgaggttttatgtt

SEQ ID NO: 578194 - DNA, 19 bp, Mus musculus
  siRNA target sequence for Ide (NM_031156.1,1194-1212).
ggttattgcacgttgaaga

SEQ ID NO: 578195 - DNA, 19 bp, Mus musculus
  siRNA target sequence for Ide (NM_031156.1,1195-1213).
gttattgcacgttgaagat

SEQ ID NO: 578196 - DNA, 19 bp, Mus musculus
  siRNA target sequence for Ide (NM_031156.1,1350-1368).
ccaagattgcaggaaagtt

SEQ ID NO: 578197 - DNA, 19 bp, Mus musculus
  siRNA target sequence for Ide (NM_031156.1,1358-1376).
gcaggaaagttgcactatt

SEQ ID NO: 578198 - DNA, 19 bp, Mus musculus
  siRNA target sequence for Ide (NM_031156.1,1369-1387).
gcactattatcccctaaat

SEQ ID NO: 578199 - DNA, 19 bp, Mus musculus
  siRNA target sequence for Ide (NM_031156.1,1372-1390).
ctattatcccctaaatgga

SEQ ID NO: 578200 - DNA, 19 bp, Mus musculus
  siRNA target sequence for Ide (NM_031156.1,1425-1443).
gacccgacttgatagacat

SEQ ID NO: 578201 - DNA, 19 bp, Mus musculus
  siRNA target sequence for Ide (NM_031156.1,1472-1490).
gtgcgggtggcaatagttt

SEQ ID NO: 578202 - DNA, 19 bp, Mus musculus
  siRNA target sequence for Ide (NM_031156.1,1480-1498).
ggcaatagtttccaaatca

SEQ ID NO: 578203 - DNA, 19 bp, Mus musculus
  siRNA target sequence for Ide (NM_031156.1,1481-1499).
gcaatagtttccaaatcat

SEQ ID NO: 578204 - DNA, 19 bp, Mus musculus
  siRNA target sequence for Ide (NM_031156.1,1530-1548).
ggtatggaacacagtataa

SEQ ID NO: 578205 - DNA, 19 bp, Mus musculus
  siRNA target sequence for Ide (NM_031156.1,1563-1581).
cagaggacgtcattcagaa

SEQ ID NO: 578206 - DNA, 19 bp, Mus musculus
  siRNA target sequence for Ide (NM_031156.1,1933-1951).
ctcagtgaaacgctacaat

SEQ ID NO: 578207 - DNA, 19 bp, Mus musculus
  siRNA target sequence for Ide (NM_031156.1,1939-1957).
gaaacgctacaatgacaaa

SEQ ID NO: 578208 - DNA, 19 bp, Mus musculus
  siRNA target sequence for Ide (NM_031156.1,1984-2002).
cgagaaaatggctactttt

SEQ ID NO: 578209 - DNA, 19 bp, Mus musculus
  siRNA target sequence for Ide (NM_031156.1,1994-2012).
gctacttttgagattgata

SEQ ID NO: 578210 - DNA, 19 bp, Mus musculus
  siRNA target sequence for Ide (NM_031156.1,2038-2056).
ggcctatatgcgatctctt

SEQ ID NO: 578211 - DNA, 19 bp, Mus musculus
  siRNA target sequence for Ide (NM_031156.1,2039-2057).
gcctatatgcgatctctta

SEQ ID NO: 578212 - DNA, 19 bp, Mus musculus
  siRNA target sequence for Ide (NM_031156.1,2040-2058).
cctatatgcgatctcttaa

SEQ ID NO: 578213 - DNA, 19 bp, Mus musculus
  siRNA target sequence for Ide (NM_031156.1,2041-2059).
ctatatgcgatctcttaat

SEQ ID NO: 578214 - DNA, 19 bp, Mus musculus
  siRNA target sequence for Ide (NM_031156.1,2150-2168).
gaagcccttgacgatgtta

SEQ ID NO: 578215 - DNA, 19 bp, Mus musculus
  siRNA target sequence for Ide (NM_031156.1,2359-2377).
ccctgacagaggatggttt

SEQ ID NO: 578216 - DNA, 19 bp, Mus musculus
  siRNA target sequence for Ide (NM_031156.1,2367-2385).
gaggatggtttgtttatca

SEQ ID NO: 578217 - DNA, 19 bp, Mus musculus
  siRNA target sequence for Ide (NM_031156.1,2448-2466).
gcacctcggagaacatgtt

SEQ ID NO: 578218 - DNA, 19 bp, Mus musculus
  siRNA target sequence for Ide (NM_031156.1,2471-2489).
gagctgttttgccagatta

SEQ ID NO: 578219 - DNA, 19 bp, Mus musculus
  siRNA target sequence for Ide (NM_031156.1,2491-2509).
ctcggagccttgcttcaat

SEQ ID NO: 578220 - DNA, 19 bp, Mus musculus
  siRNA target sequence for Ide (NM_031156.1,2528-2546).
cagcttggctatattgtct

SEQ ID NO: 578221 - DNA, 19 bp, Mus musculus
  siRNA target sequence for Ide (NM_031156.1,2633-2651).
gtagaagccttcttgatta

SEQ ID NO: 578222 - DNA, 19 bp, Mus musculus
  siRNA target sequence for Ide (NM_031156.1,2684-2702).
gaggcgttccaaaaacaca

SEQ ID NO: 578223 - DNA, 19 bp, Mus musculus
  siRNA target sequence for Ide (NM_031156.1,2686-2704).
ggcgttccaaaaacacatt

SEQ ID NO: 578224 - DNA, 19 bp, Mus musculus
  siRNA target sequence for Ide (NM_031156.1,2688-2706).
cgttccaaaaacacattca

SEQ ID NO: 578225 - DNA, 19 bp, Mus musculus
  siRNA target sequence for Ide (NM_031156.1,2720-2738).
cggcgactcgacaaaccaa

SEQ ID NO: 578226 - DNA, 19 bp, Mus musculus
  siRNA target sequence for Ide (NM_031156.1,2746-2764).
ctctgcggagtgtgctaaa

SEQ ID NO: 578227 - DNA, 19 bp, Mus musculus
  siRNA target sequence for Ide (NM_031156.1,2748-2766).
ctgcggagtgtgctaaata

SEQ ID NO: 578228 - DNA, 19 bp, Mus musculus
  siRNA target sequence for Ide (NM_031156.1,2750-2768).
gcggagtgtgctaaatact

SEQ ID NO: 578229 - DNA, 19 bp, Mus musculus
  siRNA target sequence for Ide (NM_031156.1,2784-2802).
cgcagcagtacaattacga

SEQ ID NO: 578230 - DNA, 19 bp, Mus musculus
  siRNA target sequence for Ide (NM_031156.1,2800-2818).
cgacagagataacatagaa

SEQ ID NO: 578231 - DNA, 19 bp, Mus musculus
  siRNA target sequence for Ide (NM_031156.1,2835-2853).
cacttaccaaggacgatat

SEQ ID NO: 578232 - DNA, 19 bp, Mus musculus
  siRNA target sequence for Ide (NM_031156.1,2837-2855).
cttaccaaggacgatatca

SEQ ID NO: 578233 - DNA, 19 bp, Mus musculus
  siRNA target sequence for Ide (NM_031156.1,2846-2864).
gacgatatcatcagattct

SEQ ID NO: 578234 - DNA, 19 bp, Mus musculus
  siRNA target sequence for Ide (NM_031156.1,2885-2903).
gacgcaccgaggagacata

SEQ ID NO: 578235 - DNA, 19 bp, Mus musculus
  siRNA target sequence for Ide (NM_031156.1,2887-2905).
cgcaccgaggagacataaa

SEQ ID NO: 578236 - DNA, 19 bp, Mus musculus
  siRNA target sequence for Ide (NM_031156.1,2889-2907).
caccgaggagacataaagt

SEQ ID NO: 578237 - DNA, 19 bp, Mus musculus
  siRNA target sequence for Ide (NM_031156.1,2891-2909).
ccgaggagacataaagtgt

SEQ ID NO: 578238 - DNA, 19 bp, Mus musculus
  siRNA target sequence for Ide (NM_031156.1,2962-2980).
cccctctcagaatgatata

SEQ ID NO: 578239 - DNA, 19 bp, Mus musculus
  siRNA target sequence for Ide (NM_031156.1,2963-2981).
ccctctcagaatgatataa

SEQ ID NO: 578240 - DNA, 19 bp, Mus musculus
  siRNA target sequence for Ide (NM_031156.1,2964-2982).
cctctcagaatgatataaa

SEQ ID NO: 578241 - DNA, 19 bp, Mus musculus
  siRNA target sequence for Ide (NM_031156.1,2969-2987).
cagaatgatataaacttgt

SEQ ID NO: 578242 - DNA, 19 bp, Mus musculus
  siRNA target sequence for Ide (NM_031156.1,3006-3024).
cacaacctgaagtgattca

SEQ ID NO: 578243 - DNA, 19 bp, Mus musculus
  siRNA target sequence for Ide (NM_031156.1,3012-3030).
ctgaagtgattcacaacat

SEQ ID NO: 578244 - DNA, 19 bp, Mus musculus
  siRNA target sequence for Ide (NM_031156.1,3014-3032).
gaagtgattcacaacatga

SEQ ID NO: 578245 - DNA, 19 bp, Mus musculus
  siRNA target sequence for Ide (NM_031156.1,3063-3081).
ccctcgtgaaaccacatat

SEQ ID NO: 578246 - DNA, 19 bp, Mus musculus
  siRNA target sequence for Ide (NM_031156.1,3064-3082).
cctcgtgaaaccacatatt

SEQ ID NO: 578247 - DNA, 19 bp, Mus musculus
  siRNA target sequence for Ide (NM_031156.1,3065-3083).
ctcgtgaaaccacatatta

SEQ ID NO: 578248 - DNA, 19 bp, Mus musculus
  siRNA target sequence for Nrd1 (NM_146150.2,128-146).
cggggtctgtgcgaagaat

SEQ ID NO: 578249 - DNA, 19 bp, Mus musculus
  siRNA target sequence for Nrd1 (NM_146150.2,130-148).
gggtctgtgcgaagaatca

SEQ ID NO: 578250 - DNA, 19 bp, Mus musculus
  siRNA target sequence for Nrd1 (NM_146150.2,131-149).
ggtctgtgcgaagaatcat

SEQ ID NO: 578251 - DNA, 19 bp, Mus musculus
  siRNA target sequence for Nrd1 (NM_146150.2,136-154).
gtgcgaagaatcatcgaaa

SEQ ID NO: 578252 - DNA, 19 bp, Mus musculus
  siRNA target sequence for Nrd1 (NM_146150.2,263-281).
cgtctaggagcggatgaat

SEQ ID NO: 578253 - DNA, 19 bp, Mus musculus
  siRNA target sequence for Nrd1 (NM_146150.2,289-307).
ggagggacggtctttcagt

SEQ ID NO: 578254 - DNA, 19 bp, Mus musculus
  siRNA target sequence for Nrd1 (NM_146150.2,290-308).
gagggacggtctttcagta

SEQ ID NO: 578255 - DNA, 19 bp, Mus musculus
  siRNA target sequence for Nrd1 (NM_146150.2,292-310).
gggacggtctttcagtaat

SEQ ID NO: 578256 - DNA, 19 bp, Mus musculus
  siRNA target sequence for Nrd1 (NM_146150.2,294-312).
gacggtctttcagtaatgt

SEQ ID NO: 578257 - DNA, 19 bp, Mus musculus
  siRNA target sequence for Nrd1 (NM_146150.2,348-366).
ccaagcagtaccgatacat

SEQ ID NO: 578258 - DNA, 19 bp, Mus musculus
  siRNA target sequence for Nrd1 (NM_146150.2,352-370).
gcagtaccgatacatcaaa

SEQ ID NO: 578259 - DNA, 19 bp, Mus musculus
  siRNA target sequence for Nrd1 (NM_146150.2,353-371).
cagtaccgatacatcaaat

SEQ ID NO: 578260 - DNA, 19 bp, Mus musculus
  siRNA target sequence for Nrd1 (NM_146150.2,355-373).
gtaccgatacatcaaatta

SEQ ID NO: 578261 - DNA, 19 bp, Mus musculus
  siRNA target sequence for Nrd1 (NM_146150.2,359-377).
cgatacatcaaattacaga

SEQ ID NO: 578262 - DNA, 19 bp, Mus musculus
  siRNA target sequence for Nrd1 (NM_146150.2,397-415).
gatttcagatctaagtaat

SEQ ID NO: 578263 - DNA, 19 bp, Mus musculus
  siRNA target sequence for Nrd1 (NM_146150.2,528-546).
gagctgagatacaagatga

SEQ ID NO: 578264 - DNA, 19 bp, Mus musculus
  siRNA target sequence for Nrd1 (NM_146150.2,746-764).
cctgggctggcacactttt

SEQ ID NO: 578265 - DNA, 19 bp, Mus musculus
  siRNA target sequence for Nrd1 (NM_146150.2,776-794).
gtattcatgggtagtttga

SEQ ID NO: 578266 - DNA, 19 bp, Mus musculus
  siRNA target sequence for Nrd1 (NM_146150.2,832-850).
gaaacatggaggtagtgat

SEQ ID NO: 578267 - DNA, 19 bp, Mus musculus
  siRNA target sequence for Nrd1 (NM_146150.2,848-866).
gataatgcctcaactgatt

SEQ ID NO: 578268 - DNA, 19 bp, Mus musculus
  siRNA target sequence for Nrd1 (NM_146150.2,869-887).
gaacgcacagtctttcagt

SEQ ID NO: 578269 - DNA, 19 bp, Mus musculus
  siRNA target sequence for Nrd1 (NM_146150.2,890-908).
gatgtccagagaaagtatt

SEQ ID NO: 578270 - DNA, 19 bp, Mus musculus
  siRNA target sequence for Nrd1 (NM_146150.2,955-973).
gatgatcagagatgcaatt

SEQ ID NO: 578271 - DNA, 19 bp, Mus musculus
  siRNA target sequence for Nrd1 (NM_146150.2,1062-1080).
ctagaccgggacatcctat

SEQ ID NO: 578272 - DNA, 19 bp, Mus musculus
  siRNA target sequence for Nrd1 (NM_146150.2,1110-1128).
cactcaagcatgaaccaaa

SEQ ID NO: 578273 - DNA, 19 bp, Mus musculus
  siRNA target sequence for Nrd1 (NM_146150.2,1132-1150).
gaataacattgatacacat

SEQ ID NO: 578274 - DNA, 19 bp, Mus musculus
  siRNA target sequence for Nrd1 (NM_146150.2,1261-1279).
ctctcagataccaaacaat

SEQ ID NO: 578275 - DNA, 19 bp, Mus musculus
  siRNA target sequence for Nrd1 (NM_146150.2,1272-1290).
caaacaatgggctacctaa

SEQ ID NO: 578276 - DNA, 19 bp, Mus musculus
  siRNA target sequence for Nrd1 (NM_146150.2,1276-1294).
caatgggctacctaaacca

SEQ ID NO: 578277 - DNA, 19 bp, Mus musculus
  siRNA target sequence for Nrd1 (NM_146150.2,1283-1301).
ctacctaaaccaaacttta

SEQ ID NO: 578278 - DNA, 19 bp, Mus musculus
  siRNA target sequence for Nrd1 (NM_146150.2,1302-1320).
gccatttaacggatccttt

SEQ ID NO: 578279 - DNA, 19 bp, Mus musculus
  siRNA target sequence for Nrd1 (NM_146150.2,1322-1340).
gacacaccagcatttaaca

SEQ ID NO: 578280 - DNA, 19 bp, Mus musculus
  siRNA target sequence for Nrd1 (NM_146150.2,1547-1565).
gagcaaaattctacttact

SEQ ID NO: 578281 - DNA, 19 bp, Mus musculus
  siRNA target sequence for Nrd1 (NM_146150.2,1621-1639).
ggttgcccacactgtcttt

SEQ ID NO: 578282 - DNA, 19 bp, Mus musculus
  siRNA target sequence for Nrd1 (NM_146150.2,1627-1645).
ccacactgtctttcagtat

SEQ ID NO: 578283 - DNA, 19 bp, Mus musculus
  siRNA target sequence for Nrd1 (NM_146150.2,1663-1681).
gctaggtccagagaaaaga

SEQ ID NO: 578284 - DNA, 19 bp, Mus musculus
  siRNA target sequence for Nrd1 (NM_146150.2,1787-1805).
ccacgtcaggactttctca

SEQ ID NO: 578285 - DNA, 19 bp, Mus musculus
  siRNA target sequence for Nrd1 (NM_146150.2,1806-1824).
ccggagatcagcttctgtt

SEQ ID NO: 578286 - DNA, 19 bp, Mus musculus
  siRNA target sequence for Nrd1 (NM_146150.2,1807-1825).
cggagatcagcttctgttt

SEQ ID NO: 578287 - DNA, 19 bp, Mus musculus
  siRNA target sequence for Nrd1 (NM_146150.2,1811-1829).
gatcagcttctgtttgagt

SEQ ID NO: 578288 - DNA, 19 bp, Mus musculus
  siRNA target sequence for Nrd1 (NM_146150.2,1945-1963).
gactcagtatagcatagaa

SEQ ID NO: 578289 - DNA, 19 bp, Mus musculus
  siRNA target sequence for Nrd1 (NM_146150.2,1951-1969).
gtatagcatagaagatatt

SEQ ID NO: 578290 - DNA, 19 bp, Mus musculus
  siRNA target sequence for Nrd1 (NM_146150.2,1985-2003).
gaactatggaagagtaatt

SEQ ID NO: 578291 - DNA, 19 bp, Mus musculus
  siRNA target sequence for Nrd1 (NM_146150.2,1996-2014).
gagtaattttgacttaaat

SEQ ID NO: 578292 - DNA, 19 bp, Mus musculus
  siRNA target sequence for Nrd1 (NM_146150.2,2098-2116).
ccctgctaaaattgtcaat

SEQ ID NO: 578293 - DNA, 19 bp, Mus musculus
  siRNA target sequence for Nrd1 (NM_146150.2,2126-2144).
ggctgcttgtggtataaga

SEQ ID NO: 578294 - DNA, 19 bp, Mus musculus
  siRNA target sequence for Nrd1 (NM_146150.2,2164-2182).
ccccaaagcatatatacga

SEQ ID NO: 578295 - DNA, 19 bp, Mus musculus
  siRNA target sequence for Nrd1 (NM_146150.2,2172-2190).
catatatacgatttcatct

SEQ ID NO: 578296 - DNA, 19 bp, Mus musculus
  siRNA target sequence for Nrd1 (NM_146150.2,2194-2212).
ctcacctttgatacagaaa

SEQ ID NO: 578297 - DNA, 19 bp, Mus musculus
  siRNA target sequence for Nrd1 (NM_146150.2,2294-2312).
gtggcacagctggagtata

SEQ ID NO: 578298 - DNA, 19 bp, Mus musculus
  siRNA target sequence for Nrd1 (NM_146150.2,2325-2343).
gagaacatgggttaattat

SEQ ID NO: 578299 - DNA, 19 bp, Mus musculus
  siRNA target sequence for Nrd1 (NM_146150.2,2335-2353).
gttaattattcgagtgaaa

SEQ ID NO: 578300 - DNA, 19 bp, Mus musculus
  siRNA target sequence for Nrd1 (NM_146150.2,2375-2393).
ctgctctttcagctcatta

SEQ ID NO: 578301 - DNA, 19 bp, Mus musculus
  siRNA target sequence for Nrd1 (NM_146150.2,2377-2395).
gctctttcagctcattatt

SEQ ID NO: 578302 - DNA, 19 bp, Mus musculus
  siRNA target sequence for Nrd1 (NM_146150.2,2488-2506).
cgagactctggccaaagat

SEQ ID NO: 578303 - DNA, 19 bp, Mus musculus
  siRNA target sequence for Nrd1 (NM_146150.2,2500-2518).
caaagatgtgcggctttta

SEQ ID NO: 578304 - DNA, 19 bp, Mus musculus
  siRNA target sequence for Nrd1 (NM_146150.2,2532-2550).
cccgctggtctatgattga

SEQ ID NO: 578305 - DNA, 19 bp, Mus musculus
  siRNA target sequence for Nrd1 (NM_146150.2,2534-2552).
cgctggtctatgattgaca

SEQ ID NO: 578306 - DNA, 19 bp, Mus musculus
  siRNA target sequence for Nrd1 (NM_146150.2,2535-2553).
gctggtctatgattgacaa

SEQ ID NO: 578307 - DNA, 19 bp, Mus musculus
  siRNA target sequence for Nrd1 (NM_146150.2,2538-2556).
ggtctatgattgacaagta

SEQ ID NO: 578308 - DNA, 19 bp, Mus musculus
  siRNA target sequence for Nrd1 (NM_146150.2,2570-2588).
gatggcctttcccttgatt

SEQ ID NO: 578309 - DNA, 19 bp, Mus musculus
  siRNA target sequence for Nrd1 (NM_146150.2,2589-2607).
ctctgctaaactttgtcaa

SEQ ID NO: 578310 - DNA, 19 bp, Mus musculus
  siRNA target sequence for Nrd1 (NM_146150.2,2670-2688).
cgatggatttcctaaaata

SEQ ID NO: 578311 - DNA, 19 bp, Mus musculus
  siRNA target sequence for Nrd1 (NM_146150.2,2768-2786).
caccacctgtgcaaagtca

SEQ ID NO: 578312 - DNA, 19 bp, Mus musculus
  siRNA target sequence for Nrd1 (NM_146150.2,2845-2863).
gaggagtctgagagaatat

SEQ ID NO: 578313 - DNA, 19 bp, Mus musculus
  siRNA target sequence for Nrd1 (NM_146150.2,2848-2866).
gagtctgagagaatatact

SEQ ID NO: 578314 - DNA, 19 bp, Mus musculus
  siRNA target sequence for Nrd1 (NM_146150.2,2850-2868).
gtctgagagaatatactct

SEQ ID NO: 578315 - DNA, 19 bp, Mus musculus
  siRNA target sequence for Nrd1 (NM_146150.2,2852-2870).
ctgagagaatatactctta

SEQ ID NO: 578316 - DNA, 19 bp, Mus musculus
  siRNA target sequence for Nrd1 (NM_146150.2,2856-2874).
gagaatatactcttatgga

SEQ ID NO: 578317 - DNA, 19 bp, Mus musculus
  siRNA target sequence for Nrd1 (NM_146150.2,2931-2949).
cccttgggtaccatgtcta

SEQ ID NO: 578318 - DNA, 19 bp, Mus musculus
  siRNA target sequence for Nrd1 (NM_146150.2,2951-2969).
ccaacctgtaggaacacat

SEQ ID NO: 578319 - DNA, 19 bp, Mus musculus
  siRNA target sequence for Nrd1 (NM_146150.2,3024-3042).
ccgaaactgttgacaagaa

SEQ ID NO: 578320 - DNA, 19 bp, Mus musculus
  siRNA target sequence for Nrd1 (NM_146150.2,3120-3138).
cactgatcaagttgaaaga

SEQ ID NO: 578321 - DNA, 19 bp, Mus musculus
  siRNA target sequence for Nrd1 (NM_146150.2,3233-3251).
gaagccctgaagtctttct

SEQ ID NO: 578322 - DNA, 19 bp, Mus musculus
  siRNA target sequence for Nrd1 (NM_146150.2,3307-3325).
gctcagcgttcatgttgtt

SEQ ID NO: 578323 - DNA, 19 bp, Mus musculus
  siRNA target sequence for Nrd1 (NM_146150.2,3312-3330).
gcgttcatgttgttggata

SEQ ID NO: 578324 - DNA, 19 bp, Mus musculus
  siRNA target sequence for Nrd1 (NM_146150.2,3313-3331).
cgttcatgttgttggatat

SEQ ID NO: 578325 - DNA, 19 bp, Mus musculus
  siRNA target sequence for Nrd1 (NM_146150.2,3352-3370).
ggatggtgccccttttggt

SEQ ID NO: 578326 - DNA, 19 bp, Mus musculus
  siRNA target sequence for Nrd1 (NM_146150.2,3492-3510).
cctaccataaaatagtcaa

SEQ ID NO: 578327 - DNA, 19 bp, Mus musculus
  siRNA target sequence for Adamts2 (NM_175643.1,392-410).
ggaggacgccttttctaca

SEQ ID NO: 578328 - DNA, 19 bp, Mus musculus
  siRNA target sequence for Adamts2 (NM_175643.1,393-411).
gaggacgccttttctacaa

SEQ ID NO: 578329 - DNA, 19 bp, Mus musculus
  siRNA target sequence for Adamts2 (NM_175643.1,554-572).
gacgtggcagacttaccta

SEQ ID NO: 578330 - DNA, 19 bp, Mus musculus
  siRNA target sequence for Adamts2 (NM_175643.1,556-574).
cgtggcagacttacctaaa

SEQ ID NO: 578331 - DNA, 19 bp, Mus musculus
  siRNA target sequence for Adamts2 (NM_175643.1,579-597).
cctcggtggcgctcagtaa

SEQ ID NO: 578332 - DNA, 19 bp, Mus musculus
  siRNA target sequence for Adamts2 (NM_175643.1,583-601).
ggtggcgctcagtaactgt

SEQ ID NO: 578333 - DNA, 19 bp, Mus musculus
  siRNA target sequence for Adamts2 (NM_175643.1,864-882).
ccacggacgatgactacaa

SEQ ID NO: 578334 - DNA, 19 bp, Mus musculus
  siRNA target sequence for Adamts2 (NM_175643.1,867-885).
cggacgatgactacaacat

SEQ ID NO: 578335 - DNA, 19 bp, Mus musculus
  siRNA target sequence for Adamts2 (NM_175643.1,868-886).
ggacgatgactacaacatt

SEQ ID NO: 578336 - DNA, 19 bp, Mus musculus
  siRNA target sequence for Adamts2 (NM_175643.1,1065-1083).
gcctcattgagattggaaa

SEQ ID NO: 578337 - DNA, 19 bp, Mus musculus
  siRNA target sequence for Adamts2 (NM_175643.1,1452-1470).
gccgctacctgcattccta

SEQ ID NO: 578338 - DNA, 19 bp, Mus musculus
  siRNA target sequence for Adamts2 (NM_175643.1,1453-1471).
ccgctacctgcattcctat

SEQ ID NO: 578339 - DNA, 19 bp, Mus musculus
  siRNA target sequence for Adamts2 (NM_175643.1,1550-1568).
gagcagtgtcgctttgact

SEQ ID NO: 578340 - DNA, 19 bp, Mus musculus
  siRNA target sequence for Adamts2 (NM_175643.1,1649-1667).
ccctacttttgcaagacaa

SEQ ID NO: 578341 - DNA, 19 bp, Mus musculus
  siRNA target sequence for Adamts2 (NM_175643.1,1650-1668).
cctacttttgcaagacaaa

SEQ ID NO: 578342 - DNA, 19 bp, Mus musculus
  siRNA target sequence for Adamts2 (NM_175643.1,1679-1697).
ccactggatggtactatgt

SEQ ID NO: 578343 - DNA, 19 bp, Mus musculus
  siRNA target sequence for Adamts2 (NM_175643.1,1737-1755).
ggctgacacccgatatcct

SEQ ID NO: 578344 - DNA, 19 bp, Mus musculus
  siRNA target sequence for Adamts2 (NM_175643.1,1884-1902).
cgggcctggcctatgactt

SEQ ID NO: 578345 - DNA, 19 bp, Mus musculus
  siRNA target sequence for Adamts2 (NM_175643.1,2232-2250).
gcgacaacacccactgtaa

SEQ ID NO: 578346 - DNA, 19 bp, Mus musculus
  siRNA target sequence for Adamts2 (NM_175643.1,2275-2293).
gtcaccgaggaaacaagat

SEQ ID NO: 578347 - DNA, 19 bp, Mus musculus
  siRNA target sequence for Adamts2 (NM_175643.1,2277-2295).
caccgaggaaacaagatta

SEQ ID NO: 578348 - DNA, 19 bp, Mus musculus
  siRNA target sequence for Adamts2 (NM_175643.1,2288-2306).
caagattacatcaagatgt

SEQ ID NO: 578349 - DNA, 19 bp, Mus musculus
  siRNA target sequence for Adamts2 (NM_175643.1,2419-2437).
ccacttggaccccaattct

SEQ ID NO: 578350 - DNA, 19 bp, Mus musculus
  siRNA target sequence for Adamts2 (NM_175643.1,2422-2440).
cttggaccccaattctaga

SEQ ID NO: 578351 - DNA, 19 bp, Mus musculus
  siRNA target sequence for Adamts2 (NM_175643.1,2431-2449).
caattctagatccttcatt

SEQ ID NO: 578352 - DNA, 19 bp, Mus musculus
  siRNA target sequence for Adamts2 (NM_175643.1,2563-2581).
gatctcactgacatacaaa

SEQ ID NO: 578353 - DNA, 19 bp, Mus musculus
  siRNA target sequence for Adamts2 (NM_175643.1,2593-2611).
cgaggactccctcaatgtt

SEQ ID NO: 578354 - DNA, 19 bp, Mus musculus
  siRNA target sequence for Adamts2 (NM_175643.1,2605-2623).
caatgttgacgacaacaat

SEQ ID NO: 578355 - DNA, 19 bp, Mus musculus
  siRNA target sequence for Adamts2 (NM_175643.1,2696-2714).
ggagggtcccagttcacta

SEQ ID NO: 578356 - DNA, 19 bp, Mus musculus
  siRNA target sequence for Adamts2 (NM_175643.1,2697-2715).
gagggtcccagttcactaa

SEQ ID NO: 578357 - DNA, 19 bp, Mus musculus
  siRNA target sequence for Adamts2 (NM_175643.1,2699-2717).
gggtcccagttcactaagt

SEQ ID NO: 578358 - DNA, 19 bp, Mus musculus
  siRNA target sequence for Adamts2 (NM_175643.1,2700-2718).
ggtcccagttcactaagta

SEQ ID NO: 578359 - DNA, 19 bp, Mus musculus
  siRNA target sequence for Adamts2 (NM_175643.1,2893-2911).
gcgctccgtccgctgtata

SEQ ID NO: 578360 - DNA, 19 bp, Mus musculus
  siRNA target sequence for Adamts2 (NM_175643.1,2895-2913).
gctccgtccgctgtataca

SEQ ID NO: 578361 - DNA, 19 bp, Mus musculus
  siRNA target sequence for Adamts2 (NM_175643.1,2896-2914).
ctccgtccgctgtatacaa

SEQ ID NO: 578362 - DNA, 19 bp, Mus musculus
  siRNA target sequence for Adamts2 (NM_175643.1,3085-3103).
ctgtcgcactgcagatgat

SEQ ID NO: 578363 - DNA, 19 bp, Mus musculus
  siRNA target sequence for Adamts2 (NM_175643.1,3087-3105).
gtcgcactgcagatgataa

SEQ ID NO: 578364 - DNA, 19 bp, Mus musculus
  siRNA target sequence for Adamts2 (NM_175643.1,3270-3288).
gccaaggcgacaagtcaat

SEQ ID NO: 578365 - DNA, 19 bp, Mus musculus
  siRNA target sequence for Adamts2 (NM_175643.1,3275-3293).
ggcgacaagtcaatgttct

SEQ ID NO: 578366 - DNA, 19 bp, Mus musculus
  siRNA target sequence for Adamts2 (NM_175643.1,3278-3296).
gacaagtcaatgttctgta

SEQ ID NO: 578367 - DNA, 19 bp, Mus musculus
  siRNA target sequence for Adamts2 (NM_175643.1,3411-3429).
ctcccgggaagcacaatga

SEQ ID NO: 578368 - DNA, 19 bp, Mus musculus
  siRNA target sequence for Adamts2 (NM_175643.1,3531-3549).
ccaatgccactgaagatca

SEQ ID NO: 578369 - DNA, 19 bp, Mus musculus
  siRNA target sequence for Adamts2 (NM_175643.1,3566-3584).
gtggatgtcccctacaaaa

SEQ ID NO: 578370 - DNA, 19 bp, Mus musculus
  siRNA target sequence for Adamts2 (NM_175643.1,3630-3648).
gacggccaagcctgtatgt

SEQ ID NO: 578371 - DNA, 19 bp, Mus musculus
  siRNA target sequence for Adamts2 (NM_175643.1,3633-3651).
ggccaagcctgtatgtaaa

SEQ ID NO: 578372 - DNA, 19 bp, Mus musculus
  siRNA target sequence for Osgep (NM_133676.1,336-354).
gtggcccagttgtggaata

SEQ ID NO: 578373 - DNA, 19 bp, Mus musculus
  siRNA target sequence for Osgep (NM_133676.1,347-365).
gtggaataagcctttgctt

SEQ ID NO: 578374 - DNA, 19 bp, Mus musculus
  siRNA target sequence for Osgep (NM_133676.1,527-545).
ctgcctggatcgttttgct

SEQ ID NO: 578375 - DNA, 19 bp, Mus musculus
  siRNA target sequence for Osgep (NM_133676.1,1018-1036).
ggtataggacagatgaagt

SEQ ID NO: 578376 - DNA, 19 bp, Mus musculus
  siRNA target sequence for 4933424D07Rik (NM_027665.1,114-132).
ggcgaagaagacctactat

SEQ ID NO: 578377 - DNA, 19 bp, Mus musculus
  siRNA target sequence for 4933424D07Rik (NM_027665.1,115-133).
gcgaagaagacctactatt

SEQ ID NO: 578378 - DNA, 19 bp, Mus musculus
  siRNA target sequence for 4933424D07Rik (NM_027665.1,138-156).
cctgactggggctttgact

SEQ ID NO: 578379 - DNA, 19 bp, Mus musculus
  siRNA target sequence for 4933424D07Rik (NM_027665.1,145-163).
ggggctttgactcatatga

SEQ ID NO: 578380 - DNA, 19 bp, Mus musculus
  siRNA target sequence for 4933424D07Rik (NM_027665.1,146-164).
gggctttgactcatatgaa

SEQ ID NO: 578381 - DNA, 19 bp, Mus musculus
  siRNA target sequence for 4933424D07Rik (NM_027665.1,147-165).
ggctttgactcatatgaaa

SEQ ID NO: 578382 - DNA, 19 bp, Mus musculus
  siRNA target sequence for 4933424D07Rik (NM_027665.1,224-242).
gtcatacctcttacagata

SEQ ID NO: 578383 - DNA, 19 bp, Mus musculus
  siRNA target sequence for 4933424D07Rik (NM_027665.1,247-265).
gcaaggcgcgtgttgttca

SEQ ID NO: 578384 - DNA, 19 bp, Mus musculus
  siRNA target sequence for 4933424D07Rik (NM_027665.1,266-284).
cctgcgacccaagaagtta

SEQ ID NO: 578385 - DNA, 19 bp, Mus musculus
  siRNA target sequence for 4933424D07Rik (NM_027665.1,328-346).
gcagtctgatagaggatta

SEQ ID NO: 578386 - DNA, 19 bp, Mus musculus
  siRNA target sequence for 4933424D07Rik (NM_027665.1,329-347).
cagtctgatagaggattat

SEQ ID NO: 578387 - DNA, 19 bp, Mus musculus
  siRNA target sequence for 4933424D07Rik (NM_027665.1,341-359).
ggattatccgcatatacca

SEQ ID NO: 578388 - DNA, 19 bp, Mus musculus
  siRNA target sequence for 4933424D07Rik (NM_027665.1,358-376).
cagaccagtgtaattacgt

SEQ ID NO: 578389 - DNA, 19 bp, Mus musculus
  siRNA target sequence for 4933424D07Rik (NM_027665.1,433-451).
gtctgcgaggcgtactgaa

SEQ ID NO: 578390 - DNA, 19 bp, Mus musculus
  siRNA target sequence for 4933424D07Rik (NM_027665.1,437-455).
gcgaggcgtactgaacatt

SEQ ID NO: 578391 - DNA, 19 bp, Mus musculus
  siRNA target sequence for 4933424D07Rik (NM_027665.1,439-457).
gaggcgtactgaacattga

SEQ ID NO: 578392 - DNA, 19 bp, Mus musculus
  siRNA target sequence for 4933424D07Rik (NM_027665.1,521-539).
cgtaactgaggacaacttt

SEQ ID NO: 578393 - DNA, 19 bp, Mus musculus
  siRNA target sequence for 4933424D07Rik (NM_027665.1,599-617).
ggagatggctaggataagt

SEQ ID NO: 578394 - DNA, 19 bp, Mus musculus
  siRNA target sequence for 4933424D07Rik (NM_027665.1,600-618).
gagatggctaggataagta

SEQ ID NO: 578395 - DNA, 19 bp, Mus musculus
  siRNA target sequence for 4933424D07Rik (NM_027665.1,605-623).
ggctaggataagtagtttt

SEQ ID NO: 578396 - DNA, 19 bp, Mus musculus
  siRNA target sequence for 4933424D07Rik (NM_027665.1,607-625).
ctaggataagtagttttca

SEQ ID NO: 578397 - DNA, 19 bp, Mus musculus
  siRNA target sequence for 4933424D07Rik (NM_027665.1,631-649).
cctacaagcaccaaaggta

SEQ ID NO: 578398 - DNA, 19 bp, Mus musculus
  siRNA target sequence for 4933424D07Rik (NM_027665.1,693-711).
gcccgtggcaatatgtcta

SEQ ID NO: 578399 - DNA, 19 bp, Mus musculus
  siRNA target sequence for 4933424D07Rik (NM_027665.1,717-735).
gtggatgacgccattcttt

SEQ ID NO: 578400 - DNA, 19 bp, Mus musculus
  siRNA target sequence for 4933424D07Rik (NM_027665.1,727-745).
ccattcttttggcttcaat

SEQ ID NO: 578401 - DNA, 19 bp, Mus musculus
  siRNA target sequence for 4933424D07Rik (NM_027665.1,762-780).
caggatgtcagcttgaaga

SEQ ID NO: 578402 - DNA, 19 bp, Mus musculus
  siRNA target sequence for 4933424D07Rik (NM_027665.1,772-790).
gcttgaagattcaactgaa

SEQ ID NO: 578403 - DNA, 19 bp, Mus musculus
  siRNA target sequence for 4933424D07Rik (NM_027665.1,805-823).
ggacatactataatagaat

SEQ ID NO: 578404 - DNA, 19 bp, Mus musculus
  siRNA target sequence for 4933424D07Rik (NM_027665.1,806-824).
gacatactataatagaata

SEQ ID NO: 578405 - DNA, 19 bp, Mus musculus
  siRNA target sequence for 4933424D07Rik (NM_027665.1,837-855).
cccagtttatctgaagttt

SEQ ID NO: 578406 - DNA, 19 bp, Mus musculus
  siRNA target sequence for 4933424D07Rik (NM_027665.1,838-856).
ccagtttatctgaagtttt

SEQ ID NO: 578407 - DNA, 19 bp, Mus musculus
  siRNA target sequence for 4933424D07Rik (NM_027665.1,839-857).
cagtttatctgaagtttta

SEQ ID NO: 578408 - DNA, 19 bp, Mus musculus
  siRNA target sequence for 4933424D07Rik (NM_027665.1,858-876).
ggtcaattcgtgcattaca

SEQ ID NO: 578409 - DNA, 19 bp, Mus musculus
  siRNA target sequence for 4933424D07Rik (NM_027665.1,859-877).
gtcaattcgtgcattacaa

SEQ ID NO: 578410 - DNA, 19 bp, Mus musculus
  siRNA target sequence for 4933424D07Rik (NM_027665.1,1010-1028).
cctcaatgttaatatcctt

SEQ ID NO: 578411 - DNA, 19 bp, Mus musculus
  siRNA target sequence for 4933424D07Rik (NM_027665.1,1061-1079).
ccattgtgtggggatgata

SEQ ID NO: 578412 - DNA, 19 bp, Mus musculus
  siRNA target sequence for 4933424D07Rik (NM_027665.1,1137-1155).
cgtacagggtttagtaact

SEQ ID NO: 578413 - DNA, 19 bp, Mus musculus
  siRNA target sequence for 4933424D07Rik (NM_027665.1,1159-1177).
gttaccatcagtatttttt

SEQ ID NO: 578414 - DNA, 19 bp, Mus musculus
  siRNA target sequence for 4933424D07Rik (NM_027665.1,1217-1235).
cccaaagctacatatcgta

SEQ ID NO: 578415 - DNA, 19 bp, Mus musculus
  siRNA target sequence for 4933424D07Rik (NM_027665.1,1232-1250).
cgtagagaggtgtggaaat

SEQ ID NO: 578416 - DNA, 19 bp, Mus musculus
  siRNA target sequence for 4933424D07Rik (NM_027665.1,1233-1251).
gtagagaggtgtggaaata

SEQ ID NO: 578417 - DNA, 19 bp, Mus musculus
  siRNA target sequence for 4933424D07Rik (NM_027665.1,1468-1486).
gtccagatgactcttacaa

SEQ ID NO: 578418 - DNA, 19 bp, Mus musculus
  siRNA target sequence for 4933424D07Rik (NM_027665.1,1592-1610).
ccctcaccagtgttacgaa

SEQ ID NO: 578419 - DNA, 19 bp, Mus musculus
  siRNA target sequence for 4933424D07Rik (NM_027665.1,1603-1621).
gttacgaagcagtgaacat

SEQ ID NO: 578420 - DNA, 19 bp, Mus musculus
  siRNA target sequence for 4933424D07Rik (NM_027665.1,1607-1625).
cgaagcagtgaacatgtta

SEQ ID NO: 578421 - DNA, 19 bp, Mus musculus
  siRNA target sequence for 4933424D07Rik (NM_027665.1,1653-1671).
gtaaatgctacccgatata

SEQ ID NO: 578422 - DNA, 19 bp, Mus musculus
  siRNA target sequence for 4933424D07Rik (NM_027665.1,1665-1683).
cgatatacaaggtgtcata

SEQ ID NO: 578423 - DNA, 19 bp, Mus musculus
  siRNA target sequence for 4933424D07Rik (NM_027665.1,1703-1721).
caggctacagtgtatcaat

SEQ ID NO: 578424 - DNA, 19 bp, Mus musculus
  siRNA target sequence for 4933424D07Rik (NM_027665.1,1705-1723).
ggctacagtgtatcaatgt

SEQ ID NO: 578425 - DNA, 19 bp, Mus musculus
  siRNA target sequence for 4933424D07Rik (NM_027665.1,1744-1762).
cagatcacaccattatact

SEQ ID NO: 578426 - DNA, 19 bp, Mus musculus
  siRNA target sequence for 4933424D07Rik (NM_027665.1,1773-1791).
ctgaggggagataatctca

SEQ ID NO: 578427 - DNA, 19 bp, Mus musculus
  siRNA target sequence for 4933424D07Rik (NM_027665.1,1775-1793).
gaggggagataatctcatt

SEQ ID NO: 578428 - DNA, 19 bp, Mus musculus
  siRNA target sequence for 4933424D07Rik (NM_027665.1,1796-1814).
ctggggcacaagctatcat

SEQ ID NO: 578429 - DNA, 19 bp, Mus musculus
  siRNA target sequence for 4933424D07Rik (NM_027665.1,1829-1847).
ccatggggtacctgacata

SEQ ID NO: 578430 - DNA, 19 bp, Mus musculus
  siRNA target sequence for 4933424D07Rik (NM_027665.1,1844-1862).
cataggtgacattagtgat

SEQ ID NO: 578431 - DNA, 19 bp, Mus musculus
  siRNA target sequence for 4933424D07Rik (NM_027665.1,1878-1896).
cgtaatcgggtgtgtctta

SEQ ID NO: 578432 - DNA, 19 bp, Mus musculus
  siRNA target sequence for 4933424D07Rik (NM_027665.1,1879-1897).
gtaatcgggtgtgtcttaa

SEQ ID NO: 578433 - DNA, 19 bp, Mus musculus
  siRNA target sequence for 4933424D07Rik (NM_027665.1,1958-1976).
ccgaggtgtttgcaacaat

SEQ ID NO: 578434 - DNA, 19 bp, Mus musculus
  siRNA target sequence for 4933424D07Rik (NM_027665.1,1959-1977).
cgaggtgtttgcaacaata

SEQ ID NO: 578435 - DNA, 19 bp, Mus musculus
  siRNA target sequence for 4933424D07Rik (NM_027665.1,1965-1983).
gtttgcaacaatagaaaga

SEQ ID NO: 578436 - DNA, 19 bp, Mus musculus
  siRNA target sequence for 4933424D07Rik (NM_027665.1,2001-2019).
ggctgggaacccccatttt

SEQ ID NO: 578437 - DNA, 19 bp, Mus musculus
  siRNA target sequence for 4933424D07Rik (NM_027665.1,2062-2080).
ctggacccaggatagaagt

SEQ ID NO: 578438 - DNA, 19 bp, Mus musculus
  siRNA target sequence for 4933424D07Rik (NM_027665.1,2089-2107).
cgactagtgctctgtacat

SEQ ID NO: 578439 - DNA, 19 bp, Mus musculus
  siRNA target sequence for 4933424D07Rik (NM_027665.1,2105-2123).
catgttgcgtactatctta

SEQ ID NO: 578440 - DNA, 19 bp, Mus musculus
  siRNA target sequence for 4933424D07Rik (NM_027665.1,2154-2172).
gggcagctgataagaaatt

SEQ ID NO: 578441 - DNA, 19 bp, Mus musculus
  siRNA target sequence for 4933424D07Rik (NM_027665.1,2155-2173).
ggcagctgataagaaattt

SEQ ID NO: 578442 - DNA, 19 bp, Mus musculus
  siRNA target sequence for 4933424D07Rik (NM_027665.1,2188-2206).
gccgtaatctccagcaaaa

SEQ ID NO: 578443 - DNA, 19 bp, Mus musculus
  siRNA target sequence for 4933424D07Rik (NM_027665.1,2189-2207).
ccgtaatctccagcaaaaa

SEQ ID NO: 578444 - DNA, 19 bp, Mus musculus
  siRNA target sequence for 4933424D07Rik (NM_027665.1,2190-2208).
cgtaatctccagcaaaaaa

SEQ ID NO: 578445 - DNA, 19 bp, Mus musculus
  siRNA target sequence for Adam11 (NM_009613.1,378-396).
cagccgggagggaacaaga

SEQ ID NO: 578446 - DNA, 19 bp, Mus musculus
  siRNA target sequence for Adam11 (NM_009613.1,381-399).
ccgggagggaacaagacaa

SEQ ID NO: 578447 - DNA, 19 bp, Mus musculus
  siRNA target sequence for Adam11 (NM_009613.1,506-524).
ctgatggcaacctgactta

SEQ ID NO: 578448 - DNA, 19 bp, Mus musculus
  siRNA target sequence for Adam11 (NM_009613.1,508-526).
gatggcaacctgacttaca

SEQ ID NO: 578449 - DNA, 19 bp, Mus musculus
  siRNA target sequence for Adam11 (NM_009613.1,673-691).
cccaactggcccaagctaa

SEQ ID NO: 578450 - DNA, 19 bp, Mus musculus
  siRNA target sequence for Adam11 (NM_009613.1,729-747).
gcacagcgagaccaagtat

SEQ ID NO: 578451 - DNA, 19 bp, Mus musculus
  siRNA target sequence for Adam11 (NM_009613.1,808-826).
ctcaccagcaactttgcaa

SEQ ID NO: 578452 - DNA, 19 bp, Mus musculus
  siRNA target sequence for Adam11 (NM_009613.1,813-831).
cagcaactttgcaaaatct

SEQ ID NO: 578453 - DNA, 19 bp, Mus musculus
  siRNA target sequence for Adam11 (NM_009613.1,841-859).
ctggcagatgtgatataca

SEQ ID NO: 578454 - DNA, 19 bp, Mus musculus
  siRNA target sequence for Adam11 (NM_009613.1,867-885).
gctcaacacaagaattgtt

SEQ ID NO: 578455 - DNA, 19 bp, Mus musculus
  siRNA target sequence for Adam11 (NM_009613.1,1277-1295).
gcagcatcgacgaatacaa

SEQ ID NO: 578456 - DNA, 19 bp, Mus musculus
  siRNA target sequence for Adam11 (NM_009613.1,1318-1336).
gggagctgcctgttcaaca

SEQ ID NO: 578457 - DNA, 19 bp, Mus musculus
  siRNA target sequence for Adam11 (NM_009613.1,1436-1454).
ggggcaactgctgcaaaaa

SEQ ID NO: 578458 - DNA, 19 bp, Mus musculus
  siRNA target sequence for Adam11 (NM_009613.1,1437-1455).
gggcaactgctgcaaaaaa

SEQ ID NO: 578459 - DNA, 19 bp, Mus musculus
  siRNA target sequence for Adam11 (NM_009613.1,1438-1456).
ggcaactgctgcaaaaaat

SEQ ID NO: 578460 - DNA, 19 bp, Mus musculus
  siRNA target sequence for Adam11 (NM_009613.1,1590-1608).
ccagtgtccccctaacctt

SEQ ID NO: 578461 - DNA, 19 bp, Mus musculus
  siRNA target sequence for Adam11 (NM_009613.1,1620-1638).
cggttactactgtgatcat

SEQ ID NO: 578462 - DNA, 19 bp, Mus musculus
  siRNA target sequence for Adam11 (NM_009613.1,1717-1735).
gatcgtttctgctatgaga

SEQ ID NO: 578463 - DNA, 19 bp, Mus musculus
  siRNA target sequence for Adam11 (NM_009613.1,1752-1770).
gacagagcgtggaaactgt

SEQ ID NO: 578464 - DNA, 19 bp, Mus musculus
  siRNA target sequence for Adam11 (NM_009613.1,1828-1846).
cttctgtgcgtcaacatct

SEQ ID NO: 578465 - DNA, 19 bp, Mus musculus
  siRNA target sequence for Adam11 (NM_009613.1,2105-2123).
gcaacgaggggaagtgtat

SEQ ID NO: 578466 - DNA, 19 bp, Mus musculus
  siRNA target sequence for Adam11 (NM_009613.1,2192-2210).
gggagactgagagatacaa

SEQ ID NO: 578467 - DNA, 19 bp, Mus musculus
  siRNA target sequence for Adam11 (NM_009613.1,2193-2211).
ggagactgagagatacaaa

SEQ ID NO: 578468 - DNA, 19 bp, Mus musculus
  siRNA target sequence for Adam11 (NM_009613.1,2216-2234).
ccagcggtaccaacatcat

SEQ ID NO: 578469 - DNA, 19 bp, Mus musculus
  siRNA target sequence for Adam11 (NM_009613.1,2219-2237).
gcggtaccaacatcatcat

SEQ ID NO: 578470 - DNA, 19 bp, Mus musculus
  siRNA target sequence for Adam11 (NM_009613.1,2220-2238).
cggtaccaacatcatcatt

SEQ ID NO: 578471 - DNA, 19 bp, Mus musculus
  siRNA target sequence for Adam18 (NM_010084.1,103-121).
gcctcgattcggaaggaat

SEQ ID NO: 578472 - DNA, 19 bp, Mus musculus
  siRNA target sequence for Adam18 (NM_010084.1,104-122).
cctcgattcggaaggaata

SEQ ID NO: 578473 - DNA, 19 bp, Mus musculus
  siRNA target sequence for Adam18 (NM_010084.1,105-123).
ctcgattcggaaggaatat

SEQ ID NO: 578474 - DNA, 19 bp, Mus musculus
  siRNA target sequence for Adam18 (NM_010084.1,117-135).
ggaatatgcctgcatatca

SEQ ID NO: 578475 - DNA, 19 bp, Mus musculus
  siRNA target sequence for Adam18 (NM_010084.1,186-204).
gtgacatacgtcattacca

SEQ ID NO: 578476 - DNA, 19 bp, Mus musculus
  siRNA target sequence for Adam18 (NM_010084.1,188-206).
gacatacgtcattaccatt

SEQ ID NO: 578477 - DNA, 19 bp, Mus musculus
  siRNA target sequence for Adam18 (NM_010084.1,255-273).
cagaactttttggtttaca

SEQ ID NO: 578478 - DNA, 19 bp, Mus musculus
  siRNA target sequence for Adam18 (NM_010084.1,257-275).
gaactttttggtttacaca

SEQ ID NO: 578479 - DNA, 19 bp, Mus musculus
  siRNA target sequence for Adam18 (NM_010084.1,266-284).
ggtttacacatacaatgaa

SEQ ID NO: 578480 - DNA, 19 bp, Mus musculus
  siRNA target sequence for Adam18 (NM_010084.1,267-285).
gtttacacatacaatgaaa

SEQ ID NO: 578481 - DNA, 19 bp, Mus musculus
  siRNA target sequence for Adam18 (NM_010084.1,301-319).
ctgactcatcacacttttt

SEQ ID NO: 578482 - DNA, 19 bp, Mus musculus
  siRNA target sequence for Adam18 (NM_010084.1,328-346).
gccattaccgaggatatgt

SEQ ID NO: 578483 - DNA, 19 bp, Mus musculus
  siRNA target sequence for Adam18 (NM_010084.1,329-347).
ccattaccgaggatatgtt

SEQ ID NO: 578484 - DNA, 19 bp, Mus musculus
  siRNA target sequence for Adam18 (NM_010084.1,485-503).
gagcaacagctcaatgcta

SEQ ID NO: 578485 - DNA, 19 bp, Mus musculus
  siRNA target sequence for Adam18 (NM_010084.1,494-512).
ctcaatgctagcaggaaat

SEQ ID NO: 578486 - DNA, 19 bp, Mus musculus
  siRNA target sequence for Adam18 (NM_010084.1,638-656).
ctatatgggatctgacatt

SEQ ID NO: 578487 - DNA, 19 bp, Mus musculus
  siRNA target sequence for Adam18 (NM_010084.1,659-677).
ggccataacacagaagatt

SEQ ID NO: 578488 - DNA, 19 bp, Mus musculus
  siRNA target sequence for Adam18 (NM_010084.1,732-750).
gtgttagcctccttggaat

SEQ ID NO: 578489 - DNA, 19 bp, Mus musculus
  siRNA target sequence for Adam18 (NM_010084.1,752-770).
gtggtcagataaaaatcat

SEQ ID NO: 578490 - DNA, 19 bp, Mus musculus
  siRNA target sequence for Adam18 (NM_010084.1,780-798).
gatggaaatgctactgata

SEQ ID NO: 578491 - DNA, 19 bp, Mus musculus
  siRNA target sequence for Adam18 (NM_010084.1,793-811).
ctgatattttacaaagact

SEQ ID NO: 578492 - DNA, 19 bp, Mus musculus
  siRNA target sequence for Adam18 (NM_010084.1,815-833).
ggactggaaacgagactat

SEQ ID NO: 578493 - DNA, 19 bp, Mus musculus
  siRNA target sequence for Adam18 (NM_010084.1,842-860).
gcagtccaatgaaataaca

SEQ ID NO: 578494 - DNA, 19 bp, Mus musculus
  siRNA target sequence for Adam18 (NM_010084.1,877-895).
ggagacacccgaaatacat

SEQ ID NO: 578495 - DNA, 19 bp, Mus musculus
  siRNA target sequence for Adam18 (NM_010084.1,902-920).
ggcatcgccaggtgaaata

SEQ ID NO: 578496 - DNA, 19 bp, Mus musculus
  siRNA target sequence for Adam18 (NM_010084.1,903-921).
gcatcgccaggtgaaatat

SEQ ID NO: 578497 - DNA, 19 bp, Mus musculus
  siRNA target sequence for Adam18 (NM_010084.1,978-996).
ggattctcagtggttatca

SEQ ID NO: 578498 - DNA, 19 bp, Mus musculus
  siRNA target sequence for Adam18 (NM_010084.1,989-1007).
ggttatcactcaactgatt

SEQ ID NO: 578499 - DNA, 19 bp, Mus musculus
  siRNA target sequence for Adam18 (NM_010084.1,1010-1028).
ccttcacataggattaaca

SEQ ID NO: 578500 - DNA, 19 bp, Mus musculus
  siRNA target sequence for Adam18 (NM_010084.1,1011-1029).
cttcacataggattaacat

SEQ ID NO: 578501 - DNA, 19 bp, Mus musculus
  siRNA target sequence for Adam18 (NM_010084.1,1031-1049).
cgacgacaatattagaaat

SEQ ID NO: 578502 - DNA, 19 bp, Mus musculus
  siRNA target sequence for Adam18 (NM_010084.1,1032-1050).
gacgacaatattagaaatt

SEQ ID NO: 578503 - DNA, 19 bp, Mus musculus
  siRNA target sequence for Adam18 (NM_010084.1,1059-1077).
cccagcgctccatgcataa

SEQ ID NO: 578504 - DNA, 19 bp, Mus musculus
  siRNA target sequence for Adam18 (NM_010084.1,1063-1081).
gcgctccatgcataatgca

SEQ ID NO: 578505 - DNA, 19 bp, Mus musculus
  siRNA target sequence for Adam18 (NM_010084.1,1137-1155).
gactacatgcactatgttt

SEQ ID NO: 578506 - DNA, 19 bp, Mus musculus
  siRNA target sequence for Adam18 (NM_010084.1,1218-1236).
gccgtgtgtggcaatggaa

SEQ ID NO: 578507 - DNA, 19 bp, Mus musculus
  siRNA target sequence for Adam18 (NM_010084.1,1219-1237).
ccgtgtgtggcaatggaat

SEQ ID NO: 578508 - DNA, 19 bp, Mus musculus
  siRNA target sequence for Adam18 (NM_010084.1,1274-1292).
gacggaatgtcaatttaaa

SEQ ID NO: 578509 - DNA, 19 bp, Mus musculus
  siRNA target sequence for Adam18 (NM_010084.1,1418-1436).
gtgtgacttcacagaatat

SEQ ID NO: 578510 - DNA, 19 bp, Mus musculus
  siRNA target sequence for Adam18 (NM_010084.1,1496-1514).
caggttgggatctgcatat

SEQ ID NO: 578511 - DNA, 19 bp, Mus musculus
  siRNA target sequence for Adam18 (NM_010084.1,1509-1527).
gcatattgctacaatggaa

SEQ ID NO: 578512 - DNA, 19 bp, Mus musculus
  siRNA target sequence for Adam18 (NM_010084.1,1547-1565).
ccaatgtgtcagtttattt

SEQ ID NO: 578513 - DNA, 19 bp, Mus musculus
  siRNA target sequence for Adam18 (NM_010084.1,1610-1628).
gaattcaccacgtgaaaat

SEQ ID NO: 578514 - DNA, 19 bp, Mus musculus
  siRNA target sequence for Adam18 (NM_010084.1,1686-1704).
ctctgtgggaaattagctt

SEQ ID NO: 578515 - DNA, 19 bp, Mus musculus
  siRNA target sequence for Adam18 (NM_010084.1,1879-1897).
gaacctgcaaagaagttaa

SEQ ID NO: 578516 - DNA, 19 bp, Mus musculus
  siRNA target sequence for Adam18 (NM_010084.1,1882-1900).
cctgcaaagaagttaattt

SEQ ID NO: 578517 - DNA, 19 bp, Mus musculus
  siRNA target sequence for Adam18 (NM_010084.1,1911-1929).
gactgcaacgccactaaga

SEQ ID NO: 578518 - DNA, 19 bp, Mus musculus
  siRNA target sequence for Adam18 (NM_010084.1,1938-1956).
gggaatgggatatgtaata

SEQ ID NO: 578519 - DNA, 19 bp, Mus musculus
  siRNA target sequence for Adam18 (NM_010084.1,1939-1957).
ggaatgggatatgtaataa

SEQ ID NO: 578520 - DNA, 19 bp, Mus musculus
  siRNA target sequence for Adam18 (NM_010084.1,1990-2008).
ggcctccagattgtaactt

SEQ ID NO: 578521 - DNA, 19 bp, Mus musculus
  siRNA target sequence for Adam18 (NM_010084.1,1991-2009).
gcctccagattgtaactta

SEQ ID NO: 578522 - DNA, 19 bp, Mus musculus
  siRNA target sequence for Adam18 (NM_010084.1,1993-2011).
ctccagattgtaacttaca

SEQ ID NO: 578523 - DNA, 19 bp, Mus musculus
  siRNA target sequence for Adam18 (NM_010084.1,1995-2013).
ccagattgtaacttacaga

SEQ ID NO: 578524 - DNA, 19 bp, Mus musculus
  siRNA target sequence for Adam18 (NM_010084.1,1996-2014).
cagattgtaacttacagat

SEQ ID NO: 578525 - DNA, 19 bp, Mus musculus
  siRNA target sequence for Adam18 (NM_010084.1,2074-2092).
ctacaaagcgcctgagtaa

SEQ ID NO: 578526 - DNA, 19 bp, Mus musculus
  siRNA target sequence for Adam18 (NM_010084.1,2077-2095).
caaagcgcctgagtaagaa

SEQ ID NO: 578527 - DNA, 19 bp, Mus musculus
  siRNA target sequence for Adam2 (NM_009618.1,83-101).
gaaggcactcgtgagaaat

SEQ ID NO: 578528 - DNA, 19 bp, Mus musculus
  siRNA target sequence for Adam2 (NM_009618.1,87-105).
gcactcgtgagaaattaca

SEQ ID NO: 578529 - DNA, 19 bp, Mus musculus
  siRNA target sequence for Adam2 (NM_009618.1,133-151).
ccggtccgtcacaagcaat

SEQ ID NO: 578530 - DNA, 19 bp, Mus musculus
  siRNA target sequence for Adam2 (NM_009618.1,147-165).
gcaatggctacgaaacaca

SEQ ID NO: 578531 - DNA, 19 bp, Mus musculus
  siRNA target sequence for Adam2 (NM_009618.1,162-180).
cacaggtgacctacaatct

SEQ ID NO: 578532 - DNA, 19 bp, Mus musculus
  siRNA target sequence for Adam2 (NM_009618.1,164-182).
caggtgacctacaatctca

SEQ ID NO: 578533 - DNA, 19 bp, Mus musculus
  siRNA target sequence for Adam2 (NM_009618.1,166-184).
ggtgacctacaatctcaaa

SEQ ID NO: 578534 - DNA, 19 bp, Mus musculus
  siRNA target sequence for Adam2 (NM_009618.1,167-185).
gtgacctacaatctcaaaa

SEQ ID NO: 578535 - DNA, 19 bp, Mus musculus
  siRNA target sequence for Adam2 (NM_009618.1,171-189).
cctacaatctcaaaatcga

SEQ ID NO: 578536 - DNA, 19 bp, Mus musculus
  siRNA target sequence for Adam2 (NM_009618.1,172-190).
ctacaatctcaaaatcgaa

SEQ ID NO: 578537 - DNA, 19 bp, Mus musculus
  siRNA target sequence for Adam2 (NM_009618.1,198-216).
catacaccttggacctaat

SEQ ID NO: 578538 - DNA, 19 bp, Mus musculus
  siRNA target sequence for Adam2 (NM_009618.1,202-220).
caccttggacctaatgcaa

SEQ ID NO: 578539 - DNA, 19 bp, Mus musculus
  siRNA target sequence for Adam2 (NM_009618.1,205-223).
cttggacctaatgcaaaaa

SEQ ID NO: 578540 - DNA, 19 bp, Mus musculus
  siRNA target sequence for Adam2 (NM_009618.1,232-250).
gcctcccaactttagagta

SEQ ID NO: 578541 - DNA, 19 bp, Mus musculus
  siRNA target sequence for Adam2 (NM_009618.1,233-251).
cctcccaactttagagtat

SEQ ID NO: 578542 - DNA, 19 bp, Mus musculus
  siRNA target sequence for Adam2 (NM_009618.1,236-254).
cccaactttagagtataca

SEQ ID NO: 578543 - DNA, 19 bp, Mus musculus
  siRNA target sequence for Adam2 (NM_009618.1,238-256).
caactttagagtatacagt

SEQ ID NO: 578544 - DNA, 19 bp, Mus musculus
  siRNA target sequence for Adam2 (NM_009618.1,246-264).
gagtatacagttatgacaa

SEQ ID NO: 578545 - DNA, 19 bp, Mus musculus
  siRNA target sequence for Adam2 (NM_009618.1,309-327).
gctacttccaaggatacat

SEQ ID NO: 578546 - DNA, 19 bp, Mus musculus
  siRNA target sequence for Adam2 (NM_009618.1,329-347).
gaaggttatccaaattcta

SEQ ID NO: 578547 - DNA, 19 bp, Mus musculus
  siRNA target sequence for Adam2 (NM_009618.1,350-368).
gtgattgttagcacatgta

SEQ ID NO: 578548 - DNA, 19 bp, Mus musculus
  siRNA target sequence for Adam2 (NM_009618.1,352-370).
gattgttagcacatgtact

SEQ ID NO: 578549 - DNA, 19 bp, Mus musculus
  siRNA target sequence for Adam2 (NM_009618.1,396-414).
gaaacgttagctatggaat

SEQ ID NO: 578550 - DNA, 19 bp, Mus musculus
  siRNA target sequence for Adam2 (NM_009618.1,429-447).
cttccagtggttttgaaca

SEQ ID NO: 578551 - DNA, 19 bp, Mus musculus
  siRNA target sequence for Adam2 (NM_009618.1,438-456).
gttttgaacacgtgatcta

SEQ ID NO: 578552 - DNA, 19 bp, Mus musculus
  siRNA target sequence for Adam2 (NM_009618.1,493-511).
cgccgagaaggatatcgat

SEQ ID NO: 578553 - DNA, 19 bp, Mus musculus
  siRNA target sequence for Adam2 (NM_009618.1,494-512).
gccgagaaggatatcgatt

SEQ ID NO: 578554 - DNA, 19 bp, Mus musculus
  siRNA target sequence for Adam2 (NM_009618.1,495-513).
ccgagaaggatatcgattt

SEQ ID NO: 578555 - DNA, 19 bp, Mus musculus
  siRNA target sequence for Adam2 (NM_009618.1,496-514).
cgagaaggatatcgattta

SEQ ID NO: 578556 - DNA, 19 bp, Mus musculus
  siRNA target sequence for Adam2 (NM_009618.1,499-517).
gaaggatatcgatttaaga

SEQ ID NO: 578557 - DNA, 19 bp, Mus musculus
  siRNA target sequence for Adam2 (NM_009618.1,553-571).
gcggatcgtctctcactat

SEQ ID NO: 578558 - DNA, 19 bp, Mus musculus
  siRNA target sequence for Adam2 (NM_009618.1,554-572).
cggatcgtctctcactatt

SEQ ID NO: 578559 - DNA, 19 bp, Mus musculus
  siRNA target sequence for Adam2 (NM_009618.1,555-573).
ggatcgtctctcactattt

SEQ ID NO: 578560 - DNA, 19 bp, Mus musculus
  siRNA target sequence for Adam2 (NM_009618.1,559-577).
cgtctctcactatttggaa

SEQ ID NO: 578561 - DNA, 19 bp, Mus musculus
  siRNA target sequence for Adam2 (NM_009618.1,610-628).
gcatatcggggctgataca

SEQ ID NO: 578562 - DNA, 19 bp, Mus musculus
  siRNA target sequence for Adam2 (NM_009618.1,630-648).
ccattgtcactcaaaagat

SEQ ID NO: 578563 - DNA, 19 bp, Mus musculus
  siRNA target sequence for Adam2 (NM_009618.1,684-702).
ccccctttaatcttacagt

SEQ ID NO: 578564 - DNA, 19 bp, Mus musculus
  siRNA target sequence for Adam2 (NM_009618.1,685-703).
cccctttaatcttacagta

SEQ ID NO: 578565 - DNA, 19 bp, Mus musculus
  siRNA target sequence for Adam2 (NM_009618.1,686-704).
ccctttaatcttacagtaa

SEQ ID NO: 578566 - DNA, 19 bp, Mus musculus
  siRNA target sequence for Adam2 (NM_009618.1,750-768).
ccacaggcgatgctaacaa

SEQ ID NO: 578567 - DNA, 19 bp, Mus musculus
  siRNA target sequence for Adam2 (NM_009618.1,753-771).
caggcgatgctaacaagtt

SEQ ID NO: 578568 - DNA, 19 bp, Mus musculus
  siRNA target sequence for Adam2 (NM_009618.1,809-827).
gttctgcgaccacatgata

SEQ ID NO: 578569 - DNA, 19 bp, Mus musculus
  siRNA target sequence for Adam2 (NM_009618.1,839-857).
ctcgtctacaggaacacta

SEQ ID NO: 578570 - DNA, 19 bp, Mus musculus
  siRNA target sequence for Adam2 (NM_009618.1,847-865).
caggaacactaccgattat

SEQ ID NO: 578571 - DNA, 19 bp, Mus musculus
  siRNA target sequence for Adam2 (NM_009618.1,849-867).
ggaacactaccgattatgt

SEQ ID NO: 578572 - DNA, 19 bp, Mus musculus
  siRNA target sequence for Adam2 (NM_009618.1,850-868).
gaacactaccgattatgtt

SEQ ID NO: 578573 - DNA, 19 bp, Mus musculus
  siRNA target sequence for Adam2 (NM_009618.1,889-907).
gatgtgtgacaagaactat

SEQ ID NO: 578574 - DNA, 19 bp, Mus musculus
  siRNA target sequence for Adam2 (NM_009618.1,937-955).
cgtaactctggaatcactt

SEQ ID NO: 578575 - DNA, 19 bp, Mus musculus
  siRNA target sequence for Adam2 (NM_009618.1,946-964).
ggaatcacttgcaattatt

SEQ ID NO: 578576 - DNA, 19 bp, Mus musculus
  siRNA target sequence for Adam2 (NM_009618.1,999-1017).
cgtatgacgacgtgaacaa

SEQ ID NO: 578577 - DNA, 19 bp, Mus musculus
  siRNA target sequence for Adam2 (NM_009618.1,1114-1132).
caagtttatcacaagtcaa

SEQ ID NO: 578578 - DNA, 19 bp, Mus musculus
  siRNA target sequence for Adam2 (NM_009618.1,1413-1431).
ccgaagtgtgtgaagactt

SEQ ID NO: 578579 - DNA, 19 bp, Mus musculus
  siRNA target sequence for Adam2 (NM_009618.1,1424-1442).
gaagacttctttgttcaaa

SEQ ID NO: 578580 - DNA, 19 bp, Mus musculus
  siRNA target sequence for Adam2 (NM_009618.1,1444-1462).
cggtcacccatgtgacaat

SEQ ID NO: 578581 - DNA, 19 bp, Mus musculus
  siRNA target sequence for Adam2 (NM_009618.1,1463-1481).
cgcaagtggatctgtatta

SEQ ID NO: 578582 - DNA, 19 bp, Mus musculus
  siRNA target sequence for Adam2 (NM_009618.1,1538-1556).
ggctttggttcaagtgaat

SEQ ID NO: 578583 - DNA, 19 bp, Mus musculus
  siRNA target sequence for Adam2 (NM_009618.1,1621-1639).
caaggaatgcccacctaat

SEQ ID NO: 578584 - DNA, 19 bp, Mus musculus
  siRNA target sequence for Adam2 (NM_009618.1,1642-1660).
ccggatgtgtgggaaaata

SEQ ID NO: 578585 - DNA, 19 bp, Mus musculus
  siRNA target sequence for Adam2 (NM_009618.1,1698-1716).
ggtctgccactgttattta

SEQ ID NO: 578586 - DNA, 19 bp, Mus musculus
  siRNA target sequence for Adam2 (NM_009618.1,1707-1725).
ctgttatttatgccaatat

SEQ ID NO: 578587 - DNA, 19 bp, Mus musculus
  siRNA target sequence for Adam2 (NM_009618.1,1803-1821).
ccgtctgcgggtcaaataa

SEQ ID NO: 578588 - DNA, 19 bp, Mus musculus
  siRNA target sequence for Adam2 (NM_009618.1,1807-1825).
ctgcgggtcaaataaggtt

SEQ ID NO: 578589 - DNA, 19 bp, Mus musculus
  siRNA target sequence for Adam2 (NM_009618.1,1822-1840).
ggtttgccagaatcaaaaa

SEQ ID NO: 578590 - DNA, 19 bp, Mus musculus
  siRNA target sequence for Adam2 (NM_009618.1,1852-1870).
cactttcttgggctatgat

SEQ ID NO: 578591 - DNA, 19 bp, Mus musculus
  siRNA target sequence for Adam2 (NM_009618.1,1888-1906).
caaccaccatggtgtatgt

SEQ ID NO: 578592 - DNA, 19 bp, Mus musculus
  siRNA target sequence for Adam2 (NM_009618.1,1892-1910).
caccatggtgtatgtaata

SEQ ID NO: 578593 - DNA, 19 bp, Mus musculus
  siRNA target sequence for Adam2 (NM_009618.1,1942-1960).
cttacctccagattgtaaa

SEQ ID NO: 578594 - DNA, 19 bp, Mus musculus
  siRNA target sequence for Adam2 (NM_009618.1,1947-1965).
ctccagattgtaaaagaat

SEQ ID NO: 578595 - DNA, 19 bp, Mus musculus
  siRNA target sequence for Adam2 (NM_009618.1,1979-1997).
cctggcgggagcattgata

SEQ ID NO: 578596 - DNA, 19 bp, Mus musculus
  siRNA target sequence for Adam2 (NM_009618.1,2026-2044).
ccctgtacggccctacatt

SEQ ID NO: 578597 - DNA, 19 bp, Mus musculus
  siRNA target sequence for Adam2 (NM_009618.1,2030-2048).
gtacggccctacattgcaa

SEQ ID NO: 578598 - DNA, 19 bp, Mus musculus
  siRNA target sequence for Adam2 (NM_009618.1,2067-2085).
ctccacggtggccattttt

SEQ ID NO: 578599 - DNA, 19 bp, Mus musculus
  siRNA target sequence for Adam2 (NM_009618.1,2072-2090).
cggtggccatttttcttga

SEQ ID NO: 578600 - DNA, 19 bp, Mus musculus
  siRNA target sequence for Adam2 (NM_009618.1,2122-2140).
gattgggatgctggtaaaa

SEQ ID NO: 578601 - DNA, 19 bp, Mus musculus
  siRNA target sequence for Adam2 (NM_009618.1,2128-2146).
gatgctggtaaaagtctat

SEQ ID NO: 578602 - DNA, 19 bp, Mus musculus
  siRNA target sequence for Adam2 (NM_009618.1,2143-2161).
ctattcccaaaggatgaaa

SEQ ID NO: 578603 - DNA, 19 bp, Mus musculus
  siRNA target sequence for Adam2 (NM_009618.1,2179-2197).
ctcaagcgaagagcaattt

SEQ ID NO: 578604 - DNA, 19 bp, Mus musculus
  siRNA target sequence for Adam23 (NM_011780.1,280-298).
cgctccgcactggaatgaa

SEQ ID NO: 578605 - DNA, 19 bp, Mus musculus
  siRNA target sequence for Adam23 (NM_011780.1,281-299).
gctccgcactggaatgaaa

SEQ ID NO: 578606 - DNA, 19 bp, Mus musculus
  siRNA target sequence for Adam23 (NM_011780.1,335-353).
gacaacacattgcaacaaa

SEQ ID NO: 578607 - DNA, 19 bp, Mus musculus
  siRNA target sequence for Adam23 (NM_011780.1,381-399).
gcagtgcagtgcaaaaaga

SEQ ID NO: 578608 - DNA, 19 bp, Mus musculus
  siRNA target sequence for Adam23 (NM_011780.1,384-402).
gtgcagtgcaaaaagaaat

SEQ ID NO: 578609 - DNA, 19 bp, Mus musculus
  siRNA target sequence for Adam23 (NM_011780.1,411-429).
cttcaagactggtgtatta

SEQ ID NO: 578610 - DNA, 19 bp, Mus musculus
  siRNA target sequence for Adam23 (NM_011780.1,442-460).
ctcagaaagcccctatcat

SEQ ID NO: 578611 - DNA, 19 bp, Mus musculus
  siRNA target sequence for Adam23 (NM_011780.1,444-462).
cagaaagcccctatcatgt

SEQ ID NO: 578612 - DNA, 19 bp, Mus musculus
  siRNA target sequence for Adam23 (NM_011780.1,450-468).
gcccctatcatgttcttga

SEQ ID NO: 578613 - DNA, 19 bp, Mus musculus
  siRNA target sequence for Adam23 (NM_011780.1,475-493).
ggccagacaccaacagaaa

SEQ ID NO: 578614 - DNA, 19 bp, Mus musculus
  siRNA target sequence for Adam23 (NM_011780.1,525-543).
gcttccagatcgaagcttt

SEQ ID NO: 578615 - DNA, 19 bp, Mus musculus
  siRNA target sequence for Adam23 (NM_011780.1,539-557).
gctttcggctccaagttca

SEQ ID NO: 578616 - DNA, 19 bp, Mus musculus
  siRNA target sequence for Adam23 (NM_011780.1,540-558).
ctttcggctccaagttcat

SEQ ID NO: 578617 - DNA, 19 bp, Mus musculus
  siRNA target sequence for Adam23 (NM_011780.1,577-595).
caatggtttgctatcttct

SEQ ID NO: 578618 - DNA, 19 bp, Mus musculus
  siRNA target sequence for Adam23 (NM_011780.1,644-662).
ggtggagagcactgttact

SEQ ID NO: 578619 - DNA, 19 bp, Mus musculus
  siRNA target sequence for Adam23 (NM_011780.1,645-663).
gtggagagcactgttacta

SEQ ID NO: 578620 - DNA, 19 bp, Mus musculus
  siRNA target sequence for Adam23 (NM_011780.1,720-738).
gactccatggcatgtttga

SEQ ID NO: 578621 - DNA, 19 bp, Mus musculus
  siRNA target sequence for Adam23 (NM_011780.1,739-757).
ggatgacacctttgtgtat

SEQ ID NO: 578622 - DNA, 19 bp, Mus musculus
  siRNA target sequence for Adam23 (NM_011780.1,740-758).
gatgacacctttgtgtata

SEQ ID NO: 578623 - DNA, 19 bp, Mus musculus
  siRNA target sequence for Adam23 (NM_011780.1,743-761).
gacacctttgtgtatatga

SEQ ID NO: 578624 - DNA, 19 bp, Mus musculus
  siRNA target sequence for Adam23 (NM_011780.1,798-816).
caggccgaccacacataat

SEQ ID NO: 578625 - DNA, 19 bp, Mus musculus
  siRNA target sequence for Adam23 (NM_011780.1,801-819).
gccgaccacacataatcca

SEQ ID NO: 578626 - DNA, 19 bp, Mus musculus
  siRNA target sequence for Adam23 (NM_011780.1,826-844).
cttggcaggacagtattct

SEQ ID NO: 578627 - DNA, 19 bp, Mus musculus
  siRNA target sequence for Adam23 (NM_011780.1,967-985).
gtatttggagcttatgatt

SEQ ID NO: 578628 - DNA, 19 bp, Mus musculus
  siRNA target sequence for Adam23 (NM_011780.1,992-1010).
gatcacaagacgtataaga

SEQ ID NO: 578629 - DNA, 19 bp, Mus musculus
  siRNA target sequence for Adam23 (NM_011780.1,1020-1038).
cttctcacgcgcataccaa

SEQ ID NO: 578630 - DNA, 19 bp, Mus musculus
  siRNA target sequence for Adam23 (NM_011780.1,1025-1043).
cacgcgcataccaacaact

SEQ ID NO: 578631 - DNA, 19 bp, Mus musculus
  siRNA target sequence for Adam23 (NM_011780.1,1036-1054).
caacaacttcgcaaagtct

SEQ ID NO: 578632 - DNA, 19 bp, Mus musculus
  siRNA target sequence for Adam23 (NM_011780.1,1055-1073).
gtggtcaaccttgtagatt

SEQ ID NO: 578633 - DNA, 19 bp, Mus musculus
  siRNA target sequence for Adam23 (NM_011780.1,1057-1075).
ggtcaaccttgtagattct

SEQ ID NO: 578634 - DNA, 19 bp, Mus musculus
  siRNA target sequence for Adam23 (NM_011780.1,1058-1076).
gtcaaccttgtagattcta

SEQ ID NO: 578635 - DNA, 19 bp, Mus musculus
  siRNA target sequence for Adam23 (NM_011780.1,1060-1078).
caaccttgtagattctatt

SEQ ID NO: 578636 - DNA, 19 bp, Mus musculus
  siRNA target sequence for Adam23 (NM_011780.1,1064-1082).
cttgtagattctatttaca

SEQ ID NO: 578637 - DNA, 19 bp, Mus musculus
  siRNA target sequence for Adam23 (NM_011780.1,1128-1146).
ggaccgagaaggatcacat

SEQ ID NO: 578638 - DNA, 19 bp, Mus musculus
  siRNA target sequence for Adam23 (NM_011780.1,1129-1147).
gaccgagaaggatcacatt

SEQ ID NO: 578639 - DNA, 19 bp, Mus musculus
  siRNA target sequence for Adam23 (NM_011780.1,1131-1149).
ccgagaaggatcacattga

SEQ ID NO: 578640 - DNA, 19 bp, Mus musculus
  siRNA target sequence for Adam23 (NM_011780.1,1164-1182).
ccgtgcagatgctacatga

SEQ ID NO: 578641 - DNA, 19 bp, Mus musculus
  siRNA target sequence for Adam23 (NM_011780.1,1192-1210).
gtaccggcagcgaatcaaa

SEQ ID NO: 578642 - DNA, 19 bp, Mus musculus
  siRNA target sequence for Adam23 (NM_011780.1,1237-1255).
ctcgcgcgtgacattccat

SEQ ID NO: 578643 - DNA, 19 bp, Mus musculus
  siRNA target sequence for Adam23 (NM_011780.1,1241-1259).
cgcgtgacattccattata

SEQ ID NO: 578644 - DNA, 19 bp, Mus musculus
  siRNA target sequence for Adam23 (NM_011780.1,1242-1260).
gcgtgacattccattataa

SEQ ID NO: 578645 - DNA, 19 bp, Mus musculus
  siRNA target sequence for Adam23 (NM_011780.1,1244-1262).
gtgacattccattataaga

SEQ ID NO: 578646 - DNA, 19 bp, Mus musculus
  siRNA target sequence for Adam23 (NM_011780.1,1286-1304).
ggcgtgtgttctcgaataa

SEQ ID NO: 578647 - DNA, 19 bp, Mus musculus
  siRNA target sequence for Adam23 (NM_011780.1,1288-1306).
cgtgtgttctcgaataaga

SEQ ID NO: 578648 - DNA, 19 bp, Mus musculus
  siRNA target sequence for Adam23 (NM_011780.1,1308-1326).
gggttggtgtgaatgagta

SEQ ID NO: 578649 - DNA, 19 bp, Mus musculus
  siRNA target sequence for Adam23 (NM_011780.1,1339-1357).
ggcggtggcacaagtatta

SEQ ID NO: 578650 - DNA, 19 bp, Mus musculus
  siRNA target sequence for Adam23 (NM_011780.1,1340-1358).
gcggtggcacaagtattat

SEQ ID NO: 578651 - DNA, 19 bp, Mus musculus
  siRNA target sequence for Adam23 (NM_011780.1,1411-1429).
gccaaaatgtgaatgcata

SEQ ID NO: 578652 - DNA, 19 bp, Mus musculus
  siRNA target sequence for Adam23 (NM_011780.1,1472-1490).
cactctcgaaagttctcaa

SEQ ID NO: 578653 - DNA, 19 bp, Mus musculus
  siRNA target sequence for Adam23 (NM_011780.1,1532-1550).
ggcggagcatgtcttttca

SEQ ID NO: 578654 - DNA, 19 bp, Mus musculus
  siRNA target sequence for Adam23 (NM_011780.1,1533-1551).
gcggagcatgtcttttcaa

SEQ ID NO: 578655 - DNA, 19 bp, Mus musculus
  siRNA target sequence for Adam23 (NM_011780.1,1534-1552).
cggagcatgtcttttcaat

SEQ ID NO: 578656 - DNA, 19 bp, Mus musculus
  siRNA target sequence for Adam23 (NM_011780.1,1576-1594).
cacggaatgtggaaatgga

SEQ ID NO: 578657 - DNA, 19 bp, Mus musculus
  siRNA target sequence for Adam23 (NM_011780.1,1646-1664).
ggagtttgctgtaagaagt

SEQ ID NO: 578658 - DNA, 19 bp, Mus musculus
  siRNA target sequence for Adam23 (NM_011780.1,1711-1729).
caacacctcatgtcttttt

SEQ ID NO: 578659 - DNA, 19 bp, Mus musculus
  siRNA target sequence for Adam23 (NM_011780.1,1730-1748).
cagtcacgagggtatgaat

SEQ ID NO: 578660 - DNA, 19 bp, Mus musculus
  siRNA target sequence for Adam23 (NM_011780.1,1732-1750).
gtcacgagggtatgaatgt

SEQ ID NO: 578661 - DNA, 19 bp, Mus musculus
  siRNA target sequence for Adam23 (NM_011780.1,1757-1775).
gccgtaaacagctgtgata

SEQ ID NO: 578662 - DNA, 19 bp, Mus musculus
  siRNA target sequence for Adam23 (NM_011780.1,1758-1776).
ccgtaaacagctgtgatat

SEQ ID NO: 578663 - DNA, 19 bp, Mus musculus
  siRNA target sequence for Adam23 (NM_011780.1,1809-1827).
gcccaccgaacctccataa

SEQ ID NO: 578664 - DNA, 19 bp, Mus musculus
  siRNA target sequence for Adam23 (NM_011780.1,1810-1828).
cccaccgaacctccataaa

SEQ ID NO: 578665 - DNA, 19 bp, Mus musculus
  siRNA target sequence for Adam23 (NM_011780.1,1812-1830).
caccgaacctccataaaca

SEQ ID NO: 578666 - DNA, 19 bp, Mus musculus
  siRNA target sequence for Adam23 (NM_011780.1,1815-1833).
cgaacctccataaacaaga

SEQ ID NO: 578667 - DNA, 19 bp, Mus musculus
  siRNA target sequence for Adam23 (NM_011780.1,1835-1853).
ggctatagctgcaatcaaa

SEQ ID NO: 578668 - DNA, 19 bp, Mus musculus
  siRNA target sequence for Adam23 (NM_011780.1,1836-1854).
gctatagctgcaatcaaaa

SEQ ID NO: 578669 - DNA, 19 bp, Mus musculus
  siRNA target sequence for Adam23 (NM_011780.1,1881-1899).
gcaagacaagggacaatca

SEQ ID NO: 578670 - DNA, 19 bp, Mus musculus
  siRNA target sequence for Adam23 (NM_011780.1,1882-1900).
caagacaagggacaatcaa

SEQ ID NO: 578671 - DNA, 19 bp, Mus musculus
  siRNA target sequence for Adam23 (NM_011780.1,1937-1955).
gacaagttctgctatgaaa

SEQ ID NO: 578672 - DNA, 19 bp, Mus musculus
  siRNA target sequence for Adam23 (NM_011780.1,1981-1999).
gggcaattgtggaaaggat

SEQ ID NO: 578673 - DNA, 19 bp, Mus musculus
  siRNA target sequence for Adam23 (NM_011780.1,2048-2066).
ctgctttgcaccaatctta

SEQ ID NO: 578674 - DNA, 19 bp, Mus musculus
  siRNA target sequence for Adam23 (NM_011780.1,2076-2094).
cacgtatcggtcaacttca

SEQ ID NO: 578675 - DNA, 19 bp, Mus musculus
  siRNA target sequence for Adam23 (NM_011780.1,2104-2122).
catcccgacttccttctat

SEQ ID NO: 578676 - DNA, 19 bp, Mus musculus
  siRNA target sequence for Adam23 (NM_011780.1,2107-2125).
cccgacttccttctatcat

SEQ ID NO: 578677 - DNA, 19 bp, Mus musculus
  siRNA target sequence for Adam23 (NM_011780.1,2109-2127).
cgacttccttctatcatca

SEQ ID NO: 578678 - DNA, 19 bp, Mus musculus
  siRNA target sequence for Adam23 (NM_011780.1,2143-2161).
ctgcagtggtgctcatgta

SEQ ID NO: 578679 - DNA, 19 bp, Mus musculus
  siRNA target sequence for Adam23 (NM_011780.1,2145-2163).
gcagtggtgctcatgtagt

SEQ ID NO: 578680 - DNA, 19 bp, Mus musculus
  siRNA target sequence for Adam23 (NM_011780.1,2148-2166).
gtggtgctcatgtagtttt

SEQ ID NO: 578681 - DNA, 19 bp, Mus musculus
  siRNA target sequence for Adam23 (NM_011780.1,2151-2169).
gtgctcatgtagttttaga

SEQ ID NO: 578682 - DNA, 19 bp, Mus musculus
  siRNA target sequence for Adam23 (NM_011780.1,2182-2200).
cgtgggttacgttgaagat

SEQ ID NO: 578683 - DNA, 19 bp, Mus musculus
  siRNA target sequence for Adam23 (NM_011780.1,2238-2256).
ggaagtgcctacagattca

SEQ ID NO: 578684 - DNA, 19 bp, Mus musculus
  siRNA target sequence for Adam23 (NM_011780.1,2239-2257).
gaagtgcctacagattcaa

SEQ ID NO: 578685 - DNA, 19 bp, Mus musculus
  siRNA target sequence for Adam23 (NM_011780.1,2285-2303).
gactcaaggggtaaagtct

SEQ ID NO: 578686 - DNA, 19 bp, Mus musculus
  siRNA target sequence for Adam23 (NM_011780.1,2398-2416).
ccccaacccccctaaggat

SEQ ID NO: 578687 - DNA, 19 bp, Mus musculus
  siRNA target sequence for Adam23 (NM_011780.1,2432-2450).
cctagcgccaccaatctca

SEQ ID NO: 578688 - DNA, 19 bp, Mus musculus
  siRNA target sequence for Adam23 (NM_011780.1,2433-2451).
ctagcgccaccaatctcat

SEQ ID NO: 578689 - DNA, 19 bp, Mus musculus
  siRNA target sequence for Adam23 (NM_011780.1,2436-2454).
gcgccaccaatctcataat

SEQ ID NO: 578690 - DNA, 19 bp, Mus musculus
  siRNA target sequence for Adam23 (NM_011780.1,2473-2491).
catcctggtagcagctatt

SEQ ID NO: 578691 - DNA, 19 bp, Mus musculus
  siRNA target sequence for Adam29 (NM_175939.2,347-365).
gtgattcccatgaaggtaa

SEQ ID NO: 578692 - DNA, 19 bp, Mus musculus
  siRNA target sequence for Adam29 (NM_175939.2,400-418).
gatctcctatagccttaaa

SEQ ID NO: 578693 - DNA, 19 bp, Mus musculus
  siRNA target sequence for Adam29 (NM_175939.2,403-421).
ctcctatagccttaaactt

SEQ ID NO: 578694 - DNA, 19 bp, Mus musculus
  siRNA target sequence for Adam29 (NM_175939.2,451-469).
gatcaagaatctttttcta

SEQ ID NO: 578695 - DNA, 19 bp, Mus musculus
  siRNA target sequence for Adam29 (NM_175939.2,563-581).
gtggagggtgactcagaat

SEQ ID NO: 578696 - DNA, 19 bp, Mus musculus
  siRNA target sequence for Adam29 (NM_175939.2,566-584).
gagggtgactcagaatcat

SEQ ID NO: 578697 - DNA, 19 bp, Mus musculus
  siRNA target sequence for Adam29 (NM_175939.2,570-588).
gtgactcagaatcattagt

SEQ ID NO: 578698 - DNA, 19 bp, Mus musculus
  siRNA target sequence for Adam29 (NM_175939.2,620-638).
ggactattagagataaata

SEQ ID NO: 578699 - DNA, 19 bp, Mus musculus
  siRNA target sequence for Adam29 (NM_175939.2,726-744).
ggggttccagccttatgca

SEQ ID NO: 578700 - DNA, 19 bp, Mus musculus
  siRNA target sequence for Adam29 (NM_175939.2,727-745).
gggttccagccttatgcaa

SEQ ID NO: 578701 - DNA, 19 bp, Mus musculus
  siRNA target sequence for Adam29 (NM_175939.2,735-753).
gccttatgcaagataacat

SEQ ID NO: 578702 - DNA, 19 bp, Mus musculus
  siRNA target sequence for Adam29 (NM_175939.2,736-754).
ccttatgcaagataacata

SEQ ID NO: 578703 - DNA, 19 bp, Mus musculus
  siRNA target sequence for Adam29 (NM_175939.2,780-798).
gtggtaatcccattctcaa

SEQ ID NO: 578704 - DNA, 19 bp, Mus musculus
  siRNA target sequence for Adam29 (NM_175939.2,815-833).
gactggtggacccatacta

SEQ ID NO: 578705 - DNA, 19 bp, Mus musculus
  siRNA target sequence for Adam29 (NM_175939.2,817-835).
ctggtggacccatactaaa

SEQ ID NO: 578706 - DNA, 19 bp, Mus musculus
  siRNA target sequence for Adam29 (NM_175939.2,819-837).
ggtggacccatactaaaat

SEQ ID NO: 578707 - DNA, 19 bp, Mus musculus
  siRNA target sequence for Adam29 (NM_175939.2,820-838).
gtggacccatactaaaatt

SEQ ID NO: 578708 - DNA, 19 bp, Mus musculus
  siRNA target sequence for Adam29 (NM_175939.2,822-840).
ggacccatactaaaattgt

SEQ ID NO: 578709 - DNA, 19 bp, Mus musculus
  siRNA target sequence for Adam29 (NM_175939.2,856-874).
ggtggataagactctatat

SEQ ID NO: 578710 - DNA, 19 bp, Mus musculus
  siRNA target sequence for Adam29 (NM_175939.2,875-893).
gaccactatggaaattata

SEQ ID NO: 578711 - DNA, 19 bp, Mus musculus
  siRNA target sequence for Adam29 (NM_175939.2,877-895).
ccactatggaaattataca

SEQ ID NO: 578712 - DNA, 19 bp, Mus musculus
  siRNA target sequence for Adam29 (NM_175939.2,880-898).
ctatggaaattatacagta

SEQ ID NO: 578713 - DNA, 19 bp, Mus musculus
  siRNA target sequence for Adam29 (NM_175939.2,947-965).
gaggtaattggtattaaaa

SEQ ID NO: 578714 - DNA, 19 bp, Mus musculus
  siRNA target sequence for Adam29 (NM_175939.2,1010-1028).
gtgatagatgacgtaagta

SEQ ID NO: 578715 - DNA, 19 bp, Mus musculus
  siRNA target sequence for Adam29 (NM_175939.2,1012-1030).
gatagatgacgtaagtaaa

SEQ ID NO: 578716 - DNA, 19 bp, Mus musculus
  siRNA target sequence for Adam29 (NM_175939.2,1021-1039).
cgtaagtaaatctctaaga

SEQ ID NO: 578717 - DNA, 19 bp, Mus musculus
  siRNA target sequence for Adam29 (NM_175939.2,1049-1067).
cggtggaaagcctcaaact

SEQ ID NO: 578718 - DNA, 19 bp, Mus musculus
  siRNA target sequence for Adam29 (NM_175939.2,1085-1103).
catgatgtctcgcatcttt

SEQ ID NO: 578719 - DNA, 19 bp, Mus musculus
  siRNA target sequence for Adam29 (NM_175939.2,1088-1106).
gatgtctcgcatcttttca

SEQ ID NO: 578720 - DNA, 19 bp, Mus musculus
  siRNA target sequence for Adam29 (NM_175939.2,1091-1109).
gtctcgcatcttttcatat

SEQ ID NO: 578721 - DNA, 19 bp, Mus musculus
  siRNA target sequence for Adam29 (NM_175939.2,1124-1142).
ggattaagtggcataggtt

SEQ ID NO: 578722 - DNA, 19 bp, Mus musculus
  siRNA target sequence for Adam29 (NM_175939.2,1143-1161).
ccactggggggatttgtga

SEQ ID NO: 578723 - DNA, 19 bp, Mus musculus
  siRNA target sequence for Adam29 (NM_175939.2,1149-1167).
gggggatttgtgatccaaa

SEQ ID NO: 578724 - DNA, 19 bp, Mus musculus
  siRNA target sequence for Adam29 (NM_175939.2,1150-1168).
ggggatttgtgatccaaaa

SEQ ID NO: 578725 - DNA, 19 bp, Mus musculus
  siRNA target sequence for Adam29 (NM_175939.2,1153-1171).
gatttgtgatccaaaacgt

SEQ ID NO: 578726 - DNA, 19 bp, Mus musculus
  siRNA target sequence for Adam29 (NM_175939.2,1169-1187).
cgtagttgtgcagttgtta

SEQ ID NO: 578727 - DNA, 19 bp, Mus musculus
  siRNA target sequence for Adam29 (NM_175939.2,1179-1197).
cagttgttactttcataga

SEQ ID NO: 578728 - DNA, 19 bp, Mus musculus
  siRNA target sequence for Adam29 (NM_175939.2,1232-1250).
catcacttaggtcataatt

SEQ ID NO: 578729 - DNA, 19 bp, Mus musculus
  siRNA target sequence for Adam29 (NM_175939.2,1262-1280).
catgatgaagatatatgta

SEQ ID NO: 578730 - DNA, 19 bp, Mus musculus
  siRNA target sequence for Adam29 (NM_175939.2,1268-1286).
gaagatatatgtaagtgta

SEQ ID NO: 578731 - DNA, 19 bp, Mus musculus
  siRNA target sequence for Adam29 (NM_175939.2,1271-1289).
gatatatgtaagtgtagtt

SEQ ID NO: 578732 - DNA, 19 bp, Mus musculus
  siRNA target sequence for Adam29 (NM_175939.2,1317-1335).
gcccaccgatacccaaatt

SEQ ID NO: 578733 - DNA, 19 bp, Mus musculus
  siRNA target sequence for Adam29 (NM_175939.2,1383-1401).
caaggtgtttgatggaaaa

SEQ ID NO: 578734 - DNA, 19 bp, Mus musculus
  siRNA target sequence for Adam29 (NM_175939.2,1389-1407).
gtttgatggaaaacatgta

SEQ ID NO: 578735 - DNA, 19 bp, Mus musculus
  siRNA target sequence for Adam29 (NM_175939.2,1472-1490).
gactgtggatcattaagga

SEQ ID NO: 578736 - DNA, 19 bp, Mus musculus
  siRNA target sequence for Adam29 (NM_175939.2,1474-1492).
ctgtggatcattaaggaat

SEQ ID NO: 578737 - DNA, 19 bp, Mus musculus
  siRNA target sequence for Adam29 (NM_175939.2,1478-1496).
ggatcattaaggaattgta

SEQ ID NO: 578738 - DNA, 19 bp, Mus musculus
  siRNA target sequence for Adam29 (NM_175939.2,1482-1500).
cattaaggaattgtacaaa

SEQ ID NO: 578739 - DNA, 19 bp, Mus musculus
  siRNA target sequence for Adam29 (NM_175939.2,1654-1672).
ccatgaatgtccagatgat

SEQ ID NO: 578740 - DNA, 19 bp, Mus musculus
  siRNA target sequence for Adam29 (NM_175939.2,1674-1692).
cttatgtagaagatggaat

SEQ ID NO: 578741 - DNA, 19 bp, Mus musculus
  siRNA target sequence for Adam29 (NM_175939.2,1700-1718).
ggggtctcagcctattgct

SEQ ID NO: 578742 - DNA, 19 bp, Mus musculus
  siRNA target sequence for Adam29 (NM_175939.2,1701-1719).
gggtctcagcctattgcta

SEQ ID NO: 578743 - DNA, 19 bp, Mus musculus
  siRNA target sequence for Adam29 (NM_175939.2,1702-1720).
ggtctcagcctattgctat

SEQ ID NO: 578744 - DNA, 19 bp, Mus musculus
  siRNA target sequence for Adam29 (NM_175939.2,1745-1763).
gagcactgtaggcaaattt

SEQ ID NO: 578745 - DNA, 19 bp, Mus musculus
  siRNA target sequence for Adam29 (NM_175939.2,1813-1831).
cactaaaggtgatcgtttt

SEQ ID NO: 578746 - DNA, 19 bp, Mus musculus
  siRNA target sequence for Adam29 (NM_175939.2,1842-1860).
gtcttcagggacctactta

SEQ ID NO: 578747 - DNA, 19 bp, Mus musculus
  siRNA target sequence for Adam29 (NM_175939.2,1844-1862).
cttcagggacctacttaca

SEQ ID NO: 578748 - DNA, 19 bp, Mus musculus
  siRNA target sequence for Adam29 (NM_175939.2,1847-1865).
cagggacctacttacataa

SEQ ID NO: 578749 - DNA, 19 bp, Mus musculus
  siRNA target sequence for Adam29 (NM_175939.2,1849-1867).
gggacctacttacataaaa

SEQ ID NO: 578750 - DNA, 19 bp, Mus musculus
  siRNA target sequence for Adam29 (NM_175939.2,1854-1872).
ctacttacataaaatgtaa

SEQ ID NO: 578751 - DNA, 19 bp, Mus musculus
  siRNA target sequence for Adam29 (NM_175939.2,1893-1911).
gaagaattcaatgtgataa

SEQ ID NO: 578752 - DNA, 19 bp, Mus musculus
  siRNA target sequence for Adam29 (NM_175939.2,1916-1934).
gtacaaattcccaatatga

SEQ ID NO: 578753 - DNA, 19 bp, Mus musculus
  siRNA target sequence for Adam29 (NM_175939.2,1933-1951).
gaaagatcacagtactatt

SEQ ID NO: 578754 - DNA, 19 bp, Mus musculus
  siRNA target sequence for Adam29 (NM_175939.2,1977-1995).
cttgctggggcactgatta

SEQ ID NO: 578755 - DNA, 19 bp, Mus musculus
  siRNA target sequence for Adam29 (NM_175939.2,2001-2019).
ctgggacaagcctaactga

SEQ ID NO: 578756 - DNA, 19 bp, Mus musculus
  siRNA target sequence for Adam29 (NM_175939.2,2005-2023).
gacaagcctaactgatata

SEQ ID NO: 578757 - DNA, 19 bp, Mus musculus
  siRNA target sequence for Adam29 (NM_175939.2,2016-2034).
ctgatataggcgatgtgaa

SEQ ID NO: 578758 - DNA, 19 bp, Mus musculus
  siRNA target sequence for Adam29 (NM_175939.2,2045-2063).
gagtgtgagcaaaatcata

SEQ ID NO: 578759 - DNA, 19 bp, Mus musculus
  siRNA target sequence for Adam29 (NM_175939.2,2051-2069).
gagcaaaatcatatctgta

SEQ ID NO: 578760 - DNA, 19 bp, Mus musculus
  siRNA target sequence for Adam29 (NM_175939.2,2054-2072).
caaaatcatatctgtatca

SEQ ID NO: 578761 - DNA, 19 bp, Mus musculus
  siRNA target sequence for Adam29 (NM_175939.2,2067-2085).
gtatcaataggcattgtgt

SEQ ID NO: 578762 - DNA, 19 bp, Mus musculus
  siRNA target sequence for Adam29 (NM_175939.2,2071-2089).
caataggcattgtgtacat

SEQ ID NO: 578763 - DNA, 19 bp, Mus musculus
  siRNA target sequence for Adam29 (NM_175939.2,2117-2135).
cctgcattctgtaattaca

SEQ ID NO: 578764 - DNA, 19 bp, Mus musculus
  siRNA target sequence for Adam29 (NM_175939.2,2137-2155).
gggcatctgtaacaataaa

SEQ ID NO: 578765 - DNA, 19 bp, Mus musculus
  siRNA target sequence for Adam29 (NM_175939.2,2181-2199).
gggatcctcctaactgtat

SEQ ID NO: 578766 - DNA, 19 bp, Mus musculus
  siRNA target sequence for Adam29 (NM_175939.2,2186-2204).
cctcctaactgtatgatta

SEQ ID NO: 578767 - DNA, 19 bp, Mus musculus
  siRNA target sequence for Adam29 (NM_175939.2,2227-2245).
cagtggcttacctcctaaa

SEQ ID NO: 578768 - DNA, 19 bp, Mus musculus
  siRNA target sequence for Adam29 (NM_175939.2,2231-2249).
ggcttacctcctaaaacaa

SEQ ID NO: 578769 - DNA, 19 bp, Mus musculus
  siRNA target sequence for Adam29 (NM_175939.2,2232-2250).
gcttacctcctaaaacaaa

SEQ ID NO: 578770 - DNA, 19 bp, Mus musculus
  siRNA target sequence for Adam29 (NM_175939.2,2299-2317).
ggcttgccttttaagttgt

SEQ ID NO: 578771 - DNA, 19 bp, Mus musculus
  siRNA target sequence for Adam29 (NM_175939.2,2369-2387).
cagcctacacctgtaaaaa

SEQ ID NO: 578772 - DNA, 19 bp, Mus musculus
  siRNA target sequence for Adam29 (NM_175939.2,2440-2458).
cccgagtctacctcaatta

SEQ ID NO: 578773 - DNA, 19 bp, Mus musculus
  siRNA target sequence for Adam29 (NM_175939.2,2441-2459).
ccgagtctacctcaattaa

SEQ ID NO: 578774 - DNA, 19 bp, Mus musculus
  siRNA target sequence for Adam29 (NM_175939.2,2445-2463).
gtctacctcaattaagaat

SEQ ID NO: 578775 - DNA, 19 bp, Mus musculus
  siRNA target sequence for Adam29 (NM_175939.2,2481-2499).
caccaacatcatccataaa

SEQ ID NO: 578776 - DNA, 19 bp, Mus musculus
  siRNA target sequence for Adam3 (NM_009619.2,128-146).
gcaggcaaagacgtagaaa

SEQ ID NO: 578777 - DNA, 19 bp, Mus musculus
  siRNA target sequence for Adam3 (NM_009619.2,252-270).
catacacactccaacttga

SEQ ID NO: 578778 - DNA, 19 bp, Mus musculus
  siRNA target sequence for Adam3 (NM_009619.2,260-278).
ctccaacttgaaaaacagt

SEQ ID NO: 578779 - DNA, 19 bp, Mus musculus
  siRNA target sequence for Adam3 (NM_009619.2,303-321).
catatttgcgtgacaagtt

SEQ ID NO: 578780 - DNA, 19 bp, Mus musculus
  siRNA target sequence for Adam3 (NM_009619.2,383-401).
gccgagatcccagtatcaa

SEQ ID NO: 578781 - DNA, 19 bp, Mus musculus
  siRNA target sequence for Adam3 (NM_009619.2,385-403).
cgagatcccagtatcaaca

SEQ ID NO: 578782 - DNA, 19 bp, Mus musculus
  siRNA target sequence for Adam3 (NM_009619.2,423-441).
caggtctcaggggtttgtt

SEQ ID NO: 578783 - DNA, 19 bp, Mus musculus
  siRNA target sequence for Adam3 (NM_009619.2,445-463).
gttagagaacatcacttat

SEQ ID NO: 578784 - DNA, 19 bp, Mus musculus
  siRNA target sequence for Adam3 (NM_009619.2,481-499).
gtcttcagctacatttgaa

SEQ ID NO: 578785 - DNA, 19 bp, Mus musculus
  siRNA target sequence for Adam3 (NM_009619.2,585-603).
cctaccgaatccttgtcaa

SEQ ID NO: 578786 - DNA, 19 bp, Mus musculus
  siRNA target sequence for Adam3 (NM_009619.2,586-604).
ctaccgaatccttgtcaaa

SEQ ID NO: 578787 - DNA, 19 bp, Mus musculus
  siRNA target sequence for Adam3 (NM_009619.2,595-613).
ccttgtcaaaccagagaaa

SEQ ID NO: 578788 - DNA, 19 bp, Mus musculus
  siRNA target sequence for Adam3 (NM_009619.2,599-617).
gtcaaaccagagaaaggtt

SEQ ID NO: 578789 - DNA, 19 bp, Mus musculus
  siRNA target sequence for Adam3 (NM_009619.2,614-632).
ggttcgaactcgacactaa

SEQ ID NO: 578790 - DNA, 19 bp, Mus musculus
  siRNA target sequence for Adam3 (NM_009619.2,618-636).
cgaactcgacactaacaaa

SEQ ID NO: 578791 - DNA, 19 bp, Mus musculus
  siRNA target sequence for Adam3 (NM_009619.2,622-640).
ctcgacactaacaaagaga

SEQ ID NO: 578792 - DNA, 19 bp, Mus musculus
  siRNA target sequence for Adam3 (NM_009619.2,639-657).
gaattctgaggataaagat

SEQ ID NO: 578793 - DNA, 19 bp, Mus musculus
  siRNA target sequence for Adam3 (NM_009619.2,725-743).
cacatctttggtctcatta

SEQ ID NO: 578794 - DNA, 19 bp, Mus musculus
  siRNA target sequence for Adam3 (NM_009619.2,730-748).
ctttggtctcattaatact

SEQ ID NO: 578795 - DNA, 19 bp, Mus musculus
  siRNA target sequence for Adam3 (NM_009619.2,734-752).
ggtctcattaatactatgt

SEQ ID NO: 578796 - DNA, 19 bp, Mus musculus
  siRNA target sequence for Adam3 (NM_009619.2,892-910).
ccaggatataacctactta

SEQ ID NO: 578797 - DNA, 19 bp, Mus musculus
  siRNA target sequence for Adam3 (NM_009619.2,907-925).
cttactcctgtataaggat

SEQ ID NO: 578798 - DNA, 19 bp, Mus musculus
  siRNA target sequence for Adam3 (NM_009619.2,962-980).
gcctgcaacccaaatttta

SEQ ID NO: 578799 - DNA, 19 bp, Mus musculus
  siRNA target sequence for Adam3 (NM_009619.2,1060-1078).
cctggggttggcatacgat

SEQ ID NO: 578800 - DNA, 19 bp, Mus musculus
  siRNA target sequence for Adam3 (NM_009619.2,1075-1093).
cgatgacgtctacaattgt

SEQ ID NO: 578801 - DNA, 19 bp, Mus musculus
  siRNA target sequence for Adam3 (NM_009619.2,1076-1094).
gatgacgtctacaattgtt

SEQ ID NO: 578802 - DNA, 19 bp, Mus musculus
  siRNA target sequence for Adam3 (NM_009619.2,1120-1138).
gaatccttcggcaatacgt

SEQ ID NO: 578803 - DNA, 19 bp, Mus musculus
  siRNA target sequence for Adam3 (NM_009619.2,1137-1155).
gttcccaaggcataaaggt

SEQ ID NO: 578804 - DNA, 19 bp, Mus musculus
  siRNA target sequence for Adam3 (NM_009619.2,1141-1159).
ccaaggcataaaggttttt

SEQ ID NO: 578805 - DNA, 19 bp, Mus musculus
  siRNA target sequence for Adam3 (NM_009619.2,1142-1160).
caaggcataaaggttttta

SEQ ID NO: 578806 - DNA, 19 bp, Mus musculus
  siRNA target sequence for Adam3 (NM_009619.2,1145-1163).
ggcataaaggtttttagca

SEQ ID NO: 578807 - DNA, 19 bp, Mus musculus
  siRNA target sequence for Adam3 (NM_009619.2,1170-1188).
gtgtggatgaattcaaaca

SEQ ID NO: 578808 - DNA, 19 bp, Mus musculus
  siRNA target sequence for Adam3 (NM_009619.2,1210-1228).
ggactgccttcggaataca

SEQ ID NO: 578809 - DNA, 19 bp, Mus musculus
  siRNA target sequence for Adam3 (NM_009619.2,1211-1229).
gactgccttcggaatacat

SEQ ID NO: 578810 - DNA, 19 bp, Mus musculus
  siRNA target sequence for Adam3 (NM_009619.2,1227-1245).
catcggagacagaatttgt

SEQ ID NO: 578811 - DNA, 19 bp, Mus musculus
  siRNA target sequence for Adam3 (NM_009619.2,1230-1248).
cggagacagaatttgttgt

SEQ ID NO: 578812 - DNA, 19 bp, Mus musculus
  siRNA target sequence for Adam3 (NM_009619.2,1252-1270).
gccccaaggtggatcgtat

SEQ ID NO: 578813 - DNA, 19 bp, Mus musculus
  siRNA target sequence for Adam3 (NM_009619.2,1253-1271).
ccccaaggtggatcgtatt

SEQ ID NO: 578814 - DNA, 19 bp, Mus musculus
  siRNA target sequence for Adam3 (NM_009619.2,1255-1273).
ccaaggtggatcgtattgt

SEQ ID NO: 578815 - DNA, 19 bp, Mus musculus
  siRNA target sequence for Adam3 (NM_009619.2,1436-1454).
ggacgcctatgcagaaaaa

SEQ ID NO: 578816 - DNA, 19 bp, Mus musculus
  siRNA target sequence for Adam3 (NM_009619.2,1439-1457).
cgcctatgcagaaaaagta

SEQ ID NO: 578817 - DNA, 19 bp, Mus musculus
  siRNA target sequence for Adam3 (NM_009619.2,1503-1521).
gctgtgcccctgatacaaa

SEQ ID NO: 578818 - DNA, 19 bp, Mus musculus
  siRNA target sequence for Adam3 (NM_009619.2,1623-1641).
ctaagggtcctaattatgt

SEQ ID NO: 578819 - DNA, 19 bp, Mus musculus
  siRNA target sequence for Adam3 (NM_009619.2,1644-1662).
gtgcacaagaagtgaatct

SEQ ID NO: 578820 - DNA, 19 bp, Mus musculus
  siRNA target sequence for Adam3 (NM_009619.2,1657-1675).
gaatctgcaaaatgacaaa

SEQ ID NO: 578821 - DNA, 19 bp, Mus musculus
  siRNA target sequence for Adam3 (NM_009619.2,1684-1702).
ctgtcatgggcgatgtaat

SEQ ID NO: 578822 - DNA, 19 bp, Mus musculus
  siRNA target sequence for Adam3 (NM_009619.2,1686-1704).
gtcatgggcgatgtaatta

SEQ ID NO: 578823 - DNA, 19 bp, Mus musculus
  siRNA target sequence for Adam3 (NM_009619.2,1688-1706).
catgggcgatgtaattata

SEQ ID NO: 578824 - DNA, 19 bp, Mus musculus
  siRNA target sequence for Adam3 (NM_009619.2,1744-1762).
ctttgcagaagtcatacaa

SEQ ID NO: 578825 - DNA, 19 bp, Mus musculus
  siRNA target sequence for Adam3 (NM_009619.2,1749-1767).
cagaagtcatacaaacaga

SEQ ID NO: 578826 - DNA, 19 bp, Mus musculus
  siRNA target sequence for Adam3 (NM_009619.2,1764-1782).
cagagaaatatgatgttca

SEQ ID NO: 578827 - DNA, 19 bp, Mus musculus
  siRNA target sequence for Adam3 (NM_009619.2,1775-1793).
gatgttcagtatacttact

SEQ ID NO: 578828 - DNA, 19 bp, Mus musculus
  siRNA target sequence for Adam3 (NM_009619.2,1811-1829).
gtgtccgctcatttaagat

SEQ ID NO: 578829 - DNA, 19 bp, Mus musculus
  siRNA target sequence for Adam3 (NM_009619.2,1813-1831).
gtccgctcatttaagatca

SEQ ID NO: 578830 - DNA, 19 bp, Mus musculus
  siRNA target sequence for Adam3 (NM_009619.2,1839-1857).
ggactagagatgacacata

SEQ ID NO: 578831 - DNA, 19 bp, Mus musculus
  siRNA target sequence for Adam3 (NM_009619.2,1840-1858).
gactagagatgacacatat

SEQ ID NO: 578832 - DNA, 19 bp, Mus musculus
  siRNA target sequence for Adam3 (NM_009619.2,1861-1879).
ccatgatggcactgtttgt

SEQ ID NO: 578833 - DNA, 19 bp, Mus musculus
  siRNA target sequence for Adam3 (NM_009619.2,1897-1915).
cttccgaggagattgctta

SEQ ID NO: 578834 - DNA, 19 bp, Mus musculus
  siRNA target sequence for Adam3 (NM_009619.2,1945-1963).
gtgtgaggccgatgacaaa

SEQ ID NO: 578835 - DNA, 19 bp, Mus musculus
  siRNA target sequence for Adam3 (NM_009619.2,1967-1985).
caaggacacgggatttgca

SEQ ID NO: 578836 - DNA, 19 bp, Mus musculus
  siRNA target sequence for Adam3 (NM_009619.2,1975-1993).
cgggatttgcaacaatcta

SEQ ID NO: 578837 - DNA, 19 bp, Mus musculus
  siRNA target sequence for Adam3 (NM_009619.2,1976-1994).
gggatttgcaacaatctaa

SEQ ID NO: 578838 - DNA, 19 bp, Mus musculus
  siRNA target sequence for Adam3 (NM_009619.2,1977-1995).
ggatttgcaacaatctaaa

SEQ ID NO: 578839 - DNA, 19 bp, Mus musculus
  siRNA target sequence for Adam3 (NM_009619.2,2121-2139).
ggcatggccttaagtacaa

SEQ ID NO: 578840 - DNA, 19 bp, Mus musculus
  siRNA target sequence for Adam3 (NM_009619.2,2147-2165).
cttttgatcagtttctata

SEQ ID NO: 578841 - DNA, 19 bp, Mus musculus
  siRNA target sequence for Adam3 (NM_009619.2,2204-2222).
gttaagcggatgattggta

SEQ ID NO: 578842 - DNA, 19 bp, Mus musculus
  siRNA target sequence for Adam3 (NM_009619.2,2228-2246).
cttgctaagcagaatatct

SEQ ID NO: 578843 - DNA, 19 bp, Mus musculus
  siRNA target sequence for Adam3 (NM_009619.2,2232-2250).
ctaagcagaatatctcaaa

SEQ ID NO: 578844 - DNA, 19 bp, Mus musculus
  siRNA target sequence for Adam32 (NM_153397.1,65-83).
cccgagtctcaaagttcat

SEQ ID NO: 578845 - DNA, 19 bp, Mus musculus
  siRNA target sequence for Adam32 (NM_153397.1,66-84).
ccgagtctcaaagttcatt

SEQ ID NO: 578846 - DNA, 19 bp, Mus musculus
  siRNA target sequence for Adam32 (NM_153397.1,67-85).
cgagtctcaaagttcattt

SEQ ID NO: 578847 - DNA, 19 bp, Mus musculus
  siRNA target sequence for Adam32 (NM_153397.1,78-96).
gttcatttctagaaatcat

SEQ ID NO: 578848 - DNA, 19 bp, Mus musculus
  siRNA target sequence for Adam32 (NM_153397.1,139-157).
gatatcctatattattcca

SEQ ID NO: 578849 - DNA, 19 bp, Mus musculus
  siRNA target sequence for Adam32 (NM_153397.1,184-202).
cctccagaaaagatatttt

SEQ ID NO: 578850 - DNA, 19 bp, Mus musculus
  siRNA target sequence for Adam32 (NM_153397.1,185-203).
ctccagaaaagatattttt

SEQ ID NO: 578851 - DNA, 19 bp, Mus musculus
  siRNA target sequence for Adam32 (NM_153397.1,207-225).
cgaatcgttttatggttta

SEQ ID NO: 578852 - DNA, 19 bp, Mus musculus
  siRNA target sequence for Adam32 (NM_153397.1,208-226).
gaatcgttttatggtttat

SEQ ID NO: 578853 - DNA, 19 bp, Mus musculus
  siRNA target sequence for Adam32 (NM_153397.1,229-247).
gtataatcaaggatctaca

SEQ ID NO: 578854 - DNA, 19 bp, Mus musculus
  siRNA target sequence for Adam32 (NM_153397.1,239-257).
ggatctacaagttttcatt

SEQ ID NO: 578855 - DNA, 19 bp, Mus musculus
  siRNA target sequence for Adam32 (NM_153397.1,348-366).
gagggttcctgcagtttga

SEQ ID NO: 578856 - DNA, 19 bp, Mus musculus
  siRNA target sequence for Adam32 (NM_153397.1,389-407).
cctctgcaatctgcattta

SEQ ID NO: 578857 - DNA, 19 bp, Mus musculus
  siRNA target sequence for Adam32 (NM_153397.1,408-426).
catctcaacacattgttta

SEQ ID NO: 578858 - DNA, 19 bp, Mus musculus
  siRNA target sequence for Adam32 (NM_153397.1,411-429).
ctcaacacattgtttataa

SEQ ID NO: 578859 - DNA, 19 bp, Mus musculus
  siRNA target sequence for Adam32 (NM_153397.1,489-507).
ctacaaactatggcatttt

SEQ ID NO: 578860 - DNA, 19 bp, Mus musculus
  siRNA target sequence for Adam32 (NM_153397.1,492-510).
caaactatggcattttaat

SEQ ID NO: 578861 - DNA, 19 bp, Mus musculus
  siRNA target sequence for Adam32 (NM_153397.1,577-595).
ggacaaagcgctgtatgat

SEQ ID NO: 578862 - DNA, 19 bp, Mus musculus
  siRNA target sequence for Adam32 (NM_153397.1,578-596).
gacaaagcgctgtatgatt

SEQ ID NO: 578863 - DNA, 19 bp, Mus musculus
  siRNA target sequence for Adam32 (NM_153397.1,660-678).
cagtgtttgcccaactcaa

SEQ ID NO: 578864 - DNA, 19 bp, Mus musculus
  siRNA target sequence for Adam32 (NM_153397.1,668-686).
gcccaactcaaggttacta

SEQ ID NO: 578865 - DNA, 19 bp, Mus musculus
  siRNA target sequence for Adam32 (NM_153397.1,711-729).
ggtcagataagaataagat

SEQ ID NO: 578866 - DNA, 19 bp, Mus musculus
  siRNA target sequence for Adam32 (NM_153397.1,721-739).
gaataagattcctacagtt

SEQ ID NO: 578867 - DNA, 19 bp, Mus musculus
  siRNA target sequence for Adam32 (NM_153397.1,749-767).
gatgaattattgcataaat

SEQ ID NO: 578868 - DNA, 19 bp, Mus musculus
  siRNA target sequence for Adam32 (NM_153397.1,801-819).
gacctcatgatgttgcata

SEQ ID NO: 578869 - DNA, 19 bp, Mus musculus
  siRNA target sequence for Adam32 (NM_153397.1,804-822).
ctcatgatgttgcatatct

SEQ ID NO: 578870 - DNA, 19 bp, Mus musculus
  siRNA target sequence for Adam32 (NM_153397.1,806-824).
catgatgttgcatatctat

SEQ ID NO: 578871 - DNA, 19 bp, Mus musculus
  siRNA target sequence for Adam32 (NM_153397.1,809-827).
gatgttgcatatctattca

SEQ ID NO: 578872 - DNA, 19 bp, Mus musculus
  siRNA target sequence for Adam32 (NM_153397.1,894-912).
ctgcaggaatcacaatgta

SEQ ID NO: 578873 - DNA, 19 bp, Mus musculus
  siRNA target sequence for Adam32 (NM_153397.1,931-949).
ggaggccttttcggttatt

SEQ ID NO: 578874 - DNA, 19 bp, Mus musculus
  siRNA target sequence for Adam32 (NM_153397.1,935-953).
gccttttcggttattctca

SEQ ID NO: 578875 - DNA, 19 bp, Mus musculus
  siRNA target sequence for Adam32 (NM_153397.1,968-986).
ctcagtctggggatatcgt

SEQ ID NO: 578876 - DNA, 19 bp, Mus musculus
  siRNA target sequence for Adam32 (NM_153397.1,970-988).
cagtctggggatatcgtat

SEQ ID NO: 578877 - DNA, 19 bp, Mus musculus
  siRNA target sequence for Adam32 (NM_153397.1,1005-1023).
gctactgctcggaatccat

SEQ ID NO: 578878 - DNA, 19 bp, Mus musculus
  siRNA target sequence for Adam32 (NM_153397.1,1039-1057).
cagggcgatgcaatatgga

SEQ ID NO: 578879 - DNA, 19 bp, Mus musculus
  siRNA target sequence for Adam32 (NM_153397.1,1081-1099).
cagtttgaatgactttgaa

SEQ ID NO: 578880 - DNA, 19 bp, Mus musculus
  siRNA target sequence for Adam32 (NM_153397.1,1187-1205).
gtggagggtgatgaaattt

SEQ ID NO: 578881 - DNA, 19 bp, Mus musculus
  siRNA target sequence for Adam32 (NM_153397.1,1189-1207).
ggagggtgatgaaatttgt

SEQ ID NO: 578882 - DNA, 19 bp, Mus musculus
  siRNA target sequence for Adam32 (NM_153397.1,1358-1376).
ccggaaaagcatctatact

SEQ ID NO: 578883 - DNA, 19 bp, Mus musculus
  siRNA target sequence for Adam32 (NM_153397.1,1416-1434).
gtccacctgatgtaactat

SEQ ID NO: 578884 - DNA, 19 bp, Mus musculus
  siRNA target sequence for Adam32 (NM_153397.1,1418-1436).
ccacctgatgtaactataa

SEQ ID NO: 578885 - DNA, 19 bp, Mus musculus
  siRNA target sequence for Adam32 (NM_153397.1,1419-1437).
cacctgatgtaactataaa

SEQ ID NO: 578886 - DNA, 19 bp, Mus musculus
  siRNA target sequence for Adam32 (NM_153397.1,1421-1439).
cctgatgtaactataaaca

SEQ ID NO: 578887 - DNA, 19 bp, Mus musculus
  siRNA target sequence for Adam32 (NM_153397.1,1422-1440).
ctgatgtaactataaacaa

SEQ ID NO: 578888 - DNA, 19 bp, Mus musculus
  siRNA target sequence for Adam32 (NM_153397.1,1438-1456).
caatgggcatgtttgcaaa

SEQ ID NO: 578889 - DNA, 19 bp, Mus musculus
  siRNA target sequence for Adam32 (NM_153397.1,1457-1475).
gaaagcgggactatctgtt

SEQ ID NO: 578890 - DNA, 19 bp, Mus musculus
  siRNA target sequence for Adam32 (NM_153397.1,1461-1479).
gcgggactatctgttataa

SEQ ID NO: 578891 - DNA, 19 bp, Mus musculus
  siRNA target sequence for Adam32 (NM_153397.1,1462-1480).
cgggactatctgttataat

SEQ ID NO: 578892 - DNA, 19 bp, Mus musculus
  siRNA target sequence for Adam32 (NM_153397.1,1503-1521).
gggtgtgcgagtcaatata

SEQ ID NO: 578893 - DNA, 19 bp, Mus musculus
  siRNA target sequence for Adam32 (NM_153397.1,1504-1522).
ggtgtgcgagtcaatatat

SEQ ID NO: 578894 - DNA, 19 bp, Mus musculus
  siRNA target sequence for Adam32 (NM_153397.1,1507-1525).
gtgcgagtcaatatatgga

SEQ ID NO: 578895 - DNA, 19 bp, Mus musculus
  siRNA target sequence for Adam32 (NM_153397.1,1631-1649).
ggatggaggaatctcatat

SEQ ID NO: 578896 - DNA, 19 bp, Mus musculus
  siRNA target sequence for Adam32 (NM_153397.1,1643-1661).
ctcatatgtgggagattga

SEQ ID NO: 578897 - DNA, 19 bp, Mus musculus
  siRNA target sequence for Adam32 (NM_153397.1,1645-1663).
catatgtgggagattgatt

SEQ ID NO: 578898 - DNA, 19 bp, Mus musculus
  siRNA target sequence for Adam32 (NM_153397.1,1690-1708).
caacccacccaataacagt

SEQ ID NO: 578899 - DNA, 19 bp, Mus musculus
  siRNA target sequence for Adam32 (NM_153397.1,1707-1725).
gtacagcttctgtgatcta

SEQ ID NO: 578900 - DNA, 19 bp, Mus musculus
  siRNA target sequence for Adam32 (NM_153397.1,1728-1746).
cttttgtgcgagacaaagt

SEQ ID NO: 578901 - DNA, 19 bp, Mus musculus
  siRNA target sequence for Adam32 (NM_153397.1,1736-1754).
cgagacaaagtgtgtataa

SEQ ID NO: 578902 - DNA, 19 bp, Mus musculus
  siRNA target sequence for Adam32 (NM_153397.1,1762-1780).
ctttggatcgagtgtcaaa

SEQ ID NO: 578903 - DNA, 19 bp, Mus musculus
  siRNA target sequence for Adam32 (NM_153397.1,1806-1824).
gtgctacatgtgatcttga

SEQ ID NO: 578904 - DNA, 19 bp, Mus musculus
  siRNA target sequence for Adam32 (NM_153397.1,1820-1838).
cttgataggatctgcttaa

SEQ ID NO: 578905 - DNA, 19 bp, Mus musculus
  siRNA target sequence for Adam32 (NM_153397.1,1846-1864).
gtgcgtagaatcgagattt

SEQ ID NO: 578906 - DNA, 19 bp, Mus musculus
  siRNA target sequence for Adam32 (NM_153397.1,1848-1866).
gcgtagaatcgagatttct

SEQ ID NO: 578907 - DNA, 19 bp, Mus musculus
  siRNA target sequence for Adam32 (NM_153397.1,1849-1867).
cgtagaatcgagatttctt

SEQ ID NO: 578908 - DNA, 19 bp, Mus musculus
  siRNA target sequence for Adam32 (NM_153397.1,1850-1868).
gtagaatcgagatttctta

SEQ ID NO: 578909 - DNA, 19 bp, Mus musculus
  siRNA target sequence for Adam32 (NM_153397.1,1874-1892).
caatcaaaaacgtgttcat

SEQ ID NO: 578910 - DNA, 19 bp, Mus musculus
  siRNA target sequence for Adam32 (NM_153397.1,1906-1924).
gaacggagtgtgcaattct

SEQ ID NO: 578911 - DNA, 19 bp, Mus musculus
  siRNA target sequence for Adam32 (NM_153397.1,1909-1927).
cggagtgtgcaattctcat

SEQ ID NO: 578912 - DNA, 19 bp, Mus musculus
  siRNA target sequence for Adam32 (NM_153397.1,2025-2043).
ccatggaaagagcatctaa

SEQ ID NO: 578913 - DNA, 19 bp, Mus musculus
  siRNA target sequence for Adam32 (NM_153397.1,2036-2054).
gcatctaagaaccaagaaa

SEQ ID NO: 578914 - DNA, 19 bp, Mus musculus
  siRNA target sequence for Adam32 (NM_153397.1,2121-2139).
ggtggaaaggcttgaaaca

SEQ ID NO: 578915 - DNA, 19 bp, Mus musculus
  siRNA target sequence for Adam32 (NM_153397.1,2203-2221).
gtatgtcagcagatcaact

SEQ ID NO: 578916 - DNA, 19 bp, Mus musculus
  siRNA target sequence for Adam4 (NM_009620.1,145-163).
cccaaatggcgcttctcta

SEQ ID NO: 578917 - DNA, 19 bp, Mus musculus
  siRNA target sequence for Adam4 (NM_009620.1,814-832).
cgtggtgtatggatttgga

SEQ ID NO: 578918 - DNA, 19 bp, Mus musculus
  siRNA target sequence for Adam4 (NM_009620.1,836-854).
cgaagaacctgcatactgt

SEQ ID NO: 578919 - DNA, 19 bp, Mus musculus
  siRNA target sequence for Adam4 (NM_009620.1,874-892).
cttgatccttggagtgtta

SEQ ID NO: 578920 - DNA, 19 bp, Mus musculus
  siRNA target sequence for Adam4 (NM_009620.1,898-916).
ggttttggtgtatggaaat

SEQ ID NO: 578921 - DNA, 19 bp, Mus musculus
  siRNA target sequence for Adam4 (NM_009620.1,911-929).
ggaaatctaaagaattgca

SEQ ID NO: 578922 - DNA, 19 bp, Mus musculus
  siRNA target sequence for Adam4 (NM_009620.1,917-935).
ctaaagaattgcacgattt

SEQ ID NO: 578923 - DNA, 19 bp, Mus musculus
  siRNA target sequence for Adam4 (NM_009620.1,936-954).
gtatgccactacagctatt

SEQ ID NO: 578924 - DNA, 19 bp, Mus musculus
  siRNA target sequence for Adam4 (NM_009620.1,958-976).
cttgcatcaagaccaaaaa

SEQ ID NO: 578925 - DNA, 19 bp, Mus musculus
  siRNA target sequence for Adam4 (NM_009620.1,988-1006).
ggaagctttcagaatggat

SEQ ID NO: 578926 - DNA, 19 bp, Mus musculus
  siRNA target sequence for Adam4 (NM_009620.1,989-1007).
gaagctttcagaatggatt

SEQ ID NO: 578927 - DNA, 19 bp, Mus musculus
  siRNA target sequence for Adam4 (NM_009620.1,2230-2248).
ggtgcagttttcaaagcaa

SEQ ID NO: 578928 - DNA, 19 bp, Mus musculus
  siRNA target sequence for Adam6 (NM_174885.2,525-543).
ggggtcataaagttggata

SEQ ID NO: 578929 - DNA, 19 bp, Mus musculus
  siRNA target sequence for Adam6 (NM_174885.2,526-544).
gggtcataaagttggataa

SEQ ID NO: 578930 - DNA, 19 bp, Mus musculus
  siRNA target sequence for Adam6 (NM_174885.2,911-929).
cgaggctgatccattttca

SEQ ID NO: 578931 - DNA, 19 bp, Mus musculus
  siRNA target sequence for Adam6 (NM_174885.2,914-932).
ggctgatccattttcacaa

SEQ ID NO: 578932 - DNA, 19 bp, Mus musculus
  siRNA target sequence for Adam6 (NM_174885.2,918-936).
gatccattttcacaagatt

SEQ ID NO: 578933 - DNA, 19 bp, Mus musculus
  siRNA target sequence for Adam6 (NM_174885.2,948-966).
ggagggcaggctcatactt

SEQ ID NO: 578934 - DNA, 19 bp, Mus musculus
  siRNA target sequence for Adam6 (NM_174885.2,949-967).
gagggcaggctcatacttt

SEQ ID NO: 578935 - DNA, 19 bp, Mus musculus
  siRNA target sequence for Adam6 (NM_174885.2,951-969).
gggcaggctcatactttct

SEQ ID NO: 578936 - DNA, 19 bp, Mus musculus
  siRNA target sequence for Adam6 (NM_174885.2,952-970).
ggcaggctcatactttcta

SEQ ID NO: 578937 - DNA, 19 bp, Mus musculus
  siRNA target sequence for Adam6 (NM_174885.2,953-971).
gcaggctcatactttctat

SEQ ID NO: 578938 - DNA, 19 bp, Mus musculus
  siRNA target sequence for Adam6 (NM_174885.2,999-1017).
cctgatgcaggagctataa

SEQ ID NO: 578939 - DNA, 19 bp, Mus musculus
  siRNA target sequence for Adam6 (NM_174885.2,1000-1018).
ctgatgcaggagctataat

SEQ ID NO: 578940 - DNA, 19 bp, Mus musculus
  siRNA target sequence for Adam6 (NM_174885.2,1002-1020).
gatgcaggagctataatta

SEQ ID NO: 578941 - DNA, 19 bp, Mus musculus
  siRNA target sequence for Adam6 (NM_174885.2,1005-1023).
gcaggagctataattaaca

SEQ ID NO: 578942 - DNA, 19 bp, Mus musculus
  siRNA target sequence for Adam6 (NM_174885.2,1006-1024).
caggagctataattaacaa

SEQ ID NO: 578943 - DNA, 19 bp, Mus musculus
  siRNA target sequence for Adam6 (NM_174885.2,1009-1027).
gagctataattaacaagaa

SEQ ID NO: 578944 - DNA, 19 bp, Mus musculus
  siRNA target sequence for Adam6 (NM_174885.2,1011-1029).
gctataattaacaagaatt

SEQ ID NO: 578945 - DNA, 19 bp, Mus musculus
  siRNA target sequence for Adam6 (NM_174885.2,1567-1585).
gtagtggctctaagttcat

SEQ ID NO: 578946 - DNA, 19 bp, Mus musculus
  siRNA target sequence for Adam6 (NM_174885.2,1965-1983).
catggtaccccgtgttcaa

SEQ ID NO: 578947 - DNA, 19 bp, Mus musculus
  siRNA target sequence for Adam6 (NM_174885.2,1975-1993).
cgtgttcaaggggtaagtt

SEQ ID NO: 578948 - DNA, 19 bp, Mus musculus
  siRNA target sequence for Adam6 (NM_174885.2,2173-2191).
cggttcaaaggcgcataat

SEQ ID NO: 578949 - DNA, 19 bp, Mus musculus
  siRNA target sequence for Adam6 (NM_174885.2,2182-2200).
ggcgcataataaaacagaa

SEQ ID NO: 578950 - DNA, 19 bp, Mus musculus
  siRNA target sequence for Adam6 (NM_174885.2,2201-2219).
cctagagccagtagtgtat

SEQ ID NO: 578951 - DNA, 19 bp, Mus musculus
  siRNA target sequence for Adam7 (NM_007402.1,33-51).
ccttatttctcacattcaa

SEQ ID NO: 578952 - DNA, 19 bp, Mus musculus
  siRNA target sequence for Adam7 (NM_007402.1,135-153).
catccatgactctgacata

SEQ ID NO: 578953 - DNA, 19 bp, Mus musculus
  siRNA target sequence for Adam7 (NM_007402.1,146-164).
ctgacataccggaggaata

SEQ ID NO: 578954 - DNA, 19 bp, Mus musculus
  siRNA target sequence for Adam7 (NM_007402.1,150-168).
cataccggaggaatatgaa

SEQ ID NO: 578955 - DNA, 19 bp, Mus musculus
  siRNA target sequence for Adam7 (NM_007402.1,172-190).
gaattgttgtatgaaataa

SEQ ID NO: 578956 - DNA, 19 bp, Mus musculus
  siRNA target sequence for Adam7 (NM_007402.1,234-252).
ggaattcctcagttcaaat

SEQ ID NO: 578957 - DNA, 19 bp, Mus musculus
  siRNA target sequence for Adam7 (NM_007402.1,235-253).
gaattcctcagttcaaatt

SEQ ID NO: 578958 - DNA, 19 bp, Mus musculus
  siRNA target sequence for Adam7 (NM_007402.1,240-258).
cctcagttcaaattacagt

SEQ ID NO: 578959 - DNA, 19 bp, Mus musculus
  siRNA target sequence for Adam7 (NM_007402.1,259-277).
gaaacatactacaacgtaa

SEQ ID NO: 578960 - DNA, 19 bp, Mus musculus
  siRNA target sequence for Adam7 (NM_007402.1,293-311).
ccaagcatccacagatctt

SEQ ID NO: 578961 - DNA, 19 bp, Mus musculus
  siRNA target sequence for Adam7 (NM_007402.1,332-350).
gctccatcattcatgaatt

SEQ ID NO: 578962 - DNA, 19 bp, Mus musculus
  siRNA target sequence for Adam7 (NM_007402.1,421-439).
ctcatcgaaccagtaaaat

SEQ ID NO: 578963 - DNA, 19 bp, Mus musculus
  siRNA target sequence for Adam7 (NM_007402.1,426-444).
cgaaccagtaaaatactca

SEQ ID NO: 578964 - DNA, 19 bp, Mus musculus
  siRNA target sequence for Adam7 (NM_007402.1,478-496).
gtcaaggcaccctatgcta

SEQ ID NO: 578965 - DNA, 19 bp, Mus musculus
  siRNA target sequence for Adam7 (NM_007402.1,483-501).
ggcaccctatgctaccaat

SEQ ID NO: 578966 - DNA, 19 bp, Mus musculus
  siRNA target sequence for Adam7 (NM_007402.1,487-505).
ccctatgctaccaatcact

SEQ ID NO: 578967 - DNA, 19 bp, Mus musculus
  siRNA target sequence for Adam7 (NM_007402.1,511-529).
gtggggctcaattttacta

SEQ ID NO: 578968 - DNA, 19 bp, Mus musculus
  siRNA target sequence for Adam7 (NM_007402.1,534-552).
gtctgctctgatagatgtt

SEQ ID NO: 578969 - DNA, 19 bp, Mus musculus
  siRNA target sequence for Adam7 (NM_007402.1,536-554).
ctgctctgatagatgttga

SEQ ID NO: 578970 - DNA, 19 bp, Mus musculus
  siRNA target sequence for Adam7 (NM_007402.1,631-649).
gtgtaccgcaggaacaata

SEQ ID NO: 578971 - DNA, 19 bp, Mus musculus
  siRNA target sequence for Adam7 (NM_007402.1,633-651).
gtaccgcaggaacaataaa

SEQ ID NO: 578972 - DNA, 19 bp, Mus musculus
  siRNA target sequence for Adam7 (NM_007402.1,682-700).
gggatggtcaattttgtca

SEQ ID NO: 578973 - DNA, 19 bp, Mus musculus
  siRNA target sequence for Adam7 (NM_007402.1,766-784).
gacaagatagaaatagtgt

SEQ ID NO: 578974 - DNA, 19 bp, Mus musculus
  siRNA target sequence for Adam7 (NM_007402.1,793-811).
gaaagtaccttattgcatt

SEQ ID NO: 578975 - DNA, 19 bp, Mus musculus
  siRNA target sequence for Adam7 (NM_007402.1,877-895).
gggaagtggctctacacat

SEQ ID NO: 578976 - DNA, 19 bp, Mus musculus
  siRNA target sequence for Adam7 (NM_007402.1,885-903).
gctctacacatctatgcaa

SEQ ID NO: 578977 - DNA, 19 bp, Mus musculus
  siRNA target sequence for Adam7 (NM_007402.1,891-909).
cacatctatgcaaggaatt

SEQ ID NO: 578978 - DNA, 19 bp, Mus musculus
  siRNA target sequence for Adam7 (NM_007402.1,940-958).
cgttcatgcagtgttgtta

SEQ ID NO: 578979 - DNA, 19 bp, Mus musculus
  siRNA target sequence for Adam7 (NM_007402.1,950-968).
gtgttgttaaggatcttct

SEQ ID NO: 578980 - DNA, 19 bp, Mus musculus
  siRNA target sequence for Adam7 (NM_007402.1,967-985).
ctaccagatgtaaatataa

SEQ ID NO: 578981 - DNA, 19 bp, Mus musculus
  siRNA target sequence for Adam7 (NM_007402.1,1084-1102).
ggaagcatccctgcaataa

SEQ ID NO: 578982 - DNA, 19 bp, Mus musculus
  siRNA target sequence for Adam7 (NM_007402.1,1088-1106).
gcatccctgcaataaaatt

SEQ ID NO: 578983 - DNA, 19 bp, Mus musculus
  siRNA target sequence for Adam7 (NM_007402.1,1281-1299).
ctgtgacgcacacaaatgt

SEQ ID NO: 578984 - DNA, 19 bp, Mus musculus
  siRNA target sequence for Adam7 (NM_007402.1,1427-1445).
cccctgagtgccctaaaga

SEQ ID NO: 578985 - DNA, 19 bp, Mus musculus
  siRNA target sequence for Adam7 (NM_007402.1,1453-1471).
caagccaacgggtttcctt

SEQ ID NO: 578986 - DNA, 19 bp, Mus musculus
  siRNA target sequence for Adam7 (NM_007402.1,1522-1540).
gagcagtgctcagagttat

SEQ ID NO: 578987 - DNA, 19 bp, Mus musculus
  siRNA target sequence for Adam7 (NM_007402.1,1795-1813).
gacatgggcctggttaatt

SEQ ID NO: 578988 - DNA, 19 bp, Mus musculus
  siRNA target sequence for Adam7 (NM_007402.1,1844-1862).
gcagcaatggtgaatgtat

SEQ ID NO: 578989 - DNA, 19 bp, Mus musculus
  siRNA target sequence for Adam7 (NM_007402.1,1847-1865).
gcaatggtgaatgtataga

SEQ ID NO: 578990 - DNA, 19 bp, Mus musculus
  siRNA target sequence for Adam7 (NM_007402.1,1848-1866).
caatggtgaatgtatagaa

SEQ ID NO: 578991 - DNA, 19 bp, Mus musculus
  siRNA target sequence for Adam7 (NM_007402.1,1901-1919).
ctccgtgcgatgaaaacga

SEQ ID NO: 578992 - DNA, 19 bp, Mus musculus
  siRNA target sequence for Adam7 (NM_007402.1,1951-1969).
gaggaaggatcaataatta

SEQ ID NO: 578993 - DNA, 19 bp, Mus musculus
  siRNA target sequence for Adam7 (NM_007402.1,1978-1996).
ggagaagccttaaacctta

SEQ ID NO: 578994 - DNA, 19 bp, Mus musculus
  siRNA target sequence for Adam7 (NM_007402.1,2038-2056).
ggtgttggacttgtcatat

SEQ ID NO: 578995 - DNA, 19 bp, Mus musculus
  siRNA target sequence for Adam7 (NM_007402.1,2039-2057).
gtgttggacttgtcatatt

SEQ ID NO: 578996 - DNA, 19 bp, Mus musculus
  siRNA target sequence for Adam7 (NM_007402.1,2044-2062).
ggacttgtcatattactaa

SEQ ID NO: 578997 - DNA, 19 bp, Mus musculus
  siRNA target sequence for Adam7 (NM_007402.1,2045-2063).
gacttgtcatattactaat

SEQ ID NO: 578998 - DNA, 19 bp, Mus musculus
  siRNA target sequence for Adam7 (NM_007402.1,2059-2077).
ctaatccgttaccagaaat

SEQ ID NO: 578999 - DNA, 19 bp, Mus musculus
  siRNA target sequence for Adam7 (NM_007402.1,2065-2083).
cgttaccagaaatgcatta

SEQ ID NO: 579000 - DNA, 19 bp, Mus musculus
  siRNA target sequence for Adam7 (NM_007402.1,2136-2154).
gggatactttcctgaagaa

SEQ ID NO: 579001 - DNA, 19 bp, Mus musculus
  siRNA target sequence for Adam7 (NM_007402.1,2162-2180).
cgaggagtgagccaatctt

SEQ ID NO: 579002 - DNA, 19 bp, Mus musculus
  siRNA target sequence for Adam7 (NM_007402.1,2174-2192).
caatcttgaccgatatcca

SEQ ID NO: 579003 - DNA, 19 bp, Mus musculus
  siRNA target sequence for Adam7 (NM_007402.1,2185-2203).
gatatccatcccctacata

SEQ ID NO: 579004 - DNA, 19 bp, Mus musculus
  siRNA target sequence for Adam7 (NM_007402.1,2238-2256).
cttttcaagtcctcactat

SEQ ID NO: 579005 - DNA, 19 bp, Mus musculus
  siRNA target sequence for Adam7 (NM_007402.1,2253-2271).
ctatatcacactgaaatct

SEQ ID NO: 579006 - DNA, 19 bp, Mus musculus
  siRNA target sequence for Adam7 (NM_007402.1,2299-2317).
gaccctaagcaaactgata

SEQ ID NO: 579007 - DNA, 19 bp, Mus musculus
  siRNA target sequence for Adam7 (NM_007402.1,2301-2319).
ccctaagcaaactgataat

SEQ ID NO: 579008 - DNA, 19 bp, Mus musculus
  siRNA target sequence for Adam7 (NM_007402.1,2307-2325).
gcaaactgataatgtgaat

SEQ ID NO: 579009 - DNA, 19 bp, Mus musculus
  siRNA target sequence for Adam7 (NM_007402.1,2308-2326).
caaactgataatgtgaatt

SEQ ID NO: 579010 - DNA, 19 bp, Mus musculus
  siRNA target sequence for Adamts10 (NM_172619.1,201-219).
gtcacgcatgccttcagat

SEQ ID NO: 579011 - DNA, 19 bp, Mus musculus
  siRNA target sequence for Adamts10 (NM_172619.1,436-454).
ggcacgtctcggtggaata

SEQ ID NO: 579012 - DNA, 19 bp, Mus musculus
  siRNA target sequence for Adamts10 (NM_172619.1,438-456).
cacgtctcggtggaatact

SEQ ID NO: 579013 - DNA, 19 bp, Mus musculus
  siRNA target sequence for Adamts10 (NM_172619.1,568-586).
gcctgcatggcctgattgt

SEQ ID NO: 579014 - DNA, 19 bp, Mus musculus
  siRNA target sequence for Adamts10 (NM_172619.1,750-768).
cgtccatggtggttacgta

SEQ ID NO: 579015 - DNA, 19 bp, Mus musculus
  siRNA target sequence for Adamts10 (NM_172619.1,791-809).
gcccctggggaatgaatct

SEQ ID NO: 579016 - DNA, 19 bp, Mus musculus
  siRNA target sequence for Adamts10 (NM_172619.1,870-888).
gtggtagccgacaagatga

SEQ ID NO: 579017 - DNA, 19 bp, Mus musculus
  siRNA target sequence for Adamts10 (NM_172619.1,933-951).
gccatcatgaacattgtaa

SEQ ID NO: 579018 - DNA, 19 bp, Mus musculus
  siRNA target sequence for Adamts16 (NM_172053.1,469-487).
ccacaggggggattatgta

SEQ ID NO: 579019 - DNA, 19 bp, Mus musculus
  siRNA target sequence for Adamts16 (NM_172053.1,470-488).
cacaggggggattatgtat

SEQ ID NO: 579020 - DNA, 19 bp, Mus musculus
  siRNA target sequence for Adamts16 (NM_172053.1,666-684).
ccaagtctgtacagatgtt

SEQ ID NO: 579021 - DNA, 19 bp, Mus musculus
  siRNA target sequence for Adamts16 (NM_172053.1,703-721).
cttttaccaaggatcctta

SEQ ID NO: 579022 - DNA, 19 bp, Mus musculus
  siRNA target sequence for Adamts16 (NM_172053.1,764-782).
ggtttgttaggcatgataa

SEQ ID NO: 579023 - DNA, 19 bp, Mus musculus
  siRNA target sequence for Adamts16 (NM_172053.1,769-787).
gttaggcatgataagaaca

SEQ ID NO: 579024 - DNA, 19 bp, Mus musculus
  siRNA target sequence for Adamts16 (NM_172053.1,815-833).
ctgcctccacacctaacaa

SEQ ID NO: 579025 - DNA, 19 bp, Mus musculus
  siRNA target sequence for Adamts16 (NM_172053.1,824-842).
cacctaacaagcaaactga

SEQ ID NO: 579026 - DNA, 19 bp, Mus musculus
  siRNA target sequence for Adamts16 (NM_172053.1,872-890).
catgttctgtacaagagat

SEQ ID NO: 579027 - DNA, 19 bp, Mus musculus
  siRNA target sequence for Adamts16 (NM_172053.1,875-893).
gttctgtacaagagatcta

SEQ ID NO: 579028 - DNA, 19 bp, Mus musculus
  siRNA target sequence for Adamts16 (NM_172053.1,960-978).
cacacctgcaccatgacaa

SEQ ID NO: 579029 - DNA, 19 bp, Mus musculus
  siRNA target sequence for Adamts16 (NM_172053.1,1017-1035).
gaagacgcaagaaatacat

SEQ ID NO: 579030 - DNA, 19 bp, Mus musculus
  siRNA target sequence for Adamts16 (NM_172053.1,1099-1117).
caagcgctcgctcttgaaa

SEQ ID NO: 579031 - DNA, 19 bp, Mus musculus
  siRNA target sequence for Adamts16 (NM_172053.1,1182-1200).
gccatggccatgaaaacat

SEQ ID NO: 579032 - DNA, 19 bp, Mus musculus
  siRNA target sequence for Adamts16 (NM_172053.1,1187-1205).
ggccatgaaaacattacga

SEQ ID NO: 579033 - DNA, 19 bp, Mus musculus
  siRNA target sequence for Adamts16 (NM_172053.1,1257-1275).
caattgggggaaacatcaa

SEQ ID NO: 579034 - DNA, 19 bp, Mus musculus
  siRNA target sequence for Adamts16 (NM_172053.1,1263-1281).
ggggaaacatcaacattgt

SEQ ID NO: 579035 - DNA, 19 bp, Mus musculus
  siRNA target sequence for Adamts16 (NM_172053.1,1315-1333).
gccagggctggcgattagt

SEQ ID NO: 579036 - DNA, 19 bp, Mus musculus
  siRNA target sequence for Adamts16 (NM_172053.1,1317-1335).
cagggctggcgattagtca

SEQ ID NO: 579037 - DNA, 19 bp, Mus musculus
  siRNA target sequence for Adamts16 (NM_172053.1,1337-1355).
catgcagaccacacgttaa

SEQ ID NO: 579038 - DNA, 19 bp, Mus musculus
  siRNA target sequence for Adamts16 (NM_172053.1,1378-1396).
cggattgatggggaaagat

SEQ ID NO: 579039 - DNA, 19 bp, Mus musculus
  siRNA target sequence for Adamts16 (NM_172053.1,1409-1427).
gaccacgccatcttactga

SEQ ID NO: 579040 - DNA, 19 bp, Mus musculus
  siRNA target sequence for Adamts16 (NM_172053.1,1426-1444).
gactggtctggacatatgt

SEQ ID NO: 579041 - DNA, 19 bp, Mus musculus
  siRNA target sequence for Adamts16 (NM_172053.1,1515-1533).
gctgcacagtcaatgaaga

SEQ ID NO: 579042 - DNA, 19 bp, Mus musculus
  siRNA target sequence for Adamts16 (NM_172053.1,1695-1713).
gtcagtacctgcacaagtt

SEQ ID NO: 579043 - DNA, 19 bp, Mus musculus
  siRNA target sequence for Adamts16 (NM_172053.1,1720-1738).
caccgcccaagcgatatgt

SEQ ID NO: 579044 - DNA, 19 bp, Mus musculus
  siRNA target sequence for Adamts16 (NM_172053.1,1722-1740).
ccgcccaagcgatatgtct

SEQ ID NO: 579045 - DNA, 19 bp, Mus musculus
  siRNA target sequence for Adamts16 (NM_172053.1,1723-1741).
cgcccaagcgatatgtctt

SEQ ID NO: 579046 - DNA, 19 bp, Mus musculus
  siRNA target sequence for Adamts16 (NM_172053.1,1758-1776).
ctgtgaaagagtataagta

SEQ ID NO: 579047 - DNA, 19 bp, Mus musculus
  siRNA target sequence for Adamts16 (NM_172053.1,1789-1807).
gccgggacagttatacgat

SEQ ID NO: 579048 - DNA, 19 bp, Mus musculus
  siRNA target sequence for Adamts16 (NM_172053.1,1796-1814).
cagttatacgatgcaaata

SEQ ID NO: 579049 - DNA, 19 bp, Mus musculus
  siRNA target sequence for Adamts16 (NM_172053.1,1980-1998).
gaggacagtgtgtcaagta

SEQ ID NO: 579050 - DNA, 19 bp, Mus musculus
  siRNA target sequence for Adamts16 (NM_172053.1,2157-2175).
gcactctgaagctttgcaa

SEQ ID NO: 579051 - DNA, 19 bp, Mus musculus
  siRNA target sequence for Adamts16 (NM_172053.1,2249-2267).
cgagggtggctctacaagt

SEQ ID NO: 579052 - DNA, 19 bp, Mus musculus
  siRNA target sequence for Adamts16 (NM_172053.1,2294-2312).
caggacttatgcaaactct

SEQ ID NO: 579053 - DNA, 19 bp, Mus musculus
  siRNA target sequence for Adamts16 (NM_172053.1,2316-2334).
gtatcgcagaaggatttga

SEQ ID NO: 579054 - DNA, 19 bp, Mus musculus
  siRNA target sequence for Adamts16 (NM_172053.1,2382-2400).
cggaggatagccgtaatgt

SEQ ID NO: 579055 - DNA, 19 bp, Mus musculus
  siRNA target sequence for Adamts16 (NM_172053.1,2383-2401).
ggaggatagccgtaatgtt

SEQ ID NO: 579056 - DNA, 19 bp, Mus musculus
  siRNA target sequence for Adamts16 (NM_172053.1,2384-2402).
gaggatagccgtaatgttt

SEQ ID NO: 579057 - DNA, 19 bp, Mus musculus
  siRNA target sequence for Adamts16 (NM_172053.1,2386-2404).
ggatagccgtaatgtttgt

SEQ ID NO: 579058 - DNA, 19 bp, Mus musculus
  siRNA target sequence for Adamts16 (NM_172053.1,2387-2405).
gatagccgtaatgtttgta

SEQ ID NO: 579059 - DNA, 19 bp, Mus musculus
  siRNA target sequence for Adamts16 (NM_172053.1,2391-2409).
gccgtaatgtttgtataga

SEQ ID NO: 579060 - DNA, 19 bp, Mus musculus
  siRNA target sequence for Adamts16 (NM_172053.1,2392-2410).
ccgtaatgtttgtatagat

SEQ ID NO: 579061 - DNA, 19 bp, Mus musculus
  siRNA target sequence for Adamts16 (NM_172053.1,2437-2455).
caatgtccttggatcagat

SEQ ID NO: 579062 - DNA, 19 bp, Mus musculus
  siRNA target sequence for Adamts16 (NM_172053.1,2477-2495).
gtctgcaaggggaataact

SEQ ID NO: 579063 - DNA, 19 bp, Mus musculus
  siRNA target sequence for Adamts16 (NM_172053.1,2479-2497).
ctgcaaggggaataactca

SEQ ID NO: 579064 - DNA, 19 bp, Mus musculus
  siRNA target sequence for Adamts16 (NM_172053.1,2510-2528).
catagagggctctacagta

SEQ ID NO: 579065 - DNA, 19 bp, Mus musculus
  siRNA target sequence for Adamts16 (NM_172053.1,2546-2564).
cagtactaccacatggtaa

SEQ ID NO: 579066 - DNA, 19 bp, Mus musculus
  siRNA target sequence for Adamts16 (NM_172053.1,2577-2595).
gagctcggagcattcacat

SEQ ID NO: 579067 - DNA, 19 bp, Mus musculus
  siRNA target sequence for Adamts16 (NM_172053.1,2633-2651).
cgcaattctctcaagagat

SEQ ID NO: 579068 - DNA, 19 bp, Mus musculus
  siRNA target sequence for Adamts16 (NM_172053.1,2635-2653).
caattctctcaagagatat

SEQ ID NO: 579069 - DNA, 19 bp, Mus musculus
  siRNA target sequence for Adamts16 (NM_172053.1,2640-2658).
ctctcaagagatattacct

SEQ ID NO: 579070 - DNA, 19 bp, Mus musculus
  siRNA target sequence for Adamts16 (NM_172053.1,2738-2756).
gagcctgagaatttaacct

SEQ ID NO: 579071 - DNA, 19 bp, Mus musculus
  siRNA target sequence for Adamts16 (NM_172053.1,2755-2773).
ctcccctggaccaaccaat

SEQ ID NO: 579072 - DNA, 19 bp, Mus musculus
  siRNA target sequence for Adamts16 (NM_172053.1,2758-2776).
ccctggaccaaccaatgaa

SEQ ID NO: 579073 - DNA, 19 bp, Mus musculus
  siRNA target sequence for Adamts16 (NM_172053.1,2759-2777).
cctggaccaaccaatgaaa

SEQ ID NO: 579074 - DNA, 19 bp, Mus musculus
  siRNA target sequence for Adamts16 (NM_172053.1,2778-2796).
ctctgattgtggagctttt

SEQ ID NO: 579075 - DNA, 19 bp, Mus musculus
  siRNA target sequence for Adamts18 (NM_172466.1,1026-1044).
ggcccaggaacacaactat

SEQ ID NO: 579076 - DNA, 19 bp, Mus musculus
  siRNA target sequence for Adamts18 (NM_172466.1,1027-1045).
gcccaggaacacaactata

SEQ ID NO: 579077 - DNA, 19 bp, Mus musculus
  siRNA target sequence for Adamts18 (NM_172466.1,1030-1048).
caggaacacaactatagct

SEQ ID NO: 579078 - DNA, 19 bp, Mus musculus
  siRNA target sequence for Adamts18 (NM_172466.1,1128-1146).
ctcccagcggacatatcct

SEQ ID NO: 579079 - DNA, 19 bp, Mus musculus
  siRNA target sequence for Adamts18 (NM_172466.1,1212-1230).
gtggcaaaagcggcatttt

SEQ ID NO: 579080 - DNA, 19 bp, Mus musculus
  siRNA target sequence for Adamts18 (NM_172466.1,1215-1233).
gcaaaagcggcatttttgt

SEQ ID NO: 579081 - DNA, 19 bp, Mus musculus
  siRNA target sequence for Adamts18 (NM_172466.1,1234-1252).
ggacgacgcaagaaatgta

SEQ ID NO: 579082 - DNA, 19 bp, Mus musculus
  siRNA target sequence for Adamts18 (NM_172466.1,1235-1253).
gacgacgcaagaaatgtat

SEQ ID NO: 579083 - DNA, 19 bp, Mus musculus
  siRNA target sequence for Adamts18 (NM_172466.1,1237-1255).
cgacgcaagaaatgtatat

SEQ ID NO: 579084 - DNA, 19 bp, Mus musculus
  siRNA target sequence for Adamts18 (NM_172466.1,1436-1454).
gtcatgaacatggtttcta

SEQ ID NO: 579085 - DNA, 19 bp, Mus musculus
  siRNA target sequence for Adamts18 (NM_172466.1,1473-1491).
ccattggaagcgacataaa

SEQ ID NO: 579086 - DNA, 19 bp, Mus musculus
  siRNA target sequence for Adamts18 (NM_172466.1,1479-1497).
gaagcgacataaacattgt

SEQ ID NO: 579087 - DNA, 19 bp, Mus musculus
  siRNA target sequence for Adamts18 (NM_172466.1,1553-1571).
catgcagaccagtctctaa

SEQ ID NO: 579088 - DNA, 19 bp, Mus musculus
  siRNA target sequence for Adamts18 (NM_172466.1,1633-1651).
catcctcctcacaggattt

SEQ ID NO: 579089 - DNA, 19 bp, Mus musculus
  siRNA target sequence for Adamts18 (NM_172466.1,1637-1655).
ctcctcacaggatttgaca

SEQ ID NO: 579090 - DNA, 19 bp, Mus musculus
  siRNA target sequence for Adamts18 (NM_172466.1,1677-1695).
catgtgacacactaggatt

SEQ ID NO: 579091 - DNA, 19 bp, Mus musculus
  siRNA target sequence for Adamts18 (NM_172466.1,1841-1859).
gcagaaggcaacatcatgt

SEQ ID NO: 579092 - DNA, 19 bp, Mus musculus
  siRNA target sequence for Adamts18 (NM_172466.1,1903-1921).
ctgcagccgacagtatcta

SEQ ID NO: 579093 - DNA, 19 bp, Mus musculus
  siRNA target sequence for Adamts18 (NM_172466.1,1905-1923).
gcagccgacagtatctaaa

SEQ ID NO: 579094 - DNA, 19 bp, Mus musculus
  siRNA target sequence for Adamts18 (NM_172466.1,1908-1926).
gccgacagtatctaaagaa

SEQ ID NO: 579095 - DNA, 19 bp, Mus musculus
  siRNA target sequence for Adamts18 (NM_172466.1,1909-1927).
ccgacagtatctaaagaaa

SEQ ID NO: 579096 - DNA, 19 bp, Mus musculus
  siRNA target sequence for Adamts18 (NM_172466.1,1910-1928).
cgacagtatctaaagaaat

SEQ ID NO: 579097 - DNA, 19 bp, Mus musculus
  siRNA target sequence for Adamts18 (NM_172466.1,1972-1990).
gcaaacgggacagtataaa

SEQ ID NO: 579098 - DNA, 19 bp, Mus musculus
  siRNA target sequence for Adamts18 (NM_172466.1,1973-1991).
caaacgggacagtataaat

SEQ ID NO: 579099 - DNA, 19 bp, Mus musculus
  siRNA target sequence for Adamts18 (NM_172466.1,1999-2017).
caaactcccgggacagatt

SEQ ID NO: 579100 - DNA, 19 bp, Mus musculus
  siRNA target sequence for Adamts18 (NM_172466.1,2021-2039).
gatgccgacatgcaatgta

SEQ ID NO: 579101 - DNA, 19 bp, Mus musculus
  siRNA target sequence for Adamts18 (NM_172466.1,2024-2042).
gccgacatgcaatgtaagt

SEQ ID NO: 579102 - DNA, 19 bp, Mus musculus
  siRNA target sequence for Adamts18 (NM_172466.1,2166-2184).
ccgcttgtggcttgagtat

SEQ ID NO: 579103 - DNA, 19 bp, Mus musculus
  siRNA target sequence for Adamts18 (NM_172466.1,2363-2381).
ggatctagccgcatctaca

SEQ ID NO: 579104 - DNA, 19 bp, Mus musculus
  siRNA target sequence for Adamts18 (NM_172466.1,2364-2382).
gatctagccgcatctacaa

SEQ ID NO: 579105 - DNA, 19 bp, Mus musculus
  siRNA target sequence for Adamts18 (NM_172466.1,2431-2449).
ccaacagtgtgcagagtat

SEQ ID NO: 579106 - DNA, 19 bp, Mus musculus
  siRNA target sequence for Adamts18 (NM_172466.1,2432-2450).
caacagtgtgcagagtata

SEQ ID NO: 579107 - DNA, 19 bp, Mus musculus
  siRNA target sequence for Adamts18 (NM_172466.1,2485-2503).
gaaaccctacacaaaagtt

SEQ ID NO: 579108 - DNA, 19 bp, Mus musculus
  siRNA target sequence for Adamts18 (NM_172466.1,2537-2555).
gcggagaactttgagtttt

SEQ ID NO: 579109 - DNA, 19 bp, Mus musculus
  siRNA target sequence for Adamts18 (NM_172466.1,2693-2711).
gtttgcaaaggcgataact

SEQ ID NO: 579110 - DNA, 19 bp, Mus musculus
  siRNA target sequence for Adamts18 (NM_172466.1,2710-2728).
ctcaacttgcaagttttat

SEQ ID NO: 579111 - DNA, 19 bp, Mus musculus
  siRNA target sequence for Adamts18 (NM_172466.1,2712-2730).
caacttgcaagttttataa

SEQ ID NO: 579112 - DNA, 19 bp, Mus musculus
  siRNA target sequence for Adamts18 (NM_172466.1,2747-2765).
cagcacaaagcaaatgagt

SEQ ID NO: 579113 - DNA, 19 bp, Mus musculus
  siRNA target sequence for Adamts18 (NM_172466.1,2796-2814).
cccgaagcattgagattca

SEQ ID NO: 579114 - DNA, 19 bp, Mus musculus
  siRNA target sequence for Adamts18 (NM_172466.1,2850-2868).
gaagcctcagtcaaaagta

SEQ ID NO: 579115 - DNA, 19 bp, Mus musculus
  siRNA target sequence for Adamts18 (NM_172466.1,2917-2935).
cgcagggaccacgtttgaa

SEQ ID NO: 579116 - DNA, 19 bp, Mus musculus
  siRNA target sequence for Adamts18 (NM_172466.1,2919-2937).
cagggaccacgtttgaata

SEQ ID NO: 579117 - DNA, 19 bp, Mus musculus
  siRNA target sequence for Adamts18 (NM_172466.1,2933-2951).
gaataccagcgttccttta

SEQ ID NO: 579118 - DNA, 19 bp, Mus musculus
  siRNA target sequence for Adamts18 (NM_172466.1,2953-2971).
ccgccctgaacgactgtat

SEQ ID NO: 579119 - DNA, 19 bp, Mus musculus
  siRNA target sequence for Adamts18 (NM_172466.1,2975-2993).
ccaggacccacgaatgaga

SEQ ID NO: 579120 - DNA, 19 bp, Mus musculus
  siRNA target sequence for Adamts18 (NM_172466.1,2990-3008).
gagacgctggtctttgaaa

SEQ ID NO: 579121 - DNA, 19 bp, Mus musculus
  siRNA target sequence for Adamts18 (NM_172466.1,2992-3010).
gacgctggtctttgaaatt

SEQ ID NO: 579122 - DNA, 19 bp, Mus musculus
  siRNA target sequence for Adamts18 (NM_172466.1,3031-3049).
ggggatcgcttggaagtat

SEQ ID NO: 579123 - DNA, 19 bp, Mus musculus
  siRNA target sequence for Adamts18 (NM_172466.1,3138-3156).
cctgcggtggaggttatat

SEQ ID NO: 579124 - DNA, 19 bp, Mus musculus
  siRNA target sequence for Adamts18 (NM_172466.1,3139-3157).
ctgcggtggaggttatata

SEQ ID NO: 579125 - DNA, 19 bp, Mus musculus
  siRNA target sequence for Adamts18 (NM_172466.1,3188-3206).
cacacccaagtcaattcct

SEQ ID NO: 579126 - DNA, 19 bp, Mus musculus
  siRNA target sequence for Adamts18 (NM_172466.1,3237-3255).
cagagcccaagatatgcaa

SEQ ID NO: 579127 - DNA, 19 bp, Mus musculus
  siRNA target sequence for Adamts18 (NM_172466.1,3411-3429).
cgcccactcaggttcaagt

SEQ ID NO: 579128 - DNA, 19 bp, Mus musculus
  siRNA target sequence for Adamts18 (NM_172466.1,3513-3531).
ggcgtgaggtcctttgtaa

SEQ ID NO: 579129 - DNA, 19 bp, Mus musculus
  siRNA target sequence for Adamts18 (NM_172466.1,3515-3533).
cgtgaggtcctttgtaaaa

SEQ ID NO: 579130 - DNA, 19 bp, Mus musculus
  siRNA target sequence for Adamts18 (NM_172466.1,3611-3629).
ggacggtgccccaaaaaca

SEQ ID NO: 579131 - DNA, 19 bp, Mus musculus
  siRNA target sequence for Adamts18 (NM_172466.1,3614-3632).
cggtgccccaaaaacaaca

SEQ ID NO: 579132 - DNA, 19 bp, Mus musculus
  siRNA target sequence for Adamts18 (NM_172466.1,3727-3745).
gcaggggaaactaataaca

SEQ ID NO: 579133 - DNA, 19 bp, Mus musculus
  siRNA target sequence for Adamts18 (NM_172466.1,3728-3746).
caggggaaactaataacat

SEQ ID NO: 579134 - DNA, 19 bp, Mus musculus
  siRNA target sequence for Adamts18 (NM_172466.1,3754-3772).
gcggagatgccgcaacatt

SEQ ID NO: 579135 - DNA, 19 bp, Mus musculus
  siRNA target sequence for Adamts18 (NM_172466.1,3755-3773).
cggagatgccgcaacatta

SEQ ID NO: 579136 - DNA, 19 bp, Mus musculus
  siRNA target sequence for Adamts18 (NM_172466.1,3756-3774).
ggagatgccgcaacattaa

SEQ ID NO: 579137 - DNA, 19 bp, Mus musculus
  siRNA target sequence for Adamts18 (NM_172466.1,3759-3777).
gatgccgcaacattaagaa

SEQ ID NO: 579138 - DNA, 19 bp, Mus musculus
  siRNA target sequence for Adamts18 (NM_172466.1,3840-3858).
gtggcgagctggtattcat

SEQ ID NO: 579139 - DNA, 19 bp, Mus musculus
  siRNA target sequence for Adamts18 (NM_172466.1,3973-3991).
gtgctcagagcctgtaaca

SEQ ID NO: 579140 - DNA, 19 bp, Mus musculus
  siRNA target sequence for Adamts18 (NM_172466.1,4027-4045).
ccatcttgcgtggatttct

SEQ ID NO: 579141 - DNA, 19 bp, Mus musculus
  siRNA target sequence for Adamts18 (NM_172466.1,4028-4046).
catcttgcgtggatttctt

SEQ ID NO: 579142 - DNA, 19 bp, Mus musculus
  siRNA target sequence for Adamts18 (NM_172466.1,4076-4094).
gagtctgcaaccacaaatt

SEQ ID NO: 579143 - DNA, 19 bp, Mus musculus
  siRNA target sequence for Adamts18 (NM_172466.1,4078-4096).
gtctgcaaccacaaatttt

SEQ ID NO: 579144 - DNA, 19 bp, Mus musculus
  siRNA target sequence for Adamts18 (NM_172466.1,4080-4098).
ctgcaaccacaaattttat

SEQ ID NO: 579145 - DNA, 19 bp, Mus musculus
  siRNA target sequence for Adamts18 (NM_172466.1,4171-4189).
ccttacccgtccatctcta

SEQ ID NO: 579146 - DNA, 19 bp, Mus musculus
  siRNA target sequence for Adamts18 (NM_172466.1,4187-4205).
ctaggtcttcgtatcaaga

SEQ ID NO: 579147 - DNA, 19 bp, Mus musculus
  siRNA target sequence for Adamts18 (NM_172466.1,4190-4208).
ggtcttcgtatcaagacta

SEQ ID NO: 579148 - DNA, 19 bp, Mus musculus
  siRNA target sequence for Uqcrc2 (NM_025899.1,106-124).
cgggtccttctcgagattt

SEQ ID NO: 579149 - DNA, 19 bp, Mus musculus
  siRNA target sequence for Uqcrc2 (NM_025899.1,137-155).
gttgccccgaaggttaaaa

SEQ ID NO: 579150 - DNA, 19 bp, Mus musculus
  siRNA target sequence for Uqcrc2 (NM_025899.1,142-160).
cccgaaggttaaaacttca

SEQ ID NO: 579151 - DNA, 19 bp, Mus musculus
  siRNA target sequence for Uqcrc2 (NM_025899.1,202-220).
gtttaccaaattaccaaat

SEQ ID NO: 579152 - DNA, 19 bp, Mus musculus
  siRNA target sequence for Uqcrc2 (NM_025899.1,207-225).
ccaaattaccaaatggttt

SEQ ID NO: 579153 - DNA, 19 bp, Mus musculus
  siRNA target sequence for Uqcrc2 (NM_025899.1,264-282).
gaatcggcttgttcgttaa

SEQ ID NO: 579154 - DNA, 19 bp, Mus musculus
  siRNA target sequence for Uqcrc2 (NM_025899.1,268-286).
cggcttgttcgttaaagca

SEQ ID NO: 579155 - DNA, 19 bp, Mus musculus
  siRNA target sequence for Uqcrc2 (NM_025899.1,313-331).
cttgggaacctcacattta

SEQ ID NO: 579156 - DNA, 19 bp, Mus musculus
  siRNA target sequence for Uqcrc2 (NM_025899.1,338-356).
cttgcatctagtttgacta

SEQ ID NO: 579157 - DNA, 19 bp, Mus musculus
  siRNA target sequence for Uqcrc2 (NM_025899.1,379-397).
gataacccgtgggattgaa

SEQ ID NO: 579158 - DNA, 19 bp, Mus musculus
  siRNA target sequence for Uqcrc2 (NM_025899.1,423-441).
ctgcaacaagggaaaacat

SEQ ID NO: 579159 - DNA, 19 bp, Mus musculus
  siRNA target sequence for Uqcrc2 (NM_025899.1,439-457).
catggcgtacactgtagaa

SEQ ID NO: 579160 - DNA, 19 bp, Mus musculus
  siRNA target sequence for Uqcrc2 (NM_025899.1,543-561).
ccctgcggtctcagctaaa

SEQ ID NO: 579161 - DNA, 19 bp, Mus musculus
  siRNA target sequence for Uqcrc2 (NM_025899.1,552-570).
ctcagctaaagattgacaa

SEQ ID NO: 579162 - DNA, 19 bp, Mus musculus
  siRNA target sequence for Uqcrc2 (NM_025899.1,591-609).
cacagacccgtatcattga

SEQ ID NO: 579163 - DNA, 19 bp, Mus musculus
  siRNA target sequence for Uqcrc2 (NM_025899.1,593-611).
cagacccgtatcattgaga

SEQ ID NO: 579164 - DNA, 19 bp, Mus musculus
  siRNA target sequence for Uqcrc2 (NM_025899.1,667-685).
ctataggatggggaagata

SEQ ID NO: 579165 - DNA, 19 bp, Mus musculus
  siRNA target sequence for Uqcrc2 (NM_025899.1,687-705).
catcagaggaattacatta

SEQ ID NO: 579166 - DNA, 19 bp, Mus musculus
  siRNA target sequence for Uqcrc2 (NM_025899.1,690-708).
cagaggaattacattactt

SEQ ID NO: 579167 - DNA, 19 bp, Mus musculus
  siRNA target sequence for Uqcrc2 (NM_025899.1,710-728).
gttcagaaccacttcacaa

SEQ ID NO: 579168 - DNA, 19 bp, Mus musculus
  siRNA target sequence for Uqcrc2 (NM_025899.1,749-767).
ggacttggtgtgagtcatt

SEQ ID NO: 579169 - DNA, 19 bp, Mus musculus
  siRNA target sequence for Uqcrc2 (NM_025899.1,782-800).
gtggctgaacaatttctca

SEQ ID NO: 579170 - DNA, 19 bp, Mus musculus
  siRNA target sequence for Uqcrc2 (NM_025899.1,825-843).
ctggtgcaaaagccaaata

SEQ ID NO: 579171 - DNA, 19 bp, Mus musculus
  siRNA target sequence for Uqcrc2 (NM_025899.1,844-862).
ccgtggaggtgaaattaga

SEQ ID NO: 579172 - DNA, 19 bp, Mus musculus
  siRNA target sequence for Uqcrc2 (NM_025899.1,846-864).
gtggaggtgaaattagaga

SEQ ID NO: 579173 - DNA, 19 bp, Mus musculus
  siRNA target sequence for Uqcrc2 (NM_025899.1,905-923).
gaaagtgctgccattggaa

SEQ ID NO: 579174 - DNA, 19 bp, Mus musculus
  siRNA target sequence for Uqcrc2 (NM_025899.1,1032-1050).
gaagtcaccagccttttga

SEQ ID NO: 579175 - DNA, 19 bp, Mus musculus
  siRNA target sequence for Uqcrc2 (NM_025899.1,1087-1105).
gctctttggaatttacact

SEQ ID NO: 579176 - DNA, 19 bp, Mus musculus
  siRNA target sequence for Uqcrc2 (NM_025899.1,1090-1108).
ctttggaatttacactatt

SEQ ID NO: 579177 - DNA, 19 bp, Mus musculus
  siRNA target sequence for Uqcrc2 (NM_025899.1,1122-1140).
ctgctggagaggttatcaa

SEQ ID NO: 579178 - DNA, 19 bp, Mus musculus
  siRNA target sequence for Uqcrc2 (NM_025899.1,1213-1231).
caagctaaaagctggatat

SEQ ID NO: 579179 - DNA, 19 bp, Mus musculus
  siRNA target sequence for Uqcrc2 (NM_025899.1,1216-1234).
gctaaaagctggatatcta

SEQ ID NO: 579180 - DNA, 19 bp, Mus musculus
  siRNA target sequence for Uqcrc2 (NM_025899.1,1284-1302).
ctctagctgcaggttctta

SEQ ID NO: 579181 - DNA, 19 bp, Mus musculus
  siRNA target sequence for Uqcrc2 (NM_025899.1,1286-1304).
ctagctgcaggttcttata

SEQ ID NO: 579182 - DNA, 19 bp, Mus musculus
  siRNA target sequence for Uqcrc2 (NM_025899.1,1311-1329).
cttctaccgtccttcaaca

SEQ ID NO: 579183 - DNA, 19 bp, Mus musculus
  siRNA target sequence for Uqcrc2 (NM_025899.1,1314-1332).
ctaccgtccttcaacagat

SEQ ID NO: 579184 - DNA, 19 bp, Mus musculus
  siRNA target sequence for Uqcrc2 (NM_025899.1,1339-1357).
cgtggctgatgctgatgtt

SEQ ID NO: 579185 - DNA, 19 bp, Mus musculus
  siRNA target sequence for Uqcrc2 (NM_025899.1,1355-1373).
gttgtaaaggctgcaaaaa

SEQ ID NO: 579186 - DNA, 19 bp, Mus musculus
  siRNA target sequence for Zmpste24 (NM_172700.1,285-303).
ctgcggagaagcgaatctt

SEQ ID NO: 579187 - DNA, 19 bp, Mus musculus
  siRNA target sequence for Zmpste24 (NM_172700.1,308-326).
gcggtgttgctcttttcct

SEQ ID NO: 579188 - DNA, 19 bp, Mus musculus
  siRNA target sequence for Zmpste24 (NM_172700.1,394-412).
cgtaccagcagagttagaa

SEQ ID NO: 579189 - DNA, 19 bp, Mus musculus
  siRNA target sequence for Zmpste24 (NM_172700.1,439-457).
gaaatctcgattgtatcaa

SEQ ID NO: 579190 - DNA, 19 bp, Mus musculus
  siRNA target sequence for Zmpste24 (NM_172700.1,447-465).
gattgtatcaactggataa

SEQ ID NO: 579191 - DNA, 19 bp, Mus musculus
  siRNA target sequence for Zmpste24 (NM_172700.1,500-518).
gaggtggaaggcactttta

SEQ ID NO: 579192 - DNA, 19 bp, Mus musculus
  siRNA target sequence for Zmpste24 (NM_172700.1,554-572).
ctttctgggcagttctgta

SEQ ID NO: 579193 - DNA, 19 bp, Mus musculus
  siRNA target sequence for Zmpste24 (NM_172700.1,582-600).
gctttggaccagaatacga

SEQ ID NO: 579194 - DNA, 19 bp, Mus musculus
  siRNA target sequence for Zmpste24 (NM_172700.1,593-611).
gaatacgagatcattcagt

SEQ ID NO: 579195 - DNA, 19 bp, Mus musculus
  siRNA target sequence for Zmpste24 (NM_172700.1,661-679).
gccctggagtctgtacaat

SEQ ID NO: 579196 - DNA, 19 bp, Mus musculus
  siRNA target sequence for Zmpste24 (NM_172700.1,662-680).
ccctggagtctgtacaata

SEQ ID NO: 579197 - DNA, 19 bp, Mus musculus
  siRNA target sequence for Zmpste24 (NM_172700.1,664-682).
ctggagtctgtacaatact

SEQ ID NO: 579198 - DNA, 19 bp, Mus musculus
  siRNA target sequence for Zmpste24 (NM_172700.1,671-689).
ctgtacaatacttttgtaa

SEQ ID NO: 579199 - DNA, 19 bp, Mus musculus
  siRNA target sequence for Zmpste24 (NM_172700.1,818-836).
ggaggtgactactttttta

SEQ ID NO: 579200 - DNA, 19 bp, Mus musculus
  siRNA target sequence for Zmpste24 (NM_172700.1,819-837).
gaggtgactacttttttat

SEQ ID NO: 579201 - DNA, 19 bp, Mus musculus
  siRNA target sequence for Zmpste24 (NM_172700.1,846-864).
ggctgttcacattagttgt

SEQ ID NO: 579202 - DNA, 19 bp, Mus musculus
  siRNA target sequence for Zmpste24 (NM_172700.1,880-898).
caccatttatgctgactat

SEQ ID NO: 579203 - DNA, 19 bp, Mus musculus
  siRNA target sequence for Zmpste24 (NM_172700.1,882-900).
ccatttatgctgactatat

SEQ ID NO: 579204 - DNA, 19 bp, Mus musculus
  siRNA target sequence for Zmpste24 (NM_172700.1,902-920).
gcccctctgtttgacaaat

SEQ ID NO: 579205 - DNA, 19 bp, Mus musculus
  siRNA target sequence for Zmpste24 (NM_172700.1,929-947).
ctaccggagggaaagctta

SEQ ID NO: 579206 - DNA, 19 bp, Mus musculus
  siRNA target sequence for Zmpste24 (NM_172700.1,933-951).
cggagggaaagcttaagca

SEQ ID NO: 579207 - DNA, 19 bp, Mus musculus
  siRNA target sequence for Zmpste24 (NM_172700.1,991-1009).
gactaaggtgtatgttgtt

SEQ ID NO: 579208 - DNA, 19 bp, Mus musculus
  siRNA target sequence for Zmpste24 (NM_172700.1,1030-1048).
ccacagcaatgcttacttt

SEQ ID NO: 579209 - DNA, 19 bp, Mus musculus
  siRNA target sequence for Zmpste24 (NM_172700.1,1081-1099).
gtttgacactctactagaa

SEQ ID NO: 579210 - DNA, 19 bp, Mus musculus
  siRNA target sequence for Zmpste24 (NM_172700.1,1166-1184).
ggggacagtgaagaagtaa

SEQ ID NO: 579211 - DNA, 19 bp, Mus musculus
  siRNA target sequence for Zmpste24 (NM_172700.1,1276-1294).
cacagtaaaaaatatcatt

SEQ ID NO: 579212 - DNA, 19 bp, Mus musculus
  siRNA target sequence for Zmpste24 (NM_172700.1,1278-1296).
cagtaaaaaatatcattat

SEQ ID NO: 579213 - DNA, 19 bp, Mus musculus
  siRNA target sequence for Zmpste24 (NM_172700.1,1291-1309).
cattattagtcagatgaat

SEQ ID NO: 579214 - DNA, 19 bp, Mus musculus
  siRNA target sequence for Zmpste24 (NM_172700.1,1395-1413).
ctctgatcggactcttgat

SEQ ID NO: 579215 - DNA, 19 bp, Mus musculus
  siRNA target sequence for Zmpste24 (NM_172700.1,1397-1415).
ctgatcggactcttgatca

SEQ ID NO: 579216 - DNA, 19 bp, Mus musculus
  siRNA target sequence for Zmpste24 (NM_172700.1,1404-1422).
gactcttgatcatctttca

SEQ ID NO: 579217 - DNA, 19 bp, Mus musculus
  siRNA target sequence for Zmpste24 (NM_172700.1,1471-1489).
cctgagccgcagatttgaa

SEQ ID NO: 579218 - DNA, 19 bp, Mus musculus
  siRNA target sequence for Zmpste24 (NM_172700.1,1472-1490).
ctgagccgcagatttgaat

SEQ ID NO: 579219 - DNA, 19 bp, Mus musculus
  siRNA target sequence for Zmpste24 (NM_172700.1,1517-1535).
cttgggaaggctaaagact

SEQ ID NO: 579220 - DNA, 19 bp, Mus musculus
  siRNA target sequence for Zmpste24 (NM_172700.1,1521-1539).
ggaaggctaaagacttata

SEQ ID NO: 579221 - DNA, 19 bp, Mus musculus
  siRNA target sequence for Zmpste24 (NM_172700.1,1589-1607).
gactggttgttttcaacat

SEQ ID NO: 579222 - DNA, 19 bp, Mus musculus
  siRNA target sequence for 1110035E17Rik (NM_021453.2,202-220).
gccaagtgctgaaggatta

SEQ ID NO: 579223 - DNA, 19 bp, Mus musculus
  siRNA target sequence for 1110035E17Rik (NM_021453.2,244-262).
gtgcccacgtgcttcttga

SEQ ID NO: 579224 - DNA, 19 bp, Mus musculus
  siRNA target sequence for 1110035E17Rik (NM_021453.2,270-288).
cggaacccagccgtaactt

SEQ ID NO: 579225 - DNA, 19 bp, Mus musculus
  siRNA target sequence for 1110035E17Rik (NM_021453.2,271-289).
ggaacccagccgtaactta

SEQ ID NO: 579226 - DNA, 19 bp, Mus musculus
  siRNA target sequence for 1110035E17Rik (NM_021453.2,272-290).
gaacccagccgtaacttat

SEQ ID NO: 579227 - DNA, 19 bp, Mus musculus
  siRNA target sequence for 1110035E17Rik (NM_021453.2,395-413).
gtgggtaccatccatctat

SEQ ID NO: 579228 - DNA, 19 bp, Mus musculus
  siRNA target sequence for 1110035E17Rik (NM_021453.2,514-532).
gagagatgtccggatttct

SEQ ID NO: 579229 - DNA, 19 bp, Mus musculus
  siRNA target sequence for 1110035E17Rik (NM_021453.2,525-543).
ggatttcttgcctatgaca

SEQ ID NO: 579230 - DNA, 19 bp, Mus musculus
  siRNA target sequence for 1110035E17Rik (NM_021453.2,603-621).
cctggcattttcatggaat

SEQ ID NO: 579231 - DNA, 19 bp, Mus musculus
  siRNA target sequence for 1110035E17Rik (NM_021453.2,604-622).
ctggcattttcatggaata

SEQ ID NO: 579232 - DNA, 19 bp, Mus musculus
  siRNA target sequence for 1110035E17Rik (NM_021453.2,676-694).
gaatcacacccgtctttga

SEQ ID NO: 579233 - DNA, 19 bp, Mus musculus
  siRNA target sequence for 1110035E17Rik (NM_021453.2,839-857).
gcccagctactggcaatta

SEQ ID NO: 579234 - DNA, 19 bp, Mus musculus
  siRNA target sequence for 1110035E17Rik (NM_021453.2,842-860).
cagctactggcaattagct

SEQ ID NO: 579235 - DNA, 19 bp, Mus musculus
  siRNA target sequence for 1110035E17Rik (NM_021453.2,863-881).
ggatagcatctccatgaat

SEQ ID NO: 579236 - DNA, 19 bp, Mus musculus
  siRNA target sequence for 1110035E17Rik (NM_021453.2,907-925).
gctgccaaggtattatgga

SEQ ID NO: 579237 - DNA, 19 bp, Mus musculus
  siRNA target sequence for 1110035E17Rik (NM_021453.2,954-972).
cgaagctccatcgttaaca

SEQ ID NO: 579238 - DNA, 19 bp, Mus musculus
  siRNA target sequence for 1110035E17Rik (NM_021453.2,955-973).
gaagctccatcgttaacat

SEQ ID NO: 579239 - DNA, 19 bp, Mus musculus
  siRNA target sequence for 1110035E17Rik (NM_021453.2,971-989).
catccagaatctaattggt

SEQ ID NO: 579240 - DNA, 19 bp, Mus musculus
  siRNA target sequence for 1110035E17Rik (NM_021453.2,1000-1018).
ctggtgacggcgagtactt

SEQ ID NO: 579241 - DNA, 19 bp, Mus musculus
  siRNA target sequence for 1110035E17Rik (NM_021453.2,1063-1081).
ccatcggcagtgttaccta

SEQ ID NO: 579242 - DNA, 19 bp, Mus musculus
  siRNA target sequence for 1110035E17Rik (NM_021453.2,1113-1131).
gatcggtcacacaattgca

SEQ ID NO: 579243 - DNA, 19 bp, Mus musculus
  siRNA target sequence for 1110035E17Rik (NM_021453.2,1208-1226).
gtatttcaccgtgtttgat

SEQ ID NO: 579244 - DNA, 19 bp, Mus musculus
  siRNA target sequence for 1110035E17Rik (NM_021453.2,1218-1236).
gtgtttgatcgggcaaata

SEQ ID NO: 579245 - DNA, 19 bp, Mus musculus
  siRNA target sequence for Bace (NM_011792.3,720-738).
gtggacacgggcagtagta

SEQ ID NO: 579246 - DNA, 19 bp, Mus musculus
  siRNA target sequence for Bace (NM_011792.3,723-741).
gacacgggcagtagtaact

SEQ ID NO: 579247 - DNA, 19 bp, Mus musculus
  siRNA target sequence for Bace (NM_011792.3,725-743).
cacgggcagtagtaacttt

SEQ ID NO: 579248 - DNA, 19 bp, Mus musculus
  siRNA target sequence for Bace (NM_011792.3,794-812).
gctgtccagcacatatcga

SEQ ID NO: 579249 - DNA, 19 bp, Mus musculus
  siRNA target sequence for Bace (NM_011792.3,815-833).
cctccgaaagggtgtgtat

SEQ ID NO: 579250 - DNA, 19 bp, Mus musculus
  siRNA target sequence for Bace (NM_011792.3,908-926).
cactgtgcgtgccaacatt

SEQ ID NO: 579251 - DNA, 19 bp, Mus musculus
  siRNA target sequence for Bace (NM_011792.3,939-957).
gaatcggacaagttcttca

SEQ ID NO: 579252 - DNA, 19 bp, Mus musculus
  siRNA target sequence for Bace (NM_011792.3,1247-1265).
ggaaatcaatggtcaagat

SEQ ID NO: 579253 - DNA, 19 bp, Mus musculus
  siRNA target sequence for Bace (NM_011792.3,1328-1346).
ccttcgcttgcccaagaaa

SEQ ID NO: 579254 - DNA, 19 bp, Mus musculus
  siRNA target sequence for Bace (NM_011792.3,1334-1352).
cttgcccaagaaagtattt

SEQ ID NO: 579255 - DNA, 19 bp, Mus musculus
  siRNA target sequence for Bace (NM_011792.3,1381-1399).
cctcctcgacggagaagtt

SEQ ID NO: 579256 - DNA, 19 bp, Mus musculus
  siRNA target sequence for Bace (NM_011792.3,1450-1468).
cgaccccttggaacatttt

SEQ ID NO: 579257 - DNA, 19 bp, Mus musculus
  siRNA target sequence for Bace (NM_011792.3,1570-1588).
cgtcccaagacgactgtta

SEQ ID NO: 579258 - DNA, 19 bp, Mus musculus
  siRNA target sequence for Bace (NM_011792.3,1573-1591).
cccaagacgactgttacaa

SEQ ID NO: 579259 - DNA, 19 bp, Mus musculus
  siRNA target sequence for Bace (NM_011792.3,1609-1627).
catccacgggcactgttat

SEQ ID NO: 579260 - DNA, 19 bp, Mus musculus
  siRNA target sequence for Bace (NM_011792.3,1633-1651).
ccgtcatcatggaaggttt

SEQ ID NO: 579261 - DNA, 19 bp, Mus musculus
  siRNA target sequence for Bace (NM_011792.3,1637-1655).
catcatggaaggtttctat

SEQ ID NO: 579262 - DNA, 19 bp, Mus musculus
  siRNA target sequence for Bace (NM_011792.3,1705-1723).
gccatgtgcacgatgagtt

SEQ ID NO: 579263 - DNA, 19 bp, Mus musculus
  siRNA target sequence for Bace (NM_011792.3,1737-1755).
gtggaaggtccgtttgtta

SEQ ID NO: 579264 - DNA, 19 bp, Mus musculus
  siRNA target sequence for Bace (NM_011792.3,1795-1813).
cagatgagtcaacacttat

SEQ ID NO: 579265 - DNA, 19 bp, Mus musculus
  siRNA target sequence for Bace (NM_011792.3,1797-1815).
gatgagtcaacacttatga

SEQ ID NO: 579266 - DNA, 19 bp, Mus musculus
  siRNA target sequence for Bace2 (NM_019517.2,244-262).
gggctactgccaacttctt

SEQ ID NO: 579267 - DNA, 19 bp, Mus musculus
  siRNA target sequence for Bace2 (NM_019517.2,335-353).
gcagaaggtacagattctt

SEQ ID NO: 579268 - DNA, 19 bp, Mus musculus
  siRNA target sequence for Bace2 (NM_019517.2,393-411).
ccacactcctacatagaca

SEQ ID NO: 579269 - DNA, 19 bp, Mus musculus
  siRNA target sequence for Bace2 (NM_019517.2,552-570).
gtcaatattgccactattt

SEQ ID NO: 579270 - DNA, 19 bp, Mus musculus
  siRNA target sequence for Bace2 (NM_019517.2,587-605).
ctttttgcctggtattaaa

SEQ ID NO: 579271 - DNA, 19 bp, Mus musculus
  siRNA target sequence for Bace2 (NM_019517.2,597-615).
ggtattaaatggaatggaa

SEQ ID NO: 579272 - DNA, 19 bp, Mus musculus
  siRNA target sequence for Bace2 (NM_019517.2,683-701).
ggtggcccaagcaaagatt

SEQ ID NO: 579273 - DNA, 19 bp, Mus musculus
  siRNA target sequence for Bace2 (NM_019517.2,818-836).
ctggtataccccaattaaa

SEQ ID NO: 579274 - DNA, 19 bp, Mus musculus
  siRNA target sequence for Bace2 (NM_019517.2,820-838).
ggtataccccaattaaaga

SEQ ID NO: 579275 - DNA, 19 bp, Mus musculus
  siRNA target sequence for Bace2 (NM_019517.2,837-855).
gaggaatggtactatcaaa

SEQ ID NO: 579276 - DNA, 19 bp, Mus musculus
  siRNA target sequence for Bace2 (NM_019517.2,839-857).
ggaatggtactatcaaata

SEQ ID NO: 579277 - DNA, 19 bp, Mus musculus
  siRNA target sequence for Bace2 (NM_019517.2,844-862).
ggtactatcaaatagaaat

SEQ ID NO: 579278 - DNA, 19 bp, Mus musculus
  siRNA target sequence for Bace2 (NM_019517.2,897-915).
ctggactgcagagagtata

SEQ ID NO: 579279 - DNA, 19 bp, Mus musculus
  siRNA target sequence for Bace2 (NM_019517.2,962-980).
gccccagaaggtgtttgat

SEQ ID NO: 579280 - DNA, 19 bp, Mus musculus
  siRNA target sequence for Bace2 (NM_019517.2,1052-1070).
gctggcatgctggacaaat

SEQ ID NO: 579281 - DNA, 19 bp, Mus musculus
  siRNA target sequence for Bace2 (NM_019517.2,1053-1071).
ctggcatgctggacaaatt

SEQ ID NO: 579282 - DNA, 19 bp, Mus musculus
  siRNA target sequence for Bace2 (NM_019517.2,1074-1092).
gaaacgccatgggcatatt

SEQ ID NO: 579283 - DNA, 19 bp, Mus musculus
  siRNA target sequence for Bace2 (NM_019517.2,1181-1199).
gatgggagctggtttcaat

SEQ ID NO: 579284 - DNA, 19 bp, Mus musculus
  siRNA target sequence for Bace2 (NM_019517.2,1203-1221).
gaatgctaccgttttggta

SEQ ID NO: 579285 - DNA, 19 bp, Mus musculus
  siRNA target sequence for Bace2 (NM_019517.2,1530-1548).
cgagaccctgaggtagtta

SEQ ID NO: 579286 - DNA, 19 bp, Mus musculus
  siRNA target sequence for Bace2 (NM_019517.2,1535-1553).
ccctgaggtagttaacgat

SEQ ID NO: 579287 - DNA, 19 bp, Mus musculus
  siRNA target sequence for Ctsd (NM_009983.2,113-131).
cgtcctccttcgcgattat

SEQ ID NO: 579288 - DNA, 19 bp, Mus musculus
  siRNA target sequence for Ctsd (NM_009983.2,117-135).
ctccttcgcgattatcaga

SEQ ID NO: 579289 - DNA, 19 bp, Mus musculus
  siRNA target sequence for Ctsd (NM_009983.2,119-137).
ccttcgcgattatcagaat

SEQ ID NO: 579290 - DNA, 19 bp, Mus musculus
  siRNA target sequence for Ctsd (NM_009983.2,139-157).
cctctgcgcaagttcacat

SEQ ID NO: 579291 - DNA, 19 bp, Mus musculus
  siRNA target sequence for Ctsd (NM_009983.2,142-160).
ctgcgcaagttcacatcta

SEQ ID NO: 579292 - DNA, 19 bp, Mus musculus
  siRNA target sequence for Ctsd (NM_009983.2,338-356).
gtttcacagtcgtctttga

SEQ ID NO: 579293 - DNA, 19 bp, Mus musculus
  siRNA target sequence for Ctsd (NM_009983.2,375-393).
gtgggtcccctccattcat

SEQ ID NO: 579294 - DNA, 19 bp, Mus musculus
  siRNA target sequence for Ctsd (NM_009983.2,384-402).
ctccattcattgcaagata

SEQ ID NO: 579295 - DNA, 19 bp, Mus musculus
  siRNA target sequence for Ctsd (NM_009983.2,416-434).
gctgggtccaccataagta

SEQ ID NO: 579296 - DNA, 19 bp, Mus musculus
  siRNA target sequence for Ctsd (NM_009983.2,419-437).
gggtccaccataagtacaa

SEQ ID NO: 579297 - DNA, 19 bp, Mus musculus
  siRNA target sequence for Ctsd (NM_009983.2,530-548).
ctgtatcggttccatgtaa

SEQ ID NO: 579298 - DNA, 19 bp, Mus musculus
  siRNA target sequence for Ctsd (NM_009983.2,532-550).
gtatcggttccatgtaagt

SEQ ID NO: 579299 - DNA, 19 bp, Mus musculus
  siRNA target sequence for Ctsd (NM_009983.2,609-627).
caagcagcctggaatcgta

SEQ ID NO: 579300 - DNA, 19 bp, Mus musculus
  siRNA target sequence for Ctsd (NM_009983.2,612-630).
gcagcctggaatcgtattt

SEQ ID NO: 579301 - DNA, 19 bp, Mus musculus
  siRNA target sequence for Ctsd (NM_009983.2,691-709).
gtgcttccggtctttgaca

SEQ ID NO: 579302 - DNA, 19 bp, Mus musculus
  siRNA target sequence for Ctsd (NM_009983.2,783-801).
cggaggagaactaatgctt

SEQ ID NO: 579303 - DNA, 19 bp, Mus musculus
  siRNA target sequence for Ctsd (NM_009983.2,806-824).
gcactgactccaagtacta

SEQ ID NO: 579304 - DNA, 19 bp, Mus musculus
  siRNA target sequence for Ctsd (NM_009983.2,1007-1025).
gggcagtgcctcttatcca

SEQ ID NO: 579305 - DNA, 19 bp, Mus musculus
  siRNA target sequence for Ctsd (NM_009983.2,1018-1036).
cttatccagggtgagtata

SEQ ID NO: 579306 - DNA, 19 bp, Mus musculus
  siRNA target sequence for Ctsd (NM_009983.2,1023-1041).
ccagggtgagtatatgatt

SEQ ID NO: 579307 - DNA, 19 bp, Mus musculus
  siRNA target sequence for Ctsd (NM_009983.2,1105-1123).
ctacacccagacaagtata

SEQ ID NO: 579308 - DNA, 19 bp, Mus musculus
  siRNA target sequence for Ctsd (NM_009983.2,1111-1129).
ccagacaagtatatactca

SEQ ID NO: 579309 - DNA, 19 bp, Mus musculus
  siRNA target sequence for Ctsd (NM_009983.2,1112-1130).
cagacaagtatatactcaa

SEQ ID NO: 579310 - DNA, 19 bp, Mus musculus
  siRNA target sequence for Ctsd (NM_009983.2,1136-1154).
cgcagggtggaaagacaat

SEQ ID NO: 579311 - DNA, 19 bp, Mus musculus
  siRNA target sequence for Ctse (NM_007799.2,497-515).
gaattctggaggtctcata

SEQ ID NO: 579312 - DNA, 19 bp, Mus musculus
  siRNA target sequence for Ctse (NM_007799.2,537-555).
gcgagtcctgtaatgtgta

SEQ ID NO: 579313 - DNA, 19 bp, Mus musculus
  siRNA target sequence for Ctse (NM_007799.2,538-556).
cgagtcctgtaatgtgtat

SEQ ID NO: 579314 - DNA, 19 bp, Mus musculus
  siRNA target sequence for Ctse (NM_007799.2,539-557).
gagtcctgtaatgtgtatt

SEQ ID NO: 579315 - DNA, 19 bp, Mus musculus
  siRNA target sequence for Ctse (NM_007799.2,634-652).
gaacttcactgtcatcttt

SEQ ID NO: 579316 - DNA, 19 bp, Mus musculus
  siRNA target sequence for Ctse (NM_007799.2,708-726).
gcaaggcacacccagtatt

SEQ ID NO: 579317 - DNA, 19 bp, Mus musculus
  siRNA target sequence for Ctse (NM_007799.2,712-730).
ggcacacccagtattccat

SEQ ID NO: 579318 - DNA, 19 bp, Mus musculus
  siRNA target sequence for Ctse (NM_007799.2,751-769).
cacggaggtagggaatcat

SEQ ID NO: 579319 - DNA, 19 bp, Mus musculus
  siRNA target sequence for Ctse (NM_007799.2,753-771).
cggaggtagggaatcattt

SEQ ID NO: 579320 - DNA, 19 bp, Mus musculus
  siRNA target sequence for Ctse (NM_007799.2,962-980).
ccagtgtttgacaacatga

SEQ ID NO: 579321 - DNA, 19 bp, Mus musculus
  siRNA target sequence for Ctse (NM_007799.2,995-1013).
gtggctctgcctatgtttt

SEQ ID NO: 579322 - DNA, 19 bp, Mus musculus
  siRNA target sequence for Ctse (NM_007799.2,997-1015).
ggctctgcctatgttttct

SEQ ID NO: 579323 - DNA, 19 bp, Mus musculus
  siRNA target sequence for Ctse (NM_007799.2,1070-1088).
ggctatgacccctctcatt

SEQ ID NO: 579324 - DNA, 19 bp, Mus musculus
  siRNA target sequence for Ctse (NM_007799.2,1278-1296).
cacccattgatggagaata

SEQ ID NO: 579325 - DNA, 19 bp, Mus musculus
  siRNA target sequence for Ctse (NM_007799.2,1318-1336).
cgacacgatgccaaacgtt

SEQ ID NO: 579326 - DNA, 19 bp, Mus musculus
  siRNA target sequence for Ctse (NM_007799.2,1319-1337).
gacacgatgccaaacgtta

SEQ ID NO: 579327 - DNA, 19 bp, Mus musculus
  siRNA target sequence for Ctse (NM_007799.2,1323-1341).
cgatgccaaacgttacctt

SEQ ID NO: 579328 - DNA, 19 bp, Mus musculus
  siRNA target sequence for Ctse (NM_007799.2,1345-1363).
catcaacgaggtttcatat

SEQ ID NO: 579329 - DNA, 19 bp, Mus musculus
  siRNA target sequence for Kdap (NM_008437.1,240-258).
gatccgtgtccctcttcaa

SEQ ID NO: 579330 - DNA, 19 bp, Mus musculus
  siRNA target sequence for Kdap (NM_008437.1,245-263).
gtgtccctcttcaacgaat

SEQ ID NO: 579331 - DNA, 19 bp, Mus musculus
  siRNA target sequence for Kdap (NM_008437.1,268-286).
cttggacacagaatcttaa

SEQ ID NO: 579332 - DNA, 19 bp, Mus musculus
  siRNA target sequence for Kdap (NM_008437.1,361-379).
cctctctccaagttcatga

SEQ ID NO: 579333 - DNA, 19 bp, Mus musculus
  siRNA target sequence for Kdap (NM_008437.1,362-380).
ctctctccaagttcatgaa

SEQ ID NO: 579334 - DNA, 19 bp, Mus musculus
  siRNA target sequence for Kdap (NM_008437.1,378-396).
gaacacccagtattttgga

SEQ ID NO: 579335 - DNA, 19 bp, Mus musculus
  siRNA target sequence for Kdap (NM_008437.1,383-401).
cccagtattttggaactat

SEQ ID NO: 579336 - DNA, 19 bp, Mus musculus
  siRNA target sequence for Kdap (NM_008437.1,384-402).
ccagtattttggaactatt

SEQ ID NO: 579337 - DNA, 19 bp, Mus musculus
  siRNA target sequence for Kdap (NM_008437.1,387-405).
gtattttggaactattggt

SEQ ID NO: 579338 - DNA, 19 bp, Mus musculus
  siRNA target sequence for Kdap (NM_008437.1,408-426).
gggaacgcctcctcagaat

SEQ ID NO: 579339 - DNA, 19 bp, Mus musculus
  siRNA target sequence for Kdap (NM_008437.1,409-427).
ggaacgcctcctcagaatt

SEQ ID NO: 579340 - DNA, 19 bp, Mus musculus
  siRNA target sequence for Kdap (NM_008437.1,410-428).
gaacgcctcctcagaattt

SEQ ID NO: 579341 - DNA, 19 bp, Mus musculus
  siRNA target sequence for Kdap (NM_008437.1,469-487).
ccgtccacgagatgtcatt

SEQ ID NO: 579342 - DNA, 19 bp, Mus musculus
  siRNA target sequence for Kdap (NM_008437.1,470-488).
cgtccacgagatgtcattt

SEQ ID NO: 579343 - DNA, 19 bp, Mus musculus
  siRNA target sequence for Kdap (NM_008437.1,549-567).
gcccaatgggaccaagttt

SEQ ID NO: 579344 - DNA, 19 bp, Mus musculus
  siRNA target sequence for Kdap (NM_008437.1,604-622).
ctgagccaggacaatctga

SEQ ID NO: 579345 - DNA, 19 bp, Mus musculus
  siRNA target sequence for Kdap (NM_008437.1,630-648).
ggggatccacgatgctttt

SEQ ID NO: 579346 - DNA, 19 bp, Mus musculus
  siRNA target sequence for Kdap (NM_008437.1,639-657).
cgatgcttttgtgacattt

SEQ ID NO: 579347 - DNA, 19 bp, Mus musculus
  siRNA target sequence for Kdap (NM_008437.1,1081-1099).
ctgaatgggcagtacttca

SEQ ID NO: 579348 - DNA, 19 bp, Mus musculus
  siRNA target sequence for Kdap (NM_008437.1,1083-1101).
gaatgggcagtacttcatt

SEQ ID NO: 579349 - DNA, 19 bp, Mus musculus
  siRNA target sequence for Kdap (NM_008437.1,1087-1105).
gggcagtacttcattcagt

SEQ ID NO: 579350 - DNA, 19 bp, Mus musculus
  siRNA target sequence for Kdap (NM_008437.1,1148-1166).
gtggagtctggtttaacct

SEQ ID NO: 579351 - DNA, 19 bp, Mus musculus
  siRNA target sequence for Kdap (NM_008437.1,1225-1243).
ggcttccaagccttggata

SEQ ID NO: 579352 - DNA, 19 bp, Mus musculus
  siRNA target sequence for Kdap (NM_008437.1,1226-1244).
gcttccaagccttggatat

SEQ ID NO: 579353 - DNA, 19 bp, Mus musculus
  siRNA target sequence for Kdap (NM_008437.1,1394-1412).
ctacgcaggcgcagttctt

SEQ ID NO: 579354 - DNA, 19 bp, Mus musculus
  siRNA target sequence for Kdap (NM_008437.1,1397-1415).
cgcaggcgcagttcttcaa

SEQ ID NO: 579355 - DNA, 19 bp, Mus musculus
  siRNA target sequence for Pgc (NM_025973.2,244-262).
gtgactacagtgtactcta

SEQ ID NO: 579356 - DNA, 19 bp, Mus musculus
  siRNA target sequence for Pgc (NM_025973.2,266-284).
gcccatggcctatatggat

SEQ ID NO: 579357 - DNA, 19 bp, Mus musculus
  siRNA target sequence for Pgc (NM_025973.2,551-569).
gttcggcctgagtgagaat

SEQ ID NO: 579358 - DNA, 19 bp, Mus musculus
  siRNA target sequence for Ren1 (NM_031192.1,91-109).
ccgctacctttgaacgaat

SEQ ID NO: 579359 - DNA, 19 bp, Mus musculus
  siRNA target sequence for Ren1 (NM_031192.1,105-123).
cgaatcccgctcaagaaaa

SEQ ID NO: 579360 - DNA, 19 bp, Mus musculus
  siRNA target sequence for Ren1 (NM_031192.1,106-124).
gaatcccgctcaagaaaat

SEQ ID NO: 579361 - DNA, 19 bp, Mus musculus
  siRNA target sequence for Ren1 (NM_031192.1,127-145).
cttctgtccgggaaatcct

SEQ ID NO: 579362 - DNA, 19 bp, Mus musculus
  siRNA target sequence for Ren1 (NM_031192.1,183-201).
gaatggggcgtattcacaa

SEQ ID NO: 579363 - DNA, 19 bp, Mus musculus
  siRNA target sequence for Ren1 (NM_031192.1,206-224).
gccttccttgaccaatctt

SEQ ID NO: 579364 - DNA, 19 bp, Mus musculus
  siRNA target sequence for Ren1 (NM_031192.1,301-319).
ccttcaaagtcatctttga

SEQ ID NO: 579365 - DNA, 19 bp, Mus musculus
  siRNA target sequence for Ren1 (NM_031192.1,372-390).
cttgcttgtgggattcaca

SEQ ID NO: 579366 - DNA, 19 bp, Mus musculus
  siRNA target sequence for Ren1 (NM_031192.1,382-400).
ggattcacagcctctatga

SEQ ID NO: 579367 - DNA, 19 bp, Mus musculus
  siRNA target sequence for Ren1 (NM_031192.1,460-478).
cagggagagtcaaaggttt

SEQ ID NO: 579368 - DNA, 19 bp, Mus musculus
  siRNA target sequence for Ren1 (NM_031192.1,572-590).
caagtttgacggtgttcta

SEQ ID NO: 579369 - DNA, 19 bp, Mus musculus
  siRNA target sequence for Ren1 (NM_031192.1,736-754).
gtagcgacccgcagcatta

SEQ ID NO: 579370 - DNA, 19 bp, Mus musculus
  siRNA target sequence for Ren1 (NM_031192.1,739-757).
gcgacccgcagcattatca

SEQ ID NO: 579371 - DNA, 19 bp, Mus musculus
  siRNA target sequence for Ren1 (NM_031192.1,740-758).
cgacccgcagcattatcaa

SEQ ID NO: 579372 - DNA, 19 bp, Mus musculus
  siRNA target sequence for Ren1 (NM_031192.1,759-777).
ggcaattttcactatgtga

SEQ ID NO: 579373 - DNA, 19 bp, Mus musculus
  siRNA target sequence for Ren1 (NM_031192.1,832-850).
cttccaccctgctatgtga

SEQ ID NO: 579374 - DNA, 19 bp, Mus musculus
  siRNA target sequence for Ren1 (NM_031192.1,1045-1063).
cggactacgtgctacagta

SEQ ID NO: 579375 - DNA, 19 bp, Mus musculus
  siRNA target sequence for Ren1 (NM_031192.1,1046-1064).
ggactacgtgctacagtat

SEQ ID NO: 579376 - DNA, 19 bp, Mus musculus
  siRNA target sequence for Ren1 (NM_031192.1,1157-1175).
catccgcaagttctataca

SEQ ID NO: 579377 - DNA, 19 bp, Mus musculus
  siRNA target sequence for Ren1 (NM_031192.1,1163-1181).
caagttctatacagagttt

SEQ ID NO: 579378 - DNA, 19 bp, Mus musculus
  siRNA target sequence for Ren1 (NM_031192.1,1178-1196).
gtttgatcggcataacaat

SEQ ID NO: 579379 - DNA, 19 bp, Mus musculus
  siRNA target sequence for Ren1 (NM_031192.1,1188-1206).
cataacaatcgcattggat

SEQ ID NO: 579380 - DNA, 19 bp, Mus musculus
  siRNA target sequence for 2300003P22Rik (NM_026414.1,18-36).
ggtaagggctactacctta

SEQ ID NO: 579381 - DNA, 19 bp, Mus musculus
  siRNA target sequence for 2300003P22Rik (NM_026414.1,19-37).
gtaagggctactaccttaa

SEQ ID NO: 579382 - DNA, 19 bp, Mus musculus
  siRNA target sequence for 2300003P22Rik (NM_026414.1,178-196).
ccaatggggcagagatgaa

SEQ ID NO: 579383 - DNA, 19 bp, Mus musculus
  siRNA target sequence for 2300003P22Rik (NM_026414.1,274-292).
gcgcagaagaggctattat

SEQ ID NO: 579384 - DNA, 19 bp, Mus musculus
  siRNA target sequence for 2300003P22Rik (NM_026414.1,275-293).
cgcagaagaggctattatt

SEQ ID NO: 579385 - DNA, 19 bp, Mus musculus
  siRNA target sequence for AI317395 (NM_144821.2,512-530).
gttctctttgaccacataa

SEQ ID NO: 579386 - DNA, 19 bp, Mus musculus
  siRNA target sequence for AI317395 (NM_144821.2,521-539).
gaccacataaatcaattct

SEQ ID NO: 579387 - DNA, 19 bp, Mus musculus
  siRNA target sequence for AI317395 (NM_144821.2,564-582).
caactgcagcgggacttta

SEQ ID NO: 579388 - DNA, 19 bp, Mus musculus
  siRNA target sequence for AI317395 (NM_144821.2,911-929).
gcttccattggcaccttta

SEQ ID NO: 579389 - DNA, 19 bp, Mus musculus
  siRNA target sequence for AI317395 (NM_144821.2,912-930).
cttccattggcacctttat

SEQ ID NO: 579390 - DNA, 19 bp, Mus musculus
  siRNA target sequence for Madcam1 (NM_013591.1,338-356).
ccgtgaagatccttgtgta

SEQ ID NO: 579391 - DNA, 19 bp, Mus musculus
  siRNA target sequence for Madcam1 (NM_013591.1,339-357).
cgtgaagatccttgtgtat

SEQ ID NO: 579392 - DNA, 19 bp, Mus musculus
  siRNA target sequence for Madcam1 (NM_013591.1,422-440).
cctgcacggcccacaacat

SEQ ID NO: 579393 - DNA, 19 bp, Mus musculus
  siRNA target sequence for Madcam1 (NM_013591.1,1099-1117).
caggtgaccccgaattcct

SEQ ID NO: 579394 - DNA, 19 bp, Mus musculus
  siRNA target sequence for Madcam1 (NM_013591.1,1121-1139).
ccaccgtcgtcctatggat

SEQ ID NO: 579395 - DNA, 19 bp, Mus musculus
  siRNA target sequence for Madcam1 (NM_013591.1,1122-1140).
caccgtcgtcctatggatt

SEQ ID NO: 579396 - DNA, 19 bp, Mus musculus
  siRNA target sequence for Madcam1 (NM_013591.1,1219-1237).
ccagacactagctcatgta

SEQ ID NO: 579397 - DNA, 19 bp, Mus musculus
  siRNA target sequence for 5830406J20Rik (NM_175204.2,198-216).
catcgctgcggctgatact

SEQ ID NO: 579398 - DNA, 19 bp, Mus musculus
  siRNA target sequence for 5830406J20Rik (NM_175204.2,391-409).
gcaggcacggccaaactct

SEQ ID NO: 579399 - DNA, 19 bp, Mus musculus
  siRNA target sequence for 5830406J20Rik (NM_175204.2,392-410).
caggcacggccaaactctt

SEQ ID NO: 579400 - DNA, 19 bp, Mus musculus
  siRNA target sequence for 5830406J20Rik (NM_175204.2,518-536).
cttgtctgcagggagatat

SEQ ID NO: 579401 - DNA, 19 bp, Mus musculus
  siRNA target sequence for 5830406J20Rik (NM_175204.2,583-601).
cgtggctaccactatgaca

SEQ ID NO: 579402 - DNA, 19 bp, Mus musculus
  siRNA target sequence for 5830406J20Rik (NM_175204.2,654-672).
ccaccgtgatgcttattca

SEQ ID NO: 579403 - DNA, 19 bp, Mus musculus
  siRNA target sequence for 5830406J20Rik (NM_175204.2,794-812).
caaaagcttgtggaatcta

SEQ ID NO: 579404 - DNA, 19 bp, Mus musculus
  siRNA target sequence for 5830406J20Rik (NM_175204.2,839-857).
ctcgagaatgtaaagaact

SEQ ID NO: 579405 - DNA, 19 bp, Mus musculus
  siRNA target sequence for 5830406J20Rik (NM_175204.2,884-902).
cagaagactgcgcgataat

SEQ ID NO: 579406 - DNA, 19 bp, Mus musculus
  siRNA target sequence for 5830406J20Rik (NM_175204.2,886-904).
gaagactgcgcgataataa

SEQ ID NO: 579407 - DNA, 19 bp, Mus musculus
  siRNA target sequence for 5830406J20Rik (NM_175204.2,889-907).
gactgcgcgataataatga

SEQ ID NO: 579408 - DNA, 19 bp, Mus musculus
  siRNA target sequence for Psma1 (NM_011965.1,104-122).
gaaaccagtatgacaatga

SEQ ID NO: 579409 - DNA, 19 bp, Mus musculus
  siRNA target sequence for Psma1 (NM_011965.1,138-156).
ccctcagggcaggattcat

SEQ ID NO: 579410 - DNA, 19 bp, Mus musculus
  siRNA target sequence for Psma1 (NM_011965.1,144-162).
gggcaggattcatcaaatt

SEQ ID NO: 579411 - DNA, 19 bp, Mus musculus
  siRNA target sequence for Psma1 (NM_011965.1,154-172).
catcaaattgaatatgcaa

SEQ ID NO: 579412 - DNA, 19 bp, Mus musculus
  siRNA target sequence for Psma1 (NM_011965.1,186-204).
gcaaggttcagcaacagtt

SEQ ID NO: 579413 - DNA, 19 bp, Mus musculus
  siRNA target sequence for Psma1 (NM_011965.1,194-212).
cagcaacagttggtctaaa

SEQ ID NO: 579414 - DNA, 19 bp, Mus musculus
  siRNA target sequence for Psma1 (NM_011965.1,266-284).
ccgctcaccagaagaaaat

SEQ ID NO: 579415 - DNA, 19 bp, Mus musculus
  siRNA target sequence for Psma1 (NM_011965.1,267-285).
cgctcaccagaagaaaatt

SEQ ID NO: 579416 - DNA, 19 bp, Mus musculus
  siRNA target sequence for Psma1 (NM_011965.1,292-310).
gttgacaaccatattggta

SEQ ID NO: 579417 - DNA, 19 bp, Mus musculus
  siRNA target sequence for Psma1 (NM_011965.1,312-330).
ctcaattgcgggtctaact

SEQ ID NO: 579418 - DNA, 19 bp, Mus musculus
  siRNA target sequence for Psma1 (NM_011965.1,331-349).
gctgatgccagactgttat

SEQ ID NO: 579419 - DNA, 19 bp, Mus musculus
  siRNA target sequence for Psma1 (NM_011965.1,334-352).
gatgccagactgttatgca

SEQ ID NO: 579420 - DNA, 19 bp, Mus musculus
  siRNA target sequence for Psma1 (NM_011965.1,341-359).
gactgttatgcaactttat

SEQ ID NO: 579421 - DNA, 19 bp, Mus musculus
  siRNA target sequence for Psma1 (NM_011965.1,413-431).
ctcgtcttgtgtctctaat

SEQ ID NO: 579422 - DNA, 19 bp, Mus musculus
  siRNA target sequence for Psma1 (NM_011965.1,423-441).
gtctctaattggaagcaaa

SEQ ID NO: 579423 - DNA, 19 bp, Mus musculus
  siRNA target sequence for Psma1 (NM_011965.1,559-577).
gactgcagagctatgtcta

SEQ ID NO: 579424 - DNA, 19 bp, Mus musculus
  siRNA target sequence for Psma1 (NM_011965.1,590-608).
ctcaatcagctcgtactta

SEQ ID NO: 579425 - DNA, 19 bp, Mus musculus
  siRNA target sequence for Psma1 (NM_011965.1,628-646).
gaatttatggagtgcaatt

SEQ ID NO: 579426 - DNA, 19 bp, Mus musculus
  siRNA target sequence for Psma1 (NM_011965.1,668-686).
gtctgcgtgccttaagaga

SEQ ID NO: 579427 - DNA, 19 bp, Mus musculus
  siRNA target sequence for Psma1 (NM_011965.1,670-688).
ctgcgtgccttaagagaaa

SEQ ID NO: 579428 - DNA, 19 bp, Mus musculus
  siRNA target sequence for Psma1 (NM_011965.1,672-690).
gcgtgccttaagagaaaca

SEQ ID NO: 579429 - DNA, 19 bp, Mus musculus
  siRNA target sequence for Psma1 (NM_011965.1,728-746).
ccattggaatcgttggtaa

SEQ ID NO: 579430 - DNA, 19 bp, Mus musculus
  siRNA target sequence for Psma1 (NM_011965.1,729-747).
cattggaatcgttggtaaa

SEQ ID NO: 579431 - DNA, 19 bp, Mus musculus
  siRNA target sequence for Psma1 (NM_011965.1,733-751).
ggaatcgttggtaaagact

SEQ ID NO: 579432 - DNA, 19 bp, Mus musculus
  siRNA target sequence for Psma1 (NM_011965.1,734-752).
gaatcgttggtaaagactt

SEQ ID NO: 579433 - DNA, 19 bp, Mus musculus
  siRNA target sequence for Psma1 (NM_011965.1,761-779).
caatctacgatgatgatga

SEQ ID NO: 579434 - DNA, 19 bp, Mus musculus
  siRNA target sequence for Psma1 (NM_011965.1,792-810).
cctggatggtcttgaagaa

SEQ ID NO: 579435 - DNA, 19 bp, Mus musculus
  siRNA target sequence for Psma4 (NM_011966.2,85-103).
gactccaggaccacaatat

SEQ ID NO: 579436 - DNA, 19 bp, Mus musculus
  siRNA target sequence for Psma4 (NM_011966.2,87-105).
ctccaggaccacaatattt

SEQ ID NO: 579437 - DNA, 19 bp, Mus musculus
  siRNA target sequence for Psma4 (NM_011966.2,107-125).
ctccagaaggtcgcttata

SEQ ID NO: 579438 - DNA, 19 bp, Mus musculus
  siRNA target sequence for Psma4 (NM_011966.2,110-128).
cagaaggtcgcttatacca

SEQ ID NO: 579439 - DNA, 19 bp, Mus musculus
  siRNA target sequence for Psma4 (NM_011966.2,222-240).
catccacaagcttcttgat

SEQ ID NO: 579440 - DNA, 19 bp, Mus musculus
  siRNA target sequence for Psma4 (NM_011966.2,291-309).
cagcgtggcaggcataaca

SEQ ID NO: 579441 - DNA, 19 bp, Mus musculus
  siRNA target sequence for Psma4 (NM_011966.2,297-315).
ggcaggcataacatctgat

SEQ ID NO: 579442 - DNA, 19 bp, Mus musculus
  siRNA target sequence for Psma4 (NM_011966.2,345-363).
cattgctcaacggtactta

SEQ ID NO: 579443 - DNA, 19 bp, Mus musculus
  siRNA target sequence for Psma4 (NM_011966.2,350-368).
ctcaacggtacttattaca

SEQ ID NO: 579444 - DNA, 19 bp, Mus musculus
  siRNA target sequence for Psma4 (NM_011966.2,352-370).
caacggtacttattacagt

SEQ ID NO: 579445 - DNA, 19 bp, Mus musculus
  siRNA target sequence for Psma4 (NM_011966.2,451-469).
cgtccctttggtgtttctt

SEQ ID NO: 579446 - DNA, 19 bp, Mus musculus
  siRNA target sequence for Psma4 (NM_011966.2,574-592).
gctgcggctgtgtcaatgt

SEQ ID NO: 579447 - DNA, 19 bp, Mus musculus
  siRNA target sequence for Psma4 (NM_011966.2,575-593).
ctgcggctgtgtcaatgtt

SEQ ID NO: 579448 - DNA, 19 bp, Mus musculus
  siRNA target sequence for Psma4 (NM_011966.2,577-595).
gcggctgtgtcaatgttga

SEQ ID NO: 579449 - DNA, 19 bp, Mus musculus
  siRNA target sequence for Psma4 (NM_011966.2,578-596).
cggctgtgtcaatgttgaa

SEQ ID NO: 579450 - DNA, 19 bp, Mus musculus
  siRNA target sequence for Psma4 (NM_011966.2,579-597).
ggctgtgtcaatgttgaaa

SEQ ID NO: 579451 - DNA, 19 bp, Mus musculus
  siRNA target sequence for Psma4 (NM_011966.2,587-605).
caatgttgaaacaagacta

SEQ ID NO: 579452 - DNA, 19 bp, Mus musculus
  siRNA target sequence for Psma4 (NM_011966.2,635-653).
cgcttgctctggctgttaa

SEQ ID NO: 579453 - DNA, 19 bp, Mus musculus
  siRNA target sequence for Psma4 (NM_011966.2,647-665).
ctgttaaggtgctaaataa

SEQ ID NO: 579454 - DNA, 19 bp, Mus musculus
  siRNA target sequence for Psma4 (NM_011966.2,766-784).
gtggaacagttgatcaaaa

SEQ ID NO: 579455 - DNA, 19 bp, Mus musculus
  siRNA target sequence for Psma6 (NM_011968.1,195-213).
gaaagtacccgacaaacta

SEQ ID NO: 579456 - DNA, 19 bp, Mus musculus
  siRNA target sequence for Psma6 (NM_011968.1,229-247).
gtgactcacttgttcaaga

SEQ ID NO: 579457 - DNA, 19 bp, Mus musculus
  siRNA target sequence for Psma6 (NM_011968.1,231-249).
gactcacttgttcaagata

SEQ ID NO: 579458 - DNA, 19 bp, Mus musculus
  siRNA target sequence for Psma6 (NM_011968.1,243-261).
caagataacggaaagcatt

SEQ ID NO: 579459 - DNA, 19 bp, Mus musculus
  siRNA target sequence for Psma6 (NM_011968.1,316-334).
cgctatgaggcagctaatt

SEQ ID NO: 579460 - DNA, 19 bp, Mus musculus
  siRNA target sequence for Psma6 (NM_011968.1,342-360).
caagtatggctatgaaatt

SEQ ID NO: 579461 - DNA, 19 bp, Mus musculus
  siRNA target sequence for Psma6 (NM_011968.1,345-363).
gtatggctatgaaattcct

SEQ ID NO: 579462 - DNA, 19 bp, Mus musculus
  siRNA target sequence for Psma6 (NM_011968.1,426-444).
gaggccactcggttgttgt

SEQ ID NO: 579463 - DNA, 19 bp, Mus musculus
  siRNA target sequence for Psma6 (NM_011968.1,428-446).
ggccactcggttgttgtat

SEQ ID NO: 579464 - DNA, 19 bp, Mus musculus
  siRNA target sequence for Psma6 (NM_011968.1,430-448).
ccactcggttgttgtatga

SEQ ID NO: 579465 - DNA, 19 bp, Mus musculus
  siRNA target sequence for Psma6 (NM_011968.1,431-449).
cactcggttgttgtatgat

SEQ ID NO: 579466 - DNA, 19 bp, Mus musculus
  siRNA target sequence for Psma7 (NM_011969.1,93-111).
gcgcaggaggcggtcaaaa

SEQ ID NO: 579467 - DNA, 19 bp, Mus musculus
  siRNA target sequence for Psma7 (NM_011969.1,94-112).
cgcaggaggcggtcaaaaa

SEQ ID NO: 579468 - DNA, 19 bp, Mus musculus
  siRNA target sequence for Psma7 (NM_011969.1,185-203).
gctacaagatgaaagaaca

SEQ ID NO: 579469 - DNA, 19 bp, Mus musculus
  siRNA target sequence for Psma7 (NM_011969.1,217-235).
gcgccttggacgataacgt

SEQ ID NO: 579470 - DNA, 19 bp, Mus musculus
  siRNA target sequence for Psma7 (NM_011969.1,257-275).
caccgctgatgcaaggata

SEQ ID NO: 579471 - DNA, 19 bp, Mus musculus
  siRNA target sequence for Psma7 (NM_011969.1,261-279).
gctgatgcaaggatagtca

SEQ ID NO: 579472 - DNA, 19 bp, Mus musculus
  siRNA target sequence for Psma7 (NM_011969.1,267-285).
gcaaggatagtcatcaaca

SEQ ID NO: 579473 - DNA, 19 bp, Mus musculus
  siRNA target sequence for Psma7 (NM_011969.1,344-362).
gtacatcacccgctacatt

SEQ ID NO: 579474 - DNA, 19 bp, Mus musculus
  siRNA target sequence for Psma7 (NM_011969.1,396-414).
gggcgcaggccatttggta

SEQ ID NO: 579475 - DNA, 19 bp, Mus musculus
  siRNA target sequence for Psma7 (NM_011969.1,397-415).
ggcgcaggccatttggtat

SEQ ID NO: 579476 - DNA, 19 bp, Mus musculus
  siRNA target sequence for Psma7 (NM_011969.1,412-430).
gtatctcggccctaattgt

SEQ ID NO: 579477 - DNA, 19 bp, Mus musculus
  siRNA target sequence for Psma7 (NM_011969.1,423-441).
ctaattgtgggttttgact

SEQ ID NO: 579478 - DNA, 19 bp, Mus musculus
  siRNA target sequence for Psma7 (NM_011969.1,448-466).
gcactcccagactctatca

SEQ ID NO: 579479 - DNA, 19 bp, Mus musculus
  siRNA target sequence for Psma7 (NM_011969.1,473-491).
cccctcgggcacataccat

SEQ ID NO: 579480 - DNA, 19 bp, Mus musculus
  siRNA target sequence for Psma7 (NM_011969.1,523-541).
ccaagtcagtgcgtgaatt

SEQ ID NO: 579481 - DNA, 19 bp, Mus musculus
  siRNA target sequence for Psma7 (NM_011969.1,524-542).
caagtcagtgcgtgaattt

SEQ ID NO: 579482 - DNA, 19 bp, Mus musculus
  siRNA target sequence for Psma7 (NM_011969.1,548-566).
gaagaactacacagatgat

SEQ ID NO: 579483 - DNA, 19 bp, Mus musculus
  siRNA target sequence for Psma7 (NM_011969.1,568-586).
ccattgaaacagatgatct

SEQ ID NO: 579484 - DNA, 19 bp, Mus musculus
  siRNA target sequence for Psma7 (NM_011969.1,668-686).
ggatcagccgctcaagatt

SEQ ID NO: 579485 - DNA, 19 bp, Mus musculus
  siRNA target sequence for Psmb1 (NM_011185.1,117-135).
cttcaacggaggtactgta

SEQ ID NO: 579486 - DNA, 19 bp, Mus musculus
  siRNA target sequence for Psmb1 (NM_011185.1,179-197).
ctcgattgagtgaaggatt

SEQ ID NO: 579487 - DNA, 19 bp, Mus musculus
  siRNA target sequence for Psmb1 (NM_011185.1,186-204).
gagtgaaggattttcaatt

SEQ ID NO: 579488 - DNA, 19 bp, Mus musculus
  siRNA target sequence for Psmb1 (NM_011185.1,188-206).
gtgaaggattttcaattca

SEQ ID NO: 579489 - DNA, 19 bp, Mus musculus
  siRNA target sequence for Psmb1 (NM_011185.1,211-229).
cgagatagccccaaatgct

SEQ ID NO: 579490 - DNA, 19 bp, Mus musculus
  siRNA target sequence for Psmb1 (NM_011185.1,218-236).
gccccaaatgctacaaact

SEQ ID NO: 579491 - DNA, 19 bp, Mus musculus
  siRNA target sequence for Psmb1 (NM_011185.1,274-292).
ggagattgtctcactttga

SEQ ID NO: 579492 - DNA, 19 bp, Mus musculus
  siRNA target sequence for Psmb1 (NM_011185.1,281-299).
gtctcactttgacaaagat

SEQ ID NO: 579493 - DNA, 19 bp, Mus musculus
  siRNA target sequence for Psmb1 (NM_011185.1,285-303).
cactttgacaaagattatt

SEQ ID NO: 579494 - DNA, 19 bp, Mus musculus
  siRNA target sequence for Psmb1 (NM_011185.1,287-305).
ctttgacaaagattattga

SEQ ID NO: 579495 - DNA, 19 bp, Mus musculus
  siRNA target sequence for Psmb1 (NM_011185.1,307-325).
gcaagattaaagatgtaca

SEQ ID NO: 579496 - DNA, 19 bp, Mus musculus
  siRNA target sequence for Psmb1 (NM_011185.1,318-336).
gatgtacaagcattccaat

SEQ ID NO: 579497 - DNA, 19 bp, Mus musculus
  siRNA target sequence for Psmb1 (NM_011185.1,426-444).
cattggaggacttgatgaa

SEQ ID NO: 579498 - DNA, 19 bp, Mus musculus
  siRNA target sequence for Psmb1 (NM_011185.1,646-664).
gccgagagggatgtgtata

SEQ ID NO: 579499 - DNA, 19 bp, Mus musculus
  siRNA target sequence for Psmb1 (NM_011185.1,648-666).
cgagagggatgtgtatact

SEQ ID NO: 579500 - DNA, 19 bp, Mus musculus
  siRNA target sequence for Psmb1 (NM_011185.1,721-739).
gttcccctgcggaaagact

SEQ ID NO: 579501 - DNA, 19 bp, Mus musculus
  siRNA target sequence for Psmb10 (NM_013640.1,290-308).
gttgtggcggacaaaagct

SEQ ID NO: 579502 - DNA, 19 bp, Mus musculus
  siRNA target sequence for Psmb10 (NM_013640.1,320-338).
cacttcatcgcccctaaaa

SEQ ID NO: 579503 - DNA, 19 bp, Mus musculus
  siRNA target sequence for Psmb10 (NM_013640.1,365-383).
gcggacactgagatgacta

SEQ ID NO: 579504 - DNA, 19 bp, Mus musculus
  siRNA target sequence for Psmb10 (NM_013640.1,638-656).
cggttccagccaaacatga

SEQ ID NO: 579505 - DNA, 19 bp, Mus musculus
  siRNA target sequence for Psmb2 (NM_011970.2,179-197).
gacgatcatgacaagatgt

SEQ ID NO: 579506 - DNA, 19 bp, Mus musculus
  siRNA target sequence for Psmb2 (NM_011970.2,185-203).
catgacaagatgtttaaga

SEQ ID NO: 579507 - DNA, 19 bp, Mus musculus
  siRNA target sequence for Psmb2 (NM_011970.2,274-292).
gaaaaacgtgcaactttat

SEQ ID NO: 579508 - DNA, 19 bp, Mus musculus
  siRNA target sequence for Psmb2 (NM_011970.2,299-317).
cggaatggatatgaattgt

SEQ ID NO: 579509 - DNA, 19 bp, Mus musculus
  siRNA target sequence for Psmb2 (NM_011970.2,301-319).
gaatggatatgaattgtct

SEQ ID NO: 579510 - DNA, 19 bp, Mus musculus
  siRNA target sequence for Psmb2 (NM_011970.2,369-387).
ggagtcggaccccatatca

SEQ ID NO: 579511 - DNA, 19 bp, Mus musculus
  siRNA target sequence for Psmb2 (NM_011970.2,370-388).
gagtcggaccccatatcat

SEQ ID NO: 579512 - DNA, 19 bp, Mus musculus
  siRNA target sequence for Psmb2 (NM_011970.2,372-390).
gtcggaccccatatcatgt

SEQ ID NO: 579513 - DNA, 19 bp, Mus musculus
  siRNA target sequence for Psmb2 (NM_011970.2,425-443).
gggccagccctttactaca

SEQ ID NO: 579514 - DNA, 19 bp, Mus musculus
  siRNA target sequence for Psmb2 (NM_011970.2,426-444).
ggccagccctttactacat

SEQ ID NO: 579515 - DNA, 19 bp, Mus musculus
  siRNA target sequence for Psmb2 (NM_011970.2,460-478).
cttggctaaggctcctttt

SEQ ID NO: 579516 - DNA, 19 bp, Mus musculus
  siRNA target sequence for Psmb2 (NM_011970.2,513-531).
gcatccttgaccgatacta

SEQ ID NO: 579517 - DNA, 19 bp, Mus musculus
  siRNA target sequence for Psmb2 (NM_011970.2,595-613).
gaagcgcttcatcttgaat

SEQ ID NO: 579518 - DNA, 19 bp, Mus musculus
  siRNA target sequence for Psmb2 (NM_011970.2,631-649).
ccgggtcattgacaaagat

SEQ ID NO: 579519 - DNA, 19 bp, Mus musculus
  siRNA target sequence for Psmb5 (NM_011186.1,420-438).
ccaaactgctcgctaacat

SEQ ID NO: 579520 - DNA, 19 bp, Mus musculus
  siRNA target sequence for Psmb5 (NM_011186.1,501-519).
gaggccctggcctctacta

SEQ ID NO: 579521 - DNA, 19 bp, Mus musculus
  siRNA target sequence for Psmb7 (NM_011187.1,32-50).
ccggtcggaggcttttctt

SEQ ID NO: 579522 - DNA, 19 bp, Mus musculus
  siRNA target sequence for Psmb7 (NM_011187.1,33-51).
cggtcggaggcttttcttt

SEQ ID NO: 579523 - DNA, 19 bp, Mus musculus
  siRNA target sequence for Psmb7 (NM_011187.1,80-98).
gaagcggatttcgcaaaaa

SEQ ID NO: 579524 - DNA, 19 bp, Mus musculus
  siRNA target sequence for Psmb7 (NM_011187.1,209-227).
gttgctgacaaaaactgtt

SEQ ID NO: 579525 - DNA, 19 bp, Mus musculus
  siRNA target sequence for Psmb7 (NM_011187.1,225-243).
gttcaaaaattcacttcat

SEQ ID NO: 579526 - DNA, 19 bp, Mus musculus
  siRNA target sequence for Psmb7 (NM_011187.1,433-451).
ggggggagtagatgttact

SEQ ID NO: 579527 - DNA, 19 bp, Mus musculus
  siRNA target sequence for Psmb7 (NM_011187.1,636-654).
ggtctggaagcaacattga

SEQ ID NO: 579528 - DNA, 19 bp, Mus musculus
  siRNA target sequence for Psmb7 (NM_011187.1,637-655).
gtctggaagcaacattgat

SEQ ID NO: 579529 - DNA, 19 bp, Mus musculus
  siRNA target sequence for Psmb8 (NM_010724.1,85-103).
gacccgggacactacagtt

SEQ ID NO: 579530 - DNA, 19 bp, Mus musculus
  siRNA target sequence for Psmb8 (NM_010724.1,88-106).
ccgggacactacagtttct

SEQ ID NO: 579531 - DNA, 19 bp, Mus musculus
  siRNA target sequence for Psmb8 (NM_010724.1,275-293).
ccactgcagggagttacat

SEQ ID NO: 579532 - DNA, 19 bp, Mus musculus
  siRNA target sequence for Psmb8 (NM_010724.1,276-294).
cactgcagggagttacatt

SEQ ID NO: 579533 - DNA, 19 bp, Mus musculus
  siRNA target sequence for Psmb8 (NM_010724.1,296-314).
gctccttaaggatgaacaa

SEQ ID NO: 579534 - DNA, 19 bp, Mus musculus
  siRNA target sequence for Psmb8 (NM_010724.1,297-315).
ctccttaaggatgaacaaa

SEQ ID NO: 579535 - DNA, 19 bp, Mus musculus
  siRNA target sequence for Psmb8 (NM_010724.1,299-317).
ccttaaggatgaacaaagt

SEQ ID NO: 579536 - DNA, 19 bp, Mus musculus
  siRNA target sequence for Psmb8 (NM_010724.1,399-417).
ggagtgcaggttgtattat

SEQ ID NO: 579537 - DNA, 19 bp, Mus musculus
  siRNA target sequence for Psmb8 (NM_010724.1,402-420).
gtgcaggttgtattatctt

SEQ ID NO: 579538 - DNA, 19 bp, Mus musculus
  siRNA target sequence for Psmb8 (NM_010724.1,575-593).
ggctctcgggacagatgtt

SEQ ID NO: 579539 - DNA, 19 bp, Mus musculus
  siRNA target sequence for Psmb8 (NM_010724.1,678-696).
ccttggccgcagagctatt

SEQ ID NO: 579540 - DNA, 19 bp, Mus musculus
  siRNA target sequence for Psmb8 (NM_010724.1,682-700).
ggccgcagagctattgctt

SEQ ID NO: 579541 - DNA, 19 bp, Mus musculus
  siRNA target sequence for Psmb8 (NM_010724.1,683-701).
gccgcagagctattgctta

SEQ ID NO: 579542 - DNA, 19 bp, Mus musculus
  siRNA target sequence for Psmb8 (NM_010724.1,725-743).
ctggaggagtcgtcaacta

SEQ ID NO: 579543 - DNA, 19 bp, Mus musculus
  siRNA target sequence for Psmb8 (NM_010724.1,791-809).
gtgacctgctgtacaagta

SEQ ID NO: 579544 - DNA, 19 bp, Mus musculus
  siRNA target sequence for Psmb9 (NM_013585.1,53-71).
cgttccggacggaagaagt

SEQ ID NO: 579545 - DNA, 19 bp, Mus musculus
  siRNA target sequence for Psmb9 (NM_013585.1,115-133).
gtcgtggtgggctctgatt

SEQ ID NO: 579546 - DNA, 19 bp, Mus musculus
  siRNA target sequence for Psmb9 (NM_013585.1,348-366).
gtaccgtgaggacttgtta

SEQ ID NO: 579547 - DNA, 19 bp, Mus musculus
  siRNA target sequence for Psmb9 (NM_013585.1,360-378).
cttgttagcgcatctcata

SEQ ID NO: 579548 - DNA, 19 bp, Mus musculus
  siRNA target sequence for Psmb9 (NM_013585.1,363-381).
gttagcgcatctcatagta

SEQ ID NO: 579549 - DNA, 19 bp, Mus musculus
  siRNA target sequence for Psmb9 (NM_013585.1,423-441).
catgggagggatgctaatt

SEQ ID NO: 579550 - DNA, 19 bp, Mus musculus
  siRNA target sequence for Psmb9 (NM_013585.1,476-494).
cctacatttatggttatgt

SEQ ID NO: 579551 - DNA, 19 bp, Mus musculus
  siRNA target sequence for 2310010G13Rik (NM_027122.2,271-289).
ctccatggctgttaaagct

SEQ ID NO: 579552 - DNA, 19 bp, Mus musculus
  siRNA target sequence for 2310010G13Rik (NM_027122.2,1094-1112).
gctaagcctatgtctacaa

SEQ ID NO: 579553 - DNA, 19 bp, Mus musculus
  siRNA target sequence for 2310010G13Rik (NM_027122.2,1099-1117).
gcctatgtctacaacagtt

SEQ ID NO: 579554 - DNA, 19 bp, Mus musculus
  siRNA target sequence for 2310010G13Rik (NM_027122.2,1100-1118).
cctatgtctacaacagttt

SEQ ID NO: 579555 - DNA, 19 bp, Mus musculus
  siRNA target sequence for 2310010G13Rik (NM_027122.2,1186-1204).
ccctgcaggctacacatta

SEQ ID NO: 579556 - DNA, 19 bp, Mus musculus
  siRNA target sequence for 6530406M24Rik (NM_178630.2,263-281).
ggaagactactcagataga

SEQ ID NO: 579557 - DNA, 19 bp, Mus musculus
  siRNA target sequence for 6530406M24Rik (NM_178630.2,309-327).
gaggattccttcatgaaat

SEQ ID NO: 579558 - DNA, 19 bp, Mus musculus
  siRNA target sequence for 6530406M24Rik (NM_178630.2,373-391).
ctattggtgacccattctt

SEQ ID NO: 579559 - DNA, 19 bp, Mus musculus
  siRNA target sequence for 6530406M24Rik (NM_178630.2,389-407).
cttccctcggactacacaa

SEQ ID NO: 579560 - DNA, 19 bp, Mus musculus
  siRNA target sequence for 6530406M24Rik (NM_178630.2,392-410).
ccctcggactacacaaatt

SEQ ID NO: 579561 - DNA, 19 bp, Mus musculus
  siRNA target sequence for 6530406M24Rik (NM_178630.2,393-411).
cctcggactacacaaattt

SEQ ID NO: 579562 - DNA, 19 bp, Mus musculus
  siRNA target sequence for 6530406M24Rik (NM_178630.2,394-412).
ctcggactacacaaatttt

SEQ ID NO: 579563 - DNA, 19 bp, Mus musculus
  siRNA target sequence for 6530406M24Rik (NM_178630.2,397-415).
ggactacacaaattttatt

SEQ ID NO: 579564 - DNA, 19 bp, Mus musculus
  siRNA target sequence for 6530406M24Rik (NM_178630.2,450-468).
cgcggaccacgagatttat

SEQ ID NO: 579565 - DNA, 19 bp, Mus musculus
  siRNA target sequence for 6530406M24Rik (NM_178630.2,451-469).
gcggaccacgagatttata

SEQ ID NO: 579566 - DNA, 19 bp, Mus musculus
  siRNA target sequence for 6530406M24Rik (NM_178630.2,452-470).
cggaccacgagatttatat

SEQ ID NO: 579567 - DNA, 19 bp, Mus musculus
  siRNA target sequence for 6530406M24Rik (NM_178630.2,587-605).
cccgacaggcctggaaata

SEQ ID NO: 579568 - DNA, 19 bp, Mus musculus
  siRNA target sequence for 6530406M24Rik (NM_178630.2,641-659).
ggtttatttagctgaagat

SEQ ID NO: 579569 - DNA, 19 bp, Mus musculus
  siRNA target sequence for 6530406M24Rik (NM_178630.2,764-782).
gtttgagagtggtaatcta

SEQ ID NO: 579570 - DNA, 19 bp, Mus musculus
  siRNA target sequence for 6530406M24Rik (NM_178630.2,828-846).
cgcccagacctcttcacaa

SEQ ID NO: 579571 - DNA, 19 bp, Mus musculus
  siRNA target sequence for 6530406M24Rik (NM_178630.2,829-847).
gcccagacctcttcacaaa

SEQ ID NO: 579572 - DNA, 19 bp, Mus musculus
  siRNA target sequence for 6530406M24Rik (NM_178630.2,830-848).
cccagacctcttcacaaat

SEQ ID NO: 579573 - DNA, 19 bp, Mus musculus
  siRNA target sequence for 6530406M24Rik (NM_178630.2,831-849).
ccagacctcttcacaaata

SEQ ID NO: 579574 - DNA, 19 bp, Mus musculus
  siRNA target sequence for 6530406M24Rik (NM_178630.2,851-869).
gcacactcagtggtactat

SEQ ID NO: 579575 - DNA, 19 bp, Mus musculus
  siRNA target sequence for 6530406M24Rik (NM_178630.2,866-884).
ctatttccaggtcactaat

SEQ ID NO: 579576 - DNA, 19 bp, Mus musculus
  siRNA target sequence for 6530406M24Rik (NM_178630.2,891-909).
gcagaaatagtctacagat

SEQ ID NO: 579577 - DNA, 19 bp, Mus musculus
  siRNA target sequence for 6530406M24Rik (NM_178630.2,907-925).
gattcactattgtcaactt

SEQ ID NO: 579578 - DNA, 19 bp, Mus musculus
  siRNA target sequence for 6530406M24Rik (NM_178630.2,932-950).
gcctgctagtctttacaat

SEQ ID NO: 579579 - DNA, 19 bp, Mus musculus
  siRNA target sequence for 6530406M24Rik (NM_178630.2,952-970).
ggggtatgaagccattgtt

SEQ ID NO: 579580 - DNA, 19 bp, Mus musculus
  siRNA target sequence for 6530406M24Rik (NM_178630.2,954-972).
ggtatgaagccattgttct

SEQ ID NO: 579581 - DNA, 19 bp, Mus musculus
  siRNA target sequence for 6530406M24Rik (NM_178630.2,962-980).
gccattgttctattctgaa

SEQ ID NO: 579582 - DNA, 19 bp, Mus musculus
  siRNA target sequence for 6530406M24Rik (NM_178630.2,984-1002).
gaggccaaaacccataaca

SEQ ID NO: 579583 - DNA, 19 bp, Mus musculus
  siRNA target sequence for 6530406M24Rik (NM_178630.2,986-1004).
ggccaaaacccataacatt

SEQ ID NO: 579584 - DNA, 19 bp, Mus musculus
  siRNA target sequence for 6530406M24Rik (NM_178630.2,1015-1033).
gaataggagatcaaatcaa

SEQ ID NO: 579585 - DNA, 19 bp, Mus musculus
  siRNA target sequence for 6530406M24Rik (NM_178630.2,1080-1098).
cttacgtggacatttcagt

SEQ ID NO: 579586 - DNA, 19 bp, Mus musculus
  siRNA target sequence for 6530406M24Rik (NM_178630.2,1109-1127).
ccaggatacgtgctacttt

SEQ ID NO: 579587 - DNA, 19 bp, Mus musculus
  siRNA target sequence for 6530406M24Rik (NM_178630.2,1131-1149).
cactgctatccatacactt

SEQ ID NO: 579588 - DNA, 19 bp, Mus musculus
  siRNA target sequence for 6530406M24Rik (NM_178630.2,1181-1199).
caacagtgacccagtaaga

SEQ ID NO: 579589 - DNA, 19 bp, Mus musculus
  siRNA target sequence for 6530406M24Rik (NM_178630.2,1188-1206).
gacccagtaagatcaaagt

SEQ ID NO: 579590 - DNA, 19 bp, Mus musculus
  siRNA target sequence for 6530406M24Rik (NM_178630.2,1191-1209).
ccagtaagatcaaagtttt

SEQ ID NO: 579591 - DNA, 19 bp, Mus musculus
  siRNA target sequence for 6530406M24Rik (NM_178630.2,1194-1212).
gtaagatcaaagttttgta

SEQ ID NO: 579592 - DNA, 19 bp, Mus musculus
  siRNA target sequence for 6530406M24Rik (NM_178630.2,1234-1252).
cacttgccaggaatatggt

SEQ ID NO: 579593 - DNA, 19 bp, Mus musculus
  siRNA target sequence for 6530406M24Rik (NM_178630.2,1240-1258).
ccaggaatatggtgtatgt

SEQ ID NO: 579594 - DNA, 19 bp, Mus musculus
  siRNA target sequence for 6530406M24Rik (NM_178630.2,1250-1268).
ggtgtatgtcttgacaata

SEQ ID NO: 579595 - DNA, 19 bp, Mus musculus
  siRNA target sequence for 6530406M24Rik (NM_178630.2,1365-1383).
ggcttcctggattatattt

SEQ ID NO: 579596 - DNA, 19 bp, Mus musculus
  siRNA target sequence for 6530406M24Rik (NM_178630.2,1366-1384).
gcttcctggattatatttt

SEQ ID NO: 579597 - DNA, 19 bp, Mus musculus
  siRNA target sequence for 6530406M24Rik (NM_178630.2,1370-1388).
cctggattatattttagga

SEQ ID NO: 579598 - DNA, 19 bp, Mus musculus
  siRNA target sequence for 6530406M24Rik (NM_178630.2,1413-1431).
cgggacactttcatcttca

SEQ ID NO: 579599 - DNA, 19 bp, Mus musculus
  siRNA target sequence for 6530406M24Rik (NM_178630.2,1487-1505).
cttagctggacgggattta

SEQ ID NO: 579600 - DNA, 19 bp, Mus musculus
  siRNA target sequence for 6530406M24Rik (NM_178630.2,1497-1515).
cgggatttaaaccgtaatt

SEQ ID NO: 579601 - DNA, 19 bp, Mus musculus
  siRNA target sequence for 6530406M24Rik (NM_178630.2,1498-1516).
gggatttaaaccgtaatta

SEQ ID NO: 579602 - DNA, 19 bp, Mus musculus
  siRNA target sequence for 6530406M24Rik (NM_178630.2,1562-1580).
gaacatgatcaataggtta

SEQ ID NO: 579603 - DNA, 19 bp, Mus musculus
  siRNA target sequence for 6530406M24Rik (NM_178630.2,1583-1601).
ggagaaacgagaggttatt

SEQ ID NO: 579604 - DNA, 19 bp, Mus musculus
  siRNA target sequence for 6530406M24Rik (NM_178630.2,1590-1608).
cgagaggttattttatatt

SEQ ID NO: 579605 - DNA, 19 bp, Mus musculus
  siRNA target sequence for 6530406M24Rik (NM_178630.2,1622-1640).
ccatagtaggaaacagaat

SEQ ID NO: 579606 - DNA, 19 bp, Mus musculus
  siRNA target sequence for 6530406M24Rik (NM_178630.2,1623-1641).
catagtaggaaacagaata

SEQ ID NO: 579607 - DNA, 19 bp, Mus musculus
  siRNA target sequence for 6530406M24Rik (NM_178630.2,1659-1677).
gatggtagcagcagatcta

SEQ ID NO: 579608 - DNA, 19 bp, Mus musculus
  siRNA target sequence for 6530406M24Rik (NM_178630.2,1681-1699).
caaaaggattatacttaca

SEQ ID NO: 579609 - DNA, 19 bp, Mus musculus
  siRNA target sequence for 6530406M24Rik (NM_178630.2,1713-1731).
ccactcatgctgagcaaaa

SEQ ID NO: 579610 - DNA, 19 bp, Mus musculus
  siRNA target sequence for 6530406M24Rik (NM_178630.2,1716-1734).
ctcatgctgagcaaaaatt

SEQ ID NO: 579611 - DNA, 19 bp, Mus musculus
  siRNA target sequence for 6530406M24Rik (NM_178630.2,1746-1764).
gtacgtacctttaagactt

SEQ ID NO: 579612 - DNA, 19 bp, Mus musculus
  siRNA target sequence for 6530406M24Rik (NM_178630.2,1749-1767).
cgtacctttaagactttaa

SEQ ID NO: 579613 - DNA, 19 bp, Mus musculus
  siRNA target sequence for 9030616D13 (NM_177834.2,676-694).
cggcattcacgcaagagaa

SEQ ID NO: 579614 - DNA, 19 bp, Mus musculus
  siRNA target sequence for 9030616D13 (NM_177834.2,677-695).
ggcattcacgcaagagaat

SEQ ID NO: 579615 - DNA, 19 bp, Mus musculus
  siRNA target sequence for 9030616D13 (NM_177834.2,815-833).
gtcgatggataccatttca

SEQ ID NO: 579616 - DNA, 19 bp, Mus musculus
  siRNA target sequence for 9030616D13 (NM_177834.2,867-885).
ggtcaagagactctaagtt

SEQ ID NO: 579617 - DNA, 19 bp, Mus musculus
  siRNA target sequence for 9030616D13 (NM_177834.2,868-886).
gtcaagagactctaagttt

SEQ ID NO: 579618 - DNA, 19 bp, Mus musculus
  siRNA target sequence for 9030616D13 (NM_177834.2,911-929).
cgcaactggaaagtgaaat

SEQ ID NO: 579619 - DNA, 19 bp, Mus musculus
  siRNA target sequence for 9030616D13 (NM_177834.2,956-974).
ccttgtgatgatacatact

SEQ ID NO: 579620 - DNA, 19 bp, Mus musculus
  siRNA target sequence for 9030616D13 (NM_177834.2,1050-1068).
gggcgtacctgtcttttca

SEQ ID NO: 579621 - DNA, 19 bp, Mus musculus
  siRNA target sequence for 9030616D13 (NM_177834.2,1051-1069).
ggcgtacctgtcttttcat

SEQ ID NO: 579622 - DNA, 19 bp, Mus musculus
  siRNA target sequence for 9030616D13 (NM_177834.2,1084-1102).
gttgctatatccttattct

SEQ ID NO: 579623 - DNA, 19 bp, Mus musculus
  siRNA target sequence for 9030616D13 (NM_177834.2,1088-1106).
ctatatccttattcttaca

SEQ ID NO: 579624 - DNA, 19 bp, Mus musculus
  siRNA target sequence for 9030616D13 (NM_177834.2,1226-1244).
gtaagctctggtaactcaa

SEQ ID NO: 579625 - DNA, 19 bp, Mus musculus
  siRNA target sequence for 9030616D13 (NM_177834.2,1231-1249).
ctctggtaactcaatggat

SEQ ID NO: 579626 - DNA, 19 bp, Mus musculus
  siRNA target sequence for 9030616D13 (NM_177834.2,1242-1260).
caatggattgggcttataa

SEQ ID NO: 579627 - DNA, 19 bp, Mus musculus
  siRNA target sequence for 9030616D13 (NM_177834.2,1252-1270).
ggcttataaaaatggaata

SEQ ID NO: 579628 - DNA, 19 bp, Mus musculus
  siRNA target sequence for 9030616D13 (NM_177834.2,1302-1320).
ctgggcattttggatttct

SEQ ID NO: 579629 - DNA, 19 bp, Mus musculus
  siRNA target sequence for 9030616D13 (NM_177834.2,1322-1340).
ctgccagagatgctcatta

SEQ ID NO: 579630 - DNA, 19 bp, Mus musculus
  siRNA target sequence for A430081C19Rik (NM_178755.1,238-256).
cctatgaggactttattca

SEQ ID NO: 579631 - DNA, 19 bp, Mus musculus
  siRNA target sequence for A430081C19Rik (NM_178755.1,257-275).
ccatcacctccagtattat

SEQ ID NO: 579632 - DNA, 19 bp, Mus musculus
  siRNA target sequence for A430081C19Rik (NM_178755.1,267-285).
cagtattatggatatttca

SEQ ID NO: 579633 - DNA, 19 bp, Mus musculus
  siRNA target sequence for A430081C19Rik (NM_178755.1,343-361).
gccctcggtacatgttgaa

SEQ ID NO: 579634 - DNA, 19 bp, Mus musculus
  siRNA target sequence for A430081C19Rik (NM_178755.1,344-362).
ccctcggtacatgttgaat

SEQ ID NO: 579635 - DNA, 19 bp, Mus musculus
  siRNA target sequence for A430081C19Rik (NM_178755.1,353-371).
catgttgaatggctctttt

SEQ ID NO: 579636 - DNA, 19 bp, Mus musculus
  siRNA target sequence for A430081C19Rik (NM_178755.1,389-407).
catctcggacagtttggaa

SEQ ID NO: 579637 - DNA, 19 bp, Mus musculus
  siRNA target sequence for A430081C19Rik (NM_178755.1,394-412).
cggacagtttggaaaaaga

SEQ ID NO: 579638 - DNA, 19 bp, Mus musculus
  siRNA target sequence for A430081C19Rik (NM_178755.1,422-440).
gtggcctacctgtttatct

SEQ ID NO: 579639 - DNA, 19 bp, Mus musculus
  siRNA target sequence for A430081C19Rik (NM_178755.1,454-472).
ctcacatagacgctgtaaa

SEQ ID NO: 579640 - DNA, 19 bp, Mus musculus
  siRNA target sequence for A430081C19Rik (NM_178755.1,456-474).
cacatagacgctgtaaaca

SEQ ID NO: 579641 - DNA, 19 bp, Mus musculus
  siRNA target sequence for A430081C19Rik (NM_178755.1,458-476).
catagacgctgtaaacaga

SEQ ID NO: 579642 - DNA, 19 bp, Mus musculus
  siRNA target sequence for A430081C19Rik (NM_178755.1,509-527).
gaccaggcagctgattttt

SEQ ID NO: 579643 - DNA, 19 bp, Mus musculus
  siRNA target sequence for A430081C19Rik (NM_178755.1,559-577).
gagaaccccgagaactctt

SEQ ID NO: 579644 - DNA, 19 bp, Mus musculus
  siRNA target sequence for A430081C19Rik (NM_178755.1,612-630).
ccaagatggccaatcgaat

SEQ ID NO: 579645 - DNA, 19 bp, Mus musculus
  siRNA target sequence for A430081C19Rik (NM_178755.1,644-662).
ggaaaacattcatcacatt

SEQ ID NO: 579646 - DNA, 19 bp, Mus musculus
  siRNA target sequence for A430081C19Rik (NM_178755.1,672-690).
ccacatcaaccagaatatt

SEQ ID NO: 579647 - DNA, 19 bp, Mus musculus
  siRNA target sequence for A430081C19Rik (NM_178755.1,675-693).
catcaaccagaatatttct

SEQ ID NO: 579648 - DNA, 19 bp, Mus musculus
  siRNA target sequence for A430081C19Rik (NM_178755.1,710-728).
cgagaaggtgccagagatt

SEQ ID NO: 579649 - DNA, 19 bp, Mus musculus
  siRNA target sequence for A430081C19Rik (NM_178755.1,777-795).
gcagaaggcacctatttca

SEQ ID NO: 579650 - DNA, 19 bp, Mus musculus
  siRNA target sequence for A430081C19Rik (NM_178755.1,780-798).
gaaggcacctatttcacta

SEQ ID NO: 579651 - DNA, 19 bp, Mus musculus
  siRNA target sequence for A430081C19Rik (NM_178755.1,783-801).
ggcacctatttcactagtt

SEQ ID NO: 579652 - DNA, 19 bp, Mus musculus
  siRNA target sequence for A430081C19Rik (NM_178755.1,858-876).
ccggacgacaatactctat

SEQ ID NO: 579653 - DNA, 19 bp, Mus musculus
  siRNA target sequence for A430081C19Rik (NM_178755.1,859-877).
cggacgacaatactctatt

SEQ ID NO: 579654 - DNA, 19 bp, Mus musculus
  siRNA target sequence for A430081C19Rik (NM_178755.1,863-881).
cgacaatactctattgttt

SEQ ID NO: 579655 - DNA, 19 bp, Mus musculus
  siRNA target sequence for A430081C19Rik (NM_178755.1,916-934).
ccgtcagagtaggtatcta

SEQ ID NO: 579656 - DNA, 19 bp, Mus musculus
  siRNA target sequence for A430081C19Rik (NM_178755.1,917-935).
cgtcagagtaggtatctat

SEQ ID NO: 579657 - DNA, 19 bp, Mus musculus
  siRNA target sequence for A430081C19Rik (NM_178755.1,922-940).
gagtaggtatctatgagta

SEQ ID NO: 579658 - DNA, 19 bp, Mus musculus
  siRNA target sequence for A430081C19Rik (NM_178755.1,963-981).
ctctacacggacaaacaca

SEQ ID NO: 579659 - DNA, 19 bp, Mus musculus
  siRNA target sequence for A430081C19Rik (NM_178755.1,978-996).
cacactcagtggttttact

SEQ ID NO: 579660 - DNA, 19 bp, Mus musculus
  siRNA target sequence for A430081C19Rik (NM_178755.1,1013-1031).
cagaaaagacgctacctat

SEQ ID NO: 579661 - DNA, 19 bp, Mus musculus
  siRNA target sequence for A430081C19Rik (NM_178755.1,1081-1099).
gcatgaagcctctcatgta

SEQ ID NO: 579662 - DNA, 19 bp, Mus musculus
  siRNA target sequence for A430081C19Rik (NM_178755.1,1141-1159).
gagagggccgtgaaatcaa

SEQ ID NO: 579663 - DNA, 19 bp, Mus musculus
  siRNA target sequence for A430081C19Rik (NM_178755.1,1146-1164).
ggccgtgaaatcaagtact

SEQ ID NO: 579664 - DNA, 19 bp, Mus musculus
  siRNA target sequence for A430081C19Rik (NM_178755.1,1147-1165).
gccgtgaaatcaagtacta

SEQ ID NO: 579665 - DNA, 19 bp, Mus musculus
  siRNA target sequence for A430081C19Rik (NM_178755.1,1150-1168).
gtgaaatcaagtactacaa

SEQ ID NO: 579666 - DNA, 19 bp, Mus musculus
  siRNA target sequence for A430081C19Rik (NM_178755.1,1246-1264).
gcttcttcgcacactttta

SEQ ID NO: 579667 - DNA, 19 bp, Mus musculus
  siRNA target sequence for A430081C19Rik (NM_178755.1,1257-1275).
cacttttacccatacactt

SEQ ID NO: 579668 - DNA, 19 bp, Mus musculus
  siRNA target sequence for A430081C19Rik (NM_178755.1,1281-1299).
gacttgcaatgctatctct

SEQ ID NO: 579669 - DNA, 19 bp, Mus musculus
  siRNA target sequence for A430081C19Rik (NM_178755.1,1461-1479).
caccctggagagagtaaca

SEQ ID NO: 579670 - DNA, 19 bp, Mus musculus
  siRNA target sequence for A430081C19Rik (NM_178755.1,1592-1610).
cgtgatagtggggaactat

SEQ ID NO: 579671 - DNA, 19 bp, Mus musculus
  siRNA target sequence for A430081C19Rik (NM_178755.1,1631-1649).
ggacttgaacaggcattat

SEQ ID NO: 579672 - DNA, 19 bp, Mus musculus
  siRNA target sequence for A430081C19Rik (NM_178755.1,1632-1650).
gacttgaacaggcattata

SEQ ID NO: 579673 - DNA, 19 bp, Mus musculus
  siRNA target sequence for A430081C19Rik (NM_178755.1,1634-1652).
cttgaacaggcattataaa

SEQ ID NO: 579674 - DNA, 19 bp, Mus musculus
  siRNA target sequence for A430081C19Rik (NM_178755.1,1752-1770).
gggcatagccgcaagaaca

SEQ ID NO: 579675 - DNA, 19 bp, Mus musculus
  siRNA target sequence for A430081C19Rik (NM_178755.1,1753-1771).
ggcatagccgcaagaacaa

SEQ ID NO: 579676 - DNA, 19 bp, Mus musculus
  siRNA target sequence for A430081C19Rik (NM_178755.1,1814-1832).
gctccatgagcgtgtcttt

SEQ ID NO: 579677 - DNA, 19 bp, Mus musculus
  siRNA target sequence for A430081C19Rik (NM_178755.1,1821-1839).
gagcgtgtctttcctttaa

SEQ ID NO: 579678 - DNA, 19 bp, Mus musculus
  siRNA target sequence for A430081C19Rik (NM_178755.1,1870-1888).
ctttcgacagctgtaactt

SEQ ID NO: 579679 - DNA, 19 bp, Mus musculus
  siRNA target sequence for A430081C19Rik (NM_178755.1,1882-1900).
gtaactttaaggtccaaaa

SEQ ID NO: 579680 - DNA, 19 bp, Mus musculus
  siRNA target sequence for A430081C19Rik (NM_178755.1,1981-1999).
ggtctaccctgggtagtaa

SEQ ID NO: 579681 - DNA, 19 bp, Mus musculus
  siRNA target sequence for A430081C19Rik (NM_178755.1,1982-2000).
gtctaccctgggtagtaaa

SEQ ID NO: 579682 - DNA, 19 bp, Mus musculus
  siRNA target sequence for A430081C19Rik (NM_178755.1,2002-2020).
gagacactcactttaccat

SEQ ID NO: 579683 - DNA, 19 bp, Mus musculus
  siRNA target sequence for A430081C19Rik (NM_178755.1,2260-2278).
ctcccattcgtctactgaa

SEQ ID NO: 579684 - DNA, 19 bp, Mus musculus
  siRNA target sequence for A430081C19Rik (NM_178755.1,2263-2281).
ccattcgtctactgaacat

SEQ ID NO: 579685 - DNA, 19 bp, Mus musculus
  siRNA target sequence for A430081C19Rik (NM_178755.1,2286-2304).
gcagatgagccaaatcaga

SEQ ID NO: 579686 - DNA, 19 bp, Mus musculus
  siRNA target sequence for A430081C19Rik (NM_178755.1,2303-2321).
gaagacggtgttaaagaat

SEQ ID NO: 579687 - DNA, 19 bp, Mus musculus
  siRNA target sequence for A430081C19Rik (NM_178755.1,2308-2326).
cggtgttaaagaatccaaa

SEQ ID NO: 579688 - DNA, 19 bp, Mus musculus
  siRNA target sequence for A430081C19Rik (NM_178755.1,2389-2407).
gggagttaaagttaacaga

SEQ ID NO: 579689 - DNA, 19 bp, Mus musculus
  siRNA target sequence for A430081C19Rik (NM_178755.1,2414-2432).
cccaggaagggcgagattt

SEQ ID NO: 579690 - DNA, 19 bp, Mus musculus
  siRNA target sequence for A430081C19Rik (NM_178755.1,2451-2469).
cagcctacttttttgaaaa

SEQ ID NO: 579691 - DNA, 19 bp, Mus musculus
  siRNA target sequence for A430081C19Rik (NM_178755.1,2477-2495).
gagtcctagcccttcagta

SEQ ID NO: 579692 - DNA, 19 bp, Mus musculus
  siRNA target sequence for A430081C19Rik (NM_178755.1,2571-2589).
ctgaccagccctaagaata

SEQ ID NO: 579693 - DNA, 19 bp, Mus musculus
  siRNA target sequence for A430081C19Rik (NM_178755.1,2666-2684).
cgacacgccctgtcagaat

SEQ ID NO: 579694 - DNA, 19 bp, Mus musculus
  siRNA target sequence for Agtpbp1 (NM_023328.1,274-292).
gacaaccaaaggttctaca

SEQ ID NO: 579695 - DNA, 19 bp, Mus musculus
  siRNA target sequence for Agtpbp1 (NM_023328.1,335-353).
cttcagactgtacttaata

SEQ ID NO: 579696 - DNA, 19 bp, Mus musculus
  siRNA target sequence for Agtpbp1 (NM_023328.1,340-358).
gactgtacttaatatccta

SEQ ID NO: 579697 - DNA, 19 bp, Mus musculus
  siRNA target sequence for Agtpbp1 (NM_023328.1,392-410).
ggtcgaagagcgagtttct

SEQ ID NO: 579698 - DNA, 19 bp, Mus musculus
  siRNA target sequence for Agtpbp1 (NM_023328.1,396-414).
gaagagcgagtttcttagt

SEQ ID NO: 579699 - DNA, 19 bp, Mus musculus
  siRNA target sequence for Agtpbp1 (NM_023328.1,417-435).
ccaaaggtggttcacaaat

SEQ ID NO: 579700 - DNA, 19 bp, Mus musculus
  siRNA target sequence for Agtpbp1 (NM_023328.1,423-441).
gtggttcacaaatactgtt

SEQ ID NO: 579701 - DNA, 19 bp, Mus musculus
  siRNA target sequence for Agtpbp1 (NM_023328.1,638-656).
cagctcttgcgagtctatt

SEQ ID NO: 579702 - DNA, 19 bp, Mus musculus
  siRNA target sequence for Agtpbp1 (NM_023328.1,640-658).
gctcttgcgagtctattct

SEQ ID NO: 579703 - DNA, 19 bp, Mus musculus
  siRNA target sequence for Agtpbp1 (NM_023328.1,641-659).
ctcttgcgagtctattcta

SEQ ID NO: 579704 - DNA, 19 bp, Mus musculus
  siRNA target sequence for Agtpbp1 (NM_023328.1,695-713).
ggagttgtggagttgatgt

SEQ ID NO: 579705 - DNA, 19 bp, Mus musculus
  siRNA target sequence for Agtpbp1 (NM_023328.1,696-714).
gagttgtggagttgatgtt

SEQ ID NO: 579706 - DNA, 19 bp, Mus musculus
  siRNA target sequence for Agtpbp1 (NM_023328.1,725-743).
gggccattcagtaagaaga

SEQ ID NO: 579707 - DNA, 19 bp, Mus musculus
  siRNA target sequence for Agtpbp1 (NM_023328.1,772-790).
cactcttgctgcattgcta

SEQ ID NO: 579708 - DNA, 19 bp, Mus musculus
  siRNA target sequence for Agtpbp1 (NM_023328.1,776-794).
cttgctgcattgctaaaat

SEQ ID NO: 579709 - DNA, 19 bp, Mus musculus
  siRNA target sequence for Agtpbp1 (NM_023328.1,841-859).
gcttctaaccatctatgta

SEQ ID NO: 579710 - DNA, 19 bp, Mus musculus
  siRNA target sequence for Agtpbp1 (NM_023328.1,860-878).
gattggcaccggcatgata

SEQ ID NO: 579711 - DNA, 19 bp, Mus musculus
  siRNA target sequence for Agtpbp1 (NM_023328.1,872-890).
catgataatcggcatagaa

SEQ ID NO: 579712 - DNA, 19 bp, Mus musculus
  siRNA target sequence for Agtpbp1 (NM_023328.1,875-893).
gataatcggcatagaaaca

SEQ ID NO: 579713 - DNA, 19 bp, Mus musculus
  siRNA target sequence for Agtpbp1 (NM_023328.1,898-916).
cattcggaaggggattcta

SEQ ID NO: 579714 - DNA, 19 bp, Mus musculus
  siRNA target sequence for Agtpbp1 (NM_023328.1,940-958).
catcaagttgggcagaaaa

SEQ ID NO: 579715 - DNA, 19 bp, Mus musculus
  siRNA target sequence for Agtpbp1 (NM_023328.1,951-969).
gcagaaaagcatttattga

SEQ ID NO: 579716 - DNA, 19 bp, Mus musculus
  siRNA target sequence for Agtpbp1 (NM_023328.1,968-986).
gatgcgaatgggatgaaaa

SEQ ID NO: 579717 - DNA, 19 bp, Mus musculus
  siRNA target sequence for Agtpbp1 (NM_023328.1,972-990).
cgaatgggatgaaaattct

SEQ ID NO: 579718 - DNA, 19 bp, Mus musculus
  siRNA target sequence for Agtpbp1 (NM_023328.1,1088-1106).
cttccgctccccaccatta

SEQ ID NO: 579719 - DNA, 19 bp, Mus musculus
  siRNA target sequence for Agtpbp1 (NM_023328.1,1093-1111).
gctccccaccattaaaagt

SEQ ID NO: 579720 - DNA, 19 bp, Mus musculus
  siRNA target sequence for Agtpbp1 (NM_023328.1,1094-1112).
ctccccaccattaaaagtt

SEQ ID NO: 579721 - DNA, 19 bp, Mus musculus
  siRNA target sequence for Agtpbp1 (NM_023328.1,1096-1114).
ccccaccattaaaagttct

SEQ ID NO: 579722 - DNA, 19 bp, Mus musculus
  siRNA target sequence for Agtpbp1 (NM_023328.1,1110-1128).
gttctttccacttccaatt

SEQ ID NO: 579723 - DNA, 19 bp, Mus musculus
  siRNA target sequence for Agtpbp1 (NM_023328.1,1118-1136).
cacttccaattgccaatta

SEQ ID NO: 579724 - DNA, 19 bp, Mus musculus
  siRNA target sequence for Agtpbp1 (NM_023328.1,1210-1228).
cgacaacgacgacattgat

SEQ ID NO: 579725 - DNA, 19 bp, Mus musculus
  siRNA target sequence for Agtpbp1 (NM_023328.1,1211-1229).
gacaacgacgacattgatt

SEQ ID NO: 579726 - DNA, 19 bp, Mus musculus
  siRNA target sequence for Agtpbp1 (NM_023328.1,1213-1231).
caacgacgacattgattta

SEQ ID NO: 579727 - DNA, 19 bp, Mus musculus
  siRNA target sequence for Agtpbp1 (NM_023328.1,1216-1234).
cgacgacattgatttagaa

SEQ ID NO: 579728 - DNA, 19 bp, Mus musculus
  siRNA target sequence for Agtpbp1 (NM_023328.1,1262-1280).
gacctagatcagagtttta

SEQ ID NO: 579729 - DNA, 19 bp, Mus musculus
  siRNA target sequence for Agtpbp1 (NM_023328.1,1335-1353).
gacgaacaatagaagaact

SEQ ID NO: 579730 - DNA, 19 bp, Mus musculus
  siRNA target sequence for Agtpbp1 (NM_023328.1,1375-1393).
ccccgagcttgttgatgat

SEQ ID NO: 579731 - DNA, 19 bp, Mus musculus
  siRNA target sequence for Agtpbp1 (NM_023328.1,1376-1394).
cccgagcttgttgatgatt

SEQ ID NO: 579732 - DNA, 19 bp, Mus musculus
  siRNA target sequence for Agtpbp1 (NM_023328.1,1377-1395).
ccgagcttgttgatgattt

SEQ ID NO: 579733 - DNA, 19 bp, Mus musculus
  siRNA target sequence for Agtpbp1 (NM_023328.1,1378-1396).
cgagcttgttgatgatttt

SEQ ID NO: 579734 - DNA, 19 bp, Mus musculus
  siRNA target sequence for Agtpbp1 (NM_023328.1,1639-1657).
ccacagcttcaacaatgat

SEQ ID NO: 579735 - DNA, 19 bp, Mus musculus
  siRNA target sequence for Agtpbp1 (NM_023328.1,1666-1684).
ggccctagaccgaatcaca

SEQ ID NO: 579736 - DNA, 19 bp, Mus musculus
  siRNA target sequence for Agtpbp1 (NM_023328.1,1846-1864).
gtgttgtactggagttgaa

SEQ ID NO: 579737 - DNA, 19 bp, Mus musculus
  siRNA target sequence for Agtpbp1 (NM_023328.1,1958-1976).
ctctatattgagattgtga

SEQ ID NO: 579738 - DNA, 19 bp, Mus musculus
  siRNA target sequence for Agtpbp1 (NM_023328.1,1987-2005).
gtccgttccagaatactca

SEQ ID NO: 579739 - DNA, 19 bp, Mus musculus
  siRNA target sequence for Agtpbp1 (NM_023328.1,2045-2063).
cccttcaaagagcctattt

SEQ ID NO: 579740 - DNA, 19 bp, Mus musculus
  siRNA target sequence for Agtpbp1 (NM_023328.1,2117-2135).
ctgatacaccagaacgata

SEQ ID NO: 579741 - DNA, 19 bp, Mus musculus
  siRNA target sequence for Agtpbp1 (NM_023328.1,2141-2159).
gaccgcgtggtgtatgact

SEQ ID NO: 579742 - DNA, 19 bp, Mus musculus
  siRNA target sequence for Agtpbp1 (NM_023328.1,2143-2161).
ccgcgtggtgtatgactta

SEQ ID NO: 579743 - DNA, 19 bp, Mus musculus
  siRNA target sequence for Agtpbp1 (NM_023328.1,2145-2163).
gcgtggtgtatgacttaga

SEQ ID NO: 579744 - DNA, 19 bp, Mus musculus
  siRNA target sequence for Agtpbp1 (NM_023328.1,2162-2180).
gacaaccctacctatacca

SEQ ID NO: 579745 - DNA, 19 bp, Mus musculus
  siRNA target sequence for Agtpbp1 (NM_023328.1,2173-2191).
ctataccactccagaagaa

SEQ ID NO: 579746 - DNA, 19 bp, Mus musculus
  siRNA target sequence for Agtpbp1 (NM_023328.1,2184-2202).
cagaagaaggagatacttt

SEQ ID NO: 579747 - DNA, 19 bp, Mus musculus
  siRNA target sequence for Agtpbp1 (NM_023328.1,2206-2224).
gtttaactcaaaattcgaa

SEQ ID NO: 579748 - DNA, 19 bp, Mus musculus
  siRNA target sequence for Agtpbp1 (NM_023328.1,2228-2246).
gggaatctgcgcaaagtaa

SEQ ID NO: 579749 - DNA, 19 bp, Mus musculus
  siRNA target sequence for Agtpbp1 (NM_023328.1,2229-2247).
ggaatctgcgcaaagtaat

SEQ ID NO: 579750 - DNA, 19 bp, Mus musculus
  siRNA target sequence for Agtpbp1 (NM_023328.1,2236-2254).
gcgcaaagtaattcaaatt

SEQ ID NO: 579751 - DNA, 19 bp, Mus musculus
  siRNA target sequence for Agtpbp1 (NM_023328.1,2237-2255).
cgcaaagtaattcaaatta

SEQ ID NO: 579752 - DNA, 19 bp, Mus musculus
  siRNA target sequence for Agtpbp1 (NM_023328.1,2262-2280).
gcgagtacgaccttatcct

SEQ ID NO: 579753 - DNA, 19 bp, Mus musculus
  siRNA target sequence for Agtpbp1 (NM_023328.1,2288-2306).
gatataaacagtaaccatt

SEQ ID NO: 579754 - DNA, 19 bp, Mus musculus
  siRNA target sequence for Agtpbp1 (NM_023328.1,2351-2369).
gtggcatataggttcaaca

SEQ ID NO: 579755 - DNA, 19 bp, Mus musculus
  siRNA target sequence for Agtpbp1 (NM_023328.1,2354-2372).
gcatataggttcaacatca

SEQ ID NO: 579756 - DNA, 19 bp, Mus musculus
  siRNA target sequence for Agtpbp1 (NM_023328.1,2386-2404).
gtccaacagtcagtttaat

SEQ ID NO: 579757 - DNA, 19 bp, Mus musculus
  siRNA target sequence for Agtpbp1 (NM_023328.1,2388-2406).
ccaacagtcagtttaatta

SEQ ID NO: 579758 - DNA, 19 bp, Mus musculus
  siRNA target sequence for Agtpbp1 (NM_023328.1,2408-2426).
ggtatgcagccacttatgt

SEQ ID NO: 579759 - DNA, 19 bp, Mus musculus
  siRNA target sequence for Agtpbp1 (NM_023328.1,2409-2427).
gtatgcagccacttatgta

SEQ ID NO: 579760 - DNA, 19 bp, Mus musculus
  siRNA target sequence for Agtpbp1 (NM_023328.1,2413-2431).
gcagccacttatgtattca

SEQ ID NO: 579761 - DNA, 19 bp, Mus musculus
  siRNA target sequence for Agtpbp1 (NM_023328.1,2416-2434).
gccacttatgtattcagtt

SEQ ID NO: 579762 - DNA, 19 bp, Mus musculus
  siRNA target sequence for Agtpbp1 (NM_023328.1,2430-2448).
cagttcaggaagcactaaa

SEQ ID NO: 579763 - DNA, 19 bp, Mus musculus
  siRNA target sequence for Agtpbp1 (NM_023328.1,2467-2485).
ccgtatgggcactgacatt

SEQ ID NO: 579764 - DNA, 19 bp, Mus musculus
  siRNA target sequence for Agtpbp1 (NM_023328.1,2644-2662).
gcatcttcaaaaattggaa

SEQ ID NO: 579765 - DNA, 19 bp, Mus musculus
  siRNA target sequence for Agtpbp1 (NM_023328.1,2645-2663).
catcttcaaaaattggaat

SEQ ID NO: 579766 - DNA, 19 bp, Mus musculus
  siRNA target sequence for Agtpbp1 (NM_023328.1,2667-2685).
cacacaatcctcaacaaat

SEQ ID NO: 579767 - DNA, 19 bp, Mus musculus
  siRNA target sequence for Agtpbp1 (NM_023328.1,2758-2776).
gccagagtccaattactat

SEQ ID NO: 579768 - DNA, 19 bp, Mus musculus
  siRNA target sequence for Agtpbp1 (NM_023328.1,2760-2778).
cagagtccaattactatga

SEQ ID NO: 579769 - DNA, 19 bp, Mus musculus
  siRNA target sequence for Agtpbp1 (NM_023328.1,2764-2782).
gtccaattactatgaacat

SEQ ID NO: 579770 - DNA, 19 bp, Mus musculus
  siRNA target sequence for Agtpbp1 (NM_023328.1,2794-2812).
cagaactcgcccttatatt

SEQ ID NO: 579771 - DNA, 19 bp, Mus musculus
  siRNA target sequence for Agtpbp1 (NM_023328.1,2796-2814).
gaactcgcccttatatttt

SEQ ID NO: 579772 - DNA, 19 bp, Mus musculus
  siRNA target sequence for Agtpbp1 (NM_023328.1,2876-2894).
gagtacctcatgagcaata

SEQ ID NO: 579773 - DNA, 19 bp, Mus musculus
  siRNA target sequence for Agtpbp1 (NM_023328.1,2910-2928).
gcctacgggagtcttacat

SEQ ID NO: 579774 - DNA, 19 bp, Mus musculus
  siRNA target sequence for Agtpbp1 (NM_023328.1,2915-2933).
cgggagtcttacattttta

SEQ ID NO: 579775 - DNA, 19 bp, Mus musculus
  siRNA target sequence for Agtpbp1 (NM_023328.1,3024-3042).
gtccaaacccagagttaca

SEQ ID NO: 579776 - DNA, 19 bp, Mus musculus
  siRNA target sequence for Agtpbp1 (NM_023328.1,3035-3053).
gagttacaccccacgattt

SEQ ID NO: 579777 - DNA, 19 bp, Mus musculus
  siRNA target sequence for Agtpbp1 (NM_023328.1,3097-3115).
cctacctctggtttattgt

SEQ ID NO: 579778 - DNA, 19 bp, Mus musculus
  siRNA target sequence for Agtpbp1 (NM_023328.1,3101-3119).
cctctggtttattgtgatt

SEQ ID NO: 579779 - DNA, 19 bp, Mus musculus
  siRNA target sequence for Agtpbp1 (NM_023328.1,3102-3120).
ctctggtttattgtgatta

SEQ ID NO: 579780 - DNA, 19 bp, Mus musculus
  siRNA target sequence for Agtpbp1 (NM_023328.1,3154-3172).
gtacggctgcagcatcaaa

SEQ ID NO: 579781 - DNA, 19 bp, Mus musculus
  siRNA target sequence for Agtpbp1 (NM_023328.1,3201-3219).
cggcttcctgtgatattgt

SEQ ID NO: 579782 - DNA, 19 bp, Mus musculus
  siRNA target sequence for Agtpbp1 (NM_023328.1,3235-3253).
caggactttgcctaagata

SEQ ID NO: 579783 - DNA, 19 bp, Mus musculus
  siRNA target sequence for Agtpbp1 (NM_023328.1,3237-3255).
ggactttgcctaagatact

SEQ ID NO: 579784 - DNA, 19 bp, Mus musculus
  siRNA target sequence for Agtpbp1 (NM_023328.1,3260-3278).
cacattgctccggcatttt

SEQ ID NO: 579785 - DNA, 19 bp, Mus musculus
  siRNA target sequence for Agtpbp1 (NM_023328.1,3370-3388).
caccatggagagtacttta

SEQ ID NO: 579786 - DNA, 19 bp, Mus musculus
  siRNA target sequence for Agtpbp1 (NM_023328.1,3373-3391).
catggagagtactttatgt

SEQ ID NO: 579787 - DNA, 19 bp, Mus musculus
  siRNA target sequence for Agtpbp1 (NM_023328.1,3393-3411).
gctgcgatcagggtagata

SEQ ID NO: 579788 - DNA, 19 bp, Mus musculus
  siRNA target sequence for Agtpbp1 (NM_023328.1,3405-3423).
gtagatacaagggtttaca

SEQ ID NO: 579789 - DNA, 19 bp, Mus musculus
  siRNA target sequence for Agtpbp1 (NM_023328.1,3498-3516).
cttcattggaatataatct

SEQ ID NO: 579790 - DNA, 19 bp, Mus musculus
  siRNA target sequence for Agtpbp1 (NM_023328.1,3520-3538).
ctccaacctgcttgacttt

SEQ ID NO: 579791 - DNA, 19 bp, Mus musculus
  siRNA target sequence for Agtpbp1 (NM_023328.1,3579-3597).
ccaccacttacgttttgga

SEQ ID NO: 579792 - DNA, 19 bp, Mus musculus
  siRNA target sequence for Agtpbp1 (NM_023328.1,3580-3598).
caccacttacgttttggat

SEQ ID NO: 579793 - DNA, 19 bp, Mus musculus
  siRNA target sequence for Agtpbp1 (NM_023328.1,3585-3603).
cttacgttttggatgaaga

SEQ ID NO: 579794 - DNA, 19 bp, Mus musculus
  siRNA target sequence for Agtpbp1 (NM_023328.1,3617-3635).
cttgaagaagttgattaca

SEQ ID NO: 579795 - DNA, 19 bp, Mus musculus
  siRNA target sequence for Agtpbp1 (NM_023328.1,3645-3663).
gcaatgatgagttagatgt

SEQ ID NO: 579796 - DNA, 19 bp, Mus musculus
  siRNA target sequence for C030006K11Rik (NM_145472.1,17-35).
gtggggcagtgcgtaactt

SEQ ID NO: 579797 - DNA, 19 bp, Mus musculus
  siRNA target sequence for C030006K11Rik (NM_145472.1,125-143).
gaacccgcgagtatttcta

SEQ ID NO: 579798 - DNA, 19 bp, Mus musculus
  siRNA target sequence for C030006K11Rik (NM_145472.1,128-146).
cccgcgagtatttctacta

SEQ ID NO: 579799 - DNA, 19 bp, Mus musculus
  siRNA target sequence for C030006K11Rik (NM_145472.1,131-149).
gcgagtatttctactatgt

SEQ ID NO: 579800 - DNA, 19 bp, Mus musculus
  siRNA target sequence for C030006K11Rik (NM_145472.1,302-320).
gcggcagagagcgtaactt

SEQ ID NO: 579801 - DNA, 19 bp, Mus musculus
  siRNA target sequence for C030006K11Rik (NM_145472.1,601-619).
cgccgcatcgccctaacta

SEQ ID NO: 579802 - DNA, 19 bp, Mus musculus
  siRNA target sequence for C030006K11Rik (NM_145472.1,602-620).
gccgcatcgccctaactat

SEQ ID NO: 579803 - DNA, 19 bp, Mus musculus
  siRNA target sequence for C030006K11Rik (NM_145472.1,606-624).
catcgccctaactatggat

SEQ ID NO: 579804 - DNA, 19 bp, Mus musculus
  siRNA target sequence for Cpa3 (NM_007753.1,78-96).
gaaggtattccgtgtgaaa

SEQ ID NO: 579805 - DNA, 19 bp, Mus musculus
  siRNA target sequence for Cpa3 (NM_007753.1,89-107).
gtgtgaaactccagaatga

SEQ ID NO: 579806 - DNA, 19 bp, Mus musculus
  siRNA target sequence for Cpa3 (NM_007753.1,162-180).
gtatccagatgctatccat

SEQ ID NO: 579807 - DNA, 19 bp, Mus musculus
  siRNA target sequence for Cpa3 (NM_007753.1,166-184).
ccagatgctatccatgata

SEQ ID NO: 579808 - DNA, 19 bp, Mus musculus
  siRNA target sequence for Cpa3 (NM_007753.1,177-195).
ccatgatattgctgtgaat

SEQ ID NO: 579809 - DNA, 19 bp, Mus musculus
  siRNA target sequence for Cpa3 (NM_007753.1,178-196).
catgatattgctgtgaata

SEQ ID NO: 579810 - DNA, 19 bp, Mus musculus
  siRNA target sequence for Cpa3 (NM_007753.1,211-229).
cgagttagtgagaaggaat

SEQ ID NO: 579811 - DNA, 19 bp, Mus musculus
  siRNA target sequence for Cpa3 (NM_007753.1,243-261).
gtcaaccttggaacaacat

SEQ ID NO: 579812 - DNA, 19 bp, Mus musculus
  siRNA target sequence for Cpa3 (NM_007753.1,248-266).
ccttggaacaacataaaat

SEQ ID NO: 579813 - DNA, 19 bp, Mus musculus
  siRNA target sequence for Cpa3 (NM_007753.1,336-354).
cgcaggcaggcacagttat

SEQ ID NO: 579814 - DNA, 19 bp, Mus musculus
  siRNA target sequence for Cpa3 (NM_007753.1,350-368).
gttatgcaaaatacaatga

SEQ ID NO: 579815 - DNA, 19 bp, Mus musculus
  siRNA target sequence for Cpa3 (NM_007753.1,389-407).
ggactgaaaaaatgttaga

SEQ ID NO: 579816 - DNA, 19 bp, Mus musculus
  siRNA target sequence for Cpa3 (NM_007753.1,442-460).
ggatcaactgttgaagata

SEQ ID NO: 579817 - DNA, 19 bp, Mus musculus
  siRNA target sequence for Cpa3 (NM_007753.1,443-461).
gatcaactgttgaagataa

SEQ ID NO: 579818 - DNA, 19 bp, Mus musculus
  siRNA target sequence for Cpa3 (NM_007753.1,464-482).
cattatatgtcctcaagat

SEQ ID NO: 579819 - DNA, 19 bp, Mus musculus
  siRNA target sequence for Cpa3 (NM_007753.1,563-581).
gtcagtggtttgtctatca

SEQ ID NO: 579820 - DNA, 19 bp, Mus musculus
  siRNA target sequence for Cpa3 (NM_007753.1,622-640).
ctcttggaccggatgaatt

SEQ ID NO: 579821 - DNA, 19 bp, Mus musculus
  siRNA target sequence for Cpa3 (NM_007753.1,624-642).
cttggaccggatgaatttt

SEQ ID NO: 579822 - DNA, 19 bp, Mus musculus
  siRNA target sequence for Cpa3 (NM_007753.1,645-663).
cgttctgcctgtattcaat

SEQ ID NO: 579823 - DNA, 19 bp, Mus musculus
  siRNA target sequence for Cpa3 (NM_007753.1,664-682).
gtagacggatacatttggt

SEQ ID NO: 579824 - DNA, 19 bp, Mus musculus
  siRNA target sequence for Cpa3 (NM_007753.1,683-701).
catggacacaggatcgaat

SEQ ID NO: 579825 - DNA, 19 bp, Mus musculus
  siRNA target sequence for Cpa3 (NM_007753.1,862-880).
gtcaccaacttcattcgaa

SEQ ID NO: 579826 - DNA, 19 bp, Mus musculus
  siRNA target sequence for Cpa3 (NM_007753.1,877-895).
cgaagccatctgaactcaa

SEQ ID NO: 579827 - DNA, 19 bp, Mus musculus
  siRNA target sequence for Cpa3 (NM_007753.1,881-899).
gccatctgaactcaatcaa

SEQ ID NO: 579828 - DNA, 19 bp, Mus musculus
  siRNA target sequence for Cpa3 (NM_007753.1,920-938).
cctactcgcagatgctatt

SEQ ID NO: 579829 - DNA, 19 bp, Mus musculus
  siRNA target sequence for Cpa3 (NM_007753.1,921-939).
ctactcgcagatgctatta

SEQ ID NO: 579830 - DNA, 19 bp, Mus musculus
  siRNA target sequence for Cpa3 (NM_007753.1,927-945).
gcagatgctattaattcct

SEQ ID NO: 579831 - DNA, 19 bp, Mus musculus
  siRNA target sequence for Cpa3 (NM_007753.1,930-948).
gatgctattaattccttat

SEQ ID NO: 579832 - DNA, 19 bp, Mus musculus
  siRNA target sequence for Cpa3 (NM_007753.1,971-989).
ctaaccaccaggacctatt

SEQ ID NO: 579833 - DNA, 19 bp, Mus musculus
  siRNA target sequence for Cpa3 (NM_007753.1,1011-1029).
ggatgctctctcaactaga

SEQ ID NO: 579834 - DNA, 19 bp, Mus musculus
  siRNA target sequence for Cpa3 (NM_007753.1,1012-1030).
gatgctctctcaactagat

SEQ ID NO: 579835 - DNA, 19 bp, Mus musculus
  siRNA target sequence for Cpa3 (NM_007753.1,1044-1062).
catctacggcccaatagca

SEQ ID NO: 579836 - DNA, 19 bp, Mus musculus
  siRNA target sequence for Cpa3 (NM_007753.1,1055-1073).
caatagcatccacaattta

SEQ ID NO: 579837 - DNA, 19 bp, Mus musculus
  siRNA target sequence for Cpa3 (NM_007753.1,1060-1078).
gcatccacaatttacaaga

SEQ ID NO: 579838 - DNA, 19 bp, Mus musculus
  siRNA target sequence for Cpa3 (NM_007753.1,1182-1200).
ccggataaagccaacatgt

SEQ ID NO: 579839 - DNA, 19 bp, Mus musculus
  siRNA target sequence for Cpa3 (NM_007753.1,1183-1201).
cggataaagccaacatgta

SEQ ID NO: 579840 - DNA, 19 bp, Mus musculus
  siRNA target sequence for Cpa3 (NM_007753.1,1184-1202).
ggataaagccaacatgtaa

SEQ ID NO: 579841 - DNA, 19 bp, Mus musculus
  siRNA target sequence for Cpa3 (NM_007753.1,1208-1226).
ccatgctttctgtcaaatt

SEQ ID NO: 579842 - DNA, 19 bp, Mus musculus
  siRNA target sequence for Cpa3 (NM_007753.1,1233-1251).
caagtatatcctcaagaat

SEQ ID NO: 579843 - DNA, 19 bp, Mus musculus
  siRNA target sequence for Cpa4 (NM_027926.1,85-103).
ggggaccaagtttttagga

SEQ ID NO: 579844 - DNA, 19 bp, Mus musculus
  siRNA target sequence for Cpa4 (NM_027926.1,86-104).
gggaccaagtttttaggat

SEQ ID NO: 579845 - DNA, 19 bp, Mus musculus
  siRNA target sequence for Cpa4 (NM_027926.1,87-105).
ggaccaagtttttaggatt

SEQ ID NO: 579846 - DNA, 19 bp, Mus musculus
  siRNA target sequence for Cpa4 (NM_027926.1,88-106).
gaccaagtttttaggatta

SEQ ID NO: 579847 - DNA, 19 bp, Mus musculus
  siRNA target sequence for Cpa4 (NM_027926.1,148-166).
gtgaattctgaccacttaa

SEQ ID NO: 579848 - DNA, 19 bp, Mus musculus
  siRNA target sequence for Cpa4 (NM_027926.1,297-315).
cctccaggcccttttagat

SEQ ID NO: 579849 - DNA, 19 bp, Mus musculus
  siRNA target sequence for Cpa4 (NM_027926.1,298-316).
ctccaggcccttttagata

SEQ ID NO: 579850 - DNA, 19 bp, Mus musculus
  siRNA target sequence for Cpa4 (NM_027926.1,303-321).
ggcccttttagataacgaa

SEQ ID NO: 579851 - DNA, 19 bp, Mus musculus
  siRNA target sequence for Cpa4 (NM_027926.1,369-387).
caactacggagcttaccat

SEQ ID NO: 579852 - DNA, 19 bp, Mus musculus
  siRNA target sequence for Cpa4 (NM_027926.1,591-609).
ctggacagcgaggaagatt

SEQ ID NO: 579853 - DNA, 19 bp, Mus musculus
  siRNA target sequence for Cpa4 (NM_027926.1,593-611).
ggacagcgaggaagattgt

SEQ ID NO: 579854 - DNA, 19 bp, Mus musculus
  siRNA target sequence for Cpa4 (NM_027926.1,602-620).
ggaagattgtaactgatta

SEQ ID NO: 579855 - DNA, 19 bp, Mus musculus
  siRNA target sequence for Cpa4 (NM_027926.1,681-699).
ggccaatcctgatggatat

SEQ ID NO: 579856 - DNA, 19 bp, Mus musculus
  siRNA target sequence for Cpa4 (NM_027926.1,709-727).
caaagccagaaccgattat

SEQ ID NO: 579857 - DNA, 19 bp, Mus musculus
  siRNA target sequence for Cpa4 (NM_027926.1,769-787).
ggagccgatccaaacagaa

SEQ ID NO: 579858 - DNA, 19 bp, Mus musculus
  siRNA target sequence for Cpa4 (NM_027926.1,770-788).
gagccgatccaaacagaaa

SEQ ID NO: 579859 - DNA, 19 bp, Mus musculus
  siRNA target sequence for Cpa4 (NM_027926.1,772-790).
gccgatccaaacagaaact

SEQ ID NO: 579860 - DNA, 19 bp, Mus musculus
  siRNA target sequence for Cpa4 (NM_027926.1,789-807).
ctggaatgctagttttgca

SEQ ID NO: 579861 - DNA, 19 bp, Mus musculus
  siRNA target sequence for Cpa4 (NM_027926.1,808-826).
ggagaggggaccagtgata

SEQ ID NO: 579862 - DNA, 19 bp, Mus musculus
  siRNA target sequence for Cpa4 (NM_027926.1,945-963).
ctcacagctgctgatgtat

SEQ ID NO: 579863 - DNA, 19 bp, Mus musculus
  siRNA target sequence for Cpa4 (NM_027926.1,1128-1146).
cgacaatggcatcaagtat

SEQ ID NO: 579864 - DNA, 19 bp, Mus musculus
  siRNA target sequence for Cpa5 (NM_144537.1,622-640).
gcttggggccaagtgaatt

SEQ ID NO: 579865 - DNA, 19 bp, Mus musculus
  siRNA target sequence for Cpa5 (NM_144537.1,623-641).
cttggggccaagtgaattt

SEQ ID NO: 579866 - DNA, 19 bp, Mus musculus
  siRNA target sequence for Cpa5 (NM_144537.1,664-682).
gtcctggccaaaaatgaga

SEQ ID NO: 579867 - DNA, 19 bp, Mus musculus
  siRNA target sequence for Cpa5 (NM_144537.1,799-817).
cccagtgttaaagcttatt

SEQ ID NO: 579868 - DNA, 19 bp, Mus musculus
  siRNA target sequence for Cpa5 (NM_144537.1,803-821).
gtgttaaagcttatttgaa

SEQ ID NO: 579869 - DNA, 19 bp, Mus musculus
  siRNA target sequence for Cpa5 (NM_144537.1,971-989).
gttggatcgacaactttgt

SEQ ID NO: 579870 - DNA, 19 bp, Mus musculus
  siRNA target sequence for Cpa5 (NM_144537.1,1023-1041).
cattggcaagagctttgaa

SEQ ID NO: 579871 - DNA, 19 bp, Mus musculus
  siRNA target sequence for Cpa5 (NM_144537.1,1068-1086).
cagcactggaggtccaaat

SEQ ID NO: 579872 - DNA, 19 bp, Mus musculus
  siRNA target sequence for Cpa5 (NM_144537.1,1154-1172).
ggatctcgcagaagattgt

SEQ ID NO: 579873 - DNA, 19 bp, Mus musculus
  siRNA target sequence for Cpa5 (NM_144537.1,1158-1176).
ctcgcagaagattgtcaat

SEQ ID NO: 579874 - DNA, 19 bp, Mus musculus
  siRNA target sequence for Cpa5 (NM_144537.1,1192-1210).
catgtcttgaagaggatat

SEQ ID NO: 579875 - DNA, 19 bp, Mus musculus
  siRNA target sequence for Cpa5 (NM_144537.1,1282-1300).
cgcttatggcgaaaaaaca

SEQ ID NO: 579876 - DNA, 19 bp, Mus musculus
  siRNA target sequence for Cpa5 (NM_144537.1,1356-1374).
ggcaggcttcggaggaaat

SEQ ID NO: 579877 - DNA, 19 bp, Mus musculus
  siRNA target sequence for Cpa5 (NM_144537.1,1366-1384).
ggaggaaatggttctaaca

SEQ ID NO: 579878 - DNA, 19 bp, Mus musculus
  siRNA target sequence for Cpa5 (NM_144537.1,1367-1385).
gaggaaatggttctaacaa

SEQ ID NO: 579879 - DNA, 19 bp, Mus musculus
  siRNA target sequence for Cpa5 (NM_144537.1,1442-1460).
ctgcaattgtggacttcat

SEQ ID NO: 579880 - DNA, 19 bp, Mus musculus
  siRNA target sequence for Cpa5 (NM_144537.1,1463-1481).
ctggccatgggaacttcaa

SEQ ID NO: 579881 - DNA, 19 bp, Mus musculus
  siRNA target sequence for Cpa5 (NM_144537.1,1506-1524).
ctctcagatggtcatgtat

SEQ ID NO: 579882 - DNA, 19 bp, Mus musculus
  siRNA target sequence for Cpa5 (NM_144537.1,1510-1528).
cagatggtcatgtatcctt

SEQ ID NO: 579883 - DNA, 19 bp, Mus musculus
  siRNA target sequence for Cpa5 (NM_144537.1,1512-1530).
gatggtcatgtatccttat

SEQ ID NO: 579884 - DNA, 19 bp, Mus musculus
  siRNA target sequence for Cpa5 (NM_144537.1,1557-1575).
ccacgaagagctgttcaat

SEQ ID NO: 579885 - DNA, 19 bp, Mus musculus
  siRNA target sequence for Cpa5 (NM_144537.1,1560-1578).
cgaagagctgttcaatctt

SEQ ID NO: 579886 - DNA, 19 bp, Mus musculus
  siRNA target sequence for Cpa5 (NM_144537.1,1589-1607).
cagtaaaggctctcaacaa

SEQ ID NO: 579887 - DNA, 19 bp, Mus musculus
  siRNA target sequence for Cpa5 (NM_144537.1,1612-1630).
cacgggatccagtacattt

SEQ ID NO: 579888 - DNA, 19 bp, Mus musculus
  siRNA target sequence for Cpa5 (NM_144537.1,1614-1632).
cgggatccagtacattttt

SEQ ID NO: 579889 - DNA, 19 bp, Mus musculus
  siRNA target sequence for Cpa5 (NM_144537.1,1641-1659).
cagcaccaccctctattca

SEQ ID NO: 579890 - DNA, 19 bp, Mus musculus
  siRNA target sequence for Cpa5 (NM_144537.1,1725-1743).
ccgggacactggacaatat

SEQ ID NO: 579891 - DNA, 19 bp, Mus musculus
  siRNA target sequence for Cpa5 (NM_144537.1,1798-1816).
gcattacagaccatcatga

SEQ ID NO: 579892 - DNA, 19 bp, Mus musculus
  siRNA target sequence for Cpb2 (NM_019775.2,152-170).
gagtggccaggttttatct

SEQ ID NO: 579893 - DNA, 19 bp, Mus musculus
  siRNA target sequence for Cpb2 (NM_019775.2,188-206).
caggcaagttcaactactt

SEQ ID NO: 579894 - DNA, 19 bp, Mus musculus
  siRNA target sequence for Cpb2 (NM_019775.2,198-216).
caactacttcagaatctta

SEQ ID NO: 579895 - DNA, 19 bp, Mus musculus
  siRNA target sequence for Cpb2 (NM_019775.2,201-219).
ctacttcagaatcttacta

SEQ ID NO: 579896 - DNA, 19 bp, Mus musculus
  siRNA target sequence for Cpb2 (NM_019775.2,209-227).
gaatcttactacaacgtat

SEQ ID NO: 579897 - DNA, 19 bp, Mus musculus
  siRNA target sequence for Cpb2 (NM_019775.2,341-359).
cagaattccatttaacgtt

SEQ ID NO: 579898 - DNA, 19 bp, Mus musculus
  siRNA target sequence for Cpb2 (NM_019775.2,349-367).
catttaacgttctgatgaa

SEQ ID NO: 579899 - DNA, 19 bp, Mus musculus
  siRNA target sequence for Cpb2 (NM_019775.2,422-440).
cgcctccgcttcatactat

SEQ ID NO: 579900 - DNA, 19 bp, Mus musculus
  siRNA target sequence for Cpb2 (NM_019775.2,424-442).
cctccgcttcatactatga

SEQ ID NO: 579901 - DNA, 19 bp, Mus musculus
  siRNA target sequence for Cpb2 (NM_019775.2,433-451).
catactatgagcagtatca

SEQ ID NO: 579902 - DNA, 19 bp, Mus musculus
  siRNA target sequence for Cpb2 (NM_019775.2,443-461).
gcagtatcactcgctaaat

SEQ ID NO: 579903 - DNA, 19 bp, Mus musculus
  siRNA target sequence for Cpb2 (NM_019775.2,446-464).
gtatcactcgctaaatgaa

SEQ ID NO: 579904 - DNA, 19 bp, Mus musculus
  siRNA target sequence for Cpb2 (NM_019775.2,450-468).
cactcgctaaatgaaatct

SEQ ID NO: 579905 - DNA, 19 bp, Mus musculus
  siRNA target sequence for Cpb2 (NM_019775.2,452-470).
ctcgctaaatgaaatctat

SEQ ID NO: 579906 - DNA, 19 bp, Mus musculus
  siRNA target sequence for Cpb2 (NM_019775.2,473-491).
ctggatagaagtcataact

SEQ ID NO: 579907 - DNA, 19 bp, Mus musculus
  siRNA target sequence for Cpb2 (NM_019775.2,476-494).
gatagaagtcataactgaa

SEQ ID NO: 579908 - DNA, 19 bp, Mus musculus
  siRNA target sequence for Cpb2 (NM_019775.2,529-547).
gatcatcattcgagaagta

SEQ ID NO: 579909 - DNA, 19 bp, Mus musculus
  siRNA target sequence for Cpb2 (NM_019775.2,539-557).
cgagaagtacccactttat

SEQ ID NO: 579910 - DNA, 19 bp, Mus musculus
  siRNA target sequence for Cpb2 (NM_019775.2,542-560).
gaagtacccactttatgtt

SEQ ID NO: 579911 - DNA, 19 bp, Mus musculus
  siRNA target sequence for Cpb2 (NM_019775.2,615-633).
ggaatccatgccagagaat

SEQ ID NO: 579912 - DNA, 19 bp, Mus musculus
  siRNA target sequence for Cpb2 (NM_019775.2,772-790).
cgtggaaaaagaatcgaat

SEQ ID NO: 579913 - DNA, 19 bp, Mus musculus
  siRNA target sequence for Cpb2 (NM_019775.2,804-822).
cgctctgctcacaagaaca

SEQ ID NO: 579914 - DNA, 19 bp, Mus musculus
  siRNA target sequence for Cpb2 (NM_019775.2,848-866).
caggaacttcgcttccaaa

SEQ ID NO: 579915 - DNA, 19 bp, Mus musculus
  siRNA target sequence for Cpb2 (NM_019775.2,876-894).
gagaaaggtgcgtcaagtt

SEQ ID NO: 579916 - DNA, 19 bp, Mus musculus
  siRNA target sequence for Cpb2 (NM_019775.2,951-969).
gcagtggctgacttcttga

SEQ ID NO: 579917 - DNA, 19 bp, Mus musculus
  siRNA target sequence for Cpb2 (NM_019775.2,973-991).
gaaatatcgaccacattaa

SEQ ID NO: 579918 - DNA, 19 bp, Mus musculus
  siRNA target sequence for Cpb2 (NM_019775.2,1094-1112).
cgaagcagttcgtgcaatt

SEQ ID NO: 579919 - DNA, 19 bp, Mus musculus
  siRNA target sequence for Cpb2 (NM_019775.2,1098-1116).
gcagttcgtgcaattgaaa

SEQ ID NO: 579920 - DNA, 19 bp, Mus musculus
  siRNA target sequence for Cpb2 (NM_019775.2,1101-1119).
gttcgtgcaattgaaagta

SEQ ID NO: 579921 - DNA, 19 bp, Mus musculus
  siRNA target sequence for Cpb2 (NM_019775.2,1104-1122).
cgtgcaattgaaagtatta

SEQ ID NO: 579922 - DNA, 19 bp, Mus musculus
  siRNA target sequence for Cpb2 (NM_019775.2,1150-1168).
gtggctcagaaagtttata

SEQ ID NO: 579923 - DNA, 19 bp, Mus musculus
  siRNA target sequence for Cpb2 (NM_019775.2,1180-1198).
gaggttctgacgattggat

SEQ ID NO: 579924 - DNA, 19 bp, Mus musculus
  siRNA target sequence for Cpb2 (NM_019775.2,1186-1204).
ctgacgattggatctatga

SEQ ID NO: 579925 - DNA, 19 bp, Mus musculus
  siRNA target sequence for Cpb2 (NM_019775.2,1188-1206).
gacgattggatctatgatt

SEQ ID NO: 579926 - DNA, 19 bp, Mus musculus
  siRNA target sequence for Cpb2 (NM_019775.2,1246-1264).
caggcagatacggattctt

SEQ ID NO: 579927 - DNA, 19 bp, Mus musculus
  siRNA target sequence for Cpb2 (NM_019775.2,1288-1306).
ccacttgtgcagaagcttt

SEQ ID NO: 579928 - DNA, 19 bp, Mus musculus
  siRNA target sequence for Cpb2 (NM_019775.2,1310-1328).
cgccatctctaaaatagtt

SEQ ID NO: 579929 - DNA, 19 bp, Mus musculus
  siRNA target sequence for Cpd (NM_007754.1,545-563).
ccaccgacgtgtatttgct

SEQ ID NO: 579930 - DNA, 19 bp, Mus musculus
  siRNA target sequence for Cpd (NM_007754.1,758-776).
ggatccgcaggaacaagtt

SEQ ID NO: 579931 - DNA, 19 bp, Mus musculus
  siRNA target sequence for Cpd (NM_007754.1,759-777).
gatccgcaggaacaagttt

SEQ ID NO: 579932 - DNA, 19 bp, Mus musculus
  siRNA target sequence for Cpd (NM_007754.1,808-826).
gtggtagcaagctatcctt

SEQ ID NO: 579933 - DNA, 19 bp, Mus musculus
  siRNA target sequence for Cpd (NM_007754.1,810-828).
ggtagcaagctatcctttt

SEQ ID NO: 579934 - DNA, 19 bp, Mus musculus
  siRNA target sequence for Cpd (NM_007754.1,815-833).
caagctatccttttgatga

SEQ ID NO: 579935 - DNA, 19 bp, Mus musculus
  siRNA target sequence for Cpd (NM_007754.1,832-850).
gattctcccgagcataaga

SEQ ID NO: 579936 - DNA, 19 bp, Mus musculus
  siRNA target sequence for Cpd (NM_007754.1,866-884).
gcaaaacctccgatgatga

SEQ ID NO: 579937 - DNA, 19 bp, Mus musculus
  siRNA target sequence for Cpd (NM_007754.1,867-885).
caaaacctccgatgatgaa

SEQ ID NO: 579938 - DNA, 19 bp, Mus musculus
  siRNA target sequence for Cpd (NM_007754.1,913-931).
gcctctaaccaccctataa

SEQ ID NO: 579939 - DNA, 19 bp, Mus musculus
  siRNA target sequence for Cpd (NM_007754.1,914-932).
cctctaaccaccctataat

SEQ ID NO: 579940 - DNA, 19 bp, Mus musculus
  siRNA target sequence for Cpd (NM_007754.1,917-935).
ctaaccaccctataatgaa

SEQ ID NO: 579941 - DNA, 19 bp, Mus musculus
  siRNA target sequence for Cpd (NM_007754.1,1014-1032).
cgtggaaggtggtatgcaa

SEQ ID NO: 579942 - DNA, 19 bp, Mus musculus
  siRNA target sequence for Cpd (NM_007754.1,1030-1048).
caagattacaattatgtat

SEQ ID NO: 579943 - DNA, 19 bp, Mus musculus
  siRNA target sequence for Cpd (NM_007754.1,1049-1067).
gggccaactgttttgagat

SEQ ID NO: 579944 - DNA, 19 bp, Mus musculus
  siRNA target sequence for Cpd (NM_007754.1,1063-1081).
gagatcacattagaattgt

SEQ ID NO: 579945 - DNA, 19 bp, Mus musculus
  siRNA target sequence for Cpd (NM_007754.1,1065-1083).
gatcacattagaattgtct

SEQ ID NO: 579946 - DNA, 19 bp, Mus musculus
  siRNA target sequence for Cpd (NM_007754.1,1135-1153).
cgtgagtctttgatcacat

SEQ ID NO: 579947 - DNA, 19 bp, Mus musculus
  siRNA target sequence for Cpd (NM_007754.1,1136-1154).
gtgagtctttgatcacatt

SEQ ID NO: 579948 - DNA, 19 bp, Mus musculus
  siRNA target sequence for Cpd (NM_007754.1,1164-1182).
ggtccacattggaattaaa

SEQ ID NO: 579949 - DNA, 19 bp, Mus musculus
  siRNA target sequence for Cpd (NM_007754.1,1167-1185).
ccacattggaattaaagga

SEQ ID NO: 579950 - DNA, 19 bp, Mus musculus
  siRNA target sequence for Cpd (NM_007754.1,1205-1223).
caggctctgggttagagaa

SEQ ID NO: 579951 - DNA, 19 bp, Mus musculus
  siRNA target sequence for Cpd (NM_007754.1,1215-1233).
gttagagaacgcaaccatt

SEQ ID NO: 579952 - DNA, 19 bp, Mus musculus
  siRNA target sequence for Cpd (NM_007754.1,1235-1253).
cagtggctggtattaatca

SEQ ID NO: 579953 - DNA, 19 bp, Mus musculus
  siRNA target sequence for Cpd (NM_007754.1,1243-1261).
ggtattaatcataacatca

SEQ ID NO: 579954 - DNA, 19 bp, Mus musculus
  siRNA target sequence for Cpd (NM_007754.1,1257-1275).
catcacaacgggaagattt

SEQ ID NO: 579955 - DNA, 19 bp, Mus musculus
  siRNA target sequence for Cpd (NM_007754.1,1260-1278).
cacaacgggaagatttggt

SEQ ID NO: 579956 - DNA, 19 bp, Mus musculus
  siRNA target sequence for Cpd (NM_007754.1,1268-1286).
gaagatttggtgatttcca

SEQ ID NO: 579957 - DNA, 19 bp, Mus musculus
  siRNA target sequence for Cpd (NM_007754.1,1277-1295).
gtgatttccacagattact

SEQ ID NO: 579958 - DNA, 19 bp, Mus musculus
  siRNA target sequence for Cpd (NM_007754.1,1322-1340).
cgctttcaactgggtatat

SEQ ID NO: 579959 - DNA, 19 bp, Mus musculus
  siRNA target sequence for Cpd (NM_007754.1,1341-1359).
gccattgaccattaataat

SEQ ID NO: 579960 - DNA, 19 bp, Mus musculus
  siRNA target sequence for Cpd (NM_007754.1,1540-1558).
cattttcccgacatggaaa

SEQ ID NO: 579961 - DNA, 19 bp, Mus musculus
  siRNA target sequence for Cpd (NM_007754.1,1546-1564).
cccgacatggaaatcttct

SEQ ID NO: 579962 - DNA, 19 bp, Mus musculus
  siRNA target sequence for Cpd (NM_007754.1,1547-1565).
ccgacatggaaatcttctt

SEQ ID NO: 579963 - DNA, 19 bp, Mus musculus
  siRNA target sequence for Cpd (NM_007754.1,1566-1584).
gagaagatttgccaatgaa

SEQ ID NO: 579964 - DNA, 19 bp, Mus musculus
  siRNA target sequence for Cpd (NM_007754.1,1568-1586).
gaagatttgccaatgaata

SEQ ID NO: 579965 - DNA, 19 bp, Mus musculus
  siRNA target sequence for Cpd (NM_007754.1,1577-1595).
ccaatgaatatcctaatat

SEQ ID NO: 579966 - DNA, 19 bp, Mus musculus
  siRNA target sequence for Cpd (NM_007754.1,1687-1705).
gaaccagaatttaagtata

SEQ ID NO: 579967 - DNA, 19 bp, Mus musculus
  siRNA target sequence for Cpd (NM_007754.1,1735-1753).
ggaagagagctgctattga

SEQ ID NO: 579968 - DNA, 19 bp, Mus musculus
  siRNA target sequence for Cpd (NM_007754.1,1743-1761).
gctgctattgaatctcatt

SEQ ID NO: 579969 - DNA, 19 bp, Mus musculus
  siRNA target sequence for Cpd (NM_007754.1,1762-1780).
gaatacctctgcaagaatt

SEQ ID NO: 579970 - DNA, 19 bp, Mus musculus
  siRNA target sequence for Cpd (NM_007754.1,1767-1785).
cctctgcaagaattttgga

SEQ ID NO: 579971 - DNA, 19 bp, Mus musculus
  siRNA target sequence for Cpd (NM_007754.1,1768-1786).
ctctgcaagaattttggaa

SEQ ID NO: 579972 - DNA, 19 bp, Mus musculus
  siRNA target sequence for Cpd (NM_007754.1,1809-1827).
ggttcgcagcacaagaatt

SEQ ID NO: 579973 - DNA, 19 bp, Mus musculus
  siRNA target sequence for Cpd (NM_007754.1,1817-1835).
gcacaagaattcaccttat

SEQ ID NO: 579974 - DNA, 19 bp, Mus musculus
  siRNA target sequence for Cpd (NM_007754.1,1830-1848).
ccttatgccatccatgaat

SEQ ID NO: 579975 - DNA, 19 bp, Mus musculus
  siRNA target sequence for Cpd (NM_007754.1,1849-1867).
cctgatggatatgaaaagt

SEQ ID NO: 579976 - DNA, 19 bp, Mus musculus
  siRNA target sequence for Cpd (NM_007754.1,1944-1962).
ccagtttgttccaatcaca

SEQ ID NO: 579977 - DNA, 19 bp, Mus musculus
  siRNA target sequence for Cpd (NM_007754.1,1966-1984).
cctacccaaccagaaacta

SEQ ID NO: 579978 - DNA, 19 bp, Mus musculus
  siRNA target sequence for Cpd (NM_007754.1,1967-1985).
ctacccaaccagaaactat

SEQ ID NO: 579979 - DNA, 19 bp, Mus musculus
  siRNA target sequence for Cpd (NM_007754.1,2042-2060).
ggggttccctggtggttaa

SEQ ID NO: 579980 - DNA, 19 bp, Mus musculus
  siRNA target sequence for Cpd (NM_007754.1,2044-2062).
ggttccctggtggttaact

SEQ ID NO: 579981 - DNA, 19 bp, Mus musculus
  siRNA target sequence for Cpd (NM_007754.1,2045-2063).
gttccctggtggttaacta

SEQ ID NO: 579982 - DNA, 19 bp, Mus musculus
  siRNA target sequence for Cpd (NM_007754.1,2055-2073).
ggttaactacccttatgat

SEQ ID NO: 579983 - DNA, 19 bp, Mus musculus
  siRNA target sequence for Cpd (NM_007754.1,2061-2079).
ctacccttatgatgataat

SEQ ID NO: 579984 - DNA, 19 bp, Mus musculus
  siRNA target sequence for Cpd (NM_007754.1,2180-2198).
gaccttgcaaggacatgta

SEQ ID NO: 579985 - DNA, 19 bp, Mus musculus
  siRNA target sequence for Cpd (NM_007754.1,2183-2201).
cttgcaaggacatgtatct

SEQ ID NO: 579986 - DNA, 19 bp, Mus musculus
  siRNA target sequence for Cpd (NM_007754.1,2186-2204).
gcaaggacatgtatctcaa

SEQ ID NO: 579987 - DNA, 19 bp, Mus musculus
  siRNA target sequence for Cpd (NM_007754.1,2191-2209).
gacatgtatctcaatgagt

SEQ ID NO: 579988 - DNA, 19 bp, Mus musculus
  siRNA target sequence for Cpd (NM_007754.1,2234-2252).
gagctagttggtataacgt

SEQ ID NO: 579989 - DNA, 19 bp, Mus musculus
  siRNA target sequence for Cpd (NM_007754.1,2310-2328).
cgaactcggttgtgtgaaa

SEQ ID NO: 579990 - DNA, 19 bp, Mus musculus
  siRNA target sequence for Cpd (NM_007754.1,2321-2339).
gtgtgaaatatccatttga

SEQ ID NO: 579991 - DNA, 19 bp, Mus musculus
  siRNA target sequence for Cpd (NM_007754.1,2355-2373).
gtactgggagcaaaatcga

SEQ ID NO: 579992 - DNA, 19 bp, Mus musculus
  siRNA target sequence for Cpd (NM_007754.1,2364-2382).
gcaaaatcgaagatctcta

SEQ ID NO: 579993 - DNA, 19 bp, Mus musculus
  siRNA target sequence for Cpd (NM_007754.1,2378-2396).
ctctaatccagtttatgaa

SEQ ID NO: 579994 - DNA, 19 bp, Mus musculus
  siRNA target sequence for Cpd (NM_007754.1,2400-2418).
ggttcatcagggtgtcaaa

SEQ ID NO: 579995 - DNA, 19 bp, Mus musculus
  siRNA target sequence for Cpd (NM_007754.1,2438-2456).
cagatggtaggggcatatt

SEQ ID NO: 579996 - DNA, 19 bp, Mus musculus
  siRNA target sequence for Cpd (NM_007754.1,2469-2487).
cagtgttgctgaaattaat

SEQ ID NO: 579997 - DNA, 19 bp, Mus musculus
  siRNA target sequence for Cpd (NM_007754.1,2612-2630).
gtgctgttcaggtcaactt

SEQ ID NO: 579998 - DNA, 19 bp, Mus musculus
  siRNA target sequence for Cpd (NM_007754.1,2648-2666).
cagcagatgcaaacaatga

SEQ ID NO: 579999 - DNA, 19 bp, Mus musculus
  siRNA target sequence for Cpd (NM_007754.1,2708-2726).
ccagcgacccaacttctaa

SEQ ID NO: 580000 - DNA, 19 bp, Mus musculus
  siRNA target sequence for Cpd (NM_007754.1,2717-2735).
caacttctaaggagtttga

SEQ ID NO: 580001 - DNA, 19 bp, Mus musculus
  siRNA target sequence for Cpd (NM_007754.1,2805-2823).
ggctctgtatcgataccat

SEQ ID NO: 580002 - DNA, 19 bp, Mus musculus
  siRNA target sequence for Cpd (NM_007754.1,2806-2824).
gctctgtatcgataccatt

SEQ ID NO: 580003 - DNA, 19 bp, Mus musculus
  siRNA target sequence for Cpd (NM_007754.1,2809-2827).
ctgtatcgataccattcat

SEQ ID NO: 580004 - DNA, 19 bp, Mus musculus
  siRNA target sequence for Cpd (NM_007754.1,2816-2834).
gataccattcatacaaaga

SEQ ID NO: 580005 - DNA, 19 bp, Mus musculus
  siRNA target sequence for Cpd (NM_007754.1,2820-2838).
ccattcatacaaagactta

SEQ ID NO: 580006 - DNA, 19 bp, Mus musculus
  siRNA target sequence for Cpd (NM_007754.1,2848-2866).
ctgagaggacttgtaatga

SEQ ID NO: 580007 - DNA, 19 bp, Mus musculus
  siRNA target sequence for Cpd (NM_007754.1,2865-2883).
gaactacccgcacattaca

SEQ ID NO: 580008 - DNA, 19 bp, Mus musculus
  siRNA target sequence for Cpd (NM_007754.1,2871-2889).
cccgcacattacaaacctt

SEQ ID NO: 580009 - DNA, 19 bp, Mus musculus
  siRNA target sequence for Cpd (NM_007754.1,2872-2890).
ccgcacattacaaacctta

SEQ ID NO: 580010 - DNA, 19 bp, Mus musculus
  siRNA target sequence for Cpd (NM_007754.1,2908-2926).
gttgagtatcgtcacattt

SEQ ID NO: 580011 - DNA, 19 bp, Mus musculus
  siRNA target sequence for Cpd (NM_007754.1,2911-2929).
gagtatcgtcacatttggt

SEQ ID NO: 580012 - DNA, 19 bp, Mus musculus
  siRNA target sequence for Cpd (NM_007754.1,2940-2958).
ctccaataagcccaacata

SEQ ID NO: 580013 - DNA, 19 bp, Mus musculus
  siRNA target sequence for Cpd (NM_007754.1,2968-2986).
gaagaaccgaagattcgtt

SEQ ID NO: 580014 - DNA, 19 bp, Mus musculus
  siRNA target sequence for Cpd (NM_007754.1,3009-3027).
cgctccagttggaactgaa

SEQ ID NO: 580015 - DNA, 19 bp, Mus musculus
  siRNA target sequence for Cpd (NM_007754.1,3052-3070).
ctttgcctgaattacaaaa

SEQ ID NO: 580016 - DNA, 19 bp, Mus musculus
  siRNA target sequence for Cpd (NM_007754.1,3066-3084).
caaaaggaacccagttgtt

SEQ ID NO: 580017 - DNA, 19 bp, Mus musculus
  siRNA target sequence for Cpd (NM_007754.1,3077-3095).
cagttgttacccaattggt

SEQ ID NO: 580018 - DNA, 19 bp, Mus musculus
  siRNA target sequence for Cpd (NM_007754.1,3093-3111).
ggttgacaggactagaatt

SEQ ID NO: 580019 - DNA, 19 bp, Mus musculus
  siRNA target sequence for Cpd (NM_007754.1,3101-3119).
ggactagaattgtgattgt

SEQ ID NO: 580020 - DNA, 19 bp, Mus musculus
  siRNA target sequence for Cpd (NM_007754.1,3114-3132).
gattgttccctctctgaat

SEQ ID NO: 580021 - DNA, 19 bp, Mus musculus
  siRNA target sequence for Cpd (NM_007754.1,3324-3342).
ggtcacatatccgtatgat

SEQ ID NO: 580022 - DNA, 19 bp, Mus musculus
  siRNA target sequence for Cpd (NM_007754.1,3325-3343).
gtcacatatccgtatgata

SEQ ID NO: 580023 - DNA, 19 bp, Mus musculus
  siRNA target sequence for Cpd (NM_007754.1,3389-3407).
catctctttatgcaaataa

SEQ ID NO: 580024 - DNA, 19 bp, Mus musculus
  siRNA target sequence for Cpd (NM_007754.1,3392-3410).
ctctttatgcaaataacca

SEQ ID NO: 580025 - DNA, 19 bp, Mus musculus
  siRNA target sequence for Cpd (NM_007754.1,3433-3451).
cccagttgcccaaataatt

SEQ ID NO: 580026 - DNA, 19 bp, Mus musculus
  siRNA target sequence for Cpd (NM_007754.1,3508-3526).
ggcagcatgaaggattata

SEQ ID NO: 580027 - DNA, 19 bp, Mus musculus
  siRNA target sequence for Cpd (NM_007754.1,3510-3528).
cagcatgaaggattatagt

SEQ ID NO: 580028 - DNA, 19 bp, Mus musculus
  siRNA target sequence for Cpd (NM_007754.1,3512-3530).
gcatgaaggattatagtgt

SEQ ID NO: 580029 - DNA, 19 bp, Mus musculus
  siRNA target sequence for Cpd (NM_007754.1,3667-3685).
cacgggttagtaaaagaca

SEQ ID NO: 580030 - DNA, 19 bp, Mus musculus
  siRNA target sequence for Cpd (NM_007754.1,3704-3722).
cgaaagcagtcattgtact

SEQ ID NO: 580031 - DNA, 19 bp, Mus musculus
  siRNA target sequence for Cpd (NM_007754.1,3710-3728).
cagtcattgtactcaatga

SEQ ID NO: 580032 - DNA, 19 bp, Mus musculus
  siRNA target sequence for Cpd (NM_007754.1,3718-3736).
gtactcaatgaaggaataa

SEQ ID NO: 580033 - DNA, 19 bp, Mus musculus
  siRNA target sequence for Cpd (NM_007754.1,3750-3768).
ggaggggggttatttccat

SEQ ID NO: 580034 - DNA, 19 bp, Mus musculus
  siRNA target sequence for Cpd (NM_007754.1,3779-3797).
ctcctggagtccataacat

SEQ ID NO: 580035 - DNA, 19 bp, Mus musculus
  siRNA target sequence for Cpd (NM_007754.1,3782-3800).
ctggagtccataacatcaa

SEQ ID NO: 580036 - DNA, 19 bp, Mus musculus
  siRNA target sequence for Cpd (NM_007754.1,3860-3878).
ccagttctgtggtaatagt

SEQ ID NO: 580037 - DNA, 19 bp, Mus musculus
  siRNA target sequence for Cpd (NM_007754.1,3868-3886).
gtggtaatagtctttgata

SEQ ID NO: 580038 - DNA, 19 bp, Mus musculus
  siRNA target sequence for Cpd (NM_007754.1,3889-3907).
gataaccggatatttggtt

SEQ ID NO: 580039 - DNA, 19 bp, Mus musculus
  siRNA target sequence for Cpd (NM_007754.1,3914-3932).
gggaactcgtggtaactgt

SEQ ID NO: 580040 - DNA, 19 bp, Mus musculus
  siRNA target sequence for Cpd (NM_007754.1,3931-3949).
gtgtcaggtgccactatgt

SEQ ID NO: 580041 - DNA, 19 bp, Mus musculus
  siRNA target sequence for Cpd (NM_007754.1,3933-3951).
gtcaggtgccactatgtca

SEQ ID NO: 580042 - DNA, 19 bp, Mus musculus
  siRNA target sequence for Cpd (NM_007754.1,3992-4010).
ccatcaagtctaatagaca

SEQ ID NO: 580043 - DNA, 19 bp, Mus musculus
  siRNA target sequence for Cpd (NM_007754.1,4032-4050).
gcggcagcatcatgatgaa

SEQ ID NO: 580044 - DNA, 19 bp, Mus musculus
  siRNA target sequence for Cpd (NM_007754.1,4033-4051).
cggcagcatcatgatgaat

SEQ ID NO: 580045 - DNA, 19 bp, Mus musculus
  siRNA target sequence for Cpd (NM_007754.1,4057-4075).
gatgaaattcgcatgatgt

SEQ ID NO: 580046 - DNA, 19 bp, Mus musculus
  siRNA target sequence for Cpd (NM_007754.1,4060-4078).
gaaattcgcatgatgtcaa

SEQ ID NO: 580047 - DNA, 19 bp, Mus musculus
  siRNA target sequence for Cpd (NM_007754.1,4094-4112).
ccctcctaagccatgagtt

SEQ ID NO: 580048 - DNA, 19 bp, Mus musculus
  siRNA target sequence for Cpd (NM_007754.1,4134-4152).
ggaggaaacattatattct

SEQ ID NO: 580049 - DNA, 19 bp, Mus musculus
  siRNA target sequence for Cpd (NM_007754.1,4135-4153).
gaggaaacattatattcta

SEQ ID NO: 580050 - DNA, 19 bp, Mus musculus
  siRNA target sequence for Cpe (NM_013494.2,394-412).
gccgggtgaacctgaattt

SEQ ID NO: 580051 - DNA, 19 bp, Mus musculus
  siRNA target sequence for Cpe (NM_013494.2,423-441).
ggaacatgcatggtaatga

SEQ ID NO: 580052 - DNA, 19 bp, Mus musculus
  siRNA target sequence for Cpe (NM_013494.2,450-468).
gacgggaactgcttatttt

SEQ ID NO: 580053 - DNA, 19 bp, Mus musculus
  siRNA target sequence for Cpe (NM_013494.2,503-521).
ggcaatgagacaattgtca

SEQ ID NO: 580054 - DNA, 19 bp, Mus musculus
  siRNA target sequence for Cpe (NM_013494.2,529-547).
ccacagcacccgaattcat

SEQ ID NO: 580055 - DNA, 19 bp, Mus musculus
  siRNA target sequence for Cpe (NM_013494.2,530-548).
cacagcacccgaattcata

SEQ ID NO: 580056 - DNA, 19 bp, Mus musculus
  siRNA target sequence for Cpe (NM_013494.2,534-552).
gcacccgaattcatatcat

SEQ ID NO: 580057 - DNA, 19 bp, Mus musculus
  siRNA target sequence for Cpe (NM_013494.2,630-648).
gcaacgcccagggaataga

SEQ ID NO: 580058 - DNA, 19 bp, Mus musculus
  siRNA target sequence for Cpe (NM_013494.2,636-654).
cccagggaatagatctgaa

SEQ ID NO: 580059 - DNA, 19 bp, Mus musculus
  siRNA target sequence for Cpe (NM_013494.2,673-691).
ggacaggatcgtgtatgtt

SEQ ID NO: 580060 - DNA, 19 bp, Mus musculus
  siRNA target sequence for Cpe (NM_013494.2,674-692).
gacaggatcgtgtatgtta

SEQ ID NO: 580061 - DNA, 19 bp, Mus musculus
  siRNA target sequence for Cpe (NM_013494.2,678-696).
ggatcgtgtatgttaatga

SEQ ID NO: 580062 - DNA, 19 bp, Mus musculus
  siRNA target sequence for Cpe (NM_013494.2,682-700).
cgtgtatgttaatgagaaa

SEQ ID NO: 580063 - DNA, 19 bp, Mus musculus
  siRNA target sequence for Cpe (NM_013494.2,748-766).
ggaccaaaattcaaagctt

SEQ ID NO: 580064 - DNA, 19 bp, Mus musculus
  siRNA target sequence for Cpe (NM_013494.2,795-813).
ggatcatggacattccatt

SEQ ID NO: 580065 - DNA, 19 bp, Mus musculus
  siRNA target sequence for Cpe (NM_013494.2,840-858).
gagaccttgtggctaatta

SEQ ID NO: 580066 - DNA, 19 bp, Mus musculus
  siRNA target sequence for Cpe (NM_013494.2,879-897).
gcggtactgctcacgaata

SEQ ID NO: 580067 - DNA, 19 bp, Mus musculus
  siRNA target sequence for Cpe (NM_013494.2,881-899).
ggtactgctcacgaataca

SEQ ID NO: 580068 - DNA, 19 bp, Mus musculus
  siRNA target sequence for Cpe (NM_013494.2,906-924).
gccctgatgacgcaatttt

SEQ ID NO: 580069 - DNA, 19 bp, Mus musculus
  siRNA target sequence for Cpe (NM_013494.2,909-927).
ctgatgacgcaattttcca

SEQ ID NO: 580070 - DNA, 19 bp, Mus musculus
  siRNA target sequence for Cpe (NM_013494.2,935-953).
gctcgcgcgtactcttctt

SEQ ID NO: 580071 - DNA, 19 bp, Mus musculus
  siRNA target sequence for Cpe (NM_013494.2,936-954).
ctcgcgcgtactcttcttt

SEQ ID NO: 580072 - DNA, 19 bp, Mus musculus
  siRNA target sequence for Cpe (NM_013494.2,938-956).
cgcgcgtactcttctttca

SEQ ID NO: 580073 - DNA, 19 bp, Mus musculus
  siRNA target sequence for Cpe (NM_013494.2,939-957).
gcgcgtactcttctttcaa

SEQ ID NO: 580074 - DNA, 19 bp, Mus musculus
  siRNA target sequence for Cpe (NM_013494.2,984-1002).
ctccctgtcgcaagaatga

SEQ ID NO: 580075 - DNA, 19 bp, Mus musculus
  siRNA target sequence for Cpe (NM_013494.2,1054-1072).
cgtccccggtggaatgcaa

SEQ ID NO: 580076 - DNA, 19 bp, Mus musculus
  siRNA target sequence for Cpe (NM_013494.2,1059-1077).
ccggtggaatgcaagactt

SEQ ID NO: 580077 - DNA, 19 bp, Mus musculus
  siRNA target sequence for Cpe (NM_013494.2,1204-1222).
gatacaccgaggtgttaaa

SEQ ID NO: 580078 - DNA, 19 bp, Mus musculus
  siRNA target sequence for Cpe (NM_013494.2,1304-1322).
gctaaggatggggattact

SEQ ID NO: 580079 - DNA, 19 bp, Mus musculus
  siRNA target sequence for Cpe (NM_013494.2,1337-1355).
cctggaaactataaactta

SEQ ID NO: 580080 - DNA, 19 bp, Mus musculus
  siRNA target sequence for Cpe (NM_013494.2,1370-1388).
ggctacctggcaatcacaa

SEQ ID NO: 580081 - DNA, 19 bp, Mus musculus
  siRNA target sequence for Cpe (NM_013494.2,1484-1502).
gagtggtggaaaatgatgt

SEQ ID NO: 580082 - DNA, 19 bp, Mus musculus
  siRNA target sequence for Cpn1 (NM_030703.1,457-475).
ggaaccggaagtcaagtat

SEQ ID NO: 580083 - DNA, 19 bp, Mus musculus
  siRNA target sequence for Cpn1 (NM_030703.1,647-665).
gcccagggcccaaacatgt

SEQ ID NO: 580084 - DNA, 19 bp, Mus musculus
  siRNA target sequence for Cpn1 (NM_030703.1,677-695).
gttggtaggaacaatgcaa

SEQ ID NO: 580085 - DNA, 19 bp, Mus musculus
  siRNA target sequence for Cpn1 (NM_030703.1,714-732).
gcaacttcccggatctcaa

SEQ ID NO: 580086 - DNA, 19 bp, Mus musculus
  siRNA target sequence for Cpn1 (NM_030703.1,725-743).
gatctcaacacctacttct

SEQ ID NO: 580087 - DNA, 19 bp, Mus musculus
  siRNA target sequence for Cpn1 (NM_030703.1,787-805).
ccccgacaactggaaaagt

SEQ ID NO: 580088 - DNA, 19 bp, Mus musculus
  siRNA target sequence for Cpn1 (NM_030703.1,840-858).
ggattcgctccttgaactt

SEQ ID NO: 580089 - DNA, 19 bp, Mus musculus
  siRNA target sequence for Cpn1 (NM_030703.1,885-903).
gggctgtggtggccaatta

SEQ ID NO: 580090 - DNA, 19 bp, Mus musculus
  siRNA target sequence for Cpn1 (NM_030703.1,896-914).
gccaattacccatatgaca

SEQ ID NO: 580091 - DNA, 19 bp, Mus musculus
  siRNA target sequence for Cpn1 (NM_030703.1,897-915).
ccaattacccatatgacaa

SEQ ID NO: 580092 - DNA, 19 bp, Mus musculus
  siRNA target sequence for Cpn1 (NM_030703.1,916-934).
gtcacttgagcataggttt

SEQ ID NO: 580093 - DNA, 19 bp, Mus musculus
  siRNA target sequence for Cpn1 (NM_030703.1,941-959).
ccccatcgcacctccaatt

SEQ ID NO: 580094 - DNA, 19 bp, Mus musculus
  siRNA target sequence for Cpn1 (NM_030703.1,1039-1057).
gaactgtggggactacttt

SEQ ID NO: 580095 - DNA, 19 bp, Mus musculus
  siRNA target sequence for Cpn1 (NM_030703.1,1098-1116).
gcaagggaatgcaagactt

SEQ ID NO: 580096 - DNA, 19 bp, Mus musculus
  siRNA target sequence for Cpn1 (NM_030703.1,1209-1227).
gtaaccgggaagccttaat

SEQ ID NO: 580097 - DNA, 19 bp, Mus musculus
  siRNA target sequence for Cpn1 (NM_030703.1,1333-1351).
cgtcacttcaggtgaacat

SEQ ID NO: 580098 - DNA, 19 bp, Mus musculus
  siRNA target sequence for Cpn1 (NM_030703.1,1343-1361).
ggtgaacatggggattatt

SEQ ID NO: 580099 - DNA, 19 bp, Mus musculus
  siRNA target sequence for Cpn1 (NM_030703.1,1410-1428).
ggtacgaccccaaaacagt

SEQ ID NO: 580100 - DNA, 19 bp, Mus musculus
  siRNA target sequence for Cpn1 (NM_030703.1,1567-1585).
gaaagacccagcaacgaaa

SEQ ID NO: 580101 - DNA, 19 bp, Mus musculus
  siRNA target sequence for Cpxm1 (NM_019696.1,465-483).
caccgaggacggctcaata

SEQ ID NO: 580102 - DNA, 19 bp, Mus musculus
  siRNA target sequence for Cpxm1 (NM_019696.1,469-487).
gaggacggctcaatatcca

SEQ ID NO: 580103 - DNA, 19 bp, Mus musculus
  siRNA target sequence for Cpxm1 (NM_019696.1,500-518).
ggacggtgacctgtatgat

SEQ ID NO: 580104 - DNA, 19 bp, Mus musculus
  siRNA target sequence for Cpxm1 (NM_019696.1,526-544).
ggtgcgctgagcaacaaga

SEQ ID NO: 580105 - DNA, 19 bp, Mus musculus
  siRNA target sequence for Cpxm1 (NM_019696.1,581-599).
cgtccgcttcgcaggaatt

SEQ ID NO: 580106 - DNA, 19 bp, Mus musculus
  siRNA target sequence for Cpxm1 (NM_019696.1,584-602).
ccgcttcgcaggaattgtt

SEQ ID NO: 580107 - DNA, 19 bp, Mus musculus
  siRNA target sequence for Cpxm1 (NM_019696.1,585-603).
cgcttcgcaggaattgtta

SEQ ID NO: 580108 - DNA, 19 bp, Mus musculus
  siRNA target sequence for Cpxm1 (NM_019696.1,587-605).
cttcgcaggaattgttaca

SEQ ID NO: 580109 - DNA, 19 bp, Mus musculus
  siRNA target sequence for Cpxm1 (NM_019696.1,600-618).
gttacacagggcagaaact

SEQ ID NO: 580110 - DNA, 19 bp, Mus musculus
  siRNA target sequence for Cpxm1 (NM_019696.1,700-718).
gtactggaatggacatagt

SEQ ID NO: 580111 - DNA, 19 bp, Mus musculus
  siRNA target sequence for Cpxm1 (NM_019696.1,772-790).
ctcaggtggctcgattcat

SEQ ID NO: 580112 - DNA, 19 bp, Mus musculus
  siRNA target sequence for Cpxm1 (NM_019696.1,900-918).
ctgggatcttcgaactctt

SEQ ID NO: 580113 - DNA, 19 bp, Mus musculus
  siRNA target sequence for Cpxm1 (NM_019696.1,920-938).
ggacttccggcatcacaat

SEQ ID NO: 580114 - DNA, 19 bp, Mus musculus
  siRNA target sequence for Cpxm1 (NM_019696.1,921-939).
gacttccggcatcacaatt

SEQ ID NO: 580115 - DNA, 19 bp, Mus musculus
  siRNA target sequence for Cpxm1 (NM_019696.1,923-941).
cttccggcatcacaattat

SEQ ID NO: 580116 - DNA, 19 bp, Mus musculus
  siRNA target sequence for Cpxm1 (NM_019696.1,926-944).
ccggcatcacaattataaa

SEQ ID NO: 580117 - DNA, 19 bp, Mus musculus
  siRNA target sequence for Cpxm1 (NM_019696.1,935-953).
caattataaagctatgaga

SEQ ID NO: 580118 - DNA, 19 bp, Mus musculus
  siRNA target sequence for Cpxm1 (NM_019696.1,1211-1229).
cactgagacacgaatccat

SEQ ID NO: 580119 - DNA, 19 bp, Mus musculus
  siRNA target sequence for Cpxm1 (NM_019696.1,1215-1233).
gagacacgaatccatctat

SEQ ID NO: 580120 - DNA, 19 bp, Mus musculus
  siRNA target sequence for Cpxm1 (NM_019696.1,1331-1349).
ccttaaccacaattttgct

SEQ ID NO: 580121 - DNA, 19 bp, Mus musculus
  siRNA target sequence for Cpxm1 (NM_019696.1,1425-1443).
ctgcctacctactatacat

SEQ ID NO: 580122 - DNA, 19 bp, Mus musculus
  siRNA target sequence for Cpxm1 (NM_019696.1,1539-1557).
cttgtggtgtcctatcctt

SEQ ID NO: 580123 - DNA, 19 bp, Mus musculus
  siRNA target sequence for Cpxm1 (NM_019696.1,1595-1613).
cactcccacaccagatgat

SEQ ID NO: 580124 - DNA, 19 bp, Mus musculus
  siRNA target sequence for Cpxm1 (NM_019696.1,1638-1656).
gtctatgctggcacgaata

SEQ ID NO: 580125 - DNA, 19 bp, Mus musculus
  siRNA target sequence for Cpxm1 (NM_019696.1,1673-1691).
cgaccgccgaccttgtcat

SEQ ID NO: 580126 - DNA, 19 bp, Mus musculus
  siRNA target sequence for Cpxm1 (NM_019696.1,1709-1727).
gcatggcaacgtcatcaat

SEQ ID NO: 580127 - DNA, 19 bp, Mus musculus
  siRNA target sequence for Cpxm1 (NM_019696.1,1775-1793).
cctacacaccaattgcttt

SEQ ID NO: 580128 - DNA, 19 bp, Mus musculus
  siRNA target sequence for Cpxm1 (NM_019696.1,1895-1913).
ggtgcgcatgggcattact

SEQ ID NO: 580129 - DNA, 19 bp, Mus musculus
  siRNA target sequence for Cpxm1 (NM_019696.1,1976-1994).
cattaaccacgatgttaca

SEQ ID NO: 580130 - DNA, 19 bp, Mus musculus
  siRNA target sequence for Cpxm2 (NM_018867.3,418-436).
caagagggagaagttagtt

SEQ ID NO: 580131 - DNA, 19 bp, Mus musculus
  siRNA target sequence for Cpxm2 (NM_018867.3,449-467).
ccaccaggtaaaaatagca

SEQ ID NO: 580132 - DNA, 19 bp, Mus musculus
  siRNA target sequence for Cpxm2 (NM_018867.3,450-468).
caccaggtaaaaatagcaa

SEQ ID NO: 580133 - DNA, 19 bp, Mus musculus
  siRNA target sequence for Cpxm2 (NM_018867.3,483-501).
gaagcaagaatcttgagaa

SEQ ID NO: 580134 - DNA, 19 bp, Mus musculus
  siRNA target sequence for Cpxm2 (NM_018867.3,564-582).
ctcttggtctggaaacatt

SEQ ID NO: 580135 - DNA, 19 bp, Mus musculus
  siRNA target sequence for Cpxm2 (NM_018867.3,569-587).
ggtctggaaacattaaaaa

SEQ ID NO: 580136 - DNA, 19 bp, Mus musculus
  siRNA target sequence for Cpxm2 (NM_018867.3,661-679).
ccaggcaggcattaatgaa

SEQ ID NO: 580137 - DNA, 19 bp, Mus musculus
  siRNA target sequence for Cpxm2 (NM_018867.3,664-682).
ggcaggcattaatgaaaat

SEQ ID NO: 580138 - DNA, 19 bp, Mus musculus
  siRNA target sequence for Cpxm2 (NM_018867.3,811-829).
ctgggtgacatcctataaa

SEQ ID NO: 580139 - DNA, 19 bp, Mus musculus
  siRNA target sequence for Cpxm2 (NM_018867.3,813-831).
gggtgacatcctataaagt

SEQ ID NO: 580140 - DNA, 19 bp, Mus musculus
  siRNA target sequence for Cpxm2 (NM_018867.3,875-893).
ggatctggcgacatgatat

SEQ ID NO: 580141 - DNA, 19 bp, Mus musculus
  siRNA target sequence for Cpxm2 (NM_018867.3,975-993).
ctcagtcctggtttgataa

SEQ ID NO: 580142 - DNA, 19 bp, Mus musculus
  siRNA target sequence for Cpxm2 (NM_018867.3,1029-1047).
gcccactgccggatcctaa

SEQ ID NO: 580143 - DNA, 19 bp, Mus musculus
  siRNA target sequence for Cpxm2 (NM_018867.3,1030-1048).
cccactgccggatcctaat

SEQ ID NO: 580144 - DNA, 19 bp, Mus musculus
  siRNA target sequence for Cpxm2 (NM_018867.3,1031-1049).
ccactgccggatcctaata

SEQ ID NO: 580145 - DNA, 19 bp, Mus musculus
  siRNA target sequence for Cpxm2 (NM_018867.3,1032-1050).
cactgccggatcctaataa

SEQ ID NO: 580146 - DNA, 19 bp, Mus musculus
  siRNA target sequence for Cpxm2 (NM_018867.3,1034-1052).
ctgccggatcctaataact

SEQ ID NO: 580147 - DNA, 19 bp, Mus musculus
  siRNA target sequence for Cpxm2 (NM_018867.3,1036-1054).
gccggatcctaataactat

SEQ ID NO: 580148 - DNA, 19 bp, Mus musculus
  siRNA target sequence for Cpxm2 (NM_018867.3,1037-1055).
ccggatcctaataactatt

SEQ ID NO: 580149 - DNA, 19 bp, Mus musculus
  siRNA target sequence for Cpxm2 (NM_018867.3,1039-1057).
ggatcctaataactattat

SEQ ID NO: 580150 - DNA, 19 bp, Mus musculus
  siRNA target sequence for Cpxm2 (NM_018867.3,1083-1101).
cggatgacctggattttaa

SEQ ID NO: 580151 - DNA, 19 bp, Mus musculus
  siRNA target sequence for Cpxm2 (NM_018867.3,1102-1120).
gcaccacaactataaggaa

SEQ ID NO: 580152 - DNA, 19 bp, Mus musculus
  siRNA target sequence for Cpxm2 (NM_018867.3,1103-1121).
caccacaactataaggaaa

SEQ ID NO: 580153 - DNA, 19 bp, Mus musculus
  siRNA target sequence for Cpxm2 (NM_018867.3,1148-1166).
gaaatgtgccccaatatta

SEQ ID NO: 580154 - DNA, 19 bp, Mus musculus
  siRNA target sequence for Cpxm2 (NM_018867.3,1193-1211).
caccagggcctgaaattgt

SEQ ID NO: 580155 - DNA, 19 bp, Mus musculus
  siRNA target sequence for Cpxm2 (NM_018867.3,1195-1213).
ccagggcctgaaattgtat

SEQ ID NO: 580156 - DNA, 19 bp, Mus musculus
  siRNA target sequence for Cpxm2 (NM_018867.3,1390-1408).
gactcgaatccacattcta

SEQ ID NO: 580157 - DNA, 19 bp, Mus musculus
  siRNA target sequence for Cpxm2 (NM_018867.3,1490-1508).
catgatggcatcgatatca

SEQ ID NO: 580158 - DNA, 19 bp, Mus musculus
  siRNA target sequence for Cpxm2 (NM_018867.3,1496-1514).
ggcatcgatatcaacaaca

SEQ ID NO: 580159 - DNA, 19 bp, Mus musculus
  siRNA target sequence for Cpxm2 (NM_018867.3,1501-1519).
cgatatcaacaacaacttt

SEQ ID NO: 580160 - DNA, 19 bp, Mus musculus
  siRNA target sequence for Cpxm2 (NM_018867.3,1510-1528).
caacaactttccggattta

SEQ ID NO: 580161 - DNA, 19 bp, Mus musculus
  siRNA target sequence for Cpxm2 (NM_018867.3,1768-1786).
caccccaacacctgatgat

SEQ ID NO: 580162 - DNA, 19 bp, Mus musculus
  siRNA target sequence for Cpxm2 (NM_018867.3,1773-1791).
caacacctgatgatcatgt

SEQ ID NO: 580163 - DNA, 19 bp, Mus musculus
  siRNA target sequence for Cpxm2 (NM_018867.3,1796-1814).
cgctggctggcgtattcct

SEQ ID NO: 580164 - DNA, 19 bp, Mus musculus
  siRNA target sequence for Cpxm2 (NM_018867.3,1797-1815).
gctggctggcgtattccta

SEQ ID NO: 580165 - DNA, 19 bp, Mus musculus
  siRNA target sequence for Cpxm2 (NM_018867.3,1856-1874).
gtgtgccacacggaagatt

SEQ ID NO: 580166 - DNA, 19 bp, Mus musculus
  siRNA target sequence for Cpxm2 (NM_018867.3,1858-1876).
gtgccacacggaagatttt

SEQ ID NO: 580167 - DNA, 19 bp, Mus musculus
  siRNA target sequence for Cpxm2 (NM_018867.3,1860-1878).
gccacacggaagattttca

SEQ ID NO: 580168 - DNA, 19 bp, Mus musculus
  siRNA target sequence for Cpxm2 (NM_018867.3,1862-1880).
cacacggaagattttcaga

SEQ ID NO: 580169 - DNA, 19 bp, Mus musculus
  siRNA target sequence for Cpxm2 (NM_018867.3,1917-1935).
cagtggctggaagtctaaa

SEQ ID NO: 580170 - DNA, 19 bp, Mus musculus
  siRNA target sequence for Cpxm2 (NM_018867.3,1921-1939).
ggctggaagtctaaacgat

SEQ ID NO: 580171 - DNA, 19 bp, Mus musculus
  siRNA target sequence for Cpxm2 (NM_018867.3,1922-1940).
gctggaagtctaaacgatt

SEQ ID NO: 580172 - DNA, 19 bp, Mus musculus
  siRNA target sequence for Cpxm2 (NM_018867.3,1923-1941).
ctggaagtctaaacgattt

SEQ ID NO: 580173 - DNA, 19 bp, Mus musculus
  siRNA target sequence for Cpxm2 (NM_018867.3,1925-1943).
ggaagtctaaacgatttca

SEQ ID NO: 580174 - DNA, 19 bp, Mus musculus
  siRNA target sequence for Cpxm2 (NM_018867.3,1978-1996).
ctacgtgggctgtgataaa

SEQ ID NO: 580175 - DNA, 19 bp, Mus musculus
  siRNA target sequence for Cpxm2 (NM_018867.3,2018-2036).
ccggaggaatgggagaata

SEQ ID NO: 580176 - DNA, 19 bp, Mus musculus
  siRNA target sequence for Cpxm2 (NM_018867.3,2039-2057).
cgggagtctctgattgtgt

SEQ ID NO: 580177 - DNA, 19 bp, Mus musculus
  siRNA target sequence for Cpxm2 (NM_018867.3,2068-2086).
ggttcatcgaggcatcaaa

SEQ ID NO: 580178 - DNA, 19 bp, Mus musculus
  siRNA target sequence for Cpxm2 (NM_018867.3,2311-2329).
gaccaacctggctaggata

SEQ ID NO: 580179 - DNA, 19 bp, Mus musculus
  siRNA target sequence for Cpxm2 (NM_018867.3,2314-2332).
caacctggctaggataaga

SEQ ID NO: 580180 - DNA, 19 bp, Mus musculus
  siRNA target sequence for Cpxm2 (NM_018867.3,2321-2339).
gctaggataagagaaatta

SEQ ID NO: 580181 - DNA, 19 bp, Mus musculus
  siRNA target sequence for Cpxm2 (NM_018867.3,2322-2340).
ctaggataagagaaattat

SEQ ID NO: 580182 - DNA, 19 bp, Mus musculus
  siRNA target sequence for D11Bwg0434e (NM_173742.1,170-188).
gcgcctggggagtgatcat

SEQ ID NO: 580183 - DNA, 19 bp, Mus musculus
  siRNA target sequence for D11Bwg0434e (NM_173742.1,176-194).
ggggagtgatcatgttgat

SEQ ID NO: 580184 - DNA, 19 bp, Mus musculus
  siRNA target sequence for D11Bwg0434e (NM_173742.1,198-216).
gctcgggatatttttcaat

SEQ ID NO: 580185 - DNA, 19 bp, Mus musculus
  siRNA target sequence for D11Bwg0434e (NM_173742.1,243-261).
cgttcccttcacagagaaa

SEQ ID NO: 580186 - DNA, 19 bp, Mus musculus
  siRNA target sequence for D11Bwg0434e (NM_173742.1,270-288).
gaacggtcctcagaacata

SEQ ID NO: 580187 - DNA, 19 bp, Mus musculus
  siRNA target sequence for D11Bwg0434e (NM_173742.1,304-322).
caagtcagctacaactgtt

SEQ ID NO: 580188 - DNA, 19 bp, Mus musculus
  siRNA target sequence for D11Bwg0434e (NM_173742.1,307-325).
gtcagctacaactgtttca

SEQ ID NO: 580189 - DNA, 19 bp, Mus musculus
  siRNA target sequence for D430020F16 (NM_172902.1,363-381).
gagctcccactcaatctga

SEQ ID NO: 580190 - DNA, 19 bp, Mus musculus
  siRNA target sequence for D430020F16 (NM_172902.1,374-392).
caatctgactgaagaagat

SEQ ID NO: 580191 - DNA, 19 bp, Mus musculus
  siRNA target sequence for D430020F16 (NM_172902.1,471-489).
gatctgagcaaacttagtt

SEQ ID NO: 580192 - DNA, 19 bp, Mus musculus
  siRNA target sequence for D430020F16 (NM_172902.1,474-492).
ctgagcaaacttagttcta

SEQ ID NO: 580193 - DNA, 19 bp, Mus musculus
  siRNA target sequence for D430020F16 (NM_172902.1,518-536).
ggaacttgcacagtatgat

SEQ ID NO: 580194 - DNA, 19 bp, Mus musculus
  siRNA target sequence for D430020F16 (NM_172902.1,569-587).
ggaactggaacccaaatgt

SEQ ID NO: 580195 - DNA, 19 bp, Mus musculus
  siRNA target sequence for D430020F16 (NM_172902.1,784-802).
ctgcaacaaatgtgaatca

SEQ ID NO: 580196 - DNA, 19 bp, Mus musculus
  siRNA target sequence for D430020F16 (NM_172902.1,797-815).
gaatcaaagcctacaacaa

SEQ ID NO: 580197 - DNA, 19 bp, Mus musculus
  siRNA target sequence for D430020F16 (NM_172902.1,830-848).
cgattcttctggacatgat

SEQ ID NO: 580198 - DNA, 19 bp, Mus musculus
  siRNA target sequence for D430020F16 (NM_172902.1,831-849).
gattcttctggacatgata

SEQ ID NO: 580199 - DNA, 19 bp, Mus musculus
  siRNA target sequence for D430020F16 (NM_172902.1,857-875).
cattcaggctcccttagaa

SEQ ID NO: 580200 - DNA, 19 bp, Mus musculus
  siRNA target sequence for D430020F16 (NM_172902.1,1010-1028).
cgatcctcatctttatata

SEQ ID NO: 580201 - DNA, 19 bp, Mus musculus
  siRNA target sequence for D430020F16 (NM_172902.1,1064-1082).
caagacaatggcatttcct

SEQ ID NO: 580202 - DNA, 19 bp, Mus musculus
  siRNA target sequence for D430020F16 (NM_172902.1,1182-1200).
ctccatccaagtgatgtta

SEQ ID NO: 580203 - DNA, 19 bp, Mus musculus
  siRNA target sequence for D430020F16 (NM_172902.1,1184-1202).
ccatccaagtgatgttata

SEQ ID NO: 580204 - DNA, 19 bp, Mus musculus
  siRNA target sequence for D430020F16 (NM_172902.1,1185-1203).
catccaagtgatgttataa

SEQ ID NO: 580205 - DNA, 19 bp, Mus musculus
  siRNA target sequence for D430020F16 (NM_172902.1,1241-1259).
gcaaggcagcatttccaat

SEQ ID NO: 580206 - DNA, 19 bp, Mus musculus
  siRNA target sequence for D430020F16 (NM_172902.1,1242-1260).
caaggcagcatttccaatt

SEQ ID NO: 580207 - DNA, 19 bp, Mus musculus
  siRNA target sequence for D430020F16 (NM_172902.1,1271-1289).
ccactccaagtttgaatca

SEQ ID NO: 580208 - DNA, 19 bp, Mus musculus
  siRNA target sequence for D430020F16 (NM_172902.1,1307-1325).
catccaagtgcgtgagttt

SEQ ID NO: 580209 - DNA, 19 bp, Mus musculus
  siRNA target sequence for D430020F16 (NM_172902.1,1317-1335).
cgtgagtttgagtatgact

SEQ ID NO: 580210 - DNA, 19 bp, Mus musculus
  siRNA target sequence for D430020F16 (NM_172902.1,1341-1359).
gtcaatgccgacgtgaata

SEQ ID NO: 580211 - DNA, 19 bp, Mus musculus
  siRNA target sequence for D430020F16 (NM_172902.1,1408-1426).
ccgctgtcccttatcactt

SEQ ID NO: 580212 - DNA, 19 bp, Mus musculus
  siRNA target sequence for D430020F16 (NM_172902.1,1413-1431).
gtcccttatcacttcaaca

SEQ ID NO: 580213 - DNA, 19 bp, Mus musculus
  siRNA target sequence for D430020F16 (NM_172902.1,1416-1434).
ccttatcacttcaacatca

SEQ ID NO: 580214 - DNA, 19 bp, Mus musculus
  siRNA target sequence for D430020F16 (NM_172902.1,1449-1467).
cccaacagccagttcaact

SEQ ID NO: 580215 - DNA, 19 bp, Mus musculus
  siRNA target sequence for D430020F16 (NM_172902.1,1450-1468).
ccaacagccagttcaacta

SEQ ID NO: 580216 - DNA, 19 bp, Mus musculus
  siRNA target sequence for D430020F16 (NM_172902.1,1475-1493).
gcagccaaccctgtattct

SEQ ID NO: 580217 - DNA, 19 bp, Mus musculus
  siRNA target sequence for D430020F16 (NM_172902.1,1530-1548).
cggacaggctctgacattt

SEQ ID NO: 580218 - DNA, 19 bp, Mus musculus
  siRNA target sequence for D430020F16 (NM_172902.1,1609-1627).
gctactacacccttacctt

SEQ ID NO: 580219 - DNA, 19 bp, Mus musculus
  siRNA target sequence for D430020F16 (NM_172902.1,1610-1628).
ctactacacccttaccttt

SEQ ID NO: 580220 - DNA, 19 bp, Mus musculus
  siRNA target sequence for D430020F16 (NM_172902.1,1630-1648).
ctgttaccttccctcataa

SEQ ID NO: 580221 - DNA, 19 bp, Mus musculus
  siRNA target sequence for D430020F16 (NM_172902.1,1674-1692).
cactatccctacacatatt

SEQ ID NO: 580222 - DNA, 19 bp, Mus musculus
  siRNA target sequence for D430020F16 (NM_172902.1,1734-1752).
gaccacagggaaatctact

SEQ ID NO: 580223 - DNA, 19 bp, Mus musculus
  siRNA target sequence for D430020F16 (NM_172902.1,1748-1766).
ctacttccgacatgatgtt

SEQ ID NO: 580224 - DNA, 19 bp, Mus musculus
  siRNA target sequence for D430020F16 (NM_172902.1,1792-1810).
catgtccgctggtgacaat

SEQ ID NO: 580225 - DNA, 19 bp, Mus musculus
  siRNA target sequence for D430020F16 (NM_172902.1,1815-1833).
gcctttcctgaatctaaca

SEQ ID NO: 580226 - DNA, 19 bp, Mus musculus
  siRNA target sequence for D430020F16 (NM_172902.1,1853-1871).
gttccgctgtcgtccatat

SEQ ID NO: 580227 - DNA, 19 bp, Mus musculus
  siRNA target sequence for D430020F16 (NM_172902.1,1978-1996).
gggaaaacttcgtgttcaa

SEQ ID NO: 580228 - DNA, 19 bp, Mus musculus
  siRNA target sequence for D430020F16 (NM_172902.1,2111-2129).
catctaccatgctaaaggt

SEQ ID NO: 580229 - DNA, 19 bp, Mus musculus
  siRNA target sequence for D430020F16 (NM_172902.1,2122-2140).
ctaaaggtctcctccatta

SEQ ID NO: 580230 - DNA, 19 bp, Mus musculus
  siRNA target sequence for D430020F16 (NM_172902.1,2127-2145).
ggtctcctccattacctaa

SEQ ID NO: 580231 - DNA, 19 bp, Mus musculus
  siRNA target sequence for D430020F16 (NM_172902.1,2158-2176).
ggggacctgtggtaagtca

SEQ ID NO: 580232 - DNA, 19 bp, Mus musculus
  siRNA target sequence for 4732460C16Rik (NM_177040.2,35-53).
gcccacggccgtacaaatt

SEQ ID NO: 580233 - DNA, 19 bp, Mus musculus
  siRNA target sequence for 4732460C16Rik (NM_177040.2,36-54).
cccacggccgtacaaatta

SEQ ID NO: 580234 - DNA, 19 bp, Mus musculus
  siRNA target sequence for 4732460C16Rik (NM_177040.2,37-55).
ccacggccgtacaaattaa

SEQ ID NO: 580235 - DNA, 19 bp, Mus musculus
  siRNA target sequence for 4732460C16Rik (NM_177040.2,56-74).
cccatcaggtcgtctgtat

SEQ ID NO: 580236 - DNA, 19 bp, Mus musculus
  siRNA target sequence for 4732460C16Rik (NM_177040.2,58-76).
catcaggtcgtctgtatca

SEQ ID NO: 580237 - DNA, 19 bp, Mus musculus
  siRNA target sequence for 4732460C16Rik (NM_177040.2,61-79).
caggtcgtctgtatcaaca

SEQ ID NO: 580238 - DNA, 19 bp, Mus musculus
  siRNA target sequence for 4732460C16Rik (NM_177040.2,66-84).
cgtctgtatcaacaacata

SEQ ID NO: 580239 - DNA, 19 bp, Mus musculus
  siRNA target sequence for 4732460C16Rik (NM_177040.2,87-105).
cttccagcgaaaatcagtt

SEQ ID NO: 580240 - DNA, 19 bp, Mus musculus
  siRNA target sequence for 4732460C16Rik (NM_177040.2,170-188).
gtaaacagtgtagaatata

SEQ ID NO: 580241 - DNA, 19 bp, Mus musculus
  siRNA target sequence for 4732460C16Rik (NM_177040.2,191-209).
gagtccggatcaatgactt

SEQ ID NO: 580242 - DNA, 19 bp, Mus musculus
  siRNA target sequence for 4732460C16Rik (NM_177040.2,210-228).
ggaggccgcttttatttat

SEQ ID NO: 580243 - DNA, 19 bp, Mus musculus
  siRNA target sequence for 4732460C16Rik (NM_177040.2,211-229).
gaggccgcttttatttata

SEQ ID NO: 580244 - DNA, 19 bp, Mus musculus
  siRNA target sequence for 4732460C16Rik (NM_177040.2,213-231).
ggccgcttttatttataat

SEQ ID NO: 580245 - DNA, 19 bp, Mus musculus
  siRNA target sequence for 4732460C16Rik (NM_177040.2,232-250).
gatccaaccttagaagttt

SEQ ID NO: 580246 - DNA, 19 bp, Mus musculus
  siRNA target sequence for 4732460C16Rik (NM_177040.2,236-254).
caaccttagaagtttgtca

SEQ ID NO: 580247 - DNA, 19 bp, Mus musculus
  siRNA target sequence for 4732460C16Rik (NM_177040.2,244-262).
gaagtttgtcacagtgaat

SEQ ID NO: 580248 - DNA, 19 bp, Mus musculus
  siRNA target sequence for 4732460C16Rik (NM_177040.2,374-392).
ggaaacatgtcgatgagtt

SEQ ID NO: 580249 - DNA, 19 bp, Mus musculus
  siRNA target sequence for 4732460C16Rik (NM_177040.2,501-519).
cttctcttgcgggtatcaa

SEQ ID NO: 580250 - DNA, 19 bp, Mus musculus
  siRNA target sequence for 4732460C16Rik (NM_177040.2,504-522).
ctcttgcgggtatcaaaat

SEQ ID NO: 580251 - DNA, 19 bp, Mus musculus
  siRNA target sequence for 4732460C16Rik (NM_177040.2,510-528).
cgggtatcaaaattctaca

SEQ ID NO: 580252 - DNA, 19 bp, Mus musculus
  siRNA target sequence for 4732460C16Rik (NM_177040.2,541-559).
ccgtgtgtcgattcatact

SEQ ID NO: 580253 - DNA, 19 bp, Mus musculus
  siRNA target sequence for 4732460C16Rik (NM_177040.2,543-561).
gtgtgtcgattcatactct

SEQ ID NO: 580254 - DNA, 19 bp, Mus musculus
  siRNA target sequence for 4732460C16Rik (NM_177040.2,611-629).
ccgtgtccaatggagattt

SEQ ID NO: 580255 - DNA, 19 bp, Mus musculus
  siRNA target sequence for 4732460C16Rik (NM_177040.2,638-656).
ccgtgtatacccatgacat

SEQ ID NO: 580256 - DNA, 19 bp, Mus musculus
  siRNA target sequence for 4732460C16Rik (NM_177040.2,659-677).
ggaagaagaccttccatta

SEQ ID NO: 580257 - DNA, 19 bp, Mus musculus
  siRNA target sequence for 4732460C16Rik (NM_177040.2,660-678).
gaagaagaccttccattat

SEQ ID NO: 580258 - DNA, 19 bp, Mus musculus
  siRNA target sequence for 4732460C16Rik (NM_177040.2,672-690).
ccattatatgcttactatt

SEQ ID NO: 580259 - DNA, 19 bp, Mus musculus
  siRNA target sequence for 4732460C16Rik (NM_177040.2,714-732).
cttggccattggaccattt

SEQ ID NO: 580260 - DNA, 19 bp, Mus musculus
  siRNA target sequence for 4732460C16Rik (NM_177040.2,717-735).
ggccattggaccatttgaa

SEQ ID NO: 580261 - DNA, 19 bp, Mus musculus
  siRNA target sequence for 4732460C16Rik (NM_177040.2,718-736).
gccattggaccatttgaaa

SEQ ID NO: 580262 - DNA, 19 bp, Mus musculus
  siRNA target sequence for 4732460C16Rik (NM_177040.2,719-737).
ccattggaccatttgaaat

SEQ ID NO: 580263 - DNA, 19 bp, Mus musculus
  siRNA target sequence for 4732460C16Rik (NM_177040.2,720-738).
cattggaccatttgaaata

SEQ ID NO: 580264 - DNA, 19 bp, Mus musculus
  siRNA target sequence for 4732460C16Rik (NM_177040.2,757-775).
catgaggttacccattttt

SEQ ID NO: 580265 - DNA, 19 bp, Mus musculus
  siRNA target sequence for 4732460C16Rik (NM_177040.2,784-802).
caacttcttccgttactta

SEQ ID NO: 580266 - DNA, 19 bp, Mus musculus
  siRNA target sequence for 4732460C16Rik (NM_177040.2,793-811).
ccgttacttaaacatacta

SEQ ID NO: 580267 - DNA, 19 bp, Mus musculus
  siRNA target sequence for 4732460C16Rik (NM_177040.2,815-833).
catacattcacgaagtttt

SEQ ID NO: 580268 - DNA, 19 bp, Mus musculus
  siRNA target sequence for 4732460C16Rik (NM_177040.2,819-837).
cattcacgaagtttttgaa

SEQ ID NO: 580269 - DNA, 19 bp, Mus musculus
  siRNA target sequence for 4732460C16Rik (NM_177040.2,868-886).
ccgtactcctgttttaaga

SEQ ID NO: 580270 - DNA, 19 bp, Mus musculus
  siRNA target sequence for 4732460C16Rik (NM_177040.2,894-912).
cattgatgaggcatatgtt

SEQ ID NO: 580271 - DNA, 19 bp, Mus musculus
  siRNA target sequence for 4732460C16Rik (NM_177040.2,919-937).
gccgcttacgcttctatga

SEQ ID NO: 580272 - DNA, 19 bp, Mus musculus
  siRNA target sequence for 4732460C16Rik (NM_177040.2,928-946).
gcttctatgagcattttca

SEQ ID NO: 580273 - DNA, 19 bp, Mus musculus
  siRNA target sequence for 4732460C16Rik (NM_177040.2,939-957).
cattttcagcacaaacctt

SEQ ID NO: 580274 - DNA, 19 bp, Mus musculus
  siRNA target sequence for 4732460C16Rik (NM_177040.2,960-978).
gcacagcgccatgattata

SEQ ID NO: 580275 - DNA, 19 bp, Mus musculus
  siRNA target sequence for 4732460C16Rik (NM_177040.2,1005-1023).
cttggcacaggctttagca

SEQ ID NO: 580276 - DNA, 19 bp, Mus musculus
  siRNA target sequence for 4732460C16Rik (NM_177040.2,1027-1045).
cagttcttcggatgtttca

SEQ ID NO: 580277 - DNA, 19 bp, Mus musculus
  siRNA target sequence for 4732460C16Rik (NM_177040.2,1029-1047).
gttcttcggatgtttcata

SEQ ID NO: 580278 - DNA, 19 bp, Mus musculus
  siRNA target sequence for 4732460C16Rik (NM_177040.2,1053-1071).
gatgtcttggtctgatgaa

SEQ ID NO: 580279 - DNA, 19 bp, Mus musculus
  siRNA target sequence for 4732460C16Rik (NM_177040.2,1083-1101).
gggaatttcaggctatatt

SEQ ID NO: 580280 - DNA, 19 bp, Mus musculus
  siRNA target sequence for 4732460C16Rik (NM_177040.2,1085-1103).
gaatttcaggctatattta

SEQ ID NO: 580281 - DNA, 19 bp, Mus musculus
  siRNA target sequence for 4732460C16Rik (NM_177040.2,1124-1142).
cattcggagtcaatgagta

SEQ ID NO: 580282 - DNA, 19 bp, Mus musculus
  siRNA target sequence for 4732460C16Rik (NM_177040.2,1138-1156).
gagtaccaccattggatta

SEQ ID NO: 580283 - DNA, 19 bp, Mus musculus
  siRNA target sequence for 4732460C16Rik (NM_177040.2,1140-1158).
gtaccaccattggattaaa

SEQ ID NO: 580284 - DNA, 19 bp, Mus musculus
  siRNA target sequence for 4732460C16Rik (NM_177040.2,1177-1195).
gtggcgtatgaactgaaaa

SEQ ID NO: 580285 - DNA, 19 bp, Mus musculus
  siRNA target sequence for 4732460C16Rik (NM_177040.2,1209-1227).
gcttcatcccatatttggt

SEQ ID NO: 580286 - DNA, 19 bp, Mus musculus
  siRNA target sequence for 4732460C16Rik (NM_177040.2,1263-1281).
ccacttttccataaagcat

SEQ ID NO: 580287 - DNA, 19 bp, Mus musculus
  siRNA target sequence for 4732460C16Rik (NM_177040.2,1272-1290).
cataaagcatccacataca

SEQ ID NO: 580288 - DNA, 19 bp, Mus musculus
  siRNA target sequence for 4732460C16Rik (NM_177040.2,1291-1309).
ctgtcctgggagtactaca

SEQ ID NO: 580289 - DNA, 19 bp, Mus musculus
  siRNA target sequence for 4732460C16Rik (NM_177040.2,1298-1316).
gggagtactacactatgtt

SEQ ID NO: 580290 - DNA, 19 bp, Mus musculus
  siRNA target sequence for 4732460C16Rik (NM_177040.2,1308-1326).
cactatgttccagtgtaaa

SEQ ID NO: 580291 - DNA, 19 bp, Mus musculus
  siRNA target sequence for 4732460C16Rik (NM_177040.2,1332-1350).
cctcgtgatgagactgatt

SEQ ID NO: 580292 - DNA, 19 bp, Mus musculus
  siRNA target sequence for 4732460C16Rik (NM_177040.2,1335-1353).
cgtgatgagactgattgaa

SEQ ID NO: 580293 - DNA, 19 bp, Mus musculus
  siRNA target sequence for 4732460C16Rik (NM_177040.2,1345-1363).
ctgattgaaaacagaatca

SEQ ID NO: 580294 - DNA, 19 bp, Mus musculus
  siRNA target sequence for 4732460C16Rik (NM_177040.2,1380-1398).
gcaagttttcaataaacta

SEQ ID NO: 580295 - DNA, 19 bp, Mus musculus
  siRNA target sequence for 4732460C16Rik (NM_177040.2,1466-1484).
ccacttacgggtttttgaa

SEQ ID NO: 580296 - DNA, 19 bp, Mus musculus
  siRNA target sequence for 4732460C16Rik (NM_177040.2,1543-1561).
cagagtggagtggtaaagt

SEQ ID NO: 580297 - DNA, 19 bp, Mus musculus
  siRNA target sequence for 4732460C16Rik (NM_177040.2,1545-1563).
gagtggagtggtaaagttt

SEQ ID NO: 580298 - DNA, 19 bp, Mus musculus
  siRNA target sequence for 4732460C16Rik (NM_177040.2,1566-1584).
cggaagttttgcgtttaat

SEQ ID NO: 580299 - DNA, 19 bp, Mus musculus
  siRNA target sequence for 4732460C16Rik (NM_177040.2,1571-1589).
gttttgcgtttaatagaaa

SEQ ID NO: 580300 - DNA, 19 bp, Mus musculus
  siRNA target sequence for 4732460C16Rik (NM_177040.2,1609-1627).
gaaataaagcaagattaca

SEQ ID NO: 580301 - DNA, 19 bp, Mus musculus
  siRNA target sequence for 4732460C16Rik (NM_177040.2,1647-1665).
gtacgtgggacctcttaaa

SEQ ID NO: 580302 - DNA, 19 bp, Mus musculus
  siRNA target sequence for 4732460C16Rik (NM_177040.2,1651-1669).
gtgggacctcttaaagtga

SEQ ID NO: 580303 - DNA, 19 bp, Mus musculus
  siRNA target sequence for 4732460C16Rik (NM_177040.2,1668-1686).
gacagtgcaagagttagat

SEQ ID NO: 580304 - DNA, 19 bp, Mus musculus
  siRNA target sequence for 4732460C16Rik (NM_177040.2,1688-1706).
gatccttcaaccatacctt

SEQ ID NO: 580305 - DNA, 19 bp, Mus musculus
  siRNA target sequence for 4732460C16Rik (NM_177040.2,1695-1713).
caaccataccttgcaaatt

SEQ ID NO: 580306 - DNA, 19 bp, Mus musculus
  siRNA target sequence for 4732460C16Rik (NM_177040.2,1722-1740).
cagccttaaacatgacata

SEQ ID NO: 580307 - DNA, 19 bp, Mus musculus
  siRNA target sequence for 4732460C16Rik (NM_177040.2,1791-1809).
gaatggggaagaagttgat

SEQ ID NO: 580308 - DNA, 19 bp, Mus musculus
  siRNA target sequence for 4732460C16Rik (NM_177040.2,1796-1814).
gggaagaagttgatatgga

SEQ ID NO: 580309 - DNA, 19 bp, Mus musculus
  siRNA target sequence for Metap1 (NM_175224.2,117-135).
ctgctcgcaggaatgcttt

SEQ ID NO: 580310 - DNA, 19 bp, Mus musculus
  siRNA target sequence for Metap1 (NM_175224.2,119-137).
gctcgcaggaatgctttaa

SEQ ID NO: 580311 - DNA, 19 bp, Mus musculus
  siRNA target sequence for Metap1 (NM_175224.2,120-138).
ctcgcaggaatgctttaaa

SEQ ID NO: 580312 - DNA, 19 bp, Mus musculus
  siRNA target sequence for Metap1 (NM_175224.2,146-164).
gggccactcacaagttact

SEQ ID NO: 580313 - DNA, 19 bp, Mus musculus
  siRNA target sequence for Metap1 (NM_175224.2,147-165).
ggccactcacaagttacta

SEQ ID NO: 580314 - DNA, 19 bp, Mus musculus
  siRNA target sequence for Metap1 (NM_175224.2,149-167).
ccactcacaagttactaca

SEQ ID NO: 580315 - DNA, 19 bp, Mus musculus
  siRNA target sequence for Metap1 (NM_175224.2,150-168).
cactcacaagttactacat

SEQ ID NO: 580316 - DNA, 19 bp, Mus musculus
  siRNA target sequence for Metap1 (NM_175224.2,152-170).
ctcacaagttactacataa

SEQ ID NO: 580317 - DNA, 19 bp, Mus musculus
  siRNA target sequence for Metap1 (NM_175224.2,154-172).
cacaagttactacataaga

SEQ ID NO: 580318 - DNA, 19 bp, Mus musculus
  siRNA target sequence for Metap1 (NM_175224.2,156-174).
caagttactacataagaaa

SEQ ID NO: 580319 - DNA, 19 bp, Mus musculus
  siRNA target sequence for Metap1 (NM_175224.2,252-270).
ctatcggtacactggtaaa

SEQ ID NO: 580320 - DNA, 19 bp, Mus musculus
  siRNA target sequence for Metap1 (NM_175224.2,256-274).
cggtacactggtaaactca

SEQ ID NO: 580321 - DNA, 19 bp, Mus musculus
  siRNA target sequence for Metap1 (NM_175224.2,266-284).
gtaaactcaggccacatta

SEQ ID NO: 580322 - DNA, 19 bp, Mus musculus
  siRNA target sequence for Metap1 (NM_175224.2,301-319).
cggccagtgcccagttaca

SEQ ID NO: 580323 - DNA, 19 bp, Mus musculus
  siRNA target sequence for Metap1 (NM_175224.2,302-320).
ggccagtgcccagttacat

SEQ ID NO: 580324 - DNA, 19 bp, Mus musculus
  siRNA target sequence for Metap1 (NM_175224.2,303-321).
gccagtgcccagttacatt

SEQ ID NO: 580325 - DNA, 19 bp, Mus musculus
  siRNA target sequence for Metap1 (NM_175224.2,305-323).
cagtgcccagttacattca

SEQ ID NO: 580326 - DNA, 19 bp, Mus musculus
  siRNA target sequence for Metap1 (NM_175224.2,367-385).
gagcaggctcttaaaggta

SEQ ID NO: 580327 - DNA, 19 bp, Mus musculus
  siRNA target sequence for Metap1 (NM_175224.2,399-417).
gttactctcatctgaagat

SEQ ID NO: 580328 - DNA, 19 bp, Mus musculus
  siRNA target sequence for Metap1 (NM_175224.2,480-498).
gattaaagcgggtgtaact

SEQ ID NO: 580329 - DNA, 19 bp, Mus musculus
  siRNA target sequence for Metap1 (NM_175224.2,491-509).
gtgtaactactgaagagat

SEQ ID NO: 580330 - DNA, 19 bp, Mus musculus
  siRNA target sequence for Metap1 (NM_175224.2,510-528).
cgaccacgctgtacactta

SEQ ID NO: 580331 - DNA, 19 bp, Mus musculus
  siRNA target sequence for Metap1 (NM_175224.2,514-532).
cacgctgtacacttagcat

SEQ ID NO: 580332 - DNA, 19 bp, Mus musculus
  siRNA target sequence for Metap1 (NM_175224.2,523-541).
cacttagcatgcattgcaa

SEQ ID NO: 580333 - DNA, 19 bp, Mus musculus
  siRNA target sequence for Metap1 (NM_175224.2,533-551).
gcattgcaagaaattgcta

SEQ ID NO: 580334 - DNA, 19 bp, Mus musculus
  siRNA target sequence for Metap1 (NM_175224.2,557-575).
ctcccctgaattactataa

SEQ ID NO: 580335 - DNA, 19 bp, Mus musculus
  siRNA target sequence for Metap1 (NM_175224.2,590-608).
gttgtacctcagtgaatga

SEQ ID NO: 580336 - DNA, 19 bp, Mus musculus
  siRNA target sequence for Metap1 (NM_175224.2,670-688).
gacatcactctttatcgaa

SEQ ID NO: 580337 - DNA, 19 bp, Mus musculus
  siRNA target sequence for Metap1 (NM_175224.2,672-690).
catcactctttatcgaaat

SEQ ID NO: 580338 - DNA, 19 bp, Mus musculus
  siRNA target sequence for Metap1 (NM_175224.2,675-693).
cactctttatcgaaatggt

SEQ ID NO: 580339 - DNA, 19 bp, Mus musculus
  siRNA target sequence for Metap1 (NM_175224.2,691-709).
ggttaccatggggatctaa

SEQ ID NO: 580340 - DNA, 19 bp, Mus musculus
  siRNA target sequence for Metap1 (NM_175224.2,692-710).
gttaccatggggatctaaa

SEQ ID NO: 580341 - DNA, 19 bp, Mus musculus
  siRNA target sequence for Metap1 (NM_175224.2,697-715).
catggggatctaaatgaga

SEQ ID NO: 580342 - DNA, 19 bp, Mus musculus
  siRNA target sequence for Metap1 (NM_175224.2,804-822).
gcctggtgttcgatacaga

SEQ ID NO: 580343 - DNA, 19 bp, Mus musculus
  siRNA target sequence for Metap1 (NM_175224.2,843-861).
gaaacacgcccaagcaaat

SEQ ID NO: 580344 - DNA, 19 bp, Mus musculus
  siRNA target sequence for Metap1 (NM_175224.2,867-885).
ctcagttgttcgaagctat

SEQ ID NO: 580345 - DNA, 19 bp, Mus musculus
  siRNA target sequence for Metap1 (NM_175224.2,969-987).
gtcgggtcatgtgtttaca

SEQ ID NO: 580346 - DNA, 19 bp, Mus musculus
  siRNA target sequence for Metap1 (NM_175224.2,971-989).
cgggtcatgtgtttacaat

SEQ ID NO: 580347 - DNA, 19 bp, Mus musculus
  siRNA target sequence for Metap1 (NM_175224.2,1065-1083).
gaagcgatctgctcagttt

SEQ ID NO: 580348 - DNA, 19 bp, Mus musculus
  siRNA target sequence for Metap1 (NM_175224.2,1142-1160).
gctctcggcctcatttcat

SEQ ID NO: 580349 - DNA, 19 bp, Mus musculus
  siRNA target sequence for Metap1 (NM_175224.2,1153-1171).
catttcatgtcccagtttt

SEQ ID NO: 580350 - DNA, 19 bp, Mus musculus
  siRNA target sequence for Metap2 (NM_019648.2,624-642).
gaggcacatcggcaagtta

SEQ ID NO: 580351 - DNA, 19 bp, Mus musculus
  siRNA target sequence for Metap2 (NM_019648.2,628-646).
cacatcggcaagttaggaa

SEQ ID NO: 580352 - DNA, 19 bp, Mus musculus
  siRNA target sequence for Metap2 (NM_019648.2,630-648).
catcggcaagttaggaaat

SEQ ID NO: 580353 - DNA, 19 bp, Mus musculus
  siRNA target sequence for Metap2 (NM_019648.2,634-652).
ggcaagttaggaaatatgt

SEQ ID NO: 580354 - DNA, 19 bp, Mus musculus
  siRNA target sequence for Metap2 (NM_019648.2,907-925).
cttttaatcccaaatatga

SEQ ID NO: 580355 - DNA, 19 bp, Mus musculus
  siRNA target sequence for Metap2 (NM_019648.2,915-933).
cccaaatatgacatactat

SEQ ID NO: 580356 - DNA, 19 bp, Mus musculus
  siRNA target sequence for Metap2 (NM_019648.2,916-934).
ccaaatatgacatactatt

SEQ ID NO: 580357 - DNA, 19 bp, Mus musculus
  siRNA target sequence for Metap2 (NM_019648.2,942-960).
gtaaaggatgccactaata

SEQ ID NO: 580358 - DNA, 19 bp, Mus musculus
  siRNA target sequence for Metapl1 (NM_025633.1,78-96).
gtcttcgccactcaatcat

SEQ ID NO: 580359 - DNA, 19 bp, Mus musculus
  siRNA target sequence for Metapl1 (NM_025633.1,80-98).
cttcgccactcaatcatat

SEQ ID NO: 580360 - DNA, 19 bp, Mus musculus
  siRNA target sequence for Metapl1 (NM_025633.1,83-101).
cgccactcaatcatatcta

SEQ ID NO: 580361 - DNA, 19 bp, Mus musculus
  siRNA target sequence for Metapl1 (NM_025633.1,85-103).
ccactcaatcatatctact

SEQ ID NO: 580362 - DNA, 19 bp, Mus musculus
  siRNA target sequence for Metapl1 (NM_025633.1,111-129).
gcggtcaggcagtcaacaa

SEQ ID NO: 580363 - DNA, 19 bp, Mus musculus
  siRNA target sequence for Metapl1 (NM_025633.1,112-130).
cggtcaggcagtcaacaaa

SEQ ID NO: 580364 - DNA, 19 bp, Mus musculus
  siRNA target sequence for Metapl1 (NM_025633.1,114-132).
gtcaggcagtcaacaaaga

SEQ ID NO: 580365 - DNA, 19 bp, Mus musculus
  siRNA target sequence for Metapl1 (NM_025633.1,209-227).
ctgtccccaagcgcataaa

SEQ ID NO: 580366 - DNA, 19 bp, Mus musculus
  siRNA target sequence for Metapl1 (NM_025633.1,269-287).
gagacagcatagaagtgaa

SEQ ID NO: 580367 - DNA, 19 bp, Mus musculus
  siRNA target sequence for Metapl1 (NM_025633.1,353-371).
ctgggaagagtttaaaggt

SEQ ID NO: 580368 - DNA, 19 bp, Mus musculus
  siRNA target sequence for Metapl1 (NM_025633.1,390-408).
gatagatgcgcttgttcat

SEQ ID NO: 580369 - DNA, 19 bp, Mus musculus
  siRNA target sequence for Metapl1 (NM_025633.1,472-490).
gtttgcacctctgtaaaca

SEQ ID NO: 580370 - DNA, 19 bp, Mus musculus
  siRNA target sequence for Metapl1 (NM_025633.1,536-554).
gagatattatcaacattga

SEQ ID NO: 580371 - DNA, 19 bp, Mus musculus
  siRNA target sequence for Metapl1 (NM_025633.1,553-571).
gatgtcacggtctattaca

SEQ ID NO: 580372 - DNA, 19 bp, Mus musculus
  siRNA target sequence for Metapl1 (NM_025633.1,580-598).
catggagacacctctgaaa

SEQ ID NO: 580373 - DNA, 19 bp, Mus musculus
  siRNA target sequence for Metapl1 (NM_025633.1,651-669).
caggaggtgtagagatgaa

SEQ ID NO: 580374 - DNA, 19 bp, Mus musculus
  siRNA target sequence for Metapl1 (NM_025633.1,717-735).
cacaatcagccgcataact

SEQ ID NO: 580375 - DNA, 19 bp, Mus musculus
  siRNA target sequence for Metapl1 (NM_025633.1,719-737).
caatcagccgcataactca

SEQ ID NO: 580376 - DNA, 19 bp, Mus musculus
  siRNA target sequence for Metapl1 (NM_025633.1,725-743).
gccgcataactcatcagaa

SEQ ID NO: 580377 - DNA, 19 bp, Mus musculus
  siRNA target sequence for Metapl1 (NM_025633.1,769-787).
gtgggacatgggataggat

SEQ ID NO: 580378 - DNA, 19 bp, Mus musculus
  siRNA target sequence for Metapl1 (NM_025633.1,779-797).
ggataggatcatactttca

SEQ ID NO: 580379 - DNA, 19 bp, Mus musculus
  siRNA target sequence for Metapl1 (NM_025633.1,780-798).
gataggatcatactttcat

SEQ ID NO: 580380 - DNA, 19 bp, Mus musculus
  siRNA target sequence for Metapl1 (NM_025633.1,926-944).
ccgtggtctccctagacaa

SEQ ID NO: 580381 - DNA, 19 bp, Mus musculus
  siRNA target sequence for Pa2g4 (NM_011119.1,401-419).
gctgagcttgtgtgagaaa

SEQ ID NO: 580382 - DNA, 19 bp, Mus musculus
  siRNA target sequence for Pa2g4 (NM_011119.1,1070-1088).
ggtggaacggcgttttgat

SEQ ID NO: 580383 - DNA, 19 bp, Mus musculus
  siRNA target sequence for Pa2g4 (NM_011119.1,1086-1104).
gatgccatgccgtttactt

SEQ ID NO: 580384 - DNA, 19 bp, Mus musculus
  siRNA target sequence for Pa2g4 (NM_011119.1,1089-1107).
gccatgccgtttactttaa

SEQ ID NO: 580385 - DNA, 19 bp, Mus musculus
  siRNA target sequence for Pa2g4 (NM_011119.1,1212-1230).
gttgcccagtttaaattta

SEQ ID NO: 580386 - DNA, 19 bp, Mus musculus
  siRNA target sequence for Dpep1 (NM_007876.1,374-392).
gccttggcaactgctaaat

SEQ ID NO: 580387 - DNA, 19 bp, Mus musculus
  siRNA target sequence for Dpep1 (NM_007876.1,375-393).
ccttggcaactgctaaatt

SEQ ID NO: 580388 - DNA, 19 bp, Mus musculus
  siRNA target sequence for Dpep1 (NM_007876.1,379-397).
ggcaactgctaaatttgtt

SEQ ID NO: 580389 - DNA, 19 bp, Mus musculus
  siRNA target sequence for Dpep1 (NM_007876.1,381-399).
caactgctaaatttgttca

SEQ ID NO: 580390 - DNA, 19 bp, Mus musculus
  siRNA target sequence for Dpep1 (NM_007876.1,384-402).
ctgctaaatttgttcaaca

SEQ ID NO: 580391 - DNA, 19 bp, Mus musculus
  siRNA target sequence for Dpep1 (NM_007876.1,747-765).
ctgaccctcacccacaatt

SEQ ID NO: 580392 - DNA, 19 bp, Mus musculus
  siRNA target sequence for Dpep1 (NM_007876.1,869-887).
ccgcttgggtgtcatgatt

SEQ ID NO: 580393 - DNA, 19 bp, Mus musculus
  siRNA target sequence for Dpep1 (NM_007876.1,871-889).
gcttgggtgtcatgattga

SEQ ID NO: 580394 - DNA, 19 bp, Mus musculus
  siRNA target sequence for Dpep1 (NM_007876.1,937-955).
ccagggcaccagtcatctt

SEQ ID NO: 580395 - DNA, 19 bp, Mus musculus
  siRNA target sequence for Dpep1 (NM_007876.1,1020-1038).
ctggtgaagaacacaagta

SEQ ID NO: 580396 - DNA, 19 bp, Mus musculus
  siRNA target sequence for Dpep1 (NM_007876.1,1022-1040).
ggtgaagaacacaagtagt

SEQ ID NO: 580397 - DNA, 19 bp, Mus musculus
  siRNA target sequence for Dpep1 (NM_007876.1,1154-1172).
gggccttggaggagattat

SEQ ID NO: 580398 - DNA, 19 bp, Mus musculus
  siRNA target sequence for Dpep1 (NM_007876.1,1167-1185).
gattatgatggtgttacta

SEQ ID NO: 580399 - DNA, 19 bp, Mus musculus
  siRNA target sequence for Dpep1 (NM_007876.1,1265-1283).
cgaggtcagaggtttgcta

SEQ ID NO: 580400 - DNA, 19 bp, Mus musculus
  siRNA target sequence for Dpep1 (NM_007876.1,1381-1399).
gctcctgcaggacatacta

SEQ ID NO: 580401 - DNA, 19 bp, Mus musculus
  siRNA target sequence for Dpep1 (NM_007876.1,1382-1400).
ctcctgcaggacatactat

SEQ ID NO: 580402 - DNA, 19 bp, Mus musculus
  siRNA target sequence for Dpep2 (NM_176913.3,414-432).
ggtgcttccactacatcaa

SEQ ID NO: 580403 - DNA, 19 bp, Mus musculus
  siRNA target sequence for Dpep2 (NM_176913.3,533-551).
gcaggagttcccgcttata

SEQ ID NO: 580404 - DNA, 19 bp, Mus musculus
  siRNA target sequence for Dpep2 (NM_176913.3,536-554).
ggagttcccgcttatagat

SEQ ID NO: 580405 - DNA, 19 bp, Mus musculus
  siRNA target sequence for Dpep2 (NM_176913.3,570-588).
cctcttgtcctgagacaat

SEQ ID NO: 580406 - DNA, 19 bp, Mus musculus
  siRNA target sequence for Dpep2 (NM_176913.3,571-589).
ctcttgtcctgagacaatt

SEQ ID NO: 580407 - DNA, 19 bp, Mus musculus
  siRNA target sequence for Dpep2 (NM_176913.3,573-591).
cttgtcctgagacaatttt

SEQ ID NO: 580408 - DNA, 19 bp, Mus musculus
  siRNA target sequence for Dpep2 (NM_176913.3,609-627).
gatgctaacctgagaaact

SEQ ID NO: 580409 - DNA, 19 bp, Mus musculus
  siRNA target sequence for Dpep2 (NM_176913.3,644-662).
cagcctggataggcttaaa

SEQ ID NO: 580410 - DNA, 19 bp, Mus musculus
  siRNA target sequence for Dpep2 (NM_176913.3,646-664).
gcctggataggcttaaaga

SEQ ID NO: 580411 - DNA, 19 bp, Mus musculus
  siRNA target sequence for Dpep2 (NM_176913.3,683-701).
gttctggtctgcttacgta

SEQ ID NO: 580412 - DNA, 19 bp, Mus musculus
  siRNA target sequence for Dpep2 (NM_176913.3,984-1002).
ggtgtccacgcattctaca

SEQ ID NO: 580413 - DNA, 19 bp, Mus musculus
  siRNA target sequence for Dpep2 (NM_176913.3,1047-1065).
gaaatgaatcgcttaggta

SEQ ID NO: 580414 - DNA, 19 bp, Mus musculus
  siRNA target sequence for Dpep2 (NM_176913.3,1265-1283).
caaccctttagccaatgta

SEQ ID NO: 580415 - DNA, 19 bp, Mus musculus
  siRNA target sequence for Dpep2 (NM_176913.3,1539-1557).
caggtccgagacaaaagca

SEQ ID NO: 580416 - DNA, 19 bp, Mus musculus
  siRNA target sequence for Dpep2 (NM_176913.3,1541-1559).
ggtccgagacaaaagcaaa

SEQ ID NO: 580417 - DNA, 19 bp, Mus musculus
  siRNA target sequence for Dpep2 (NM_176913.3,1542-1560).
gtccgagacaaaagcaaat

SEQ ID NO: 580418 - DNA, 19 bp, Mus musculus
  siRNA target sequence for Dpep2 (NM_176913.3,1731-1749).
gccattgttgcgaccttat

SEQ ID NO: 580419 - DNA, 19 bp, Mus musculus
  siRNA target sequence for Dpep3 (NM_027960.1,195-213).
cctgctgggggtgttactt

SEQ ID NO: 580420 - DNA, 19 bp, Mus musculus
  siRNA target sequence for Dpep3 (NM_027960.1,201-219).
gggggtgttacttctagtt

SEQ ID NO: 580421 - DNA, 19 bp, Mus musculus
  siRNA target sequence for Dpep3 (NM_027960.1,736-754).
gctgtgttgcgcagtttct

SEQ ID NO: 580422 - DNA, 19 bp, Mus musculus
  siRNA target sequence for Dpep3 (NM_027960.1,737-755).
ctgtgttgcgcagtttcta

SEQ ID NO: 580423 - DNA, 19 bp, Mus musculus
  siRNA target sequence for Dpep3 (NM_027960.1,770-788).
gctacctgactcttacctt

SEQ ID NO: 580424 - DNA, 19 bp, Mus musculus
  siRNA target sequence for Dpep3 (NM_027960.1,808-826).
gcagaaagcgccacaaaat

SEQ ID NO: 580425 - DNA, 19 bp, Mus musculus
  siRNA target sequence for Dpep3 (NM_027960.1,897-915).
ccgtctgggcatgatgata

SEQ ID NO: 580426 - DNA, 19 bp, Mus musculus
  siRNA target sequence for Dpep3 (NM_027960.1,899-917).
gtctgggcatgatgataga

SEQ ID NO: 580427 - DNA, 19 bp, Mus musculus
  siRNA target sequence for Dpep3 (NM_027960.1,1001-1019).
gatcggtgtgtgacaattt

SEQ ID NO: 580428 - DNA, 19 bp, Mus musculus
  siRNA target sequence for Dpep3 (NM_027960.1,1014-1032).
caatttgctgaatattcct

SEQ ID NO: 580429 - DNA, 19 bp, Mus musculus
  siRNA target sequence for Dpep3 (NM_027960.1,1023-1041).
gaatattcctgatgacata

SEQ ID NO: 580430 - DNA, 19 bp, Mus musculus
  siRNA target sequence for Dpep3 (NM_027960.1,1102-1120).
cagtgcagtctgtttgcta

SEQ ID NO: 580431 - DNA, 19 bp, Mus musculus
  siRNA target sequence for Dpep3 (NM_027960.1,1125-1143).
gtccactgtagcagatcat

SEQ ID NO: 580432 - DNA, 19 bp, Mus musculus
  siRNA target sequence for Dpep3 (NM_027960.1,1127-1145).
ccactgtagcagatcattt

SEQ ID NO: 580433 - DNA, 19 bp, Mus musculus
  siRNA target sequence for Dpep3 (NM_027960.1,1130-1148).
ctgtagcagatcattttga

SEQ ID NO: 580434 - DNA, 19 bp, Mus musculus
  siRNA target sequence for Dpep3 (NM_027960.1,1149-1167).
ccacatcaggacagtcatt

SEQ ID NO: 580435 - DNA, 19 bp, Mus musculus
  siRNA target sequence for Dpep3 (NM_027960.1,1344-1362).
ggaacaggtgagagagaaa

SEQ ID NO: 580436 - DNA, 19 bp, Mus musculus
  siRNA target sequence for Dpep3 (NM_027960.1,1376-1394).
gccctgtggaggtcaagtt

SEQ ID NO: 580437 - DNA, 19 bp, Mus musculus
  siRNA target sequence for Dpep3 (NM_027960.1,1570-1588).
ctcatcctttggctatgtt

SEQ ID NO: 580438 - DNA, 19 bp, Mus musculus
  siRNA target sequence for Dnpep (NM_016878.2,464-482).
gggatatcgtaccagaaaa

SEQ ID NO: 580439 - DNA, 19 bp, Mus musculus
  siRNA target sequence for Dnpep (NM_016878.2,472-490).
gtaccagaaaacaagtact

SEQ ID NO: 580440 - DNA, 19 bp, Mus musculus
  siRNA target sequence for Dnpep (NM_016878.2,706-724).
gctggacgcgtcattatca

SEQ ID NO: 580441 - DNA, 19 bp, Mus musculus
  siRNA target sequence for Dnpep (NM_016878.2,707-725).
ctggacgcgtcattatcaa

SEQ ID NO: 580442 - DNA, 19 bp, Mus musculus
  siRNA target sequence for Dnpep (NM_016878.2,709-727).
ggacgcgtcattatcaagt

SEQ ID NO: 580443 - DNA, 19 bp, Mus musculus
  siRNA target sequence for Dnpep (NM_016878.2,753-771).
gaggctcgtccatatagaa

SEQ ID NO: 580444 - DNA, 19 bp, Mus musculus
  siRNA target sequence for Dnpep (NM_016878.2,805-823).
catctgcagcgaaatatca

SEQ ID NO: 580445 - DNA, 19 bp, Mus musculus
  siRNA target sequence for Dnpep (NM_016878.2,811-829).
cagcgaaatatcaatgaga

SEQ ID NO: 580446 - DNA, 19 bp, Mus musculus
  siRNA target sequence for Dnpep (NM_016878.2,815-833).
gaaatatcaatgagaactt

SEQ ID NO: 580447 - DNA, 19 bp, Mus musculus
  siRNA target sequence for Dnpep (NM_016878.2,1044-1062).
cctgggtggagcctatgaa

SEQ ID NO: 580448 - DNA, 19 bp, Mus musculus
  siRNA target sequence for Dnpep (NM_016878.2,1052-1070).
gagcctatgaagagttcat

SEQ ID NO: 580449 - DNA, 19 bp, Mus musculus
  siRNA target sequence for Dnpep (NM_016878.2,1076-1094).
ctcctcgactggacaatct

SEQ ID NO: 580450 - DNA, 19 bp, Mus musculus
  siRNA target sequence for Dnpep (NM_016878.2,1109-1127).
gtgccctgcaggcattgat

SEQ ID NO: 580451 - DNA, 19 bp, Mus musculus
  siRNA target sequence for Dnpep (NM_016878.2,1112-1130).
ccctgcaggcattgattga

SEQ ID NO: 580452 - DNA, 19 bp, Mus musculus
  siRNA target sequence for Dnpep (NM_016878.2,1184-1202).
cactctacgacaatgaaga

SEQ ID NO: 580453 - DNA, 19 bp, Mus musculus
  siRNA target sequence for Dnpep (NM_016878.2,1239-1257).
gctgacggagctgatacta

SEQ ID NO: 580454 - DNA, 19 bp, Mus musculus
  siRNA target sequence for Dnpep (NM_016878.2,1384-1402).
caccggcctttgttccata

SEQ ID NO: 580455 - DNA, 19 bp, Mus musculus
  siRNA target sequence for Dnpep (NM_016878.2,1431-1449).
gcagcgctacgcctctaat

SEQ ID NO: 580456 - DNA, 19 bp, Mus musculus
  siRNA target sequence for Dnpep (NM_016878.2,1434-1452).
gcgctacgcctctaatgca

SEQ ID NO: 580457 - DNA, 19 bp, Mus musculus
  siRNA target sequence for E430012M05Rik (NM_177310.2,156-174).
gattccaaaccggtactta

SEQ ID NO: 580458 - DNA, 19 bp, Mus musculus
  siRNA target sequence for E430012M05Rik (NM_177310.2,180-198).
gcccagcccggttacacat

SEQ ID NO: 580459 - DNA, 19 bp, Mus musculus
  siRNA target sequence for E430012M05Rik (NM_177310.2,473-491).
cccataaggccatgctttt

SEQ ID NO: 580460 - DNA, 19 bp, Mus musculus
  siRNA target sequence for E430012M05Rik (NM_177310.2,503-521).
gagatcctggccgagaatt

SEQ ID NO: 580461 - DNA, 19 bp, Mus musculus
  siRNA target sequence for E430012M05Rik (NM_177310.2,580-598).
gcctacccgctggaagaat

SEQ ID NO: 580462 - DNA, 19 bp, Mus musculus
  siRNA target sequence for E430012M05Rik (NM_177310.2,585-603).
cccgctggaagaatttcaa

SEQ ID NO: 580463 - DNA, 19 bp, Mus musculus
  siRNA target sequence for E430012M05Rik (NM_177310.2,625-643).
gctgagacgaacatggttt

SEQ ID NO: 580464 - DNA, 19 bp, Mus musculus
  siRNA target sequence for E430012M05Rik (NM_177310.2,630-648).
gacgaacatggtttggtat

SEQ ID NO: 580465 - DNA, 19 bp, Mus musculus
  siRNA target sequence for E430012M05Rik (NM_177310.2,690-708).
catgcagcctctaactgaa

SEQ ID NO: 580466 - DNA, 19 bp, Mus musculus
  siRNA target sequence for E430012M05Rik (NM_177310.2,760-778).
cgcctaaggctggttaagt

SEQ ID NO: 580467 - DNA, 19 bp, Mus musculus
  siRNA target sequence for E430012M05Rik (NM_177310.2,782-800).
cttcagagattaagagaat

SEQ ID NO: 580468 - DNA, 19 bp, Mus musculus
  siRNA target sequence for E430012M05Rik (NM_177310.2,819-837).
gacgtcagaggctttcata

SEQ ID NO: 580469 - DNA, 19 bp, Mus musculus
  siRNA target sequence for E430012M05Rik (NM_177310.2,821-839).
cgtcagaggctttcataga

SEQ ID NO: 580470 - DNA, 19 bp, Mus musculus
  siRNA target sequence for E430012M05Rik (NM_177310.2,840-858).
gaccatgtttgccagtaaa

SEQ ID NO: 580471 - DNA, 19 bp, Mus musculus
  siRNA target sequence for E430012M05Rik (NM_177310.2,843-861).
catgtttgccagtaaagct

SEQ ID NO: 580472 - DNA, 19 bp, Mus musculus
  siRNA target sequence for E430012M05Rik (NM_177310.2,852-870).
cagtaaagctccgatagat

SEQ ID NO: 580473 - DNA, 19 bp, Mus musculus
  siRNA target sequence for E430012M05Rik (NM_177310.2,854-872).
gtaaagctccgatagatga

SEQ ID NO: 580474 - DNA, 19 bp, Mus musculus
  siRNA target sequence for E430012M05Rik (NM_177310.2,876-894).
ctttctttacgcgaagttt

SEQ ID NO: 580475 - DNA, 19 bp, Mus musculus
  siRNA target sequence for E430012M05Rik (NM_177310.2,880-898).
ctttacgcgaagtttgaat

SEQ ID NO: 580476 - DNA, 19 bp, Mus musculus
  siRNA target sequence for E430012M05Rik (NM_177310.2,886-904).
gcgaagtttgaatttgagt

SEQ ID NO: 580477 - DNA, 19 bp, Mus musculus
  siRNA target sequence for E430012M05Rik (NM_177310.2,955-973).
ggtaatcgctccaacactt

SEQ ID NO: 580478 - DNA, 19 bp, Mus musculus
  siRNA target sequence for E430012M05Rik (NM_177310.2,956-974).
gtaatcgctccaacacttt

SEQ ID NO: 580479 - DNA, 19 bp, Mus musculus
  siRNA target sequence for E430012M05Rik (NM_177310.2,965-983).
ccaacactttgcactatgt

SEQ ID NO: 580480 - DNA, 19 bp, Mus musculus
  siRNA target sequence for E430012M05Rik (NM_177310.2,1039-1057).
gaatcatcctgctatgtga

SEQ ID NO: 580481 - DNA, 19 bp, Mus musculus
  siRNA target sequence for E430012M05Rik (NM_177310.2,1087-1105).
ggcaggctgctcgaaaata

SEQ ID NO: 580482 - DNA, 19 bp, Mus musculus
  siRNA target sequence for E430012M05Rik (NM_177310.2,1089-1107).
caggctgctcgaaaatact

SEQ ID NO: 580483 - DNA, 19 bp, Mus musculus
  siRNA target sequence for Xpnpep1 (NM_133216.1,210-228).
ggcagctgcgacaagctat

SEQ ID NO: 580484 - DNA, 19 bp, Mus musculus
  siRNA target sequence for Xpnpep1 (NM_133216.1,254-272).
cccatccaggcctatatca

SEQ ID NO: 580485 - DNA, 19 bp, Mus musculus
  siRNA target sequence for Xpnpep1 (NM_133216.1,289-307).
ccaccagagcgagtacatt

SEQ ID NO: 580486 - DNA, 19 bp, Mus musculus
  siRNA target sequence for Xpnpep1 (NM_133216.1,331-349).
gtttgtctctggattcgat

SEQ ID NO: 580487 - DNA, 19 bp, Mus musculus
  siRNA target sequence for Xpnpep1 (NM_133216.1,725-743).
gcagacctccggttgaaaa

SEQ ID NO: 580488 - DNA, 19 bp, Mus musculus
  siRNA target sequence for Xpnpep1 (NM_133216.1,726-744).
cagacctccggttgaaaat

SEQ ID NO: 580489 - DNA, 19 bp, Mus musculus
  siRNA target sequence for Xpnpep1 (NM_133216.1,754-772).
gagcatcgcgtggtttgta

SEQ ID NO: 580490 - DNA, 19 bp, Mus musculus
  siRNA target sequence for Xpnpep1 (NM_133216.1,756-774).
gcatcgcgtggtttgtagt

SEQ ID NO: 580491 - DNA, 19 bp, Mus musculus
  siRNA target sequence for Xpnpep1 (NM_133216.1,779-797).
gccctagacgagattgcat

SEQ ID NO: 580492 - DNA, 19 bp, Mus musculus
  siRNA target sequence for Xpnpep1 (NM_133216.1,790-808).
gattgcatggctgttcaat

SEQ ID NO: 580493 - DNA, 19 bp, Mus musculus
  siRNA target sequence for Xpnpep1 (NM_133216.1,816-834).
ggtcagatgtggaacacaa

SEQ ID NO: 580494 - DNA, 19 bp, Mus musculus
  siRNA target sequence for Xpnpep1 (NM_133216.1,817-835).
gtcagatgtggaacacaat

SEQ ID NO: 580495 - DNA, 19 bp, Mus musculus
  siRNA target sequence for Xpnpep1 (NM_133216.1,827-845).
gaacacaatcctgtgtttt

SEQ ID NO: 580496 - DNA, 19 bp, Mus musculus
  siRNA target sequence for Xpnpep1 (NM_133216.1,871-889).
gacgatcatgctcttcatt

SEQ ID NO: 580497 - DNA, 19 bp, Mus musculus
  siRNA target sequence for Xpnpep1 (NM_133216.1,873-891).
cgatcatgctcttcattga

SEQ ID NO: 580498 - DNA, 19 bp, Mus musculus
  siRNA target sequence for Xpnpep1 (NM_133216.1,944-962).
ggcctggaggcggaataca

SEQ ID NO: 580499 - DNA, 19 bp, Mus musculus
  siRNA target sequence for Xpnpep1 (NM_133216.1,968-986).
caggtcctgccatacaagt

SEQ ID NO: 580500 - DNA, 19 bp, Mus musculus
  siRNA target sequence for Xpnpep1 (NM_133216.1,1270-1288).
caaggccgaggaatttcga

SEQ ID NO: 580501 - DNA, 19 bp, Mus musculus
  siRNA target sequence for Xpnpep1 (NM_133216.1,1398-1416).
ccctggacgaggtttacct

SEQ ID NO: 580502 - DNA, 19 bp, Mus musculus
  siRNA target sequence for Xpnpep1 (NM_133216.1,1406-1424).
gaggtttacctcattgact

SEQ ID NO: 580503 - DNA, 19 bp, Mus musculus
  siRNA target sequence for Xpnpep1 (NM_133216.1,1501-1519).
ggaatgcttcacatacgta

SEQ ID NO: 580504 - DNA, 19 bp, Mus musculus
  siRNA target sequence for Xpnpep1 (NM_133216.1,1506-1524).
gcttcacatacgtactgaa

SEQ ID NO: 580505 - DNA, 19 bp, Mus musculus
  siRNA target sequence for Xpnpep1 (NM_133216.1,1507-1525).
cttcacatacgtactgaaa

SEQ ID NO: 580506 - DNA, 19 bp, Mus musculus
  siRNA target sequence for Xpnpep1 (NM_133216.1,1608-1626).
gggattctggtctggatta

SEQ ID NO: 580507 - DNA, 19 bp, Mus musculus
  siRNA target sequence for Xpnpep1 (NM_133216.1,1643-1661).
catggcgttgggtcctttt

SEQ ID NO: 580508 - DNA, 19 bp, Mus musculus
  siRNA target sequence for Xpnpep1 (NM_133216.1,1648-1666).
cgttgggtcctttttgaat

SEQ ID NO: 580509 - DNA, 19 bp, Mus musculus
  siRNA target sequence for Xpnpep1 (NM_133216.1,1679-1697).
ccctgtggcatcagttata

SEQ ID NO: 580510 - DNA, 19 bp, Mus musculus
  siRNA target sequence for Xpnpep1 (NM_133216.1,1680-1698).
cctgtggcatcagttataa

SEQ ID NO: 580511 - DNA, 19 bp, Mus musculus
  siRNA target sequence for Xpnpep1 (NM_133216.1,1685-1703).
ggcatcagttataaaacat

SEQ ID NO: 580512 - DNA, 19 bp, Mus musculus
  siRNA target sequence for Xpnpep1 (NM_133216.1,1777-1795).
gatccgcattgagaatgtt

SEQ ID NO: 580513 - DNA, 19 bp, Mus musculus
  siRNA target sequence for Xpnpep1 (NM_133216.1,1782-1800).
gcattgagaatgttgttct

SEQ ID NO: 580514 - DNA, 19 bp, Mus musculus
  siRNA target sequence for Xpnpep1 (NM_133216.1,1849-1867).
gacctttgaacctctaact

SEQ ID NO: 580515 - DNA, 19 bp, Mus musculus
  siRNA target sequence for Xpnpep1 (NM_133216.1,1851-1869).
cctttgaacctctaacttt

SEQ ID NO: 580516 - DNA, 19 bp, Mus musculus
  siRNA target sequence for Xpnpep1 (NM_133216.1,1871-1889).
gttcccatccagaccaaaa

SEQ ID NO: 580517 - DNA, 19 bp, Mus musculus
  siRNA target sequence for Xpnpep1 (NM_133216.1,1904-1922).
gctcttacagataaagagt

SEQ ID NO: 580518 - DNA, 19 bp, Mus musculus
  siRNA target sequence for Xpnpep2 (NM_133213.1,366-384).
gatgtgagaaactgttcaa

SEQ ID NO: 580519 - DNA, 19 bp, Mus musculus
  siRNA target sequence for Xpnpep2 (NM_133213.1,405-423).
gttactgccgtcaatacaa

SEQ ID NO: 580520 - DNA, 19 bp, Mus musculus
  siRNA target sequence for Xpnpep2 (NM_133213.1,409-427).
ctgccgtcaatacaacaat

SEQ ID NO: 580521 - DNA, 19 bp, Mus musculus
  siRNA target sequence for Xpnpep2 (NM_133213.1,436-454).
cagccctccgccaacagat

SEQ ID NO: 580522 - DNA, 19 bp, Mus musculus
  siRNA target sequence for Xpnpep2 (NM_133213.1,665-683).
gcacaaggaagttagcatt

SEQ ID NO: 580523 - DNA, 19 bp, Mus musculus
  siRNA target sequence for Xpnpep2 (NM_133213.1,668-686).
caaggaagttagcatttct

SEQ ID NO: 580524 - DNA, 19 bp, Mus musculus
  siRNA target sequence for Xpnpep2 (NM_133213.1,689-707).
cattgtcgcctggatctta

SEQ ID NO: 580525 - DNA, 19 bp, Mus musculus
  siRNA target sequence for Xpnpep2 (NM_133213.1,759-777).
gttgattcctggaaaaatt

SEQ ID NO: 580526 - DNA, 19 bp, Mus musculus
  siRNA target sequence for Xpnpep2 (NM_133213.1,767-785).
ctggaaaaattatgatcaa

SEQ ID NO: 580527 - DNA, 19 bp, Mus musculus
  siRNA target sequence for Xpnpep2 (NM_133213.1,807-825).
cacctgttatcggttacaa

SEQ ID NO: 580528 - DNA, 19 bp, Mus musculus
  siRNA target sequence for Xpnpep2 (NM_133213.1,869-887).
gccaagccaacccatttat

SEQ ID NO: 580529 - DNA, 19 bp, Mus musculus
  siRNA target sequence for Xpnpep2 (NM_133213.1,910-928).
ggagcacttggcaggaaaa

SEQ ID NO: 580530 - DNA, 19 bp, Mus musculus
  siRNA target sequence for Xpnpep2 (NM_133213.1,934-952).
ccgctgtccgaagctatat

SEQ ID NO: 580531 - DNA, 19 bp, Mus musculus
  siRNA target sequence for Xpnpep2 (NM_133213.1,937-955).
ctgtccgaagctatatgga

SEQ ID NO: 580532 - DNA, 19 bp, Mus musculus
  siRNA target sequence for Xpnpep2 (NM_133213.1,972-990).
ccaactggggtccttctat

SEQ ID NO: 580533 - DNA, 19 bp, Mus musculus
  siRNA target sequence for Xpnpep2 (NM_133213.1,983-1001).
ccttctatctgcacttgat

SEQ ID NO: 580534 - DNA, 19 bp, Mus musculus
  siRNA target sequence for Xpnpep2 (NM_133213.1,1030-1048).
gcagtgacatcccctataa

SEQ ID NO: 580535 - DNA, 19 bp, Mus musculus
  siRNA target sequence for Xpnpep2 (NM_133213.1,1041-1059).
ccctataaccccttcttct

SEQ ID NO: 580536 - DNA, 19 bp, Mus musculus
  siRNA target sequence for Xpnpep2 (NM_133213.1,1042-1060).
cctataaccccttcttcta

SEQ ID NO: 580537 - DNA, 19 bp, Mus musculus
  siRNA target sequence for Xpnpep2 (NM_133213.1,1219-1237).
cctcaggcgatgtgaaaat

SEQ ID NO: 580538 - DNA, 19 bp, Mus musculus
  siRNA target sequence for Xpnpep2 (NM_133213.1,1222-1240).
caggcgatgtgaaaatctt

SEQ ID NO: 580539 - DNA, 19 bp, Mus musculus
  siRNA target sequence for Xpnpep2 (NM_133213.1,1224-1242).
ggcgatgtgaaaatcttaa

SEQ ID NO: 580540 - DNA, 19 bp, Mus musculus
  siRNA target sequence for Xpnpep2 (NM_133213.1,1225-1243).
gcgatgtgaaaatcttaat

SEQ ID NO: 580541 - DNA, 19 bp, Mus musculus
  siRNA target sequence for Xpnpep2 (NM_133213.1,1226-1244).
cgatgtgaaaatcttaatt

SEQ ID NO: 580542 - DNA, 19 bp, Mus musculus
  siRNA target sequence for Xpnpep2 (NM_133213.1,1258-1276).
ccacctatggggtctatga

SEQ ID NO: 580543 - DNA, 19 bp, Mus musculus
  siRNA target sequence for Xpnpep2 (NM_133213.1,1259-1277).
cacctatggggtctatgaa

SEQ ID NO: 580544 - DNA, 19 bp, Mus musculus
  siRNA target sequence for Xpnpep2 (NM_133213.1,1440-1458).
ggcacggtggatgagtttt

SEQ ID NO: 580545 - DNA, 19 bp, Mus musculus
  siRNA target sequence for Xpnpep2 (NM_133213.1,1479-1497).
gagttacgacggaatgaaa

SEQ ID NO: 580546 - DNA, 19 bp, Mus musculus
  siRNA target sequence for Xpnpep2 (NM_133213.1,1504-1522).
cctctggacccagttttga

SEQ ID NO: 580547 - DNA, 19 bp, Mus musculus
  siRNA target sequence for Xpnpep2 (NM_133213.1,1681-1699).
ctcctactgccttccaaaa

SEQ ID NO: 580548 - DNA, 19 bp, Mus musculus
  siRNA target sequence for Xpnpep2 (NM_133213.1,1705-1723).
cctatactcgagtgctaat

SEQ ID NO: 580549 - DNA, 19 bp, Mus musculus
  siRNA target sequence for Xpnpep2 (NM_133213.1,1878-1896).
ccagtgggattccagtata

SEQ ID NO: 580550 - DNA, 19 bp, Mus musculus
  siRNA target sequence for Xpnpep2 (NM_133213.1,1879-1897).
cagtgggattccagtataa

SEQ ID NO: 580551 - DNA, 19 bp, Mus musculus
  siRNA target sequence for Xpnpep2 (NM_133213.1,1881-1899).
gtgggattccagtataaca

SEQ ID NO: 580552 - DNA, 19 bp, Mus musculus
  siRNA target sequence for Xpnpep2 (NM_133213.1,1916-1934).
gggcatgttcacttccatt

SEQ ID NO: 580553 - DNA, 19 bp, Mus musculus
  siRNA target sequence for Xpnpep2 (NM_133213.1,1950-1968).
catgatggggagtttggaa

SEQ ID NO: 580554 - DNA, 19 bp, Mus musculus
  siRNA target sequence for Xpnpep2 (NM_133213.1,1961-1979).
gtttggaatccgtcttgaa

SEQ ID NO: 580555 - DNA, 19 bp, Mus musculus
  siRNA target sequence for Xpnpep2 (NM_133213.1,1966-1984).
gaatccgtcttgaagatgt

SEQ ID NO: 580556 - DNA, 19 bp, Mus musculus
  siRNA target sequence for Xpnpep2 (NM_133213.1,1989-2007).
cttgtggtagaagcaaaaa

SEQ ID NO: 580557 - DNA, 19 bp, Mus musculus
  siRNA target sequence for Xpnpep2 (NM_133213.1,2108-2126).
gtacctgaaccgctactat

SEQ ID NO: 580558 - DNA, 19 bp, Mus musculus
  siRNA target sequence for Xpnpep2 (NM_133213.1,2112-2130).
ctgaaccgctactatcaga

SEQ ID NO: 580559 - DNA, 19 bp, Mus musculus
  siRNA target sequence for Xpnpep2 (NM_133213.1,2129-2147).
gaccattcgtgagaatgta

SEQ ID NO: 580560 - DNA, 19 bp, Mus musculus
  siRNA target sequence for Xpnpep2 (NM_178074.2,1597-1615).
gatgggaccacagatatca

SEQ ID NO: 580561 - DNA, 19 bp, Mus musculus
  siRNA target sequence for Acy1 (NM_025371.1,421-439).
gattccgagggctacatct

SEQ ID NO: 580562 - DNA, 19 bp, Mus musculus
  siRNA target sequence for Acy1 (NM_025371.1,446-464).
ggggctcccaggacatgaa

SEQ ID NO: 580563 - DNA, 19 bp, Mus musculus
  siRNA target sequence for Acy1 (NM_025371.1,659-677).
ccacggatgcctttactgt

SEQ ID NO: 580564 - DNA, 19 bp, Mus musculus
  siRNA target sequence for Acy1 (NM_025371.1,735-753).
ccatgcctcacgcttcatt

SEQ ID NO: 580565 - DNA, 19 bp, Mus musculus
  siRNA target sequence for Acy1 (NM_025371.1,763-781).
gctgcagagaagttgcata

SEQ ID NO: 580566 - DNA, 19 bp, Mus musculus
  siRNA target sequence for Acy1 (NM_025371.1,769-787).
gagaagttgcataaggtta

SEQ ID NO: 580567 - DNA, 19 bp, Mus musculus
  siRNA target sequence for Acy1 (NM_025371.1,862-880).
gtgacttcggtgaatctga

SEQ ID NO: 580568 - DNA, 19 bp, Mus musculus
  siRNA target sequence for Acy1 (NM_025371.1,1062-1080).
gacacccacggatgattca

SEQ ID NO: 580569 - DNA, 19 bp, Mus musculus
  siRNA target sequence for Acy1 (NM_025371.1,1064-1082).
cacccacggatgattcaga

SEQ ID NO: 580570 - DNA, 19 bp, Mus musculus
  siRNA target sequence for Acy1 (NM_025371.1,1157-1175).
ccactgacagccgctttat

SEQ ID NO: 580571 - DNA, 19 bp, Mus musculus
  siRNA target sequence for Acy1 (NM_025371.1,1252-1270).
cggctgcatgaggatatat

SEQ ID NO: 580572 - DNA, 19 bp, Mus musculus
  siRNA target sequence for Acy1 (NM_025371.1,1253-1271).
ggctgcatgaggatatatt

SEQ ID NO: 580573 - DNA, 19 bp, Mus musculus
  siRNA target sequence for Acy1 (NM_025371.1,1273-1291).
ctccgtggggttgacatat

SEQ ID NO: 580574 - DNA, 19 bp, Mus musculus
  siRNA target sequence for Acy1 (NM_025371.1,1275-1293).
ccgtggggttgacatatat

SEQ ID NO: 580575 - DNA, 19 bp, Mus musculus
  siRNA target sequence for Acy1 (NM_025371.1,1276-1294).
cgtggggttgacatatata

SEQ ID NO: 580576 - DNA, 19 bp, Mus musculus
  siRNA target sequence for Cn1 (NM_177450.2,357-375).
ggccattgagagtgattct

SEQ ID NO: 580577 - DNA, 19 bp, Mus musculus
  siRNA target sequence for Cn1 (NM_177450.2,422-440).
ccttggctgcagacaaact

SEQ ID NO: 580578 - DNA, 19 bp, Mus musculus
  siRNA target sequence for Cn1 (NM_177450.2,457-475).
ggggtggagtccatagact

SEQ ID NO: 580579 - DNA, 19 bp, Mus musculus
  siRNA target sequence for Cn1 (NM_177450.2,668-686).
ggggagcaacagacaacaa

SEQ ID NO: 580580 - DNA, 19 bp, Mus musculus
  siRNA target sequence for Cn1 (NM_177450.2,693-711).
cgtcttggcttggatcaat

SEQ ID NO: 580581 - DNA, 19 bp, Mus musculus
  siRNA target sequence for Cn1 (NM_177450.2,808-826).
gaactcgtcatgagagaaa

SEQ ID NO: 580582 - DNA, 19 bp, Mus musculus
  siRNA target sequence for Cn1 (NM_177450.2,821-839).
gagaaaaggaccacttctt

SEQ ID NO: 580583 - DNA, 19 bp, Mus musculus
  siRNA target sequence for Cn1 (NM_177450.2,891-909).
gaaacctgcactcacttat

SEQ ID NO: 580584 - DNA, 19 bp, Mus musculus
  siRNA target sequence for Cn1 (NM_177450.2,939-957).
ggaggtgaagtgtagagat

SEQ ID NO: 580585 - DNA, 19 bp, Mus musculus
  siRNA target sequence for Cn1 (NM_177450.2,1056-1074).
cctaattcctggaatctat

SEQ ID NO: 580586 - DNA, 19 bp, Mus musculus
  siRNA target sequence for Cn1 (NM_177450.2,1075-1093).
gatcaaatggcacctatta

SEQ ID NO: 580587 - DNA, 19 bp, Mus musculus
  siRNA target sequence for Cn1 (NM_177450.2,1159-1177).
caagttgagaaatttctgt

SEQ ID NO: 580588 - DNA, 19 bp, Mus musculus
  siRNA target sequence for Cn1 (NM_177450.2,1239-1257).
catcgagggtgcctttgat

SEQ ID NO: 580589 - DNA, 19 bp, Mus musculus
  siRNA target sequence for Cn1 (NM_177450.2,1255-1273).
gatgagcctggaactaaaa

SEQ ID NO: 580590 - DNA, 19 bp, Mus musculus
  siRNA target sequence for Cn1 (NM_177450.2,1286-1304).
gccgagtcctagggaaatt

SEQ ID NO: 580591 - DNA, 19 bp, Mus musculus
  siRNA target sequence for Cn1 (NM_177450.2,1382-1400).
ctaaaaggaatagtttcaa

SEQ ID NO: 580592 - DNA, 19 bp, Mus musculus
  siRNA target sequence for Cn1 (NM_177450.2,1439-1457).
ggactgcaaacgtcaatga

SEQ ID NO: 580593 - DNA, 19 bp, Mus musculus
  siRNA target sequence for Cn1 (NM_177450.2,1440-1458).
gactgcaaacgtcaatgat

SEQ ID NO: 580594 - DNA, 19 bp, Mus musculus
  siRNA target sequence for Cn1 (NM_177450.2,1502-1520).
gagttaatcctgacatgat

SEQ ID NO: 580595 - DNA, 19 bp, Mus musculus
  siRNA target sequence for Cn1 (NM_177450.2,1521-1539).
ccgggatgggtcaaccatt

SEQ ID NO: 580596 - DNA, 19 bp, Mus musculus
  siRNA target sequence for Cn1 (NM_177450.2,1525-1543).
gatgggtcaaccattccaa

SEQ ID NO: 580597 - DNA, 19 bp, Mus musculus
  siRNA target sequence for Cn1 (NM_177450.2,1535-1553).
ccattccaattgccaaaat

SEQ ID NO: 580598 - DNA, 19 bp, Mus musculus
  siRNA target sequence for Cn1 (NM_177450.2,1536-1554).
cattccaattgccaaaata

SEQ ID NO: 580599 - DNA, 19 bp, Mus musculus
  siRNA target sequence for Cn1 (NM_177450.2,1653-1671).
catacaggggtcgaaatta

SEQ ID NO: 580600 - DNA, 19 bp, Mus musculus
  siRNA target sequence for Dpp3 (NM_133803.1,33-51).
catcctgcccaatgacatt

SEQ ID NO: 580601 - DNA, 19 bp, Mus musculus
  siRNA target sequence for Dpp3 (NM_133803.1,126-144).
gtctagagctgcttggtat

SEQ ID NO: 580602 - DNA, 19 bp, Mus musculus
  siRNA target sequence for Dpp3 (NM_133803.1,175-193).
cctgaagccccctacatct

SEQ ID NO: 580603 - DNA, 19 bp, Mus musculus
  siRNA target sequence for Dpp3 (NM_133803.1,252-270).
cctggctgagggtcttact

SEQ ID NO: 580604 - DNA, 19 bp, Mus musculus
  siRNA target sequence for Dpp3 (NM_133803.1,511-529).
gagggagtcaccacctatt

SEQ ID NO: 580605 - DNA, 19 bp, Mus musculus
  siRNA target sequence for Dpp3 (NM_133803.1,514-532).
ggagtcaccacctatttct

SEQ ID NO: 580606 - DNA, 19 bp, Mus musculus
  siRNA target sequence for Dpp3 (NM_133803.1,929-947).
gccccattgtagagagtta

SEQ ID NO: 580607 - DNA, 19 bp, Mus musculus
  siRNA target sequence for Dpp3 (NM_133803.1,931-949).
cccattgtagagagttaca

SEQ ID NO: 580608 - DNA, 19 bp, Mus musculus
  siRNA target sequence for Dpp3 (NM_133803.1,944-962).
gttacattggcttcattga

SEQ ID NO: 580609 - DNA, 19 bp, Mus musculus
  siRNA target sequence for Dpp3 (NM_133803.1,984-1002).
ctcccgaggagagtttgaa

SEQ ID NO: 580610 - DNA, 19 bp, Mus musculus
  siRNA target sequence for Dpp3 (NM_133803.1,1008-1026).
cgtggccatggtaaacaaa

SEQ ID NO: 580611 - DNA, 19 bp, Mus musculus
  siRNA target sequence for Dpp3 (NM_133803.1,1215-1233).
gacagaaggctttaagaat

SEQ ID NO: 580612 - DNA, 19 bp, Mus musculus
  siRNA target sequence for Dpp3 (NM_133803.1,1217-1235).
cagaaggctttaagaatgt

SEQ ID NO: 580613 - DNA, 19 bp, Mus musculus
  siRNA target sequence for Dpp3 (NM_133803.1,1383-1401).
cagcggcaagctctttgta

SEQ ID NO: 580614 - DNA, 19 bp, Mus musculus
  siRNA target sequence for Dpp3 (NM_133803.1,1385-1403).
gcggcaagctctttgtaca

SEQ ID NO: 580615 - DNA, 19 bp, Mus musculus
  siRNA target sequence for Dpp3 (NM_133803.1,2013-2031).
ggagtcccggaagcttatt

SEQ ID NO: 580616 - DNA, 19 bp, Mus musculus
  siRNA target sequence for Dpp3 (NM_133803.1,2018-2036).
cccggaagcttattgttca

SEQ ID NO: 580617 - DNA, 19 bp, Mus musculus
  siRNA target sequence for Dpp3 (NM_133803.1,2019-2037).
ccggaagcttattgttcaa

SEQ ID NO: 580618 - DNA, 19 bp, Mus musculus
  siRNA target sequence for Pitrm1 (NM_145131.1,118-136).
gtgaacgagctctacagta

SEQ ID NO: 580619 - DNA, 19 bp, Mus musculus
  siRNA target sequence for Pitrm1 (NM_145131.1,120-138).
gaacgagctctacagtata

SEQ ID NO: 580620 - DNA, 19 bp, Mus musculus
  siRNA target sequence for Pitrm1 (NM_145131.1,124-142).
gagctctacagtataaagt

SEQ ID NO: 580621 - DNA, 19 bp, Mus musculus
  siRNA target sequence for Pitrm1 (NM_145131.1,266-284).
caagaacaacttattcagt

SEQ ID NO: 580622 - DNA, 19 bp, Mus musculus
  siRNA target sequence for Pitrm1 (NM_145131.1,293-311).
ccgcacaaccccaatggat

SEQ ID NO: 580623 - DNA, 19 bp, Mus musculus
  siRNA target sequence for Pitrm1 (NM_145131.1,294-312).
cgcacaaccccaatggata

SEQ ID NO: 580624 - DNA, 19 bp, Mus musculus
  siRNA target sequence for Pitrm1 (NM_145131.1,370-388).
cgtgcagagatcctttctt

SEQ ID NO: 580625 - DNA, 19 bp, Mus musculus
  siRNA target sequence for Pitrm1 (NM_145131.1,401-419).
caggtcactgtccacattt

SEQ ID NO: 580626 - DNA, 19 bp, Mus musculus
  siRNA target sequence for Pitrm1 (NM_145131.1,403-421).
ggtcactgtccacatttat

SEQ ID NO: 580627 - DNA, 19 bp, Mus musculus
  siRNA target sequence for Pitrm1 (NM_145131.1,435-453).
gccagcgattacacgatat

SEQ ID NO: 580628 - DNA, 19 bp, Mus musculus
  siRNA target sequence for Pitrm1 (NM_145131.1,436-454).
ccagcgattacacgatata

SEQ ID NO: 580629 - DNA, 19 bp, Mus musculus
  siRNA target sequence for Pitrm1 (NM_145131.1,437-455).
cagcgattacacgatatat

SEQ ID NO: 580630 - DNA, 19 bp, Mus musculus
  siRNA target sequence for Pitrm1 (NM_145131.1,562-580).
ggcgtctggagcatgagaa

SEQ ID NO: 580631 - DNA, 19 bp, Mus musculus
  siRNA target sequence for Pitrm1 (NM_145131.1,591-609).
cctcagacgcccttgatct

SEQ ID NO: 580632 - DNA, 19 bp, Mus musculus
  siRNA target sequence for Pitrm1 (NM_145131.1,592-610).
ctcagacgcccttgatctt

SEQ ID NO: 580633 - DNA, 19 bp, Mus musculus
  siRNA target sequence for Pitrm1 (NM_145131.1,594-612).
cagacgcccttgatcttta

SEQ ID NO: 580634 - DNA, 19 bp, Mus musculus
  siRNA target sequence for Pitrm1 (NM_145131.1,632-650).
gatgaaaggggcatttaca

SEQ ID NO: 580635 - DNA, 19 bp, Mus musculus
  siRNA target sequence for Pitrm1 (NM_145131.1,649-667).
cagacaatgagaggatatt

SEQ ID NO: 580636 - DNA, 19 bp, Mus musculus
  siRNA target sequence for Pitrm1 (NM_145131.1,651-669).
gacaatgagaggatattct

SEQ ID NO: 580637 - DNA, 19 bp, Mus musculus
  siRNA target sequence for Pitrm1 (NM_145131.1,773-791).
gttccacgctactcattat

SEQ ID NO: 580638 - DNA, 19 bp, Mus musculus
  siRNA target sequence for Pitrm1 (NM_145131.1,841-859).
gacacctgaaacaaattca

SEQ ID NO: 580639 - DNA, 19 bp, Mus musculus
  siRNA target sequence for Pitrm1 (NM_145131.1,860-878).
cgaagaagccctgagtaaa

SEQ ID NO: 580640 - DNA, 19 bp, Mus musculus
  siRNA target sequence for Pitrm1 (NM_145131.1,932-950).
gcctagggaattccatata

SEQ ID NO: 580641 - DNA, 19 bp, Mus musculus
  siRNA target sequence for Pitrm1 (NM_145131.1,938-956).
ggaattccatataacatgt

SEQ ID NO: 580642 - DNA, 19 bp, Mus musculus
  siRNA target sequence for Pitrm1 (NM_145131.1,994-1012).
caactgtcagcgttagctt

SEQ ID NO: 580643 - DNA, 19 bp, Mus musculus
  siRNA target sequence for Pitrm1 (NM_145131.1,1013-1031).
cctcttaccggatatcact

SEQ ID NO: 580644 - DNA, 19 bp, Mus musculus
  siRNA target sequence for Pitrm1 (NM_145131.1,1021-1039).
cggatatcactgacacatt

SEQ ID NO: 580645 - DNA, 19 bp, Mus musculus
  siRNA target sequence for Pitrm1 (NM_145131.1,1093-1111).
cccccttctacaaagcttt

SEQ ID NO: 580646 - DNA, 19 bp, Mus musculus
  siRNA target sequence for Pitrm1 (NM_145131.1,1122-1140).
ggactcggcacagactttt

SEQ ID NO: 580647 - DNA, 19 bp, Mus musculus
  siRNA target sequence for Pitrm1 (NM_145131.1,1238-1256).
cgtagacaggacaatcgaa

SEQ ID NO: 580648 - DNA, 19 bp, Mus musculus
  siRNA target sequence for Pitrm1 (NM_145131.1,1246-1264).
ggacaatcgaagaagttat

SEQ ID NO: 580649 - DNA, 19 bp, Mus musculus
  siRNA target sequence for Pitrm1 (NM_145131.1,1247-1265).
gacaatcgaagaagttata

SEQ ID NO: 580650 - DNA, 19 bp, Mus musculus
  siRNA target sequence for Pitrm1 (NM_145131.1,1249-1267).
caatcgaagaagttataga

SEQ ID NO: 580651 - DNA, 19 bp, Mus musculus
  siRNA target sequence for Pitrm1 (NM_145131.1,1301-1319).
gcttcataaaatcgaaatt

SEQ ID NO: 580652 - DNA, 19 bp, Mus musculus
  siRNA target sequence for Pitrm1 (NM_145131.1,1349-1367).
cctgaccctgacgtcatat

SEQ ID NO: 580653 - DNA, 19 bp, Mus musculus
  siRNA target sequence for Pitrm1 (NM_145131.1,1350-1368).
ctgaccctgacgtcatata

SEQ ID NO: 580654 - DNA, 19 bp, Mus musculus
  siRNA target sequence for Pitrm1 (NM_145131.1,1352-1370).
gaccctgacgtcatatata

SEQ ID NO: 580655 - DNA, 19 bp, Mus musculus
  siRNA target sequence for Pitrm1 (NM_145131.1,1355-1373).
cctgacgtcatatatagct

SEQ ID NO: 580656 - DNA, 19 bp, Mus musculus
  siRNA target sequence for Pitrm1 (NM_145131.1,1419-1437).
ggaagtcagctgactagat

SEQ ID NO: 580657 - DNA, 19 bp, Mus musculus
  siRNA target sequence for Pitrm1 (NM_145131.1,1425-1443).
cagctgactagatttagga

SEQ ID NO: 580658 - DNA, 19 bp, Mus musculus
  siRNA target sequence for Pitrm1 (NM_145131.1,1509-1527).
cacaagctgactttatcca

SEQ ID NO: 580659 - DNA, 19 bp, Mus musculus
  siRNA target sequence for Pitrm1 (NM_145131.1,1534-1552).
cagacgacaagtattatga

SEQ ID NO: 580660 - DNA, 19 bp, Mus musculus
  siRNA target sequence for Pitrm1 (NM_145131.1,1536-1554).
gacgacaagtattatgaaa

SEQ ID NO: 580661 - DNA, 19 bp, Mus musculus
  siRNA target sequence for Pitrm1 (NM_145131.1,1581-1599).
ctggagcaaaaggtgaatt

SEQ ID NO: 580662 - DNA, 19 bp, Mus musculus
  siRNA target sequence for Pitrm1 (NM_145131.1,1612-1630).
cggacaagcagcagatcta

SEQ ID NO: 580663 - DNA, 19 bp, Mus musculus
  siRNA target sequence for Pitrm1 (NM_145131.1,1623-1641).
cagatctacgagaaaggtt

SEQ ID NO: 580664 - DNA, 19 bp, Mus musculus
  siRNA target sequence for Pitrm1 (NM_145131.1,1625-1643).
gatctacgagaaaggttta

SEQ ID NO: 580665 - DNA, 19 bp, Mus musculus
  siRNA target sequence for Pitrm1 (NM_145131.1,1628-1646).
ctacgagaaaggtttagaa

SEQ ID NO: 580666 - DNA, 19 bp, Mus musculus
  siRNA target sequence for Pitrm1 (NM_145131.1,1631-1649).
cgagaaaggtttagaacta

SEQ ID NO: 580667 - DNA, 19 bp, Mus musculus
  siRNA target sequence for Pitrm1 (NM_145131.1,1652-1670).
gacgcagcaaagtaaacat

SEQ ID NO: 580668 - DNA, 19 bp, Mus musculus
  siRNA target sequence for Pitrm1 (NM_145131.1,1654-1672).
cgcagcaaagtaaacatca

SEQ ID NO: 580669 - DNA, 19 bp, Mus musculus
  siRNA target sequence for Pitrm1 (NM_145131.1,1655-1673).
gcagcaaagtaaacatcaa

SEQ ID NO: 580670 - DNA, 19 bp, Mus musculus
  siRNA target sequence for Pitrm1 (NM_145131.1,1792-1810).
ccaacggcatggtgtattt

SEQ ID NO: 580671 - DNA, 19 bp, Mus musculus
  siRNA target sequence for Pitrm1 (NM_145131.1,1894-1912).
gttgtggcatccttaacta

SEQ ID NO: 580672 - DNA, 19 bp, Mus musculus
  siRNA target sequence for Pitrm1 (NM_145131.1,1915-1933).
gagagcaagcccaacagat

SEQ ID NO: 580673 - DNA, 19 bp, Mus musculus
  siRNA target sequence for Pitrm1 (NM_145131.1,2000-2018).
ctacgagcagggtgtgtta

SEQ ID NO: 580674 - DNA, 19 bp, Mus musculus
  siRNA target sequence for Pitrm1 (NM_145131.1,2003-2021).
cgagcagggtgtgttattt

SEQ ID NO: 580675 - DNA, 19 bp, Mus musculus
  siRNA target sequence for Pitrm1 (NM_145131.1,2004-2022).
gagcagggtgtgttatttt

SEQ ID NO: 580676 - DNA, 19 bp, Mus musculus
  siRNA target sequence for Pitrm1 (NM_145131.1,2006-2024).
gcagggtgtgttattttca

SEQ ID NO: 580677 - DNA, 19 bp, Mus musculus
  siRNA target sequence for Pitrm1 (NM_145131.1,2060-2078).
gcatctgtggagcgaaata

SEQ ID NO: 580678 - DNA, 19 bp, Mus musculus
  siRNA target sequence for Pitrm1 (NM_145131.1,2064-2082).
ctgtggagcgaaatattta

SEQ ID NO: 580679 - DNA, 19 bp, Mus musculus
  siRNA target sequence for Pitrm1 (NM_145131.1,2068-2086).
ggagcgaaatatttaacaa

SEQ ID NO: 580680 - DNA, 19 bp, Mus musculus
  siRNA target sequence for Pitrm1 (NM_145131.1,2141-2159).
ggagctctccaatggaatt

SEQ ID NO: 580681 - DNA, 19 bp, Mus musculus
  siRNA target sequence for Pitrm1 (NM_145131.1,2161-2179).
cagactcggggcatctcta

SEQ ID NO: 580682 - DNA, 19 bp, Mus musculus
  siRNA target sequence for Pitrm1 (NM_145131.1,2315-2333).
ccggatcaagaagtatcta

SEQ ID NO: 580683 - DNA, 19 bp, Mus musculus
  siRNA target sequence for Pitrm1 (NM_145131.1,2348-2366).
catgagatgctcagtgaat

SEQ ID NO: 580684 - DNA, 19 bp, Mus musculus
  siRNA target sequence for Pitrm1 (NM_145131.1,2381-2399).
gatgcctcaggcagaaaaa

SEQ ID NO: 580685 - DNA, 19 bp, Mus musculus
  siRNA target sequence for Pitrm1 (NM_145131.1,2518-2536).
ggtcccagatcgtcagaaa

SEQ ID NO: 580686 - DNA, 19 bp, Mus musculus
  siRNA target sequence for Pitrm1 (NM_145131.1,2519-2537).
gtcccagatcgtcagaaaa

SEQ ID NO: 580687 - DNA, 19 bp, Mus musculus
  siRNA target sequence for Pitrm1 (NM_145131.1,2649-2667).
gaccatgccagccttaaga

SEQ ID NO: 580688 - DNA, 19 bp, Mus musculus
  siRNA target sequence for Pitrm1 (NM_145131.1,2669-2687).
ccttgcccgtctaatgaca

SEQ ID NO: 580689 - DNA, 19 bp, Mus musculus
  siRNA target sequence for Pitrm1 (NM_145131.1,2675-2693).
ccgtctaatgacagctaaa

SEQ ID NO: 580690 - DNA, 19 bp, Mus musculus
  siRNA target sequence for Pitrm1 (NM_145131.1,2676-2694).
cgtctaatgacagctaaat

SEQ ID NO: 580691 - DNA, 19 bp, Mus musculus
  siRNA target sequence for Pitrm1 (NM_145131.1,2679-2697).
ctaatgacagctaaattct

SEQ ID NO: 580692 - DNA, 19 bp, Mus musculus
  siRNA target sequence for Pitrm1 (NM_145131.1,2696-2714).
cttgcatacggaaattcga

SEQ ID NO: 580693 - DNA, 19 bp, Mus musculus
  siRNA target sequence for Pitrm1 (NM_145131.1,2717-2735).
gaaggggggtgcttatggt

SEQ ID NO: 580694 - DNA, 19 bp, Mus musculus
  siRNA target sequence for Pitrm1 (NM_145131.1,2760-2778).
gggattttcacgctttact

SEQ ID NO: 580695 - DNA, 19 bp, Mus musculus
  siRNA target sequence for Pitrm1 (NM_145131.1,2762-2780).
gattttcacgctttactct

SEQ ID NO: 580696 - DNA, 19 bp, Mus musculus
  siRNA target sequence for Pitrm1 (NM_145131.1,2786-2804).
ggatcccaattccatagaa

SEQ ID NO: 580697 - DNA, 19 bp, Mus musculus
  siRNA target sequence for Pitrm1 (NM_145131.1,2787-2805).
gatcccaattccatagaaa

SEQ ID NO: 580698 - DNA, 19 bp, Mus musculus
  siRNA target sequence for Pitrm1 (NM_145131.1,2916-2934).
gctccatccgataaaggaa

SEQ ID NO: 580699 - DNA, 19 bp, Mus musculus
  siRNA target sequence for Pitrm1 (NM_145131.1,2917-2935).
ctccatccgataaaggaat

SEQ ID NO: 580700 - DNA, 19 bp, Mus musculus
  siRNA target sequence for Pitrm1 (NM_145131.1,2953-2971).
gcctctccgatgagatgaa

SEQ ID NO: 580701 - DNA, 19 bp, Mus musculus
  siRNA target sequence for Pitrm1 (NM_145131.1,2998-3016).
ctgtcaaccacgacaaact

SEQ ID NO: 580702 - DNA, 19 bp, Mus musculus
  siRNA target sequence for Pitrm1 (NM_145131.1,3022-3040).
ctgtgagccataaatacct

SEQ ID NO: 580703 - DNA, 19 bp, Mus musculus
  siRNA target sequence for Pitrm1 (NM_145131.1,3105-3123).
gacccatcatggatcataa

SEQ ID NO: 580704 - DNA, 19 bp, Mus musculus
  siRNA target sequence for Pitrm1 (NM_145131.1,3107-3125).
cccatcatggatcataaaa

SEQ ID NO: 580705 - DNA, 19 bp, Mus musculus
  siRNA target sequence for Spag5 (NM_017407.1,107-125).
ctctccgagagcttaaact

SEQ ID NO: 580706 - DNA, 19 bp, Mus musculus
  siRNA target sequence for Spag5 (NM_017407.1,225-243).
ctcatctccagtggatttt

SEQ ID NO: 580707 - DNA, 19 bp, Mus musculus
  siRNA target sequence for Spag5 (NM_017407.1,227-245).
catctccagtggattttat

SEQ ID NO: 580708 - DNA, 19 bp, Mus musculus
  siRNA target sequence for Spag5 (NM_017407.1,397-415).
gacccaagagatgatagta

SEQ ID NO: 580709 - DNA, 19 bp, Mus musculus
  siRNA target sequence for Spag5 (NM_017407.1,399-417).
cccaagagatgatagtata

SEQ ID NO: 580710 - DNA, 19 bp, Mus musculus
  siRNA target sequence for Spag5 (NM_017407.1,401-419).
caagagatgatagtatagt

SEQ ID NO: 580711 - DNA, 19 bp, Mus musculus
  siRNA target sequence for Spag5 (NM_017407.1,429-447).
ggttcttctgcccttttca

SEQ ID NO: 580712 - DNA, 19 bp, Mus musculus
  siRNA target sequence for Spag5 (NM_017407.1,503-521).
gaactaaaagctctctaaa

SEQ ID NO: 580713 - DNA, 19 bp, Mus musculus
  siRNA target sequence for Spag5 (NM_017407.1,512-530).
gctctctaaatgaatcttt

SEQ ID NO: 580714 - DNA, 19 bp, Mus musculus
  siRNA target sequence for Spag5 (NM_017407.1,527-545).
ctttggggctagaagatct

SEQ ID NO: 580715 - DNA, 19 bp, Mus musculus
  siRNA target sequence for Spag5 (NM_017407.1,605-623).
ggcccgagcaacctacatt

SEQ ID NO: 580716 - DNA, 19 bp, Mus musculus
  siRNA target sequence for Spag5 (NM_017407.1,608-626).
ccgagcaacctacatttca

SEQ ID NO: 580717 - DNA, 19 bp, Mus musculus
  siRNA target sequence for Spag5 (NM_017407.1,702-720).
ctctctggctcgtctttct

SEQ ID NO: 580718 - DNA, 19 bp, Mus musculus
  siRNA target sequence for Spag5 (NM_017407.1,852-870).
ccaagcacctgctgcaaat

SEQ ID NO: 580719 - DNA, 19 bp, Mus musculus
  siRNA target sequence for Spag5 (NM_017407.1,886-904).
cccttgtacctgacatcaa

SEQ ID NO: 580720 - DNA, 19 bp, Mus musculus
  siRNA target sequence for Spag5 (NM_017407.1,891-909).
gtacctgacatcaagtcta

SEQ ID NO: 580721 - DNA, 19 bp, Mus musculus
  siRNA target sequence for Spag5 (NM_017407.1,998-1016).
cattggcctggctagaaaa

SEQ ID NO: 580722 - DNA, 19 bp, Mus musculus
  siRNA target sequence for Spag5 (NM_017407.1,1012-1030).
gaaaagggtgtgaatacat

SEQ ID NO: 580723 - DNA, 19 bp, Mus musculus
  siRNA target sequence for Spag5 (NM_017407.1,1031-1049).
cggtcatgctacaaaacct

SEQ ID NO: 580724 - DNA, 19 bp, Mus musculus
  siRNA target sequence for Spag5 (NM_017407.1,1048-1066).
ctccgccagagcttatcct

SEQ ID NO: 580725 - DNA, 19 bp, Mus musculus
  siRNA target sequence for Spag5 (NM_017407.1,1162-1180).
ggcaccaaggacagtactt

SEQ ID NO: 580726 - DNA, 19 bp, Mus musculus
  siRNA target sequence for Spag5 (NM_017407.1,1164-1182).
caccaaggacagtacttca

SEQ ID NO: 580727 - DNA, 19 bp, Mus musculus
  siRNA target sequence for Spag5 (NM_017407.1,1238-1256).
gacacgacttggaagagaa

SEQ ID NO: 580728 - DNA, 19 bp, Mus musculus
  siRNA target sequence for Spag5 (NM_017407.1,1438-1456).
ctgcaagccaggaatgtca

SEQ ID NO: 580729 - DNA, 19 bp, Mus musculus
  siRNA target sequence for Spag5 (NM_017407.1,1444-1462).
gccaggaatgtcatgcaat

SEQ ID NO: 580730 - DNA, 19 bp, Mus musculus
  siRNA target sequence for Spag5 (NM_017407.1,1548-1566).
ggagtctcagcggtcaaaa

SEQ ID NO: 580731 - DNA, 19 bp, Mus musculus
  siRNA target sequence for Spag5 (NM_017407.1,1549-1567).
gagtctcagcggtcaaaaa

SEQ ID NO: 580732 - DNA, 19 bp, Mus musculus
  siRNA target sequence for Spag5 (NM_017407.1,2063-2081).
gtcaaatcgaacaactgaa

SEQ ID NO: 580733 - DNA, 19 bp, Mus musculus
  siRNA target sequence for Spag5 (NM_017407.1,2138-2156).
gcacagagagtcagctaaa

SEQ ID NO: 580734 - DNA, 19 bp, Mus musculus
  siRNA target sequence for Spag5 (NM_017407.1,2238-2256).
caaggagcaggctactcaa

SEQ ID NO: 580735 - DNA, 19 bp, Mus musculus
  siRNA target sequence for Spag5 (NM_017407.1,2349-2367).
gactgtggagtttatagat

SEQ ID NO: 580736 - DNA, 19 bp, Mus musculus
  siRNA target sequence for Spag5 (NM_017407.1,2358-2376).
gtttatagatgaagaaagt

SEQ ID NO: 580737 - DNA, 19 bp, Mus musculus
  siRNA target sequence for Spag5 (NM_017407.1,2403-2421).
gattgagagtcagttgaaa

SEQ ID NO: 580738 - DNA, 19 bp, Mus musculus
  siRNA target sequence for Spag5 (NM_017407.1,2418-2436).
gaaagtcacgctagagtta

SEQ ID NO: 580739 - DNA, 19 bp, Mus musculus
  siRNA target sequence for Spag5 (NM_017407.1,2625-2643).
ggagaacaaggctgaatca

SEQ ID NO: 580740 - DNA, 19 bp, Mus musculus
  siRNA target sequence for Spag5 (NM_017407.1,2634-2652).
ggctgaatcagagatcatt

SEQ ID NO: 580741 - DNA, 19 bp, Mus musculus
  siRNA target sequence for Spag5 (NM_017407.1,2903-2921).
ccctgctgcaagagtctaa

SEQ ID NO: 580742 - DNA, 19 bp, Mus musculus
  siRNA target sequence for Spag5 (NM_017407.1,2946-2964).
gagggaaatctgtgaacta

SEQ ID NO: 580743 - DNA, 19 bp, Mus musculus
  siRNA target sequence for Spag5 (NM_017407.1,2948-2966).
gggaaatctgtgaactaca

SEQ ID NO: 580744 - DNA, 19 bp, Mus musculus
  siRNA target sequence for Spag5 (NM_017407.1,3051-3069).
gtgcttgctccgcaagaat

SEQ ID NO: 580745 - DNA, 19 bp, Mus musculus
  siRNA target sequence for Spag5 (NM_017407.1,3053-3071).
gcttgctccgcaagaatga

SEQ ID NO: 580746 - DNA, 19 bp, Mus musculus
  siRNA target sequence for Spag5 (NM_017407.1,3134-3152).
gcggccagctcataaacct

SEQ ID NO: 580747 - DNA, 19 bp, Mus musculus
  siRNA target sequence for Spag5 (NM_017407.1,3253-3271).
cagctgatggctactaact

SEQ ID NO: 580748 - DNA, 19 bp, Mus musculus
  siRNA target sequence for Spag5 (NM_017407.1,3308-3326).
gcaagctgagggttatgtt

SEQ ID NO: 580749 - DNA, 19 bp, Mus musculus
  siRNA target sequence for Spag5 (NM_017407.1,3426-3444).
gaaactcgatgacacaatt

SEQ ID NO: 580750 - DNA, 19 bp, Mus musculus
  siRNA target sequence for Spag5 (NM_017407.1,3438-3456).
cacaattcagcatgtctat

SEQ ID NO: 580751 - DNA, 19 bp, Mus musculus
  siRNA target sequence for Spag5 (NM_017407.1,3498-3516).
ggagttacaaggattgcta

SEQ ID NO: 580752 - DNA, 19 bp, Mus musculus
  siRNA target sequence for 6430584G11Rik (NM_172624.1,271-289).
ggatgggctgcgtagcatt

SEQ ID NO: 580753 - DNA, 19 bp, Mus musculus
  siRNA target sequence for 6430584G11Rik (NM_172624.1,272-290).
gatgggctgcgtagcatta

SEQ ID NO: 580754 - DNA, 19 bp, Mus musculus
  siRNA target sequence for 6430584G11Rik (NM_172624.1,276-294).
ggctgcgtagcattatcca

SEQ ID NO: 580755 - DNA, 19 bp, Mus musculus
  siRNA target sequence for 6430584G11Rik (NM_172624.1,336-354).
cccacgacttccagtttgt

SEQ ID NO: 580756 - DNA, 19 bp, Mus musculus
  siRNA target sequence for 6430584G11Rik (NM_172624.1,384-402).
ctcaccgtctctattacct

SEQ ID NO: 580757 - DNA, 19 bp, Mus musculus
  siRNA target sequence for 6430584G11Rik (NM_172624.1,586-604).
cttcggaatcacctcttat

SEQ ID NO: 580758 - DNA, 19 bp, Mus musculus
  siRNA target sequence for 6430584G11Rik (NM_172624.1,590-608).
ggaatcacctcttatgact

SEQ ID NO: 580759 - DNA, 19 bp, Mus musculus
  siRNA target sequence for 6430584G11Rik (NM_172624.1,664-682).
cagggatggtggcaagaat

SEQ ID NO: 580760 - DNA, 19 bp, Mus musculus
  siRNA target sequence for 6430584G11Rik (NM_172624.1,672-690).
gtggcaagaatggctttat

SEQ ID NO: 580761 - DNA, 19 bp, Mus musculus
  siRNA target sequence for 6430584G11Rik (NM_172624.1,896-914).
ggcgtggccacctttgtca

SEQ ID NO: 580762 - DNA, 19 bp, Mus musculus
  siRNA target sequence for 6430584G11Rik (NM_172624.1,897-915).
gcgtggccacctttgtcat

SEQ ID NO: 580763 - DNA, 19 bp, Mus musculus
  siRNA target sequence for 6430584G11Rik (NM_172624.1,991-1009).
gacgctgcgcatcctatat

SEQ ID NO: 580764 - DNA, 19 bp, Mus musculus
  siRNA target sequence for 6430584G11Rik (NM_172624.1,993-1011).
cgctgcgcatcctatatga

SEQ ID NO: 580765 - DNA, 19 bp, Mus musculus
  siRNA target sequence for 6430584G11Rik (NM_172624.1,1149-1167).
cggaccatcagggcaaaat

SEQ ID NO: 580766 - DNA, 19 bp, Mus musculus
  siRNA target sequence for 6430584G11Rik (NM_172624.1,1248-1266).
ggacacgggacggcaaata

SEQ ID NO: 580767 - DNA, 19 bp, Mus musculus
  siRNA target sequence for 6430584G11Rik (NM_172624.1,1249-1267).
gacacgggacggcaaatat

SEQ ID NO: 580768 - DNA, 19 bp, Mus musculus
  siRNA target sequence for 6430584G11Rik (NM_172624.1,1380-1398).
gagccgtccccaagaatgt

SEQ ID NO: 580769 - DNA, 19 bp, Mus musculus
  siRNA target sequence for 6430584G11Rik (NM_172624.1,1399-1417).
gcagccctttgtcatctat

SEQ ID NO: 580770 - DNA, 19 bp, Mus musculus
  siRNA target sequence for 6430584G11Rik (NM_172624.1,1481-1499).
ggccagcaggacttttgtt

SEQ ID NO: 580771 - DNA, 19 bp, Mus musculus
  siRNA target sequence for 6430584G11Rik (NM_172624.1,1551-1569).
cagtggaacttaaaaccaa

SEQ ID NO: 580772 - DNA, 19 bp, Mus musculus
  siRNA target sequence for 6430584G11Rik (NM_172624.1,1596-1614).
gccctacagaagatgagtt

SEQ ID NO: 580773 - DNA, 19 bp, Mus musculus
  siRNA target sequence for 6430584G11Rik (NM_172624.1,1879-1897).
cacgccaccctgtgtacat

SEQ ID NO: 580774 - DNA, 19 bp, Mus musculus
  siRNA target sequence for 6430584G11Rik (NM_172624.1,1881-1899).
cgccaccctgtgtacatgt

SEQ ID NO: 580775 - DNA, 19 bp, Mus musculus
  siRNA target sequence for 6430584G11Rik (NM_172624.1,2039-2057).
ctctacggcatgatctaca

SEQ ID NO: 580776 - DNA, 19 bp, Mus musculus
  siRNA target sequence for 6430584G11Rik (NM_172624.1,2155-2173).
caaatacctgcggctaaat

SEQ ID NO: 580777 - DNA, 19 bp, Mus musculus
  siRNA target sequence for 6430584G11Rik (NM_172624.1,2469-2487).
cagggtacacggaacgata

SEQ ID NO: 580778 - DNA, 19 bp, Mus musculus
  siRNA target sequence for 6430584G11Rik (NM_172624.1,2472-2490).
ggtacacggaacgatacat

SEQ ID NO: 580779 - DNA, 19 bp, Mus musculus
  siRNA target sequence for 6430584G11Rik (NM_172624.1,2568-2586).
ctaaccgcctgcttatcct

SEQ ID NO: 580780 - DNA, 19 bp, Mus musculus
  siRNA target sequence for 6430584G11Rik (NM_172624.1,2612-2630).
cacttcttccacacaaatt

SEQ ID NO: 580781 - DNA, 19 bp, Mus musculus
  siRNA target sequence for 6430584G11Rik (NM_172624.1,2685-2703).
caaacgagagacatagcat

SEQ ID NO: 580782 - DNA, 19 bp, Mus musculus
  siRNA target sequence for 6430584G11Rik (NM_172624.1,2712-2730).
gcgagtccggagagcatta

SEQ ID NO: 580783 - DNA, 19 bp, Mus musculus
  siRNA target sequence for 6430601K09Rik (NM_199021.1,85-103).
cctcacactctgtgaatct

SEQ ID NO: 580784 - DNA, 19 bp, Mus musculus
  siRNA target sequence for 6430601K09Rik (NM_199021.1,111-129).
gggcatgcagcaggaaata

SEQ ID NO: 580785 - DNA, 19 bp, Mus musculus
  siRNA target sequence for 6430601K09Rik (NM_199021.1,112-130).
ggcatgcagcaggaaatat

SEQ ID NO: 580786 - DNA, 19 bp, Mus musculus
  siRNA target sequence for 6430601K09Rik (NM_199021.1,141-159).
ccgacacctggctctctaa

SEQ ID NO: 580787 - DNA, 19 bp, Mus musculus
  siRNA target sequence for 6430601K09Rik (NM_199021.1,142-160).
cgacacctggctctctaaa

SEQ ID NO: 580788 - DNA, 19 bp, Mus musculus
  siRNA target sequence for 6430601K09Rik (NM_199021.1,147-165).
cctggctctctaaacagaa

SEQ ID NO: 580789 - DNA, 19 bp, Mus musculus
  siRNA target sequence for 6430601K09Rik (NM_199021.1,205-223).
catgactgttcctgttaaa

SEQ ID NO: 580790 - DNA, 19 bp, Mus musculus
  siRNA target sequence for 6430601K09Rik (NM_199021.1,208-226).
gactgttcctgttaaacaa

SEQ ID NO: 580791 - DNA, 19 bp, Mus musculus
  siRNA target sequence for 6430601K09Rik (NM_199021.1,271-289).
gagtaaaagcgagcaaatt

SEQ ID NO: 580792 - DNA, 19 bp, Mus musculus
  siRNA target sequence for 6430601K09Rik (NM_199021.1,330-348).
ggatcttggcctatgatga

SEQ ID NO: 580793 - DNA, 19 bp, Mus musculus
  siRNA target sequence for 6430601K09Rik (NM_199021.1,331-349).
gatcttggcctatgatgaa

SEQ ID NO: 580794 - DNA, 19 bp, Mus musculus
  siRNA target sequence for 6430601K09Rik (NM_199021.1,334-352).
cttggcctatgatgaaaca

SEQ ID NO: 580795 - DNA, 19 bp, Mus musculus
  siRNA target sequence for 6430601K09Rik (NM_199021.1,337-355).
ggcctatgatgaaacaact

SEQ ID NO: 580796 - DNA, 19 bp, Mus musculus
  siRNA target sequence for 6430601K09Rik (NM_199021.1,389-407).
ccccaagggaggcaactat

SEQ ID NO: 580797 - DNA, 19 bp, Mus musculus
  siRNA target sequence for 6430601K09Rik (NM_199021.1,390-408).
cccaagggaggcaactata

SEQ ID NO: 580798 - DNA, 19 bp, Mus musculus
  siRNA target sequence for 6430601K09Rik (NM_199021.1,417-435).
ctactgagggactattgaa

SEQ ID NO: 580799 - DNA, 19 bp, Mus musculus
  siRNA target sequence for 6430601K09Rik (NM_199021.1,498-516).
gccccatgaatcaacattt

SEQ ID NO: 580800 - DNA, 19 bp, Mus musculus
  siRNA target sequence for 6430601K09Rik (NM_199021.1,500-518).
cccatgaatcaacatttct

SEQ ID NO: 580801 - DNA, 19 bp, Mus musculus
  siRNA target sequence for 6430601K09Rik (NM_199021.1,501-519).
ccatgaatcaacatttctt

SEQ ID NO: 580802 - DNA, 19 bp, Mus musculus
  siRNA target sequence for 6430601K09Rik (NM_199021.1,505-523).
gaatcaacatttcttgtta

SEQ ID NO: 580803 - DNA, 19 bp, Mus musculus
  siRNA target sequence for 6430601K09Rik (NM_199021.1,569-587).
gacaacccatcaaggtatt

SEQ ID NO: 580804 - DNA, 19 bp, Mus musculus
  siRNA target sequence for 6430601K09Rik (NM_199021.1,654-672).
ctagaatacttcacattga

SEQ ID NO: 580805 - DNA, 19 bp, Mus musculus
  siRNA target sequence for 6430601K09Rik (NM_199021.1,730-748).
gtatgctcttctattaata

SEQ ID NO: 580806 - DNA, 19 bp, Mus musculus
  siRNA target sequence for 6430601K09Rik (NM_199021.1,799-817).
ctgggattcagttcttatt

SEQ ID NO: 580807 - DNA, 19 bp, Mus musculus
  siRNA target sequence for 6430601K09Rik (NM_199021.1,803-821).
gattcagttcttattgaca

SEQ ID NO: 580808 - DNA, 19 bp, Mus musculus
  siRNA target sequence for 6430601K09Rik (NM_199021.1,832-850).
cattgtagcaagatttgat

SEQ ID NO: 580809 - DNA, 19 bp, Mus musculus
  siRNA target sequence for 6430601K09Rik (NM_199021.1,864-882).
gattccagggcctgaaagt

SEQ ID NO: 580810 - DNA, 19 bp, Mus musculus
  siRNA target sequence for 6430601K09Rik (NM_199021.1,971-989).
gactccaaaagattaagca

SEQ ID NO: 580811 - DNA, 19 bp, Mus musculus
  siRNA target sequence for 6430601K09Rik (NM_199021.1,973-991).
ctccaaaagattaagcatt

SEQ ID NO: 580812 - DNA, 19 bp, Mus musculus
  siRNA target sequence for 6430601K09Rik (NM_199021.1,1008-1026).
ggggctatattgcatcaat

SEQ ID NO: 580813 - DNA, 19 bp, Mus musculus
  siRNA target sequence for 6430601K09Rik (NM_199021.1,1011-1029).
gctatattgcatcaatgat

SEQ ID NO: 580814 - DNA, 19 bp, Mus musculus
  siRNA target sequence for 6430601K09Rik (NM_199021.1,1019-1037).
gcatcaatgatcttaaaat

SEQ ID NO: 580815 - DNA, 19 bp, Mus musculus
  siRNA target sequence for 6430601K09Rik (NM_199021.1,1161-1179).
catccagtgtactgcataa

SEQ ID NO: 580816 - DNA, 19 bp, Mus musculus
  siRNA target sequence for 6430601K09Rik (NM_199021.1,1164-1182).
ccagtgtactgcataacat

SEQ ID NO: 580817 - DNA, 19 bp, Mus musculus
  siRNA target sequence for 6430601K09Rik (NM_199021.1,1167-1185).
gtgtactgcataacattca

SEQ ID NO: 580818 - DNA, 19 bp, Mus musculus
  siRNA target sequence for 6430601K09Rik (NM_199021.1,1174-1192).
gcataacattcatggttta

SEQ ID NO: 580819 - DNA, 19 bp, Mus musculus
  siRNA target sequence for 6430601K09Rik (NM_199021.1,1217-1235).
cacggaactgctgatacaa

SEQ ID NO: 580820 - DNA, 19 bp, Mus musculus
  siRNA target sequence for 6430601K09Rik (NM_199021.1,1219-1237).
cggaactgctgatacaaaa

SEQ ID NO: 580821 - DNA, 19 bp, Mus musculus
  siRNA target sequence for 6430601K09Rik (NM_199021.1,1221-1239).
gaactgctgatacaaaagt

SEQ ID NO: 580822 - DNA, 19 bp, Mus musculus
  siRNA target sequence for 6430601K09Rik (NM_199021.1,1224-1242).
ctgctgatacaaaagttca

SEQ ID NO: 580823 - DNA, 19 bp, Mus musculus
  siRNA target sequence for 6430601K09Rik (NM_199021.1,1372-1390).
cagattcttcagtgattgt

SEQ ID NO: 580824 - DNA, 19 bp, Mus musculus
  siRNA target sequence for 6430601K09Rik (NM_199021.1,1374-1392).
gattcttcagtgattgtct

SEQ ID NO: 580825 - DNA, 19 bp, Mus musculus
  siRNA target sequence for Dpp6 (NM_010075.1,982-1000).
gcaataaggaattcatcta

SEQ ID NO: 580826 - DNA, 19 bp, Mus musculus
  siRNA target sequence for Dpp6 (NM_010075.1,1029-1047).
cggaatgttgaaacaaata

SEQ ID NO: 580827 - DNA, 19 bp, Mus musculus
  siRNA target sequence for Dpp6 (NM_010075.1,1111-1129).
ccccagataaagagtatgt

SEQ ID NO: 580828 - DNA, 19 bp, Mus musculus
  siRNA target sequence for Dpp6 (NM_010075.1,1164-1182).
cactcccacactggatatt

SEQ ID NO: 580829 - DNA, 19 bp, Mus musculus
  siRNA target sequence for Dpp6 (NM_010075.1,1166-1184).
ctcccacactggatattat

SEQ ID NO: 580830 - DNA, 19 bp, Mus musculus
  siRNA target sequence for Dpp6 (NM_010075.1,1168-1186).
cccacactggatattatgt

SEQ ID NO: 580831 - DNA, 19 bp, Mus musculus
  siRNA target sequence for Dpp6 (NM_010075.1,1169-1187).
ccacactggatattatgtt

SEQ ID NO: 580832 - DNA, 19 bp, Mus musculus
  siRNA target sequence for Dpp6 (NM_010075.1,1241-1259).
caacgcaaagcttcagtat

SEQ ID NO: 580833 - DNA, 19 bp, Mus musculus
  siRNA target sequence for Dpp6 (NM_010075.1,1363-1381).
ggaaggagggcgtgatcta

SEQ ID NO: 580834 - DNA, 19 bp, Mus musculus
  siRNA target sequence for Dpp6 (NM_010075.1,1367-1385).
ggagggcgtgatctacaat

SEQ ID NO: 580835 - DNA, 19 bp, Mus musculus
  siRNA target sequence for Dpp6 (NM_010075.1,1489-1507).
cccgggttccacttatgga

SEQ ID NO: 580836 - DNA, 19 bp, Mus musculus
  siRNA target sequence for Dpp6 (NM_010075.1,1560-1578).
cctaaggctggcagtgaaa

SEQ ID NO: 580837 - DNA, 19 bp, Mus musculus
  siRNA target sequence for Dpp6 (NM_010075.1,1585-1603).
gcatctcgctccatgtcat

SEQ ID NO: 580838 - DNA, 19 bp, Mus musculus
  siRNA target sequence for Dpp6 (NM_010075.1,1656-1674).
cgcatgagggaatattaca

SEQ ID NO: 580839 - DNA, 19 bp, Mus musculus
  siRNA target sequence for Dpp6 (NM_010075.1,1657-1675).
gcatgagggaatattacat

SEQ ID NO: 580840 - DNA, 19 bp, Mus musculus
  siRNA target sequence for Dpp6 (NM_010075.1,2889-2907).
cacgccacggccgatgaaa

SEQ ID NO: 580841 - DNA, 19 bp, Mus musculus
  siRNA target sequence for Dpp6 (NM_010075.1,2891-2909).
cgccacggccgatgaaaaa

SEQ ID NO: 580842 - DNA, 19 bp, Mus musculus
  siRNA target sequence for Dpp6 (NM_010075.1,2893-2911).
ccacggccgatgaaaaaat

SEQ ID NO: 580843 - DNA, 19 bp, Mus musculus
  siRNA target sequence for Dpp6 (NM_010075.1,2898-2916).
gccgatgaaaaaatccatt

SEQ ID NO: 580844 - DNA, 19 bp, Mus musculus
  siRNA target sequence for Dpp6 (NM_010075.1,2899-2917).
ccgatgaaaaaatccattt

SEQ ID NO: 580845 - DNA, 19 bp, Mus musculus
  siRNA target sequence for Dpp6 (NM_010075.1,2986-3004).
cagatgagagtcactactt

SEQ ID NO: 580846 - DNA, 19 bp, Mus musculus
  siRNA target sequence for Dpp8 (NM_028906.2,339-357).
cagctgggtgtcgagatat

SEQ ID NO: 580847 - DNA, 19 bp, Mus musculus
  siRNA target sequence for Dpp8 (NM_028906.2,341-359).
gctgggtgtcgagatattt

SEQ ID NO: 580848 - DNA, 19 bp, Mus musculus
  siRNA target sequence for Dpp8 (NM_028906.2,344-362).
gggtgtcgagatatttgaa

SEQ ID NO: 580849 - DNA, 19 bp, Mus musculus
  siRNA target sequence for Dpp8 (NM_028906.2,345-363).
ggtgtcgagatatttgaaa

SEQ ID NO: 580850 - DNA, 19 bp, Mus musculus
  siRNA target sequence for Dpp8 (NM_028906.2,461-479).
gcttgctgataccagaaaa

SEQ ID NO: 580851 - DNA, 19 bp, Mus musculus
  siRNA target sequence for Dpp8 (NM_028906.2,499-517).
ctaaggcgccacatgactt

SEQ ID NO: 580852 - DNA, 19 bp, Mus musculus
  siRNA target sequence for Dpp8 (NM_028906.2,504-522).
gcgccacatgactttatgt

SEQ ID NO: 580853 - DNA, 19 bp, Mus musculus
  siRNA target sequence for Dpp8 (NM_028906.2,635-653).
caacagagcagcagtctta

SEQ ID NO: 580854 - DNA, 19 bp, Mus musculus
  siRNA target sequence for Dpp8 (NM_028906.2,640-658).
gagcagcagtcttaatgct

SEQ ID NO: 580855 - DNA, 19 bp, Mus musculus
  siRNA target sequence for Dpp8 (NM_028906.2,662-680).
ctggaagccccttttggat

SEQ ID NO: 580856 - DNA, 19 bp, Mus musculus
  siRNA target sequence for Dpp8 (NM_028906.2,758-776).
cgtggggatcgcagcttat

SEQ ID NO: 580857 - DNA, 19 bp, Mus musculus
  siRNA target sequence for Dpp8 (NM_028906.2,761-779).
ggggatcgcagcttatgat

SEQ ID NO: 580858 - DNA, 19 bp, Mus musculus
  siRNA target sequence for Dpp8 (NM_028906.2,762-780).
gggatcgcagcttatgatt

SEQ ID NO: 580859 - DNA, 19 bp, Mus musculus
  siRNA target sequence for Dpp8 (NM_028906.2,763-781).
ggatcgcagcttatgatta

SEQ ID NO: 580860 - DNA, 19 bp, Mus musculus
  siRNA target sequence for Dpp8 (NM_028906.2,793-811).
gcggaacattcctgtttca

SEQ ID NO: 580861 - DNA, 19 bp, Mus musculus
  siRNA target sequence for Dpp8 (NM_028906.2,794-812).
cggaacattcctgtttcaa

SEQ ID NO: 580862 - DNA, 19 bp, Mus musculus
  siRNA target sequence for Dpp8 (NM_028906.2,814-832).
ctggcagcggcatttacca

SEQ ID NO: 580863 - DNA, 19 bp, Mus musculus
  siRNA target sequence for Dpp8 (NM_028906.2,816-834).
ggcagcggcatttaccata

SEQ ID NO: 580864 - DNA, 19 bp, Mus musculus
  siRNA target sequence for Dpp8 (NM_028906.2,817-835).
gcagcggcatttaccatat

SEQ ID NO: 580865 - DNA, 19 bp, Mus musculus
  siRNA target sequence for Dpp8 (NM_028906.2,820-838).
gcggcatttaccatatcaa

SEQ ID NO: 580866 - DNA, 19 bp, Mus musculus
  siRNA target sequence for Dpp8 (NM_028906.2,821-839).
cggcatttaccatatcaaa

SEQ ID NO: 580867 - DNA, 19 bp, Mus musculus
  siRNA target sequence for Dpp8 (NM_028906.2,847-865).
gaccacatggatttacaca

SEQ ID NO: 580868 - DNA, 19 bp, Mus musculus
  siRNA target sequence for Dpp8 (NM_028906.2,879-897).
cccaatttagtggaaacta

SEQ ID NO: 580869 - DNA, 19 bp, Mus musculus
  siRNA target sequence for Dpp8 (NM_028906.2,881-899).
caatttagtggaaactagt

SEQ ID NO: 580870 - DNA, 19 bp, Mus musculus
  siRNA target sequence for Dpp8 (NM_028906.2,898-916).
gttgtcccaatatacgaat

SEQ ID NO: 580871 - DNA, 19 bp, Mus musculus
  siRNA target sequence for Dpp8 (NM_028906.2,912-930).
cgaatggatccaaaattat

SEQ ID NO: 580872 - DNA, 19 bp, Mus musculus
  siRNA target sequence for Dpp8 (NM_028906.2,939-957).
gatccagactggatagctt

SEQ ID NO: 580873 - DNA, 19 bp, Mus musculus
  siRNA target sequence for Dpp8 (NM_028906.2,1002-1020).
gaagagcggaggatcacat

SEQ ID NO: 580874 - DNA, 19 bp, Mus musculus
  siRNA target sequence for Dpp8 (NM_028906.2,1012-1030).
ggatcacatacgtacacaa

SEQ ID NO: 580875 - DNA, 19 bp, Mus musculus
  siRNA target sequence for Dpp8 (NM_028906.2,1144-1162).
ctcctagtggtggtaaaat

SEQ ID NO: 580876 - DNA, 19 bp, Mus musculus
  siRNA target sequence for Dpp8 (NM_028906.2,1152-1170).
ggtggtaaaattcttagaa

SEQ ID NO: 580877 - DNA, 19 bp, Mus musculus
  siRNA target sequence for Dpp8 (NM_028906.2,1253-1271).
ctttcgttatcccaaaaca

SEQ ID NO: 580878 - DNA, 19 bp, Mus musculus
  siRNA target sequence for Dpp8 (NM_028906.2,1301-1319).
gatgtcggagattgttgtt

SEQ ID NO: 580879 - DNA, 19 bp, Mus musculus
  siRNA target sequence for Dpp8 (NM_028906.2,1324-1342).
ctgcaggagggattataga

SEQ ID NO: 580880 - DNA, 19 bp, Mus musculus
  siRNA target sequence for Dpp8 (NM_028906.2,1330-1348).
gagggattatagatgtcat

SEQ ID NO: 580881 - DNA, 19 bp, Mus musculus
  siRNA target sequence for Dpp8 (NM_028906.2,1333-1351).
ggattatagatgtcataga

SEQ ID NO: 580882 - DNA, 19 bp, Mus musculus
  siRNA target sequence for Dpp8 (NM_028906.2,1365-1383).
caacctttcgagattctgt

SEQ ID NO: 580883 - DNA, 19 bp, Mus musculus
  siRNA target sequence for Dpp8 (NM_028906.2,1380-1398).
ctgtttgagggagttgaat

SEQ ID NO: 580884 - DNA, 19 bp, Mus musculus
  siRNA target sequence for Dpp8 (NM_028906.2,1438-1456).
cctggtccatcctactaga

SEQ ID NO: 580885 - DNA, 19 bp, Mus musculus
  siRNA target sequence for Dpp8 (NM_028906.2,1690-1708).
caggttttcgtcatctgta

SEQ ID NO: 580886 - DNA, 19 bp, Mus musculus
  siRNA target sequence for Dpp8 (NM_028906.2,1692-1710).
ggttttcgtcatctgtata

SEQ ID NO: 580887 - DNA, 19 bp, Mus musculus
  siRNA target sequence for Dpp8 (NM_028906.2,1693-1711).
gttttcgtcatctgtataa

SEQ ID NO: 580888 - DNA, 19 bp, Mus musculus
  siRNA target sequence for Dpp8 (NM_028906.2,1698-1716).
cgtcatctgtataaaatca

SEQ ID NO: 580889 - DNA, 19 bp, Mus musculus
  siRNA target sequence for Dpp8 (NM_028906.2,1767-1785).
gccccaagtgatttcaagt

SEQ ID NO: 580890 - DNA, 19 bp, Mus musculus
  siRNA target sequence for Dpp8 (NM_028906.2,1781-1799).
caagtgtcctatcaaagaa

SEQ ID NO: 580891 - DNA, 19 bp, Mus musculus
  siRNA target sequence for Dpp8 (NM_028906.2,1784-1802).
gtgtcctatcaaagaagaa

SEQ ID NO: 580892 - DNA, 19 bp, Mus musculus
  siRNA target sequence for Dpp8 (NM_028906.2,1839-1857).
cggcatggatctaatatct

SEQ ID NO: 580893 - DNA, 19 bp, Mus musculus
  siRNA target sequence for Dpp8 (NM_028906.2,1849-1867).
ctaatatctgggttgatga

SEQ ID NO: 580894 - DNA, 19 bp, Mus musculus
  siRNA target sequence for Dpp8 (NM_028906.2,1871-1889).
cagaaagctggtgtacttt

SEQ ID NO: 580895 - DNA, 19 bp, Mus musculus
  siRNA target sequence for Dpp8 (NM_028906.2,1922-1940).
cctgtacgtgaccagttat

SEQ ID NO: 580896 - DNA, 19 bp, Mus musculus
  siRNA target sequence for Dpp8 (NM_028906.2,1925-1943).
gtacgtgaccagttatgca

SEQ ID NO: 580897 - DNA, 19 bp, Mus musculus
  siRNA target sequence for Dpp8 (NM_028906.2,2002-2020).
gccggcattgtgacttctt

SEQ ID NO: 580898 - DNA, 19 bp, Mus musculus
  siRNA target sequence for Dpp8 (NM_028906.2,2007-2025).
cattgtgacttcttcataa

SEQ ID NO: 580899 - DNA, 19 bp, Mus musculus
  siRNA target sequence for Dpp8 (NM_028906.2,2056-2074).
gtgtgtccctctacaaact

SEQ ID NO: 580900 - DNA, 19 bp, Mus musculus
  siRNA target sequence for Dpp8 (NM_028906.2,2091-2109).
gacccagttcataaaacaa

SEQ ID NO: 580901 - DNA, 19 bp, Mus musculus
  siRNA target sequence for Dpp8 (NM_028906.2,2112-2130).
gaattttgggccaccattt

SEQ ID NO: 580902 - DNA, 19 bp, Mus musculus
  siRNA target sequence for Dpp8 (NM_028906.2,2188-2206).
gtactactggatttacact

SEQ ID NO: 580903 - DNA, 19 bp, Mus musculus
  siRNA target sequence for Dpp8 (NM_028906.2,2197-2215).
gatttacactgtatggaat

SEQ ID NO: 580904 - DNA, 19 bp, Mus musculus
  siRNA target sequence for Dpp8 (NM_028906.2,2235-2253).
ctacaacctggaaagaaat

SEQ ID NO: 580905 - DNA, 19 bp, Mus musculus
  siRNA target sequence for Dpp8 (NM_028906.2,2249-2267).
gaaataccccactgtgtta

SEQ ID NO: 580906 - DNA, 19 bp, Mus musculus
  siRNA target sequence for Dpp8 (NM_028906.2,2255-2273).
ccccactgtgttattcata

SEQ ID NO: 580907 - DNA, 19 bp, Mus musculus
  siRNA target sequence for Dpp8 (NM_028906.2,2300-2318).
gaacaatcggtttaaagga

SEQ ID NO: 580908 - DNA, 19 bp, Mus musculus
  siRNA target sequence for Dpp8 (NM_028906.2,2308-2326).
ggtttaaaggagtcaagta

SEQ ID NO: 580909 - DNA, 19 bp, Mus musculus
  siRNA target sequence for Dpp8 (NM_028906.2,2389-2407).
cctgtcaccgaggacttaa

SEQ ID NO: 580910 - DNA, 19 bp, Mus musculus
  siRNA target sequence for Dpp8 (NM_028906.2,2396-2414).
ccgaggacttaaatttgaa

SEQ ID NO: 580911 - DNA, 19 bp, Mus musculus
  siRNA target sequence for Dpp8 (NM_028906.2,2412-2430).
gaaggcgcctttaaatata

SEQ ID NO: 580912 - DNA, 19 bp, Mus musculus
  siRNA target sequence for Dpp8 (NM_028906.2,2415-2433).
ggcgcctttaaatataaaa

SEQ ID NO: 580913 - DNA, 19 bp, Mus musculus
  siRNA target sequence for Dpp8 (NM_028906.2,2435-2453).
gggtcaaatagaaatcgat

SEQ ID NO: 580914 - DNA, 19 bp, Mus musculus
  siRNA target sequence for Dpp8 (NM_028906.2,2474-2492).
gtacctagcatctcagtat

SEQ ID NO: 580915 - DNA, 19 bp, Mus musculus
  siRNA target sequence for Dpp8 (NM_028906.2,2478-2496).
ctagcatctcagtatgact

SEQ ID NO: 580916 - DNA, 19 bp, Mus musculus
  siRNA target sequence for Dpp8 (NM_028906.2,2482-2500).
catctcagtatgacttcat

SEQ ID NO: 580917 - DNA, 19 bp, Mus musculus
  siRNA target sequence for Dpp8 (NM_028906.2,2551-2569).
ccctgatggcattaatgca

SEQ ID NO: 580918 - DNA, 19 bp, Mus musculus
  siRNA target sequence for Dpp8 (NM_028906.2,2582-2600).
cttccgggtggctattgct

SEQ ID NO: 580919 - DNA, 19 bp, Mus musculus
  siRNA target sequence for Dpp8 (NM_028906.2,2616-2634).
ctgtggatcttctatgata

SEQ ID NO: 580920 - DNA, 19 bp, Mus musculus
  siRNA target sequence for Dpp8 (NM_028906.2,2618-2636).
gtggatcttctatgataca

SEQ ID NO: 580921 - DNA, 19 bp, Mus musculus
  siRNA target sequence for Dpp8 (NM_028906.2,2638-2656).
gatacacggagcgctatat

SEQ ID NO: 580922 - DNA, 19 bp, Mus musculus
  siRNA target sequence for Dpp8 (NM_028906.2,2679-2697).
cagggctactacttaggat

SEQ ID NO: 580923 - DNA, 19 bp, Mus musculus
  siRNA target sequence for Dpp8 (NM_028906.2,2785-2803).
cacacaccagtatattgct

SEQ ID NO: 580924 - DNA, 19 bp, Mus musculus
  siRNA target sequence for Dpp8 (NM_028906.2,2824-2842).
gaaagccatatgacttaca

SEQ ID NO: 580925 - DNA, 19 bp, Mus musculus
  siRNA target sequence for Dpp8 (NM_028906.2,2830-2848).
catatgacttacagatcta

SEQ ID NO: 580926 - DNA, 19 bp, Mus musculus
  siRNA target sequence for Ppgb (NM_008906.2,119-137).
cggaccaggatgaaatcga

SEQ ID NO: 580927 - DNA, 19 bp, Mus musculus
  siRNA target sequence for Ppgb (NM_008906.2,120-138).
ggaccaggatgaaatcgat

SEQ ID NO: 580928 - DNA, 19 bp, Mus musculus
  siRNA target sequence for Ppgb (NM_008906.2,236-254).
cgcagaacgacccaaagaa

SEQ ID NO: 580929 - DNA, 19 bp, Mus musculus
  siRNA target sequence for Ppgb (NM_008906.2,361-379).
gagtacaacccctatgctt

SEQ ID NO: 580930 - DNA, 19 bp, Mus musculus
  siRNA target sequence for Ppgb (NM_008906.2,392-410).
ccaacgtgctgtatatcga

SEQ ID NO: 580931 - DNA, 19 bp, Mus musculus
  siRNA target sequence for Ppgb (NM_008906.2,477-495).
ggcggagaacaattatgaa

SEQ ID NO: 580932 - DNA, 19 bp, Mus musculus
  siRNA target sequence for Ppgb (NM_008906.2,486-504).
caattatgaagcccttaaa

SEQ ID NO: 580933 - DNA, 19 bp, Mus musculus
  siRNA target sequence for Ppgb (NM_008906.2,514-532).
cgcctctttccggaataca

SEQ ID NO: 580934 - DNA, 19 bp, Mus musculus
  siRNA target sequence for Ppgb (NM_008906.2,606-624).
gcaggatcctagcatgaat

SEQ ID NO: 580935 - DNA, 19 bp, Mus musculus
  siRNA target sequence for Ppgb (NM_008906.2,752-770).
gcgctcagaacaagtgtaa

SEQ ID NO: 580936 - DNA, 19 bp, Mus musculus
  siRNA target sequence for Ppgb (NM_008906.2,754-772).
gctcagaacaagtgtaact

SEQ ID NO: 580937 - DNA, 19 bp, Mus musculus
  siRNA target sequence for Ppgb (NM_008906.2,757-775).
cagaacaagtgtaacttct

SEQ ID NO: 580938 - DNA, 19 bp, Mus musculus
  siRNA target sequence for Ppgb (NM_008906.2,759-777).
gaacaagtgtaacttctat

SEQ ID NO: 580939 - DNA, 19 bp, Mus musculus
  siRNA target sequence for Ppgb (NM_008906.2,787-805).
gacccagagtgtgtaaaca

SEQ ID NO: 580940 - DNA, 19 bp, Mus musculus
  siRNA target sequence for Ppgb (NM_008906.2,789-807).
cccagagtgtgtaaacaat

SEQ ID NO: 580941 - DNA, 19 bp, Mus musculus
  siRNA target sequence for Ppgb (NM_008906.2,833-851).
gcaaatctggcctcaacat

SEQ ID NO: 580942 - DNA, 19 bp, Mus musculus
  siRNA target sequence for Ppgb (NM_008906.2,844-862).
ctcaacatctacaatctct

SEQ ID NO: 580943 - DNA, 19 bp, Mus musculus
  siRNA target sequence for Ppgb (NM_008906.2,1225-1243).
gacatggcctgcaacttca

SEQ ID NO: 580944 - DNA, 19 bp, Mus musculus
  siRNA target sequence for Ppgb (NM_008906.2,1417-1435).
cctcgagctgcttttacca

SEQ ID NO: 580945 - DNA, 19 bp, Mus musculus
  siRNA target sequence for Ppgb (NM_008906.2,1418-1436).
ctcgagctgcttttaccat

SEQ ID NO: 580946 - DNA, 19 bp, Mus musculus
  siRNA target sequence for Ppgb (NM_008906.2,1442-1460).
cgaggttcctgaacaaaga

SEQ ID NO: 580947 - DNA, 19 bp, Mus musculus
  siRNA target sequence for 4833411K15Rik (NM_029023.2,105-123).
gctgctcctatcgttctta

SEQ ID NO: 580948 - DNA, 19 bp, Mus musculus
  siRNA target sequence for 4833411K15Rik (NM_029023.2,163-181).
cccgaaggcaaggaagtat

SEQ ID NO: 580949 - DNA, 19 bp, Mus musculus
  siRNA target sequence for 4833411K15Rik (NM_029023.2,200-218).
gaaaggatgcccacatgtt

SEQ ID NO: 580950 - DNA, 19 bp, Mus musculus
  siRNA target sequence for 4833411K15Rik (NM_029023.2,216-234).
gttctggtggctctattat

SEQ ID NO: 580951 - DNA, 19 bp, Mus musculus
  siRNA target sequence for 4833411K15Rik (NM_029023.2,352-370).
caactcaagcctcgaaata

SEQ ID NO: 580952 - DNA, 19 bp, Mus musculus
  siRNA target sequence for 4833411K15Rik (NM_029023.2,532-550).
cagacggttccattctaca

SEQ ID NO: 580953 - DNA, 19 bp, Mus musculus
  siRNA target sequence for 4833411K15Rik (NM_029023.2,534-552).
gacggttccattctacatt

SEQ ID NO: 580954 - DNA, 19 bp, Mus musculus
  siRNA target sequence for 4833411K15Rik (NM_029023.2,536-554).
cggttccattctacatttt

SEQ ID NO: 580955 - DNA, 19 bp, Mus musculus
  siRNA target sequence for 4833411K15Rik (NM_029023.2,587-605).
gcatcagtgtagaacttta

SEQ ID NO: 580956 - DNA, 19 bp, Mus musculus
  siRNA target sequence for 4833411K15Rik (NM_029023.2,613-631).
gttcagcaagggaccatta

SEQ ID NO: 580957 - DNA, 19 bp, Mus musculus
  siRNA target sequence for 4833411K15Rik (NM_029023.2,616-634).
cagcaagggaccattaagt

SEQ ID NO: 580958 - DNA, 19 bp, Mus musculus
  siRNA target sequence for 4833411K15Rik (NM_029023.2,627-645).
cattaagtgcaacttttct

SEQ ID NO: 580959 - DNA, 19 bp, Mus musculus
  siRNA target sequence for 4833411K15Rik (NM_029023.2,699-717).
gggaccttacctgtatagt

SEQ ID NO: 580960 - DNA, 19 bp, Mus musculus
  siRNA target sequence for 4833411K15Rik (NM_029023.2,700-718).
ggaccttacctgtatagta

SEQ ID NO: 580961 - DNA, 19 bp, Mus musculus
  siRNA target sequence for 4833411K15Rik (NM_029023.2,701-719).
gaccttacctgtatagtat

SEQ ID NO: 580962 - DNA, 19 bp, Mus musculus
  siRNA target sequence for 4833411K15Rik (NM_029023.2,716-734).
gtatgtctctccttgataa

SEQ ID NO: 580963 - DNA, 19 bp, Mus musculus
  siRNA target sequence for 4833411K15Rik (NM_029023.2,854-872).
ccgacggggtaaacttcta

SEQ ID NO: 580964 - DNA, 19 bp, Mus musculus
  siRNA target sequence for 4833411K15Rik (NM_029023.2,855-873).
cgacggggtaaacttctat

SEQ ID NO: 580965 - DNA, 19 bp, Mus musculus
  siRNA target sequence for 4833411K15Rik (NM_029023.2,856-874).
gacggggtaaacttctata

SEQ ID NO: 580966 - DNA, 19 bp, Mus musculus
  siRNA target sequence for 4833411K15Rik (NM_029023.2,867-885).
cttctataacatcttaact

SEQ ID NO: 580967 - DNA, 19 bp, Mus musculus
  siRNA target sequence for 4833411K15Rik (NM_029023.2,890-908).
gcagcccggagaaagctat

SEQ ID NO: 580968 - DNA, 19 bp, Mus musculus
  siRNA target sequence for 4833411K15Rik (NM_029023.2,894-912).
cccggagaaagctatggaa

SEQ ID NO: 580969 - DNA, 19 bp, Mus musculus
  siRNA target sequence for 4833411K15Rik (NM_029023.2,895-913).
ccggagaaagctatggaat

SEQ ID NO: 580970 - DNA, 19 bp, Mus musculus
  siRNA target sequence for 4833411K15Rik (NM_029023.2,975-993).
gcaaggagacgccttaagt

SEQ ID NO: 580971 - DNA, 19 bp, Mus musculus
  siRNA target sequence for 4833411K15Rik (NM_029023.2,986-1004).
ccttaagtcaactcatgaa

SEQ ID NO: 580972 - DNA, 19 bp, Mus musculus
  siRNA target sequence for 4833411K15Rik (NM_029023.2,1109-1127).
ccatcgacgttgtggataa

SEQ ID NO: 580973 - DNA, 19 bp, Mus musculus
  siRNA target sequence for 4833411K15Rik (NM_029023.2,1135-1153).
gcagctggggtcaatgtga

SEQ ID NO: 580974 - DNA, 19 bp, Mus musculus
  siRNA target sequence for 4833411K15Rik (NM_029023.2,1238-1256).
ccaaattcaatcagctaaa

SEQ ID NO: 580975 - DNA, 19 bp, Mus musculus
  siRNA target sequence for 4833411K15Rik (NM_029023.2,1239-1257).
caaattcaatcagctaaaa

SEQ ID NO: 580976 - DNA, 19 bp, Mus musculus
  siRNA target sequence for 4833411K15Rik (NM_029023.2,1327-1345).
gccttctactggatcctaa

SEQ ID NO: 580977 - DNA, 19 bp, Mus musculus
  siRNA target sequence for 2510048K03Rik (NM_028243.1,124-142).
cggcagcccgcatttgtca

SEQ ID NO: 580978 - DNA, 19 bp, Mus musculus
  siRNA target sequence for 2510048K03Rik (NM_028243.1,463-481).
gaatttcctgacatcagaa

SEQ ID NO: 580979 - DNA, 19 bp, Mus musculus
  siRNA target sequence for 2510048K03Rik (NM_028243.1,686-704).
gagtttatgaagattgtaa

SEQ ID NO: 580980 - DNA, 19 bp, Mus musculus
  siRNA target sequence for 2510048K03Rik (NM_028243.1,688-706).
gtttatgaagattgtaact

SEQ ID NO: 580981 - DNA, 19 bp, Mus musculus
  siRNA target sequence for 2510048K03Rik (NM_028243.1,694-712).
gaagattgtaactaacgat

SEQ ID NO: 580982 - DNA, 19 bp, Mus musculus
  siRNA target sequence for 2510048K03Rik (NM_028243.1,715-733).
caggaaaagtggtccttat

SEQ ID NO: 580983 - DNA, 19 bp, Mus musculus
  siRNA target sequence for 2510048K03Rik (NM_028243.1,718-736).
gaaaagtggtccttattgt

SEQ ID NO: 580984 - DNA, 19 bp, Mus musculus
  siRNA target sequence for 2510048K03Rik (NM_028243.1,728-746).
ccttattgttcagaaagta

SEQ ID NO: 580985 - DNA, 19 bp, Mus musculus
  siRNA target sequence for 2510048K03Rik (NM_028243.1,749-767).
cgcaaatcctggaatgtca

SEQ ID NO: 580986 - DNA, 19 bp, Mus musculus
  siRNA target sequence for 2510048K03Rik (NM_028243.1,799-817).
ccagtcgctcacgaacatt

SEQ ID NO: 580987 - DNA, 19 bp, Mus musculus
  siRNA target sequence for 2510048K03Rik (NM_028243.1,802-820).
gtcgctcacgaacattctt

SEQ ID NO: 580988 - DNA, 19 bp, Mus musculus
  siRNA target sequence for 2510048K03Rik (NM_028243.1,804-822).
cgctcacgaacattcttca

SEQ ID NO: 580989 - DNA, 19 bp, Mus musculus
  siRNA target sequence for 2510048K03Rik (NM_028243.1,824-842).
ctatgtagtcccttgactt

SEQ ID NO: 580990 - DNA, 19 bp, Mus musculus
  siRNA target sequence for 2510048K03Rik (NM_028243.1,843-861).
ctgagaaaatcccaacttt

SEQ ID NO: 580991 - DNA, 19 bp, Mus musculus
  siRNA target sequence for 2510048K03Rik (NM_028243.1,910-928).
cccttacgcatgcaacttt

SEQ ID NO: 580992 - DNA, 19 bp, Mus musculus
  siRNA target sequence for 2510048K03Rik (NM_028243.1,911-929).
ccttacgcatgcaactttt

SEQ ID NO: 580993 - DNA, 19 bp, Mus musculus
  siRNA target sequence for 2510048K03Rik (NM_028243.1,912-930).
cttacgcatgcaacttttt

SEQ ID NO: 580994 - DNA, 19 bp, Mus musculus
  siRNA target sequence for 2510048K03Rik (NM_028243.1,955-973).
caaggaggtgtgccaatat

SEQ ID NO: 580995 - DNA, 19 bp, Mus musculus
  siRNA target sequence for 2510048K03Rik (NM_028243.1,961-979).
ggtgtgccaatatttgaaa

SEQ ID NO: 580996 - DNA, 19 bp, Mus musculus
  siRNA target sequence for 2510048K03Rik (NM_028243.1,964-982).
gtgccaatatttgaaaaat

SEQ ID NO: 580997 - DNA, 19 bp, Mus musculus
  siRNA target sequence for 2510048K03Rik (NM_028243.1,984-1002).
ctaatgtatcggatacagt

SEQ ID NO: 580998 - DNA, 19 bp, Mus musculus
  siRNA target sequence for 2510048K03Rik (NM_028243.1,1028-1046).
ctgagtgtatattataact

SEQ ID NO: 580999 - DNA, 19 bp, Mus musculus
  siRNA target sequence for 2510048K03Rik (NM_028243.1,1055-1073).
caagcagcatgcctgaata

SEQ ID NO: 581000 - DNA, 19 bp, Mus musculus
  siRNA target sequence for 2510048K03Rik (NM_028243.1,1058-1076).
gcagcatgcctgaatattt

SEQ ID NO: 581001 - DNA, 19 bp, Mus musculus
  siRNA target sequence for 2510048K03Rik (NM_028243.1,1145-1163).
cccttttgtactaatggta

SEQ ID NO: 581002 - DNA, 19 bp, Mus musculus
  siRNA target sequence for 2510048K03Rik (NM_028243.1,1146-1164).
ccttttgtactaatggtat

SEQ ID NO: 581003 - DNA, 19 bp, Mus musculus
  siRNA target sequence for 2510048K03Rik (NM_028243.1,1147-1165).
cttttgtactaatggtatt

SEQ ID NO: 581004 - DNA, 19 bp, Mus musculus
  siRNA target sequence for 2510048K03Rik (NM_028243.1,1152-1170).
gtactaatggtattgatga

SEQ ID NO: 581005 - DNA, 19 bp, Mus musculus
  siRNA target sequence for 2510048K03Rik (NM_028243.1,1195-1213).
cttggagaagtattccaat

SEQ ID NO: 581006 - DNA, 19 bp, Mus musculus
  siRNA target sequence for 2510048K03Rik (NM_028243.1,1209-1227).
ccaatgactgttttaacca

SEQ ID NO: 581007 - DNA, 19 bp, Mus musculus
  siRNA target sequence for 2510048K03Rik (NM_028243.1,1244-1262).
cggcctcattggatgacta

SEQ ID NO: 581008 - DNA, 19 bp, Mus musculus
  siRNA target sequence for 2510048K03Rik (NM_028243.1,1271-1289).
ggtggcaaaaacatcagtt

SEQ ID NO: 581009 - DNA, 19 bp, Mus musculus
  siRNA target sequence for 2510048K03Rik (NM_028243.1,1287-1305).
gttcacactcaaacatcat

SEQ ID NO: 581010 - DNA, 19 bp, Mus musculus
  siRNA target sequence for 2510048K03Rik (NM_028243.1,1368-1386).
ccctggtggctatcaacat

SEQ ID NO: 581011 - DNA, 19 bp, Mus musculus
  siRNA target sequence for 2510048K03Rik (NM_028243.1,1455-1473).
ctcgattattggaagttaa

SEQ ID NO: 581012 - DNA, 19 bp, Mus musculus
  siRNA target sequence for Casp1 (NM_009807.1,13-31).
gcaaagaggaagcaattta

SEQ ID NO: 581013 - DNA, 19 bp, Mus musculus
  siRNA target sequence for Casp1 (NM_009807.1,42-60).
gagtatagggacaataaat

SEQ ID NO: 581014 - DNA, 19 bp, Mus musculus
  siRNA target sequence for Casp1 (NM_009807.1,61-79).
ggattgttggatgaacttt

SEQ ID NO: 581015 - DNA, 19 bp, Mus musculus
  siRNA target sequence for Casp1 (NM_009807.1,96-114).
gaatcaggaagaaatggat

SEQ ID NO: 581016 - DNA, 19 bp, Mus musculus
  siRNA target sequence for Casp1 (NM_009807.1,150-168).
ggcacgggacctatgtgat

SEQ ID NO: 581017 - DNA, 19 bp, Mus musculus
  siRNA target sequence for Casp1 (NM_009807.1,190-208).
caggcaagccaaatcttta

SEQ ID NO: 581018 - DNA, 19 bp, Mus musculus
  siRNA target sequence for Casp1 (NM_009807.1,193-211).
gcaagccaaatctttatca

SEQ ID NO: 581019 - DNA, 19 bp, Mus musculus
  siRNA target sequence for Casp1 (NM_009807.1,197-215).
gccaaatctttatcactta

SEQ ID NO: 581020 - DNA, 19 bp, Mus musculus
  siRNA target sequence for Casp1 (NM_009807.1,244-262).
ggaattctggagcttcaat

SEQ ID NO: 581021 - DNA, 19 bp, Mus musculus
  siRNA target sequence for Casp1 (NM_009807.1,387-405).
caagttttgccctttagaa

SEQ ID NO: 581022 - DNA, 19 bp, Mus musculus
  siRNA target sequence for Casp1 (NM_009807.1,437-455).
cagagatttatccaataat

SEQ ID NO: 581023 - DNA, 19 bp, Mus musculus
  siRNA target sequence for Casp1 (NM_009807.1,439-457).
gagatttatccaataatga

SEQ ID NO: 581024 - DNA, 19 bp, Mus musculus
  siRNA target sequence for Casp1 (NM_009807.1,473-491).
cacgtcttgccctcattat

SEQ ID NO: 581025 - DNA, 19 bp, Mus musculus
  siRNA target sequence for Casp1 (NM_009807.1,577-595).
gggtataccgtgaaagtga

SEQ ID NO: 581026 - DNA, 19 bp, Mus musculus
  siRNA target sequence for Casp1 (NM_009807.1,578-596).
ggtataccgtgaaagtgaa

SEQ ID NO: 581027 - DNA, 19 bp, Mus musculus
  siRNA target sequence for Casp1 (NM_009807.1,579-597).
gtataccgtgaaagtgaaa

SEQ ID NO: 581028 - DNA, 19 bp, Mus musculus
  siRNA target sequence for Casp1 (NM_009807.1,700-718).
ggtatccaggagggaatat

SEQ ID NO: 581029 - DNA, 19 bp, Mus musculus
  siRNA target sequence for Casp1 (NM_009807.1,722-740).
ggaccacatactctaatga

SEQ ID NO: 581030 - DNA, 19 bp, Mus musculus
  siRNA target sequence for Casp1 (NM_009807.1,723-741).
gaccacatactctaatgaa

SEQ ID NO: 581031 - DNA, 19 bp, Mus musculus
  siRNA target sequence for Casp1 (NM_009807.1,760-778).
gttgacacaatctttcaga

SEQ ID NO: 581032 - DNA, 19 bp, Mus musculus
  siRNA target sequence for Casp1 (NM_009807.1,818-836).
ccaaggtgatcattattca

SEQ ID NO: 581033 - DNA, 19 bp, Mus musculus
  siRNA target sequence for Casp1 (NM_009807.1,856-874).
caaggagtggtgttgttaa

SEQ ID NO: 581034 - DNA, 19 bp, Mus musculus
  siRNA target sequence for Casp1 (NM_009807.1,864-882).
ggtgttgttaaaagattca

SEQ ID NO: 581035 - DNA, 19 bp, Mus musculus
  siRNA target sequence for Casp1 (NM_009807.1,906-924).
cttaacggatgcaattttt

SEQ ID NO: 581036 - DNA, 19 bp, Mus musculus
  siRNA target sequence for Casp1 (NM_009807.1,936-954).
cattaagaaggcccatata

SEQ ID NO: 581037 - DNA, 19 bp, Mus musculus
  siRNA target sequence for Casp1 (NM_009807.1,945-963).
ggcccatatagagaaagat

SEQ ID NO: 581038 - DNA, 19 bp, Mus musculus
  siRNA target sequence for Casp1 (NM_009807.1,980-998).
cttcaacaccagataatgt

SEQ ID NO: 581039 - DNA, 19 bp, Mus musculus
  siRNA target sequence for Casp1 (NM_009807.1,1017-1035).
caggggctcacttttcatt

SEQ ID NO: 581040 - DNA, 19 bp, Mus musculus
  siRNA target sequence for Casp1 (NM_009807.1,1019-1037).
ggggctcacttttcattga

SEQ ID NO: 581041 - DNA, 19 bp, Mus musculus
  siRNA target sequence for Casp1 (NM_009807.1,1095-1113).
cagaaaggttcgattttca

SEQ ID NO: 581042 - DNA, 19 bp, Mus musculus
  siRNA target sequence for Casp1 (NM_009807.1,1097-1115).
gaaaggttcgattttcatt

SEQ ID NO: 581043 - DNA, 19 bp, Mus musculus
  siRNA target sequence for Casp1 (NM_009807.1,1101-1119).
ggttcgattttcatttgaa

SEQ ID NO: 581044 - DNA, 19 bp, Mus musculus
  siRNA target sequence for Casp1 (NM_009807.1,1112-1130).
catttgaacaaccagaatt

SEQ ID NO: 581045 - DNA, 19 bp, Mus musculus
  siRNA target sequence for Casp12 (NM_009808.2,30-48).
gaggacacatgaaagagat

SEQ ID NO: 581046 - DNA, 19 bp, Mus musculus
  siRNA target sequence for Casp12 (NM_009808.2,151-169).
ggggaaagtgcgagtttca

SEQ ID NO: 581047 - DNA, 19 bp, Mus musculus
  siRNA target sequence for Casp12 (NM_009808.2,152-170).
gggaaagtgcgagtttcat

SEQ ID NO: 581048 - DNA, 19 bp, Mus musculus
  siRNA target sequence for Casp12 (NM_009808.2,161-179).
cgagtttcatcctgaacaa

SEQ ID NO: 581049 - DNA, 19 bp, Mus musculus
  siRNA target sequence for Casp12 (NM_009808.2,217-235).
gacatggcaggaaaaatat

SEQ ID NO: 581050 - DNA, 19 bp, Mus musculus
  siRNA target sequence for Casp12 (NM_009808.2,268-286).
ctgagtttacaattttcta

SEQ ID NO: 581051 - DNA, 19 bp, Mus musculus
  siRNA target sequence for Casp12 (NM_009808.2,270-288).
gagtttacaattttctaat

SEQ ID NO: 581052 - DNA, 19 bp, Mus musculus
  siRNA target sequence for Casp12 (NM_009808.2,301-319).
ggacctcagaagatatgta

SEQ ID NO: 581053 - DNA, 19 bp, Mus musculus
  siRNA target sequence for Casp12 (NM_009808.2,379-397).
gctggattggcccatgaat

SEQ ID NO: 581054 - DNA, 19 bp, Mus musculus
  siRNA target sequence for Casp12 (NM_009808.2,383-401).
gattggcccatgaatcaca

SEQ ID NO: 581055 - DNA, 19 bp, Mus musculus
  siRNA target sequence for Casp12 (NM_009808.2,388-406).
gcccatgaatcacatctaa

SEQ ID NO: 581056 - DNA, 19 bp, Mus musculus
  siRNA target sequence for Casp12 (NM_009808.2,389-407).
cccatgaatcacatctaat

SEQ ID NO: 581057 - DNA, 19 bp, Mus musculus
  siRNA target sequence for Casp12 (NM_009808.2,435-453).
ctcagaagtccaagataca

SEQ ID NO: 581058 - DNA, 19 bp, Mus musculus
  siRNA target sequence for Casp12 (NM_009808.2,466-484).
ccacgtgatcagttttgta

SEQ ID NO: 581059 - DNA, 19 bp, Mus musculus
  siRNA target sequence for Casp12 (NM_009808.2,467-485).
cacgtgatcagttttgtaa

SEQ ID NO: 581060 - DNA, 19 bp, Mus musculus
  siRNA target sequence for Casp12 (NM_009808.2,469-487).
cgtgatcagttttgtaaga

SEQ ID NO: 581061 - DNA, 19 bp, Mus musculus
  siRNA target sequence for Casp12 (NM_009808.2,582-600).
cctttttgatagagataat

SEQ ID NO: 581062 - DNA, 19 bp, Mus musculus
  siRNA target sequence for Casp12 (NM_009808.2,601-619).
gctgatactgacattttga

SEQ ID NO: 581063 - DNA, 19 bp, Mus musculus
  siRNA target sequence for Casp12 (NM_009808.2,618-636).
gaacatgcaagaactactt

SEQ ID NO: 581064 - DNA, 19 bp, Mus musculus
  siRNA target sequence for Casp12 (NM_009808.2,646-664).
ggatactctgtggtgttaa

SEQ ID NO: 581065 - DNA, 19 bp, Mus musculus
  siRNA target sequence for Casp12 (NM_009808.2,647-665).
gatactctgtggtgttaaa

SEQ ID NO: 581066 - DNA, 19 bp, Mus musculus
  siRNA target sequence for Casp12 (NM_009808.2,658-676).
gtgttaaaggaaaacctta

SEQ ID NO: 581067 - DNA, 19 bp, Mus musculus
  siRNA target sequence for Casp12 (NM_009808.2,771-789).
catcctggaaggaatctgt

SEQ ID NO: 581068 - DNA, 19 bp, Mus musculus
  siRNA target sequence for Casp12 (NM_009808.2,791-809).
gggtgaagcaccgaaacaa

SEQ ID NO: 581069 - DNA, 19 bp, Mus musculus
  siRNA target sequence for Casp12 (NM_009808.2,792-810).
ggtgaagcaccgaaacaaa

SEQ ID NO: 581070 - DNA, 19 bp, Mus musculus
  siRNA target sequence for Casp12 (NM_009808.2,823-841).
cttcatgatgacactatct

SEQ ID NO: 581071 - DNA, 19 bp, Mus musculus
  siRNA target sequence for Casp12 (NM_009808.2,985-1003).
cgtgtgttgagctgtaaat

SEQ ID NO: 581072 - DNA, 19 bp, Mus musculus
  siRNA target sequence for Casp12 (NM_009808.2,998-1016).
gtaaatggaataatagtat

SEQ ID NO: 581073 - DNA, 19 bp, Mus musculus
  siRNA target sequence for Casp12 (NM_009808.2,1024-1042).
gcccatgtggagacagatt

SEQ ID NO: 581074 - DNA, 19 bp, Mus musculus
  siRNA target sequence for Casp12 (NM_009808.2,1216-1234).
cagatgcccactattgaga

SEQ ID NO: 581075 - DNA, 19 bp, Mus musculus
  siRNA target sequence for Casp12 (NM_009808.2,1222-1240).
cccactattgagagagtat

SEQ ID NO: 581076 - DNA, 19 bp, Mus musculus
  siRNA target sequence for Casp12 (NM_009808.2,1247-1265).
cacgctatttctacctttt

SEQ ID NO: 581077 - DNA, 19 bp, Mus musculus
  siRNA target sequence for Casp14 (NM_009809.2,310-328).
cgttacctgaaatttgaaa

SEQ ID NO: 581078 - DNA, 19 bp, Mus musculus
  siRNA target sequence for Casp14 (NM_009809.2,491-509).
gactagaagacctttttga

SEQ ID NO: 581079 - DNA, 19 bp, Mus musculus
  siRNA target sequence for Casp14 (NM_009809.2,508-526).
gaagtcttgaacaacaaga

SEQ ID NO: 581080 - DNA, 19 bp, Mus musculus
  siRNA target sequence for Casp14 (NM_009809.2,561-579).
catcatccaggcttgtaga

SEQ ID NO: 581081 - DNA, 19 bp, Mus musculus
  siRNA target sequence for Casp14 (NM_009809.2,703-721).
gataccctccacatctact

SEQ ID NO: 581082 - DNA, 19 bp, Mus musculus
  siRNA target sequence for Casp14 (NM_009809.2,730-748).
gaggggtacctctcctata

SEQ ID NO: 581083 - DNA, 19 bp, Mus musculus
  siRNA target sequence for Casp14 (NM_009809.2,732-750).
ggggtacctctcctataga

SEQ ID NO: 581084 - DNA, 19 bp, Mus musculus
  siRNA target sequence for Casp14 (NM_009809.2,782-800).
ccctgacggatgtgttcat

SEQ ID NO: 581085 - DNA, 19 bp, Mus musculus
  siRNA target sequence for Casp14 (NM_009809.2,783-801).
cctgacggatgtgttcatt

SEQ ID NO: 581086 - DNA, 19 bp, Mus musculus
  siRNA target sequence for Casp14 (NM_009809.2,916-934).
ctccggaagaagctctatt

SEQ ID NO: 581087 - DNA, 19 bp, Mus musculus
  siRNA target sequence for Casp14 (NM_009809.2,921-939).
gaagaagctctatttgcaa

SEQ ID NO: 581088 - DNA, 19 bp, Mus musculus
  siRNA target sequence for Casp2 (NM_007610.1,269-287).
gagaaggacattatcactt

SEQ ID NO: 581089 - DNA, 19 bp, Mus musculus
  siRNA target sequence for Casp2 (NM_007610.1,275-293).
gacattatcactttggaaa

SEQ ID NO: 581090 - DNA, 19 bp, Mus musculus
  siRNA target sequence for Casp2 (NM_007610.1,311-329).
gccaaagggggcagtttca

SEQ ID NO: 581091 - DNA, 19 bp, Mus musculus
  siRNA target sequence for Casp2 (NM_007610.1,321-339).
gcagtttcagccagaatgt

SEQ ID NO: 581092 - DNA, 19 bp, Mus musculus
  siRNA target sequence for Casp2 (NM_007610.1,418-436).
gggtcacttggaagactta

SEQ ID NO: 581093 - DNA, 19 bp, Mus musculus
  siRNA target sequence for Casp2 (NM_007610.1,442-460).
cacaaccctctcagatatt

SEQ ID NO: 581094 - DNA, 19 bp, Mus musculus
  siRNA target sequence for Casp2 (NM_007610.1,444-462).
caaccctctcagatattca

SEQ ID NO: 581095 - DNA, 19 bp, Mus musculus
  siRNA target sequence for Casp2 (NM_007610.1,477-495).
cgttgagctgtgactatga

SEQ ID NO: 581096 - DNA, 19 bp, Mus musculus
  siRNA target sequence for Casp2 (NM_007610.1,567-585).
cggaacactccttagataa

SEQ ID NO: 581097 - DNA, 19 bp, Mus musculus
  siRNA target sequence for Casp2 (NM_007610.1,568-586).
ggaacactccttagataat

SEQ ID NO: 581098 - DNA, 19 bp, Mus musculus
  siRNA target sequence for Casp2 (NM_007610.1,616-634).
gccatgcactcctgagttt

SEQ ID NO: 581099 - DNA, 19 bp, Mus musculus
  siRNA target sequence for Casp2 (NM_007610.1,617-635).
ccatgcactcctgagtttt

SEQ ID NO: 581100 - DNA, 19 bp, Mus musculus
  siRNA target sequence for Casp2 (NM_007610.1,618-636).
catgcactcctgagtttta

SEQ ID NO: 581101 - DNA, 19 bp, Mus musculus
  siRNA target sequence for Casp2 (NM_007610.1,657-675).
cctataggttgcaatctca

SEQ ID NO: 581102 - DNA, 19 bp, Mus musculus
  siRNA target sequence for Casp2 (NM_007610.1,709-727).
gcacttcactggagagaaa

SEQ ID NO: 581103 - DNA, 19 bp, Mus musculus
  siRNA target sequence for Casp2 (NM_007610.1,768-786).
ctctagtcaccctcttcaa

SEQ ID NO: 581104 - DNA, 19 bp, Mus musculus
  siRNA target sequence for Casp2 (NM_007610.1,773-791).
gtcaccctcttcaagcttt

SEQ ID NO: 581105 - DNA, 19 bp, Mus musculus
  siRNA target sequence for Casp2 (NM_007610.1,784-802).
caagcttttgggctacaat

SEQ ID NO: 581106 - DNA, 19 bp, Mus musculus
  siRNA target sequence for Casp2 (NM_007610.1,977-995).
cgactttttgacaatgcta

SEQ ID NO: 581107 - DNA, 19 bp, Mus musculus
  siRNA target sequence for Casp2 (NM_007610.1,999-1017).
gtccaagtctacagaacaa

SEQ ID NO: 581108 - DNA, 19 bp, Mus musculus
  siRNA target sequence for Casp2 (NM_007610.1,1046-1064).
cgtggagatgagacagata

SEQ ID NO: 581109 - DNA, 19 bp, Mus musculus
  siRNA target sequence for Casp2 (NM_007610.1,1128-1146).
ctggcaaagaggagttgat

SEQ ID NO: 581110 - DNA, 19 bp, Mus musculus
  siRNA target sequence for Casp2 (NM_007610.1,1161-1179).
ctactcgctcagacatgat

SEQ ID NO: 581111 - DNA, 19 bp, Mus musculus
  siRNA target sequence for Casp2 (NM_007610.1,1186-1204).
ctatgcttgccttaaaggt

SEQ ID NO: 581112 - DNA, 19 bp, Mus musculus
  siRNA target sequence for Casp2 (NM_007610.1,1230-1248).
ggggttcctggtacattga

SEQ ID NO: 581113 - DNA, 19 bp, Mus musculus
  siRNA target sequence for Casp2 (NM_007610.1,1296-1314).
ccgacatgcttgttaaggt

SEQ ID NO: 581114 - DNA, 19 bp, Mus musculus
  siRNA target sequence for Casp2 (NM_007610.1,1381-1399).
gtctgagtactgtagtact

SEQ ID NO: 581115 - DNA, 19 bp, Mus musculus
  siRNA target sequence for Casp3 (NM_009810.1,85-103).
gtggattcaaaatccatta

SEQ ID NO: 581116 - DNA, 19 bp, Mus musculus
  siRNA target sequence for Casp3 (NM_009810.1,87-105).
ggattcaaaatccattaat

SEQ ID NO: 581117 - DNA, 19 bp, Mus musculus
  siRNA target sequence for Casp3 (NM_009810.1,88-106).
gattcaaaatccattaata

SEQ ID NO: 581118 - DNA, 19 bp, Mus musculus
  siRNA target sequence for Casp3 (NM_009810.1,167-185).
gtagttacaaaatggatta

SEQ ID NO: 581119 - DNA, 19 bp, Mus musculus
  siRNA target sequence for Casp3 (NM_009810.1,187-205).
cctgaaatgggcatatgca

SEQ ID NO: 581120 - DNA, 19 bp, Mus musculus
  siRNA target sequence for Casp3 (NM_009810.1,195-213).
gggcatatgcataataatt

SEQ ID NO: 581121 - DNA, 19 bp, Mus musculus
  siRNA target sequence for Casp3 (NM_009810.1,196-214).
ggcatatgcataataatta

SEQ ID NO: 581122 - DNA, 19 bp, Mus musculus
  siRNA target sequence for Casp3 (NM_009810.1,321-339).
gaataaaaatgatcttact

SEQ ID NO: 581123 - DNA, 19 bp, Mus musculus
  siRNA target sequence for Casp3 (NM_009810.1,363-381).
ggatagtgtttctaaggaa

SEQ ID NO: 581124 - DNA, 19 bp, Mus musculus
  siRNA target sequence for Casp3 (NM_009810.1,379-397).
gaagatcatagcaaaagga

SEQ ID NO: 581125 - DNA, 19 bp, Mus musculus
  siRNA target sequence for Casp3 (NM_009810.1,450-468).
gacaaatgggcctgttgaa

SEQ ID NO: 581126 - DNA, 19 bp, Mus musculus
  siRNA target sequence for Casp3 (NM_009810.1,452-470).
caaatgggcctgttgaact

SEQ ID NO: 581127 - DNA, 19 bp, Mus musculus
  siRNA target sequence for Casp3 (NM_009810.1,463-481).
gttgaactgaaaaagttga

SEQ ID NO: 581128 - DNA, 19 bp, Mus musculus
  siRNA target sequence for Casp3 (NM_009810.1,466-484).
gaactgaaaaagttgacta

SEQ ID NO: 581129 - DNA, 19 bp, Mus musculus
  siRNA target sequence for Casp3 (NM_009810.1,518-536).
ctggaaagccgaaactctt

SEQ ID NO: 581130 - DNA, 19 bp, Mus musculus
  siRNA target sequence for Casp3 (NM_009810.1,521-539).
gaaagccgaaactcttcat

SEQ ID NO: 581131 - DNA, 19 bp, Mus musculus
  siRNA target sequence for Casp3 (NM_009810.1,525-543).
gccgaaactcttcatcatt

SEQ ID NO: 581132 - DNA, 19 bp, Mus musculus
  siRNA target sequence for Casp3 (NM_009810.1,661-679).
gcacctggttactattcct

SEQ ID NO: 581133 - DNA, 19 bp, Mus musculus
  siRNA target sequence for Casp3 (NM_009810.1,741-759).
cgcgcacaagctagaattt

SEQ ID NO: 581134 - DNA, 19 bp, Mus musculus
  siRNA target sequence for Casp3 (NM_009810.1,824-842).
ccactttccacgcaaagaa

SEQ ID NO: 581135 - DNA, 19 bp, Mus musculus
  siRNA target sequence for Casp3 (NM_009810.1,825-843).
cactttccacgcaaagaaa

SEQ ID NO: 581136 - DNA, 19 bp, Mus musculus
  siRNA target sequence for Casp3 (NM_009810.1,870-888).
cacgaaagaactgtacttt

SEQ ID NO: 581137 - DNA, 19 bp, Mus musculus
  siRNA target sequence for Casp3 (NM_009810.1,877-895).
gaactgtacttttatcact

SEQ ID NO: 581138 - DNA, 19 bp, Mus musculus
  siRNA target sequence for Casp4 (NM_007609.1,54-72).
ctgacaaaccacttaaggt

SEQ ID NO: 581139 - DNA, 19 bp, Mus musculus
  siRNA target sequence for Casp4 (NM_007609.1,98-116).
cttacggagtacctagaaa

SEQ ID NO: 581140 - DNA, 19 bp, Mus musculus
  siRNA target sequence for Casp4 (NM_007609.1,102-120).
cggagtacctagaaaaatt

SEQ ID NO: 581141 - DNA, 19 bp, Mus musculus
  siRNA target sequence for Casp4 (NM_007609.1,109-127).
cctagaaaaattagtacaa

SEQ ID NO: 581142 - DNA, 19 bp, Mus musculus
  siRNA target sequence for Casp4 (NM_007609.1,190-208).
caagcgttgggtttttgta

SEQ ID NO: 581143 - DNA, 19 bp, Mus musculus
  siRNA target sequence for Casp4 (NM_007609.1,193-211).
gcgttgggtttttgtagat

SEQ ID NO: 581144 - DNA, 19 bp, Mus musculus
  siRNA target sequence for Casp4 (NM_007609.1,231-249).
gcaaagtaggtgaaatgct

SEQ ID NO: 581145 - DNA, 19 bp, Mus musculus
  siRNA target sequence for Casp4 (NM_007609.1,232-250).
caaagtaggtgaaatgctt

SEQ ID NO: 581146 - DNA, 19 bp, Mus musculus
  siRNA target sequence for Casp4 (NM_007609.1,314-332).
gaaccagaagaatcattga

SEQ ID NO: 581147 - DNA, 19 bp, Mus musculus
  siRNA target sequence for Casp4 (NM_007609.1,423-441).
gtacacgaaaggctcttat

SEQ ID NO: 581148 - DNA, 19 bp, Mus musculus
  siRNA target sequence for Casp4 (NM_007609.1,426-444).
cacgaaaggctcttatcat

SEQ ID NO: 581149 - DNA, 19 bp, Mus musculus
  siRNA target sequence for Casp4 (NM_007609.1,428-446).
cgaaaggctcttatcatat

SEQ ID NO: 581150 - DNA, 19 bp, Mus musculus
  siRNA target sequence for Casp4 (NM_007609.1,655-673).
cacactgcatggcatttgt

SEQ ID NO: 581151 - DNA, 19 bp, Mus musculus
  siRNA target sequence for Casp4 (NM_007609.1,701-719).
gatgtgctacagtatgata

SEQ ID NO: 581152 - DNA, 19 bp, Mus musculus
  siRNA target sequence for Casp4 (NM_007609.1,716-734).
gataccatctatcagatat

SEQ ID NO: 581153 - DNA, 19 bp, Mus musculus
  siRNA target sequence for Casp4 (NM_007609.1,724-742).
ctatcagatattcaacaat

SEQ ID NO: 581154 - DNA, 19 bp, Mus musculus
  siRNA target sequence for Casp4 (NM_007609.1,766-784).
caaacccaaagtcatcatt

SEQ ID NO: 581155 - DNA, 19 bp, Mus musculus
  siRNA target sequence for Casp4 (NM_007609.1,847-865).
gttgtgcagaggtgtagat

SEQ ID NO: 581156 - DNA, 19 bp, Mus musculus
  siRNA target sequence for Casp4 (NM_007609.1,850-868).
gtgcagaggtgtagatcta

SEQ ID NO: 581157 - DNA, 19 bp, Mus musculus
  siRNA target sequence for Casp4 (NM_007609.1,860-878).
gtagatctacctaggaata

SEQ ID NO: 581158 - DNA, 19 bp, Mus musculus
  siRNA target sequence for Casp4 (NM_007609.1,907-925).
cgtggagaaggacttcatt

SEQ ID NO: 581159 - DNA, 19 bp, Mus musculus
  siRNA target sequence for Casp4 (NM_007609.1,917-935).
gacttcattgccttctact

SEQ ID NO: 581160 - DNA, 19 bp, Mus musculus
  siRNA target sequence for Casp4 (NM_007609.1,936-954).
ctacaaccccacatcactt

SEQ ID NO: 581161 - DNA, 19 bp, Mus musculus
  siRNA target sequence for Casp4 (NM_007609.1,952-970).
cttgtcctaccgagacaaa

SEQ ID NO: 581162 - DNA, 19 bp, Mus musculus
  siRNA target sequence for Casp4 (NM_007609.1,972-990).
caggaggctcttacttcat

SEQ ID NO: 581163 - DNA, 19 bp, Mus musculus
  siRNA target sequence for Casp4 (NM_007609.1,974-992).
ggaggctcttacttcatca

SEQ ID NO: 581164 - DNA, 19 bp, Mus musculus
  siRNA target sequence for Casp4 (NM_007609.1,1026-1044).
gctcttgtcatctctttga

SEQ ID NO: 581165 - DNA, 19 bp, Mus musculus
  siRNA target sequence for Casp4 (NM_007609.1,1051-1069).
cctgaaggtgcaacaatca

SEQ ID NO: 581166 - DNA, 19 bp, Mus musculus
  siRNA target sequence for Casp4 (NM_007609.1,1052-1070).
ctgaaggtgcaacaatcat

SEQ ID NO: 581167 - DNA, 19 bp, Mus musculus
  siRNA target sequence for Casp4 (NM_007609.1,1054-1072).
gaaggtgcaacaatcattt

SEQ ID NO: 581168 - DNA, 19 bp, Mus musculus
  siRNA target sequence for Casp4 (NM_007609.1,1057-1075).
ggtgcaacaatcatttgaa

SEQ ID NO: 581169 - DNA, 19 bp, Mus musculus
  siRNA target sequence for Casp4 (NM_007609.1,1058-1076).
gtgcaacaatcatttgaaa

SEQ ID NO: 581170 - DNA, 19 bp, Mus musculus
  siRNA target sequence for Casp6 (NM_009811.2,63-81).
gaaaccgatggcttctaca

SEQ ID NO: 581171 - DNA, 19 bp, Mus musculus
  siRNA target sequence for Casp6 (NM_009811.2,136-154).
gaggagttgccctcatctt

SEQ ID NO: 581172 - DNA, 19 bp, Mus musculus
  siRNA target sequence for Casp6 (NM_009811.2,155-173).
caatcacgagaggttcttt

SEQ ID NO: 581173 - DNA, 19 bp, Mus musculus
  siRNA target sequence for Casp6 (NM_009811.2,227-245).
gactcgcaggttttcagat

SEQ ID NO: 581174 - DNA, 19 bp, Mus musculus
  siRNA target sequence for Casp6 (NM_009811.2,235-253).
ggttttcagatctaggatt

SEQ ID NO: 581175 - DNA, 19 bp, Mus musculus
  siRNA target sequence for Casp6 (NM_009811.2,250-268).
gatttgaagtgaaatgctt

SEQ ID NO: 581176 - DNA, 19 bp, Mus musculus
  siRNA target sequence for Casp6 (NM_009811.2,306-324).
cacgaggtgtcgacttcaa

SEQ ID NO: 581177 - DNA, 19 bp, Mus musculus
  siRNA target sequence for Casp6 (NM_009811.2,316-334).
cgacttcaagccacataga

SEQ ID NO: 581178 - DNA, 19 bp, Mus musculus
  siRNA target sequence for Casp6 (NM_009811.2,333-351).
gatgccgattgcttcatct

SEQ ID NO: 581179 - DNA, 19 bp, Mus musculus
  siRNA target sequence for Casp6 (NM_009811.2,370-388).
gggaaggcaaccacgttta

SEQ ID NO: 581180 - DNA, 19 bp, Mus musculus
  siRNA target sequence for Casp6 (NM_009811.2,389-407).
cgcatacgacgccaaaatt

SEQ ID NO: 581181 - DNA, 19 bp, Mus musculus
  siRNA target sequence for Casp6 (NM_009811.2,391-409).
catacgacgccaaaattga

SEQ ID NO: 581182 - DNA, 19 bp, Mus musculus
  siRNA target sequence for Casp6 (NM_009811.2,395-413).
cgacgccaaaattgaaatt

SEQ ID NO: 581183 - DNA, 19 bp, Mus musculus
  siRNA target sequence for Casp6 (NM_009811.2,418-436).
cgttgactggcttgttcaa

SEQ ID NO: 581184 - DNA, 19 bp, Mus musculus
  siRNA target sequence for Casp6 (NM_009811.2,634-652).
ctgtcgcagaagggtatta

SEQ ID NO: 581185 - DNA, 19 bp, Mus musculus
  siRNA target sequence for Casp6 (NM_009811.2,636-654).
gtcgcagaagggtattact

SEQ ID NO: 581186 - DNA, 19 bp, Mus musculus
  siRNA target sequence for Casp6 (NM_009811.2,671-689).
gaatggctcctggtacatt

SEQ ID NO: 581187 - DNA, 19 bp, Mus musculus
  siRNA target sequence for Casp6 (NM_009811.2,683-701).
gtacattcaggatttgtgt

SEQ ID NO: 581188 - DNA, 19 bp, Mus musculus
  siRNA target sequence for Casp6 (NM_009811.2,747-765).
ctcacgctggtgaacagaa

SEQ ID NO: 581189 - DNA, 19 bp, Mus musculus
  siRNA target sequence for Casp7 (NM_007611.1,209-227).
gtgctgcggagctggaaaa

SEQ ID NO: 581190 - DNA, 19 bp, Mus musculus
  siRNA target sequence for Casp7 (NM_007611.1,265-283).
ccagaccgctcctctatca

SEQ ID NO: 581191 - DNA, 19 bp, Mus musculus
  siRNA target sequence for Casp7 (NM_007611.1,266-284).
cagaccgctcctctatcat

SEQ ID NO: 581192 - DNA, 19 bp, Mus musculus
  siRNA target sequence for Casp7 (NM_007611.1,278-296).
ctatcatctcctctattct

SEQ ID NO: 581193 - DNA, 19 bp, Mus musculus
  siRNA target sequence for Casp7 (NM_007611.1,345-363).
ggaccgagtgcccacttat

SEQ ID NO: 581194 - DNA, 19 bp, Mus musculus
  siRNA target sequence for Casp7 (NM_007611.1,349-367).
cgagtgcccacttatctgt

SEQ ID NO: 581195 - DNA, 19 bp, Mus musculus
  siRNA target sequence for Casp7 (NM_007611.1,390-408).
gggtaaatgcatcatcata

SEQ ID NO: 581196 - DNA, 19 bp, Mus musculus
  siRNA target sequence for Casp7 (NM_007611.1,391-409).
ggtaaatgcatcatcataa

SEQ ID NO: 581197 - DNA, 19 bp, Mus musculus
  siRNA target sequence for Casp7 (NM_007611.1,449-467).
ggaatgggacggacaaaga

SEQ ID NO: 581198 - DNA, 19 bp, Mus musculus
  siRNA target sequence for Casp7 (NM_007611.1,511-529).
gtaaccgtccacaatgact

SEQ ID NO: 581199 - DNA, 19 bp, Mus musculus
  siRNA target sequence for Casp7 (NM_007611.1,623-641).
gggaagaggacctgattta

SEQ ID NO: 581200 - DNA, 19 bp, Mus musculus
  siRNA target sequence for Casp7 (NM_007611.1,653-671).
gcgtgacacccataaagga

SEQ ID NO: 581201 - DNA, 19 bp, Mus musculus
  siRNA target sequence for Casp7 (NM_007611.1,654-672).
cgtgacacccataaaggat

SEQ ID NO: 581202 - DNA, 19 bp, Mus musculus
  siRNA target sequence for Casp7 (NM_007611.1,670-688).
gatctgacagctcatttta

SEQ ID NO: 581203 - DNA, 19 bp, Mus musculus
  siRNA target sequence for Casp7 (NM_007611.1,698-716).
gatgcaaaaccctgttaga

SEQ ID NO: 581204 - DNA, 19 bp, Mus musculus
  siRNA target sequence for Casp7 (NM_007611.1,701-719).
gcaaaaccctgttagagaa

SEQ ID NO: 581205 - DNA, 19 bp, Mus musculus
  siRNA target sequence for Casp7 (NM_007611.1,808-826).
gctaatccccgcaacaaga

SEQ ID NO: 581206 - DNA, 19 bp, Mus musculus
  siRNA target sequence for Casp7 (NM_007611.1,809-827).
ctaatccccgcaacaagat

SEQ ID NO: 581207 - DNA, 19 bp, Mus musculus
  siRNA target sequence for Casp7 (NM_007611.1,839-857).
ccgacttcctctttgctta

SEQ ID NO: 581208 - DNA, 19 bp, Mus musculus
  siRNA target sequence for Casp7 (NM_007611.1,858-876).
ctccacggttccaggttat

SEQ ID NO: 581209 - DNA, 19 bp, Mus musculus
  siRNA target sequence for Casp7 (NM_007611.1,947-965).
gcaaggacctcgagatcat

SEQ ID NO: 581210 - DNA, 19 bp, Mus musculus
  siRNA target sequence for Casp8 (NM_009812.1,540-558).
gctgcgggatccagacaat

SEQ ID NO: 581211 - DNA, 19 bp, Mus musculus
  siRNA target sequence for Casp8 (NM_009812.1,578-596).
gggtcatgctctttaagct

SEQ ID NO: 581212 - DNA, 19 bp, Mus musculus
  siRNA target sequence for Casp8 (NM_009812.1,604-622).
gaagtgagcgagttggaat

SEQ ID NO: 581213 - DNA, 19 bp, Mus musculus
  siRNA target sequence for Casp8 (NM_009812.1,607-625).
gtgagcgagttggaattga

SEQ ID NO: 581214 - DNA, 19 bp, Mus musculus
  siRNA target sequence for Casp8 (NM_009812.1,619-637).
gaattgagatcttttaagt

SEQ ID NO: 581215 - DNA, 19 bp, Mus musculus
  siRNA target sequence for Casp8 (NM_009812.1,681-699).
cttgagcctgcttgaaatt

SEQ ID NO: 581216 - DNA, 19 bp, Mus musculus
  siRNA target sequence for Casp8 (NM_009812.1,684-702).
gagcctgcttgaaattttt

SEQ ID NO: 581217 - DNA, 19 bp, Mus musculus
  siRNA target sequence for Casp8 (NM_009812.1,687-705).
cctgcttgaaatttttgta

SEQ ID NO: 581218 - DNA, 19 bp, Mus musculus
  siRNA target sequence for Casp8 (NM_009812.1,690-708).
gcttgaaatttttgtagaa

SEQ ID NO: 581219 - DNA, 19 bp, Mus musculus
  siRNA target sequence for Casp8 (NM_009812.1,789-807).
ggggaagatcgaggattat

SEQ ID NO: 581220 - DNA, 19 bp, Mus musculus
  siRNA target sequence for Casp8 (NM_009812.1,792-810).
gaagatcgaggattatgaa

SEQ ID NO: 581221 - DNA, 19 bp, Mus musculus
  siRNA target sequence for Casp8 (NM_009812.1,938-956).
ggacttcagacaaagttta

SEQ ID NO: 581222 - DNA, 19 bp, Mus musculus
  siRNA target sequence for Casp8 (NM_009812.1,969-987).
caaacctcggggatactgt

SEQ ID NO: 581223 - DNA, 19 bp, Mus musculus
  siRNA target sequence for Casp8 (NM_009812.1,979-997).
ggatactgtctgatcatca

SEQ ID NO: 581224 - DNA, 19 bp, Mus musculus
  siRNA target sequence for Casp8 (NM_009812.1,986-1004).
gtctgatcatcaacaatca

SEQ ID NO: 581225 - DNA, 19 bp, Mus musculus
  siRNA target sequence for Casp8 (NM_009812.1,990-1008).
gatcatcaacaatcatgat

SEQ ID NO: 581226 - DNA, 19 bp, Mus musculus
  siRNA target sequence for Casp8 (NM_009812.1,1064-1082).
gaacagactgtgataaaga

SEQ ID NO: 581227 - DNA, 19 bp, Mus musculus
  siRNA target sequence for Casp8 (NM_009812.1,1084-1102).
gctctgagtaagaccttta

SEQ ID NO: 581228 - DNA, 19 bp, Mus musculus
  siRNA target sequence for Casp8 (NM_009812.1,1131-1149).
cgacgactgcactgcaaat

SEQ ID NO: 581229 - DNA, 19 bp, Mus musculus
  siRNA target sequence for Casp8 (NM_009812.1,1181-1199).
gcgcagaccacaagaacaa

SEQ ID NO: 581230 - DNA, 19 bp, Mus musculus
  siRNA target sequence for Casp8 (NM_009812.1,1182-1200).
cgcagaccacaagaacaaa

SEQ ID NO: 581231 - DNA, 19 bp, Mus musculus
  siRNA target sequence for Casp8 (NM_009812.1,1397-1415).
caggcttcgagcaacagaa

SEQ ID NO: 581232 - DNA, 19 bp, Mus musculus
  siRNA target sequence for Casp8 (NM_009812.1,1460-1478).
cggatgaggcagactttct

SEQ ID NO: 581233 - DNA, 19 bp, Mus musculus
  siRNA target sequence for Casp8 (NM_009812.1,1484-1502).
gaatggctacggtgaagaa

SEQ ID NO: 581234 - DNA, 19 bp, Mus musculus
  siRNA target sequence for Casp8 (NM_009812.1,1525-1543).
gtgaatggaacctggtata

SEQ ID NO: 581235 - DNA, 19 bp, Mus musculus
  siRNA target sequence for Casp8 (NM_009812.1,1605-1623).
cctgactggcgtgaactat

SEQ ID NO: 581236 - DNA, 19 bp, Mus musculus
  siRNA target sequence for Casp8 (NM_009812.1,1620-1638).
ctatgacgtgagcaataaa

SEQ ID NO: 581237 - DNA, 19 bp, Mus musculus
  siRNA target sequence for Casp9 (NM_015733.3,353-371).
gcgacatgatcgaggatat

SEQ ID NO: 581238 - DNA, 19 bp, Mus musculus
  siRNA target sequence for Casp9 (NM_015733.3,755-773).
ctggcggagctcatgatgt

SEQ ID NO: 581239 - DNA, 19 bp, Mus musculus
  siRNA target sequence for Casp9 (NM_015733.3,906-924).
caacttggaccgtgacaaa

SEQ ID NO: 581240 - DNA, 19 bp, Mus musculus
  siRNA target sequence for Casp9 (NM_015733.3,1127-1145).
ccgtgtccattgagaaaat

SEQ ID NO: 581241 - DNA, 19 bp, Mus musculus
  siRNA target sequence for Casp9 (NM_015733.3,1128-1146).
cgtgtccattgagaaaatt

SEQ ID NO: 581242 - DNA, 19 bp, Mus musculus
  siRNA target sequence for Casp9 (NM_015733.3,1217-1235).
gcggtggtgagcagaaaga

SEQ ID NO: 581243 - DNA, 19 bp, Mus musculus
  siRNA target sequence for Casp9 (NM_015733.3,1515-1533).
ggttgccaatgctgtttct

SEQ ID NO: 581244 - DNA, 19 bp, Mus musculus
  siRNA target sequence for Casp9 (NM_015733.3,1532-1550).
ctgcgaaagggacttacaa

SEQ ID NO: 581245 - DNA, 19 bp, Mus musculus
  siRNA target sequence for Casp9 (NM_015733.3,1576-1594).
ctccggaaaaagctgtttt

SEQ ID NO: 581246 - DNA, 19 bp, Mus musculus
  siRNA target sequence for Cflar (NM_009805.1,113-131).
ggtggaagagtgtcttgat

SEQ ID NO: 581247 - DNA, 19 bp, Mus musculus
  siRNA target sequence for Cflar (NM_009805.1,152-170).
gctcttcctgtgtagagat

SEQ ID NO: 581248 - DNA, 19 bp, Mus musculus
  siRNA target sequence for Cflar (NM_009805.1,203-221).
ggacctcctggatagctta

SEQ ID NO: 581249 - DNA, 19 bp, Mus musculus
  siRNA target sequence for Cflar (NM_009805.1,206-224).
cctcctggatagcttaagt

SEQ ID NO: 581250 - DNA, 19 bp, Mus musculus
  siRNA target sequence for Cflar (NM_009805.1,231-249).
ggccagctctcttttgcta

SEQ ID NO: 581251 - DNA, 19 bp, Mus musculus
  siRNA target sequence for Cflar (NM_009805.1,288-306).
cttctcaagaggatcttga

SEQ ID NO: 581252 - DNA, 19 bp, Mus musculus
  siRNA target sequence for Cflar (NM_009805.1,391-409).
gtgagagcttagatcagaa

SEQ ID NO: 581253 - DNA, 19 bp, Mus musculus
  siRNA target sequence for Cflar (NM_009805.1,410-428).
cgatgtatcctccttagtt

SEQ ID NO: 581254 - DNA, 19 bp, Mus musculus
  siRNA target sequence for Cflar (NM_009805.1,411-429).
gatgtatcctccttagttt

SEQ ID NO: 581255 - DNA, 19 bp, Mus musculus
  siRNA target sequence for Cflar (NM_009805.1,531-549).
gcttcagaccaattgaatt

SEQ ID NO: 581256 - DNA, 19 bp, Mus musculus
  siRNA target sequence for Cflar (NM_009805.1,532-550).
cttcagaccaattgaattt

SEQ ID NO: 581257 - DNA, 19 bp, Mus musculus
  siRNA target sequence for Cflar (NM_009805.1,566-584).
gaagaacatccacagaata

SEQ ID NO: 581258 - DNA, 19 bp, Mus musculus
  siRNA target sequence for Cflar (NM_009805.1,623-641).
ccaaggagcaagatcaaat

SEQ ID NO: 581259 - DNA, 19 bp, Mus musculus
  siRNA target sequence for Cflar (NM_009805.1,657-675).
gcttcgctcccaaaattga

SEQ ID NO: 581260 - DNA, 19 bp, Mus musculus
  siRNA target sequence for Cflar (NM_009805.1,661-679).
cgctcccaaaattgagtat

SEQ ID NO: 581261 - DNA, 19 bp, Mus musculus
  siRNA target sequence for Cflar (NM_009805.1,663-681).
ctcccaaaattgagtatca

SEQ ID NO: 581262 - DNA, 19 bp, Mus musculus
  siRNA target sequence for Cflar (NM_009805.1,674-692).
gagtatcaagtataactca

SEQ ID NO: 581263 - DNA, 19 bp, Mus musculus
  siRNA target sequence for Malt1 (NM_172833.1,476-494).
ctaatgggtgaaaaaggat

SEQ ID NO: 581264 - DNA, 19 bp, Mus musculus
  siRNA target sequence for Malt1 (NM_172833.1,481-499).
gggtgaaaaaggatgtaca

SEQ ID NO: 581265 - DNA, 19 bp, Mus musculus
  siRNA target sequence for Malt1 (NM_172833.1,557-575).
ctcaaccccccaggattaa

SEQ ID NO: 581266 - DNA, 19 bp, Mus musculus
  siRNA target sequence for Malt1 (NM_172833.1,582-600).
ctgtaaacccagaatccaa

SEQ ID NO: 581267 - DNA, 19 bp, Mus musculus
  siRNA target sequence for Malt1 (NM_172833.1,610-628).
ggctggacagtttgtaaaa

SEQ ID NO: 581268 - DNA, 19 bp, Mus musculus
  siRNA target sequence for Malt1 (NM_172833.1,648-666).
gacatccttttgtacaata

SEQ ID NO: 581269 - DNA, 19 bp, Mus musculus
  siRNA target sequence for Malt1 (NM_172833.1,653-671).
ccttttgtacaatatcaat

SEQ ID NO: 581270 - DNA, 19 bp, Mus musculus
  siRNA target sequence for Malt1 (NM_172833.1,691-709).
gatcccatatggaaattca

SEQ ID NO: 581271 - DNA, 19 bp, Mus musculus
  siRNA target sequence for Malt1 (NM_172833.1,844-862).
cttccagggaagtatggat

SEQ ID NO: 581272 - DNA, 19 bp, Mus musculus
  siRNA target sequence for Malt1 (NM_172833.1,870-888).
cagaatccaggttgcaaat

SEQ ID NO: 581273 - DNA, 19 bp, Mus musculus
  siRNA target sequence for Malt1 (NM_172833.1,872-890).
gaatccaggttgcaaatct

SEQ ID NO: 581274 - DNA, 19 bp, Mus musculus
  siRNA target sequence for Malt1 (NM_172833.1,917-935).
gtgccaggcagcatgttgt

SEQ ID NO: 581275 - DNA, 19 bp, Mus musculus
  siRNA target sequence for Malt1 (NM_172833.1,924-942).
gcagcatgttgttgttaca

SEQ ID NO: 581276 - DNA, 19 bp, Mus musculus
  siRNA target sequence for Malt1 (NM_172833.1,937-955).
gttacagtgtgttgctatt

SEQ ID NO: 581277 - DNA, 19 bp, Mus musculus
  siRNA target sequence for Malt1 (NM_172833.1,969-987).
ctcactaccagtggtttaa

SEQ ID NO: 581278 - DNA, 19 bp, Mus musculus
  siRNA target sequence for Malt1 (NM_172833.1,973-991).
ctaccagtggtttaaagat

SEQ ID NO: 581279 - DNA, 19 bp, Mus musculus
  siRNA target sequence for Malt1 (NM_172833.1,1029-1047).
cggttccatatgtggatat

SEQ ID NO: 581280 - DNA, 19 bp, Mus musculus
  siRNA target sequence for Malt1 (NM_172833.1,1062-1080).
cctactggtgtcatgtata

SEQ ID NO: 581281 - DNA, 19 bp, Mus musculus
  siRNA target sequence for Malt1 (NM_172833.1,1063-1081).
ctactggtgtcatgtatat

SEQ ID NO: 581282 - DNA, 19 bp, Mus musculus
  siRNA target sequence for Malt1 (NM_172833.1,1068-1086).
ggtgtcatgtatataatga

SEQ ID NO: 581283 - DNA, 19 bp, Mus musculus
  siRNA target sequence for Malt1 (NM_172833.1,1085-1103).
gaccgagacagtcaagata

SEQ ID NO: 581284 - DNA, 19 bp, Mus musculus
  siRNA target sequence for Malt1 (NM_172833.1,1089-1107).
gagacagtcaagatagcaa

SEQ ID NO: 581285 - DNA, 19 bp, Mus musculus
  siRNA target sequence for Malt1 (NM_172833.1,1118-1136).
gtcaccatagatgaattaa

SEQ ID NO: 581286 - DNA, 19 bp, Mus musculus
  siRNA target sequence for Malt1 (NM_172833.1,1190-1208).
gacaaagtcgcccttttga

SEQ ID NO: 581287 - DNA, 19 bp, Mus musculus
  siRNA target sequence for Malt1 (NM_172833.1,1192-1210).
caaagtcgcccttttgata

SEQ ID NO: 581288 - DNA, 19 bp, Mus musculus
  siRNA target sequence for Malt1 (NM_172833.1,1227-1245).
gggagcatcccaagcttaa

SEQ ID NO: 581289 - DNA, 19 bp, Mus musculus
  siRNA target sequence for Malt1 (NM_172833.1,1228-1246).
ggagcatcccaagcttaaa

SEQ ID NO: 581290 - DNA, 19 bp, Mus musculus
  siRNA target sequence for Malt1 (NM_172833.1,1248-1266).
cgcctttggtggatgtgta

SEQ ID NO: 581291 - DNA, 19 bp, Mus musculus
  siRNA target sequence for Malt1 (NM_172833.1,1264-1282).
gtatgaattgaccaactta

SEQ ID NO: 581292 - DNA, 19 bp, Mus musculus
  siRNA target sequence for Malt1 (NM_172833.1,1268-1286).
gaattgaccaacttactaa

SEQ ID NO: 581293 - DNA, 19 bp, Mus musculus
  siRNA target sequence for Malt1 (NM_172833.1,1273-1291).
gaccaacttactaagacaa

SEQ ID NO: 581294 - DNA, 19 bp, Mus musculus
  siRNA target sequence for Malt1 (NM_172833.1,1276-1294).
caacttactaagacaacta

SEQ ID NO: 581295 - DNA, 19 bp, Mus musculus
  siRNA target sequence for Malt1 (NM_172833.1,1279-1297).
cttactaagacaactagat

SEQ ID NO: 581296 - DNA, 19 bp, Mus musculus
  siRNA target sequence for Malt1 (NM_172833.1,1315-1333).
gttggaccttactgaatat

SEQ ID NO: 581297 - DNA, 19 bp, Mus musculus
  siRNA target sequence for Malt1 (NM_172833.1,1326-1344).
ctgaatatgagatgtgtaa

SEQ ID NO: 581298 - DNA, 19 bp, Mus musculus
  siRNA target sequence for Malt1 (NM_172833.1,1345-1363).
cgctgtggatgaattttta

SEQ ID NO: 581299 - DNA, 19 bp, Mus musculus
  siRNA target sequence for Malt1 (NM_172833.1,1379-1397).
ggagtatatggattgttat

SEQ ID NO: 581300 - DNA, 19 bp, Mus musculus
  siRNA target sequence for Malt1 (NM_172833.1,1380-1398).
gagtatatggattgttata

SEQ ID NO: 581301 - DNA, 19 bp, Mus musculus
  siRNA target sequence for Malt1 (NM_172833.1,1403-1421).
gcagggcacggttatgaaa

SEQ ID NO: 581302 - DNA, 19 bp, Mus musculus
  siRNA target sequence for Malt1 (NM_172833.1,1404-1422).
cagggcacggttatgaaaa

SEQ ID NO: 581303 - DNA, 19 bp, Mus musculus
  siRNA target sequence for Malt1 (NM_172833.1,1408-1426).
gcacggttatgaaaacttt

SEQ ID NO: 581304 - DNA, 19 bp, Mus musculus
  siRNA target sequence for Malt1 (NM_172833.1,1454-1472).
gctccaaatccatataggt

SEQ ID NO: 581305 - DNA, 19 bp, Mus musculus
  siRNA target sequence for Malt1 (NM_172833.1,1482-1500).
gcctatgcgtacaaaacat

SEQ ID NO: 581306 - DNA, 19 bp, Mus musculus
  siRNA target sequence for Malt1 (NM_172833.1,1483-1501).
cctatgcgtacaaaacata

SEQ ID NO: 581307 - DNA, 19 bp, Mus musculus
  siRNA target sequence for Malt1 (NM_172833.1,1488-1506).
gcgtacaaaacatactgaa

SEQ ID NO: 581308 - DNA, 19 bp, Mus musculus
  siRNA target sequence for Malt1 (NM_172833.1,1549-1567).
ggatatgtgtcggaaaaga

SEQ ID NO: 581309 - DNA, 19 bp, Mus musculus
  siRNA target sequence for Malt1 (NM_172833.1,1550-1568).
gatatgtgtcggaaaagaa

SEQ ID NO: 581310 - DNA, 19 bp, Mus musculus
  siRNA target sequence for Malt1 (NM_172833.1,1680-1698).
ggttggcaaatgggatttt

SEQ ID NO: 581311 - DNA, 19 bp, Mus musculus
  siRNA target sequence for Malt1 (NM_172833.1,1719-1737).
gattattagaagacaagaa

SEQ ID NO: 581312 - DNA, 19 bp, Mus musculus
  siRNA target sequence for Malt1 (NM_172833.1,1882-1900).
ggctctggtgcgcaatcta

SEQ ID NO: 581313 - DNA, 19 bp, Mus musculus
  siRNA target sequence for Malt1 (NM_172833.1,1884-1902).
ctctggtgcgcaatctaca

SEQ ID NO: 581314 - DNA, 19 bp, Mus musculus
  siRNA target sequence for Malt1 (NM_172833.1,1903-1921).
gtgggccaaggctcatgaa

SEQ ID NO: 581315 - DNA, 19 bp, Mus musculus
  siRNA target sequence for Malt1 (NM_172833.1,1905-1923).
gggccaaggctcatgaact

SEQ ID NO: 581316 - DNA, 19 bp, Mus musculus
  siRNA target sequence for Malt1 (NM_172833.1,1906-1924).
ggccaaggctcatgaactt

SEQ ID NO: 581317 - DNA, 19 bp, Mus musculus
  siRNA target sequence for Malt1 (NM_172833.1,1953-1971).
gtggcgttcacattcaatt

SEQ ID NO: 581318 - DNA, 19 bp, Mus musculus
  siRNA target sequence for Malt1 (NM_172833.1,1957-1975).
cgttcacattcaattagga

SEQ ID NO: 581319 - DNA, 19 bp, Mus musculus
  siRNA target sequence for Malt1 (NM_172833.1,1958-1976).
gttcacattcaattaggat

SEQ ID NO: 581320 - DNA, 19 bp, Mus musculus
  siRNA target sequence for Malt1 (NM_172833.1,1997-2015).
gtcatgataatctacacaa

SEQ ID NO: 581321 - DNA, 19 bp, Mus musculus
  siRNA target sequence for Malt1 (NM_172833.1,2002-2020).
gataatctacacaagtata

SEQ ID NO: 581322 - DNA, 19 bp, Mus musculus
  siRNA target sequence for Malt1 (NM_172833.1,2047-2065).
gtgtgacgcctatgttact

SEQ ID NO: 581323 - DNA, 19 bp, Mus musculus
  siRNA target sequence for Malt1 (NM_172833.1,2049-2067).
gtgacgcctatgttactga

SEQ ID NO: 581324 - DNA, 19 bp, Mus musculus
  siRNA target sequence for Malt1 (NM_172833.1,2051-2069).
gacgcctatgttactgatt

SEQ ID NO: 581325 - DNA, 19 bp, Mus musculus
  siRNA target sequence for Malt1 (NM_172833.1,2071-2089).
ccctcttgacctagatatt

SEQ ID NO: 581326 - DNA, 19 bp, Mus musculus
  siRNA target sequence for Malt1 (NM_172833.1,2080-2098).
cctagatattgatccaaaa

SEQ ID NO: 581327 - DNA, 19 bp, Mus musculus
  siRNA target sequence for Malt1 (NM_172833.1,2129-2147).
ggcagctacttagtatcaa

SEQ ID NO: 581328 - DNA, 19 bp, Mus musculus
  siRNA target sequence for Malt1 (NM_172833.1,2133-2151).
gctacttagtatcaaaaga

SEQ ID NO: 581329 - DNA, 19 bp, Mus musculus
  siRNA target sequence for Malt1 (NM_172833.1,2184-2202).
gctcactacaaaaattaaa

SEQ ID NO: 581330 - DNA, 19 bp, Mus musculus
  siRNA target sequence for Malt1 (NM_172833.1,2507-2525).
cggactccacacacattca

SEQ ID NO: 581331 - DNA, 19 bp, Mus musculus
  siRNA target sequence for Malt1 (NM_172833.1,2508-2526).
ggactccacacacattcat

SEQ ID NO: 581332 - DNA, 19 bp, Mus musculus
  siRNA target sequence for Malt1 (NM_172833.1,2553-2571).
gccagtttggtagaagtaa

SEQ ID NO: 581333 - DNA, 19 bp, Mus musculus
  siRNA target sequence for Malt1 (NM_172833.1,2554-2572).
ccagtttggtagaagtaat

SEQ ID NO: 581334 - DNA, 19 bp, Mus musculus
  siRNA target sequence for Malt1 (NM_172833.1,2575-2593).
gcccgtagagacaactgat

SEQ ID NO: 581335 - DNA, 19 bp, Mus musculus
  siRNA target sequence for Malt1 (NM_172833.1,2578-2596).
cgtagagacaactgatgaa

SEQ ID NO: 581336 - DNA, 19 bp, Mus musculus
  siRNA target sequence for Capn10 (NM_011796.1,89-107).
cggactcctcgctctttta

SEQ ID NO: 581337 - DNA, 19 bp, Mus musculus
  siRNA target sequence for Capn10 (NM_011796.1,91-109).
gactcctcgctcttttaca

SEQ ID NO: 581338 - DNA, 19 bp, Mus musculus
  siRNA target sequence for Capn10 (NM_011796.1,95-113).
cctcgctcttttacaactt

SEQ ID NO: 581339 - DNA, 19 bp, Mus musculus
  siRNA target sequence for Capn10 (NM_011796.1,323-341).
ggtctgaccagaaatacca

SEQ ID NO: 581340 - DNA, 19 bp, Mus musculus
  siRNA target sequence for Capn10 (NM_011796.1,324-342).
gtctgaccagaaataccaa

SEQ ID NO: 581341 - DNA, 19 bp, Mus musculus
  siRNA target sequence for Capn10 (NM_011796.1,418-436).
gccgggagactctgctttt

SEQ ID NO: 581342 - DNA, 19 bp, Mus musculus
  siRNA target sequence for Capn10 (NM_011796.1,443-461).
gccagagagaggatgtgtt

SEQ ID NO: 581343 - DNA, 19 bp, Mus musculus
  siRNA target sequence for Capn10 (NM_011796.1,581-599).
gcttgaaggatgtaacgaa

SEQ ID NO: 581344 - DNA, 19 bp, Mus musculus
  siRNA target sequence for Capn10 (NM_011796.1,945-963).
gttcctcagggagtttgat

SEQ ID NO: 581345 - DNA, 19 bp, Mus musculus
  siRNA target sequence for Capn10 (NM_011796.1,1081-1099).
ggaggctgccggaacaaca

SEQ ID NO: 581346 - DNA, 19 bp, Mus musculus
  siRNA target sequence for Capn10 (NM_011796.1,1084-1102).
ggctgccggaacaacagtt

SEQ ID NO: 581347 - DNA, 19 bp, Mus musculus
  siRNA target sequence for Capn10 (NM_011796.1,1089-1107).
ccggaacaacagttgcttt

SEQ ID NO: 581348 - DNA, 19 bp, Mus musculus
  siRNA target sequence for Capn10 (NM_011796.1,1408-1426).
gccgtccctagcacctttt

SEQ ID NO: 581349 - DNA, 19 bp, Mus musculus
  siRNA target sequence for Capn10 (NM_011796.1,1409-1427).
ccgtccctagcaccttttt

SEQ ID NO: 581350 - DNA, 19 bp, Mus musculus
  siRNA target sequence for Capn10 (NM_011796.1,1411-1429).
gtccctagcacctttttga

SEQ ID NO: 581351 - DNA, 19 bp, Mus musculus
  siRNA target sequence for Capn10 (NM_011796.1,1717-1735).
cagctgcaccccattggtt

SEQ ID NO: 581352 - DNA, 19 bp, Mus musculus
  siRNA target sequence for Capn5 (NM_007602.2,200-218).
cctatgaggaccagaacta

SEQ ID NO: 581353 - DNA, 19 bp, Mus musculus
  siRNA target sequence for Capn5 (NM_007602.2,284-302).
ccgacgactccctttacta

SEQ ID NO: 581354 - DNA, 19 bp, Mus musculus
  siRNA target sequence for Capn5 (NM_007602.2,285-303).
cgacgactccctttactat

SEQ ID NO: 581355 - DNA, 19 bp, Mus musculus
  siRNA target sequence for Capn5 (NM_007602.2,286-304).
gacgactccctttactata

SEQ ID NO: 581356 - DNA, 19 bp, Mus musculus
  siRNA target sequence for Capn5 (NM_007602.2,566-584).
gggagtgggtggacgtaat

SEQ ID NO: 581357 - DNA, 19 bp, Mus musculus
  siRNA target sequence for Capn5 (NM_007602.2,596-614).
ggctgcccacagtcaacaa

SEQ ID NO: 581358 - DNA, 19 bp, Mus musculus
  siRNA target sequence for Capn5 (NM_007602.2,635-653).
ccaactccaaaaatgagtt

SEQ ID NO: 581359 - DNA, 19 bp, Mus musculus
  siRNA target sequence for Capn5 (NM_007602.2,719-737).
gcaacacggccgatgcatt

SEQ ID NO: 581360 - DNA, 19 bp, Mus musculus
  siRNA target sequence for Capn5 (NM_007602.2,1076-1094).
cagaggaatggcagaaagt

SEQ ID NO: 581361 - DNA, 19 bp, Mus musculus
  siRNA target sequence for Capn5 (NM_007602.2,1165-1183).
gacatgtgccggtacttta

SEQ ID NO: 581362 - DNA, 19 bp, Mus musculus
  siRNA target sequence for Capn5 (NM_007602.2,1341-1359).
cccacagtacgtatttgaa

SEQ ID NO: 581363 - DNA, 19 bp, Mus musculus
  siRNA target sequence for Capn5 (NM_007602.2,1343-1361).
cacagtacgtatttgaagt

SEQ ID NO: 581364 - DNA, 19 bp, Mus musculus
  siRNA target sequence for Capn5 (NM_007602.2,1370-1388).
cagaagatgaagtgttgat

SEQ ID NO: 581365 - DNA, 19 bp, Mus musculus
  siRNA target sequence for Capn5 (NM_007602.2,1519-1537).
gccagctccatctacatca

SEQ ID NO: 581366 - DNA, 19 bp, Mus musculus
  siRNA target sequence for Capn5 (NM_007602.2,1536-1554).
caattcccgcagcgttttt

SEQ ID NO: 581367 - DNA, 19 bp, Mus musculus
  siRNA target sequence for Capn5 (NM_007602.2,1778-1796).
caacaggagcaaactcata

SEQ ID NO: 581368 - DNA, 19 bp, Mus musculus
  siRNA target sequence for Capn5 (NM_007602.2,1783-1801).
ggagcaaactcatatgtga

SEQ ID NO: 581369 - DNA, 19 bp, Mus musculus
  siRNA target sequence for Capn5 (NM_007602.2,1784-1802).
gagcaaactcatatgtgat

SEQ ID NO: 581370 - DNA, 19 bp, Mus musculus
  siRNA target sequence for Capn5 (NM_007602.2,1809-1827).
gtgtgagggcgaaaaggtt

SEQ ID NO: 581371 - DNA, 19 bp, Mus musculus
  siRNA target sequence for Capn5 (NM_007602.2,1850-1868).
cctcgacaccagagtacaa

SEQ ID NO: 581372 - DNA, 19 bp, Mus musculus
  siRNA target sequence for Capn5 (NM_007602.2,1851-1869).
ctcgacaccagagtacaat

SEQ ID NO: 581373 - DNA, 19 bp, Mus musculus
  siRNA target sequence for Capn5 (NM_007602.2,1856-1874).
caccagagtacaatgtaaa

SEQ ID NO: 581374 - DNA, 19 bp, Mus musculus
  siRNA target sequence for Capn5 (NM_007602.2,1911-1929).
caccgtgcaggtttggaat

SEQ ID NO: 581375 - DNA, 19 bp, Mus musculus
  siRNA target sequence for Capn5 (NM_007602.2,1933-1951).
cgagtcctgaaggatgaat

SEQ ID NO: 581376 - DNA, 19 bp, Mus musculus
  siRNA target sequence for Capn6 (NM_007603.2,131-149).
cctctgaagctcttcaaaa

SEQ ID NO: 581377 - DNA, 19 bp, Mus musculus
  siRNA target sequence for Capn6 (NM_007603.2,213-231).
ccttcctaccggagaatga

SEQ ID NO: 581378 - DNA, 19 bp, Mus musculus
  siRNA target sequence for Capn6 (NM_007603.2,217-235).
cctaccggagaatgattct

SEQ ID NO: 581379 - DNA, 19 bp, Mus musculus
  siRNA target sequence for Capn6 (NM_007603.2,277-295).
gcgtccacaggacatttct

SEQ ID NO: 581380 - DNA, 19 bp, Mus musculus
  siRNA target sequence for Capn6 (NM_007603.2,356-374).
gggaacaaggcaatgatct

SEQ ID NO: 581381 - DNA, 19 bp, Mus musculus
  siRNA target sequence for Capn6 (NM_007603.2,365-383).
gcaatgatctctgcatttt

SEQ ID NO: 581382 - DNA, 19 bp, Mus musculus
  siRNA target sequence for Capn6 (NM_007603.2,466-484).
gaaatacgctggaatcttt

SEQ ID NO: 581383 - DNA, 19 bp, Mus musculus
  siRNA target sequence for Capn6 (NM_007603.2,513-531).
ggaccgaggtggtgattga

SEQ ID NO: 581384 - DNA, 19 bp, Mus musculus
  siRNA target sequence for Capn6 (NM_007603.2,514-532).
gaccgaggtggtgattgat

SEQ ID NO: 581385 - DNA, 19 bp, Mus musculus
  siRNA target sequence for Capn6 (NM_007603.2,516-534).
ccgaggtggtgattgatga

SEQ ID NO: 581386 - DNA, 19 bp, Mus musculus
  siRNA target sequence for Capn6 (NM_007603.2,554-572).
ggagatctggtcttctcat

SEQ ID NO: 581387 - DNA, 19 bp, Mus musculus
  siRNA target sequence for Capn6 (NM_007603.2,555-573).
gagatctggtcttctcatt

SEQ ID NO: 581388 - DNA, 19 bp, Mus musculus
  siRNA target sequence for Capn6 (NM_007603.2,656-674).
ggtctgaccatcactgata

SEQ ID NO: 581389 - DNA, 19 bp, Mus musculus
  siRNA target sequence for Capn6 (NM_007603.2,657-675).
gtctgaccatcactgatat

SEQ ID NO: 581390 - DNA, 19 bp, Mus musculus
  siRNA target sequence for Capn6 (NM_007603.2,659-677).
ctgaccatcactgatatca

SEQ ID NO: 581391 - DNA, 19 bp, Mus musculus
  siRNA target sequence for Capn6 (NM_007603.2,692-710).
ggcacactggctgaaatca

SEQ ID NO: 581392 - DNA, 19 bp, Mus musculus
  siRNA target sequence for Capn6 (NM_007603.2,693-711).
gcacactggctgaaatcat

SEQ ID NO: 581393 - DNA, 19 bp, Mus musculus
  siRNA target sequence for Capn6 (NM_007603.2,694-712).
cacactggctgaaatcatt

SEQ ID NO: 581394 - DNA, 19 bp, Mus musculus
  siRNA target sequence for Capn6 (NM_007603.2,718-736).
gcagaaaggacgatacact

SEQ ID NO: 581395 - DNA, 19 bp, Mus musculus
  siRNA target sequence for Capn6 (NM_007603.2,726-744).
gacgatacactgatcttgt

SEQ ID NO: 581396 - DNA, 19 bp, Mus musculus
  siRNA target sequence for Capn6 (NM_007603.2,763-781).
gtttggagaactgtacaaa

SEQ ID NO: 581397 - DNA, 19 bp, Mus musculus
  siRNA target sequence for Capn6 (NM_007603.2,767-785).
ggagaactgtacaaaacgt

SEQ ID NO: 581398 - DNA, 19 bp, Mus musculus
  siRNA target sequence for Capn6 (NM_007603.2,787-805).
caccaaaggaggtctaatt

SEQ ID NO: 581399 - DNA, 19 bp, Mus musculus
  siRNA target sequence for Capn6 (NM_007603.2,860-878).
ggactactgaagggttata

SEQ ID NO: 581400 - DNA, 19 bp, Mus musculus
  siRNA target sequence for Capn6 (NM_007603.2,879-897).
cctacaccatgactgatat

SEQ ID NO: 581401 - DNA, 19 bp, Mus musculus
  siRNA target sequence for Capn6 (NM_007603.2,880-898).
ctacaccatgactgatatt

SEQ ID NO: 581402 - DNA, 19 bp, Mus musculus
  siRNA target sequence for Capn6 (NM_007603.2,904-922).
gctccgtctcggagaaaga

SEQ ID NO: 581403 - DNA, 19 bp, Mus musculus
  siRNA target sequence for Capn6 (NM_007603.2,996-1014).
gtggcccctggagtgaaat

SEQ ID NO: 581404 - DNA, 19 bp, Mus musculus
  siRNA target sequence for Capn6 (NM_007603.2,1000-1018).
cccctggagtgaaatttca

SEQ ID NO: 581405 - DNA, 19 bp, Mus musculus
  siRNA target sequence for Capn6 (NM_007603.2,1113-1131).
gccacaactttcacaaact

SEQ ID NO: 581406 - DNA, 19 bp, Mus musculus
  siRNA target sequence for Capn6 (NM_007603.2,1115-1133).
cacaactttcacaaactga

SEQ ID NO: 581407 - DNA, 19 bp, Mus musculus
  siRNA target sequence for Capn6 (NM_007603.2,1117-1135).
caactttcacaaactgaat

SEQ ID NO: 581408 - DNA, 19 bp, Mus musculus
  siRNA target sequence for Capn6 (NM_007603.2,1136-1154).
gtctgccgcaatgtgaata

SEQ ID NO: 581409 - DNA, 19 bp, Mus musculus
  siRNA target sequence for Capn6 (NM_007603.2,1138-1156).
ctgccgcaatgtgaataat

SEQ ID NO: 581410 - DNA, 19 bp, Mus musculus
  siRNA target sequence for Capn6 (NM_007603.2,1141-1159).
ccgcaatgtgaataatcct

SEQ ID NO: 581411 - DNA, 19 bp, Mus musculus
  siRNA target sequence for Capn6 (NM_007603.2,1228-1246).
ccgatcaggaggttgctat

SEQ ID NO: 581412 - DNA, 19 bp, Mus musculus
  siRNA target sequence for Capn6 (NM_007603.2,1229-1247).
cgatcaggaggttgctata

SEQ ID NO: 581413 - DNA, 19 bp, Mus musculus
  siRNA target sequence for Capn6 (NM_007603.2,1230-1248).
gatcaggaggttgctataa

SEQ ID NO: 581414 - DNA, 19 bp, Mus musculus
  siRNA target sequence for Capn6 (NM_007603.2,1233-1251).
caggaggttgctataacaa

SEQ ID NO: 581415 - DNA, 19 bp, Mus musculus
  siRNA target sequence for Capn6 (NM_007603.2,1267-1285).
gcagaatcctcagtacatt

SEQ ID NO: 581416 - DNA, 19 bp, Mus musculus
  siRNA target sequence for Capn6 (NM_007603.2,1268-1286).
cagaatcctcagtacattt

SEQ ID NO: 581417 - DNA, 19 bp, Mus musculus
  siRNA target sequence for Capn6 (NM_007603.2,1294-1312).
gcccgaggatggccataaa

SEQ ID NO: 581418 - DNA, 19 bp, Mus musculus
  siRNA target sequence for Capn6 (NM_007603.2,1304-1322).
ggccataaagtcatcatgt

SEQ ID NO: 581419 - DNA, 19 bp, Mus musculus
  siRNA target sequence for Capn6 (NM_007603.2,1362-1380).
gaagacctgataattacat

SEQ ID NO: 581420 - DNA, 19 bp, Mus musculus
  siRNA target sequence for Capn6 (NM_007603.2,1474-1492).
cgacacccgtactgtgttt

SEQ ID NO: 581421 - DNA, 19 bp, Mus musculus
  siRNA target sequence for Capn6 (NM_007603.2,1547-1565).
catggccgtaccagtgaat

SEQ ID NO: 581422 - DNA, 19 bp, Mus musculus
  siRNA target sequence for Capn6 (NM_007603.2,1551-1569).
gccgtaccagtgaatttct

SEQ ID NO: 581423 - DNA, 19 bp, Mus musculus
  siRNA target sequence for Capn6 (NM_007603.2,1728-1746).
ctgtcaatccatatctgat

SEQ ID NO: 581424 - DNA, 19 bp, Mus musculus
  siRNA target sequence for Capn6 (NM_007603.2,1736-1754).
ccatatctgatcatcaaat

SEQ ID NO: 581425 - DNA, 19 bp, Mus musculus
  siRNA target sequence for Capn6 (NM_007603.2,1794-1812).
ctgtgcatgccatttttga

SEQ ID NO: 581426 - DNA, 19 bp, Mus musculus
  siRNA target sequence for Capn6 (NM_007603.2,1836-1854).
ggaccactgacattcctat

SEQ ID NO: 581427 - DNA, 19 bp, Mus musculus
  siRNA target sequence for Capn6 (NM_007603.2,1839-1857).
ccactgacattcctattat

SEQ ID NO: 581428 - DNA, 19 bp, Mus musculus
  siRNA target sequence for Capn6 (NM_007603.2,1842-1860).
ctgacattcctattatcat

SEQ ID NO: 581429 - DNA, 19 bp, Mus musculus
  siRNA target sequence for Capn6 (NM_007603.2,1878-1896).
gaaaattctgtgatcagtt

SEQ ID NO: 581430 - DNA, 19 bp, Mus musculus
  siRNA target sequence for Capn6 (NM_007603.2,1929-1947).
gcgactgccgtgatctgaa

SEQ ID NO: 581431 - DNA, 19 bp, Mus musculus
  siRNA target sequence for Capn6 (NM_007603.2,1930-1948).
cgactgccgtgatctgaaa

SEQ ID NO: 581432 - DNA, 19 bp, Mus musculus
  siRNA target sequence for Capn6 (NM_007603.2,1931-1949).
gactgccgtgatctgaaat

SEQ ID NO: 581433 - DNA, 19 bp, Mus musculus
  siRNA target sequence for Capn6 (NM_007603.2,1933-1951).
ctgccgtgatctgaaatct

SEQ ID NO: 581434 - DNA, 19 bp, Mus musculus
  siRNA target sequence for Capn6 (NM_007603.2,1950-1968).
ctctgtacctgcgtaagaa

SEQ ID NO: 581435 - DNA, 19 bp, Mus musculus
  siRNA target sequence for Capn6 (NM_007603.2,1974-1992).
gtcctactgccaaagtcaa

SEQ ID NO: 581436 - DNA, 19 bp, Mus musculus
  siRNA target sequence for Capn7 (NM_009796.1,238-256).
ctgaggcggtgttttacta

SEQ ID NO: 581437 - DNA, 19 bp, Mus musculus
  siRNA target sequence for Capn7 (NM_009796.1,264-282).
gctgcccaagctttaattt

SEQ ID NO: 581438 - DNA, 19 bp, Mus musculus
  siRNA target sequence for Capn7 (NM_009796.1,269-287).
ccaagctttaatttatgct

SEQ ID NO: 581439 - DNA, 19 bp, Mus musculus
  siRNA target sequence for Capn7 (NM_009796.1,294-312).
gcaggatccagcctagaaa

SEQ ID NO: 581440 - DNA, 19 bp, Mus musculus
  siRNA target sequence for Capn7 (NM_009796.1,385-403).
ctgatcctttgaaatcaaa

SEQ ID NO: 581441 - DNA, 19 bp, Mus musculus
  siRNA target sequence for Capn7 (NM_009796.1,423-441).
cgtgcccattttcttgtta

SEQ ID NO: 581442 - DNA, 19 bp, Mus musculus
  siRNA target sequence for Capn7 (NM_009796.1,505-523).
ctgtggaactctgtctaaa

SEQ ID NO: 581443 - DNA, 19 bp, Mus musculus
  siRNA target sequence for Capn7 (NM_009796.1,541-559).
ctgacaagactctgcaaaa

SEQ ID NO: 581444 - DNA, 19 bp, Mus musculus
  siRNA target sequence for Capn7 (NM_009796.1,543-561).
gacaagactctgcaaaata

SEQ ID NO: 581445 - DNA, 19 bp, Mus musculus
  siRNA target sequence for Capn7 (NM_009796.1,545-563).
caagactctgcaaaataaa

SEQ ID NO: 581446 - DNA, 19 bp, Mus musculus
  siRNA target sequence for Capn7 (NM_009796.1,550-568).
ctctgcaaaataaattgaa

SEQ ID NO: 581447 - DNA, 19 bp, Mus musculus
  siRNA target sequence for Capn7 (NM_009796.1,575-593).
ggctcgacaggcactagat

SEQ ID NO: 581448 - DNA, 19 bp, Mus musculus
  siRNA target sequence for Capn7 (NM_009796.1,576-594).
gctcgacaggcactagata

SEQ ID NO: 581449 - DNA, 19 bp, Mus musculus
  siRNA target sequence for Capn7 (NM_009796.1,691-709).
ctctaggacctaatccttt

SEQ ID NO: 581450 - DNA, 19 bp, Mus musculus
  siRNA target sequence for Capn7 (NM_009796.1,699-717).
cctaatcctttcgttgaaa

SEQ ID NO: 581451 - DNA, 19 bp, Mus musculus
  siRNA target sequence for Capn7 (NM_009796.1,700-718).
ctaatcctttcgttgaaaa

SEQ ID NO: 581452 - DNA, 19 bp, Mus musculus
  siRNA target sequence for Capn7 (NM_009796.1,753-771).
gcgcaaggacagaagtaca

SEQ ID NO: 581453 - DNA, 19 bp, Mus musculus
  siRNA target sequence for Capn7 (NM_009796.1,849-867).
ctaagggaacgctttgctt

SEQ ID NO: 581454 - DNA, 19 bp, Mus musculus
  siRNA target sequence for Capn7 (NM_009796.1,854-872).
ggaacgctttgcttatcca

SEQ ID NO: 581455 - DNA, 19 bp, Mus musculus
  siRNA target sequence for Capn7 (NM_009796.1,890-908).
gttgggcaagcttccatta

SEQ ID NO: 581456 - DNA, 19 bp, Mus musculus
  siRNA target sequence for Capn7 (NM_009796.1,893-911).
gggcaagcttccattatca

SEQ ID NO: 581457 - DNA, 19 bp, Mus musculus
  siRNA target sequence for Capn7 (NM_009796.1,899-917).
gcttccattatcacctaaa

SEQ ID NO: 581458 - DNA, 19 bp, Mus musculus
  siRNA target sequence for Capn7 (NM_009796.1,940-958).
gggtacgaccggaagatct

SEQ ID NO: 581459 - DNA, 19 bp, Mus musculus
  siRNA target sequence for Capn7 (NM_009796.1,950-968).
ggaagatctcaccaacaat

SEQ ID NO: 581460 - DNA, 19 bp, Mus musculus
  siRNA target sequence for Capn7 (NM_009796.1,954-972).
gatctcaccaacaatccta

SEQ ID NO: 581461 - DNA, 19 bp, Mus musculus
  siRNA target sequence for Capn7 (NM_009796.1,962-980).
caacaatcctacaatgata

SEQ ID NO: 581462 - DNA, 19 bp, Mus musculus
  siRNA target sequence for Capn7 (NM_009796.1,1000-1018).
gcataaagcagacaatagt

SEQ ID NO: 581463 - DNA, 19 bp, Mus musculus
  siRNA target sequence for Capn7 (NM_009796.1,1001-1019).
cataaagcagacaatagta

SEQ ID NO: 581464 - DNA, 19 bp, Mus musculus
  siRNA target sequence for Capn7 (NM_009796.1,1010-1028).
gacaatagtatcagattgt

SEQ ID NO: 581465 - DNA, 19 bp, Mus musculus
  siRNA target sequence for Capn7 (NM_009796.1,1037-1055).
ggcatcgttggctatcagt

SEQ ID NO: 581466 - DNA, 19 bp, Mus musculus
  siRNA target sequence for Capn7 (NM_009796.1,1060-1078).
cgtatgagagacgattcaa

SEQ ID NO: 581467 - DNA, 19 bp, Mus musculus
  siRNA target sequence for Capn7 (NM_009796.1,1065-1083).
gagagacgattcaataaga

SEQ ID NO: 581468 - DNA, 19 bp, Mus musculus
  siRNA target sequence for Capn7 (NM_009796.1,1085-1103).
gttaattaccagcataatt

SEQ ID NO: 581469 - DNA, 19 bp, Mus musculus
  siRNA target sequence for Capn7 (NM_009796.1,1142-1160).
ctgtggaaagtatatggta

SEQ ID NO: 581470 - DNA, 19 bp, Mus musculus
  siRNA target sequence for Capn7 (NM_009796.1,1144-1162).
gtggaaagtatatggtaaa

SEQ ID NO: 581471 - DNA, 19 bp, Mus musculus
  siRNA target sequence for Capn7 (NM_009796.1,1179-1197).
gttccgagaaaggtgataa

SEQ ID NO: 581472 - DNA, 19 bp, Mus musculus
  siRNA target sequence for Capn7 (NM_009796.1,1298-1316).
gaaagttatgggaggatat

SEQ ID NO: 581473 - DNA, 19 bp, Mus musculus
  siRNA target sequence for Capn7 (NM_009796.1,1302-1320).
gttatgggaggatatgatt

SEQ ID NO: 581474 - DNA, 19 bp, Mus musculus
  siRNA target sequence for Capn7 (NM_009796.1,1327-1345).
gatccaactcaaatattga

SEQ ID NO: 581475 - DNA, 19 bp, Mus musculus
  siRNA target sequence for Capn7 (NM_009796.1,1364-1382).
gtggataccagaaaggatt

SEQ ID NO: 581476 - DNA, 19 bp, Mus musculus
  siRNA target sequence for Capn7 (NM_009796.1,1400-1418).
ccagacgttcagtaaggat

SEQ ID NO: 581477 - DNA, 19 bp, Mus musculus
  siRNA target sequence for Capn7 (NM_009796.1,1401-1419).
cagacgttcagtaaggata

SEQ ID NO: 581478 - DNA, 19 bp, Mus musculus
  siRNA target sequence for Capn7 (NM_009796.1,1421-1439).
ctcattcagaatgctttat

SEQ ID NO: 581479 - DNA, 19 bp, Mus musculus
  siRNA target sequence for Capn7 (NM_009796.1,1423-1441).
cattcagaatgctttatca

SEQ ID NO: 581480 - DNA, 19 bp, Mus musculus
  siRNA target sequence for Capn7 (NM_009796.1,1471-1489).
ccgcatcgacgggagtaat

SEQ ID NO: 581481 - DNA, 19 bp, Mus musculus
  siRNA target sequence for Capn7 (NM_009796.1,1473-1491).
gcatcgacgggagtaatga

SEQ ID NO: 581482 - DNA, 19 bp, Mus musculus
  siRNA target sequence for Capn7 (NM_009796.1,1534-1552).
cctatgcggttttggatat

SEQ ID NO: 581483 - DNA, 19 bp, Mus musculus
  siRNA target sequence for Capn7 (NM_009796.1,1535-1553).
ctatgcggttttggatatt

SEQ ID NO: 581484 - DNA, 19 bp, Mus musculus
  siRNA target sequence for Capn7 (NM_009796.1,1559-1577).
gttcaaggggctgagattt

SEQ ID NO: 581485 - DNA, 19 bp, Mus musculus
  siRNA target sequence for Capn7 (NM_009796.1,1566-1584).
gggctgagatttattcagt

SEQ ID NO: 581486 - DNA, 19 bp, Mus musculus
  siRNA target sequence for Capn7 (NM_009796.1,1568-1586).
gctgagatttattcagtta

SEQ ID NO: 581487 - DNA, 19 bp, Mus musculus
  siRNA target sequence for Capn7 (NM_009796.1,1742-1760).
ccagtattatgatgtagtt

SEQ ID NO: 581488 - DNA, 19 bp, Mus musculus
  siRNA target sequence for Capn7 (NM_009796.1,1743-1761).
cagtattatgatgtagttt

SEQ ID NO: 581489 - DNA, 19 bp, Mus musculus
  siRNA target sequence for Capn7 (NM_009796.1,1745-1763).
gtattatgatgtagtttat

SEQ ID NO: 581490 - DNA, 19 bp, Mus musculus
  siRNA target sequence for Capn7 (NM_009796.1,1810-1828).
gtacttgggatgctaaaca

SEQ ID NO: 581491 - DNA, 19 bp, Mus musculus
  siRNA target sequence for Capn7 (NM_009796.1,1956-1974).
gcaaataaccgtgagttta

SEQ ID NO: 581492 - DNA, 19 bp, Mus musculus
  siRNA target sequence for Capn7 (NM_009796.1,1957-1975).
caaataaccgtgagtttat

SEQ ID NO: 581493 - DNA, 19 bp, Mus musculus
  siRNA target sequence for Capn7 (NM_009796.1,2023-2041).
ctgacccacctccatacat

SEQ ID NO: 581494 - DNA, 19 bp, Mus musculus
  siRNA target sequence for Capn7 (NM_009796.1,2039-2057).
cattgatgggattcgaatt

SEQ ID NO: 581495 - DNA, 19 bp, Mus musculus
  siRNA target sequence for Capn7 (NM_009796.1,2043-2061).
gatgggattcgaattaaca

SEQ ID NO: 581496 - DNA, 19 bp, Mus musculus
  siRNA target sequence for Capn7 (NM_009796.1,2064-2082).
cctcattacttgactaaga

SEQ ID NO: 581497 - DNA, 19 bp, Mus musculus
  siRNA target sequence for Capn7 (NM_009796.1,2067-2085).
cattacttgactaagataa

SEQ ID NO: 581498 - DNA, 19 bp, Mus musculus
  siRNA target sequence for Capn7 (NM_009796.1,2123-2141).
ggtttctcagtatgagaaa

SEQ ID NO: 581499 - DNA, 19 bp, Mus musculus
  siRNA target sequence for Capn7 (NM_009796.1,2159-2177).
cacagtccgggtgtattca

SEQ ID NO: 581500 - DNA, 19 bp, Mus musculus
  siRNA target sequence for Capn7 (NM_009796.1,2178-2196).
gcctgcagctttacttttt

SEQ ID NO: 581501 - DNA, 19 bp, Mus musculus
  siRNA target sequence for Capn7 (NM_009796.1,2205-2223).
ccttcaccatacaccttat

SEQ ID NO: 581502 - DNA, 19 bp, Mus musculus
  siRNA target sequence for Capn7 (NM_009796.1,2219-2237).
cttatccaaacggataaat

SEQ ID NO: 581503 - DNA, 19 bp, Mus musculus
  siRNA target sequence for Capn7 (NM_009796.1,2224-2242).
ccaaacggataaatggaaa

SEQ ID NO: 581504 - DNA, 19 bp, Mus musculus
  siRNA target sequence for Capn7 (NM_009796.1,2306-2324).
ctaccaattccatatagat

SEQ ID NO: 581505 - DNA, 19 bp, Mus musculus
  siRNA target sequence for Capn7 (NM_009796.1,2327-2345).
gactggaccgttattgatt

SEQ ID NO: 581506 - DNA, 19 bp, Mus musculus
  siRNA target sequence for Capn7 (NM_009796.1,2329-2347).
ctggaccgttattgattga

SEQ ID NO: 581507 - DNA, 19 bp, Mus musculus
  siRNA target sequence for Capn7 (NM_009796.1,2362-2380).
ggcaatacagtgttggatt

SEQ ID NO: 581508 - DNA, 19 bp, Mus musculus
  siRNA target sequence for Capn7 (NM_009796.1,2363-2381).
gcaatacagtgttggattt

SEQ ID NO: 581509 - DNA, 19 bp, Mus musculus
  siRNA target sequence for Capn7 (NM_009796.1,2456-2474).
gtgtggattttgctactta

SEQ ID NO: 581510 - DNA, 19 bp, Mus musculus
  siRNA target sequence for Capn7 (NM_009796.1,2490-2508).
cctgctgggatctttaata

SEQ ID NO: 581511 - DNA, 19 bp, Mus musculus
  siRNA target sequence for Capn7 (NM_009796.1,2494-2512).
ctgggatctttaatatcat

SEQ ID NO: 581512 - DNA, 19 bp, Mus musculus
  siRNA target sequence for Capn7 (NM_009796.1,2573-2591).
ccccatcaagacaacacaa

SEQ ID NO: 581513 - DNA, 19 bp, Mus musculus
  siRNA target sequence for Lgmn (NM_011175.1,207-225).
gctccaatggctggtataa

SEQ ID NO: 581514 - DNA, 19 bp, Mus musculus
  siRNA target sequence for Lgmn (NM_011175.1,249-267).
gccacgcctaccagatcat

SEQ ID NO: 581515 - DNA, 19 bp, Mus musculus
  siRNA target sequence for Lgmn (NM_011175.1,287-305).
gacgagcagatcatagtga

SEQ ID NO: 581516 - DNA, 19 bp, Mus musculus
  siRNA target sequence for Lgmn (NM_011175.1,345-363).
ccccaggtgttgtgatcaa

SEQ ID NO: 581517 - DNA, 19 bp, Mus musculus
  siRNA target sequence for Lgmn (NM_011175.1,368-386).
cctaacggcacagatgtat

SEQ ID NO: 581518 - DNA, 19 bp, Mus musculus
  siRNA target sequence for Lgmn (NM_011175.1,369-387).
ctaacggcacagatgtata

SEQ ID NO: 581519 - DNA, 19 bp, Mus musculus
  siRNA target sequence for Lgmn (NM_011175.1,510-528).
cccgagatcatgtcttcat

SEQ ID NO: 581520 - DNA, 19 bp, Mus musculus
  siRNA target sequence for Lgmn (NM_011175.1,512-530).
cgagatcatgtcttcattt

SEQ ID NO: 581521 - DNA, 19 bp, Mus musculus
  siRNA target sequence for Lgmn (NM_011175.1,559-577).
cctggtgtttcctaatgat

SEQ ID NO: 581522 - DNA, 19 bp, Mus musculus
  siRNA target sequence for Lgmn (NM_011175.1,562-580).
ggtgtttcctaatgatgat

SEQ ID NO: 581523 - DNA, 19 bp, Mus musculus
  siRNA target sequence for Lgmn (NM_011175.1,565-583).
gtttcctaatgatgatctt

SEQ ID NO: 581524 - DNA, 19 bp, Mus musculus
  siRNA target sequence for Lgmn (NM_011175.1,587-605).
gtcaaggacctgaataaga

SEQ ID NO: 581525 - DNA, 19 bp, Mus musculus
  siRNA target sequence for Lgmn (NM_011175.1,592-610).
ggacctgaataagactatt

SEQ ID NO: 581526 - DNA, 19 bp, Mus musculus
  siRNA target sequence for Lgmn (NM_011175.1,604-622).
gactattcgctacatgtat

SEQ ID NO: 581527 - DNA, 19 bp, Mus musculus
  siRNA target sequence for Lgmn (NM_011175.1,606-624).
ctattcgctacatgtatga

SEQ ID NO: 581528 - DNA, 19 bp, Mus musculus
  siRNA target sequence for Lgmn (NM_011175.1,612-630).
gctacatgtatgaacacaa

SEQ ID NO: 581529 - DNA, 19 bp, Mus musculus
  siRNA target sequence for Lgmn (NM_011175.1,668-686).
gagtctggctccatgatga

SEQ ID NO: 581530 - DNA, 19 bp, Mus musculus
  siRNA target sequence for Lgmn (NM_011175.1,695-713).
cccgacgacatcaacgttt

SEQ ID NO: 581531 - DNA, 19 bp, Mus musculus
  siRNA target sequence for Lgmn (NM_011175.1,696-714).
ccgacgacatcaacgttta

SEQ ID NO: 581532 - DNA, 19 bp, Mus musculus
  siRNA target sequence for Lgmn (NM_011175.1,697-715).
cgacgacatcaacgtttat

SEQ ID NO: 581533 - DNA, 19 bp, Mus musculus
  siRNA target sequence for Lgmn (NM_011175.1,700-718).
cgacatcaacgtttatgca

SEQ ID NO: 581534 - DNA, 19 bp, Mus musculus
  siRNA target sequence for Lgmn (NM_011175.1,706-724).
caacgtttatgcaactact

SEQ ID NO: 581535 - DNA, 19 bp, Mus musculus
  siRNA target sequence for Lgmn (NM_011175.1,885-903).
ccaacaccagccatgtcat

SEQ ID NO: 581536 - DNA, 19 bp, Mus musculus
  siRNA target sequence for Lgmn (NM_011175.1,891-909).
ccagccatgtcatgcaata

SEQ ID NO: 581537 - DNA, 19 bp, Mus musculus
  siRNA target sequence for Lgmn (NM_011175.1,892-910).
cagccatgtcatgcaatat

SEQ ID NO: 581538 - DNA, 19 bp, Mus musculus
  siRNA target sequence for Lgmn (NM_011175.1,1121-1139).
gccaggcacgtcattgaga

SEQ ID NO: 581539 - DNA, 19 bp, Mus musculus
  siRNA target sequence for Lgmn (NM_011175.1,1298-1316).
catgccttgcggtacttgt

SEQ ID NO: 581540 - DNA, 19 bp, Mus musculus
  siRNA target sequence for Lgmn (NM_011175.1,1340-1358).
gcaccatatccgattgaca

SEQ ID NO: 581541 - DNA, 19 bp, Mus musculus
  siRNA target sequence for Lgmn (NM_011175.1,1349-1367).
ccgattgacaggatagaga

SEQ ID NO: 581542 - DNA, 19 bp, Mus musculus
  siRNA target sequence for Lgmn (NM_011175.1,1350-1368).
cgattgacaggatagagat

SEQ ID NO: 581543 - DNA, 19 bp, Mus musculus
  siRNA target sequence for Pigk (NM_025662.1,128-146).
gccgaacagttctttagaa

SEQ ID NO: 581544 - DNA, 19 bp, Mus musculus
  siRNA target sequence for Pigk (NM_025662.1,156-174).
caaataactgggctgtttt

SEQ ID NO: 581545 - DNA, 19 bp, Mus musculus
  siRNA target sequence for Pigk (NM_025662.1,183-201).
catcccgattctggtttaa

SEQ ID NO: 581546 - DNA, 19 bp, Mus musculus
  siRNA target sequence for Pigk (NM_025662.1,186-204).
cccgattctggtttaacta

SEQ ID NO: 581547 - DNA, 19 bp, Mus musculus
  siRNA target sequence for Pigk (NM_025662.1,196-214).
gtttaactaccgacatgtt

SEQ ID NO: 581548 - DNA, 19 bp, Mus musculus
  siRNA target sequence for Pigk (NM_025662.1,205-223).
ccgacatgttgcaaatact

SEQ ID NO: 581549 - DNA, 19 bp, Mus musculus
  siRNA target sequence for Pigk (NM_025662.1,209-227).
catgttgcaaatactcttt

SEQ ID NO: 581550 - DNA, 19 bp, Mus musculus
  siRNA target sequence for Pigk (NM_025662.1,240-258).
gcgtcaagaggctaggtat

SEQ ID NO: 581551 - DNA, 19 bp, Mus musculus
  siRNA target sequence for Pigk (NM_025662.1,393-411).
gaagctatgaggtaactgt

SEQ ID NO: 581552 - DNA, 19 bp, Mus musculus
  siRNA target sequence for Pigk (NM_025662.1,461-479).
cgctcaaagcgtcttcttt

SEQ ID NO: 581553 - DNA, 19 bp, Mus musculus
  siRNA target sequence for Pigk (NM_025662.1,521-539).
ggagggaatggtttcttga

SEQ ID NO: 581554 - DNA, 19 bp, Mus musculus
  siRNA target sequence for Pigk (NM_025662.1,522-540).
gagggaatggtttcttgaa

SEQ ID NO: 581555 - DNA, 19 bp, Mus musculus
  siRNA target sequence for Pigk (NM_025662.1,525-543).
ggaatggtttcttgaaatt

SEQ ID NO: 581556 - DNA, 19 bp, Mus musculus
  siRNA target sequence for Pigk (NM_025662.1,535-553).
cttgaaattccaagattct

SEQ ID NO: 581557 - DNA, 19 bp, Mus musculus
  siRNA target sequence for Pigk (NM_025662.1,579-597).
cagatgcgtttgaacagat

SEQ ID NO: 581558 - DNA, 19 bp, Mus musculus
  siRNA target sequence for Pigk (NM_025662.1,669-687).
ggttctactctcctaacat

SEQ ID NO: 581559 - DNA, 19 bp, Mus musculus
  siRNA target sequence for Pigk (NM_025662.1,742-760).
ccctgcgattggagttcat

SEQ ID NO: 581560 - DNA, 19 bp, Mus musculus
  siRNA target sequence for Pigk (NM_025662.1,744-762).
ctgcgattggagttcatct

SEQ ID NO: 581561 - DNA, 19 bp, Mus musculus
  siRNA target sequence for Pigk (NM_025662.1,746-764).
gcgattggagttcatctta

SEQ ID NO: 581562 - DNA, 19 bp, Mus musculus
  siRNA target sequence for Pigk (NM_025662.1,747-765).
cgattggagttcatcttat

SEQ ID NO: 581563 - DNA, 19 bp, Mus musculus
  siRNA target sequence for Pigk (NM_025662.1,752-770).
ggagttcatcttatggata

SEQ ID NO: 581564 - DNA, 19 bp, Mus musculus
  siRNA target sequence for Pigk (NM_025662.1,766-784).
ggataggtacacgttttat

SEQ ID NO: 581565 - DNA, 19 bp, Mus musculus
  siRNA target sequence for Pigk (NM_025662.1,771-789).
ggtacacgttttatgtctt

SEQ ID NO: 581566 - DNA, 19 bp, Mus musculus
  siRNA target sequence for Pigk (NM_025662.1,777-795).
cgttttatgtcttggaatt

SEQ ID NO: 581567 - DNA, 19 bp, Mus musculus
  siRNA target sequence for Pigk (NM_025662.1,813-831).
cagctagccaaactaacat

SEQ ID NO: 581568 - DNA, 19 bp, Mus musculus
  siRNA target sequence for Pigk (NM_025662.1,816-834).
ctagccaaactaacatgaa

SEQ ID NO: 581569 - DNA, 19 bp, Mus musculus
  siRNA target sequence for Pigk (NM_025662.1,829-847).
catgaacgacctttttcaa

SEQ ID NO: 581570 - DNA, 19 bp, Mus musculus
  siRNA target sequence for Pigk (NM_025662.1,882-900).
gacatcgcactgacctttt

SEQ ID NO: 581571 - DNA, 19 bp, Mus musculus
  siRNA target sequence for Pigk (NM_025662.1,901-919).
ccagcgagatccaaaaaat

SEQ ID NO: 581572 - DNA, 19 bp, Mus musculus
  siRNA target sequence for Pigk (NM_025662.1,920-938).
gtcctgatcaccgatttct

SEQ ID NO: 581573 - DNA, 19 bp, Mus musculus
  siRNA target sequence for Pigk (NM_025662.1,945-963).
gtgtgcgcaaggtggaaat

SEQ ID NO: 581574 - DNA, 19 bp, Mus musculus
  siRNA target sequence for Pigk (NM_025662.1,947-965).
gtgcgcaaggtggaaatca

SEQ ID NO: 581575 - DNA, 19 bp, Mus musculus
  siRNA target sequence for Pigk (NM_025662.1,949-967).
gcgcaaggtggaaatcaca

SEQ ID NO: 581576 - DNA, 19 bp, Mus musculus
  siRNA target sequence for Pigk (NM_025662.1,981-999).
gtttgcagtgggattcaca

SEQ ID NO: 581577 - DNA, 19 bp, Mus musculus
  siRNA target sequence for Pigk (NM_025662.1,1001-1019).
gtcgtggacagcagttcta

SEQ ID NO: 581578 - DNA, 19 bp, Mus musculus
  siRNA target sequence for Pigk (NM_025662.1,1044-1062).
gcatgggacctctcaagta

SEQ ID NO: 581579 - DNA, 19 bp, Mus musculus
  siRNA target sequence for Pigk (NM_025662.1,1075-1093).
cccggtggctcagataata

SEQ ID NO: 581580 - DNA, 19 bp, Mus musculus
  siRNA target sequence for Pigk (NM_025662.1,1146-1164).
ggctgtgggcgctcatcat

SEQ ID NO: 581581 - DNA, 19 bp, Mus musculus
  siRNA target sequence for Pigk (NM_025662.1,1182-1200).
cctatgggatcaagcatat

SEQ ID NO: 581582 - DNA, 19 bp, Mus musculus
  siRNA target sequence for Pigk (NM_025662.1,1192-1210).
caagcatatgaagttcatt

SEQ ID NO: 581583 - DNA, 19 bp, Mus musculus
  siRNA target sequence for Pigk (NM_178016.1,556-574).
cgtccttctcagcacataa

SEQ ID NO: 581584 - DNA, 19 bp, Mus musculus
  siRNA target sequence for Pigk (NM_178016.1,601-619).
ccgcacactcccaaattct

SEQ ID NO: 581585 - DNA, 19 bp, Mus musculus
  siRNA target sequence for Pigk (NM_178016.1,602-620).
cgcacactcccaaattcta

SEQ ID NO: 581586 - DNA, 19 bp, Mus musculus
  siRNA target sequence for Pigk (NM_178016.1,606-624).
cactcccaaattctacttt

SEQ ID NO: 581587 - DNA, 19 bp, Mus musculus
  siRNA target sequence for Ctss (NM_021281.1,69-87).
ggccacgctgccataagat

SEQ ID NO: 581588 - DNA, 19 bp, Mus musculus
  siRNA target sequence for Ctss (NM_021281.1,144-162).
cctaccctggactaccatt

SEQ ID NO: 581589 - DNA, 19 bp, Mus musculus
  siRNA target sequence for Ctss (NM_021281.1,225-243).
cgtctcatctgggaaaaga

SEQ ID NO: 581590 - DNA, 19 bp, Mus musculus
  siRNA target sequence for Ctss (NM_021281.1,226-244).
gtctcatctgggaaaagaa

SEQ ID NO: 581591 - DNA, 19 bp, Mus musculus
  siRNA target sequence for Ctss (NM_021281.1,251-269).
gtttataatgattcacaat

SEQ ID NO: 581592 - DNA, 19 bp, Mus musculus
  siRNA target sequence for Ctss (NM_021281.1,264-282).
cacaatctcgaatattcta

SEQ ID NO: 581593 - DNA, 19 bp, Mus musculus
  siRNA target sequence for Ctss (NM_021281.1,300-318).
caagtgggcatgaacgata

SEQ ID NO: 581594 - DNA, 19 bp, Mus musculus
  siRNA target sequence for Ctss (NM_021281.1,382-400).
ctccgaagactgtcacttt

SEQ ID NO: 581595 - DNA, 19 bp, Mus musculus
  siRNA target sequence for Ctss (NM_021281.1,384-402).
ccgaagactgtcactttca

SEQ ID NO: 581596 - DNA, 19 bp, Mus musculus
  siRNA target sequence for Ctss (NM_021281.1,397-415).
ctttcaggtcatactctaa

SEQ ID NO: 581597 - DNA, 19 bp, Mus musculus
  siRNA target sequence for Ctss (NM_021281.1,578-596).
cctggtggactgctcaaat

SEQ ID NO: 581598 - DNA, 19 bp, Mus musculus
  siRNA target sequence for Ctss (NM_021281.1,581-599).
ggtggactgctcaaatgaa

SEQ ID NO: 581599 - DNA, 19 bp, Mus musculus
  siRNA target sequence for Ctss (NM_021281.1,631-649).
gctacatgaccgaagcttt

SEQ ID NO: 581600 - DNA, 19 bp, Mus musculus
  siRNA target sequence for Ctss (NM_021281.1,650-668).
ccagtacatcattgataat

SEQ ID NO: 581601 - DNA, 19 bp, Mus musculus
  siRNA target sequence for Ctss (NM_021281.1,686-704).
cgcttcctatccctacaaa

SEQ ID NO: 581602 - DNA, 19 bp, Mus musculus
  siRNA target sequence for Ctss (NM_021281.1,719-737).
gtgtcactataactcaaaa

SEQ ID NO: 581603 - DNA, 19 bp, Mus musculus
  siRNA target sequence for Ctss (NM_021281.1,725-743).
ctataactcaaaaaatcga

SEQ ID NO: 581604 - DNA, 19 bp, Mus musculus
  siRNA target sequence for Ctss (NM_021281.1,866-884).
ctacaaaagcggtgtctat

SEQ ID NO: 581605 - DNA, 19 bp, Mus musculus
  siRNA target sequence for Ctss (NM_021281.1,895-913).
cctgtacgggcaatgtgaa

SEQ ID NO: 581606 - DNA, 19 bp, Mus musculus
  siRNA target sequence for Ctss (NM_021281.1,896-914).
ctgtacgggcaatgtgaat

SEQ ID NO: 581607 - DNA, 19 bp, Mus musculus
  siRNA target sequence for Ctss (NM_021281.1,898-916).
gtacgggcaatgtgaatca

SEQ ID NO: 581608 - DNA, 19 bp, Mus musculus
  siRNA target sequence for Ctss (NM_021281.1,941-959).
gactcttgatggcaaagat

SEQ ID NO: 581609 - DNA, 19 bp, Mus musculus
  siRNA target sequence for Ctss (NM_021281.1,943-961).
ctcttgatggcaaagatta

SEQ ID NO: 581610 - DNA, 19 bp, Mus musculus
  siRNA target sequence for Ctss (NM_021281.1,945-963).
cttgatggcaaagattact

SEQ ID NO: 581611 - DNA, 19 bp, Mus musculus
  siRNA target sequence for Ctss (NM_021281.1,1010-1028).
cattcggatggcaagaaat

SEQ ID NO: 581612 - DNA, 19 bp, Mus musculus
  siRNA target sequence for Ctss (NM_021281.1,1040-1058).
ctgcggaattgctagttat

SEQ ID NO: 581613 - DNA, 19 bp, Mus musculus
  siRNA target sequence for Ctss (NM_021281.1,1044-1062).
ggaattgctagttattgct

SEQ ID NO: 581614 - DNA, 19 bp, Mus musculus
  siRNA target sequence for Ctsl (NM_009984.2,127-145).
ccttagctactccaaaatt

SEQ ID NO: 581615 - DNA, 19 bp, Mus musculus
  siRNA target sequence for Ctsl (NM_009984.2,133-151).
ctactccaaaatttgatca

SEQ ID NO: 581616 - DNA, 19 bp, Mus musculus
  siRNA target sequence for Ctsl (NM_009984.2,231-249).
gcgatatgggagaagaaca

SEQ ID NO: 581617 - DNA, 19 bp, Mus musculus
  siRNA target sequence for Ctsl (NM_009984.2,232-250).
cgatatgggagaagaacat

SEQ ID NO: 581618 - DNA, 19 bp, Mus musculus
  siRNA target sequence for Ctsl (NM_009984.2,264-282).
ctacacaacggggaataca

SEQ ID NO: 581619 - DNA, 19 bp, Mus musculus
  siRNA target sequence for Ctsl (NM_009984.2,298-316).
gcttttccatggagatgaa

SEQ ID NO: 581620 - DNA, 19 bp, Mus musculus
  siRNA target sequence for Ctsl (NM_009984.2,402-420).
caggaaccgctgatgctta

SEQ ID NO: 581621 - DNA, 19 bp, Mus musculus
  siRNA target sequence for Ctsl (NM_009984.2,405-423).
gaaccgctgatgcttaaga

SEQ ID NO: 581622 - DNA, 19 bp, Mus musculus
  siRNA target sequence for Ctsl (NM_009984.2,620-638).
cggaggcctgatggatttt

SEQ ID NO: 581623 - DNA, 19 bp, Mus musculus
  siRNA target sequence for Ctsl (NM_009984.2,640-658).
ctttccagtacattaagga

SEQ ID NO: 581624 - DNA, 19 bp, Mus musculus
  siRNA target sequence for Ctsl (NM_009984.2,647-665).
gtacattaaggaaaatgga

SEQ ID NO: 581625 - DNA, 19 bp, Mus musculus
  siRNA target sequence for Ctsl (NM_009984.2,699-717).
gcgaaggacggatcttgta

SEQ ID NO: 581626 - DNA, 19 bp, Mus musculus
  siRNA target sequence for Ctsl (NM_009984.2,700-718).
cgaaggacggatcttgtaa

SEQ ID NO: 581627 - DNA, 19 bp, Mus musculus
  siRNA target sequence for Ctsl (NM_009984.2,701-719).
gaaggacggatcttgtaaa

SEQ ID NO: 581628 - DNA, 19 bp, Mus musculus
  siRNA target sequence for Ctsl (NM_009984.2,705-723).
gacggatcttgtaaataca

SEQ ID NO: 581629 - DNA, 19 bp, Mus musculus
  siRNA target sequence for Ctsl (NM_009984.2,801-819).
gcgactgtggggcctattt

SEQ ID NO: 581630 - DNA, 19 bp, Mus musculus
  siRNA target sequence for Ctsl (NM_009984.2,803-821).
gactgtggggcctatttct

SEQ ID NO: 581631 - DNA, 19 bp, Mus musculus
  siRNA target sequence for Ctsl (NM_009984.2,805-823).
ctgtggggcctatttctgt

SEQ ID NO: 581632 - DNA, 19 bp, Mus musculus
  siRNA target sequence for Ctsl (NM_009984.2,862-880).
gttcaggcatctactatga

SEQ ID NO: 581633 - DNA, 19 bp, Mus musculus
  siRNA target sequence for Ctsl (NM_009984.2,1002-1020).
ggtatggaaggctacatca

SEQ ID NO: 581634 - DNA, 19 bp, Mus musculus
  siRNA target sequence for Ctsl (NM_009984.2,1003-1021).
gtatggaaggctacatcaa

SEQ ID NO: 581635 - DNA, 19 bp, Mus musculus
  siRNA target sequence for Ctsk (NM_007802.2,150-168).
caccagaagcagtataaca

SEQ ID NO: 581636 - DNA, 19 bp, Mus musculus
  siRNA target sequence for Ctsk (NM_007802.2,180-198).
gaaatctctcggcgtttaa

SEQ ID NO: 581637 - DNA, 19 bp, Mus musculus
  siRNA target sequence for Ctsk (NM_007802.2,247-265).
ctcttggtgtccatacata

SEQ ID NO: 581638 - DNA, 19 bp, Mus musculus
  siRNA target sequence for Ctsk (NM_007802.2,320-338).
gatgacgggactcagaata

SEQ ID NO: 581639 - DNA, 19 bp, Mus musculus
  siRNA target sequence for Ctsk (NM_007802.2,323-341).
gacgggactcagaatacct

SEQ ID NO: 581640 - DNA, 19 bp, Mus musculus
  siRNA target sequence for Ctsk (NM_007802.2,342-360).
ccctctcgatcctacagta

SEQ ID NO: 581641 - DNA, 19 bp, Mus musculus
  siRNA target sequence for Ctsk (NM_007802.2,343-361).
cctctcgatcctacagtaa

SEQ ID NO: 581642 - DNA, 19 bp, Mus musculus
  siRNA target sequence for Ctsk (NM_007802.2,344-362).
ctctcgatcctacagtaat

SEQ ID NO: 581643 - DNA, 19 bp, Mus musculus
  siRNA target sequence for Ctsk (NM_007802.2,348-366).
cgatcctacagtaatgaca

SEQ ID NO: 581644 - DNA, 19 bp, Mus musculus
  siRNA target sequence for Ctsk (NM_007802.2,356-374).
cagtaatgacactctctat

SEQ ID NO: 581645 - DNA, 19 bp, Mus musculus
  siRNA target sequence for Ctsk (NM_007802.2,406-424).
ccatcgactatcgaaagaa

SEQ ID NO: 581646 - DNA, 19 bp, Mus musculus
  siRNA target sequence for Ctsk (NM_007802.2,407-425).
catcgactatcgaaagaaa

SEQ ID NO: 581647 - DNA, 19 bp, Mus musculus
  siRNA target sequence for Ctsk (NM_007802.2,411-429).
gactatcgaaagaaaggat

SEQ ID NO: 581648 - DNA, 19 bp, Mus musculus
  siRNA target sequence for Ctsk (NM_007802.2,500-518).
gggccaactcaagaagaaa

SEQ ID NO: 581649 - DNA, 19 bp, Mus musculus
  siRNA target sequence for Ctsk (NM_007802.2,671-689).
ggatgaaagttgtatgtat

SEQ ID NO: 581650 - DNA, 19 bp, Mus musculus
  siRNA target sequence for Ctsk (NM_007802.2,672-690).
gatgaaagttgtatgtata

SEQ ID NO: 581651 - DNA, 19 bp, Mus musculus
  siRNA target sequence for Ctsk (NM_007802.2,716-734).
cagagggtacagagagatt

SEQ ID NO: 581652 - DNA, 19 bp, Mus musculus
  siRNA target sequence for Ctsk (NM_007802.2,835-853).
gaggtgtgtactatgatga

SEQ ID NO: 581653 - DNA, 19 bp, Mus musculus
  siRNA target sequence for Ctsk (NM_007802.2,838-856).
gtgtgtactatgatgaaaa

SEQ ID NO: 581654 - DNA, 19 bp, Mus musculus
  siRNA target sequence for Ctsk (NM_007802.2,859-877).
gtgaccgtgataatgtgaa

SEQ ID NO: 581655 - DNA, 19 bp, Mus musculus
  siRNA target sequence for Ctsk (NM_007802.2,916-934).
gaagcaagcactggataat

SEQ ID NO: 581656 - DNA, 19 bp, Mus musculus
  siRNA target sequence for Ctsk (NM_007802.2,956-974).
ctggggaaacaaaggatat

SEQ ID NO: 581657 - DNA, 19 bp, Mus musculus
  siRNA target sequence for Ctsk (NM_007802.2,978-996).
ctcttggctcggaataaga

SEQ ID NO: 581658 - DNA, 19 bp, Mus musculus
  siRNA target sequence for Ctsh (NM_007801.1,116-134).
gaccgtgaacgccatagaa

SEQ ID NO: 581659 - DNA, 19 bp, Mus musculus
  siRNA target sequence for Ctsh (NM_007801.1,118-136).
ccgtgaacgccatagaaaa

SEQ ID NO: 581660 - DNA, 19 bp, Mus musculus
  siRNA target sequence for Ctsh (NM_007801.1,126-144).
gccatagaaaagtttcact

SEQ ID NO: 581661 - DNA, 19 bp, Mus musculus
  siRNA target sequence for Ctsh (NM_007801.1,128-146).
catagaaaagtttcacttt

SEQ ID NO: 581662 - DNA, 19 bp, Mus musculus
  siRNA target sequence for Ctsh (NM_007801.1,197-215).
ccacagactgcagatgttt

SEQ ID NO: 581663 - DNA, 19 bp, Mus musculus
  siRNA target sequence for Ctsh (NM_007801.1,249-267).
cagaggaaccacacattta

SEQ ID NO: 581664 - DNA, 19 bp, Mus musculus
  siRNA target sequence for Ctsh (NM_007801.1,423-441).
gttgtttcgccagtgaaaa

SEQ ID NO: 581665 - DNA, 19 bp, Mus musculus
  siRNA target sequence for Ctsh (NM_007801.1,514-532).
gtgggaaaatgctgtcttt

SEQ ID NO: 581666 - DNA, 19 bp, Mus musculus
  siRNA target sequence for Ctsh (NM_007801.1,612-630).
gagtacatcctatacaaca

SEQ ID NO: 581667 - DNA, 19 bp, Mus musculus
  siRNA target sequence for Ctsh (NM_007801.1,662-680).
cataggcaaggatagttca

SEQ ID NO: 581668 - DNA, 19 bp, Mus musculus
  siRNA target sequence for Ctsh (NM_007801.1,672-690).
gatagttcatgcagattca

SEQ ID NO: 581669 - DNA, 19 bp, Mus musculus
  siRNA target sequence for Ctsh (NM_007801.1,683-701).
cagattcaacccccaaaaa

SEQ ID NO: 581670 - DNA, 19 bp, Mus musculus
  siRNA target sequence for Ctsh (NM_007801.1,694-712).
cccaaaaagctgttgcatt

SEQ ID NO: 581671 - DNA, 19 bp, Mus musculus
  siRNA target sequence for Ctsh (NM_007801.1,709-727).
cattcgtcaagaatgttgt

SEQ ID NO: 581672 - DNA, 19 bp, Mus musculus
  siRNA target sequence for Ctsh (NM_007801.1,834-852).
ggcgtctactccagtaaat

SEQ ID NO: 581673 - DNA, 19 bp, Mus musculus
  siRNA target sequence for Ctsh (NM_007801.1,837-855).
gtctactccagtaaatcct

SEQ ID NO: 581674 - DNA, 19 bp, Mus musculus
  siRNA target sequence for Ctsh (NM_007801.1,844-862).
ccagtaaatcctgtcataa

SEQ ID NO: 581675 - DNA, 19 bp, Mus musculus
  siRNA target sequence for Ctsh (NM_007801.1,865-883).
ctccagataaagtaaacca

SEQ ID NO: 581676 - DNA, 19 bp, Mus musculus
  siRNA target sequence for Ctsb (NM_007798.1,221-239).
ctatatcaacaaacagaat

SEQ ID NO: 581677 - DNA, 19 bp, Mus musculus
  siRNA target sequence for Ctsb (NM_007798.1,343-361).
cgttcggtgaggacataga

SEQ ID NO: 581678 - DNA, 19 bp, Mus musculus
  siRNA target sequence for Ctsb (NM_007798.1,344-362).
gttcggtgaggacatagat

SEQ ID NO: 581679 - DNA, 19 bp, Mus musculus
  siRNA target sequence for Ctsb (NM_007798.1,347-365).
cggtgaggacatagatcta

SEQ ID NO: 581680 - DNA, 19 bp, Mus musculus
  siRNA target sequence for Ctsb (NM_007798.1,404-422).
cccgaccattggacagatt

SEQ ID NO: 581681 - DNA, 19 bp, Mus musculus
  siRNA target sequence for Ctsb (NM_007798.1,405-423).
ccgaccattggacagatta

SEQ ID NO: 581682 - DNA, 19 bp, Mus musculus
  siRNA target sequence for Ctsb (NM_007798.1,407-425).
gaccattggacagattaga

SEQ ID NO: 581683 - DNA, 19 bp, Mus musculus
  siRNA target sequence for Ctsb (NM_007798.1,480-498).
gaccgaacctgcattcaca

SEQ ID NO: 581684 - DNA, 19 bp, Mus musculus
  siRNA target sequence for Ctsb (NM_007798.1,634-652).
gtggagtctacaattctca

SEQ ID NO: 581685 - DNA, 19 bp, Mus musculus
  siRNA target sequence for Ctsb (NM_007798.1,683-701).
ctgcgagcaccatgtcaat

SEQ ID NO: 581686 - DNA, 19 bp, Mus musculus
  siRNA target sequence for Ctsb (NM_007798.1,812-830).
ctacagcgtgtctaacagt

SEQ ID NO: 581687 - DNA, 19 bp, Mus musculus
  siRNA target sequence for Ctsb (NM_007798.1,895-913).
ctgacttcttgacttacaa

SEQ ID NO: 581688 - DNA, 19 bp, Mus musculus
  siRNA target sequence for Ctsb (NM_007798.1,907-925).
cttacaaatcaggagtata

SEQ ID NO: 581689 - DNA, 19 bp, Mus musculus
  siRNA target sequence for Blmh (NM_178645.1,140-158).
ctaaattcggagaaggtat

SEQ ID NO: 581690 - DNA, 19 bp, Mus musculus
  siRNA target sequence for Blmh (NM_178645.1,226-244).
cgatctgctggacatatgt

SEQ ID NO: 581691 - DNA, 19 bp, Mus musculus
  siRNA target sequence for Blmh (NM_178645.1,335-353).
ggacgatgctggatctttt

SEQ ID NO: 581692 - DNA, 19 bp, Mus musculus
  siRNA target sequence for Blmh (NM_178645.1,338-356).
cgatgctggatcttttctt

SEQ ID NO: 581693 - DNA, 19 bp, Mus musculus
  siRNA target sequence for Blmh (NM_178645.1,370-388).
gagacttccattcatgaaa

SEQ ID NO: 581694 - DNA, 19 bp, Mus musculus
  siRNA target sequence for Blmh (NM_178645.1,397-415).
cattgaagaatttgagttt

SEQ ID NO: 581695 - DNA, 19 bp, Mus musculus
  siRNA target sequence for Blmh (NM_178645.1,442-460).
caaggttgaacgctgttat

SEQ ID NO: 581696 - DNA, 19 bp, Mus musculus
  siRNA target sequence for Blmh (NM_178645.1,446-464).
gttgaacgctgttatttct

SEQ ID NO: 581697 - DNA, 19 bp, Mus musculus
  siRNA target sequence for Blmh (NM_178645.1,452-470).
cgctgttatttcttcttga

SEQ ID NO: 581698 - DNA, 19 bp, Mus musculus
  siRNA target sequence for Blmh (NM_178645.1,516-534).
gactggtgcagtatttgct

SEQ ID NO: 581699 - DNA, 19 bp, Mus musculus
  siRNA target sequence for Blmh (NM_178645.1,532-550).
gcttatgaaccctacaaat

SEQ ID NO: 581700 - DNA, 19 bp, Mus musculus
  siRNA target sequence for Blmh (NM_178645.1,562-580).
gtgggatatgcttgtcaat

SEQ ID NO: 581701 - DNA, 19 bp, Mus musculus
  siRNA target sequence for Blmh (NM_178645.1,564-582).
gggatatgcttgtcaatat

SEQ ID NO: 581702 - DNA, 19 bp, Mus musculus
  siRNA target sequence for Blmh (NM_178645.1,571-589).
gcttgtcaatattgttgaa

SEQ ID NO: 581703 - DNA, 19 bp, Mus musculus
  siRNA target sequence for Blmh (NM_178645.1,572-590).
cttgtcaatattgttgaaa

SEQ ID NO: 581704 - DNA, 19 bp, Mus musculus
  siRNA target sequence for Blmh (NM_178645.1,636-654).
cagaggctaccagaagaat

SEQ ID NO: 581705 - DNA, 19 bp, Mus musculus
  siRNA target sequence for Blmh (NM_178645.1,671-689).
cacaagatgagagaattct

SEQ ID NO: 581706 - DNA, 19 bp, Mus musculus
  siRNA target sequence for Blmh (NM_178645.1,733-751).
ggagatctcatctacacaa

SEQ ID NO: 581707 - DNA, 19 bp, Mus musculus
  siRNA target sequence for Blmh (NM_178645.1,824-842).
gagtaccgagacaaagata

SEQ ID NO: 581708 - DNA, 19 bp, Mus musculus
  siRNA target sequence for Blmh (NM_178645.1,826-844).
gtaccgagacaaagataaa

SEQ ID NO: 581709 - DNA, 19 bp, Mus musculus
  siRNA target sequence for Blmh (NM_178645.1,829-847).
ccgagacaaagataaaaat

SEQ ID NO: 581710 - DNA, 19 bp, Mus musculus
  siRNA target sequence for Blmh (NM_178645.1,896-914).
gtgaagccgctcttcaata

SEQ ID NO: 581711 - DNA, 19 bp, Mus musculus
  siRNA target sequence for Blmh (NM_178645.1,901-919).
gccgctcttcaatatggaa

SEQ ID NO: 581712 - DNA, 19 bp, Mus musculus
  siRNA target sequence for Blmh (NM_178645.1,985-1003).
ctacttgagcaatatggtt

SEQ ID NO: 581713 - DNA, 19 bp, Mus musculus
  siRNA target sequence for Blmh (NM_178645.1,1011-1029).
gaaaaacgctgtataacaa

SEQ ID NO: 581714 - DNA, 19 bp, Mus musculus
  siRNA target sequence for Blmh (NM_178645.1,1031-1049).
cagcccattgacttcttga

SEQ ID NO: 581715 - DNA, 19 bp, Mus musculus
  siRNA target sequence for Blmh (NM_178645.1,1033-1051).
gcccattgacttcttgaaa

SEQ ID NO: 581716 - DNA, 19 bp, Mus musculus
  siRNA target sequence for Blmh (NM_178645.1,1132-1150).
gggcctcagtgacatgaat

SEQ ID NO: 581717 - DNA, 19 bp, Mus musculus
  siRNA target sequence for Blmh (NM_178645.1,1134-1152).
gcctcagtgacatgaatgt

SEQ ID NO: 581718 - DNA, 19 bp, Mus musculus
  siRNA target sequence for Blmh (NM_178645.1,1182-1200).
ccttgaagaacatgaataa

SEQ ID NO: 581719 - DNA, 19 bp, Mus musculus
  siRNA target sequence for 1200014O24Rik (NM_133992.1,414-432).
gtcagtgcacataatggaa

SEQ ID NO: 581720 - DNA, 19 bp, Mus musculus
  siRNA target sequence for 1200014O24Rik (NM_133992.1,565-583).
gctctggagcgctactcat

SEQ ID NO: 581721 - DNA, 19 bp, Mus musculus
  siRNA target sequence for 1200014O24Rik (NM_133992.1,570-588).
ggagcgctactcatccttt

SEQ ID NO: 581722 - DNA, 19 bp, Mus musculus
  siRNA target sequence for 1200014O24Rik (NM_133992.1,676-694).
gcccgtggagggctcatta

SEQ ID NO: 581723 - DNA, 19 bp, Mus musculus
  siRNA target sequence for 1200014O24Rik (NM_133992.1,677-695).
cccgtggagggctcattat

SEQ ID NO: 581724 - DNA, 19 bp, Mus musculus
  siRNA target sequence for 1200014O24Rik (NM_133992.1,678-696).
ccgtggagggctcattata

SEQ ID NO: 581725 - DNA, 19 bp, Mus musculus
  siRNA target sequence for 1200014O24Rik (NM_133992.1,679-697).
cgtggagggctcattatat

SEQ ID NO: 581726 - DNA, 19 bp, Mus musculus
  siRNA target sequence for 1200014O24Rik (NM_133992.1,680-698).
gtggagggctcattatatt

SEQ ID NO: 581727 - DNA, 19 bp, Mus musculus
  siRNA target sequence for 1200014O24Rik (NM_133992.1,685-703).
gggctcattatatttgact

SEQ ID NO: 581728 - DNA, 19 bp, Mus musculus
  siRNA target sequence for 1200014O24Rik (NM_133992.1,844-862).
cccggagtcaccatcatga

SEQ ID NO: 581729 - DNA, 19 bp, Mus musculus
  siRNA target sequence for 1200014O24Rik (NM_133992.1,865-883).
cagacaaatcgtttcttct

SEQ ID NO: 581730 - DNA, 19 bp, Mus musculus
  siRNA target sequence for 1200014O24Rik (NM_133992.1,915-933).
gcgagacctccgtagtttt

SEQ ID NO: 581731 - DNA, 19 bp, Mus musculus
  siRNA target sequence for 1200014O24Rik (NM_133992.1,916-934).
cgagacctccgtagtttta

SEQ ID NO: 581732 - DNA, 19 bp, Mus musculus
  siRNA target sequence for 1200014O24Rik (NM_133992.1,917-935).
gagacctccgtagttttaa

SEQ ID NO: 581733 - DNA, 19 bp, Mus musculus
  siRNA target sequence for 1200014O24Rik (NM_133992.1,966-984).
gagtctgtcagattttgat

SEQ ID NO: 581734 - DNA, 19 bp, Mus musculus
  siRNA target sequence for 1200014O24Rik (NM_133992.1,968-986).
gtctgtcagattttgatgt

SEQ ID NO: 581735 - DNA, 19 bp, Mus musculus
  siRNA target sequence for 1200014O24Rik (NM_133992.1,1043-1061).
gtgaccgtttcctcaaagt

SEQ ID NO: 581736 - DNA, 19 bp, Mus musculus
  siRNA target sequence for 1200014O24Rik (NM_133992.1,1085-1103).
ccatcacacctcttcaagt

SEQ ID NO: 581737 - DNA, 19 bp, Mus musculus
  siRNA target sequence for 1200014O24Rik (NM_133992.1,1107-1125).
cgtggatccggccttctta

SEQ ID NO: 581738 - DNA, 19 bp, Mus musculus
  siRNA target sequence for 1200014O24Rik (NM_133992.1,1111-1129).
gatccggccttcttacgat

SEQ ID NO: 581739 - DNA, 19 bp, Mus musculus
  siRNA target sequence for 1200014O24Rik (NM_133992.1,1115-1133).
cggccttcttacgattcat

SEQ ID NO: 581740 - DNA, 19 bp, Mus musculus
  siRNA target sequence for 1200014O24Rik (NM_133992.1,1126-1144).
cgattcatccccacataca

SEQ ID NO: 581741 - DNA, 19 bp, Mus musculus
  siRNA target sequence for 1200014O24Rik (NM_133992.1,1145-1163).
cttcccgccttgctatcat

SEQ ID NO: 581742 - DNA, 19 bp, Mus musculus
  siRNA target sequence for 1200014O24Rik (NM_133992.1,1175-1193).
gtcaatgccagttttgtga

SEQ ID NO: 581743 - DNA, 19 bp, Mus musculus
  siRNA target sequence for 1200014O24Rik (NM_133992.1,1207-1225).
gccaacccagccgacattt

SEQ ID NO: 581744 - DNA, 19 bp, Mus musculus
  siRNA target sequence for 1200014O24Rik (NM_133992.1,1208-1226).
ccaacccagccgacatttt

SEQ ID NO: 581745 - DNA, 19 bp, Mus musculus
  siRNA target sequence for 1200014O24Rik (NM_133992.1,1217-1235).
ccgacattttccatgtgaa

SEQ ID NO: 581746 - DNA, 19 bp, Mus musculus
  siRNA target sequence for 1200014O24Rik (NM_133992.1,1218-1236).
cgacattttccatgtgaat

SEQ ID NO: 581747 - DNA, 19 bp, Mus musculus
  siRNA target sequence for 1200014O24Rik (NM_133992.1,1237-1255).
cccgtgggacctttgctaa

SEQ ID NO: 581748 - DNA, 19 bp, Mus musculus
  siRNA target sequence for 1200014O24Rik (NM_133992.1,1315-1333).
gtgcatctctggactgatt

SEQ ID NO: 581749 - DNA, 19 bp, Mus musculus
  siRNA target sequence for 1200014O24Rik (NM_133992.1,1637-1655).
cagaccatgaatttgacaa

SEQ ID NO: 581750 - DNA, 19 bp, Mus musculus
  siRNA target sequence for 1200014O24Rik (NM_133992.1,1696-1714).
gagcctctccacacagttt

SEQ ID NO: 581751 - DNA, 19 bp, Mus musculus
  siRNA target sequence for 1200014O24Rik (NM_133992.1,1698-1716).
gcctctccacacagtttct

SEQ ID NO: 581752 - DNA, 19 bp, Mus musculus
  siRNA target sequence for 1200014O24Rik (NM_133992.1,1699-1717).
cctctccacacagtttcta

SEQ ID NO: 581753 - DNA, 19 bp, Mus musculus
  siRNA target sequence for 1200014O24Rik (NM_133992.1,1725-1743).
ccggaaggtaaccatcaaa

SEQ ID NO: 581754 - DNA, 19 bp, Mus musculus
  siRNA target sequence for 1200014O24Rik (NM_133992.1,1732-1750).
gtaaccatcaaatattcca

SEQ ID NO: 581755 - DNA, 19 bp, Mus musculus
  siRNA target sequence for 1200014O24Rik (NM_133992.1,1776-1794).
caaacactacaataagact

SEQ ID NO: 581756 - DNA, 19 bp, Mus musculus
  siRNA target sequence for 1200014O24Rik (NM_133992.1,1973-1991).
cttgtcagggcagtaattt

SEQ ID NO: 581757 - DNA, 19 bp, Mus musculus
  siRNA target sequence for 1200014O24Rik (NM_133992.1,2276-2294).
cctcgtccaccctactctt

SEQ ID NO: 581758 - DNA, 19 bp, Mus musculus
  siRNA target sequence for 1200014O24Rik (NM_133992.1,2321-2339).
ccgggaagaactatgactt

SEQ ID NO: 581759 - DNA, 19 bp, Mus musculus
  siRNA target sequence for 1200014O24Rik (NM_133992.1,2347-2365).
gtgctgaagcgaagtatct

SEQ ID NO: 581760 - DNA, 19 bp, Mus musculus
  siRNA target sequence for 1200014O24Rik (NM_133992.1,2439-2457).
ccgacatctgccagatatt

SEQ ID NO: 581761 - DNA, 19 bp, Mus musculus
  siRNA target sequence for 1200014O24Rik (NM_133992.1,2441-2459).
gacatctgccagatattct

SEQ ID NO: 581762 - DNA, 19 bp, Mus musculus
  siRNA target sequence for 1200014O24Rik (NM_133992.1,2463-2481).
cattaactgtgaagtgaat

SEQ ID NO: 581763 - DNA, 19 bp, Mus musculus
  siRNA target sequence for 1200014O24Rik (NM_133992.1,2483-2501).
gctcaaaagaggctgattt

SEQ ID NO: 581764 - DNA, 19 bp, Mus musculus
  siRNA target sequence for 1200014O24Rik (NM_133992.1,2565-2583).
gagcaaagagtttgcttta

SEQ ID NO: 581765 - DNA, 19 bp, Mus musculus
  siRNA target sequence for 1200014O24Rik (NM_133992.1,2646-2664).
gaatgtctggcttccattt

SEQ ID NO: 581766 - DNA, 19 bp, Mus musculus
  siRNA target sequence for 1200014O24Rik (NM_133992.1,2781-2799).
ggagcttggtgtctatgta

SEQ ID NO: 581767 - DNA, 19 bp, Mus musculus
  siRNA target sequence for 1200014O24Rik (NM_133992.1,2911-2929).
catcagcagtggtatctct

SEQ ID NO: 581768 - DNA, 19 bp, Mus musculus
  siRNA target sequence for 1200014O24Rik (NM_133992.1,2937-2955).
cttccttattgaacctatt

SEQ ID NO: 581769 - DNA, 19 bp, Mus musculus
  siRNA target sequence for 1200014O24Rik (NM_133992.1,2941-2959).
cttattgaacctattgata

SEQ ID NO: 581770 - DNA, 19 bp, Mus musculus
  siRNA target sequence for 1200014O24Rik (NM_133992.1,2974-2992).
cagtttgacatgaattgga

SEQ ID NO: 581771 - DNA, 19 bp, Mus musculus
  siRNA target sequence for 1200014O24Rik (NM_133992.1,3121-3139).
cacacgacctttattccat

SEQ ID NO: 581772 - DNA, 19 bp, Mus musculus
  siRNA target sequence for 1200014O24Rik (NM_133992.1,3187-3205).
gccgagtttgtcactctta

SEQ ID NO: 581773 - DNA, 19 bp, Mus musculus
  siRNA target sequence for 1200014O24Rik (NM_133992.1,3189-3207).
cgagtttgtcactcttaat

SEQ ID NO: 581774 - DNA, 19 bp, Mus musculus
  siRNA target sequence for 1200014O24Rik (NM_133992.1,3349-3367).
gagcaggtagtagattact

SEQ ID NO: 581775 - DNA, 19 bp, Mus musculus
  siRNA target sequence for 1200014O24Rik (NM_133992.1,3352-3370).
caggtagtagattacttga

SEQ ID NO: 581776 - DNA, 19 bp, Mus musculus
  siRNA target sequence for 1200014O24Rik (NM_133992.1,3397-3415).
gaccttgatgccaaaatct

SEQ ID NO: 581777 - DNA, 19 bp, Mus musculus
  siRNA target sequence for 1200014O24Rik (NM_133992.1,3435-3453).
cctcaagtctacctactta

SEQ ID NO: 581778 - DNA, 19 bp, Mus musculus
  siRNA target sequence for 1200014O24Rik (NM_133992.1,3456-3474).
gcttcgctttctcattgat

SEQ ID NO: 581779 - DNA, 19 bp, Mus musculus
  siRNA target sequence for 1200014O24Rik (NM_133992.1,3457-3475).
cttcgctttctcattgata

SEQ ID NO: 581780 - DNA, 19 bp, Mus musculus
  siRNA target sequence for 1200014O24Rik (NM_133992.1,3537-3555).
gcccaaggaccaagttctt

SEQ ID NO: 581781 - DNA, 19 bp, Mus musculus
  siRNA target sequence for 1200014O24Rik (NM_133992.1,3573-3591).
ccacatgccccgaaaacga

SEQ ID NO: 581782 - DNA, 19 bp, Mus musculus
  siRNA target sequence for 1200014O24Rik (NM_133992.1,3574-3592).
cacatgccccgaaaacgaa

SEQ ID NO: 581783 - DNA, 19 bp, Mus musculus
  siRNA target sequence for 1200014O24Rik (NM_133992.1,3579-3597).
gccccgaaaacgaatgatt

SEQ ID NO: 581784 - DNA, 19 bp, Mus musculus
  siRNA target sequence for 1200014O24Rik (NM_133992.1,3580-3598).
ccccgaaaacgaatgattt

SEQ ID NO: 581785 - DNA, 19 bp, Mus musculus
  siRNA target sequence for 1200014O24Rik (NM_133992.1,3605-3623).
gattcctggcctggtattt

SEQ ID NO: 581786 - DNA, 19 bp, Mus musculus
  siRNA target sequence for 1200014O24Rik (NM_133992.1,3609-3627).
cctggcctggtattttcta

SEQ ID NO: 581787 - DNA, 19 bp, Mus musculus
  siRNA target sequence for 2310051M13Rik (NM_027344.1,85-103).
cccctcttttgtctttcaa

SEQ ID NO: 581788 - DNA, 19 bp, Mus musculus
  siRNA target sequence for 2310051M13Rik (NM_027344.1,146-164).
cagtcacgggctttgtgaa

SEQ ID NO: 581789 - DNA, 19 bp, Mus musculus
  siRNA target sequence for 2310051M13Rik (NM_027344.1,165-183).
cgtccaatccagtgaagat

SEQ ID NO: 581790 - DNA, 19 bp, Mus musculus
  siRNA target sequence for 2310051M13Rik (NM_027344.1,261-279).
caaggagggcatgtactat

SEQ ID NO: 581791 - DNA, 19 bp, Mus musculus
  siRNA target sequence for 2410018I08Rik (NM_177561.2,206-224).
gcagtttccgatcaatgaa

SEQ ID NO: 581792 - DNA, 19 bp, Mus musculus
  siRNA target sequence for 2410018I08Rik (NM_177561.2,214-232).
cgatcaatgaacactactt

SEQ ID NO: 581793 - DNA, 19 bp, Mus musculus
  siRNA target sequence for 2410018I08Rik (NM_177561.2,233-251).
cggattggtcaattttgga

SEQ ID NO: 581794 - DNA, 19 bp, Mus musculus
  siRNA target sequence for 2410018I08Rik (NM_177561.2,240-258).
gtcaattttggaaacacat

SEQ ID NO: 581795 - DNA, 19 bp, Mus musculus
  siRNA target sequence for 2410018I08Rik (NM_177561.2,276-294).
cttcaagcgctgtacttct

SEQ ID NO: 581796 - DNA, 19 bp, Mus musculus
  siRNA target sequence for 2410018I08Rik (NM_177561.2,300-318).
ccgttccgggagaatgtgt

SEQ ID NO: 581797 - DNA, 19 bp, Mus musculus
  siRNA target sequence for 2410018I08Rik (NM_177561.2,301-319).
cgttccgggagaatgtgtt

SEQ ID NO: 581798 - DNA, 19 bp, Mus musculus
  siRNA target sequence for 2410018I08Rik (NM_177561.2,412-430).
gcgtcatcccaccaaagaa

SEQ ID NO: 581799 - DNA, 19 bp, Mus musculus
  siRNA target sequence for 2410018I08Rik (NM_177561.2,414-432).
gtcatcccaccaaagaagt

SEQ ID NO: 581800 - DNA, 19 bp, Mus musculus
  siRNA target sequence for 2410018I08Rik (NM_177561.2,453-471).
gagaacgatctctttgata

SEQ ID NO: 581801 - DNA, 19 bp, Mus musculus
  siRNA target sequence for 2410018I08Rik (NM_177561.2,459-477).
gatctctttgataactaca

SEQ ID NO: 581802 - DNA, 19 bp, Mus musculus
  siRNA target sequence for 2410018I08Rik (NM_177561.2,724-742).
ctgtcgatgtggaacagaa

SEQ ID NO: 581803 - DNA, 19 bp, Mus musculus
  siRNA target sequence for 2410018I08Rik (NM_177561.2,787-805).
cgctgtgtagtgaacaaaa

SEQ ID NO: 581804 - DNA, 19 bp, Mus musculus
  siRNA target sequence for 2410018I08Rik (NM_177561.2,793-811).
gtagtgaacaaaaatatta

SEQ ID NO: 581805 - DNA, 19 bp, Mus musculus
  siRNA target sequence for 2410018I08Rik (NM_177561.2,963-981).
gaactccggctcttcaaca

SEQ ID NO: 581806 - DNA, 19 bp, Mus musculus
  siRNA target sequence for 2410018I08Rik (NM_177561.2,1053-1071).
cctaaccgtgggcattaca

SEQ ID NO: 581807 - DNA, 19 bp, Mus musculus
  siRNA target sequence for 2410018I08Rik (NM_177561.2,1054-1072).
ctaaccgtgggcattacat

SEQ ID NO: 581808 - DNA, 19 bp, Mus musculus
  siRNA target sequence for 2410018I08Rik (NM_177561.2,1065-1083).
cattacatcaccatcgtaa

SEQ ID NO: 581809 - DNA, 19 bp, Mus musculus
  siRNA target sequence for 2410018I08Rik (NM_177561.2,1073-1091).
caccatcgtaaaaagtcat

SEQ ID NO: 581810 - DNA, 19 bp, Mus musculus
  siRNA target sequence for 2410018I08Rik (NM_177561.2,1161-1179).
ggtctaacgtcagatatat

SEQ ID NO: 581811 - DNA, 19 bp, Mus musculus
  siRNA target sequence for 2410018I08Rik (NM_177561.2,1169-1187).
gtcagatatatcaaaaaat

SEQ ID NO: 581812 - DNA, 19 bp, Mus musculus
  siRNA target sequence for 2700067E09Rik (NM_175185.2,272-290).
gcaggcccgacctgatcaa

SEQ ID NO: 581813 - DNA, 19 bp, Mus musculus
  siRNA target sequence for 2700067E09Rik (NM_175185.2,283-301).
ctgatcaagcagtatggaa

SEQ ID NO: 581814 - DNA, 19 bp, Mus musculus
  siRNA target sequence for 2700067E09Rik (NM_175185.2,362-380).
cgagccacggactcaatgt

SEQ ID NO: 581815 - DNA, 19 bp, Mus musculus
  siRNA target sequence for 2700067E09Rik (NM_175185.2,365-383).
gccacggactcaatgtcat

SEQ ID NO: 581816 - DNA, 19 bp, Mus musculus
  siRNA target sequence for 2700067E09Rik (NM_175185.2,809-827).
cctctaaggggatctttgt

SEQ ID NO: 581817 - DNA, 19 bp, Mus musculus
  siRNA target sequence for 2700067E09Rik (NM_175185.2,939-957).
gtcgaccctgggcatttca

SEQ ID NO: 581818 - DNA, 19 bp, Mus musculus
  siRNA target sequence for 2700067E09Rik (NM_175185.2,977-995).
ggtcccattccattcagtt

SEQ ID NO: 581819 - DNA, 19 bp, Mus musculus
  siRNA target sequence for 4833420O05Rik (NM_027554.2,515-533).
gcccctcaagcggatgatt

SEQ ID NO: 581820 - DNA, 19 bp, Mus musculus
  siRNA target sequence for 4833420O05Rik (NM_027554.2,517-535).
ccctcaagcggatgattgt

SEQ ID NO: 581821 - DNA, 19 bp, Mus musculus
  siRNA target sequence for 4833420O05Rik (NM_027554.2,693-711).
gagttcgagtccttcttca

SEQ ID NO: 581822 - DNA, 19 bp, Mus musculus
  siRNA target sequence for 4833420O05Rik (NM_027554.2,703-721).
ccttcttcaacaagacttt

SEQ ID NO: 581823 - DNA, 19 bp, Mus musculus
  siRNA target sequence for 4833420O05Rik (NM_027554.2,857-875).
ggaggtcctgcgaatggtt

SEQ ID NO: 581824 - DNA, 19 bp, Mus musculus
  siRNA target sequence for 4833420O05Rik (NM_027554.2,988-1006).
gaacgataggtcatttcca

SEQ ID NO: 581825 - DNA, 19 bp, Mus musculus
  siRNA target sequence for 4833420O05Rik (NM_027554.2,1029-1047).
gaactacgggagtatgtct

SEQ ID NO: 581826 - DNA, 19 bp, Mus musculus
  siRNA target sequence for 4833420O05Rik (NM_027554.2,1058-1076).
gaaagtgagtaccttacta

SEQ ID NO: 581827 - DNA, 19 bp, Mus musculus
  siRNA target sequence for 4833420O05Rik (NM_027554.2,1113-1131).
ccttctctgcaagaagttt

SEQ ID NO: 581828 - DNA, 19 bp, Mus musculus
  siRNA target sequence for 4833420O05Rik (NM_027554.2,1119-1137).
ctgcaagaagtttttgcaa

SEQ ID NO: 581829 - DNA, 19 bp, Mus musculus
  siRNA target sequence for 4833420O05Rik (NM_027554.2,1183-1201).
caagcctggtgcagcatat

SEQ ID NO: 581830 - DNA, 19 bp, Mus musculus
  siRNA target sequence for 4833420O05Rik (NM_027554.2,1240-1258).
ccaccgacccaaatgtaaa

SEQ ID NO: 581831 - DNA, 19 bp, Mus musculus
  siRNA target sequence for 4833420O05Rik (NM_027554.2,1241-1259).
caccgacccaaatgtaaaa

SEQ ID NO: 581832 - DNA, 19 bp, Mus musculus
  siRNA target sequence for 4833420O05Rik (NM_027554.2,1254-1272).
gtaaaagatgcgagtatga

SEQ ID NO: 581833 - DNA, 19 bp, Mus musculus
  siRNA target sequence for 4833420O05Rik (NM_027554.2,1281-1299).
ctctgcagaatgattgact

SEQ ID NO: 581834 - DNA, 19 bp, Mus musculus
  siRNA target sequence for 4833420O05Rik (NM_027554.2,1365-1383).
gctgttcagaagtttacta

SEQ ID NO: 581835 - DNA, 19 bp, Mus musculus
  siRNA target sequence for 4833420O05Rik (NM_027554.2,1399-1417).
ctttgctgaaaatagaact

SEQ ID NO: 581836 - DNA, 19 bp, Mus musculus
  siRNA target sequence for 4833420O05Rik (NM_027554.2,1520-1538).
gattgtccctcatatagtt

SEQ ID NO: 581837 - DNA, 19 bp, Mus musculus
  siRNA target sequence for 4833420O05Rik (NM_027554.2,1524-1542).
gtccctcatatagttaact

SEQ ID NO: 581838 - DNA, 19 bp, Mus musculus
  siRNA target sequence for 4833420O05Rik (NM_027554.2,1582-1600).
cagccttcctagtacagtt

SEQ ID NO: 581839 - DNA, 19 bp, Mus musculus
  siRNA target sequence for 4833420O05Rik (NM_027554.2,1584-1602).
gccttcctagtacagttaa

SEQ ID NO: 581840 - DNA, 19 bp, Mus musculus
  siRNA target sequence for 4833420O05Rik (NM_027554.2,1586-1604).
cttcctagtacagttaaca

SEQ ID NO: 581841 - DNA, 19 bp, Mus musculus
  siRNA target sequence for 4833420O05Rik (NM_027554.2,1603-1621).
cagagttggttcactgtat

SEQ ID NO: 581842 - DNA, 19 bp, Mus musculus
  siRNA target sequence for 4833420O05Rik (NM_027554.2,1636-1654).
ccggattcccagatctcta

SEQ ID NO: 581843 - DNA, 19 bp, Mus musculus
  siRNA target sequence for 4833420O05Rik (NM_027554.2,1637-1655).
cggattcccagatctctat

SEQ ID NO: 581844 - DNA, 19 bp, Mus musculus
  siRNA target sequence for 4833420O05Rik (NM_027554.2,1671-1689).
gcagtaaaggactttccta

SEQ ID NO: 581845 - DNA, 19 bp, Mus musculus
  siRNA target sequence for 4833420O05Rik (NM_027554.2,1672-1690).
cagtaaaggactttcctaa

SEQ ID NO: 581846 - DNA, 19 bp, Mus musculus
  siRNA target sequence for 4833420O05Rik (NM_027554.2,1908-1926).
gggtgtaattcgttaatga

SEQ ID NO: 581847 - DNA, 19 bp, Mus musculus
  siRNA target sequence for 4833420O05Rik (NM_027554.2,1912-1930).
gtaattcgttaatgaaaaa

SEQ ID NO: 581848 - DNA, 19 bp, Mus musculus
  siRNA target sequence for 4833420O05Rik (NM_027554.2,1975-1993).
cttacgcacctcggatatt

SEQ ID NO: 581849 - DNA, 19 bp, Mus musculus
  siRNA target sequence for 4833420O05Rik (NM_027554.2,1981-1999).
cacctcggatattttttga

SEQ ID NO: 581850 - DNA, 19 bp, Mus musculus
  siRNA target sequence for 4833420O05Rik (NM_027554.2,2006-2024).
cagacctccgtggtttact

SEQ ID NO: 581851 - DNA, 19 bp, Mus musculus
  siRNA target sequence for 4833420O05Rik (NM_027554.2,2100-2118).
cgagttcagtcctcacata

SEQ ID NO: 581852 - DNA, 19 bp, Mus musculus
  siRNA target sequence for 4833420O05Rik (NM_027554.2,2135-2153).
ggactgtgctgaaacttgt

SEQ ID NO: 581853 - DNA, 19 bp, Mus musculus
  siRNA target sequence for 4833420O05Rik (NM_027554.2,2216-2234).
gaagactctaatagagaaa

SEQ ID NO: 581854 - DNA, 19 bp, Mus musculus
  siRNA target sequence for 4833420O05Rik (NM_027554.2,2284-2302).
gtacctcacacaaagttga

SEQ ID NO: 581855 - DNA, 19 bp, Mus musculus
  siRNA target sequence for 4833420O05Rik (NM_027554.2,2363-2381).
ccaagatacagcttcgtta

SEQ ID NO: 581856 - DNA, 19 bp, Mus musculus
  siRNA target sequence for 4833420O05Rik (NM_027554.2,2438-2456).
gccagtagtttataatcca

SEQ ID NO: 581857 - DNA, 19 bp, Mus musculus
  siRNA target sequence for 4833420O05Rik (NM_027554.2,2474-2492).
ctgcgactcagttgtgaat

SEQ ID NO: 581858 - DNA, 19 bp, Mus musculus
  siRNA target sequence for 4833420O05Rik (NM_027554.2,2476-2494).
gcgactcagttgtgaatca

SEQ ID NO: 581859 - DNA, 19 bp, Mus musculus
  siRNA target sequence for 4833420O05Rik (NM_027554.2,2477-2495).
cgactcagttgtgaatcaa

SEQ ID NO: 581860 - DNA, 19 bp, Mus musculus
  siRNA target sequence for 4833420O05Rik (NM_027554.2,2484-2502).
gttgtgaatcaaagagtat

SEQ ID NO: 581861 - DNA, 19 bp, Mus musculus
  siRNA target sequence for 4833420O05Rik (NM_027554.2,2562-2580).
gcaaagattctcatcagta

SEQ ID NO: 581862 - DNA, 19 bp, Mus musculus
  siRNA target sequence for 4833420O05Rik (NM_027554.2,2563-2581).
caaagattctcatcagtaa

SEQ ID NO: 581863 - DNA, 19 bp, Mus musculus
  siRNA target sequence for 4833420O05Rik (NM_027554.2,2567-2585).
gattctcatcagtaaagat

SEQ ID NO: 581864 - DNA, 19 bp, Mus musculus
  siRNA target sequence for 4833420O05Rik (NM_027554.2,2648-2666).
ggctccagaggttcttact

SEQ ID NO: 581865 - DNA, 19 bp, Mus musculus
  siRNA target sequence for 4833420O05Rik (NM_027554.2,2661-2679).
cttactggggagaaccaat

SEQ ID NO: 581866 - DNA, 19 bp, Mus musculus
  siRNA target sequence for 4833420O05Rik (NM_027554.2,2667-2685).
ggggagaaccaatactact

SEQ ID NO: 581867 - DNA, 19 bp, Mus musculus
  siRNA target sequence for 4833420O05Rik (NM_027554.2,2692-2710).
gctgtgcctctctacagaa

SEQ ID NO: 581868 - DNA, 19 bp, Mus musculus
  siRNA target sequence for 4833420O05Rik (NM_027554.2,2711-2729).
cgcagagaaaactatgcaa

SEQ ID NO: 581869 - DNA, 19 bp, Mus musculus
  siRNA target sequence for 4833420O05Rik (NM_027554.2,2732-2750).
cacggaggagcctgagtat

SEQ ID NO: 581870 - DNA, 19 bp, Mus musculus
  siRNA target sequence for 4833420O05Rik (NM_027554.2,2734-2752).
cggaggagcctgagtatct

SEQ ID NO: 581871 - DNA, 19 bp, Mus musculus
  siRNA target sequence for 4833420O05Rik (NM_027554.2,2736-2754).
gaggagcctgagtatctta

SEQ ID NO: 581872 - DNA, 19 bp, Mus musculus
  siRNA target sequence for 4833420O05Rik (NM_027554.2,2770-2788).
gattctcctacgatcagaa

SEQ ID NO: 581873 - DNA, 19 bp, Mus musculus
  siRNA target sequence for 4833420O05Rik (NM_027554.2,2789-2807).
gtaccatgtgagaagaaaa

SEQ ID NO: 581874 - DNA, 19 bp, Mus musculus
  siRNA target sequence for 4833420O05Rik (NM_027554.2,2843-2861).
gttgccagttaaaagaact

SEQ ID NO: 581875 - DNA, 19 bp, Mus musculus
  siRNA target sequence for 4833420O05Rik (NM_027554.2,2882-2900).
ccagagttggtctgtagat

SEQ ID NO: 581876 - DNA, 19 bp, Mus musculus
  siRNA target sequence for 4833420O05Rik (NM_027554.2,2885-2903).
gagttggtctgtagatgtt

SEQ ID NO: 581877 - DNA, 19 bp, Mus musculus
  siRNA target sequence for 4833420O05Rik (NM_027554.2,2898-2916).
gatgttgacttcactgata

SEQ ID NO: 581878 - DNA, 19 bp, Mus musculus
  siRNA target sequence for 4833420O05Rik (NM_027554.2,2901-2919).
gttgacttcactgatatta

SEQ ID NO: 581879 - DNA, 19 bp, Mus musculus
  siRNA target sequence for 4833420O05Rik (NM_027554.2,2982-3000).
gtgccctacctattaagtt

SEQ ID NO: 581880 - DNA, 19 bp, Mus musculus
  siRNA target sequence for 4833420O05Rik (NM_027554.2,2984-3002).
gccctacctattaagttct

SEQ ID NO: 581881 - DNA, 19 bp, Mus musculus
  siRNA target sequence for 4833420O05Rik (NM_027554.2,2987-3005).
ctacctattaagttctgtt

SEQ ID NO: 581882 - DNA, 19 bp, Mus musculus
  siRNA target sequence for 4833420O05Rik (NM_027554.2,3028-3046).
ctgagagtggccattacta

SEQ ID NO: 581883 - DNA, 19 bp, Mus musculus
  siRNA target sequence for 4833420O05Rik (NM_027554.2,3125-3143).
ctcccagagttgtttacta

SEQ ID NO: 581884 - DNA, 19 bp, Mus musculus
  siRNA target sequence for 4833420O05Rik (NM_027554.2,3146-3164).
ggtagaaagccccaataca

SEQ ID NO: 581885 - DNA, 19 bp, Mus musculus
  siRNA target sequence for 4833420O05Rik (NM_027554.2,3154-3172).
gccccaatacagtcattga

SEQ ID NO: 581886 - DNA, 19 bp, Mus musculus
  siRNA target sequence for 4833420O05Rik (NM_027554.2,3155-3173).
ccccaatacagtcattgaa

SEQ ID NO: 581887 - DNA, 19 bp, Mus musculus
  siRNA target sequence for 4833420O05Rik (NM_027554.2,3157-3175).
ccaatacagtcattgaaca

SEQ ID NO: 581888 - DNA, 19 bp, Mus musculus
  siRNA target sequence for 4833420O05Rik (NM_027554.2,3197-3215).
gtcacaagagtggttttta

SEQ ID NO: 581889 - DNA, 19 bp, Mus musculus
  siRNA target sequence for 4833420O05Rik (NM_027554.2,3224-3242).
cagcagggtgacatttact

SEQ ID NO: 581890 - DNA, 19 bp, Mus musculus
  siRNA target sequence for 4833420O05Rik (NM_027554.2,3268-3286).
caagtaggtttccaaaaga

SEQ ID NO: 581891 - DNA, 19 bp, Mus musculus
  siRNA target sequence for 4833420O05Rik (NM_027554.2,3373-3391).
gagatccacccctacagaa

SEQ ID NO: 581892 - DNA, 19 bp, Mus musculus
  siRNA target sequence for 4833420O05Rik (NM_027554.2,3396-3414).
ctgatggatgccataacaa

SEQ ID NO: 581893 - DNA, 19 bp, Mus musculus
  siRNA target sequence for 4833420O05Rik (NM_027554.2,3493-3511).
cgttccgacccaatggatt

SEQ ID NO: 581894 - DNA, 19 bp, Mus musculus
  siRNA target sequence for 4833420O05Rik (NM_027554.2,3494-3512).
gttccgacccaatggattt

SEQ ID NO: 581895 - DNA, 19 bp, Mus musculus
  siRNA target sequence for 4833420O05Rik (NM_027554.2,3499-3517).
gacccaatggatttgatga

SEQ ID NO: 581896 - DNA, 19 bp, Mus musculus
  siRNA target sequence for 4833420O05Rik (NM_027554.2,3577-3595).
cagttggcagactcgtatt

SEQ ID NO: 581897 - DNA, 19 bp, Mus musculus
  siRNA target sequence for 4833420O05Rik (NM_027554.2,3579-3597).
gttggcagactcgtatttt

SEQ ID NO: 581898 - DNA, 19 bp, Mus musculus
  siRNA target sequence for 4930486L24Rik (NM_178098.2,216-234).
gaaaagcatacaatgtgaa

SEQ ID NO: 581899 - DNA, 19 bp, Mus musculus
  siRNA target sequence for 4930486L24Rik (NM_178098.2,254-272).
gctgtgtgggaaaagaatt

SEQ ID NO: 581900 - DNA, 19 bp, Mus musculus
  siRNA target sequence for 4930486L24Rik (NM_178098.2,289-307).
gcataattgggaatacctt

SEQ ID NO: 581901 - DNA, 19 bp, Mus musculus
  siRNA target sequence for 4930486L24Rik (NM_178098.2,493-511).
caagaatcagggttattgt

SEQ ID NO: 581902 - DNA, 19 bp, Mus musculus
  siRNA target sequence for 4930486L24Rik (NM_178098.2,503-521).
ggttattgtgcctctagtt

SEQ ID NO: 581903 - DNA, 19 bp, Mus musculus
  siRNA target sequence for 4930486L24Rik (NM_178098.2,540-558).
gatccctagaaggacaaat

SEQ ID NO: 581904 - DNA, 19 bp, Mus musculus
  siRNA target sequence for 4930486L24Rik (NM_178098.2,694-712).
cgcaactgaggaatcctat

SEQ ID NO: 581905 - DNA, 19 bp, Mus musculus
  siRNA target sequence for 4930486L24Rik (NM_178098.2,739-757).
caggtaccatgctgagaat

SEQ ID NO: 581906 - DNA, 19 bp, Mus musculus
  siRNA target sequence for 4930486L24Rik (NM_178098.2,742-760).
gtaccatgctgagaattct

SEQ ID NO: 581907 - DNA, 19 bp, Mus musculus
  siRNA target sequence for 4930486L24Rik (NM_178098.2,761-779).
gcggctaatgtcagagatt

SEQ ID NO: 581908 - DNA, 19 bp, Mus musculus
  siRNA target sequence for 4930486L24Rik (NM_178098.2,762-780).
cggctaatgtcagagattt

SEQ ID NO: 581909 - DNA, 19 bp, Mus musculus
  siRNA target sequence for 4930486L24Rik (NM_178098.2,763-781).
ggctaatgtcagagatttt

SEQ ID NO: 581910 - DNA, 19 bp, Mus musculus
  siRNA target sequence for 4930486L24Rik (NM_178098.2,851-869).
gttgatgccagccatgatt

SEQ ID NO: 581911 - DNA, 19 bp, Mus musculus
  siRNA target sequence for 4930486L24Rik (NM_178098.2,861-879).
gccatgattccttccaatt

SEQ ID NO: 581912 - DNA, 19 bp, Mus musculus
  siRNA target sequence for 4930486L24Rik (NM_178098.2,912-930).
gcaaaagggtccacctaaa

SEQ ID NO: 581913 - DNA, 19 bp, Mus musculus
  siRNA target sequence for 4930486L24Rik (NM_178098.2,1069-1087).
ctgcgggattgctacactt

SEQ ID NO: 581914 - DNA, 19 bp, Mus musculus
  siRNA target sequence for 4930511O11Rik (NM_029163.1,204-222).
gacttcggtgcctactaca

SEQ ID NO: 581915 - DNA, 19 bp, Mus musculus
  siRNA target sequence for 4930511O11Rik (NM_029163.1,378-396).
ctgtccggaaagtacatca

SEQ ID NO: 581916 - DNA, 19 bp, Mus musculus
  siRNA target sequence for 4930511O11Rik (NM_029163.1,476-494).
ctgtgtctcaccagagata

SEQ ID NO: 581917 - DNA, 19 bp, Mus musculus
  siRNA target sequence for 4930511O11Rik (NM_029163.1,478-496).
gtgtctcaccagagatatt

SEQ ID NO: 581918 - DNA, 19 bp, Mus musculus
  siRNA target sequence for 4930511O11Rik (NM_029163.1,514-532).
gtctttacccagcttttct

SEQ ID NO: 581919 - DNA, 19 bp, Mus musculus
  siRNA target sequence for 4930511O11Rik (NM_029163.1,584-602).
gcttcacgaagctttgaaa

SEQ ID NO: 581920 - DNA, 19 bp, Mus musculus
  siRNA target sequence for 4930511O11Rik (NM_029163.1,708-726).
ctcagttacagcatcacat

SEQ ID NO: 581921 - DNA, 19 bp, Mus musculus
  siRNA target sequence for 4930511O11Rik (NM_029163.1,748-766).
cgcacaagaacgaagtttt

SEQ ID NO: 581922 - DNA, 19 bp, Mus musculus
  siRNA target sequence for 4930511O11Rik (NM_029163.1,750-768).
cacaagaacgaagttttca

SEQ ID NO: 581923 - DNA, 19 bp, Mus musculus
  siRNA target sequence for 4930511O11Rik (NM_029163.1,784-802).
ccatcccatctgactatga

SEQ ID NO: 581924 - DNA, 19 bp, Mus musculus
  siRNA target sequence for 4930511O11Rik (NM_029163.1,785-803).
catcccatctgactatgaa

SEQ ID NO: 581925 - DNA, 19 bp, Mus musculus
  siRNA target sequence for 4930511O11Rik (NM_029163.1,789-807).
ccatctgactatgaatgtt

SEQ ID NO: 581926 - DNA, 19 bp, Mus musculus
  siRNA target sequence for 4930511O11Rik (NM_029163.1,853-871).
cctggagcaaccaaatcta

SEQ ID NO: 581927 - DNA, 19 bp, Mus musculus
  siRNA target sequence for 4930511O11Rik (NM_029163.1,854-872).
ctggagcaaccaaatctat

SEQ ID NO: 581928 - DNA, 19 bp, Mus musculus
  siRNA target sequence for 4930511O11Rik (NM_029163.1,863-881).
ccaaatctattgttccttt

SEQ ID NO: 581929 - DNA, 19 bp, Mus musculus
  siRNA target sequence for 4930511O11Rik (NM_029163.1,906-924).
gtgaggaccacgatttcca

SEQ ID NO: 581930 - DNA, 19 bp, Mus musculus
  siRNA target sequence for 4930511O11Rik (NM_029163.1,923-941).
caaggtgccgaaaataatt

SEQ ID NO: 581931 - DNA, 19 bp, Mus musculus
  siRNA target sequence for 4930511O11Rik (NM_029163.1,926-944).
ggtgccgaaaataattgtt

SEQ ID NO: 581932 - DNA, 19 bp, Mus musculus
  siRNA target sequence for 4930511O11Rik (NM_029163.1,927-945).
gtgccgaaaataattgttt

SEQ ID NO: 581933 - DNA, 19 bp, Mus musculus
  siRNA target sequence for 4930511O11Rik (NM_029163.1,929-947).
gccgaaaataattgttttt

SEQ ID NO: 581934 - DNA, 19 bp, Mus musculus
  siRNA target sequence for 4930511O11Rik (NM_029163.1,948-966).
cactttaaaaggtttgaca

SEQ ID NO: 581935 - DNA, 19 bp, Mus musculus
  siRNA target sequence for 4930550B20Rik (NM_152825.1,46-64).
gggtaaaagatccatcaaa

SEQ ID NO: 581936 - DNA, 19 bp, Mus musculus
  siRNA target sequence for 4930550B20Rik (NM_152825.1,151-169).
cgtgccagcacgtcagtta

SEQ ID NO: 581937 - DNA, 19 bp, Mus musculus
  siRNA target sequence for 4930550B20Rik (NM_152825.1,152-170).
gtgccagcacgtcagttat

SEQ ID NO: 581938 - DNA, 19 bp, Mus musculus
  siRNA target sequence for 4930550B20Rik (NM_152825.1,155-173).
ccagcacgtcagttatgct

SEQ ID NO: 581939 - DNA, 19 bp, Mus musculus
  siRNA target sequence for 4930550B20Rik (NM_152825.1,312-330).
cagggatgcggtaaaaact

SEQ ID NO: 581940 - DNA, 19 bp, Mus musculus
  siRNA target sequence for 4930550B20Rik (NM_152825.1,314-332).
gggatgcggtaaaaactca

SEQ ID NO: 581941 - DNA, 19 bp, Mus musculus
  siRNA target sequence for 4930550B20Rik (NM_152825.1,399-417).
ctgagtacatgggtcatat

SEQ ID NO: 581942 - DNA, 19 bp, Mus musculus
  siRNA target sequence for 4930550B20Rik (NM_152825.1,409-427).
gggtcatatggtgttatga

SEQ ID NO: 581943 - DNA, 19 bp, Mus musculus
  siRNA target sequence for 4930550B20Rik (NM_152825.1,410-428).
ggtcatatggtgttatgaa

SEQ ID NO: 581944 - DNA, 19 bp, Mus musculus
  siRNA target sequence for 4930550B20Rik (NM_152825.1,426-444).
gaatgcaatgaaaagttgt

SEQ ID NO: 581945 - DNA, 19 bp, Mus musculus
  siRNA target sequence for 4930550B20Rik (NM_152825.1,435-453).
gaaaagttgtcgacacatt

SEQ ID NO: 581946 - DNA, 19 bp, Mus musculus
  siRNA target sequence for 4930550B20Rik (NM_152825.1,445-463).
cgacacattgcaacaagaa

SEQ ID NO: 581947 - DNA, 19 bp, Mus musculus
  siRNA target sequence for 4930550B20Rik (NM_152825.1,446-464).
gacacattgcaacaagaaa

SEQ ID NO: 581948 - DNA, 19 bp, Mus musculus
  siRNA target sequence for 4930550B20Rik (NM_152825.1,470-488).
ggctcaaatagttgatttt

SEQ ID NO: 581949 - DNA, 19 bp, Mus musculus
  siRNA target sequence for 4930550B20Rik (NM_152825.1,558-576).
cgtgaagcaggtgaaataa

SEQ ID NO: 581950 - DNA, 19 bp, Mus musculus
  siRNA target sequence for 4930550B20Rik (NM_152825.1,602-620).
gccatctgtcaaaggaatt

SEQ ID NO: 581951 - DNA, 19 bp, Mus musculus
  siRNA target sequence for 4930550B20Rik (NM_152825.1,603-621).
ccatctgtcaaaggaatta

SEQ ID NO: 581952 - DNA, 19 bp, Mus musculus
  siRNA target sequence for 4930550B20Rik (NM_152825.1,609-627).
gtcaaaggaattacaaact

SEQ ID NO: 581953 - DNA, 19 bp, Mus musculus
  siRNA target sequence for 4930550B20Rik (NM_152825.1,630-648).
gggaatacttgctttttta

SEQ ID NO: 581954 - DNA, 19 bp, Mus musculus
  siRNA target sequence for 4930550B20Rik (NM_152825.1,668-686).
ggctcagacttacattctt

SEQ ID NO: 581955 - DNA, 19 bp, Mus musculus
  siRNA target sequence for 4930550B20Rik (NM_152825.1,847-865).
gaccactttctcctaaagt

SEQ ID NO: 581956 - DNA, 19 bp, Mus musculus
  siRNA target sequence for 4930550B20Rik (NM_152825.1,856-874).
ctcctaaagttcttttcaa

SEQ ID NO: 581957 - DNA, 19 bp, Mus musculus
  siRNA target sequence for 4930550B20Rik (NM_152825.1,887-905).
gaaggctcctcggtttaaa

SEQ ID NO: 581958 - DNA, 19 bp, Mus musculus
  siRNA target sequence for 4930550B20Rik (NM_152825.1,891-909).
gctcctcggtttaaaggtt

SEQ ID NO: 581959 - DNA, 19 bp, Mus musculus
  siRNA target sequence for 4930550B20Rik (NM_152825.1,1025-1043).
gactgctgatgatgaaact

SEQ ID NO: 581960 - DNA, 19 bp, Mus musculus
  siRNA target sequence for 4930550B20Rik (NM_152825.1,1091-1109).
catagatcgcatctttatt

SEQ ID NO: 581961 - DNA, 19 bp, Mus musculus
  siRNA target sequence for 4930550B20Rik (NM_152825.1,1100-1118).
catctttattggcgaatta

SEQ ID NO: 581962 - DNA, 19 bp, Mus musculus
  siRNA target sequence for 4930550B20Rik (NM_152825.1,1137-1155).
gaagaatgtgcgaacatct

SEQ ID NO: 581963 - DNA, 19 bp, Mus musculus
  siRNA target sequence for 4930550B20Rik (NM_152825.1,1140-1158).
gaatgtgcgaacatctcta

SEQ ID NO: 581964 - DNA, 19 bp, Mus musculus
  siRNA target sequence for 4930550B20Rik (NM_152825.1,1167-1185).
gatcccttcattgatatct

SEQ ID NO: 581965 - DNA, 19 bp, Mus musculus
  siRNA target sequence for 4930550B20Rik (NM_152825.1,1188-1206).
cttcctatcatagaagaaa

SEQ ID NO: 581966 - DNA, 19 bp, Mus musculus
  siRNA target sequence for 4930550B20Rik (NM_152825.1,1240-1258).
gtaaatgcagaagtttaca

SEQ ID NO: 581967 - DNA, 19 bp, Mus musculus
  siRNA target sequence for 4930550B20Rik (NM_152825.1,1285-1303).
gcaccgtgactgtaggaaa

SEQ ID NO: 581968 - DNA, 19 bp, Mus musculus
  siRNA target sequence for 4930550B20Rik (NM_152825.1,1286-1304).
caccgtgactgtaggaaat

SEQ ID NO: 581969 - DNA, 19 bp, Mus musculus
  siRNA target sequence for 4930550B20Rik (NM_152825.1,1346-1364).
cgacaagaaccaactaagt

SEQ ID NO: 581970 - DNA, 19 bp, Mus musculus
  siRNA target sequence for 4930550B20Rik (NM_152825.1,1349-1367).
caagaaccaactaagtcat

SEQ ID NO: 581971 - DNA, 19 bp, Mus musculus
  siRNA target sequence for 4930550B20Rik (NM_152825.1,1643-1661).
cctcccactggcaagtgaa

SEQ ID NO: 581972 - DNA, 19 bp, Mus musculus
  siRNA target sequence for 4930550B20Rik (NM_152825.1,1644-1662).
ctcccactggcaagtgaat

SEQ ID NO: 581973 - DNA, 19 bp, Mus musculus
  siRNA target sequence for 4930550B20Rik (NM_152825.1,1710-1728).
gcgattgctgaacttcatt

SEQ ID NO: 581974 - DNA, 19 bp, Mus musculus
  siRNA target sequence for 4930550B20Rik (NM_152825.1,1740-1758).
gtaactggcaatagagatt

SEQ ID NO: 581975 - DNA, 19 bp, Mus musculus
  siRNA target sequence for 4930550B20Rik (NM_152825.1,1785-1803).
gtcccaaataatttgtgtt

SEQ ID NO: 581976 - DNA, 19 bp, Mus musculus
  siRNA target sequence for 4930550B20Rik (NM_152825.1,1801-1819).
gtttttcagagggaaaaca

SEQ ID NO: 581977 - DNA, 19 bp, Mus musculus
  siRNA target sequence for 4930550B20Rik (NM_152825.1,1832-1850).
cagtgcccaaaatgctttt

SEQ ID NO: 581978 - DNA, 19 bp, Mus musculus
  siRNA target sequence for 4930550B20Rik (NM_152825.1,1857-1875).
ctttctcagagttatgtaa

SEQ ID NO: 581979 - DNA, 19 bp, Mus musculus
  siRNA target sequence for 4930550B20Rik (NM_152825.1,1863-1881).
cagagttatgtaactactt

SEQ ID NO: 581980 - DNA, 19 bp, Mus musculus
  siRNA target sequence for 4930550B20Rik (NM_152825.1,1865-1883).
gagttatgtaactacttct

SEQ ID NO: 581981 - DNA, 19 bp, Mus musculus
  siRNA target sequence for 4930550B20Rik (NM_152825.1,1867-1885).
gttatgtaactacttctaa

SEQ ID NO: 581982 - DNA, 19 bp, Mus musculus
  siRNA target sequence for 4930550B20Rik (NM_152825.1,1872-1890).
gtaactacttctaaagaat

SEQ ID NO: 581983 - DNA, 19 bp, Mus musculus
  siRNA target sequence for 4930550B20Rik (NM_152825.1,1919-1937).
cacatccatggagttatta

SEQ ID NO: 581984 - DNA, 19 bp, Mus musculus
  siRNA target sequence for 4930550B20Rik (NM_152825.1,1921-1939).
catccatggagttattaat

SEQ ID NO: 581985 - DNA, 19 bp, Mus musculus
  siRNA target sequence for 4930550B20Rik (NM_152825.1,1931-1949).
gttattaatgggcaacaat

SEQ ID NO: 581986 - DNA, 19 bp, Mus musculus
  siRNA target sequence for 4930550B20Rik (NM_152825.1,1981-1999).
gacggaagtgccacaaaga

SEQ ID NO: 581987 - DNA, 19 bp, Mus musculus
  siRNA target sequence for 4930550B20Rik (NM_152825.1,1983-2001).
cggaagtgccacaaagaaa

SEQ ID NO: 581988 - DNA, 19 bp, Mus musculus
  siRNA target sequence for 4930550B20Rik (NM_152825.1,2022-2040).
gcaggaggagtttatacca

SEQ ID NO: 581989 - DNA, 19 bp, Mus musculus
  siRNA target sequence for 4930550B20Rik (NM_152825.1,2048-2066).
gaagcaactcctcatatct

SEQ ID NO: 581990 - DNA, 19 bp, Mus musculus
  siRNA target sequence for 4930550B20Rik (NM_152825.1,2067-2085).
gccgttcctgctatcctaa

SEQ ID NO: 581991 - DNA, 19 bp, Mus musculus
  siRNA target sequence for 4930550B20Rik (NM_152825.1,2068-2086).
ccgttcctgctatcctaat

SEQ ID NO: 581992 - DNA, 19 bp, Mus musculus
  siRNA target sequence for 4930550B20Rik (NM_152825.1,2077-2095).
ctatcctaatccttcatct

SEQ ID NO: 581993 - DNA, 19 bp, Mus musculus
  siRNA target sequence for 4930550B20Rik (NM_152825.1,2081-2099).
cctaatccttcatcttaaa

SEQ ID NO: 581994 - DNA, 19 bp, Mus musculus
  siRNA target sequence for 4930550B20Rik (NM_152825.1,2082-2100).
ctaatccttcatcttaaaa

SEQ ID NO: 581995 - DNA, 19 bp, Mus musculus
  siRNA target sequence for 4930550B20Rik (NM_152825.1,2113-2131).
ctggcttgagtcttcgtaa

SEQ ID NO: 581996 - DNA, 19 bp, Mus musculus
  siRNA target sequence for 4930550B20Rik (NM_152825.1,2116-2134).
gcttgagtcttcgtaaagt

SEQ ID NO: 581997 - DNA, 19 bp, Mus musculus
  siRNA target sequence for 4930550B20Rik (NM_152825.1,2117-2135).
cttgagtcttcgtaaagta

SEQ ID NO: 581998 - DNA, 19 bp, Mus musculus
  siRNA target sequence for 4930550B20Rik (NM_152825.1,2182-2200).
gtgcggctacctgtaagaa

SEQ ID NO: 581999 - DNA, 19 bp, Mus musculus
  siRNA target sequence for 4930550B20Rik (NM_152825.1,2184-2202).
gcggctacctgtaagaata

SEQ ID NO: 582000 - DNA, 19 bp, Mus musculus
  siRNA target sequence for 4930550B20Rik (NM_152825.1,2185-2203).
cggctacctgtaagaatat

SEQ ID NO: 582001 - DNA, 19 bp, Mus musculus
  siRNA target sequence for 4930550B20Rik (NM_152825.1,2186-2204).
ggctacctgtaagaatata

SEQ ID NO: 582002 - DNA, 19 bp, Mus musculus
  siRNA target sequence for 4930550B20Rik (NM_152825.1,2187-2205).
gctacctgtaagaatataa

SEQ ID NO: 582003 - DNA, 19 bp, Mus musculus
  siRNA target sequence for 4930550B20Rik (NM_152825.1,2191-2209).
cctgtaagaatataagtgt

SEQ ID NO: 582004 - DNA, 19 bp, Mus musculus
  siRNA target sequence for 4930550B20Rik (NM_152825.1,2344-2362).
ctgcagccggtttgaaaga

SEQ ID NO: 582005 - DNA, 19 bp, Mus musculus
  siRNA target sequence for 4930550B20Rik (NM_152825.1,2437-2455).
ccctgagtgcacaagctta

SEQ ID NO: 582006 - DNA, 19 bp, Mus musculus
  siRNA target sequence for 4930550B20Rik (NM_152825.1,2438-2456).
cctgagtgcacaagcttat

SEQ ID NO: 582007 - DNA, 19 bp, Mus musculus
  siRNA target sequence for 4930550B20Rik (NM_152825.1,2441-2459).
gagtgcacaagcttatctt

SEQ ID NO: 582008 - DNA, 19 bp, Mus musculus
  siRNA target sequence for 4930550B20Rik (NM_152825.1,2443-2461).
gtgcacaagcttatcttct

SEQ ID NO: 582009 - DNA, 19 bp, Mus musculus
  siRNA target sequence for 5730439E10Rik (NM_175324.2,1300-1318).
ggggacaccccttagtgat

SEQ ID NO: 582010 - DNA, 19 bp, Mus musculus
  siRNA target sequence for 5730439E10Rik (NM_175324.2,1305-1323).
caccccttagtgatcgaaa

SEQ ID NO: 582011 - DNA, 19 bp, Mus musculus
  siRNA target sequence for 5730439E10Rik (NM_175324.2,1307-1325).
ccccttagtgatcgaaaaa

SEQ ID NO: 582012 - DNA, 19 bp, Mus musculus
  siRNA target sequence for 5730439E10Rik (NM_175324.2,1309-1327).
ccttagtgatcgaaaaact

SEQ ID NO: 582013 - DNA, 19 bp, Mus musculus
  siRNA target sequence for 5730439E10Rik (NM_175324.2,1310-1328).
cttagtgatcgaaaaacta

SEQ ID NO: 582014 - DNA, 19 bp, Mus musculus
  siRNA target sequence for 5730439E10Rik (NM_175324.2,1539-1557).
ctcctgcgtggcgatatca

SEQ ID NO: 582015 - DNA, 19 bp, Mus musculus
  siRNA target sequence for 5730439E10Rik (NM_175324.2,1599-1617).
gatgccacgaacatcgaat

SEQ ID NO: 582016 - DNA, 19 bp, Mus musculus
  siRNA target sequence for 5730439E10Rik (NM_175324.2,1684-1702).
ggaatcccaagtgcaaaat

SEQ ID NO: 582017 - DNA, 19 bp, Mus musculus
  siRNA target sequence for 5730439E10Rik (NM_175324.2,1694-1712).
gtgcaaaatcgccattgtt

SEQ ID NO: 582018 - DNA, 19 bp, Mus musculus
  siRNA target sequence for 5730439E10Rik (NM_175324.2,1696-1714).
gcaaaatcgccattgtttt

SEQ ID NO: 582019 - DNA, 19 bp, Mus musculus
  siRNA target sequence for 5730439E10Rik (NM_175324.2,1783-1801).
cacctggagtggagttaat

SEQ ID NO: 582020 - DNA, 19 bp, Mus musculus
  siRNA target sequence for 5730439E10Rik (NM_175324.2,1817-1835).
gttcggctacatggataat

SEQ ID NO: 582021 - DNA, 19 bp, Mus musculus
  siRNA target sequence for 5730439E10Rik (NM_175324.2,1822-1840).
gctacatggataatatgca

SEQ ID NO: 582022 - DNA, 19 bp, Mus musculus
  siRNA target sequence for 5730439E10Rik (NM_175324.2,1823-1841).
ctacatggataatatgcat

SEQ ID NO: 582023 - DNA, 19 bp, Mus musculus
  siRNA target sequence for 5730439E10Rik (NM_175324.2,1846-1864).
ggcactgggaggtccattt

SEQ ID NO: 582024 - DNA, 19 bp, Mus musculus
  siRNA target sequence for 5730439E10Rik (NM_175324.2,1850-1868).
ctgggaggtccatttcaat

SEQ ID NO: 582025 - DNA, 19 bp, Mus musculus
  siRNA target sequence for 5730439E10Rik (NM_175324.2,1852-1870).
gggaggtccatttcaatca

SEQ ID NO: 582026 - DNA, 19 bp, Mus musculus
  siRNA target sequence for 5730439E10Rik (NM_175324.2,1877-1895).
cgttcctgccagcaactta

SEQ ID NO: 582027 - DNA, 19 bp, Mus musculus
  siRNA target sequence for 5730439E10Rik (NM_175324.2,1948-1966).
gaagaatccaccactgtat

SEQ ID NO: 582028 - DNA, 19 bp, Mus musculus
  siRNA target sequence for 5730439E10Rik (NM_175324.2,1989-2007).
cgcattctgcagatcatgt

SEQ ID NO: 582029 - DNA, 19 bp, Mus musculus
  siRNA target sequence for 5730439E10Rik (NM_175324.2,2108-2126).
ccgcttgctgaccttgaaa

SEQ ID NO: 582030 - DNA, 19 bp, Mus musculus
  siRNA target sequence for 5730439E10Rik (NM_175324.2,2127-2145).
gcggctcacagcatagata

SEQ ID NO: 582031 - DNA, 19 bp, Mus musculus
  siRNA target sequence for 5730439E10Rik (NM_175324.2,2129-2147).
ggctcacagcatagatact

SEQ ID NO: 582032 - DNA, 19 bp, Mus musculus
  siRNA target sequence for 5730439E10Rik (NM_175324.2,2199-2217).
cccaaagctgtctgcaaaa

SEQ ID NO: 582033 - DNA, 19 bp, Mus musculus
  siRNA target sequence for AA939927 (NM_133857.1,708-726).
gaagcctagcggcaatctt

SEQ ID NO: 582034 - DNA, 19 bp, Mus musculus
  siRNA target sequence for AA939927 (NM_133857.1,765-783).
ccctactgtgggcttgtta

SEQ ID NO: 582035 - DNA, 19 bp, Mus musculus
  siRNA target sequence for AA939927 (NM_133857.1,770-788).
ctgtgggcttgttaaacga

SEQ ID NO: 582036 - DNA, 19 bp, Mus musculus
  siRNA target sequence for AA939927 (NM_133857.1,828-846).
ggttttatggcaattagat

SEQ ID NO: 582037 - DNA, 19 bp, Mus musculus
  siRNA target sequence for AA939927 (NM_133857.1,829-847).
gttttatggcaattagata

SEQ ID NO: 582038 - DNA, 19 bp, Mus musculus
  siRNA target sequence for AA939927 (NM_133857.1,868-886).
gctctgactggacacatat

SEQ ID NO: 582039 - DNA, 19 bp, Mus musculus
  siRNA target sequence for AA939927 (NM_133857.1,889-907).
cagggagatgcctgtatat

SEQ ID NO: 582040 - DNA, 19 bp, Mus musculus
  siRNA target sequence for AA939927 (NM_133857.1,911-929).
gtgcattgaagacaatatt

SEQ ID NO: 582041 - DNA, 19 bp, Mus musculus
  siRNA target sequence for AA939927 (NM_133857.1,921-939).
gacaatatttgcacaattt

SEQ ID NO: 582042 - DNA, 19 bp, Mus musculus
  siRNA target sequence for AA939927 (NM_133857.1,958-976).
gcacttccctcagataaca

SEQ ID NO: 582043 - DNA, 19 bp, Mus musculus
  siRNA target sequence for AA939927 (NM_133857.1,1108-1126).
gacatgtgcacctctaagt

SEQ ID NO: 582044 - DNA, 19 bp, Mus musculus
  siRNA target sequence for AA939927 (NM_133857.1,1110-1128).
catgtgcacctctaagtct

SEQ ID NO: 582045 - DNA, 19 bp, Mus musculus
  siRNA target sequence for AA939927 (NM_133857.1,1130-1148).
gtgtgactcatcagaagtt

SEQ ID NO: 582046 - DNA, 19 bp, Mus musculus
  siRNA target sequence for AA939927 (NM_133857.1,1218-1236).
cgaactcgtgaggtacatt

SEQ ID NO: 582047 - DNA, 19 bp, Mus musculus
  siRNA target sequence for AA939927 (NM_133857.1,1219-1237).
gaactcgtgaggtacattt

SEQ ID NO: 582048 - DNA, 19 bp, Mus musculus
  siRNA target sequence for AA939927 (NM_133857.1,1222-1240).
ctcgtgaggtacatttcta

SEQ ID NO: 582049 - DNA, 19 bp, Mus musculus
  siRNA target sequence for AA939927 (NM_133857.1,1224-1242).
cgtgaggtacatttctaca

SEQ ID NO: 582050 - DNA, 19 bp, Mus musculus
  siRNA target sequence for AA939927 (NM_133857.1,1281-1299).
gcatgagcgagttaaacca

SEQ ID NO: 582051 - DNA, 19 bp, Mus musculus
  siRNA target sequence for AA939927 (NM_133857.1,1328-1346).
caaacacagcagatgacta

SEQ ID NO: 582052 - DNA, 19 bp, Mus musculus
  siRNA target sequence for AA939927 (NM_133857.1,1387-1405).
cgccgtgttttaatgaatt

SEQ ID NO: 582053 - DNA, 19 bp, Mus musculus
  siRNA target sequence for AA939927 (NM_133857.1,1401-1419).
gaattgcccagagattgtt

SEQ ID NO: 582054 - DNA, 19 bp, Mus musculus
  siRNA target sequence for AA939927 (NM_133857.1,1478-1496).
gtctagccacgcatctcta

SEQ ID NO: 582055 - DNA, 19 bp, Mus musculus
  siRNA target sequence for AA939927 (NM_133857.1,1552-1570).
caccttgtgggtatgatct

SEQ ID NO: 582056 - DNA, 19 bp, Mus musculus
  siRNA target sequence for AA939927 (NM_133857.1,1558-1576).
gtgggtatgatctgttaca

SEQ ID NO: 582057 - DNA, 19 bp, Mus musculus
  siRNA target sequence for AA939927 (NM_133857.1,1619-1637).
ccaagtgggtgttttttga

SEQ ID NO: 582058 - DNA, 19 bp, Mus musculus
  siRNA target sequence for AA939927 (NM_133857.1,1620-1638).
caagtgggtgttttttgat

SEQ ID NO: 582059 - DNA, 19 bp, Mus musculus
  siRNA target sequence for AA939927 (NM_133857.1,1623-1641).
gtgggtgttttttgatgat

SEQ ID NO: 582060 - DNA, 19 bp, Mus musculus
  siRNA target sequence for AA939927 (NM_133857.1,1691-1709).
gcatacgatgccacttaca

SEQ ID NO: 582061 - DNA, 19 bp, Mus musculus
  siRNA target sequence for AA939927 (NM_133857.1,1783-1801).
cactggtcacattacagat

SEQ ID NO: 582062 - DNA, 19 bp, Mus musculus
  siRNA target sequence for AA939927 (NM_133857.1,1823-1841).
gtggaaagcctatcattta

SEQ ID NO: 582063 - DNA, 19 bp, Mus musculus
  siRNA target sequence for AA939927 (NM_133857.1,1825-1843).
ggaaagcctatcatttata

SEQ ID NO: 582064 - DNA, 19 bp, Mus musculus
  siRNA target sequence for AA939927 (NM_133857.1,1873-1891).
ggtggtcagacgaaacaga

SEQ ID NO: 582065 - DNA, 19 bp, Mus musculus
  siRNA target sequence for AA939927 (NM_133857.1,1874-1892).
gtggtcagacgaaacagaa

SEQ ID NO: 582066 - DNA, 19 bp, Mus musculus
  siRNA target sequence for AA939927 (NM_133857.1,1900-1918).
cacaaatttcaaactgata

SEQ ID NO: 582067 - DNA, 19 bp, Mus musculus
  siRNA target sequence for AA939927 (NM_133857.1,1959-1977).
gagagcaccagttaagtta

SEQ ID NO: 582068 - DNA, 19 bp, Mus musculus
  siRNA target sequence for AA939927 (NM_133857.1,1974-1992).
gttaagccatgatcaaaga

SEQ ID NO: 582069 - DNA, 19 bp, Mus musculus
  siRNA target sequence for AA939927 (NM_133857.1,2013-2031).
cagagaatgtgctctgaaa

SEQ ID NO: 582070 - DNA, 19 bp, Mus musculus
  siRNA target sequence for AA939927 (NM_133857.1,2057-2075).
cttctcaacggaaagattt

SEQ ID NO: 582071 - DNA, 19 bp, Mus musculus
  siRNA target sequence for AA939927 (NM_133857.1,2060-2078).
ctcaacggaaagatttaga

SEQ ID NO: 582072 - DNA, 19 bp, Mus musculus
  siRNA target sequence for AA939927 (NM_133857.1,2102-2120).
gccgacacagggatttggt

SEQ ID NO: 582073 - DNA, 19 bp, Mus musculus
  siRNA target sequence for AA939927 (NM_133857.1,2111-2129).
gggatttggttgatgaagt

SEQ ID NO: 582074 - DNA, 19 bp, Mus musculus
  siRNA target sequence for AA939927 (NM_133857.1,2250-2268).
gagctacacctctggaaaa

SEQ ID NO: 582075 - DNA, 19 bp, Mus musculus
  siRNA target sequence for AA939927 (NM_133857.1,2252-2270).
gctacacctctggaaaagt

SEQ ID NO: 582076 - DNA, 19 bp, Mus musculus
  siRNA target sequence for AA939927 (NM_133857.1,2256-2274).
cacctctggaaaagtgata

SEQ ID NO: 582077 - DNA, 19 bp, Mus musculus
  siRNA target sequence for AA939927 (NM_133857.1,2392-2410).
ggcagctacagtagtaaga

SEQ ID NO: 582078 - DNA, 19 bp, Mus musculus
  siRNA target sequence for AA939927 (NM_133857.1,2394-2412).
cagctacagtagtaagact

SEQ ID NO: 582079 - DNA, 19 bp, Mus musculus
  siRNA target sequence for AA939927 (NM_133857.1,2457-2475).
cgtcgatagcgtttttagt

SEQ ID NO: 582080 - DNA, 19 bp, Mus musculus
  siRNA target sequence for AA939927 (NM_133857.1,2537-2555).
gtagcaaggaccagagttt

SEQ ID NO: 582081 - DNA, 19 bp, Mus musculus
  siRNA target sequence for AA939927 (NM_133857.1,2591-2609).
gcttaatgaccatatacga

SEQ ID NO: 582082 - DNA, 19 bp, Mus musculus
  siRNA target sequence for AA939927 (NM_133857.1,2592-2610).
cttaatgaccatatacgaa

SEQ ID NO: 582083 - DNA, 19 bp, Mus musculus
  siRNA target sequence for AA939927 (NM_133857.1,2600-2618).
ccatatacgaagatgaaat

SEQ ID NO: 582084 - DNA, 19 bp, Mus musculus
  siRNA target sequence for AA939927 (NM_133857.1,2750-2768).
gcagcgatcatgtcagtaa

SEQ ID NO: 582085 - DNA, 19 bp, Mus musculus
  siRNA target sequence for AA939927 (NM_133857.1,2840-2858).
ccttcagtgaacatattaa

SEQ ID NO: 582086 - DNA, 19 bp, Mus musculus
  siRNA target sequence for AA939927 (NM_133857.1,2877-2895).
ggacagtatggagtatata

SEQ ID NO: 582087 - DNA, 19 bp, Mus musculus
  siRNA target sequence for AA939927 (NM_133857.1,2878-2896).
gacagtatggagtatatat

SEQ ID NO: 582088 - DNA, 19 bp, Mus musculus
  siRNA target sequence for AA939927 (NM_133857.1,2886-2904).
ggagtatatatctcatcat

SEQ ID NO: 582089 - DNA, 19 bp, Mus musculus
  siRNA target sequence for AA939927 (NM_133857.1,2887-2905).
gagtatatatctcatcatt

SEQ ID NO: 582090 - DNA, 19 bp, Mus musculus
  siRNA target sequence for AA939927 (NM_133857.1,2914-2932).
cacccagaaggctttagga

SEQ ID NO: 582091 - DNA, 19 bp, Mus musculus
  siRNA target sequence for AA939927 (NM_133857.1,3012-3030).
gataaaaaggtcacagatt

SEQ ID NO: 582092 - DNA, 19 bp, Mus musculus
  siRNA target sequence for AA939927 (NM_133857.1,3023-3041).
cacagattggtgaaaccaa

SEQ ID NO: 582093 - DNA, 19 bp, Mus musculus
  siRNA target sequence for AA939927 (NM_133857.1,3034-3052).
gaaaccaatgacaagttgt

SEQ ID NO: 582094 - DNA, 19 bp, Mus musculus
  siRNA target sequence for AA939927 (NM_133857.1,3076-3094).
cttgcaagagagcatgttt

SEQ ID NO: 582095 - DNA, 19 bp, Mus musculus
  siRNA target sequence for AA939927 (NM_133857.1,3124-3142).
ccagataggagcaaatgtt

SEQ ID NO: 582096 - DNA, 19 bp, Mus musculus
  siRNA target sequence for AA939927 (NM_133857.1,3150-3168).
gcataatacagaaaactct

SEQ ID NO: 582097 - DNA, 19 bp, Mus musculus
  siRNA target sequence for AA939927 (NM_133857.1,3215-3233).
ggaagagagtcgacagtaa

SEQ ID NO: 582098 - DNA, 19 bp, Mus musculus
  siRNA target sequence for AA939927 (NM_133857.1,3219-3237).
gagagtcgacagtaacgaa

SEQ ID NO: 582099 - DNA, 19 bp, Mus musculus
  siRNA target sequence for AA939927 (NM_133857.1,3385-3403).
gcctgcaatgctgatagtt

SEQ ID NO: 582100 - DNA, 19 bp, Mus musculus
  siRNA target sequence for AA939927 (NM_133857.1,3448-3466).
ccaccaaagaaatactcta

SEQ ID NO: 582101 - DNA, 19 bp, Mus musculus
  siRNA target sequence for AA939927 (NM_133857.1,3515-3533).
gggttaccgaggcgtttaa

SEQ ID NO: 582102 - DNA, 19 bp, Mus musculus
  siRNA target sequence for AA939927 (NM_133857.1,3517-3535).
gttaccgaggcgtttaaca

SEQ ID NO: 582103 - DNA, 19 bp, Mus musculus
  siRNA target sequence for AA939927 (NM_133857.1,3521-3539).
ccgaggcgtttaacactaa

SEQ ID NO: 582104 - DNA, 19 bp, Mus musculus
  siRNA target sequence for AA939927 (NM_133857.1,3522-3540).
cgaggcgtttaacactaat

SEQ ID NO: 582105 - DNA, 19 bp, Mus musculus
  siRNA target sequence for AA939927 (NM_133857.1,3663-3681).
ctacccgtccagttgttca

SEQ ID NO: 582106 - DNA, 19 bp, Mus musculus
  siRNA target sequence for AA939927 (NM_133857.1,3666-3684).
cccgtccagttgttcaact

SEQ ID NO: 582107 - DNA, 19 bp, Mus musculus
  siRNA target sequence for AA939927 (NM_133857.1,3667-3685).
ccgtccagttgttcaacta

SEQ ID NO: 582108 - DNA, 19 bp, Mus musculus
  siRNA target sequence for AA939927 (NM_133857.1,3668-3686).
cgtccagttgttcaactaa

SEQ ID NO: 582109 - DNA, 19 bp, Mus musculus
  siRNA target sequence for AA939927 (NM_133857.1,3763-3781).
gatagttgcatgactgata

SEQ ID NO: 582110 - DNA, 19 bp, Mus musculus
  siRNA target sequence for AA939927 (NM_133857.1,3767-3785).
gttgcatgactgataccta

SEQ ID NO: 582111 - DNA, 19 bp, Mus musculus
  siRNA target sequence for AA939927 (NM_133857.1,3826-3844).
gagagcagtggccatcata

SEQ ID NO: 582112 - DNA, 19 bp, Mus musculus
  siRNA target sequence for AA939927 (NM_133857.1,3828-3846).
gagcagtggccatcatagt

SEQ ID NO: 582113 - DNA, 19 bp, Mus musculus
  siRNA target sequence for AA939927 (NM_133857.1,3830-3848).
gcagtggccatcatagtaa

SEQ ID NO: 582114 - DNA, 19 bp, Mus musculus
  siRNA target sequence for AA939927 (NM_133857.1,3833-3851).
gtggccatcatagtaataa
